United States Patent Application Publication US 2007/0067865 A1 - sequence listing, part 63

SEQ ID NO: 402670 - DNA, 617 bp, Oryza sativa nipponbare
taatagtaatagactctttgatggagtattacaacatgcagcagtggcattaatacgccagtacattaattaagttacacatatgcaggctccattttggtttcttttaatttatcgtattacagaatttctgtagccttgctgatgatcacttggatatcatgtactagtaattaacaataggatgcatacaaaagatggcccaacgacaacagaagatgcgtgcatctgacattgtctggccttatttggttggtagtactccaattaattaacaagagatgatgcattcttgtgccttagtttcttcacatgcttggcttcacgttgagcctattcgcaatcttcacccccaacgactcatcacactgggagaggtagttgacccagatggcgcggagctcaagggagacctttggggtgcgcgagctcgccggcgaagcggcggatgaacctctcctgtctatccggcgcccacgacctgtacctctccccgggctgcttgaagtcgttctgcttgtgtatcgtcgccttctgcctcctccccaccacggggcgcggcgtgatgggcgtcggcggcgcgtggcggaacggggcgtggcgcgatgggtagtagt

SEQ ID NO: 402671 - DNA, 480 bp, Oryza sativa nipponbare
agctagaacactgctgctaccatgagatagtttatccccctgtagtactgtacatcagaaattcaccactcaactcaccccctcacccatgcatccagatccatgcatgcaggaaacaattaccacaacacacacagtaagtctgaatctcatcacatccatctttctctctctcctccccccaattcattaacatcttatacatgcatactccacaaaaaaaaaaagaagaaacaagaagagaacatcttccatcgcccaatcatcggtttcaccagcctgaactcatcaagctccttgagatgccctggccctgatgaaatcgatcacacgctcagcctgacagcgtctggatgatggtgttgtgccacgggtcaaacaggtgctgcaacaagtttgtcaaagggccccttctgcgtaacgttgtgctgcaccaggaaccccaagaacgccagcatcgccagcctcccgttggcgagc

SEQ ID NO: 402672 - DNA, 517 bp, Oryza sativa nipponbare
tacataagcatcaataccttataaattcatcaaataggtagccactacattgggaaaacaagtaggggaaggcaggggatcaagctcaggaattacaacaactgaagattttttatgtttttagtaggtgatacagaccgggaaagccagaattgcatatctttaggagaagcttgttgcagaaactgcaactcaatcatgtccttggcttagtcggccgtccagctctgctccacaatctcgcggactttgcggttgtactcgcgcttgttctcgctgaacagtctggctgcttcggagtttgcaggggagtttgggtttggatcacagagcagggactggatagaggtcaatatcgcagcaacatcatatatagggctccattgattttgtaggatatccaagcagaatctttccacttgcataaatatttgggtgaaacatccttgagacaaaccgaacaactggtggtttgttgggataatcttctgtaaattgtagtgtcagcttgaacgtg

SEQ ID NO: 402673 - DNA, 549 bp, Oryza sativa nipponbare
aaataagcaccaaatttttaaggtgctgagaaacactcttgggccggacaatcaatattatggcaatacagttcagttaaataggtcataacacgagatatgacaattgatatttgttgtagaaggcgtcaactaattaattacatcacattttcatggcaggtacaagctcagaacttgtctatggggataccatctctgactacctcatatgcgtcacggctgcgggtcttcttcacaccagcagtgaaatgaaccttcgatccctcagtcttgatggcagtcaccttggtccaaacaagcactttcgtcttcaagccttcgatatcagagagctttcccttctccaggtagccagtcacacaggtaaagaatcgcagaacagacgaatccttgtacccgacatcacaagctggaggaatgtccacggttagcttctttgtctcctcattgaactcatagttagtagcatcccttgggaagaggcccgccggcatgtcatattccttgagaaggtctggcaatgctttctgcatcttccctttgatc

SEQ ID NO: 402674 - DNA, 570 bp, Oryza sativa nipponbare
ggataggtgacacgcgagtgtaacgctctcggtgaaaaaccggagcagagtagtagtagtaatacagcagccgtgattttatttagaagactaagtatatcaattaagagggtagttaaccttaaaccccgcaagaaacccgcgtcaccctcacttggccttgccgttgacggcggtctccttgccgttggccgctgctgcggcggcggggaccttgcccttgccatcgtcctccttggcgaaggcgtcgacggggtaggtcctcccgaggccggtgggggtcttgaaggtgatcttggaggcgtcgtccttgtcgatgaacatgtcggagagggagacccagatgaggagctccttggtcttggccccggtgacgcgcttcatccggcggtcctcgacgaaggccgtgacctcgggcggcgaacgagacctgcctgctgatctgcttgaaggtgtgggtgatggccttcttctggcgcagccacacgaaccccgtggcgcggttgtagccgacctcctccatcttcgccagcggcagcaggcccagcggcatgtggatctccgcgagga

SEQ ID NO: 402675 - DNA, 533 bp, Oryza sativa nipponbare
gggaaacgaataaaatcattattgcaaaaacatcatcttcttcttcatcttcttagtgtacacaacaccaactcgatcatcatctcgtcgcactaaacccatcttccccaacccaaagacaacgaactcgctggccacaaatccatccaaccacaattaaccactgctaagctacggtcccccacttcacttgccggggacgaagttggtggcgtacgcccaggcgttgttgttgacggggtcggcgaggtggtcggcgaggttctcgagggggcccttgccggtgacgatggcctggacgaagaagccgaacatggagaacatggcgaggcggccgttcttgatctccttcaccttgagctccgcgaacgcctcggggtcatcggcgaggccgagcgggtcgaaaggcgccgccggggtagaagcggtcgacgacctcgccgagcggcccgccggcgatgcggtacccctcgacggcgcccatgagcaccacctgcaccgcccagatggcgaggatgctctgcgcgtggatc

SEQ ID NO: 402676 - DNA, 543 bp, Oryza sativa nipponbare
tacgcaaaactttgcagtaaccaaatcgattcacaggccacacatacaggtagtatacagattcgtctacacacaaggttattgcagaggcaaaacacgaggtatgtatatcaaacgctctagaaaagattcatgtgatgaaatacatgatgaaccacgtatgttctcaaggtaaaattaattaatgcagtatagttttaactttgtccatcgatctcaacctgtaactgtgacgacacactggctacagtgccctcgaggtactagcagtatagcagtagctgtagtacgtagcagcagcagcagcaggttcactgtcttgattggattggatcggattagtagacgtagttcttgacgaacatgccctccttggcctcggcggcctcgccgtcgctggtgtacttgccgagcttgccccagcgagttggccttggcgcggaggagcagcgcgtcctgcgccgccttcacgttctccggctgcccgccccacgtcttgaggcacgtgttctgcagcgccctcgcgtacgagaacgacacgtg

SEQ ID NO: 402677 - DNA, 501 bp, Oryza sativa nipponbare
  unsure (1)..(501): unsure at all n locations
tttcgggaacgcaataccggatttggtaccaacacatctagaaagaggtttcagtggatgcagcattgcagttgagcataacagcccaccgagacattgacaacgtactgaggatggccataggccgaacaaattttattacagaggcgactcacagtggtagtctgctggttcacactggccctagcctagatgcaaaacaagagtaccacgggcaatgtactagcagtagtagactagaaacctcttaagcatcagcgaaccccagttcggagagcttgaggtgggcctccttgtagtcttcaaagaaagccttctcatctgcagcatatttctcgacgagtgggcggaaggcagggtcactcagcagggctttgtcactaggaagctgaagaaggccctnctttgcaccactcagaagctccgtgaagtaagagttgtcaaactgcagagggtttcttgtccaaggtccctcaaaaccagatctttccttgtggcacc

SEQ ID NO: 402678 - DNA, 587 bp, Oryza sativa nipponbare
tcccaggaacaaatcagataaaaattattttacacaatcaggtccattgtacttctttcatcaaccaaccagataacattgttttacacaatctgaacgaacgaagcaaatattcgggtacgcggaaagaggagaacgtcgcgcgtctcaccgcagcctgcatgaaagcaatggacctcaccgccgttgctcgccggagatccacactcacttgccggggacgaagttggtggcgtaggcccatgcgttgttgttgacggggtcggcgaggtggtcggccaggttctccagtggccccttgccggtgacgatggcctggacgaagaacccgaacatggagaacatggcgaggcggccgttcttgatctccttcaccttgagctcggcgaacgcctcggggtcgtcggcgagggccaagcgggtcgaagctgccgccggggtagagcgggtcgacgacctcgccgagcgggccgccggcgacgcggtacccctcgacggcgcccatgagcacgacctggcaaccccagatcgccaggatgcttttggcgtggatcaagctggggttgccgaggtagtccagccccccc

SEQ ID NO: 402679 - DNA, 412 bp, Oryza sativa nipponbare
  unsure (1)..(412): unsure at all n locations
gttggacgagagcggagcacactaagattcattcattcatttcatttgatcaaagcaaacacgagacgagctttctttttgcgatcaaaaacacagatgggcaaccacacagtaacacaaactagatagtagttccacacaaaactaacgatgataacgatcggatgatgatgatggtagctcgattagatagatagataacttggccatgagggccccaccgctcagttcctccagttcccgtcggagttgccgccgccgcggctgccgtagccaccgccgtagccgccgccgccgccacgggcgccaccgtagccgccgccaccgccgtagccgccttcacggggctggccgtagccaccggcggcgncaccaccgtaggcggcggcggcaacggaagcttccgcttccg

SEQ ID NO: 402680 - DNA, 483 bp, Oryza sativa nipponbare
ggggggatatagccggagctttgttttcacatatcctcacccaacgataattgtagtactcttacaataaaaccggccggagagggagggaagagattattacatatgtgttaagagcagaggccattgagatggtacataaccaaactgtaaaataaaaatatatagcatattatatattgatatatcatcaacatagcccaaaacaaagctgcatactattattataggcagcaatccaccagcgcgatgcttgatcttagcttagttgccaccagactcctcgcaacctgggggcttgtaggcgatgaagctaatcaactgcacctgcctgacgttgtcgaagccgatgatacggacaaaggcatcggggtaggccttcttggccttcttgagcttccttgggcacctgggtggcatcggtgcagccgaacatgggcagcttccacatggtccaatacctgccatcgtagtacccgggag

SEQ ID NO: 402681 - DNA, 508 bp, Oryza sativa nipponbare
aactaagaccagtttgatttcgtgtttgatacaaaaattaagatggacggattcacaagagagcaccctctacttaagctttacattacaaggccaaccagcagctgcctgccggccgaccactgcgtgcgcacgcgcgcgcaataatcaaccaatcacacacagtacgcacgcacataaaaaccacccatagccttcacgtacgcccggacgcacgcaccggttcgtgccaagctcaagggtagatggttctcgggatgatgatgtcgccgatgttgttgtgccacgggtccgagaggtggctggccaggttctccagtgggccggtgcccgggtacgccgactgttggacgcagaaacccacaaaagccagcatggccaatcgcccgttcttgatcttcttggagcttgacttcctcgaacttgacggggtccttggagaagccgagggggtcgaaggcgccgccggggtacttcttcttctcggggtccttctccatggtgcgct

SEQ ID NO: 402682 - DNA, 541 bp, Oryza sativa nipponbare
  unsure (1)..(541): unsure at all n locations
tgatcgatgtacaagtggatgcattaattcatcatcttgggtgttcttatattacaaatcaccaccatgcaagtcgccattaaccaccaacccagctttcctaatttaagtagtaatcaacaaaaggatgacctctcctctctccataccctcccagctcgctcgtcatcacaaaactaaacagcgcgcgcgaacgcacaccaacgcatcgatcccgtttgaattgcgcgcgaaagagcttaaattaagaggatgaggagaaggtgtcgaagatggtggtgtggagcgggtcgctgaggtgggtggcccagttgttgaggggccccttgccggtggcggcggcctgcacggcgaagccgaggaaggcgaccatggcgaggcgggcgtgcttgatctccgncagctgcagccgctccttcttttccgggtccgacgccaacccgagcgggtcgaagtaggacccccccgggtacagcctcttctccgggtccagctccgcgttgcgctggaactcgatgtagccgatgacgagcacctcgat

SEQ ID NO: 402683 - DNA, 366 bp, Oryza sativa nipponbare
tttgatttatttcccacttatatcatcatatacaaatactaacacatgcgaaaattatcaagcagaaaagttccatacaaattcatccagacaaacaagtgtaaaaaacctttttttcccatttcccccttgaactatccgtaaataccaccattccaccaaactcccctctgtcttctacgacaaataatcttttcaacccagtaacttataattaattacagagagattagcaaacatataatggtaagaatcagttgtcgtaggtgcggcactcgtcggtctccgggttgtccttgcagtaggcctcgagcgggtcggaggtctccttgagcttgtcgcgcgcgtggctcgccgccgcgctca

SEQ ID NO: 402684 - DNA, 563 bp, Oryza sativa nipponbare
  unsure (1)..(563): unsure at all n locations
taattcatatactgtacctgttgctatataagagcaagttcaatagtatagccaactactagctccaattcatctatagtcaatctaatagcccattcatacaatagttacatactacactattaatatctagtcccacctgtcatagacacactgcgtcttggagtccgtgctacagctggctacaaatctgtagcccgttgctcttctctctcttgatttatcttcgtaaaatatgtttgtagctggcttatagcctgccattgtacctgctctaacgcagcaaagtgtgatgaatgttggtgttgatgatgggatcatgggaagtaaccatgagataacagaggtattgttcgatggagtaagtgtattatatgtatgtaaatattatattattggaaatcattttgaggagctagacttgcgggcctaattaacaaggagatatgtaccattacatgatgattaacatataaatctgtagctacatggaattaaggtagtggagcanaggaggaaggatgatagaagactccaattctccatggatgggaatgggatca

SEQ ID NO: 402685 - DNA, 531 bp, Oryza sativa nipponbare
  unsure (1)..(531): unsure at all n locations
gatcgatcgatgtacaagtggatgcattaattcatcatcttgggtgttcttatattacaaatcaccaccatgcaagtcgccattaaccaccaacccagctttcctaatttaagtagtaatcaacaaaaggatgacctctcctctctccataccctcccagctcgctcgtcatcacaaaactaaacagcgcgcgcgaacgcacaccaacgcatcgatcccgtttgaattgcgcgcgaaagagcttaaattaagaggatgaggagaaggtgtcgaagatggtggtgtggagcgggtcgctgaggtgggtggcccagttgttgaggggccccttgccggtggcggcggcctgcacggcgaagccgaggaaggcgaccatggcgaggcgggcgtgcttgatctncgncagctgcagccgctccttcttctccgggtccgacgccaacccgagcgggtcgaagtaggacccccccgggtacagcctcttctccgggtccagctccgcgttgcgctggaactcgatgtaaccgatga

SEQ ID NO: 402686 - DNA, 488 bp, Oryza sativa nipponbare
  unsure (1)..(488): unsure at all n locations
ttgctggaaaatttgatgaggtatgggccacttatatcatcatatacaaatactaacacatgcgaaaattatcaagcagaaaagttccatacaaattcatccagacaaacaagtgtaaaaaacctttttttttcccatttcccccttgaactatccgtaaataccaccattccaccaaactcccctctgtcttctacgacaaataatcttttcaacccagtaacttataattaattacagagagattagcaaacatataatggtaagaatcagttgtcgtaggtgcggcactcgtcggtctccgggttgtccttgcagtaggcctcgagcgggtcggaggtctccttgagcttgtcgcgcgcgtggctcgccgccgcgctcagctnctccacctngtnccacgccgncgngcacntcgcgttcgccgtgtcctccgngcacgcctccttngccttgtcgatgctctccgacatcttgtccgagatgtc

SEQ ID NO: 402687 - DNA, 473 bp, Oryza sativa nipponbare
tatcattgttaaaacttttggtttccattttaaattatctgcaaagtaagaaagtaacactcccaagttacaacagcacaccatccatatatccatgcaggcagcctgtttgtgcccttgtgcagatgcatttcatttatacaagtagaaggcactcaaatcagccaccacatgaacacacacatgttccatcatcgatcgatctacacatgcatcacccggtcatgcacttacaaacaaaagatctacttgaagaagtacgggaggtcgagcacgtagaggaggaagtaggcccagaggacgccggagatgccgccgaagaagaagccgccggtgaacttggcccagccgtcggcggtctgcagcttgtcggcctccttcttgcggccggtgagcgtcagcgtcggcgccgtggacggctcgccctcgccgaaggaggcgacgccgtacatggtgaggcagacgctgaggat

SEQ ID NO: 402688 - DNA, 506 bp, Oryza sativa nipponbare
tgaagagaacttcacttttaaaagagtatcaacttgctttttacattggttacatcatatttcaggtgcacaatcaacaaggcatgcggggctccatccacaattacatcccaatacaccaccaccattcacagcctactccgatcccaaaaaagagaggtaagccgcgtccactaacaggcttttcatcttcctccattgggagccattgctaacacttcaacacctgaagaactgctcatttgggggtgaaggcctggaagatggtggcgtggccggggtcggcgagatgggcgaacaggttgtcgatggggccggtgccggtgtactctgcctggaaccaagctcccatgacggccagcatggcaagccgcccgatcttgatcttcttggtgcgcaactccttgatctttttccgggaagccgaggccccagccgagcgggtcaaaccacagaccaccagggtacccgacgttggtgccggagagcttgcttgtggggaagat

SEQ ID NO: 402689 - DNA, 462 bp, Oryza sativa nipponbare
cccacttatatcatcatatacaaatactaacacatgcgaaaattatcaagcagaaaagttccatacaaattcatccagacaaacaagtgtaaaaaaccttttttttcccatttcccccttgaactatccgtaaataccaccattccaccaaactcccctctgtcttctacgacaaataatcttttcaacccagtaacttataattaattacagagagattagcaaacatataatggtaagaatcagttgtcgtaggtgcggcactcgtcggtctccgggttgtccttgcagtaggcctcgagcgggtcggaggtctccttgagcttgtcgcgcgcgtggctcgccgccgcgctcagctactgcaccttgttccacgccgacgggcaattggcggttggcggtgtcctccgggcacgcctccttcgccttgtcgatgctctccgacatcttgtccgagatgtc

SEQ ID NO: 402690 - DNA, 317 bp, Oryza sativa nipponbare
aaagataactatccggagctgccagatcttaaattaacatatgcctcacccaacagcatattgacccagcagatacccctcttacatcaagtcacatagagatcaggtgaaacaaaaacaaaaagctcagcacggccggtccaatcaaaagacagatgaacaaactgggaacacacaaaacaaggcgggagacatcttctaatcacaaatagacaatgaaacaaggctatatatgactacgaccgtttaatagccaacagactgctggcagcccggggtcttgtaagcgaagaatctgttaagctgcacctggctga

SEQ ID NO: 402691 - DNA, 549 bp, Oryza sativa nipponbare
  unsure (1)..(549): unsure at all n locations
taactagaacaaacctttatttcataacttttttttcagatctttttcctaacttctaaggatgaaaactaccagtaatcctctttttgtttcttttttactactattacatagggttgtgacaacaacagatatcagtaataatcataggatctaaataaataagaacaagcaatggagttgggaatcactcatcttcgtcgggcctgctcgcgaggcacagctcatggagctcattgagaatccactcctccccagtgtggccacccaggacaagaaccctggtgccgccaaccacgcatgtgctatgaccccaggcgaacttgggtggctggccagggacgttcaaaatcctccatgtcggcttctcctccgctgggtcgaggaggaacagctgtgagggcgagtgcagcccancgatggagccaccgaatatgattatccgtccacaggggaggctgaccgcgacatgatcgagncctcgaggtggaccgatgctcgggaacccgttgtcgccagttgcctccattgtgggctgtcttcaccagc

SEQ ID NO: 402692 - DNA, 378 bp, Oryza sativa nipponbare
tttgagaaagtcaaggttcgataaatattgcttcacttgtacaaagtacagataaaaatacattgatacatgacacggagagagccatgcacaccacttatttggacacacagagggcaaggctgcagagaaaatcaagcaacacaagctgaactcacggccccacctgtcagcctctcactggtcgaggccggagactcttgtgaaaaacagcaacaccacgcatgcagaagaagacaaattattacacacacaaatcgacgacacggcggccggcgacgtacggcgaggtcgtcgccgccgccggcgacgttgtgatgaggtcgatcagccgaagaggtggtgcttcttctcgccggtggactcctcggcgctctt

SEQ ID NO: 402693 - DNA, 557 bp, Oryza sativa nipponbare
ttttgacagaaacaaaattaagctagataagcactgattccacgcacaatttacatgatcattacatcgtccatcacacaggcactcatgcatcgattacacataggagtattgattcgtgtgactagcttaatgaatttgattagccgatgatctggtccaggacgccgatgttcttgaggccgaggacgacgccgacgcccatgatgtggccgacggcgccgcaggccagcgtgtcggcgagcgtgaacccggcggggtcgccggtctgcaggccggagtcgcgcgcctccagcttcagccccgccgtcgacttcctgttcgccgacggcgccagcccgaacctccccgcgaacagcatcagcgtcgtcgtcgtcaccatgataacgttggtggctgagccgatgtaagcccaaccgaatgccctgggacctcttcttgctcatcctcaacgatggcagcgtcaccatggacctaggagaggagtaggtccggaggccatggaactgcggcacggatgtggcggcggagagctgggaagccatggctggagccta

SEQ ID NO: 402694 - DNA, 519 bp, Oryza sativa nipponbare
ttacatgttacacccacaccctacagccatgcataataatacatcgtatatacgtacgtacatacatacccctgtcgatcacacgcaccatcgatcgtacaaagttgcgtacatacatacgtacacacatatacgcatacgcacgtacatacatacataattaaaaactcgtaattaattaaatacgtagttgatggcatttctaatggaacttgaggctggtgaggatgttgttgtggacgggatcagcgaggtgatcaagcaggttctgcacggggccaaccccggagaagagcgcctggacggagaagcctaggaaggcgagcatggcgagcctgccattcttgatctccttgagcttgagctccttcatctccgcctcgctcttggtcccaaagccgagcgggttgaagagacggccgccggggtaggcctgttcgccggagccggcgaggtacttctcgaggccgaggaagtactgcttccccatggagcccggcgtgtaccagtcctggaagc

SEQ ID NO: 402695 - DNA, 542 bp, Oryza sativa nipponbare
  unsure (1)..(542): unsure at all n locations
ttttatagccggagcttccagatatttcattcacatatgcctcacccaacaacatatagtcgtagcagataccactcttacatcaagtcagagagagatcaggtgaaacaaaaacaaaagcagagcacggccggtaaaatcaaaagacgatgaacaaactgggaacacacgaaacaaggtgggagacatcatcgaatcagagatgaacaattaaacaaggctatatatgacgatgacggcttagttgccaccagactcctcgcagcccgggggcttgtaggcgatgaagctgatgagctgcacctgcctgacgttgtcgaagccgatgatacggacgaatgcatcagggtacgccttcttggcctcctcgagctccttgagcacctgggtggcgtcagtgcacccgaacatgggcaagcttcacatggtccagtacctgccatcgtagtatccgggggatctgtggttctcacggtagacgaatccgaccttgctgaactcgaggcagggcacccacttggaacggagcangtactcgatct

SEQ ID NO: 402696 - DNA, 526 bp, Oryza sativa nipponbare
tgtgtatatagccggagctttgttttcacatatcctcacccaacgataattgtagtactcttacaataaaaccggccggagagggagggaagagattattacatatgtgttaagagcagaggccattgagatggtacataaccaaactgtaaaataaaaatatatagcatattatatattgatatatcatcaacatagcccaaaacaaagctgcatactattattataggcagcaatccaccagcgcgatgcttgatcttagcttagttgccaccagactcctcgcaacctgggggcttgtaggcgatgaagctaatcaactgcacctgcctgacgttgtcgaagccgatgatacggacaaaggcatcggggtaggccttcttggcctcctcgagctccttgagcacctgggtggcatcggtgcagccgaacatgggcagctttcacatggtccaatacctgccatcgtagtacccgggagacctgtggttctcacggtagacgaatccaaccttgctgaactcga

SEQ ID NO: 402697 - DNA, 603 bp, Oryza sativa nipponbare
ttttcagctaattacattttataattaaccaagagtaagttacatgtagtatgccaaaaaatccggccggcaaagtaaagttagtgtacaccaagaatcgaaaatatgaacatcttacagcatgttccattcctacaaaactagtgggatttaggcagggagagctgccggcgtggctgggggaacccggttctcgacagggatctccgtgaactcggagagaatcgccctgaactcgtcaccactcaatgtctccttctcaaggagcacctccacgatcttgtccatggcctcccggttgctcctgatctggctcaaagcgatctcgtaggcctcatcggacaaccgcttcacagcggtatcgatgtcctccgcgagcttctccgacatggagttccttgccatcatcctcatgatgacatcgccgctctgagctcctgagtccattagcgaccacggaccaatgtccgacataccgaatgtaaccaccatctgcttggctaggccagtaatttgctgcaagtcaccagcagctcctgtggtcacctcaggctccccaaaaatgatctcctcagcagcacgaccgccaaggccaccaacaat

SEQ ID NO: 402698 - DNA, 487 bp, Oryza sativa nipponbare
ttagatcctataataacgatacatcattaattcgatcatcccttggatgcggcctgcggcttacattaaatctcgatccaaagaagcaaagatgatgacagacagaaattaattaagctagaaatctcctcgatcgatcacacacacacacacaattaaggtacatacatacatgcactgctgcaactgcaactgcagggtcggtgcgtggctactacaagtgtacacatggtacgttggttggcaccatctcgatcgtgtcgttgtgctcacttgccggggacgaagttggtggcgtatgcccaggcgttgttggcgacggggtcggcgacgtggtcgaagaggttctcgatggggcccttgccggtgacgatggcctggacgaagaagccgaacatggagaacatggcgaggccggccgttcttgagctccttcaccttgagctcggcgaaggtgtcagggtcgtcggcgaggccgagcgggtcg

SEQ ID NO: 402699 - DNA, 558 bp, Oryza sativa nipponbare
ttttacaacagcacaccatgcatatatccatgcaggcagcctgtttgtgcccttgtgcagatgcatttcatttatacaagtagaaggcactcaaatcagccaccacatgaacacacacatgttccatcatcgatcgatctacacatgcatcacccggtcatgcacttacaaacaaaagatctacttgaagaagtacgggaggtcgagcacgtagaggaggaagtaggcccagaggacgccggagatgccgccgaagaagaagccgccggtgaacttggcccagccgtcggcggtctgcagcttgtcggcctccttcttgcggccggtgagcgtcagcgtcggcgccgtggacggctcgccctcgccgaaggaggcgacgccgtacatggtgaggcaaacgctgaggattgcgaccaggcctgcggcgccgagggcgccggcctggccgtgcaccggcgtgttgcggagcgggccggtgagcgcgaagggcccgacgaggaggtagccgtgggcgaggccgacctcgatgccgcggagcaacgggctgacggcggtgcg

SEQ ID NO: 402700 - DNA, 510 bp, Oryza sativa nipponbare
  unsure (1)..(510): unsure at all n locations
ccacgcgtgcgaactcattctcggtatgcaatctcgcttggattccatggaaaaggagctacatgaacttaagaagaaaaattcttcccaacaaatgcagcaatttgctggagaagagaaaaacgagctgctgtattacttgagatcgctgtcacctgagaaggttgttgaactctcggagtcttcctgccctggtgtggaagaagctgtttactccgtggtacatggtctgctagcaactctctcccccaaaatgcatacgaatcgctctccgacctcagagaacatggcgggtggagcttgtaaatttgggatggaggagacgatgaattcactgagctcggtgaggacgtgtcccttccatntcaacccctgatatctatttctcgcgaccgtcttgcccgtctattattctggtgcatgatgctgggccattacatccgaagtcaggagtgccggcttgagctgatgcacctnccggcagtctccagtgatgcacattcatgatct

SEQ ID NO: 402701 - DNA, 235 bp, Oryza sativa nipponbare
cacgcgtccggttgctcatgtgcaccatgctatggatgctgaaggaatcatcatccggaactgcaaaaatggttagcgagaatggagagatgatcctgatctagctgagagcacagaccgatccgcttactgtatgccgccaggtcgtgctgtgtatgtttgacgtgtaacgctcagctagcattgggattgaatctgttgtcgccacagaatacttgggttctgatgctatgtg

SEQ ID NO: 402702 - DNA, 214 bp, Oryza sativa nipponbare
ccacgcgtgcgcgcacgcgtccgaagcataagcaacacaagggattaactcatcactcacttagctaattaaatcttcgaccatgtcggacaagtgcggcaactgcgactgtgctgacgagagccagtgcgtgaagaaaggtaccagctatggcgtcgtcatagttgaagccgagaagagccacttcgaggaggtcgccgccggcgaggagaac

SEQ ID NO: 402703 - DNA, 353 bp, Oryza sativa nipponbare
ccacgcgtccgagcttgactaccttgttggagctgtttcaagccctaaacgcccatttgctgccatcgtgggtgggtcaaaggtgtcatccaagatggggttatcgaatccttttggagaatgtgatatcctcttctagtggggtatgacttcacatttacaaggccaagactcttgttggtcttcctggtgagaaacaacttgactgcacatcttcttgcaagcaagaaagtgttcctctgtgcattgcgtatatgtgtagttgtctgtctacgcagtgtcacattgttctgtgtgtggctgtatgcaatcaccgatcattctgacaccacgatgatgcatgtgtcattcag

SEQ ID NO: 402704 - DNA, 435 bp, Oryza sativa nipponbare
cgaattccacggtcgacccacgcgtgcgatggcccccaccgtgatggcctcctcggccacctccgtggctccattccaagggctcaagtccaccgccgggctccccgtgagccggggctccaccaactcgggctggggcaacgtcagcaatggcggaaggatcaagtgcatgcaggtgtggccaattgagggcatcaagaagttcgagaccctatcgtacctgccaccactcaccgtggaggatcttttgaagcatatcgagtacctgcttcgatccaagtgggtgccttgcctcgagttcagcaaggctggattcctctaccgcgagaaccacaggtgtcccgggtactacgatggcaggtattgtaccatgtggaaactgcccatgttcggctgcaccgatgccacccaggtgctcaaggagcgtgaggaggc

SEQ ID NO: 402705 - DNA, 432 bp, Oryza sativa nipponbare
  unsure (1)..(432): unsure at all n locations
ccggattcccggtcgacccacgcgtgcgacgtaattaaagagtcagcacagttagctctgacatgggtgagagcaagagctgctgaccttaatctgtcacctacttctgatatgagcttattggagagtcgtgaggattcacatacattntcctgctggcgcggtgccaaaggatggtccttctgctggagtgacattggtaacatcattagtgtcactatttagccaccgaaaagtcagagctgacactgctatgacgggagagatgactcttaggggccttgtgtagcagttggggtgttaggataggacttgacacataatatgatcaaagagattgcaaagaactatgactgtggtcagccattttgtgaattgtgagcataagctactcttaggtcctacctcagttgtacatgaagtacgtctctg

SEQ ID NO: 402706 - DNA, 414 bp, Oryza sativa nipponbare
  unsure (1)..(414): unsure at all n locations
ccacgcgtccgcataagaccaacccaaccgccgccgcatcgccctcgttagaacgatggccgcgtcggcgctgcaccagaccaccagcttcctcggcaccgcccgtcgccgggatgagctcgtgcgccgcgtcggcgactccggtggccgcatcaccatgcgccgcaccgtcaagagcgcgccccagagcatctggtatggacctgaccgtcccaagtacctgagcccgttctcggagcagacgccatcgtacctgaccggagagttcccgggagactacgggtgggacacggcggtgctatcggccgacccggaacgttcgcgaggaacagggagnctggggtgatccactcgcggtgggcgatgctgngggcgctgggctgcgtctttcccgagatcctgtccaagaacggg

SEQ ID NO: 402707 - DNA, 55 bp, Oryza sativa nipponbare
  unsure (1)..(55): unsure at all n locations
ccacgcgntgcgcacgcgtncagcacgtacgggatcaacgccgtgtgcacgcacc

SEQ ID NO: 402708 - DNA, 420 bp, Oryza sativa nipponbare
  unsure (1)..(420): unsure at all n locations
gcgattcgtacacctcgtatggcggttagctgccaagcacagacagtgtctgcgaatgcttcgcgctgacgctaggctgtaactgccgcaagatgaagtgtggtcacagcaaccagctgaggcccaagaagagatcaagactagagcgcactcgccggttcatggactgctaaatcaatcgtcatattagactnttatgcattcgttgttatctcccctggatgttagtgaaccgcgttttactgtgctggatgcttcagcttcttgtttgacggtcgtgtatatggtaattggcagcaaactatatggtcaaaaaaaaaaaaggcggcgtctaagatcagttactacctgctgcagctagtcttataggactaataatatgcgcgttacacgcggctggaacccggtccactatgctga

SEQ ID NO: 402709 - DNA, 469 bp, Oryza sativa nipponbare
  unsure (1)..(469): unsure at all n locations
ccacgcgtgcgggtgatagctgagacgctgaactcggaccatgcgagggacacggacctgccgctgagggaaaggttctacctgcatccgctgccggcggcggatgctgcggcgagggcgaaagacntctcccatgacatcatcaacctcaagccgctcatcgagaagaacagtggcgttcgcagggacacctccgctcaggcctctactggctcgactataacgcataactcagccaagacagagaaggctaaagacctacgcaagtctcgcacattgacggtactaattagctcattagttcaaatatactaattagctcactcactacagagcttctttaaattattattcctctattgatttattttaaaatcgatgattttgttgttgagaactcctcagtctatcaagttgtaaaattactattttcatcgataaccctataaatttgcaaggtaataaaaat

SEQ ID NO: 402710 - DNA, 283 bp, Oryza sativa nipponbare
  unsure (1)..(283): unsure at all n locations
ccacgcgtgcgtccacgcgttcgtccacgcgttcgtccacgcgtacgtccacgcgttcgcccacgcgtncgacaaactccagctcctnctagggctccgagctagagatcccggctgcgcctccgncttccccagtcgccggcgagcaactccggtgaagcgcgagctacggattaagaagtgcccatggcaaggtaagccaaggcctgtggacaagcagagagaaagccactcaaatgcgactcatatactcatgctggagctgcgtctcgtcttgttaaat

SEQ ID NO: 402711 - DNA, 174 bp, Oryza sativa nipponbare
caagaccacttaccatctgataaacccggaaaggctgccatcatgaagaaggaagcggttcttgtgaatgcaagtcgaggaccggtgattgatgaggtagcactggtggagcacctcaaggccaaccccatgttccgcgtcggtcttgatgtgtttgaggatgagccttacatg

SEQ ID NO: 402712 - DNA, 413 bp, Oryza sativa nipponbare
  unsure (1)..(413): unsure at all n locations
agttataaatacatntaaccaggacccattaaatgctgcttcatccttccagatcagaggagggttgctgggactacaaataagacagttaanctgcctaagaactctactcttaaggccccatgtcctgggtacacatgtgggcgtgctatgattgttaggcctactaagtttttcaccaatgatggggcgcaggcaacccaagctctaatgacatggaatgtgacctgcacatactcacaattacttgctcagaagactgcaaccctgttgtgtatcccttttcgtcattttacaatgacacaattgtgaactggccaacatgctcttgtgggtggcaaaacaatggggactagttctaggagctgtgtttatgagaatttaccctatttataatctggcatcgatggccc

SEQ ID NO: 402713 - DNA, 274 bp, Oryza sativa nipponbare
ccacgcgtccggccacgcgtacagtgtcaaagagagggtatctgcaccttgctctgatataccttcagagataccggaagcaacggcgcctactactgtcctcgagtcatatttgcttgccaagaaggccacacggcatgccacccgccaggatgccgtcaccaagtcgatgactgtcttcatgggtgcccacgccgatgacttcgacaataagcttgtcacgaccgcgtaaaccattggatcaccaggaacgatgattcttgccatcgatgac

SEQ ID NO: 402714 - DNA, 506 bp, Oryza sativa nipponbare
ccacgcgtgcgcgagctcaaaagacacacattccaaaagcatctgtggccatctcctcctagtcctaggctcgcgtcaatggcggcgtccaccatggcactctcctcccctgccgccctcgccggcaaggcggtcgccaatgccaaggtgttcggcgagggccgcgtcacgatgcgcaagtcggcggccaagcccaagcccgccgcggcgtcggggagcccgtggtacggcgccgaccgcgtgctctacctcgagccgctctccggcgagccgccgtcctacctcaccggcgagttccccggcgactacggctgggacaccgccgggctgtcggccgacccgcagacgttcgccaagaaccgggagcctggggtgatccactgccggtgggccatgctgggcgcgctcgggtgcgtcttcccggagctcctcgcccgcaacggcgtgaagttcgacgaggcccgtggttcaaggcggtgtcccagaccttagcgaggggggtttgc

SEQ ID NO: 402715 - DNA, 89 bp, Oryza sativa nipponbare
  unsure (1)..(89): unsure at all n locations
ccacgcgtgcgncaccttgtttcgtgtgttcccagtttgttcatcggcttttgattttaccgggccggctctgcttttgtttttggttc

SEQ ID NO: 402716 - DNA, 376 bp, Oryza sativa nipponbare
ccacgcgtgcggtgctccccgtcagccgccgctccaccaactcgggcttcggcaacgtcagcaatggcggaaggatcaagtgcatgcaggtgtgggcggttgagggcatcaagaagttcgagaccctatcgtacctgccaccactcaccgtggaggatcttttgaagcagatcgagtacctgcttcgatccaagtgggtgccttgcctcgagttcagcaaggttggattcgtctaccgtgagaaccacaggtctcccgggtactacgatggcaggtattggaccatgtggaagctgcccatgttcggctgcaccgatgccacccaggtgctcaaggagcttgaggaggccaagaaggcctaccccgatgcctttgt

SEQ ID NO: 402717 - DNA, 158 bp, Oryza sativa nipponbare
ccacgcgtgcgcccacgcgtccgcccacgcgttcgggagaagaaggagaggagcagccatggcgtcgtcggtggcagcggccgcgagcacgttcctggggacgaggctggcggacccggcgcctcatatcgcgaggatcgtggcgaggctcgggttcg

SEQ ID NO: 402718 - DNA, 275 bp, Oryza sativa nipponbare
ccacgcgtccgaaagaagaagaagaagaaagaagaagaagaagatgcagaccgctgctagcagtgtcgttggattgtcggccgtgttgcccgctgctgtgaaggggcgcagcctgcagattcaggctcctcgccgtgttgcgttgcgcgttcgtgcggcggcggcggcggtggcagtggaagctgcggaggtggactacagctctaacatctcggtgtttccgatggaggcgtgcgacctcatcggcggcgaggcgtgcaacgtgcagatgtacc

SEQ ID NO: 402719 - DNA, 323 bp, Oryza sativa nipponbare
cggccgaattcccggtcgaccacgcgtgcggcaacatgcagccaatggatgatacctttgtgctcaacctggaatctgcaaagcctgaatggcgccgtgtcaaagtttgagcttctgcacccggccggtgggggcacactctctcatggctgaatggctcatggctagaggtctttggaggctgtggacagcaaggtttgctcaatgatgtctgtggccttgaccttgatgccaagcagcccacctggagggaggttgcaagcgagggcccaccattggcgatgtcatggcacaggtcatgtaccctggatggatcaaagctg

SEQ ID NO: 402720 - DNA, 446 bp, Oryza sativa nipponbare
  unsure (1)..(446): unsure at all n locations
ccacgcgtccgcgacaggctaaagcgtgacaagaacatcttactcgcggaggttgtgaaactaaggcacaagcagcaaagcacgaaagccaatatgcgagccatggaagagaggctgcaacatgcggagcagaagcaggtccagatgatgggtttcttggcaagagcaatgcagaaccctgacttctttcaccagttgattcaccagcaggataaaatgaaggggctcgaggacacattctcgaagaagaggacgaggtcgatagacatagtgccatttctcaaccccggggaggtcagccagagcgatcaactcgagtcgacaatgctggttgatccaaggccatttgctgaactgaatgatgagcctgcaaagtctgaactggagaatttagcactgaacatccagngtcttgggaagggcaagcaagatgtcaacaggactcg

SEQ ID NO: 402721 - DNA, 200 bp, Oryza sativa nipponbare
  unsure (1)..(200): unsure at all n locations
ccacgcgtccgcttattgtcacttccatctcattctcctaattgtcatcactagcttctagctagcttaattaattaattagccatggcggatgagaagcaccaccaccacctgtttcaccacaagaaggacgacgagccggccaccggagtagactcctacggcgagggcgtctacacgtncgagacggtgaccaccga

SEQ ID NO: 402722 - DNA, 429 bp, Oryza sativa nipponbare
ccacgcgtgcgccacgcgtacgccacgcgtacggtactagacatactctactactactagccagtaagctagctaactaactacgtggctatggcccccaccgtgatggcctcctcggccacctccgtggctccattccaagggctcaagtccaccgtcgggctccccgtcagccgccgctccaccaactcgggcttcggcaacgtcagcaatggcggaaggatcaagtgcatgcaggtgtggccaattgagggcatcaagaagttcgagaccctatcgtacctgccaccactcaccgtggaggatcttttgaagcagatcgagtacctgcttcgatccaagtgggtgcctagcctcgagttcaacaaggttggattcggctaccgcgagaaccacaggtctcccgggtactacgatggcaggtattgg

SEQ ID NO: 402723 - DNA, 306 bp, Oryza sativa nipponbare
  unsure (1)..(306): unsure at all n locations
ccacgcgtgcggaaaagaatatcgattntgctgcacacagcaaccaggaggactctgggtctcttctgttcaacctgatcggaaacttggctttccgcgggtatccttattggtggtctatttttgctgtcaagaagagcacaaggtggccttggtggacctaacggtcctggcctttcccttggttttggtcaatctagggccaagcttcagatggaacccaacactggtgttacatttgatgatgttgctggtgtcgatgaagcaaaacaagacttcatggaagtgggtgagttcttgaagaac

SEQ ID NO: 402724 - DNA, 69 bp, Oryza sativa nipponbare
ccacgcgtgcgaaaaaccaacccaaccgccgccgcatcggcctcgttagaacgatggccgcgtcggcgc

SEQ ID NO: 402725 - DNA, 314 bp, Oryza sativa nipponbare
ccacgcgtccgcccacgcgtccggagcactccctcgtgatcggtgcaatcgagccacttgacccctcgaggcgctgctacagaatgattgggggagtgctggttgaacggactatcaaggaggtcttgcctgcagtgcaacgcaacaaggagggcctcgaggaagttgttgctcgcatgaacgaggcactggagaagaagaagaaggaaatcacggagtttgagctcaagtacaagatcagaatccggaaagcagatagtgacacccaggaagaaggcagcatgaaggaaggatctgccgcaggtgttcttgta

SEQ ID NO: 402726 - DNA, 457 bp, Oryza sativa nipponbare
ccacgcgtccgagaagtactcgagcaaagaaggagagagcttggtgagctgcagagatggccccctccgtgatggcgtcgtcggccaccaccgtcgctcccttccaggggctcaagtccaccgccggcatgcccgtcgcccgccgctccggcaactccagcttcggcaacgtcagcaatggcggcaggatcaggtgcatgcaggtgtggccgattgagggcatcaagaagttcgagaccctctcctacctgccaccgctcaccgtggaggacctcctgaagcagatcgagtacctgctccgttccaagtgggtgccctgcctcgagttcagcaaggtcggattcgtctaccgtgagaaccacagatcccccggatactacgatggcaggtactggaccatgtggaagctgcccatgttcgggtgcactgacgccacccaggtgctcaaggagctcga

SEQ ID NO: 402727 - DNA, 465 bp, Oryza sativa nipponbare
ccacgcgtccgatgaggggagggttgactacatgtagaaggttgtaccgactgctgatgtggaagagctcactgttgaggatcgcaacctcttgtctgaggcttacaagactgatattggggcccgccgtgcctcctggcgtattgtctgatccattgaacacaaggaggagggtcgcggcaatgaggaacatgttactctgatcaaggagtaccgtggcaagattgaagctgagctgagcaagatttgcgatggtatcctgaagttgcttgactcacaccttgtgccctcatctactgctgcagaatctaaggtgttttacctcaagatgaagggtgattaccacaagtaccttgcggaatttaagactggtgccgagagaaaggaagctgctgagagcacaatggtggcttacaaggctgctcaagatattgctctggcggatcttgctcccacccatcccat

SEQ ID NO: 402728 - DNA, 407 bp, Oryza sativa nipponbare
ccacgcgtccgaaaaaccaacccaaccgccgccgcatcgccctcgttagaacgatggccgcgtcggcgctgcaccagaccaccagcttcctcggcaccgcccctcgccgggatgagctcgtacgccgcgtcggcaactccggtggccgcatcaccatgcgccgcaccgtcaagagcgcgcgcgagagcatctggtatggacctgaccgtcccaagtacctgggcccgttctcggagcagacgccatcgtacctgaccggagagttcccgggagactaccggtgggacacggcggagctatacgccgacccggagacgttcgcgaggaacagggagcttggaggtgatctcactcgcggtgggcgatgctgggggcgcctgggctgcgtcttccccggagatcctgtc

SEQ ID NO: 402729 - DNA, 479 bp, Oryza sativa nipponbare
ccacgcgtccgcccacgcgtccgcggacgcgtgggtgcgagttcaggggggcatacggtcaactgaggagacacgccagggagaaccatcctactgttagaccaactcaggtggatcctgaacggcagcgagactggcacagaatggagcagcagcgtgatcttggggacttgttcagcatgcttcgttcaggcttaagtgccagggaggacgggatcggagtcagtgaaggggaagaggatatcagcgagagggctctacatagcccatctataacaatggtcttcattgtgcgcactggcaggtcgatactccactacagggaagcattcccaggccaccacagaagaagaacaattcttctgcttggggaggcttttggtcgtgaatcctccccattagggggagcaagtggcagtggtgatggtgacaccacagctcgcgaaaatgatgaaggtgatgaacacgtcacgctatca

SEQ ID NO: 402730 - DNA, 471 bp, Oryza sativa nipponbare
ccacgcgtccgcccacgcgtccgcggacgcgtgggcaggactgcagaggatgcacaggctgcattggaggcattggatggagtggaactggaaggaaggccactgaggctcagtatggcggaacagaacccaacagctggttctcctagcacagtgcagtcacaggaggaagaaactgcttcagaatcatctgatgcagagacagagcagagcattacctcagaaccttctgaagctgaaacggaagagagcaacttgcagacagctgccagttattagtatctaattgatggttgcactgatttacttattctgccattcggcattccaatctaaattgtacttgtccaattgaaaattttgacacaagagatgctaaaatgggatatgagccatagccaatagaatattattagacatagaggtgctccgaggttcagttattgctgtaatatattgtgcagaaatcta

SEQ ID NO: 402731 - DNA, 477 bp, Oryza sativa nipponbare
  unsure (1)..(477): unsure at all n locations
ccacgcgtccgcgccggcaacctcgtcgtggatggcatcccggactacctcgccacggcgcggctgccgtacgggatgacgtacttcgggtaccccaccgggcgttgctccgacggccgcctcgtcgtcgacttcatcgcgcaggaggtggggttgccgctgctgccgccgtcgaaggcgaagaacgcgacgttccaccgcggcgccaacttcgccatcaccggcgcgacgtcgctggacacgccgtacttccaggggcgcgggctggggcacacggtgtggaactccggctctctgcacacccagatcaagtggttccaggacatgaaggcctccatctgcaagtcccctcaagagtgcagggacctgttccggcgatctctgttcatcgtgggggagttcggcggcaacgactacaactcgccgctgttcgcgttccggccactggaggaggtgcacacncttcgtccccgacgt

SEQ ID NO: 402732 - DNA, 469 bp, Oryza sativa nipponbare
  unsure (1)..(469): unsure at all n locations
ccacgcgtccgcccacgcgtccggcgaaaaaaaaaatcatcagcacaagatcgaggaggctttatctgaacaagggagatggcggactacgtgtatgggccggggcggaaccacctgttcgtgcctgggccggtgaacatcccggaccaggtgatccgcgccatgagccgtcagaacgaggactaccgctcgccggcggtgcccgccctcaccaagaccctcctcgaggacgtcaagcagatcttcaagaccaccaccggcacccccttcctcttccccaccaccgggaccgggggcgtgggagagcgcgctgacnaacacgctgtcgccgggggacaagatcgtgtcgttcctgatcgggcagttcagcctgctgtggatcgaccagcagcaacgcctcaacttcaacgtggacgtggtggagagcgactggngctacggcgccgacctttgccgcctgactacaagc

SEQ ID NO: 402733 - DNA, 462 bp, Oryza sativa nipponbare
ccacgcgtccgcggacgcgtgggcggacgcgtgggctgcacaccaactcgggcttagcatattcgcaactgagttgatgtcgggaaaaccagcaatctagttgctgctctctgttactctgtatgtgtaggtaacattggctaggtaaacctcacatcatggccagaggtaggggcgcgagaggaagcagggaggaaggtggatggacagctaataagctgatgaggatgtcatccggctggtggtctggtggaggtggcagaagcggatgccgtcaacatattttgcatcaagatgtgctttgctgcagtccttgctgcggtgcacagcacggatgacccttatagcctctttggaggcctataatctgagagcccgttgtgtatagctcttatcgtgtcctgcgttttgtctggtggaagcgaaattaccatgtttccagaactccggaattgtctctaa

SEQ ID NO: 402734 - DNA, 431 bp, Oryza sativa nipponbare
acccgggacatactctactactactagccagtcagctagctaactaactacgtggctatggcccccaccgtgatggcctcctcggccacctccgtggctacatgccaagggctcaagtccaccgccgggctccccgtcagccgccgctccaccaactcgggcttcggcaacgtcagcaatggccgaaggatcaagcgcatgcaggtgtggccaatcgaggtcatcaagaagctacagaccctatcgtacctgccaccactcaccgtggaggatcttttgaagcagatcgagtacctgcttcgatccaagtgggtgccttgcctcgagttcagcaaggttggattcgtctaccgtgagaaccacaggtctcccggtactacgatggcaggtattggaccatgtggaagctgcccatgttcggctgcaccgat

SEQ ID NO: 402735 - DNA, 403 bp, Oryza sativa nipponbare
ccacgcgtccgcccacgcgtccgcccacgcgtccgcggacgcgtgggggagtaggagagaaggccatggcgtcgaaggaggaggtggccgtggagacggtggagggcggagcggcggcggcgaaggcgccgtactgggacccgccgccggcgccgctgctggacacgagcgagctgggtaagtggtcgctgtaccgtgccctcatcgcggagttcatggcgacgctcatcttcctctacgtgagcatcgccaccgtgatcgggtacaagaaccagagggccaccgtcgacgcgtgcaccggcgtcggctacctcggcgtggcgtggtcgttcggtgccaccatattcgtcctcgtctactgcaccggcgggtctccggcggcacatcaaccccgcgggacgct

SEQ ID NO: 402736 - DNA, 471 bp, Oryza sativa nipponbare
ccacgcgtccgcccacgcgtccgcccacgcgtccgatcggcatcctcaacacgccgtcgtggtacaccgccggcgagcagcaatacttcaccgacaccaccaccctcttcatcatcgagctcatcctcatcggctgggccgagggccgccggtgggctgacatcatcaagcccggctgcgtcaacaccgaccccatcttccccaacaacaagctcaccggcaccgacgtcgggtaccctggtggtctgtggtttgacccgctcggctggggcaccggctcgccggagaagatcaaggagctgcgcaccaaggagatcaagaacggcggctcgccatgctcgccgtcatgggagcttggttccaggcagagtacaccggcaccggccccatcgacaacctcttcgcccatctcgccgaccccggccacgccaccatcttccaggccttcacccccaaatgaggagttcttca

SEQ ID NO: 402737 - DNA, 469 bp, Oryza sativa nipponbare
ccacgcgtccggtacccttgtgactacacccgcttcgcttcctcccctctctaagccggggaagctaagccatggcgtccgtcaccgcccgcaccccggtcgcagccctccgctcgtcggcgtcgctcaagtctaccttcctagggcaatcctccacccgcctcgcccgcgcaccgactacgaggcgtaatgttcgggcggaggccaagggagagtggctccccggcctcccttctcccacctacctcaacggcagcttgccaggcgataacgggttcgacccgttgggtctggcggaggacccggagaacctgcggtggttcgtgcaggcggagctggtgaacgggcggtgggcgatgctgggggtggccgggatgctgctgcctgaggtgctgacgaagatcgggttgatcgacgcgccgcagtggtacgacgctcggcaggccacctacttcgcgtcgtcgtcgac

SEQ ID NO: 402738 - DNA, 283 bp, Oryza sativa nipponbare
  unsure (1)..(283): unsure at all n locations
ccacgcgtccgagcctttagagagcgggatatccgcaaaagattaatgccgatttgtattttgcgccttagagtcagtacgatcaagactgtcgtggcggttgtaataaaaattagtgtgctttgggccatctttttatgtgattccaattgtctttctcttcattcttgctttgatgctctttgtctggacctctagaccgccgtattgtactgtggagtttcaaagttaccaagctatttgctgtcaagataactatggattgaattccccttgatggntg

SEQ ID NO: 402739 - DNA, 433 bp, Oryza sativa nipponbare
  unsure (1)..(433): unsure at all n locations
ccacgcgtccgcccacgcgtccgcccacgcgtccggcaactgcctgcccctctctttccctcgccattaagttttctcgtccggcggcgtcacccctgcgaattaactaactagctaggccggccatggagacggtggccgcggccagctacacccgcggggcggcgacgcgctcgccagcgtgctgcgccgccatgtccttctcgcagtcctacaggcccaaggccgctagaccgccgagcacgttctacggcgagtcgctgcgggttaacacggcgaggtcgctgccgtctgggaggcagtccaaggcggcgagccgggcggcgctcagcacccggtgcgagatcggggacagcnctgnaggagttcctgaccaaggcgacgccggataagaacctcatcaggctgctcatctgcatgggggaggcgatga

SEQ ID NO: 402740 - DNA, 436 bp, Oryza sativa nipponbare
  unsure (1)..(436): unsure at all n locations
ccacgcgtccgcaagcagaaagctagagagctagcaatggcgcccaccgtgatggcctcgtcggccacctccgttgctcccttccaggggctcaaatccaccgccgggctccccgtcagccgccgctccaacagcgccggcctcggcagcgtcagcaacggtggaaggatcagctgtatgcaggtgtggccgattgaaggcatcaagaagtttgagaccctgtcgtacctgccaccgctcacggtcgaggacctcttgaagcagatcgagtacctgctccggtccaaatgggtgccttgcctcgagtttagtaaggtcgggttcgtctaccgtgagaaccacaggtctcctgggtactatgatnggaggtactggaccatgtggaagctgcctatgttcggatgcactgatgccacccaggtgctcaaggagctcg

SEQ ID NO: 402741 - DNA, 467 bp, Oryza sativa nipponbare
ccacgcgtccggcataagcaacacaggggattaactcatcactcacttagctaattaaatcttcgaccatgtcggacaagtgcggcaactgcgactgtgctgacaagagccagtgcgtgaagaaaggtaccagctatggcgtcgtcatagttgaagccgagaagagccacttcgaggaggttcgccgccggcgaggagaacggcggctgcaagtgcggcaccagctgctcctgcaccgactgcaagtgcggcaagtgaagtcacgaagcaaccgaacactcgccgccggcgagtcacctaccttaattagtccacaataaaaaccacccatatgagtgtggtttgtgtgtgtgctgattatggctgaattaaacccgtgtgttatcgattaattaagcagctggtcgcttcggcgactatgcgtgtatcaacgtatgaatttgtgtgatgtgatgtacccgtgctat

SEQ ID NO: 402742 - DNA, 476 bp, Oryza sativa nipponbare
  unsure (1)..(476): unsure at all n locations
ccacgcgtccgaggagcttgagcttggagagagacaacaatggcggctcaggctcttctctctgggaggcagctgctggggaggccattgcaatcttcagtctccaggtcttcttcctccaggaaggcacccttcatggtcagggcagaggccactccccctgccaagcaaggtgctgacaggcagctgtggttcgcatccaagcagtccctgagctacctggatggcacgcttccgggagacttcgggttcgacccgctggggctatcggacccggaggggaccggtgggttcatcgagccacggtggctggcctacggcgaggtgttcaacggccggacggcgatgatgggcgtcgtcggcatggtcgccccggagctcctcggcaagctgggcctcgtccccgccgagacggcgatcccgtggtccagacncggcggatcccccccgcgggcacctacacctactgggccgac

SEQ ID NO: 402743 - DNA, 364 bp, Oryza sativa nipponbare
ccacgcgtccgcggacgcgtgggcgacggcggcaggaggagaggtggaggtggagcagctgccgggattcaggttccatccgacggaggaggagctgctggagttctacctgaagcaggtggtgcaggggaagaagctcaagttcgacatcatcctcaccgtccacctctaccgccacgacccgcgcgagctccccggactcgcccgcatcggcgagcgcgagtggtacttcttcgtcccccgcgaccgcaagcaggccaccggcggcggcggcggcggtaggcccagccgcaccacggagcgcggcttctggaaggccaccggctccaaccgcgccatccgttgcgccgccgaccccaagcgc

SEQ ID NO: 402744 - DNA, 411 bp, Oryza sativa nipponbare
ccacgcgtccgccacactacaccccgctccactctcaggcaggcaatcagcggcgaggcaccagcccaccggccggcaatggcgtccacctcctgcttcctccaccagtccacggcccgcgtcgccgcgcgcgtcgcctccccgtccccggcgacacggacccacctcctcgtctgccgcgcccagaagcaggacgacgccgacgtctcccgccgcgcggcgctcgcgctgctggccggagcgaccgcggccgtgggggatgaaggtggcgcccgccgccgcggcctacggcgaggcggcgaacgtgttcgggaagcccaagacgaacacggagttcatcgcctacagcggcgaggggttcaagctggctgatcccgtccaagtggaaccccagcagggagcgcgagttcc

SEQ ID NO: 402745 - DNA, 404 bp, Oryza sativa nipponbare
ccacgcgtccgccacgcgtccgggcgccatggcgcaggaggtgcttctcggcgccaatggcggcgtgctggtgttcgagccgaacgacttcaccgtcaagtccggcgagaccatcacgttcaagaacaacgccggcttccctcacaacgtggtgttcgacgaggacgcggttccgagcggcgtcgacgtgtccaagatatcgcaggaggagtacctcaacgcccccggcgagaccttctccgtcacgctcaccgtccccggcacatacggcttctactgcgagccgcacgccggagctgggatggtcggcaaggtcaccgtcaactaattattctttcttctcaatctaaatatgcctcctacggctctatcctatatatatatatatcgatttgtccatcgcg

SEQ ID NO: 402746 - DNA, 475 bp, Oryza sativa nipponbare
ccacgcgtccgcctgccgccagtcaccgcggaggatctagtgccgcagatcgagtacctgcttcgatccaagcgggggccttgcctcgagttcagcaaggttggattcgtctaccgagagaaccacaggtatcccggttactacgatggcaggtattggaccatgcggaagctgcccatgttcggctgcaccgatgccacccaggtgctcaaggagctcgaggaggccaagaaggcctaccccgatgcctttgttcgtatcataggcttcgacaacgtcaggcaggtgcagttgattagcttgatcgcctacaagcccccaggttgcgaggagtttggtggcaactaagctaagatcaagcatcgcgctggtggattgctgcctataataatagtatgcagctttgttttgggctatgttgatgatatatcaatatataatatgctatatattcttattttacagtttggttatg

SEQ ID NO: 402747 - DNA, 342 bp, Oryza sativa nipponbare
  unsure (1)..(342): unsure at all n locations
ccacgcgtccgcttcaagcttattttcttgtgcttgatgatattatggacaactctcaaacacgacgtggccagccttgctggtttagggtgcctcaggttgggctcattgctgtaaatgatggtattatccttcgcaaccatatttcacgaattcttcaacgccattttaaaggaaagctgtattatgttgatctcattgatttgttcaatgaggttgagtttaagactgcttcaggtcaattgttggatcttattactactcatgaggggagaaaaggatctcacanagtacaacttgacagttcaccgncgcattgttcagtacaagacagctnactac

SEQ ID NO: 402748 - DNA, 481 bp, Oryza sativa nipponbare
ccacgcgtccgcccacgcgtccggctaattaagcaaaagaagaagaagaagaaagaagaagaagaagatgcagaccgctgctagcagtgtcgttggattgtcggccgtgttgcccgctgctgtgaaggggcgcagcctgcagattcaggctcctcgccgtgttgcgttgcgcgttcgtgcggcggcggcggcggtggcagtggaggctgcggaggtggactacagctctaacatctcggtgtttccgatggaggcgtgcgacctcatcggcggcgaggcgtgcaacgtgcagatgtacccagaggccaagctctcatcatcggctgctgttgctgtttctcgtgcggcggcggaggaagtcgacagggactacctatcctacgacgagcccaccacggtgttccccgaggaggcgtgcgacgatctgggcggagagttctgcaaggccacctgatcccattcccatccatggagaaattga

SEQ ID NO: 402749 - DNA, 386 bp, Oryza sativa nipponbare
ccacgcgtccgcgccgctccaacagcgccggcctcggcagcgtcagcaacggtggaaggatcagctgtatgcaggtgtggccgattgaaggcatcaagaagtttgagaccctgtcgtacctgccaccgctcacggtcgaggacctcttgaagcagatcgagtacctgctccggtccaaatgggtgccttgcctcgagtttagtaaggtcgggttcgtctaccgtgagaaccacaggtctcctgggtactatgatggcaggtactggaccatgtggaagctgcctatgttcggatgcactgatgccacccaggtgctcaaggagctcgaggaggccaagaaggcatatccagatgcatttgttcgcatcatcggcttcgacaacgtc

SEQ ID NO: 402750 - DNA, 289 bp, Oryza sativa nipponbare
ccacgcgtccggagatgttgagcctgacacttgagaagcgcacgctggtggatcatgtgacacacttccgggaggaatatctgttctagcaatctctgcgtggtatgctaattcgccacccagacatgtttatacgtgtcgcttaagggggacagggactcggtctttctctcgtgaggcatacaagaacttccaggtggtcgagaagagcaaactcgtgctgcttaaggagaagatgagggctcctggtgcagtcccacgctttcctagaaggggagtgcccgcaact

SEQ ID NO: 402751 - DNA, 397 bp, Oryza sativa nipponbare
ccacgcgtccggcaaggagaaggagaaggtaggctccagccatggcttcccagctctccgccgccacatccgtgccgcagttccatggcctccggacctactcctctcctaggtccatggtgacgctgccatcgttgaggatgagcaagaagaggtcccagggcatccggtgcgactacatcggctcagccaccaacgttatcatggtgacgacgacgacgctgatgctgttcgcggggaggttcgggctggcgccgtcggcgaacaggaagtcgacggcggggctgaagctggaggcgcgcgactccggcctgcagaccggcgaccccgccgggttcacgctcgccgacacgctggcctgcggcgccgtcggccacatcatgggcgtcggcgtcgt

SEQ ID NO: 402752 - DNA, 477 bp, Oryza sativa nipponbare
ccacgcgtccgcggacgcgtgggcggcgagcaacaagctgggagacaggctgcggatgcaggcgacgtacaacgtgaagctgatcacaccggacggcgaggtggagctgcaggtgccggacgacgtgtacatcctggaccaggcggaggaggaagggatcgacctgccttactcctgccgcgcgggctcctgctcctcctgcgccggcaaggtggtctccggcgagatcgaccagtccgaccagagcttcctcgacgacgaccaggttgccgccggctgggtcctcacctgccacgcctaccccaagtccgacgtcgtcatcgagacccacaaggaggacgacctcatctaatcaatcaagcaagctccatatttataaatctctcgatccatctccatgcgttcttgagtttatcaattaagaatataatgtcgtcgtccctatgctatgcaagcaaagtattacgtacgtatatg

SEQ ID NO: 402753 - DNA, 418 bp, Oryza sativa nipponbare
ccacgcgtccggagataatgagcaatgggttgttaaagagcccggtgcatagggtggtgacgaacgccgagagggagcgagtgtcggtggtgatgttctacgcgctggatccggagaaggagctggagccggcgccggagctggtggacgatgagaagaggccgaggcagtatgccaagatgaagatcaaggactacttaagtggcttctacgagacttttgcaagagggacacgagtcatcgacactgtcaagatgtcagaatgagattgttgtcgtaacgggggtggaacggtggaatatagctttctaataactagatgaaaccccgagcttcggtgggggcacatttgagaaccattggaaatattccttttaagatggaccattagattggattggttggaccttaaaaccaa

SEQ ID NO: 402754 - DNA, 457 bp, Oryza sativa nipponbare
ccacgcgtccgagcataagcaacacaagggattaactcatcactcacttagctaattaaatcttcgaccatgtcggacaagtgcggcaactgcgactgtgctgacaagagccagtgcgtgaagaaaggtaccagctatggcgtcgtcatagttgaagccgagaagagccacttcgaggaggtcgccgccggcgaggagaacggcggctgcaagtgcggcaccagctgctcctgcaccgactgcaagtgcggcaagtgaagtcacgaagcaaccgaacactcgccgccggcgagtcacctaccttaattagtccacaataaaaaccacccatatgagtgtggtttgtgtgtgtgctgattattgctgaattaaacccgtgtgttatcgattaattaagcagctggtcgcttcggcgacttatgcgtgtttcaacgtatgaaatttgtgtgatgtgatg

SEQ ID NO: 402755 - DNA, 468 bp, Oryza sativa nipponbare
ccacgcgtccgcctgccaccactcaccgtggaggatcttttgaagcagatcgagtacctgcttcgatccaagtgggtgccttgcctcgagttcagcaaggttggattcgtctaccgtgagaaccacaggtctcccgggtactacgatggcaggtattggaccatgtggaagctgcccatgttcggctgcaccgatgccacccaggtgctcaaggagctcgaggaggccaagaaggcctaccccgatgcctttgtccgtatcatcggcttcgacaacgtcaggcaggtgcagttgattagcttcatcgcctacaagcccccaggttgcgaggagtctggtggcaactaagctaagatcaagcatcgcgctggtggattgctgcctataataatagtatgcagctttgttttgggctatgttgatgatatatcaatatataatatgctatatatttttattttacagttt

SEQ ID NO: 402756 - DNA, 424 bp, Oryza sativa nipponbare
ccacgcgtccggaaccagagacccaagtattaaatcaaccagcactacctccaccgagggaggaggaggaggtagattctatggagtcagatacttctgccgttgcagagagctcttccgcttctgctatcatgccagataatttgcagtcgacctatccagtgattgttccagcttatttctcgccctttttacaattctcggttcctttctggcaaaatcagaaagatgaagatggtcctgtgcaagaaacacatgagattgtcaagcctgttccagttcattcaaagagcccaatcaacgttgatgagcttgttggcatgtcgaagctcagcataagagagtccaatcaagagacagtgtctacttctctttcataaatctggtaagaggtcaaaatagacaatcagctttccatgcaaat

SEQ ID NO: 402757 - DNA, 307 bp, Oryza sativa nipponbare
  unsure (1)..(307): unsure at all n locations
ccacgcgtccgcccacgcgtccgcccacgcgtccgcttggaattcgaaatccacacgagcgcggcggcggggccagccgcgtgagcttcgcggcgaacagggtcgggaggaggatggtggtggtccgcgccgaggaggaggcggcggcngcgatggcgagcaccattaacgtggcgtcggccacctcgaggttcctgctggccggcggaggccgaggcggccgtggcgaccaaggagcccgccgccgccaagccgccttccattggccccaagagaggcaccaatgtgaagatcctgatgagggagt

SEQ ID NO: 402758 - DNA, 373 bp, Oryza sativa nipponbare
  unsure (1)..(373): unsure at all n locations
ccacgcgtccgcccacgcgtccgcccacgcgtccgcccacgcgtccggctgcctataataatagtatgcagctttgttgtgggctatgttgatgatatatcaatatataatatgctatatatttttatttcacagtggggttatgtaccatctcaatggcctctgctcttaacacatatgtaataatctcttccctccctctccggccggttttattgtaagagcactacaattatcggtgggtgaggatatgtgaaaacaaagctccggctatatacacacaagatatgtatctagagcatatctgataaattcggcgacaataaaaaaaatggatggtatcacgtaaaaaaaaaaantaaattttttttct

SEQ ID NO: 402759 - DNA, 299 bp, Oryza sativa nipponbare
ccacgcgtccggattctgttgccgctgttgagaaggtgggagttgcagatgttatgagccacatttcaacgggaggtggtgctagcttggagctgttggaaggaaaggaacttcctggagtcattgcacttgatgaagctgtcactgtggccgtatgaggctaagtttcattttgttgcatcttcttcatgtaccattctaaacttgctatattctactcctttctcgcacctcttcaaccactcgaaatgtaagagaccaatgttttatagagatgctggaaatcgtttgaataactt

SEQ ID NO: 402760 - DNA, 462 bp, Oryza sativa nipponbare
ccacgcgtccgcggacgcgtgggcggacgcgtgggcggccaccatggcgctctcctccccggtgatggcccgcgcggcgccgtcgacctcctccgcgctcttcggcgaggcgcggatcaccatgcgcaagaccgccgcgaagcccaagccggcggcgtcgtcggggagcccgtggtacggcgccgaccgcgtcctctacctcggcccgctctccggcgagccgccgagctacctcaccggcgagttcccgggcgactacgggtgggacaccgcggggctctccgccgacccggagacgttcgccaagaaccgggagctggaggtgatccactcccggtgggcgatgctgggcgcgctcggctgcgtcttcccggagctcctcgcccggaacggcgtcaagttcggcgaggccgtgtggttcaaggcgggctcgcagatctttagcgagggcgggctcgacta

SEQ ID NO: 402761 - DNA, 471 bp, Oryza sativa nipponbare
  unsure (1)..(471): unsure at all n locations
ccacgcgtccgaactacggcaagttcggcctgctctgcggcgccgacggcctcccgcacctcatcgtcagcggcgaccagcggcactggggcgagttcatcaccccgggcttgctcttcctctacatcgccggctggatcggctgggtcggcaggagctacctcatcgccatcagcggcgagaagaagccggccatgagggagatcatcatcgacgtcgagctcgccgtcaagctcctcccgagggggttcatctggcccgtcgccgcctaccgtgagctcatcaccggcaacctcgtcgtcgacgacgctgacatcggctactgatcaccacatggatgcttggctactcaagccccagttgatttggcagtggaggaagagggctcgtgccatggtgattgtgtggtttggtgtagaagctgataggatcatggaggaaatgangatctgtgtacttaagaaaaactaa

SEQ ID NO: 402762 - DNA, 279 bp, Oryza sativa nipponbare
ccacgcgtccgcccacgcgtccgcccacgcgtccggatcgcaaatactctctctcgccgatagcagcagcagcagcaatggccgccctcgccgacgcatccaccgccttcgccgccaagccgcgcctggcgcgcgcgccgtcgtccccggccgcgcggttctccgagtcgtgctccgcgtcaggcaacaacggcggcgccggcgagatggcgcagtcgctggcggcgtcggccaagacgttctccgcggcgctggcgctgtcctcggtgctgctctcct

SEQ ID NO: 402763 - DNA, 456 bp, Oryza sativa nipponbare
ccacgcgtccggttcgaggaggaggaggaggaggagaagctagcggcggcggcggcaatggcgacgagcgggctgaggagctgcagcgcggtgggcgtgccgagcctgctggcgccgtcgtcgaacaggagccgcctgccggtctgcgcctacgccaccacctccgggcgcgtcaccatgtccgccgagtggatgccgggccagccacgccccgcccacctcgacggctcctctcccggtgacttcgggttcgacccgctgggcctcgccaccgtgccggagaacttcgagcggttcaaggagtcggaggtgtaccactgccggtgggccatgctcgctgtgcctggggtgtggtgccggaggcgctggggctgggcaactggggcaggcgcaggagtgggcggcggacccggcggcaggccagtacctcggaacccgtgccatgggcacgctgca

SEQ ID NO: 402764 - DNA, 421 bp, Oryza sativa nipponbare
cccacgcgtccgcccacgcgtccggttcatgttgttggtattgatctttcgataaacatggtttcttttgcacttgagcgtgctattgggcgtaagtgctcagttgagtttgaagtcgctgattgcaccaaaaagacatacccagacaacacgtttgacgtcatctacagtcgtgatactatccttcacatacaagataaaccctcactatttaaaagtttcttcaagtggctcaaacctgggggtaaggtcctaattagtgattactgcaagtgccctgggaaaccttcagaagagttcgcagcttacattaagcaaaggggttatgaccttcacgacgtcagggcttacggacagatgcttgagaatgctggtttccatgatgtcattgctgaagaccgcaccgatcagttcctcgatg

SEQ ID NO: 402765 - DNA, 475 bp, Oryza sativa nipponbare
ccacgcgtccgcccacgcgtccgcccacgcgtccgcggacgcgtggcggacgcgtgggcggcagcaccccgccgccgtggctcgacggcagcctccccggcgacttcggcttcgaccccctgggtctcggatcggacccggagagcttgcggtggaacgtgcaggcggagctggtgcactgccggtgggcgatgctgggcgcggcgggcatcttcatcccggagttcctgaccaagatcggcatcctcaacacgccgtcgtggtacaccgccggcgagcagcaatacttcaccgacaccaccaccctcttcatcatcgagctcatcctcatcggctgggccgagggccgccggtgggctgacatcatcaagcccggctgcgtcaacaccgaccccatcttccccaacaacaagctcaccggcaccgacgtcgggtacccctggtggtctgtggttcgacccgttcgcttgggcac

SEQ ID NO: 402766 - DNA, 383 bp, Oryza sativa nipponbare
ccacgcgtccgctcgagctaaccagctacaagctacaagaagcagcctagcaaattaagctcgatcgatagcaatggcggcgaaggcggcgcttgttctggcggtgagcctcctcgccgtggccgtggcggcgagcgcctgcggcaccgactgcccgccggcaccgaggccgaggccgagcaccgggtcgtgcccgcgcgacgcgttgaagctgcgggtgtgcgccaacgtgctggggctcgtcaaggccaaggtcggcgcggtggcgccgtacgagccctgctgctcgctgctcgacggcctcgtcgacctcgacgccgccgtctgcctctgcaccgccgtcaaggccaacgtgctcggcatcaagctcgacctccccgtcg

SEQ ID NO: 402767 - DNA, 437 bp, Oryza sativa nipponbare
ccacgcgtccgctcaccactgctagcttgggaagaggaggaggagcttgagcttggagagagacaacaatggcggctcaggctcttctctctgggaggcagctgctggggaggccattgcaatcttcagtctccaggtcttcttcctccaggaaggcacccttcatggtcagggcagaggccactccccctgccaagcaaggtgctgacaggcagctgtggttcgcatccaagcagtccctgagctacctggatggcacgcttccgggagacttcgggttcgacccgctggggctatcggacccggaggggaccggtgggttcatcgagccacggtggctggcctacggcgagggttcaacggccggacggcgatgatggggcgcgtcggcatggcgccccggagctcctcggcaagctgggcctcgtccccgccga

SEQ ID NO: 402768 - DNA, 273 bp, Oryza sativa nipponbare
ccacgcgtccgcccacgcgtccgcccacgcgtccgcgacggtgtagaaggagaagacctcaaaccggaggccgcagcgctcgccgatgaccttccctcccggcgaactggcggcgaagacctgccgggtcatctcctccatggccgacgctaggcacgcgcggcactgcgccggtgtcaggtccggcgtgcactgagccaaggcgtagatcttggagaacggctcgccgtcgaagtagccgccgacgccgacgtcgccggtggcgaaccgcgc

SEQ ID NO: 402769 - DNA, 479 bp, Oryza sativa nipponbare
ccacgcgtccgcccacgcgtccgcccacgcgtccgcctcgccctcgcaggcgcggcggcgggcctctctcgtcgtcgttgcaaaggtcaaggtgtccactccccaggccgaccgcatcgcccgccatgtccgcctccgcaagaaggttagtggcaccacggagaggccaagactcagtgttttccgctcaaacaaacatttatatgctcaagtgattgacgatacaaagtcatgcactctggtttcagcttccacaatgcacaagtctctttcaaaggacttggaatactcggcagggccaacagttgaagtggcacaaaagattggtgaagtgattgccaagtcttgcttggagaaaggaattaccaaagttgtttttgaccggggtggtttcctctaccatggtcgcattaaagctctggctgatgctgctagagagaatgggcttgatttctgaaacctccaaatgtttgttcata

SEQ ID NO: 402770 - DNA, 464 bp, Oryza sativa nipponbare
  unsure (1)..(464): unsure at all n locations
ccacgcgtccgtgttgcagggaggctggcgatgctggcgttcttggggttcctggtgcagcacaacgtgacgcagaaggggcccttcgacaacctgctgcagcacctgtctgacccgtggcacaacaccatcatccagacgctgtcaggctgagcgtgtgatcgatttcatcagggccagggcatctcaaggagcttgatgagttcaggctggtgaaaccgatgattgggcgatggaagatgttctcttcttgtttcttctttttttttttgtggagtatgcatgtataagatgttaatgaattggggggaggagagagagagagaatgatgtgatgagattcagacttactgtgtgtgttgtggtaattgtttcctgcatgcatggatctggatgcatgggtgagggggtgagtngagtggtgaatttctgatgtacagtactacagggggataaactatctc

SEQ ID NO: 402771 - DNA, 463 bp, Oryza sativa nipponbare
ccacgcgtccgcccacgcgtccgcaagttcggcgaggcggtgtggttcaaggcggggtcgcagatcttcagcgagggcgggctcgactacctcggcaacccgagcctgatccacgcgcagagcatcctcgccatctgggcggtccaggtggtgctcatgggcgccgtcgaggggtaccgcatcgccggcgggccgctcggcgaggtcgtcgacccgctctaccccggcggcagcttcgacccgctcggcctcgccgacgacccggaggccttcgcggagctcaaggtgaaggagatcaagaacggccgcctcgccatgttctccatgttcggcttcttcgtccaggccatcgtcaccggcaagggccccctcgagaacctcggcgaccaccttggccgacccggtaaacaacaacgcctgggcctacgccaccaacttcgtccccggcaagtgagcgccgccg

SEQ ID NO: 402772 - DNA, 364 bp, Oryza sativa nipponbare
ccacgcgtccgcaagttgctgctgccatgggcatctatggccctcgcactacttacattatcgctctcaaagattgtcctggaactcatgaattccttcttcttgatgaaggaaaatggcagcatgtcaaggacaccacaaccattggagaggggaaaatgttctctcctggtaacctgagggctacatttgataatcctgaatatgacaagctcatcaactactatgtcaaggagaagtacacattgcgttacactggaggaatggttcctgatgtcaaccagatcatagttaaggagaagggcatcttcaccaacgtgacgtctccgacagccaaggccaagctgaggctcctgttcgaggt

SEQ ID NO: 402773 - DNA, 421 bp, Oryza sativa nipponbare
ccacgcgtccgcgttcataacagatcttgccgatgctgttattgaaagcttgccttatgttggtgctatggcagtttcaaaccttgaagctcgacagccactggtgccacttgggagtgtggaagaactgctagcggcgtacgactcgaaacgcgacgagctgccccctccagtgactgtatgggagtggggctggacgaagagcgcggagacctggaatggacgggctgctatgctggccgtgctggctctcctagtgctggaggtgacaaccggagaagggttcttgcaccagtggggcatcctgcctttgttccactgagccgatggcccttttcaggtcagctctttttgaggtgatctaatcataaatggtgattcatatgggataattcccgatgctgtatacgaatgggaaaag

SEQ ID NO: 402774 - DNA, 355 bp, Oryza sativa nipponbare
ccacgcgtccgcccacgcgtccgcacgatcattacgaggatgagcgcaaggtaggccgaggggaatacagtggagtcttcaaaggaattaatgtgacaaatgatgagccctgcgtcattcacattctcaagcctgttcagaaaccggagatgaagagggagataaagattcttcagaacctctgtggtggcccaaatattggcacacttcacaatattgtcagcgatcaacactcaaaacctccaagtttgacatctggatatgtaaacagctctgatttcagcgctctgtatccagcattgactgactctgagactcgcttctacattcatgaactccttaaggcactggatta

SEQ ID NO: 402775 - DNA, 417 bp, Oryza sativa nipponbare
ccacgcgtccggcagcagcagtagctgagcttgaagcagcagagcgaggtagacatggccgccgccaccatggccctctcgtccccggcgctggccggcaaggccgccgcgaaggtgttcggcgaggggcgcatcaccatgcgcaagtcggcggcgaagcccaagcccgccgcgtcggggagcccgtggtacggcgccgaccgcgtgctctacctcggcccgctctccggcgagccgccgagctacctgaccggcgagttccccggcgactacgggtgggacaccgcggggctctccgccgacccggagacgttcgccaagaaccgggagctggaggtgatccactccaggtgggcgatgctcggcgcgctgggctgcgtgttcccggagctcctcgcccgcaacggcgtcaagttc

SEQ ID NO: 402776 - DNA, 455 bp, Oryza sativa nipponbare
ccacgcgtccgatctcatcatcagcaaccaattcgcaccgatcgatcgatcgatccagcaactagatcaacagtactagctaggaagcatggcccgagcacagttggtgtcggtcgccctggtggcagctctgctcctcgccggcccgcacgccgtcgaggccatcacctgcggccaggtcaactccgacgtcgggccctgcctgacctacgcccgcggcggcgccggaccgtcggcggcctgctgcagcggcgtgcggagcctcatggcggcagcaagcacgaccgcagaccggcgcaccgtctgcaactgcctcaagaacgcagcccgcggcaataaggggctcaacgccgtgaacgccggcagcattccctccaagtgcggcgtcaagcgtccctacaccatcagcgctttcatcgactgctccaggtgagccgagccatcgatcagagacg

SEQ ID NO: 402777 - DNA, 245 bp, Oryza sativa nipponbare
ccacgcgtccgcggacgcgtgggcgccgacaggatcatcaacgagatcgccaccctgctggagcaacccgtcgtcaacttcgataaggtcgacgcctacgttcatcagctcaaaggcagcagcgccagtgttggtgctcagaaagtgaagttcacttgcatgcagttccgtcagttctgtcaggacaaaagcagagatgggtgccttatggcattggctgttgtgagaaacgacttctatgatct

SEQ ID NO: 402778 - DNA, 408 bp, Oryza sativa nipponbare
ccacgcgtccgcggacgcgtgggcggacgcgtgggttcgagaggaaaaggaagtattggtgtacgcgtttagctacaaatatggtcatgcagcggctagagcagagctgaggcatcaggcgtggtgcgcgtcgcttgatggtgcttgccggcactgtcagcaaacctggcaagaggaccactcgatgatcttgtgaacatttacagacggcttttgcatcattaagggaacttgttgcatcatggatgactaggatatcagaagagtgcaagttgtggacttcttctgctctatccaaacaaggaagacttcagatatcctaatatgcatattaatggaatttttagaaataaaatattcagctcctttaactttctgcttcaaatgcatatttcccattccaatgct

SEQ ID NO: 402779 - DNA, 442 bp, Oryza sativa nipponbare
ccacgcgtccgcggacgcgtgggatttcaccaaggagttggcacggagatgtcaggagaatgaagggaggcccattgagagcatctttgatctggctgatatgagcatcgatgagatgcgggatctgttgcagcaatcaaaccctcagctgcaggatatcattgaattcttcaagcgtttccccaatgtcgatatggcttacgaagttcgcgagggtgatgatatcagggctggtgacaatgtaactgtacaggtgaccctggagcgtgacatgacgaacttgccttctgaggtggggccagttcatgcccccaggtacccaaagtccaaggaagaaggctggtggctggtaattggcgatagctctaccaatcagttgcttgcaatcaagagggttgcacttcagaagagggctcgagtgaagcttgagttcaccgctgct

SEQ ID NO: 402780 - DNA, 470 bp, Oryza sativa nipponbare
gcgtcgggatccattttagtcgcaaagatcttgtaaaacctctaggcaggaaagtattcatgaatgcatctggctttttacgtgttcgccgtagtggtggagctgccgcgagtgctcaaatcattgatttacttgaggatacaaggatacatcctgagtcatatgcattagcaaaaactttggcaaaggatgtatttgctgaggaagcaccacatgaagcaaatgaaatggacgatgatgagcaagagatggcaattgagcatgtcagagaaaagccacgttatctgaaatcgctcgacattcgtgagtacatgaagagtatgccagaagagttccataataaagagcaaacactgaaagatataaaatgggaactgttgtgcggtttccctgattggaggaccccctatgctgagccaactccagatgaggaattctggatgctttctggggaaactgaggacaccata

SEQ ID NO: 402781 - DNA, 414 bp, Oryza sativa nipponbare
ccacgcgtccgtctccatctccgacttcctcagatctccaaggcgagaagccctcgaggcccgccgcgccgcacgcagggatgtcggcgagcagcgcgccggtggacgcatcgggggatccgatcccgacctcgtcggtgctgatggcggcgtcgaagcacatcgccgtgcggtgcaggccggagaacgtggccttcctcaactgcaagaagaaggaccccaacccgcagaagtgcctcgagaagggccgccaggtcaagcgctgcgtcttcgacctgttgaaagaacttcaccagaagtgccccaaggagatggacgcctatgccggctgcatgtattactacaccaacgaaattgacttctgtcgtaaggaggcagcaagattttgggagtgcatgccccgtatctgagtag

SEQ ID NO: 402782 - DNA, 411 bp, Oryza sativa nipponbare
ccacgcgtccgctcagctctcacagctcactgcatcaatggccgcggccaccatggcgctctcctccccggtgatggcccgcgcggcgccgtcgacctcctccgcgctcttcggcgaggcgcggatcaccatgcgcaagaccgccgcgaagcccaagccggcggcgtcgtcggggagcccgtggtacggcgccgaccgcgtcctctacctcggcccgctctccggcgagccgccgagctacctcaccggcgagttcccgggcgactacgggtgggacaccgcggggctctccgccgacccggagacgttcgccaagaaccgggagctggaggtgatccactcccggtgggcgatgctgggcgcgctcggctgcgtcttcccggagctcctcgcccggaacggcttaaagtt

SEQ ID NO: 402783 - DNA, 482 bp, Oryza sativa nipponbare
ccacgcgtccgagaaagcataagcaacacaagggattaactcatcactcacttagctaattaaatcttcgaccatgtcggacaagtgcggcaactgcgactgtgctgacaagagccagtgcgtgaagaaaggtaccagctatggcgtcgtcatagttgaagccgagaagagccacttcgaggaggtcgccgccggcgaggagaacggcggctgcaagtgcggcaccagctgctcctgcaccgactgcaagtgcggcaagtgaagtcacgaagcaaccgaacactcgccgccggcgagtcacctaccttaattagtccacaataaaaaccacccatatgagtgtggtttgtgtgtgtgctgattattgctgaattaaacccgtgtgttatcgattaattaagcagctggtcgcttcggcgactatgcgtgtatcaacgtatgaatttgtgtgatgtgatgtacccgtgctattctcagtgaaa

SEQ ID NO: 402784 - DNA, 440 bp, Oryza sativa nipponbare
ccacgcgtccgcccacgcgtccggccatctctctcagctctcacagctcactgcatcaatggccgcggccaccatggcgctctcctccccggtgatggcccgcgcggcgccgtcgacctcctccgcgctcttcggcgaggcgcggatcaccatgcgcaagaccgccgcgaagcccaagccggcggcgtcgtcggggagcccgtggtacggcgccgaccgcgtcctctacctcggcccgctctccggcgagccgccgagctacctcaccggcgagttcccgggcgactacgggtgggacaccgcggggctctccgccgacccggagacgttcgccaagaaccgggagctggaggtgatccactcccggtgggcgatgctgggcgcgctcggctgcgtcttcccggagctcctcgcccggaacggcgttaagttcggcgagg

SEQ ID NO: 402785 - DNA, 375 bp, Oryza sativa nipponbare
ccacgcgtccgctcacgagctcaaaagacacacattccaaaagcatctgtggccatctcctcctagtcctaggctcgcgtcaatggcggcgtccaccatggcactctcctcccctgccgccctcgccggcaaggcggtcgccaatgccaaggtgttcggcgagggccgcgtcacgatgcgcaagtcggcggccaagcccaagcccgccgcggcgtcggggagcccgtggtacggcgccgaccgcgtgctctacctcggcccgctctccggcgagccgccgtcctacctcaccggcgagttccccggcgactacggctgggacaccgccgggctgtcggccgacccggagacgttcgccaaagaaccggagctgga

SEQ ID NO: 402786 - DNA, 480 bp, Oryza sativa nipponbare
  unsure (1)..(480): unsure at all n locations
ccacgcgtccgcgaaactcagctgcaaggagaaggagaaggtaggctccagccatggcttcccagctctccgccgccacatccgtgccgcagttccatggcctccggacctactcctctcctaggtccatggtgacgctgccatcgttgaggatgagcaagaagaggtcccagggcatccggtgcgactacatcggctcagccaccaacgttatcatggtgacgacgacgacgctgatgctgttcgcggggaggttcgggctggcgccgtcggcgaacaggaagtcgacggcggngctgaagctggaggcgcgcgactccggcctgcagaccggcgaccccgccgggttcacgctcgccgacacgctggcctgcggcgccgtcggccacatcatgggcgtcggcgtcgtcctcggcctcaagaacatcggcgttctggaccagatcatcggctaatcaaattcattaagctagtcacacg

SEQ ID NO: 402787 - DNA, 327 bp, Oryza sativa nipponbare
ccacgcgtacggtcagcttgaattcaaggccatcctgtttgtaccaaagagagcgccatttgacctctttgacaccaggaagaagcaaaacaacatcaagctgtacgtacgccgggtgtttatcatggacaactgtgaggagttgatcccagagtggctcagctttgtcaagggcattgttgattctgaagaccttcccctcaacatctcacgtgagatgctccagcagaacaagatcctgaaggtgatccgcaagaaccctgtgaagaagtgcgtggagctcttctttgagatcgctgagaacaaggaagactacaacaagttcta

SEQ ID NO: 402788 - DNA, 405 bp, Oryza sativa nipponbare
ccacgcgtccgcttttgagtcgtttacacctgattttcttccttttcaagttgaaaataccaggtgatatgtagtcctagctcaactttgtagaggatgacaggtgtaaatcgccttgatacgttactacggaattgcaacagaattcgatttgcatctttcacggtgctagaattaatctaccatatttttgtttgaaaaaaaaaaaaaaaaaaaaaaaaaaaaaaaaaaaaaaaaaaaaaaaaaaaaaaaaaaaaaaaaaataaaaaaaaagaaaaaaataataaaatttaaaaatatataaaataaatttttaaaaaaaaaaaaaaattgggggggggcctcttaaaggtaccaaattttacttccggttgtttcaaaaataattgttttttttatggggcc

SEQ ID NO: 402789 - DNA, 449 bp, Oryza sativa nipponbare
ccacgcgtccgcccacgcgtccgcgggcaacactatcattgctttgcttttgaggatgggcagtgggtcatgtacgatgaccagactgtgaaggttgttggtaattgggatgatgtgctcgtaatgtgtaagaaaggtcacttgcaacctcaggtgctcttctttgaagctgcaaagtaattgttccttcagataggcttttccttgtggtgttgtgaagattagaaattgataccaaattcgttttgagctgtgggggataaaggcgtaaagtggtaattcagcagttgcactgatcagttagttttgtcatgccccgtcataaataaacggtcacatgagaatactagaaatagaaaagccagtaatccttttgtttaggttttttggagcttcggtataattctgatccctgatcctgtcaataagaatttggcataggaatggga

SEQ ID NO: 402790 - DNA, 462 bp, Oryza sativa nipponbare
ccacgcgtccgctgctataaggagcgcgccgtgcaccgcctctcacaatgtcgaccgccgccgccgccgccgctgcccagagctggtgcttcgccactgtcaccccgcgctcccgcgccacagtcgtcgccagcctcgcctccccatcaccgtcctcctcctcctcctcctccaacagcagcaacctcccggcccccttccgcccccgcctcatccgcaacacccccgtcttcgccgcccccgtcgcccccgccgcgtgatccgggaggccgcgacgaccgccagcgaacggaagggaaaaaaaaaagtcaaaaactagagccgatcgtttgatccattcgatatagggaagatgagtggatgcctctgcctcccccgctataaaaaggccccaaacgggacgccatcgccaccaccaccagcagcagcggccgaagcggaagcagcagcagcagcaggggc

SEQ ID NO: 402791 - DNA, 252 bp, Oryza sativa nipponbare
cctataataacgatacatcattaattcgatcatcccttggatgcggcctgcggcttacattaaatctcgatccaaagaagcaaagatgatgacagacagaaattaattaagctagaaatctcctcgatcgatcacacacacacacacaattaaggtacatacatacatgcactgctgcaactgcaactgcagggtcggtgcgtggctactacaagtgtacacatggtacgttgggttggcaccatctcgatc

SEQ ID NO: 402792 - DNA, 314 bp, Oryza sativa nipponbare
ccacgcgttcgcccacgcgtccgcccacgcgtccgattaattggagtactaccaaccaaataaggccagacaatgtcagatgcacgcatcttctgttgtcgttgggccatcttttgtatgcatcctattgttaattactagtacatgatatccaagtgatcatcagcaaggctacagaaattctgtaatacgataaattaaaagaaaccaaaatggagcctgcatatgtgtaacttaattaatgtactggcgtattaatgccactgctgcatgttgtaatactccatcaaagagtctattactattaagtattt

SEQ ID NO: 402793 - DNA, 469 bp, Oryza sativa nipponbare
ccacgcgtccgcccacgcgtccgcaagcctcgcctccactccccgcgccgccgccgccgccgccgactcgccggtcgtcaccctcgccccgcagccatggctgagcagactgagaaggctttcctgaagcagccaaaggttttcctcagctcaaagaagtctggcaagggtaagaagccaggcaagggtggcaaccgcttctggaagagcattggccttggcttcaagacccccagggaagcaattgaagggacatacattgacaagaagtgcccattcactggaactgtttctatcagaggcagaatcattgctggaacatgccacagtgccaagatgaacagaactatcattgttcgcaggaactacctccattttgtcaagaaatatcagaggtatgagaagaggcattccaacattccggctcacgtctccccatgcctccgtgtcaaaggaggtgaccatgtca

SEQ ID NO: 402794 - DNA, 265 bp, Oryza sativa nipponbare
ccacgcgtccgcccacgcgtccgcccacgcgtccgcgactacctggggaaccctaacctggtgcacgtgcagagtatccaggctatttctgcagtcatgtcttttctcactgaaaattcttaccttttgcatccatatttttttcttatctcaatatatgtttggctaggattatgttgctattcattgggttgtaatccgtattttgaagagcttttttcttgtttttatgacttttaggtttgtatttgtatggacatatatt

SEQ ID NO: 402795 - DNA, 289 bp, Oryza sativa nipponbare
ccacgcgtccggtgggttggcttctcctccccctcccggttcggttcggttcgggtccggttcgatttcgtttttttttcttcttcgtggggttggtgggaaagcatggcggcgccggatgttgagtaccgctgcttcgtcggcggcctcgcctgggccaccgacgaccgctccctcgaagccgccttctccaccttcggcgagatcctcgagtccaagatcatcaacgatcgggagacggggaggtcgcgcgggttcgggtacgagacgttcttgagcgagcatgcta

SEQ ID NO: 402796 - DNA, 422 bp, Oryza sativa nipponbare
ccacgcgtccggcggcaccgcctgcgtcaactccttcggtgacgagcagctcgccgtcgatatgctcgccgacaagctcctcttcgaggctctggaatactctcatgtctgcaagtatgcgtgctccgaggaagtcccggagctgcaagacatgggtggaccagtcgatggtggtttcagtgtagcattcgaccctcttgatgggtccagcattgtcgacacgaacttcacagttggaaccatatttggtgtctggcctggtgacaagctgacaggcgtcaccggtggagaccaagttgctgctgccatgggcatctatggccctcgcactacttacattatcgctctcaaagattgtcctggaactcatgaattccctcttcttgatgaaagaaaaggcagcatgtcaaggacacccacac

SEQ ID NO: 402797 - DNA, 180 bp, Oryza sativa nipponbare
ccacgcgtccgcgtttatgagatgcccaaggaagaaaatttgagtgaatatgagatggacaagatgatgggacggccacacccgttcgttgacccgcagaaggcaatgtctgtaggggaaccaaaatctagtgaagagctgtggtggaactggaagaggaagtctgagggaaatgaaatg

SEQ ID NO: 402798 - DNA, 419 bp, Oryza sativa nipponbare
ccacgcgtccggaagtactcgagcaaagaaggagagagcttggtgagctgcagagatggccccctccgtgatggcgtcgtcggccaccaccgtcgctcccttccaggggctcaagtccaccgccggcatgcccgtcgcccgccgctccggcaactccagcttcggcaacgtcagcaatggcggcaggatcaggtgcatgcaggtgtggccgattgagggcatcaagaagttcgagaccctctcctacctgccaccgctcaccgtggaggacctcctgaagcagatcgagtacctgctccgttccaagtgggtgccctgcctcgagttcagcaaggtcggattcgtctaccgtgagaaccacagatcccccggatactacgatggcaggtactggaccatgtggaagctgcccatgttcg

SEQ ID NO: 402799 - DNA, 484 bp, Oryza sativa nipponbare
atatatagccggagcttgcatatatttcattcacatatgcctcacccaacaacatatagtcgtagcagataccactcttacatcaagtcagagagagatcaggtgaaacaaaaacaaaagcagagcacggccggtaaaatcaaaagacgatgaacaaactgggaacacacgaaacaaggtgggagacatcatcgaatcagagatgaacaattaaacaaggctatatatgacgatgacggcttagttgccaccagactcctcgcagcccgggggcttgtaggcgatgaagctgatgagctgcacctgcctgacgttgtcgaagccgatgatacggacgaatgcatcagggtacgccttcttggcctcctcgagctccttgagcacctgggtggcgtcagtgcacccgaacatgggcagcttccacatggtccagtacctgccatcgtagtatccgggggatctgtggttctcacggtagacgaat

SEQ ID NO: 402800 - DNA, 405 bp, Oryza sativa nipponbare
  unsure (1)..(405): unsure at all n locations
ttttctccttggggggtagacaatttcattccgagagatagcaacaagcatttgaaacaccataaccaaagcgaactctattcatggtaacattacggacgaagaacaccttacactggatggatggatagagggcttatctacttgagagagccactggccactataaccactagactagatgataagatgatcctgacacagaacgctctagataactgggcacgaagggcccccccaatggggtcctccagatgccgcatgtaaatcgatgggatccaatagcacgcggtgccatcgatcgatcggtcttccnattatacggggcctcggaagcgtgcgccttggaggcttttttcatctcattaccagcggccttcgtgaggtcagaggtccaaagggtca

SEQ ID NO: 402801 - DNA, 400 bp, Oryza sativa nipponbare
agtttgtacaacggcgcaccatccatatatccatgcaggcagcctgtttgtgcccttgagcagatgcatttaatttatacaagtagaaggcactcaaatcagccaccacatgaacacacacatgttccatcatcgatcgagctacacatgcatcacccggacatgcacttacaaacaaaagatctacttgaagaagtacgggaggtcgagcacgtagaggaggaagtaggcccagaggacgccggatatgccgtcgaagaagaagccgtcggagaacttggcccagacgaaggcggtctggatgttgtcggcctgcttattgcggtcagagagcgtcagcgtcagcgcctgggacaggtcgccctcgcccaaggaagcgacgccgtacatggtgaggcag

SEQ ID NO: 402802 - DNA, 563 bp, Oryza sativa nipponbare
aggtgacactagagacaatctatgacagctatagtgcgatcgcgtgcgcgcgctcgtatgctcgagtagcggtcgacctgtcgttcttttttttagatcctataataacgatacatcattaattcgatcatcccttggatgcggcctgcggcttacattaaatctcgatccaaagaagcaaagatgatgacagacagaaattaattaagctagaaatctcctcgatcgatcacacacacacacacaattaaggtacatacatacatgcactgctgcaactgcaactgcagggtcggtgcgtggctactacaagtgtacacatggtacgttggttggcaccatctcgatcgtgtcgttgtgctcacttgccggggacgaagttggtggcgtatgcccaggcgttgttggcgacggggtcggcgacgtggtcgaagaggttctcgatggggcccttgccggtgacgatggcctggacgaagaagccgaacatggagaacatggcgaggcggccgttcttgagctccttcaccttgagctcggcgaaggtgtcagggtcgtcggcg

SEQ ID NO: 402803 - DNA, 458 bp, Oryza sativa nipponbare
  unsure (1)..(458): unsure at all n locations
ttagggaatgatgattaatttaactgttcactgttgtatacatcgaggttcaagattaattaagtaaaagctgcagtaccttcacaaaattatactccttactccttagcatagagctgatcgatggagcgtataaaaatttaactttacatacagagaccaaattatatgcaataggattaatttgccgctgttccgttctgccaaactgcaggcagaaccatcgctgctgagaattgctttccttccttcgttcgttgtgcttcagatcctggacgggatgagcggcgtcgaattcgacaggtacgccgncgccgccgccacgccggagccgagcttcaccgggtagccgatgtccttgagcaccatctccactccactcagggcacccatcaattgcagctcgttgaggtggccgaggtggccgatcctgaacaccttgccggcgaccttgttga

SEQ ID NO: 402804 - DNA, 476 bp, Oryza sativa nipponbare
tacgtgataccatccattttttttattgtcgacgaatttatcagatatgctctagatacatatcttgtgtgtatatagccggagctttgttttcacatatcctcacccaacgataattgtagtactcttacaataaaaccggccggagagggagggaagagattattacatatgtgttaagagcagaggccattgagatggtacataaccaaactgtaaaataaaaatatatagcatattatatattgatatatcatcaacatagcccaaaacaaagctgcatactattattataggcagcaatccaccagcgcgatgcttgatcttagcttagttgccaccagactcctcgcaacctgggggcttgtaggcgatgaagctaatcaactgcacctgcctgacgttgtcgaagccgatgatacggacaaaggcatcggggtagggctttttggccttctcgagctccttgagcacct

SEQ ID NO: 402805 - DNA, 554 bp, Oryza sativa nipponbare
ttaattaagctgcacaatatatatatatacccagtataataattaccacgacaacatacgcacacatattgacataattaagcctgctacgtaacaaagcatcatccataaacacgcgtaccgtgccgtgcatgcatacagatacatacaggcactccacttattttacaaccattcacactctcacactgaaagtcccaaataaaactgacaacagacgcatgcatcgatcatatcatatgcatgatcgtccatagtcgtagattgtaaattgaacaacgaaatcaagaacaattaatcaagcagctgatcgatctctcgtatcaaatgaacatcgtcgtcttcctcacgccgtcacgctggtgctcctgaacgagctgagcgccttggcggcctcgccgcgcagcaccagcttgtggtacgccgccgccaagaacgccccgatcaccggccccacccagaagatccagtggtctttccaagctgcgtgctggttgtacagcacggcggcgccgaggcttctcgccgggttgatgcccgtgccggtgatcgga

SEQ ID NO: 402806 - DNA, 517 bp, Oryza sativa nipponbare
cagtgatgaagagaacttcacttctaaaagagtatcaacttgttttttacatcggttacatcatagtacaggtacacaatcaacaaggcatgcagtgctccatccacaattacatcccaatacaccaccaccattcacagcctactccgatcccaaaaaagagaggtaagtcgcgtcgacgaacagtcttttcatcttcctccattggcagccattgctaacactccaacacctgaagaactcctcatttgggggtgaaggcctggaagatggtggcgtggccggggtcggcgagatgggcgaagaggttgtcgatggggccggtgccggtgtactctgcctggaaccaagctcccatgacggcgagcatggcgagccgcccgttcttgatctccttggtgcgcagctccttgatcttctccggcgagccggtgccccagccgagcgggtcaaaccacaaaccaccagggtacccgacgtcggtgccggtgagcttgttgttggggaagatggggtc

SEQ ID NO: 402807 - DNA, 491 bp, Oryza sativa nipponbare
agctagaacactgctgctaccatgagatagtttatccccctgtagtactgtacatcagaaattcaccactcaactcaccccctcacccatgcatccagatccatgcatgcaggaaacaattaccacaacacacacagtaagtctgaatctcatcacatccatctctctctctctcctccccccaattcattaacatcttatacatgcatactccacaaaaaaaaaaagaagaaacaagaagagaacatcttccatcgcccaatcatcggtttcaccagcctgaactcatcaagctccttgagatgccctggccctgatgaaatcgatcacacgctcagcctgacagcgtctggatgatggtgttgtgccacgggtcagacaggtgctgcagcaggttgtcgaagggccccttctgcgtcacgttgtgctgcaccaggaaccccaagaacgccagcatcgccagcctcccgttggcgagctccttctccttg

SEQ ID NO: 402808 - DNA, 299 bp, Oryza sativa nipponbare
tttgacagaaacaaaattaagctagagaagcactgattccacgcacaatttacatgatcattacatctgccatcacacaggcactcatgcatcgattacacataggagtatagattcgtgtgactagcttaatgaatttgattagccgatgatctggtccaggacgccgatgttcttgaggccgaggacgacgcctacgcccatgatgtggccgtcggaaccaaaggccaacgtgtcggcgagcgggaacccaaccgagtcaacggtctagaatgccggagttttgcgcctccagcttg

SEQ ID NO: 402809 - DNA, 503 bp, Oryza sativa nipponbare
aaaacagaaatgcgaatttacctttatatgcaactgtttacaccaaaaggggaaaaaaacgggtaccttgcaaaaaggagtataactttgcagtttcaagtcccacttcaactacaacccaatctgcattacaggatgggagtctaaaacgactgcagtttcagcgtttttgaggcctgcagagacactgggctcgcgttgcagcaaaagattaggcggcggcgcccacggtggcgccggcggtgagcctcgacgagccgtagagagtctcctcgaaccggatgatctcgttcttggaaccgtaggccacttgagtccgctcgtcgaggttgttgatcaccttgtccagcaccgactgtttgccgtcgctgctgtacccgccggctttctctatcaagaaacccaacggcgccacctcgaacaggagcctcagcttggccttggctgtcggagacgtcacgttggtgaagatgcccttctccttaactatgatctggttgaca

SEQ ID NO: 402810 - DNA, 518 bp, Oryza sativa nipponbare
ggggatcaagtttggtctgagtatagtattacatataagtatcgtttttgacgatttgtacaatatatttattacgatgtgtatgtgcatatgattagcctggtgctagcattcacatatgcatgctcttcaacctatgttgatacatacatatgtacatacatacacagctgatgttgacacaaacaagatgaaaaaaaaaaactgaagcaacaaactgggaaaggggaaaccaatgcaaggtggcccgattcgaacgttcaaagctgccaaaaccgaatagatcaatcgagtctcctctgtatagagctcacgagtgagcttgctggcttgccaactagcttagtttccgccggactcctcgcaacccgggggcttgtaggcgatgaagctaatcaactgcacctgcctgacgttgtcgaagccgatgatgcgaacaaatgcatctggatatgccttcttggcctcctcgagctccttgagcacctgggtggcatcagtgcatccgaacataggca

SEQ ID NO: 402811 - DNA, 318 bp, Oryza sativa nipponbare
gttgaagttcgattgagtatgatagacctttttactaggcaaaccacacgaatacacgattgattaatttcactgagaatagcacgggtacatcacatcacacaaattcatacgttgatacacgcatagtcgccgaagcgaccagctgcttaattaatcgataacacacgggtttaattcagcaataatcagcacacacacaaaccacactcatatgggtggtttttattgtggactaattaaggtaggtgactcgccggcggcgagtgttcggttgcttcgtgacttcacttgccgcacttgcagtcggtgcaagag

SEQ ID NO: 402812 - DNA, 381 bp, Oryza sativa nipponbare
agctagcaaatcgatccatgcgaccatgcgtgcaaatcagttggagcacaaatttacatgttacacccacaccctacacccatgcataataatacatcgtatatacgtacgtacatacatacccctctcgatcacacgcaccatcgatcgtacaaagttgcgtacatacatacgtacacacatatacgcatacgcacgtacatacatacataattaaaaactcgtaattaattaaatacgtagttgatggcatctctaatggaacttgaggctggtgaggatgttgttgtggacgggatcagcgaggtgatcaagcaggttctgcacggggccaaccccggtgaagagcgcctggacggagaagccgagaaggcgagcatg

SEQ ID NO: 402813 - DNA, 476 bp, Oryza sativa nipponbare
  unsure (1)..(476): unsure at all n locations
ttacagaaaatcaatccttgcatgcaggggaaatcgatggatcgacctctctccttaacttgttcttaattctcatgtacaatcaaagaaacacacacgcacacacacatgcgtgcactgcatctctctgagcaacgaactcgattgatttgattttgattcgctagggattaaagagaagctgagatagagatttcgacgatcatgcgacgctgaaggagctggctgcgctctcgacgaacttcctggcgcccttgaaccacctcttgtcgccggcctgcgccttgcagatgtacagcttgccgtcgttgacggtggccgtgatcagctggtgcttgccgccctcgtcgccgtccgccgtcctcgtcagcaccgttacgctgtagtactgcttncctcccaccaccggcgccgagctctccaggatgttcgccgtcgccaccgcgttcgactcaaacccaccctcggaatctgtc

SEQ ID NO: 402814 - DNA, 404 bp, Oryza sativa nipponbare
cgcgatggacaaatcgatatatatatatataggatagagccgtaggaggcatatttagattgagaagaaagaataattagttgacggtgaccttgccgaccatcccagctccggcgtgcggctcgcagtagaagccgtatgtgccggggacggtgagcgtgacggagaaggtctcgccgggggcgttgaggtactcctcctgcgatatcttggacacgtcgacgccgctcggaaccgcgtcctcgtcgaacaccacgttgtgagggaagccggcgttgttcttgaacgtgatggtctcgccggacttgacggtgaagtcgttcggctcgaacaccagcacgccgccattggcgccgagaagcacctcctgcgccatggcgcccggacgcgtggcggacgcgtgg

SEQ ID NO: 402815 - DNA, 436 bp, Oryza sativa nipponbare
acgtgataccaggcattggttttatggccagagcggagcacactaagattcattaatcacattttagtggatcaaaacaaacaccagacgtgcttttttcttgcacatcaaaaacacatgtgggcctccaaccattaacccaaactggatgggaggtccacacaaatctcatatgtgttacgagcggatgacaatgatgggggccctatccgatcggtagataacttggccatgggggccccaccgttgatttattacaaacaccgtcgaaattaccgccgcctactatgattatacccccgaattaaccagcgcgatgctcgatgttagctaagttgccaccagactcctcgtaacctgcttgacggtgctggatgaagctaatgaagtggacatgactgtagtcgccgaagccactgatacctacaaatgcgtc

SEQ ID NO: 402816 - DNA, 511 bp, Oryza sativa nipponbare
cacgcacgcataaatagcaccatgcttcattattttacggagtagcacgctgtactacacggtacgaacataaccataatacacacaacatcagggaacagtccccatgattctagttaccagttatttgtccccacgactctagttaccaagcaaacatgaaacagcttctccatgagcttagctctacttctgcctcttgtagatcttgtgcaggaaggatttcaatacattctgaactgctttgttcggatgtgcttcgatgtcggcaatcagcttattgtaactctccctctcgtattcatgaaatacggcctccagattaagttctttatacagatccttcacttttgcaacacattcaggatctggcttcccataattttcaaatagaatgtgcttttggttctcgtcagcacgctcgagagcttgcacaactaaccatgagcacttgtagtcttcaatgtccgttccaatcttgccaataaactcaggatcaccataacaatct

SEQ ID NO: 402817 - DNA, 507 bp, Oryza sativa nipponbare
  unsure (1)..(507): unsure at all n locations
atgtatgtaaatattatattattggaaatcattttgaggagctagactagcgtgccttattaacaaggagatatgtaccattacatgatgattaacatataaatctgtagctacatggaattaaggtagtggagcagaggaggaaggatgatagaagactccaattctccatggatgggaatgggatcaggtggccttgcagaactctccgcccagatcgtcgcacgcctcctcggggaacaccgtggtgggctcgtcgtaggataggtagtccctgtcgacttcctccgccgccgcacgagaaacagcaacagcagccgatgatgagagcttggcctctgggtacatctgcacgttgcacgcctcgccgccgatgaggtcgcacgcctccatcggaaacaccgagatgttagagctgtagtccaccttcgcagccttcactgccaccgccgtcgncggcggacgaacgcgcaacgcaacacggcgaggagcctgaatctgcaggct

SEQ ID NO: 402818 - DNA, 562 bp, Oryza sativa nipponbare
tttgaggtatcaagtttggtctgagtatagtattacatataagtatcgtttttgacgatttgtacaatatatttattacgatgtgtatgtgcatatgattagcctggtgctagcattcacatatgcatgctcttcaacctatgttgatacatacatatgtacatacatacacagctgatgttgacacaaacaagatgaaaaaaaaaaactgaagcaacaaactgggaaaggggaaaccaatgcaaggtggcccgattcgaacgttcaaagctgccaaaaccgaatagatcaatcgagtctcctctgtatagagctcacgagtgagcttgctggcttgccaactagcttagtttccgccggactcctcgcaacccgggggcttgtaggcgatgaagctaatcaactgcacctgcctgacgttgtcgaagccgatgatgcgaacaaatgcatctggatatgccttcttggcctcctcgagctccttgagcacctgggtggcatcagtgcatccgaacataagcagctttcacatggtccagtacctgccatcatagtaccccag

SEQ ID NO: 402819 - DNA, 594 bp, Oryza sativa nipponbare
  unsure (1)..(594): unsure at all n locations
ttgacagaaacaaaattaagctagataagcactgattccacgcacaatttacatgatcattacatcgtccatcacacaggcactcatgcatcgattacacataggagtattgattcgtgtgactagcttaatgaatttgattagccgatgatctggtccaggacgccgatgttcttgaggccgaggacgacgccgacgcccatgatgtggccgacggcgccgcaggccagcgtgtcggcgagcgtgaacccggcggggtcgccggtctgcaggccggagtcgcgcgcctccagcttcagccccgccgtcgacttcctgttcgccgacggcgccagcccgaacctccccgcgaacagcatcagcgtcgtcgtcgtcaccatgataacgttggtggctgagccgatgtagtcgcaccggatgccctgggacctcttcttgctcatcctcaacgatggcagcgttaccatggacctaggagaggagtaggtccggaggccatggaactgcggcacggatgtggcggctgagagctgggaagccatggctggagcctaccttttncttctccttgccggacgcgtgggtcgacccggg

SEQ ID NO: 402820 - DNA, 371 bp, Oryza sativa nipponbare
gacaccaaaatgtgatatggatatgattaagcaggtgcagcaaaacgtacattaattaaacaacaacaattaaccctcgggcacgcctgtgttttgttatctcgctcaacatatacgtacgtaatactttgcttgcatagcatagggacgacgacattatattcttaattgataaactcaagaacgcatggagatggatcgagagatttataaatatggagcttgcttgattgattagatgaggtcgtcctccttgtgggtctcgatgacgacgtcggacttggggtaggcgtggcaggtgaggacccagccggcggcaacctggtcgtcgtcgaggaagctctggtcggactggtcgatctcgccggaga

SEQ ID NO: 402821 - DNA, 515 bp, Oryza sativa nipponbare
gaagttcgattgagtatgatagacctttttactaggcaaaccacacgaatacacgattgattaatttcactgagaatagcacgggtacatcacatcacacaaattcatacgttgatacacgcatagtcgccgaagcgaccagctgcttaattaatcgataacacacgggtttaattcagcaataatcagcacacacacaaaccacactcatatgggtggtttttattgtggactaattaaggtaggtgactcgccggcggcgagtgttcggttgcttcgtgacttcacttgccgcacttgcagtcggtgcaggagcagctggtgccgcacttgcagccgccgttctcctcgccggcggcgacctcctcgaagtggctcttctcggcttcaactatgacgacgccatagctggtacctttcttcacgcactggctcttgtcagcacagtcgcagttgccgcacttgtccgacatggtcgaagatttaattagctaagtgagtgatgaagtaatccc

SEQ ID NO: 402822 - DNA, 568 bp, Oryza sativa nipponbare
acgtgataccatccattttttttattgtcgacgaatttatcagatatgctctagatacatatcttgtgtgtatatagccggagctttgttttcacatatcctcacccaacgataattgtagtactcttacaataaaaccggccggagagggagggaagagattattacatatgtgttaagagcagaggccattgagatggtacataaccaaactgtaaaataaaaatatatagcatattatatattgatatatcatcaacatagcccaaaacaaagctgcatactattattataggcagcaatccaccagcgcgatgcttgatcttagcttagttgccaccagactcctcgcaacctgggggcttgtaggcgatgaagctaatcaactgcacctgcctgacgttgtcgaagccgatgatacggacaaaggcatcggggtaggccttcttggcctcctcgagctccttgagcacctgggtggcatcggtgcagccgaacatgggcagcttccacatggtccaatacctgccatcgtagtacccgggagacctgtggttctcacggtaga

SEQ ID NO: 402823 - DNA, 517 bp, Oryza sativa nipponbare
gactaactaatatttttttttcttataaaagagtttacaacagtacaaccacgaagatcagcactaccattactgattttgttaacatagagtgatttatcatgtgtgccagacaaacaacagatacattcatacatagcataacttacagcacatgatacagactacggagaacggttaatcttaaaataaaaacaaaaaaacaaggaggcaaagcttattttgcctgggattcatctaaatgcagttgtgtgcagaaggagatcatgcctgtgcccttgttggtggatttgcatggaaagctgattgtctattttgacctcctaccagatttaatgaaagagaagtagacactgtctcttgattggactctcctatgctgagcttcgacatgccaacaagctcatcaacgttgattgggctctttgaatgaactggaacaggcttgacaatctcatgtgtttcttgcacaggaccatcttcatctttctgattttgccagaaaggaaccgagaat

SEQ ID NO: 402824 - DNA, 353 bp, Oryza sativa nipponbare
aacgggaaaccatccattttttttattggcgacaaatttataaaaaatgctctaaaaacatattttggggggatatagccggggctttgttttaaaatatcctcacccaacgataattggagtacttttacaaaaaaacccgccggggggggggggaagaaattattacatttgtgttaaaagcagaggccattgagatgggccataaccaaactggaaaaaaaaaatttttagcattttttattttggtttattatcaacatagcccaaaaaaaaggtgtatactattattataggcagccggacccttgggcggacccctggggggacccgtgggcggaccctggggtctc

SEQ ID NO: 402825 - DNA, 433 bp, Oryza sativa nipponbare
tttgggaaacgaataaaatcattattgcaaaaacatcatcttcttcttcatcttcttagtgtacacaacaccaactcgatcatcatctcgtcgcactaaacccatcttccccaacccaaagacaacgaactcgctggccacaaatccatccaaccacaattaaccactgctaagctacggtcccccacttcacttgccggggacgaagttggtggcgtacgcccaggcgttgttgttgacggggtcggcgaggtggtcggcgaggttctcgagggggcccttgccggtgacgatggcctggacgaagaagccgaacatggagaacatggcgaggcggccgttcttgatctccttcaccttgagctccgcgaacgcctcggggtcatcggcgaggccgagcgggtcgaaggcgccgccggggtagagcgggtcg

SEQ ID NO: 402826 - DNA, 471 bp, Oryza sativa nipponbare
acggtatacaagacttagtttttcttaagtacaacagatcttccattcctccatgatcctatcagcttctacacccaaaccacacaaatcaccatgcacgagccctcttcctccactgccaaatcaactggggcttgagtagccaagcatccatgtggtgatcagtagccgatgtcagcgtcgtcgacgacgaggttgccggtgatgagctcacggtaggcggcgacgggccagatgaaccccctcgggaggagcttgacggcgagctcgacgtcgatgatgatctccctcatggccggcttcttctcgccgctgatggcgatgaggtagctcctgccgacccagccgatccagccggcgatgtagaggaagagcaagcccggggtgatgaactcgccccagtgccgctggtcgccgctgacgatgaggtgcgggaggccgtccgcgccgcaaagcaggccgaacttgccg

SEQ ID NO: 402827 - DNA, 484 bp, Oryza sativa nipponbare
tttcccggtcagatgagtttctatctactttatgctggagtacatacgattgaaaatctctctgcagctgcagcgacaacagcacgagaattgcacgaaggaattgttctcaagaatcttaagatggtaaatacacacaagagagaggtacggtatacaagacttagtttttcttaagtacaacagatcttccattcctccatgatcctatcagcttctacacccaaaccacacaaatcaccatgcacgagccctcttcctccactgccaaatcaactggggcttgagtagccaagcatccatgtggtgatcagtagccgatgtcagcgtcgtcgacgacgaggttgccggtgatgagctcacggtaggcggcgacgggccagatgaaccccctcgggaggagcttgacggcgagctcgacgtcgatgatgatctccctcatggccggcttcttctcgccgctgatggcgatgaggtagctcct

SEQ ID NO: 402828 - DNA, 580 bp, Oryza sativa nipponbare
ttaactaagaccagtttgatttcgtgtttgatacaaaaattaagatggacggattcacaagagagcaccctctacttaagctttacattacaaggccaaccagcagctgcctgccggccgaccactgcgtgcgcacgcgcgcgcaataatcaaccaatcacacacagtacgcacgcacataaaaaccacccatagccttcacgtacgcccggacgcacgcaccggttcgtgccaagctcaagggtagatggttctcgggatgatgatgtcgccgatgttgttgtgccacgggtccgagaggtggctggccaggttctccagtgggccggtgcccgggtacgccgactgttggacgcagaaacccacaaaagccagcatggccaatcgcccgttcttgatctccttgagcttgtactcctcgaacttgacggggtccttggagaagccgagggggtcgaaggcgccgccggggtacttcttcttctcggggtccttctccatggtgcgctggtgctcggcgaaggcgatggcgacgaactcgatgaccaggatcgtcggcagcgtgccccatggcaccggg

SEQ ID NO: 402829 - DNA, 460 bp, Oryza sativa nipponbare
gatgaagagaacttcacttctaaaagagtatcaacttgttttttacatcggttacatcatagtacaggtacacaatcaacaaggcatgcagtgctccatccacaattacatcccaatacaccaccaccattcacagcctactccgatcccaaaaaagagaggtaagtcgcgtcgacgaacagtcttttcatcttcctccattggcagccattgctaacactccaacacctgaagaactcctcatttgggggtgaaggcctggaagatggtggcgtggccggggtcggcgagatgggcgaagaggttgtcgatggggccggtgccggtgtactctgcctggaaccaagctcccatgacggcgagcatggcgagccgcccgttcttgatctccttggtgcgcagctccttgatcttctccggcgagccggtgccccagccgagcgggtcaaaccacagacca

SEQ ID NO: 402830 - DNA, 482 bp, Oryza sativa nipponbare
ggatgaaaagtagagcttcattttattggcgaatcattcatgggaatcaaacaacacatggaaccaagagatagatcaagaactaaagtactccaaacaacatcaagatacagtagtactctcaagctcgcagccatggtcatggagaaacaagtgcaacaaccagctctagtgcacgcacttgaagtcggatgggcagatcttgccgcagttgttgaggatgaggctgaggtcgacggggaggtcgagcttgatgccgagcacgttggccttgacggcggtgcagaggcagacggcggcgtcgaggtcgacgaggccgtcgagcagcgagcagcagggctcgtacggcgccaccgcgccgaccttggccttgacgagccccagcacgttggcgcacacccgcagcttcaacgcgtcgcgcgggcacgacccggtgctcggcctcggcctcggtgccggcgggcagtcggtgccgcaggcgc

SEQ ID NO: 402831 - DNA, 423 bp, Oryza sativa nipponbare
agcaaattgatccatgcgaccatgcgtgcaaattagttggggcacaaatttacatgttacacccacaccctacacccatgcataataatacattgtatttacgtacgtacatacataccccttttgatcacacgcaccattgatcgtacaaagttgcgtacatacatacgtacacacatttacgcatacgcacgttcattcattcataattaaaaactcgtgattaattaaatacgtagttgatggcatttttaatggaacttgaggctggtgaggattttgttgtggacgggatcagcgaggtgatcaagcaggttttgcacggggccaaccccggtgaaaagcgcctggacggagaaacccaggaaggcgagcattgcgagcctgccatttttgatcttcttgagcttgagctcctttatt

SEQ ID NO: 402832 - DNA, 405 bp, Oryza sativa nipponbare
ttttttttttgggttttggtttttttttttttttttttttttttttttttttttttttttttttttttttgggggagccgataggggggggatttacaaataaagagtggcccaccctgccgggcaaattaaatttctccaaaaaaaaacttttttccaccggggggcgaaaaaaaaagtaacaagggattttggagattttaacaaacatttgggggtttaaaaaattaaacccatttttttttgcagaataagccaaagttttaatgccaccatggtaaaggaaacccccccgggcaaaaacaactttggtaatttctttttccaaacaagacttgggaattacttcaccaattttttgtgccacttaaactgttggcccttccgagtattccaagacctttg

SEQ ID NO: 402833 - DNA, 535 bp, Oryza sativa nipponbare
tttttaaattaactagatgaattcaaataagaagaagagctgtactgaatttttgttcaagggaagagaggattaggaacaggattaattaaggcataagtacaccacattccacgtcactaccactccactccactccaccaccctcaaaacacaccacgtacacacatgtacggatgcaatcttcaagctcaagctctcagtctgaccgcatgcggtttagctggttcaacgccggctgcaggatgttgtagagaacccaggcgatcgccggcgccaccacgaacagcagcagcaggccgcggttgtcgccgccctccgccgccgccgcctccgccgccagcctcgccaccttctgcgccgccgacgccttgggcgggaacgcgagcccggcacccgccgccgcgcccaggccgagcccggcgacgagcacctgctccgaccgcatgcggttcagctggttcagcgccggctggaggatgttgtagagcacccacgcgatggccggcgcgatcggcagcagcaacgccagccc

SEQ ID NO: 402834 - DNA, 388 bp, Oryza sativa nipponbare
ggggaccatgagatagctagaacactgctgctaccatgagatagtttatccccctgtagtactgtacatcagaaattcaccatttaacttacccctttacccatgcattcagatccatgcttgcaggaaacaattaccacaacacacacagtaagtttgaattttataacatccatttttttttttttcctccccccaattcattaacattttatacatgcatactccacaaaaaaaaaaagaagaaacaggaagggaactttttccatcgcccaatcattggtttcaccagcctgaacttataaagctccttgagatgccctggccctgatgaaatcgatcacacgcttagcctgacagcgtttggatgatggtgttgtgccacggg

SEQ ID NO: 402835 - DNA, 440 bp, Oryza sativa nipponbare
  unsure (1)..(440): unsure at all n locations
aaaancacaacaccatttttcattgatcaggttcaaaacctgcacaaaaatacacactaccggtacagatctcaccctttttccaatacttgtacatccatccacgcggtccacacgaatacgtacatttatacggtacacgtacgtacatttactgcaccgggtacacacacgcacacttttctgcagagacccgcattgtcgtcaacctagctagcttagctgaaggcgatgcgtccccatggcagcacggggggggcggcgcttacttgccggggaccaaattggtggcgtaggcccaggcgttttttttgacggggtcggcgaggtggtcggcgaggttctcgagggggcccttgccggtgaccatggcctggacaaagaagcccaacatggagaacatggcgaggcggccgttcttgatcttcttcaccttgagc

SEQ ID NO: 402836 - DNA, 490 bp, Oryza sativa nipponbare
gcgaatttacctttatatgcaactgtttacaccaaaaggggaaaaaaacgggtaccttgcaaaaaggagtataactttgcagtttcaagtcccacttcaactacaacccaatctgcattacaggatgggagtctaaaacgactgcagtttcagcgtttttgaggcctgcagagacactgggctcgcgttgcagcaaaagattaggcggcggcgcccacggtggcgccggcggtgagcctcgacgagccgtagagagtctcctcgaaccggatgatctcgttcttggaaccgtaggccacttgagtccgctcgtcgaggttgttgatcaccttgtccagcaccgactgtttgccgtcgctgctgtacccgccggctttctctatcaagaaacccaacggcgccacctcgaacaggagcctcagcttggccttggctgtcggagacgtcacgttggtgaagatgcccttctccttaactatgatctggttga

SEQ ID NO: 402837 - DNA, 489 bp, Oryza sativa nipponbare
gaaccaaaaaccatcaatcaaacgatcaaagaaccagatcacttatcttggagatgaatgtacaagataaatgataacatgactcgcacaagtacgattacaatagacgatcctaggtagtgggtacatctcccatttttcttttggtcctaccactaaccacaaacttagcatgacaaaagttggaccatgcatgccatgtataatacagcagccaccggacaaatgcataccaagagttcagaaggtgcataatattcagccatgaaacaaatccaacaacattctgataggacaccaacaatcccaaacagagtagcttacatgacaagggcttgtgaaaactgaaaagaaactgccttgtagataagcgattaaaaagccagagcttagaagcacttccggtgaacaattgctggacccgactcatcatactctccctttgagatccacatctgttggaaggtgctaagggaggcaaggatggac

SEQ ID NO: 402838 - DNA, 564 bp, Oryza sativa nipponbare
gaatcttttttgaaaagagattatctctgataatctgatttatagactcggcactttatgatgtgtttcaaaatttaaggatgttaggcaccgctcagcagcaagcggacctaaggcgcaacatgctacaacttttgcgttgcctcagtagaatagaataaaacaaaggagcaaatctgcaacagatttccagtgcaatccaacagcagcagatggcgttccgttcatgttacgttctcattctgcagtcttctgctgccctcacttgttcaaagtagggatgcgccatagcttcacgagcggtcagcctgtcatggtggtcgaagcgaataagtttatcaagaaaatcaatagcctctggagagacaagatgcctattttctggatttataaacttagaccaaggtttcctggtatgcctcccaatcagagcctcaagctggggatcaagtgcaatcctgtatttattcaggtaagcattaagctggtctgtacctagaaccttggctattttgacaagctggtcatggttatcgtggccatagaaagatggttccttgcgaa

SEQ ID NO: 402839 - DNA, 519 bp, Oryza sativa nipponbare
  unsure (1)..(519): unsure at all n locations
ttttataattaattcacaacaccatatttcattgatcaggttcagaacctgcacagaaatacacactaccggtacagatctcaccctctctccaatactcgtacatccatccacgcggtccacacgaatacgtacatctatacggtacacgtacgtacatctactgcaccgngtacacacacgcacactctcctgcagagacgcgcatcgtcgtcaacctagctagcttagctgaaggcgatgcgtcgccatggcagcacggcggcggcggcgctcacttgccggggacgaagttggtggcgtaggcccaggcgttgttgttgacggggtcggcgaggtggtcggcgaggttctcgagggggcccttgccggtgacgatggcctggacgaagaagccgaacatggagaacatggcgaggcggccgttcttgatctccttcaccttgagctccgcgaaggcctccgggtcgtcggcgaggccgagcgggtcgaagctgccgccggggtagagcgggtcga

SEQ ID NO: 402840 - DNA, 440 bp, Oryza sativa nipponbare
gggttggggcgaaaaagagctatatgtatgtgtaataatccaaaacaagcacgtagtacaaggagttgcagtacatgcatgtagaatctttagctctttttggtacacgtacccctcgaaaaggagcaaaacgttcgagacgaacacacaagaagaagaaagcttgctagcgtgaccgggccgatcaaccatggatgcatggtgattgatcgagaccttagctagctcatcttttattccagaatacagatatgatactactagtactggatacagaattcggctccacacatcgacccaggcagaatctactaggtggcaaccggcgcgctgctgtatatatatgatccgtctctgatcgatggctcagctcaccctggagcagtcgatggaagcgcttatggtgtaggggacgctgacgccgcacttggaggggatgc

SEQ ID NO: 402841 - DNA, 507 bp, Oryza sativa nipponbare
  unsure (1)..(507): unsure at all n locations
aaaacacaataagaaggatgatcacaagaagcacagccataggctagctaataaagatccccaaagatgaccacaggtagcagcagaggtgagcatcagttacactaagaaaatggctaaagataaaaacgagtacaaacacatacaagtgtggataggacattaggaattgctacgagcgtacaagcaaccacccagctccatacacacctgggggctgggcaaagctttcatcctctttctggccttgggatcaatcccctccagcatccatgacatcgacggtgaactcgtactcctgatcgcagcccagataagaatcggacatcaggtagatcatgtactcctttctcccagcttctgaagcagcggtgaactcaagcttcactcgagccctcttctgaagtgcaaccctcttgattgcaagcaactgattggtagagctatcaccaattaccagccaccagccttcttncttgggctttgggtacctgggggcatgaactg

SEQ ID NO: 402842 - DNA, 400 bp, Oryza sativa nipponbare
aaaaaatagggccgtccaaattgtttaaaaccggcggctttcagtagcagtttactggggtcccttaaaactaggccgaatgaccttttcaccaggttttttgtcagataaaaactgcttagttttttcagctgtcaagttttgaaagtggggttggccaatcttccggggtttgaaatgtttttttgccagttttttttgtttccgaagttttttttgttctttttgagaagtcatgttttgttcatgattggccggatcatgattccctttggacaatggttttttcctaaattcacttgccttgcttgttaagtaaaccatgaacctgtttttattcacatttttaattttgcccgttaatacatcaccttcatgtaactgcagagtttttagatca

SEQ ID NO: 402843 - DNA, 517 bp, Oryza sativa nipponbare
  unsure (1)..(517): unsure at all n locations
ttgccatccaactcaaacagtgttgttgattggtgagaaaatcttgcatgagaataatgacaagcaggatgaaaagctcagaggcgtgctagtcatccgaaaagaaaaattctgtgaggacaacaacaaacatgggagatcatgaacttggtttgtcggctttttctccttatttgtgaagatcattcatttgaagtaaaaccctgagaggctactcagatacggggcatgcactctcaaaatcttgctgctccttacgacagaagtcaaattcgttggtgtagtaatacatgcagccggcataggcgtccatctccttggggcacttctggtgaagttctttcaacaggtcgaagacgcagcgcttgacctggcggcccttctcgaggcacttctgcgggttggggtccttcttcttgcagttgaggaaggccacgttctccggcctgcaccgcacggcgatgtgcttcgacgccgncatcagcaccgacgaggtcgggatcggatcccccgatgc

SEQ ID NO: 402844 - DNA, 491 bp, Oryza sativa nipponbare
catcaaatagggagccactacattgggaaaacaagtaggggaaggcaggggatcaagctcaggaattacaacaactgaagattttttatgtttttagtaggtgatacagaccgggaaagccagaattgcatatctttaggagaagcttgttgcagaaactgcaactcaatcatgtccttggcttagtcggccgtccagctctgctccacaatctcgcggactttgcggttgtactcgcgcttgttctcgctgaacagtctggctgcttcggagtttgcaggggagtttgggtttggatcacagagcagggactggatagaggtcaatatcgcagcaacatcatatatagggctccattgattttgtaggatatccaagcagatacttccatctgcataaatatttgggtgaaacatccttgagacaaaccgaacaactggtggtttgttgggataatcttcttgtaaatggagtgtcagcttgaacgtgcc

SEQ ID NO: 402845 - DNA, 228 bp, Oryza sativa nipponbare
tttaatcagagtgacaccacggataagtacctagaccattagttgggaaacgaataaaatcattattgcaaaaacatcatcttcttcttcatcttcttagtgtacacaacaccaactcgatcatcatctcgtcgcactaaacccatcttccccaacccaaagacaacgaactcgctggccacaaatccatccaaccacaattaaccactgctaagctacgggtcccca

SEQ ID NO: 402846 - DNA, 498 bp, Oryza sativa nipponbare
ggaaccagacgaatacacgattgattaatttcactgagaatagcacgggtacatcacatcacacaaattcatacgttgatacacgcatagtcgccgaagcgaccagctgcttaattaatcgataacacacgggtttaattcagcaataatcagcacacacacaaaccacactcatatgggtggtttttattgtggactaattaaggtaggtgactcgccggcggcgagtgttcggttgcttcgtgacttcacttgccgcacttgcagtcggtgcaggagcagctggtgccgcacttgcagccgccgttctcctcgccggcggcgacctcctcgaagtggctcttctcggcttcaactatgacgacgccatagctggtacctttcttcacgcactggctcttgtcagcacagtcgcagttgccgcacttgtccgacatggtcgaagatttaattagctaagtgagtgatgaggtaatcccttgggttgcttatgctttc

SEQ ID NO: 402847 - DNA, 594 bp, Oryza sativa nipponbare
ttagttgggaaacgaataaaatcattattgcaaaaacatcatcttcttcttcatcttcttagtgtacacaacaccaactcgatcatcatctcgtcgcactaaacccatcttccccaacccaaagacaacgaactcgctggccacaaatccatccaaccacaattaaccactgctaagctacggtcccccacttcacttgccggggacgaagttggtggcgtacgcccaggcgttgttgttgacggggtcggcgaggtggtcggcgaggttctcgagggggcccttgccggtgacgatggcctggacgaagaagccgaacatggagaacatggcgaggcggccgttcttgatctccttcaccttgagctccgcgaacgcctcggggtcatcggcgaggccgagcgggtcgaaggcgccgccggggtagagcgggtcgacgacctcgccgagcggcccgccggcgatgcggtacccctcgacggcgcccatgagcaccacctgcaccgcccagatggcgaggatgctctgcgcgtggatcaggctcgggttgccgaggtagtcgagcccgccctcgctgaagatctgcgagcccgc

SEQ ID NO: 402848 - DNA, 558 bp, Oryza sativa nipponbare
tttttacacaatcaggtccattgtacttctttcatcaaccaaccagataacattgttttacacaatctgaacgaacgaagcaaatattcgggtacgcggaaagaggagaacgtcgcgcgtctcaccgcagcctgcatgaaagcaatggacctcaccgccgttgctcgccggagatccacactcacttgccggggacgaagttggtggcgtaggcccatgcgttgttgttgacggggtcggcgaggtggtcggccaggttctccagtggccccttgccggtgacgatggcctggacgaagaacccgaacatggagaacatggcgaggcggccgttcttgatctccttcaccttgagctcggcgaacgcctcggggtcgtcggcgaggccgagcgggtcgaagctgccgccggggtagagcgggtcgacgacctcgccgagcgggccgccggcgacgcggtacccctcgacggcgcccatgagcacgacctggcaaccccagatcgccaggatgctctgcgcgtggatcaagctggggttgccgaggtagtcgagccccc

SEQ ID NO: 402849 - DNA, 421 bp, Oryza sativa nipponbare
  unsure (1)..(421): unsure at all n locations
tagaactttaaaaccaagcaatcaaaaacattttcttcctcgaagatccaacaacaaagctctgcatcaagaaacattccattggttgacagaaacaaaattaagctagataagcactgattccacgcacaatttacatgatcattacatcgtccatcacacaggcactcatgcatcgattacacataggagtattgattcgtgtgactagcttaatgaatttgattagccgatgatctggtccaggacgccgatgttcttgaggccgaggacgacgccgacgcccatgatgtggccgacggcgccgcaggccagcgtgtcggcgagcgtgaacccggcggggtcgccggtctgcaggccggagtcgcgcgcctncagcttcagccccgccgtcgacttcctgttcgccgacggcgccagc

SEQ ID NO: 402850 - DNA, 503 bp, Oryza sativa nipponbare
tatgaataagaagctggcatatacttcggctagtagcattgcaacgcaaacagtatgacaaggtaccacgcattgtttaagagctaagacaaagacaaaactgatgcatccaacgtaccaaaaagaaagcgaacagcagcagtcagatagctatgagaagagaactaggagagggataactagaagggacagaatggcatccatgggtccatgacgtttagtcgacctcctccatcttgctctcgccggcgtcgtcctccagcggcggcatgtcggcgtcagcctcggcggactcgtcctcgtcgatgctcaggccgagcttgagcatgcggtggatcctggtgccgaaggtgttggggtcctccaagctgaaaccggaggtcagcagggcagtctcgaagagcagcatcaccaggtccttcacggacttgtcattcttgtccgcatcggcacgcttgcggagctcgtccatgatggcattctccgggttgatctccatgggc

SEQ ID NO: 402851 - DNA, 568 bp, Oryza sativa nipponbare
gcggccttccctgccctcggagccacggttggcggctcccgctgctgggtcccgtgcgccgccgtcgagagcctccgtccgcccgtccgctgccgccgccccgctcgccgcgcgcggcctgccgcaccacgcctccgtcgctgggcaaaacagtggaatttacactgttggtgattttatgactaaaagggaagaactccatgttgtgaagtcaacaacttcagtcgatgaagcccttgagatgctggtggagcataggataactggctttcctgttattgatgacgagtggaatttggttggcgttgtgtcagattatgatctcttagcactcgattcaatatcaggaaatggacttgcggaagtagacatatttcctgaggtggatagtacttggaagacgttcaatgagatacagaagctcttgagcaaaaccaatgggaaagtcattggtgatgttatgacgtctgcacctcttgtggtgcgtgaaactactaaccttgaagatgctgcaaggttactccttgaaactaaataccgcaggttacctgtagttgacagttcaggc

SEQ ID NO: 402852 - DNA, 390 bp, Oryza sativa nipponbare
ttaaaaggtactaaaaaggtaaactgtgcataataatattattaagacattatagctgatgtcttttgatcacactgcgatcaaattatgcatcataggcagtacaactccgcgtcaggaaaaagtagaggagatatatttcttgttattacttaatacagcattcacatatatcgaaccatccggtacgtacgtagtagtactccacgcgttcacatcgatgatcggggacgatatcctcaggtagtacttatgcaaaagcgttggcgtaaactgacgaactgaacggacggacggtcggatttagggctcccataagtccaagttgccggagacgaattcgtaatgtccgcctgcgagcttgagggtgcctgttgtcgatccccttct

SEQ ID NO: 402853 - DNA, 262 bp, Oryza sativa nipponbare
gcttggggttgtttccttaaaaccctttttgttgataagacttcgttttgttgggaccattttccaattcgttggggtcaaaacaccacccctgccaggattttaagcaaagggttttttttttaaactccccatgaataatgcgggtccaagctcttgctggggggaaggcttttttgccgccgttgcccccgggggatccagctgggttgaccttcaggccgttgaacctcacagtttttgacaggggcctgcactggcc

SEQ ID NO: 402854 - DNA, 346 bp, Oryza sativa nipponbare
gggcaaaacagaaatgcgaatttacctttatatgcaactgtttacaccaaaaggggaaaaaaacgggtaccttgcaaaaaggagtataactttgcagtttcaagtcccacttcaactacaacccaatctgcattacaggatgggagtctaaaacgactgcagtttcagcgtttttgaggcctgcagagacactgggctcgcgttgcagcaaaagattaggcggcggcgcccacggtggcgccggcggtgagcctcgacgagccgtagagagtctcctcgaaccggatgatctcgttcttggaaccgtaggccacttgagtccgctcgtcgaggttgttgatcacct

SEQ ID NO: 402855 - DNA, 525 bp, Oryza sativa nipponbare
ccatatatttcattcacagatgcctcacccaacaacatatagtcgtagcagataccactcttacatcaagtcagagagagatcaggtgaaacaaaaacaaaagcagagcacggccggtaaaatcaaaagacgatgaacaaactgggaacacacgaaacaaggtgggagacatcatcgaatcagagatgaacaattaaacaaggctatatatgacgatgacggcttagttgccaccagactcctcgcagcccgggggcttgtaggcgatgaagctgatgagctgcacctgcctgacgttgtcgaagccgatgatacggacgaatgcatcagggtacgccttcttggcctcctcgagctccttgagcacctgggtggcgtcagtgcacccgaacatgggcagcttccacatggtccagtacctgccatcgtagtatccgggggatctgtggttctcacggtagacgaatccgaccttgctgaactcgaggcagggcacccacttggaacggagcaggtactcgatct

SEQ ID NO: 402856 - DNA, 471 bp, Oryza sativa nipponbare
ccacgcgtccgcccagctcaaggacctcaaggcggagctctccctctttcgcgtcgccaaggtcaccggcggcgcgggcaacaagctctccaagatcaaggtggtgcgcacctcgatcgcgcgcgtgctgacggtgatctcgcagaagcagaaggcggcgctgagggaggcgtacaagaagaagagcctgctcccgctcgacctccgccccaagaagacccgcgccatccgcaggcgcctcaccaagcaccagctctctttgaagaccgagagggagaagaagcgtgagaagtttttcccatgaggaagtatgctgttaaagcttagttattaggaacataaatgtttacccggcaagtttgccagtgcctaaattgatgttttgtgtggacatcattgtcacttagtacaatgtatttgtctactgcatgaagtgcgtactattttgccttttaacgtggttatttggtt

SEQ ID NO: 402857 - DNA, 451 bp, Oryza sativa nipponbare
ccacgcgtccgggggaggcgtcctcctgctcgtcttcctcctcgtcgttgcacccggcgaagcggcaggcgacggcggagcgcggcgcggatctggaggcccgccgcggcgccgtccgcgcgtggggcaaccaggcgctggcggaggccgacccggacgtgcacgcgctgatggagctcgagcgcgaccgccaggtgcgcgggatcgagctgatcgcgtcggagaacttcgtctgccgcgcggtgctcgaggcgctcggcagccacctcaccaacaagtactctgagggccatcccggggctcggtactatggcgggaaccagcacatcgacggcatcgagcgcctctgccatgagcgcgccctcgccgccttcggtctcgaccccgcctgctggggggtcaacgtccaaccatacttctggacctctgcaaacctagctgtttacacaag

SEQ ID NO: 402858 - DNA, 410 bp, Oryza sativa nipponbare
ccacgcgtccggaaccaatccctggagaacctcaagacctacccgtttttcaaggaggggatcgccaacggcaccgtcaagctcgtcggcggccactacgacttcgtctccggcaacttggacttatgggagccctaaatccgaccgtccgtccgttcagttcgtcagtttacgccaacgcttttgcataagtactacctgaggatatcgtccccgatcatcgatgtgaacgcgtggagtactactacgtacgtaccggatggttcgatatatgtgaatgctgtattaagtaataacaagaaatatatctcctctactttttcctgacgcggagttgtactgcctatgatgcataatttgatcgcagtgtgatcaaaagacatcagctataatgtcttaataatattatt

SEQ ID NO: 402859 - DNA, 468 bp, Oryza sativa nipponbare
cgacccacgcgtccgtgcacagcgctatatccaccggcgagaggcggcggcgtttgcggcgttgtgcacagcctctcccgggagccgctccggggcttcatggcgccatggcctcctgcccacgagcgtatggcaaaggtgaatacatgtgagctgctcgttccctgtagaacacagtgcgttcaacagacacaactggctgaacggaagaagaattctgcactcccataaataaaactgacgcatacatggagcccatggcattgaacaagtcctggtgattggttctgcaagaagggagtatcctcaatgaattgggacaaatataatctcaagaacattggtccaaacaacagtgcaattacaatggtgtagaagtatttgacagcagtatatggagggtttctccagtaggacagactttgcttccataggcaagccaaacattgtgtgatgaaagtttgagag

SEQ ID NO: 402860 - DNA, 333 bp, Oryza sativa nipponbare
cgacccacgcgtccgcccacgcgtccgcaaatgttgtttcaggttcagagatgcgcggtttacaacacgatcctcgtggcgacgtacgagggggagcacaaccacggccagccgccgccgccgctgcagtcggcggcgcagaacagcgacggctccggcaagagcgccgggaagccaccccatgcgccggcggcggcgccgccggcgccggtggtgccgcaccgtcagcacgaaccggtcgtcgtcaacggcgagcagcaggccgcggcggcgtcggagatgatcaggcggaacctggccgagcagatggcgatgacgctgacgcgtgaccca

SEQ ID NO: 402861 - DNA, 463 bp, Oryza sativa nipponbare
ccacgcgtccgagaaagcataagcaacacaagggattaactcatcactttcttagctaattaaatcttcgaccatgtgggacaggtgcggcaactgcgactgtgctgacaagagccagtgcgtgaagaaaggtaccagctatggcgtcgtcatagttgaagccgagaagaggtaactaactaactcaatatcgatcaaccaaagcatatttctcgtctgaattttacagttttaatttcttcgtctttgctctcaaacacacacacgatactatcgatcctgacgttcgcatacgagacacgtacggcctaatgtattcgttcatgcttatatttatcagacaaaatttaaattttcaatcttaaatttaaaactgattttaagttttttattaaaaattatttttcaccctctacttttagttgctaaaaatatatatatgaattttatttataaattattt

SEQ ID NO: 402862 - DNA, 414 bp, Oryza sativa nipponbare
ccacgcgtccgctgacgcgtggcctgttcatatacctggaaggcctatttttccttcgtacccgcttccagctctgcggatggacgatgatgaaatctcttccaaagcaatcggaggttcaacaggagaaatccttgaatctaatgcccaagtactgagtcaaatttgaaccaacctgagtactatgcagatacaggataacatctgtctactgtgccaaactagacacaatatactcatggtctcgaacgagataaatgatgctgcacatgtcatgaagcagatgccaccggtacacgtgaagattaacgaggagctagtcaactcaatgctaggcacgccaactgtacctatacacaagtgaactagtgatagctaatgaacatatattctcagtagtctgaagagctcttt

SEQ ID NO: 402863 - DNA, 383 bp, Oryza sativa nipponbare
ccacgcgtccgaaagtgcaacaagtcattcaccagcaaagatatcttcttggatctcactgtcacttctggaacaagagaatatagtgaattgaagccagctagaactgagctgttcaggagcccactcgtctcatttctttatgaaagagggtggcgtcaaaatttcaatcgaagtggattccctggacttgacgaagagtttcaaatggctcaagattatttccaatcagttgctggtggtgtacttcttgatgtaagctgtggcagtggcttgttcacaagaaaatttgcaaaatctggatcgtactcagctgtgattgctttggacttctccgagaatatgctttgccagtgttatgaatttattcagcaagatgatac

SEQ ID NO: 402864 - DNA, 416 bp, Oryza sativa nipponbare
ccgggtcgacccacgcgtgcggagagcttggtgagctgcagagatggcctcctccgttatggcgtcgtcggccaccagcgtcggtggcttccaggggctcaagtccaccgccggcatgcccgtcgcccgccgatccggcaactccagcttcggcaacgtcagcaatggcggcaggatcaggtgcatgcacgtgtggccgattgagggcatcaagaagttcgagaccctctcctacctgccaccgctcaccagggaggacctcctgaagcagatcgagtacctgctccgttccaagtgggtgccctgcctcgagttcagcaaggtcggattcgtctaccgtgagaaccacagatcccccggatactacgatggcaggtactggaccatgtggaagctgcccatgttcgggtgcactg

SEQ ID NO: 402865 - DNA, 448 bp, Oryza sativa nipponbare
cgggtcgacccacgcgtccgcaacaaggtcgtacgagtgggggactgtttgctgattttgacggtggactcggacagccagccgtacgtggcgcgggtggagaagatggagctggacgggcgcgggagcgtgcgggtgcgggtgcggtggtactaccggcccgaggagtccaagggcgggaggaggcagttccatggcgccaaggagctcttcctctccgaccacttcgacatgcagagcgccaacaccatcgagggcaagggcgtcgtccacttcttcaagaactacaccaagcttgacaacgtcgggcccgaggacttcttctggcgattcgagtacaagggcgtcaccggcgcctttacccccgaacgcgttggcgtatactgcaagtgtgagatgccatacaacccggatgatctcatggtgcaatgcgatgactgcaaggact

SEQ ID NO: 402866 - DNA, 425 bp, Oryza sativa nipponbare
ccacgcgtccgagcgcgccatggtcggccggaccatcgttttcgcgctgcggaggggcaagaacctctggctccggctcgacgcccctccattcccctccttccagttcgggatggcaggtgcgatctacattaagggagttcctgtgaccaagtacaagagatcagttgtcagttctacagacgagtggccctccaagtactccaaattttttgttcaacttgatgatggcttaaagttttccttcactgataagaagcgggttgcaagaattccggtggttgaaaaatccgaaaccggaccccccaatttttgagtaaggaccagatgctttctttgagccgatgtcttttgacagttttgcggactcgctgagcagaaagaagattggaataaaagctcttttactcgatcagagctttata

SEQ ID NO: 402867 - DNA, 481 bp, Oryza sativa nipponbare
  unsure (1)..(481): unsure at all n locations
ccacgcgtccgcccacgcgtccgcccacgcgtccgcccacgcgtccggtctcgcgcctcgctgggcaagcccgtcaagggcctgggcttcggccgggagcgcgtgccgaggacggcgacgaccatcacatgccaggccgcgagcagcatcccggccgaccgcgtcccggacatgggcaagcgccagctgatgaacctcctcctgctcggcgccatctcgctccccaccgtcggcatgctcgtcccctacggcgccttcttcatccccgccgggtccgggaacgccggcggcgggcaggtcgccaaggacaagctcggcaacgacgtgctcgccgaggagtggctcaagacacacggncccaacgaccgcacccttacccaggggctcaagggtgacccgacgtacctcgtcgtggaggccgacaagacgctggccacgtacgggatcaacgccgtgtgcacacaccttgggtgcgtcgtgc

SEQ ID NO: 402868 - DNA, 273 bp, Oryza sativa nipponbare
ccacgcgtccgcgaagtctcagatcattaggagcaaaccaagtgcatcctaagaattggtaccccattcctctgatattctgccgtccttggggtaaacttccagaaaatgtaccttgtcatccaaagcttgcagattttgccaactgtatgaagaagaaggggcgtggtatgtcaattttcgtctcgattattgacggtgattatcatgaactggccgaggatgcaaagactgcttgtcgtcagctggacacttacattgagtacaaacgct

SEQ ID NO: 402869 - DNA, 344 bp, Oryza sativa nipponbare
ccacgcgtccgcttagcgaatccagcagcagaagcagcagcagcagctcagccgccgccgatggcgtccacgatcatggccccaacctcccgcgtcctcgccgccaagacccccttcctcggccatccccgcccctccaatgcccccgtccgcgacatcgccgccgccgccaccggccgcatcaccatgagcaaggagctgtggtacgggccggatagggtgaagtacctggggccattctcggcgcagacgccgtcgtacctgaggggcgagttcccgggcgactacgggtgggacacggcggggctctccgcggacccggaggcgttcgcgaggaacagggc

SEQ ID NO: 402870 - DNA, 472 bp, Oryza sativa nipponbare
ccacgcgtccggcaagcacatatgagggattggacagactgggctcatcagaaggtgatgcaagtcactcgtcgacttgccaaggagaaggaagagcttcattcacttaggaaagagaaggaagaagcggaccgcctccaagaagagaggcacaatctggaagagagcactcggaagaagcttttagagatggaatctgcgatttctagggcgaacacccagctggaaaaggcagaatcttctgctcgtagacgtgaagccgagaatgaacagctcaggatacagatggaagctgcaaagcggcatgcactagtgtctgcaacaaatattttggagctttcaaaggaaggatgagaacagtcataaaagggcttaacattgggaatctggaagagccctgttgcaagaggatcttgctgctcaaaggaacaagctatctcaggtccaccagcaacttcatcatgctaaagag

SEQ ID NO: 402871 - DNA, 266 bp, Oryza sativa nipponbare
ccacgcgtccgcccacgcgtccgcccacgcgtccggttctttctttttctttttttttttttgagtgtccgtgtggggctgcacgtaattgttctctcgcgctccgacctgccgttgttgcaagagtactactacaactatcggtctatcgttcggtgacggtgagacagggcacgtgaatgcaagatctacggctatacacacgtactcatgtaatatgatgcctagagcatatctgaatccgtcgacaatgaaattttggtttt

SEQ ID NO: 402872 - DNA, 378 bp, Oryza sativa nipponbare
ccacgcgtccgcccacgcgtccggactggtacacgccgggctccatggggaagcagtacttcctcggcctcgagaagtacctcgccggctccggcgagccggcctaccccggcggcccgctcttcaacccgctcggcttcgggaccaagagcgaggcggagatgaaggagctcaagctcaaggagatcaagaatggcaggctcgccatgctcgccttcctcggcttctccgtccaggcgctcttcaccggggttggccccgtgcagaacctgcttgatcacctcgctgatcccgtccacaacaacatcctcaccagcctcaagttccattagagatgccatcaactacgtatttaattaattacgaagttttaattat

SEQ ID NO: 402873 - DNA, 413 bp, Oryza sativa nipponbare
ccacgcgtccgcccgggtcgagatgccaccacggtcacaatccacgagcccgtcgctccggcaactccagcttcgggaacgtcagcaatggcggcaggatcaggtgcatgcaggtgtggccgattgagggcatcaagaagttcgagaccctctcctacctgccaccgctcaccgtggaggacctactgaagcagatcgagtacctgctccgttccaagtgggtgccctgcctcgagttcagcaaggtcggattcgtctaccgtgagaaccacagatcccccggatactacgatggcaggtactggaccatgtggaagctgcccatgttcgggtgcactgacgccaccccaggtgctcaaaggagctcgaggaggccaagaaggcgtaccctgatgcattcgtgcgtatcatcg

SEQ ID NO: 402874 - DNA, 481 bp, Oryza sativa nipponbare
ccacgcgtccgcccacgcgtccgcggacgcgtgggctgcttacccagcttattcctgatgacaatgaaggaaaggtgctacgtgttaaattgatcatgaaagaaggtgtaaagaacttcaacccagtttacctcttcgacgaaggatcaagcatcacctgggtcccttgtggaagaaaactcacatgttcttatcctggcatcaaatttgcctatggcccagacacttactttgggcatgaggtatcagtgctggagatggatggccaatttgacagactagatgagcttatctatgttgagagccatttaagcaacctctcaaccaaattttatggagaggtgacacagcaaatgctaaagcatgcagacttccccggcagcaacaatggaacaggtctcttccaaactatcgtaggactgaagattagagatctctatgagcagattattgctgagagggccggtgcacctactgaagc

SEQ ID NO: 402875 - DNA, 281 bp, Oryza sativa nipponbare
ccacgcgtccgcggacgcgtgggccactgctagcttgggatagaggaggaggagcttgagcttggagagagacaacagtggcggctcaggctcttctctctgggaggcagctgctggggaggccattgcaatcttcagtctccaggtcttcttcctccaggaaggcacccttcatggtcagggcagaagccactccccctgccaagcaaggtgctgacaggcaggctgggttcgcatccaagcaagccctgagctacctggatggcacgctttcgggagac

SEQ ID NO: 402876 - DNA, 396 bp, Oryza sativa nipponbare
ccacgcgtccgcgctcaccgtggaggacctcctgaagcagatcgagtacctgctccgttccaagtgggtgccctgcctcgagttcagcaaggtcggattcgtctaccgtgagaaccacagatcccccggatactacgatggcaggtactggaccatgtggaagctgcccatgttcgggtgcactgacgccacccaggtgctcaaggagctcgaggaggccaagaaggcgtaccctgatgcattcgtccgtatcatcggcttcgacaacgtcaggcaggtgcagctcatcagcttcatcgcctacaagcccccgggctgcgaggagtctggtggcaactaagccgtcatcgtcatatatagccttgtttaattgttcatctctgattcgatgatgtc

SEQ ID NO: 402877 - DNA, 510 bp, Oryza sativa nipponbare
accgcccctgtagttcccgggtcgacccacgcgtccggaaagcagaggccagggaagagccaggtagagccgattagggtccacgactgacatggccgccacggcgtgctccacggcgcctcttctcggtggagctcgcctccccgccgtcggcgccatcttgccgccgacgttcgttctcctcctcccccagcgcaacttcccctctcctctccgtctccatgacgcaccgaggctatctctgctccgggcgagggcgtcgtccgacgacacctcgtcctccgccgcgaccggcgacgagctcatcgaagacctgaaagctaagtgggacgccgttgagaacaagtccaccgtccttacgtacgccggcggggccatcatcgccctttggctgtcgtccgtcatcgtcggcgccgtcaactgcgtgcctctgcttcccaagttcatggagctcgtcgggctcgggtacacaggctggtttgtgtaccgctaccttctcttcaaggaaag

SEQ ID NO: 402878 - DNA, 368 bp, Oryza sativa nipponbare
ccacgcgtccgagaaagaacagattgatgttgccgtcgcaacaaagtttgctgcacttccatggagatttggccgaggaagtgttctttccgcactgaagaaatcgcttgaccgtcttgggttatcttcagttgagctctaccaacttcattggccagggctatggggaaatgaagggtatcttgatggacttgcagatgcctatgagcaaggccttgtaaaggctgttggagtctcaaactacaatgagaaacgccttcgggatgcatatgcgcggatgaagaaaagaggagttccacttgctgcaaaccaagtgaactacaggctaatatacaagactcctgaattgaatggtgtgagaacgcagc

SEQ ID NO: 402879 - DNA, 252 bp, Oryza sativa nipponbare
ccacgcgtccgcccacgcgtccggaggatatcgtccccgatcatcgatgtgaacgcgtggagtactactacgtacgtaccggatggttcgatatatgtgaatgctgtattaagtaataacaagaaatatatctcctctactttttcctgacgcggagttgtactgcctatgatgcataatttgatcgcagtgtgatcaaaagacatcagctataatgtcttaataatattattatgaagagtttaccttttt

SEQ ID NO: 402880 - DNA, 480 bp, Oryza sativa nipponbare
ccacgcgtccgctcttttaactggtgacctccaggtgactctcaaagtttgtgtagggacgattggagagcttatgttcactgacaattcaagctggataagaagcaggaaatttagacttggtttgcgagtctcttcaggattttgtgaaggtgtccgtgttaaggaggcgaaaacggaggcttttactgttaaagatcacagaggagaattgtacaagaaacactaccctcctgccctaaaggatgatgtttggagattggagaagattggaaaggatggtgcatttcacaagaagctaaactcaaatggaatatacacagttgaacattttcttcaacttcttggtagagatcaacagaagctaagaactattcttggcagtaacatgtcaaataagatgtgggaaagtcttgttgagcatgccaagacatgtgttttgagtggcaaacactatatatattactcaagcgatgcaag

SEQ ID NO: 402881 - DNA, 378 bp, Oryza sativa nipponbare
ccacgcgtccggccatgttctccatgttcggcttcttcgtccaggccatcgtcaccggcaagggccccatcgagagacctcttcgaccacgtcgccgaccccgtcgccaacaacgcctgggcatacgccaccaacttcgtccccggcaagtgagcacaacgacacgatcgagatggtgccaaccaacgtaccatgtgtacacttgtagtagccacgcaccgaccctgcagttgcagttgcagcagtgcatgtatgtatgtaccttaattgggggggggtgggtgatcgatcgaagagatttctagcttaattaatttctgtctgtcatcatctttgcttctttggatcgagatttaatgtaagccgcaagccgcatcc

SEQ ID NO: 402882 - DNA, 288 bp, Oryza sativa nipponbare
ccacgcgtccgaccacgcgtgcgaccgatgcgcttactccactatttaatccggtgaagctaagccatggcatgcgtgaccggcggcaccccggtcacagccctcccatcatccacggcgctaaagacgaccttactagggcaatcctccacccggctggcccgagcaccgactacgaggcggaatgctcgggcggaggccacgggagagtgaatcccgggactagctgctcctacatacattaacagtacgttgcgagacgataacaggttccaccacactggtctg

SEQ ID NO: 402883 - DNA, 415 bp, Oryza sativa nipponbare
ccacgcgtccgcccacgcgtccgcccacgcgtccgcccacgcgtccggtctgatgactcctattataagaaatgcagatcaaaagactatatcagcaatatcctcagaggttaagcagttggctgaaaaggcacgtgctgggaagcttgctcctaatgaatttcagggagggactttcagcatctcaaatttgggaatgtacccagtcgaccacttctgtgcaatcatcaatcctcctcagtctggaattcttgctgttgggcgtggtaataagattatcgagcctgtggtggacagtgatggaaccgagaaggctacagtggttacaaaaatgagcttgacattgtccgctgaccatcgtgtatttgatggtcaagtaggaggcaagtttttcacagagttgtcacagaatttt

SEQ ID NO: 402884 - DNA, 437 bp, Oryza sativa nipponbare
ccacgcgtccgattgagaacaaaatagccctccgcttcaatagtgtattttggccaaatgtagaagtgctaggcagggttgccgcaacatcaaatgcctgcggttactttcttaaccttcacaaagccacagggcatccggttcttgtatgcatggtagcaggaagattcgcatatgaattcgagaagctatccgatgaagaatccgtaaactttgtcatgtctcagctcaagaaaatgctaccaggagctactgaaccggtccagtatttggtttcaaggtggggaaccgacccgaattcgcttggttcttattcctgcgaccttgttgggaagccagctgacttgattgaaagattctgtgctccggtgggcaacctgtttttcgctggggaggccgcctgcatcgatcactctgggtccgtgcatggagcttat

SEQ ID NO: 402885 - DNA, 453 bp, Oryza sativa nipponbare
ccacgcgtccgaaaattcgttgattcagcatctggcaaaactttcccaactctggaccctcgtaccggggagctgattgcccatgtggctgaaggcgatgcggaggatattaaccgtgcggttcatgcggcccgcaaggctttcgatgaagggccatggccaaagatgactgcctatgagagatcccggattctgttgcggtttgctgacttgattgagaagcacaacgatgaaattgctgcattggagacatgggacaacggcaagccgtatgcgcaagctgccaacattgaagtgccaatggtggcacggctgatgcggtactatgctggttgggctgacaagatccatgggcttgtcgtgccggctgacggcccacaccatgtacaggtgctgcacgagcccattggtgtcgcaggtcagatcatcccatggaactttccgcttctgatg

SEQ ID NO: 402886 - DNA, 450 bp, Oryza sativa nipponbare
ccacgcgtccgctcttttaactgatgacctgcatcttactctaaaattgttgtacggacgattgcagagcttgaggcgactgacaattcaagctggataagaacccaacaactcatactcgtactccaagtattttcacgattttgagagagcgcacgactcaggaggcaaaaaccgacgctcttactgttaaagatcacagaggagaatcgcacaagaaacactaccctactgccctaaaggatgatgtttgtagatcggagaagattggaaaggatggtgcatttcacaagaagcttaactcaattggaatatacacagttgaacattttcttcaatcttctggtaaaaatcaacaagagctaagaactattcttggcaataacatgtcgaataacatttttgaaagtcttggttaacatgcgcagacatgtttcttgagtggcctac

SEQ ID NO: 402887 - DNA, 440 bp, Oryza sativa nipponbare
ccacgcgtccgcggacgcgtgggcggacgcgtgggcggactcgtgggttacaactcagcgcgcctatggactccaccattctagggttcctggatataagaaaaccttctctcctcccgaactccttcacgccgccgccggcgccgccacctcgccgatgctccgaccggtcgaagatggcggttccattgctgacgaagaagatcgtgaagaagcgggtgaagcagttcaagaggccgcacagcgaccgctacattggcctcaagacaagctggcgcaaaccaaagggtattgactcacgtgtcaggaggaagttcaagggatgcacattgatgcccaatattggatatggttcggacaagaagaccaggcattacctgcccaacaagttcaagaagtttggggtgcacaacgtctcagagctggagctgcttatgatg

SEQ ID NO: 402888 - DNA, 410 bp, Oryza sativa nipponbare
ccacgcgtccggaaaagatctacacaaacagtgtggcgcacattatgttcgatgagaccactcgcaagtaccttgggtcaatcaagaggcttatgaccctttgccagcgacgttatcctgctctgccctcaaaatcggtggagttcaacagcctggcaaatgggagtgacctgcaggcccttttgtcagaggagaaagatccaggaaaccctcctagcgaggataggcttcgactcatgccagcgtcaaaagagtgatgcttcaacgcacaagcttggatcacaaatagaataattgtaatctgtggaatgtgtaaaccaaattttcctgctcttatttccatttttggactcttgcaagactctgagaatattgcctgctaattaaattactgaagaaagcaatatact

SEQ ID NO: 402889 - DNA, 368 bp, Oryza sativa nipponbare
ccacgcgtccgcggacgcgtgggcggacgcgtgggcggacgcgtgggcggacgcgtgggcaacagctacaaacgccgacatcacacgcagaaatccgcatcaacagccagccatggcgtccacgctgaccaacgtcggcctgtctaccccggcggcggcggcgtcgtccctcgttaggccggtcgccggagctggacgcgtggtgtttccccgtgttggccgcggcgggttcgcggcggtgagggcgagcgggccggcgacgccgccggacatctcggacaagatgtcggagagcatcgacaagggcaaaggaggcgtgcgcggaggacacggcgagcggcgagtgcgcggcggcgtgggacgaggtg

SEQ ID NO: 402890 - DNA, 374 bp, Oryza sativa nipponbare
ccacgcgtccgcccacgcgtccgcccacgcgtccgcttctccgagggggggctcgactacctggggaaccccaacctggtgcacgcgcagagcatcctcgccatctgggcggtccaggtggtgctcatgggattcgtcgagggctaccgcgtcggcggcggcccgctcggcgagggcctcgacaaggtgtacccaggcggcgccttcgacccgctcggcctcgccgacgaccctgacaccttcgccgagctcaaggtgaaggagctcaagaacggccgcctcgccatgttctccatgttcggcttcttcggtcaaggccatcgtcaccggcaagggccccatcgagaacctcttcgaccacgtcggcgaccccg

SEQ ID NO: 402891 - DNA, 394 bp, Oryza sativa nipponbare
ccacgcgtccggtggtgagaagaacatccttgtctttgaccttggtggtgggacattcgatgtcagtatcttgacgattgacaacggtgtgtttgaggtgttggccaccaatggtgacactcatcttggaggtgaggactttgaccagagaatcatggagtacttcatcaagttgatcaagaagaagtacagcaaggacatcagcaaggacaaccgtgctcttggaaagctgaggagggaagctgagcgtgccaagagggccctcagcaaccagcaccaggtccgtgttgagattgagtccctctttgacgggaccgatttctcggagccgctgacccgtgccagatttgaggagttgaacaatgatctgtttcgcaagaacatgggacctgtc

SEQ ID NO: 402892 - DNA, 491 bp, Oryza sativa nipponbare
ccacgcgtccggaaaaaatggcgataggatggcataggtcacagagcctggcgtctgcagggctcgggctgcacgtgctcctctgctcgtcgttgctgctcaacgccgtcttcatcgcgcaccaattcctcggggcctcaccgccggcaacgccggagcggctcggcgacgggctgagctgggcactgcaggcggccaaggaggccgaggacgtggccgccgtcgactgctccggccacgggagcgtgttcctggatggcgtcaccggcgaggacgggcggcccgggtgccagtgcaacagctgcttctccggtccggactgcttcggccgaattcccaactgcgccggcgacggtcaagggggggacccgttgttcctggagccgtattggaagcgccacgccgcggccagcgccgtggtgttctccgggtggcatcgcttgagctacatcaccaccgatggccacttaaagtgcgttgagctcgatcgc

SEQ ID NO: 402893 - DNA, 462 bp, Oryza sativa nipponbare
ccacgcgtccgagcaattcttgagctcaatcagcaacaacatctatcttcttcttgcttagttaagtccttcgcccgtgccaagaagaagaagatgtcttgctgcggcggcaactgcggctgcggcagcggctgccagtgcggcggcggctgcggcggatgcaagatgttccctgatgtggaggccacagccaccaccaagaccttcgtcctcgctgctccatccaacaaggcgagctctggaggaatggagatggcggtggagagcggcgagaacggcggctgcggctgcaacacctgcaagtgtggcaccagctgcagcggctgctcctgctgctcctgcaactgaatctatcgtcgtcgtcgcccggctgcatgaggatttatcgtatggatgctgctactgtcgatcagagctttgatcgaggccttaatttgcttgcattagtacccagcttatatg

SEQ ID NO: 402894 - DNA, 356 bp, Oryza sativa nipponbare
ccacgcgtccgggtgaaaggagtaaacaagcaaggcaaagaggttatgtatgactttgaggacaagatcaatgctgctgtctggccaggtctgcaaggtggaccacataatcataccattactggcttagctgttgcgcttaagcaggcaactactccggagtacagagcttatcaagagcaagttatgagtaactgtgcaaaatttgcacagagcttgacagcaaaaggctacgaacttgtctctggtgggactgacaaccatttagtgttggtaaatctcaagagcaagggcatagatggttcaagagtgggaaaggttttagaaaacgtgcacattgcagcaaacaagaacac

SEQ ID NO: 402895 - DNA, 408 bp, Oryza sativa nipponbare
ccacgcgtccgatcaggtagaacagtgagagtgaggtgcagaaaaatttgagctgaagctgaggatggcaacatccatgatcacctcgccgctggtggcgccggcccgggccaagggccttccgtccatctcccgccggggatcctccttcgccatcgtctgcagcggtgggaagaagatcaagaccgacaagccctacgggattggaggtggcatgtcagtcgatattgatgcatctggcaggaagagcacggggaagggtgtgtaccaattcgttgacaagtacggcgcaaacgtcgacggctacagcccaatctactcgccggaggaatggtctcccaccggtgacacctacgttggtggaaccaccgggcttctgatcttggccgtgacccttgccgggcttct

SEQ ID NO: 402896 - DNA, 480 bp, Oryza sativa nipponbare
ccacgcgtccgcccacgcgtccgcccacgcgtccgcgaccttgacgatcccgaggtcatgggccctgaggtccgggaacgcgtgctggagggtgagaagcttcctgttgtcacggccaagatcaccatggtagatcttccccttggtgccactgaggatagagtctgtggcaccattgatattgagaaggcgctcaccgatggtgtcaaggcgttcgagcctggtttgcttgccaaggccaacagggggattctttatgtggatgaggtcaatttgttggatgaccatctagtagatgtgcttctggattctgctgcgtcaggatggaacaccgtggagagagagggtatctccatctcccaccctgctcggatcatcctcattgggtctggtaaccccgaggaaggggagctccggccacagctgcttgaccggtttggcatgcacgcgcaggttggtactgtcagggatgctgaactc

SEQ ID NO: 402897 - DNA, 479 bp, Oryza sativa nipponbare
  unsure (1)..(479): unsure at all n locations
ccacgcgtccggcgaggtagacatggccgccgccaccatggccctctcgtccccggcgctggccggcaaggccgccgcgaaggtgttcggcgaggggcgcatcaccatgcgcaagtcggcggcgaagcccaagcccgccgcgtcggggagcccgtggtacggcgccgaccgcgtgctctacctcggcccgctctccggcgagccgccgagctacctgaccggggagtttcccggcgactacgggtgggacaccgcggggctctccgccgacccggagacgttcgccaagaaccgggagctggaggtgatccactccaggtgggcgatgctcggcgcgctgggctgcgtgttcccggagctcctcgcccgcaacggcgtcaagttcggcgaggcggggtggttcaaggcggngtcgcagatcttcagcgagggcgggctcgactacctcggcaacccgagcctgatccacgcgcagagca

SEQ ID NO: 402898 - DNA, 341 bp, Oryza sativa nipponbare
ccacgcgtccgcgagattcagagtaagacgtacatggaggtgaagggaaccggcacggcgaaccagtgcccgacggtggagggcggcgtcgactccttcgccttcaaggccggcaagtacaacatgaagaagttctgcctggagccgacgtccttcaccgttaaggcggagggcgtggccaagaacgcgccacccgagttccagaagaccaagctcatgacccgcctgacctacaccctcgacgagatcgagggcccgctcgaggtcagctccgacggaaccatcaagttcgaggagaaagacggaatcgactaccccgccgtcaccctgcaacttcccgg

SEQ ID NO: 402899 - DNA, 382 bp, Oryza sativa nipponbare
ccacgcgtccgcatcgacccgctgctcgaatgcctcaaggaatggaatggcgcgccactgccactctgctgaacagaaatggaatactaaaaaaaatgcaaaacaagaagacgtatagcaacacaaaactgaaagatagagagcatttcgagagtgtgaatgttttctactatgtctagatgaacatggtgatgatactattttacggttctttgtagttaacttgatgttactgttgctgtttcagcttctgcggttgccataacctgcagttccgcatggcctggcacgcagctttctgaaacttttggtgctgtaaatttgtataagttgggggactaaagtaaattattttgttttacagctgctgctcgttctctga

SEQ ID NO: 402900 - DNA, 345 bp, Oryza sativa nipponbare
ccacgcgtccgggaaggcggaggaacggtgcacaccgtcatcactaagtttgcattgaccaacatacgtatcaggaaaagcgtcgcctgctaacgcatcctgtgaggagaacgcgtacatggcatagcttgcctacccggctgagcgttacataggaaatgcgtcaattcatggatatggcggcaaacaccactgatgtgctcgagctcaccgttcaggagcggaacctgctttctcgggcttacaagaacatgacttgtgctcggatggcattgtggaggatcatatcttctattgagcaaaaggaggacagccctaggcatgcagcatctgttgcatcaatta

SEQ ID NO: 402901 - DNA, 390 bp, Oryza sativa nipponbare
ccacgcgtccgcccacgcgtccgccacgcgtccgagaaggagagagcttggtgagctgcagagatggccccctccgtgatggcgtcgtcggccaccaccgtcgctcccttccaggggctcaagtccaccgccggcatgcccgtcgcccgccgctccggcaactccagcttcggcaacgtcagcaatggcggcaggatcaggtgcatgcaggtgtggccgattgagggcatcaagaagttcgagaccctctcctacctgccaccgctcaccgtggaggacctcctgaagcagatcgagtacctgctccgttccaagtgggtgccctgcctcgagttcagcaaggtcggattcgtctaccgtgagaaccacagatcccccggatactacgat

SEQ ID NO: 402902 - DNA, 336 bp, Oryza sativa nipponbare
ccacgcgtccgctcaagaagtactcgagcaaagaaggagagagcttggtgagctgcagagatggccccctccgtgatggcgtcgtcggccaccaccgtcgctcccttccaggggctcaagtccaccgccggcatgcccgtcgcccgccgctccggcaactccagcttcggcaacgtcagcaatggcgggaggatcaggtgcatgcaggtgtggccgattgagggcatcaagaagttcgagaccctctcctacctgccaccgctcaccgtggaggacctcctgaagcagatcgagtacctgctccgttccaagtgggtgccctgcctcgagttcagc

SEQ ID NO: 402903 - DNA, 314 bp, Oryza sativa nipponbare
ccacgcgtccgcgaatccagcagcagaagcagcagcagcattttaacctccggcgatggggtccacgaggagggggccaaccttccgggttcttggcggcaagaccccctttcttgggcattcccggcccttcaatggccccggtcgggacattggcggcggcggcaccgggcggattaacatgagcaaggggctggggtaccggccggattgggtgaagtacctgggggcattcttggggcaaaccccggcgtacctgaggggggaggttccgggcgaattccggtgggacacgggggggcttttcgcggacc

SEQ ID NO: 402904 - DNA, 463 bp, Oryza sativa nipponbare
ccacgcgtccgcggacgcgtgggctcgagcaaagaaggagagagcttggtgagctgcagagatggccccgtccgtgatggcgtcgtcggccaccaccgtcgctcccttccaggggctcaagtccaccgccggcatgcccgtcgcccgccgctccggcaactccagcttcggcaacgtcagcaatggcggcaggatcaggtgcatgcaggtgtggccgattgagggcatcaagaagttcgagacccttttcctacctgccaccgctcaccgtggaggacctcctgaagcagatcgagtacctgctccgttccaagtgggtgccctgcctcgagttcagcaaggtcggattcgtctaccgtgagaaccacagatcccccggatactacgatggcaggtactggaccatgtggaagctgcccatgttcgggtgcactgacgccacccaggtgctcaaggagctcga

SEQ ID NO: 402905 - DNA, 428 bp, Oryza sativa nipponbare
ccacgcgtccgccagataacagatgctgtcgctgtcaaccaaatatggaaagccacacttggtgcccctgactctgaccaccactgattgtggatggattattgccacttctctgacacttctgacgcggactggctcatatgttacctatcaaaggatgtaactattggcaaaagaatccgttatgaggcgatgataataatggataaacttctatggaccatgcatccgcctaggaaattcatacctgatttttacatctattaatgcttgactatccttatacgaacgcttaccaggctaacaaagatggcttatcggattacttactagctttgagaaaaagtcctgtacttaccctagcgcatgaatttgcatgcattaagaattacaaatgccatactaactataggcgagaaattggtgct

SEQ ID NO: 402906 - DNA, 433 bp, Oryza sativa nipponbare
  unsure (1)..(433): unsure at all n locations
ccacgcgtccgcccacgcgtccgccccacgcgtccgcccacgcgtccggccgccgccgcagatagtacaccggctagctatccatctatctactcagctttgcgtcctcccgcgaattcaccgcagcaatggcgtccctcgtcgccgtccagcctgtcgccgtgaagggcctcgccggcagctccatctccggcaggaagctcgccgtcaggccgtcgccccgggcgctctgccgcaccacccgcaggccgcgcgccgccgtggtggccaagtacggcgagaagagcgtctacttcgacctcgaggacatcggcaacaccaccgggcagtgggacctgtacggctccgacgcgccgtcgccgtacaaccctctccagagcaagttcttcgagacgttcgcggngcccttcaccaagagggggctcctgctcaa

SEQ ID NO: 402907 - DNA, 348 bp, Oryza sativa nipponbare
  unsure (1)..(348): unsure at all n locations
ccacgcgtccgtgatcacctacgccgacaccgacgtcgtcgtcgtcggtgccggctccgcggggctctcctgcgcgtacgagctctccaaggacccctccgtcagcgtcgccgtcatcgagcagtcggtgtccccccggcggcggcgcgtggctcggcgggcagctgttctccgccctggtggtgcgcaagccggcgcacctgttcctcgacgagctcggcgtcgcgtacgacgagcaggaagactacgtcgtcatcaagcacgccgcgctcttcacctncaccgtcatgagccgcctnctggcgcgccccaacgtgaagctgttcaacgccgtcgccgtcgaggacc

SEQ ID NO: 402908 - DNA, 467 bp, Oryza sativa nipponbare
ccacgcgtccgcgccaccgtgatcgggtacaagaaccagagggccaccgtcgacgcgtgcaccggcgtcggctacctcggcgtggcgtggtcgttcggtgccaccatattcgtcctcgtctactgcaccggcggcgtctccggcgggcacatcaacccggcggtgacgctgggcctcttcttcgggcggaagctgtcgctcgtccgcaccgtgctgtacgtcgtggcgcagtgcctcggcgccatcgccggcgccggcatcgtcaaggggatcatgaagcgcccctacgacgcgctcggcggcggcgccaacaccgtcagcgacggctacttcggcgccggcgcccttgggggcgagatcgtcggcacgttcattcttgtctacaccgtcttcttcggcaccgaccccaagcgcaccggccgggacttcttcattcccgtactcgtgccgctgtccatcgggttcgc

SEQ ID NO: 402909 - DNA, 425 bp, Oryza sativa nipponbare
ccacgcgtccgcccacgcgtccgcggcgactccggtggccgtatcaccatgcgccgcaccgtcaagagcgcgcccgagagcatctggtatggacctgaccgtcccaagtacctgggcccgttctcggagcagacgccatcgtacctgaccggagagttcccgggagactacgggtgggacacggcggggctatcggccgacccggagacgttcgcgaggaacagggagctggaggtgatccactcgcggtgggcgatgctgggggcgctgggctgcgtcttcccggagatcctgtccaagaacggggtgaagttcggggaggcggtgtggttcaaggccggcgcgcagatcttcttcgagggggggctcgactacctggggaaccccaacctggtgcacgcgcagagcattctcgccatctgggc

SEQ ID NO: 402910 - DNA, 384 bp, Oryza sativa nipponbare
ccacgcgtacgctgacgcgtgggcggacgcgtgggcggacgcgtgggcgcccacatcacacgcagaaatccgcatgaacagccatccatggcgtgcacgctgaccaacgtaatgctgtctaccacgacgggagcggcctcacccctatgtaggactaccgccggaaccacacccgtgttgtttacccgtgttgcccccacctgaataactgctgtaacggcaaactggccaacgacaccgacgcacattacagaccactaaccgagtacgtatcccaatgccaactgagcgacatgctagaggacactacacagccgtctgtacccaggtgtcttggaccagggggatgagccaaacccaggtggcagtccaccgcgccacaag

SEQ ID NO: 402911 - DNA, 397 bp, Oryza sativa nipponbare
ccacgcgtccgcccacgcgtccgcccacgcgtccgaaagaagaagaagatagaaagaagaagaagaagatgcagaccggtgctagcagtgtcgttggattgtcggccgtgttgcccgctgctgtgaaggggcgcagcctgcagattcaggctcctcgccgtgttgcgttgcgcgttcgtgcggcggcggcggcggtggcagtggaggctgcggaggtggactacagctctaacatctcggtgtttccgatggaggcgtgcgacctcatcggcggcgaggcgtgcaacgtgcagatgtacccagaggccaagctctcatcatcggctgctggtggctgtttctcgtgcggcggcagatgaagtccacagggactacctatcctacgacgagcccacca

SEQ ID NO: 402912 - DNA, 474 bp, Oryza sativa nipponbare
ccacgcgtccgcccacgcgtccggtgaaaagggtacctttgtttgagaatatggacgaaagattgctggatgcagtgatgtgagaggttaacgcctacactatacactgaaaatgaatacattttgagagaaggcgatcctgtggatgagatgcatttcatcctccatggctgcttggagagtgagaccaccgatgggggccgaagtggattctttaacaaggtccagttaaaggagggcgctttctgcggtgatgagctgctcacatgggcattggatcctaaatctgctgctaacttcccagcttcaactaggacagtgaaagctcttactgaggttgaggcatttgcgttgtgtgctgaggagctgaaatttgtggccagtcagttcaggaggctccacagtaggcaagttcagcacacgttccggttctattcccagcactggaggacatgggcggcctgtttcattcaa

SEQ ID NO: 402913 - DNA, 482 bp, Oryza sativa nipponbare
ccacgcgtccgagctaattaagcaaaagaagaagaagaagaaagaagatgaagaagatgcagaccgctgctagcagtgtcgttggattgtcggccgtgttgcccgctgctgtgaaggggcgcagcctgcagattcaggctcctcgccgtgttgcgttgcgcgttcgtgcggcggcggcggcggtggcagtggaggctgcggaggtggactacagctctaacatctcggtgtttccgatggaggcgtgcgacctcatcggcggcgaggcgtgcaacgtgcagatgtacccagaggccaagctctcatcatcggctgctgttgctgtttctcgtgcggcggcggaggaagtcgacagggactacctatcctacgacgagcccaccacggtgttccccgaggaggcgtgcgacgatctgggcggagagttctgcaaggccacctgatcccattcccatccatggagaattggagtcttctatcat

SEQ ID NO: 402914 - DNA, 491 bp, Oryza sativa nipponbare
ccacgcgtccggcagtactgatagaaggccacgacacctaaggacgtggtgcccggttacacgctgcatgctcgagcgggaggagctatcgcgagcctgaccagccctatcacaagtggagaagaagatacggaagcatgagggaaatgggagagaagaggaggcgtggacaccttaaccctgctggttttgcaggagggttgcatgatcatgaggagaagaagaacgaggagcatacgctagacatgagtggcatgtccatggatgccctcccacacctcaccatgtctgttggtcaagtcaccatcttggatctctctaacaacaatcttgagagcatcccggagtcaataatcgctcggctgctgaacgtggtggtgctggacgtgcggtccaaccagctgaaatcgctgcccaactccatcggctgcctttccaagctcaaggtcctcaacgtcttcggcaacctgctcgagtccctccccaacacc

SEQ ID NO: 402915 - DNA, 266 bp, Oryza sativa nipponbare
ccacgcgtccgcccacgcgtccgccgatcgcaaatactctctctcgccgatagcagcagcagcagcaatggccgcgcgtcgccggcgcatccaccgccttcgccgccaagccgcgcctggcgcgcgcgccgtcgtccccggccgcgcggttctccgtgtcgtgctccgcgtcgggcaacaacggcggcgccggcgagatggcgcagtcgctggcggcgtcggccaagacgttctccgcggcgctggcgctgtcctcggtgctgctc

SEQ ID NO: 402916 - DNA, 251 bp, Oryza sativa nipponbare
ccacgcgtccggatagacaagtatctaactacacactgaagctagtacacagaattatccgccctgccggtccccggatgatgtgattgtccgcaggccacacatacatgctcgtcacccagaacctgaacgcgatgaaccaggggcccaacccgtggcacgtgtcgctctcgtacgcgacgtcacttctaaacacgtgcctgaagacatggagcgcgcagacctagaacgtgaaggcggcgcaagacgcg

SEQ ID NO: 402917 - DNA, 344 bp, Oryza sativa nipponbare
ccacgcgtccgctcacctggcgcgccgaagcttctctcctctctctcaactccggcgagaggaggaggcggcggtggggcgttcgtcgggagagagaccagggccggggggctagggttcggccgttcagagaggcggcggctgaggaggaggaggaggaggaggagggggtgaggagagatgtctacgccggcgaggaagccgttgatgcgggacttcaagcggttgcagcaagacccacccgccggaattagtggtgcgccagaaagcaacaacattatgctttggaacgccggcttattcggtttgtctcaaggatgtttcacccaaatatttatgcagat

SEQ ID NO: 402918 - DNA, 438 bp, Oryza sativa nipponbare
ccacgcgtccggcgatgcttgaatgagggaattgagttccaaggtgagctattgaattttcggaaggacggtgctccactgtacaacaggctaaggctcattccaatgcatggggatgatggttttgtgactcacgtcattggaatccagttgttctctgaagctaacattgatcttagcaatgtatcatatccagtgtataaacaacagtccaaccacagacccaacattcaagagatcaaccctgcttctcatgaacatattcctaagattcaaagttccgagtactgctgcatcctccagctctcagatgaagttctggcgcacaacatattgtctcgcttatcgccaaaagaatgttgcatccatcggatcagtctgcactagaatgcatgagttgaccaagaatgatcacctgagaaagatggtatgtcaaaa

SEQ ID NO: 402919 - DNA, 436 bp, Oryza sativa nipponbare
cgccgcgccggtccggaatcgaccggatgcgacccacgcgtccgcaagaagtactcgagcaaagaaggagagagcttggtgagctgcatagatggccccctgggtgacggcgtcgtccgtcaccaccgtcgctcccttccaggggctcaagtccaccgacggcatgcccgtcgcccgacgctccggcaactgcagcttcggcaacgtcagcaatggcggcaggatcaggtgcatgcacgtgtggccgattgagggcatcaagaagttcgagaccctctgctacctgccaccgatcaccgtggaggacctactgaagcagatcgagtacctgctccgttccaagtgggtgccctgcctcgagttcagcacggtcggattcgtctaccgtgagaaccacagatccgccggatactacgatggcaggtactggaccatg

SEQ ID NO: 402920 - DNA, 461 bp, Oryza sativa nipponbare
ccacgcgtccgcccacgcgtccgctctttagttcaccaaatgcgagattttccaagaagaaatatggaggaagatgaactatccagccaaacattgaatttggaaaaactcaaaatagtaggactcagagaaaatggaggacattctccgctgatcaagctcaagctaccgttgtcgatgctggtgacaacaaaacatgggaagaagccaaacagatactaacatcactggattactccattgaagacgccgacaaaatgctgaagaaggcatttggatggattcattcaccatactggagtgaagagagaaagaaggaggttccaaatgctgaggtggttagtggagtactgaactacattagaactcttgggctctccgatgatgaccttcgcaaattgctgaagaaattcccagaagtacttggatgtgatcttgacagcgaggtgaaactgaatgta

SEQ ID NO: 402921 - DNA, 373 bp, Oryza sativa nipponbare
ccacgcgtccggagcggttcaaggagtcggaggtgtaccactgccggtgggccatgctcgctgtgcctggggtgtgggtgccggaggcgctggggctgggcaactgggtgcaggcgcaggagtgggcggcggagcccggcggccaggccacgtccctcggcaccccggtgccatggggcacgctgccaacgatcctggtcatcgagttcgtcgccatcgctttcgccgagcaccagcgcaccatggagaaggaccccgagaagaagaagtacccgggcggcgccttcgaccccttgggtttttccaaggaccccgtcaagttcaaggagtccaagctcaaggagatcaagaacggccgatgggccatgctggc

SEQ ID NO: 402922 - DNA, 365 bp, Oryza sativa nipponbare
ccacgcgtccgcggagctcctcggcaagctgggcctcgtccccgccgagacggcgatcccgtggttccagaccggcgtgatcccccccgcgggcacctacacctactgggccgacccttacactctcttcgtcttcgagctcgccctcgtcggcttcgccgagcaccgccgcttccaggactggtacacgccgggctccatggggaagcagtacttcctcggcctcgagaagtacctcgccggctccggcgagccggcctaccccggcggcccgctcttcaacccgctcggtttcgggaccaagagcgaggcggagatgaaggagctcaagctcaaggagatcaagaattgcaggctcgccatgc

SEQ ID NO: 402923 - DNA, 385 bp, Oryza sativa nipponbare
  unsure (1)..(385): unsure at all n locations
ccacgcgtccgcaagaagtactcgagcaaagaaggagagagcttggtgagctgcagagatggccccctccgtgatggcgtcgtcggccaccaccgtcgctcccttccaggggctcaagtccaccgccggcatgcccgtcgcccgccgctccggcaactccagcttcggcaacgtcagcaatggcggcaggatcaggtgcatgcaggtgtggccgattgagggcatcaagaagttcgagaccctctcctacctgccaccgctcaccgtggaggacctcctgaagcagatcgagtacctgctccgttccaagtgggtgccctgcctcgagttcagcaaggtcggattcgtctaccgtgagaaccacagatccnccggatactaccat

SEQ ID NO: 402924 - DNA, 439 bp, Oryza sativa nipponbare
ccacgcgtccggcaaagaaaaggcctgtgtcaaggagagggtagtagcaccttgctctcctttgccttcagagaaaccggaagcaatggcgtctgctactctcctcaagtcatctttccttcccaagaagtctgaatggggtgccacccgccaggctgccgcccccaagccggtgactgtctccatggttgtccgcgctggtgcctacgacgatgagcttgtcaagaccgcgaaaaccattgcatcaccaggaaggggtatccttgccatggatgagtcgaacgcgacctgcggtaagaggcttgcgtcaattggccttgagaacaccgaggccaaccgccaggcttaccggaccctccttgtcaccgcaccgggcttgggacagtacatctccggtgctatcctcttcgaggagactctgtaccaatcaactgtagat

SEQ ID NO: 402925 - DNA, 482 bp, Oryza sativa nipponbare
  unsure (1)..(482): unsure at all n locations
aaccaaataacaacgttaaaaggcaaaatagtacgcacttcatgcagtagaccaaatacattgtactaaggtgacaatggatgtccacacaaaacatcaaatttaggcaactgggcaaaacttgaccggtaaaacatttatgttcctaataacctaagctttaacagcatacttcctcatggggaaatacttctcacgcttcttctccctctcggtcttcaaagagagctggtgcttggtgaggcgcctgcggatggcgcgggtcttcttggggcggaggtcgagcgggagcaggctcttcttcttgtacgcctccctcagcgccgccttctgcttctgcgagatcaccgtcagcacgcgcgcgatcgaggtgcgcaccacctttgatcttggagagctttgtgggggcgccttcggtgaccttggcgacncggaggagggagagctccgccttgaggtccttgagctgggcggacgcgtgg

SEQ ID NO: 402926 - DNA, 538 bp, Oryza sativa nipponbare
tggaggaaaattatctcctatacaaagccgttatatgaaggttcaatacgttacataaatgacaactcagaagtatgcatgtacagcttcagtcaagaccaatttccaacaaaagaaaaaacgatctttccctattctgctcctgttgaaagaaacacttcggcaaagagtgaaacggttgctaattcctgatgaatctggacaacctcaccaagatatgtacacatacatgcacactcatacatcaaaacctggcattgcaaactgcgatgcaaaattctcaacctggttacggagttctatgatatctttattgttctgtaggcctctcaggaattccttctgcatttttccatgttctttcataagattactagctatttgggtggctctgatggggaaattggcaatcaccttaaagtcatcttccaagcaacctctagtagtcattgcaggtgttccaatccgaacacccccaggagatattgagccattatccccatatatcggcatcttatttatggagatgtggcatgcc

SEQ ID NO: 402927 - DNA, 363 bp, Oryza sativa nipponbare
caacaacaactcaggattgaatcatacgtaagtgcttgctgatacaatatcaacatggagggtacattgccggttccatatgaacaaacataaaaacaccgaaaccccatatggccattatgccgatcctagcctagcttggcgaggacatcgccaagagcagatttggtcaacgtgtagtacttctccgcctcttcggggctcttgatcttggctgcatggtcaagcccgtcaatggtggcgaagagcttgccggtgaggtccttgaggcccttcttctcgtccttgggcttggagttgatgacggttttgaggtcgtagcgcaggtaggaggccctgaggcggaggtcgtccctgacaaac

SEQ ID NO: 402928 - DNA, 412 bp, Oryza sativa nipponbare
taataatattattaagacattatagctgatgtcttttgatcacactgcgatcaaattatgcatcataggcagtacaactccgcgtcaggaaaaagtagaggagatatatttcttgttattacttaatacagcattcacatatatcgaaccatccggtacgtacgtagtagtactccacgcgttcacatcgatgatcggggacgatatcctcaggtagtacttatgcaaaagcgttggcgtaaactgacgaactgaacggacggacggtcggatttagggctcccataagtccaagttgccggagacgaagtcgtagtggccgccgacgagcttgagggtgccgttggcgatcccctccttgacgaacgggtaggtcttgaggttctccaaggattgggttccggacgcgtgg

SEQ ID NO: 402929 - DNA, 530 bp, Oryza sativa nipponbare
tggtggatatggggatactggatgtcacccctgatgtatgcacaaaatgccatatcagtaaacgaatttctaggtcacagctggaacaaggtaaaaaaaatactcatggaaatcgattaacagccattatatgaatgtctggctaaagtgttctgttcttgctgtactgcagacaatacctggtttcagggagccacttggaaaactagttcttgaatcccgtggagttttccctgaggccaaatggtattggattggtgttggtgcattgctcggatacgtcctgctattcaatatcctctacacaatctgcctcacattcctcaatcgtgagtcagaaataaattatatttggaatgccagagcttataaattctcatttttataaattctcaattttatgcattctttcactgcagcatttgacagcaatcagccaacaatatctgaggagacgttgaagataaaacaagctaatctgaccggtgatgttatagaagcatcctcgagaggacgaattaccaccaaca

SEQ ID NO: 402930 - DNA, 539 bp, Oryza sativa nipponbare
ggaccgaagcaaatttgggattaattttgctcaaaaggactgcactacgtacacttcaaataattttcctccctactctacatgttacaagcgtcttttgccgacgcaaatatctgaatttttttctgaatcgtcttgctcacgtccggccgccgccgatgatcgttggttgatcagccatgggcgccggccgaaaatgttgctcgtcgatctatccctcgagtaatcgtgtaaaaattctaggttatatacagcgaatcatcaattcctccctagccgatcaatcgatcgatcgaactccgccatggatggacaccgcgtcgatcgtgttcttgctggcgccaccaagaacagagaggcagagacaggagaggatggcaatggccatgcccgccagttgcaagaagaagcgatcgaatccgccgcgtcgatcagtagcaatcgtcaatccttggtcggcgagagctccaggatgcggccggagagggcggtgaccagcgccgccttgaagcttgggtcacgcgtcagcgtcatcgcca

SEQ ID NO: 402931 - DNA, 644 bp, Oryza sativa nipponbare
tttttcactgagaatagcacgggtacatcacatcacacaaattcatacgttgatacacgcatagtcgccgaagcgaccagctgcttaattaatcgataacacacgggtttaattcagcaataatcagcacacacacaaaccacactcatatgggtggtttttattgtggactaattaaggtaggtgactcgccggcggcgagtgttcggttgcttcgtgacttcacttgccgcacttgcagtcggtgcaggagcagctggtgccgcacttgcagccgccgttctcctcgccggcggcgacctcctcgaagtggctgcacgcacgcacaaagcaagcaaataattaaggcgtcaggtaaaaattgttgagaactatctaatctcggatgtaaaggtcttaacttatttttctggaaattttaaaatatttttgatgaagtttttttatggtggttgtagtatatgctacagaccccatcatttagcttattcgtggaataagtcaaacgatataattgcaaacgaaaataatttataaataaaattcatatatatatttttagcaacttaaagtagagggtgaaaaataaattttaataaaaaacttaaaatcagttttaaatttaagattgaaaatttaaattt

SEQ ID NO: 402932 - DNA, 378 bp, Oryza sativa nipponbare
tgaatgatgaactctgtatgcagggcttgatgcaagaaaatgccacatcaaatgagggtaatcaaacactaggcctcgcatggatcattacaaagtacgcaaatgtgcaaattaaaacataaaaagcgttaactaagcttaaagcaccagttgacacataaaccgcaaaccccaacttttttgagcatgtgaaaaccggatggatcatataacattcatcagagcatcatacaatatgtgcaagcattgcttcatcgagcgatcgaaagagagagtggtctacaatggctgctgggccattcacgagcccagggtgaacttggtgacttagacccatgctttaaaggcgactgggtactccagggggtatagctggtt

SEQ ID NO: 402933 - DNA, 516 bp, Oryza sativa nipponbare
tttcacatccatctggtacgctttgtataaatatatatagccggagcttccatatatttcattcacatatgcctcacccaacaacatatagtcgtagcagataccactcttacatcaagtcagagagagatcaggtgaaacaaaaacaaaagcagagcacggccggtaaaatcaaaagacgatgaacaaactgggaacacacgaaacaaggtgggagacatcatcgaatcagagatgaacaattaaacaaggctatatatgacgatgacggcttagttgccaccagactcctcgcagcccgggggcttgtaggcgatgaagctgatgagctgcacctgcctgacgttgtcgaagccgatgatacggacgaatgcatcagggtacgcctttctgggcttctcgagctccttgagcacctgggtggcgtcagtgcacccgaacatgggcagcttccacatggtccagtacctgccatcgtagtatccgggggatctgtggttctcacggtagacgaat

SEQ ID NO: 402934 - DNA, 525 bp, Oryza sativa nipponbare
tgctctgaaacaattctctatatatgctatcttatgccctgaattcttcagtctttcagtttcagagtgtagtgcagatgcagaaatgcccatattcaggaagacatctaaggtatgatctgctataaaagagtatccatctcacagattcataaccctcaaaaagggttacttatgcagtgaaaagggttttatgctctttcatacagtgtgacagtgtgtgtacatataatttggaaaaacaaagtgaagatggatttacagcagcgtttctcagatacagcggacttatagctacaagctgatcacacaagtgaactttgctgctgatgatgatatggatcatgttgttatagcttacgcccaccacgggttgtcgccggtcctgaagtccgtcttcacccacggcacgaagagaaccttgccgtcgtcgacgtcggcgtgcaccaatgccagcgacaggggagcaggtccacggacgaccctgccctggttgtgtactgcgagccgtggcaggggcagatg

SEQ ID NO: 402935 - DNA, 566 bp, Oryza sativa nipponbare
tacagtgttaccaataatttcagctgattttcacgtgtatcagtataaacgtcatgccaatcaacaacatgccaacattaatggccacctcagtttgctcattacatcaactggaaatatattttaaaaaatgtgataccattgctactgtttcagtgcaaaaggaagcgttgcgtttctaagattgttacacgtatggggaacaccagggctacaaaatttgtgacaattaactgtattgaagcttgctatgtgaatccgagaaaaagaatggacatactgtagttgacgtacccaatatgccagcgaaaggcccagcagatctcctatctcagggtaggtagccttcaaggtgatggcttctgactttcagctgtaaaatctgcacaaaatcttgcttgcccactttgctatgatgatgttacaacaatcatatggcagtagagccgccagaaggtatacatctctaatcatgtgaagaatgtgacaacatctcttctgtatcccctaactatcaacatgcgtgggacgttctctacaagcagatccatgtactccatgtagaa

SEQ ID NO: 402936 - DNA, 374 bp, Oryza sativa nipponbare
gcaaaccccaacttttttcagtttctgaattctggatggatcatatcagattcatcacagcatcgtacaatctgtgcaagcattggtacatcgagcgatggagagagagagtagtctacaatggcggctgggccattcacgagcccggcgtgaacttggtggcgtagacccaggcgttgttggcgacggggtcggcgaggtggtcgagcaggttctccaaggggcccttgccggtgacgatggcctggacgaagaagccgaacatggagaacatggcgaggcggccattcttgatctccttgaccttgagctcggcgaaggtgacggggtcgtcggcgaggccgagcgggtcgaagtactggccgccggggtag

SEQ ID NO: 402937 - DNA, 333 bp, Oryza sativa nipponbare
  unsure (1)..(333): unsure at all n locations
ttttgatgtgcgaccaaccatgtgtattattctcaaagtttaaccactctcaccaccactcattattccatccaatcttccatccatccatccaaggcaagctcagcaaatcaatcaaaaaaaacaaataaaaagagaaaacaaaatggtgtatatgaagaagtctagcaaccggcgaggcgggcgcacaccctgcgctggatgggggtccggcacgatgggcactccttcatcccttgcttgtcatggaggtcattgcatttcgcgcagaccacctggtgcgcgcaagggaggaagacgaccgacatctnctcgctcaggcacatgacgcac

SEQ ID NO: 402938 - DNA, 476 bp, Oryza sativa nipponbare
tttttgatccatgcgaccatgcgtgcaaatcagttggagcacaaatttacatgttacacccacaccctacacccatgcataataatacatcgtatatacgtacgtacatacatacccctctcgatcacacgcaccatcgatcgtacaaagttgcgtacatacatacgtacacacatatacgcatacgcacgtacatacatacataattaaaaactcgtaattaattaaatacgtagttgatggcatctctaatggaacttgaggctggtgaggatgttgttgtggacgggatcagcgaggtgatcaagcaggttctgcacggggccaaccccggtgaagagcgcctggacggagaagccgaggaaggcgagcatggcgagcctgccattcttgatctccttgagcttgagctcctttatctccgcctcgctcttggtcccgaagccgagcgggttgaagagcgggccgccggggta

SEQ ID NO: 402939 - DNA, 553 bp, Oryza sativa nipponbare
agcgcaaaatatatatagccggaggttccatatatttcattcacatatgcctcacccaacaacatatagtcgtagcagataccactcttacatcaagtcagagggagatcaggtgaaacaaaaacaaaagcagagcacggccgggaaaatcaaaagacgatgaacaaactgggaacacacgaaacaaggtgggagacatcatcgaatcagagatgaacaattaaacaaggctatatatgacgatgacggcttagttgccaccagactcctcgcagcccgggggcttgtaggcgatgaagctgatgagctgcacctgcctgacgttgtcgaagccgatgatacggacgaatgcgtcagggtacgccttcttggcctgctcgagcttcttggagcacctggggggcgtcagtgcacccgaacatgggcagcttccacatggtccagtacctgccatcgtagtatccgggggatctgtggttctcacggtagacgaatccgaccttgctgaactcgaggcagggcacccacttggaacggagcaggtactcgatct

SEQ ID NO: 402940 - DNA, 363 bp, Oryza sativa nipponbare
gtgagaggagaaagcaaccgtatttctttctacattgaaatatagaagatgtacattgaaatgtgtcaagaagagatgtaggagcaccctcatggagagggatttttagaagttccattgcatggtttcacaagttatgcaatgaccatcctactttcttctagctgtaatatttccaaaactagttacaagaaatgcgaggatgcccattgtcattgatatggtatggggatgaagagattcacgaaatatgaatgtggagctcattaaacttttgccgcttcagtaggtgcaccggccctctcagcaataatctgctcatagagatctctaatcttcagtcctacgatagtttggaagaga

SEQ ID NO: 402941 - DNA, 520 bp, Oryza sativa nipponbare
tgcaaatcagttggagcacaaatttacatgttacacccacaccctacacccatgcataataatacatcgtatatacgtacgtacatacatacccctctcgatcacacgcaccatcgatcgtacaaagttgcgtacatacatacgtacacacatatacgcatacgcacgtacatacatacataattaaaaactcgtaattaattaaatacgtagttgatggcatctctaatggaacttgaggctggtgaggatgttgttgtggacgggatcagcgaggtgatcaagcaggttctgcacggggccaaccccggtgaagagcgcctggacggagaagccgaggaaggcgagcatggcgagcctgccattcttgatctccttgagcttgagcttctttcatctccgctcgctcttggtcccgaagccgagcgggttgaagagcgggccgccggggtaggccggctcgccggagccggcgaggtacttctcgaggccgaggaagtactgctttcccatggagccc

SEQ ID NO: 402942 - DNA, 470 bp, Oryza sativa nipponbare
  unsure (1)..(470): unsure at all n locations
gtataaatatatatagccggagcttccatatatttcattcacatatgcctcacccaacaacatatagtcgtagcagataccactcttacatcaagtcagagagagatcaggtgaaacaaaaacaaaagcagagcacggccggtaaaatcaaaagacgatgaacaaactgggaacacacgaaacaaggtgggagacatcatcgaatcagagatgaacaattaaacaaggctatatatgacgatgacggcttagttgccaccagactcctcgcagcccgggggcttgtaggcgatgaagctgatgagctgcacctgcctgacgttgtcgaagccgatgatacggacgaatgcatcagggtacgccttcttggcctnctcgagctccttgagcacctgggtggcgtcagtgcacccgaacatgggcagcttccacatggtccagtacctgccatcgtagtatccgggggatct

SEQ ID NO: 402943 - DNA, 512 bp, Oryza sativa nipponbare
  unsure (1)..(512): unsure at all n locations
tttttagtcgagacgcaattcggagattattattaattcgatctacacgtgaagacactgttattgcccatcaaggaaaggaacaaaacaaagcttcgcggtaccaaacactagtactctaaacaacgggttttggtctctgcaatgtgcgatccaaagaatcgttccaaaaaattggtgcagacgacggcattttttactctgtcccagcaatcctcttcttcaaagaatcgacgtcgtcggccaattccttcctgctttccttgaagaggaggtagcggtacacaaaccagcctgtgtacccgagcccgacgagctccatgaacttgggaagcagaggcacggagttgacggcgccgacgatgacggacgacagccagagggggatgatggggccgccgccgtacgtgaggacggtggacttgttctcaacggcgtcccacttagctttcaggtcttcgatgagctcgtcgccggtcgcggcggaagacgaggtgtcttcngacgacgcc

SEQ ID NO: 402944 - DNA, 257 bp, Oryza sativa nipponbare
aaaaaagggaaacttttcataataatttttttaaaacatttttgctggtgttttttgatcaccctgcgatcaaattttgctttataggcggtccaactccccgtcaggaaaaagtgggggggatatttttcttggtattacttaatacagcattcacattttttgaaccatccggtccgtacgtagtagtcctccacccgttcacatcgatgagcggggaccttattcccttgactcttagcctggctcttggattc

SEQ ID NO: 402945 - DNA, 528 bp, Oryza sativa nipponbare
aatacaacagggcggactagcaaaacttacataatgtccatcaaacagctatacaaacaacgggtgtccatttcatactaataagctcgtcatgtggaccatcctggcctggtgcatcgctgagcccatttctttcatcagtaaacataaatatcaacagtactattgtacaagaccagccaagagaggcgtgttaccatctgtccagactggccaggcctcatggtccataagatgaacactccggacgacctccgctaggctagtcctccagctcgacaagctgagctcttctctcggcagctttcttcctcacaaagatgccccatcgcatagcggccttaatcttaagccacccaacaacagccttaccagacgggcgagcccggtcattctcgtagttgaagctggtgcaggagacggcatgaagggggagaatccatctccatgattcatgttggctgatgatccacccatgctcaggatgcgcagcatttgttgcatgtcctcttcgttctctagtatctc

SEQ ID NO: 402946 - DNA, 377 bp, Oryza sativa nipponbare
ggatgcggcctgcggcttacattaaatctcgatccaaagaagcaaagatgatgacagacagaaattaattaagctagaaatctcctcgatcgatcacacacacacacacaattaaggtacatacatacatgcactgctgcaactgcaactgcagggtcggtgcgtggctactacaagtgtacacatggtacgttggttggcaccatctcgatcgtgtcgttgtgctcacttgccggggacgaagttggtggcgtatgcccaggcgttgttggcgacggggtcggcgacgtggtcgaagaggttctcgatggggcccttgccggtgacgatggcctggacgaagaagccgaacatggagaacatggccggacgcgtgg

SEQ ID NO: 402947 - DNA, 455 bp, Oryza sativa nipponbare
  unsure (1)..(455): unsure at all n locations
tagttagagcactgctgctgcggtgagataggatataccccagtgggactggccatgagacattaaataataaacttacatacttagctacgcatatagatgcatgcatgcccggatgatttaccacaacacacaccacgggtttgaatcagatcacatccatatatatatatatcatactcataaggatggacattttagtacgcgcntactccgcaggagaaaaaagaggagacagggagagaacgttttccatcgcccaatgatcggcttgaccagcctgaactcatcaagctccttgagatgccctggccctgatgaaatcgatcacacgctcagcctgacagtgtctggatgatggtgttgtgccacgggtcacaaaagtgctgcagcaagttagtcgaatggcccttgttgcgtcacgttgtgctgcaccaggaaccccaagaacgcca

SEQ ID NO: 402948 - DNA, 553 bp, Oryza sativa nipponbare
aaagacgaaatggcactgtatctgcaaaattcttggggcattaatcccagtattattaattaagaaaaaaaacttggaaatgcagatttaaccttattaaaaaaataaaaaataattggttacttttgtacgtgctggaggtgaagcaaccaagctccgagctgcatgggaaagatttttcttggccaacctttttccaacagaatatttgaaagcacgattagtactaactttcatttacaatagcagtctcctaatgtcaccaaaattctgtgacaactctgtgaaaaacttgcctcctacttgaccatcaaatacacgatggtcagcggacaatgtcaagctcatttttgtaaccactgtagccttctcggttccatcactgtccaacacaggctcgataatctaattaccacgcccaacagcaagaattccagactgaggaggattgatgattgcacagaagtggtcgactgggtacattcccaaatttgagatgctgaaagtccctccctgaaattcattaggagcaagctttccagcacgtgccttt

SEQ ID NO: 402949 - DNA, 529 bp, Oryza sativa nipponbare
cacgtcataattgctatactcaaaatagtaatatggcaatcatacattgccagagtcacaaataattccagatagcaaattgctctcagaatattcggatcctgatgtaaacaaatacgtagaacaatattcatgatgtgcaagtctactgcaggcaaaaaccaagtccaaaataactactcatcctcctggctgcgtagcctggcaagcttgttggtgacgacaatgtcaagctgagcagcgcgctccactatctccttgcgtttcttcgtggacacattatgagcaatttcagcacagtacatcctgttgtgcatcataagcagctccagctctgagacgttgtgcaccacaaacttcttgaacttgttgggcaagtaatgccctggctttttgtccgaaccatatccaatattgggcatcaatgtgcatcccttgaacttcctcctgacacgtgagtcaataccctttggtctgcgccagcttgtcttgaggccaatgtagcggtcgctgtgcggccttttgaact

SEQ ID NO: 402950 - DNA, 485 bp, Oryza sativa nipponbare
  unsure (1)..(485): unsure at all n locations
tgctggaaaatttgatgatgtatttcccacttatatcatcatatacaaatactaacacatgcgaaaattatcaagcagaaaagttccatacaaattcatccagacaaacaagtgtaaaaaaccttttttttcccatttcccccttgaactatccgtaaataccaccattccaccaaactcccctctgtcttctacgacaaataatcttttcaacccagtaacttataattaattacagagagattagcaaacatataatggtaagaatcagttgtcgtaggtgcggcactcgtcggtctccgggttgtccttgcagtaggcctcgagcgggtcggaggtctccttgagcttgtcgcgcgcgtggctcgccgncgcgctcagctnctncacctnggtccacgccgccgngcactcgccgntcgccgtgtcctccgcgcacgcctncttcgccttgtcgatgctctccgacatcttgtccgagatgt

SEQ ID NO: 402951 - DNA, 554 bp, Oryza sativa nipponbare
tggcatcgttttagctggcttcgttgtagatcctataataacgatacatcattaattcgatcatcccttggatgcggcctgcggcttacattaaatctcgatccaaagaagcaaagatgatgacagacagaaattaattaagctagaaatctcctcgatcgatcacacacacacacacaattaaggtacatacatacatgcactgctgcaactgcaactgcagggtcggtgcgtggctactacaagtgtacacatggtacgttggttggcaccatctcgatcgtgtcgttgtgctcacttgccggggacgaagttggtggcgtatgcccaggcgttgttggcgacggggtcggcgacgtggtcgaagaggttctcgatggggcccttgccggtgacgatgggcttggccgaagaagccgaacatggagaacatggcgaggcggccgttcttgagctccttcaccttgagctcggcgaaggtgtcagggtcgtcggcgaggccgagcgggtcgaaggcgccgcctgggtacaccttgtcgaggcccttgccgagc

SEQ ID NO: 402952 - DNA, 374 bp, Oryza sativa nipponbare
agtaattaaaattgacttatgtttcttcttcttcttcacagttcacatggaaatcagaaggaagtagcaaaaggaagagctgttctacactcgacagagtaacaaactaagagagcaacacaagtaacaagaggagagatttagtctcttttctggtgttctgcaaataaaactctcccctcttgctacccctaaaccccaacccaaggtagtagtaagtcaccccactaaaagtaaccggccatctcttacaaaaattggctgtctcctttgaatcaatcgaatcagatcatcatcatcatcatctacagctcgtcatgctcgtcgtcgacgccgccctcgccgtcggcgccgccacccggggcgccaccggt

SEQ ID NO: 402953 - DNA, 575 bp, Oryza sativa nipponbare
catttatttacatactcaattattagtcactgcaaacataatcacatagtgtccacctaattgattgtgtagatccacataattacacctgtccgtcgaaaggtcgacagcgaacgaatgaacgattaacgcgtagctgatcattccagtcttgattttccacgttgccttgtatttattgcctacaatcagctagcagctgatcgttccggcacagtggccatcgaagccagctagacgaaagcttttgtcccggtcccaattcacgattttcacatggagctggaggcagcgggagctctgccgtgcttctcggcatcgacaaattcggtgatcctctccaggagcatgtcgaagtcgtcctgcgtcttgatgaggctcagccgcgtgtaccgagtgccggcctcgttaacagtgccggtaagcgagttgatccccgccgccagcagcgtctcgtagcagtcgtcgtcttccacccactcgcatttcacccaagcgtaggctggcgatggttctttgatccggttgaagtaagtgcagtactgcggtggcatcttctgcagcgagatccgggt

SEQ ID NO: 402954 - DNA, 499 bp, Oryza sativa nipponbare
ggatgaaagcagaggtagattatattaagaagcctggcacgcatgaggagatggagcaggagtacatgatgagatcaccatgatgatagatgatccatccaagctagctagggatccatccaacattgatcgacacacgcacacactgacaacgacgacgacggttttatttaggcgtcagagcaaaaggcaaggcctgcctacatataagctgggtactaatgcaagcaaattaaggcctcgatcaaagctctgatcgacagtagcagcatccatacgataaatcctcatgcagccgggcgacgacgacgatagattcagttgcaggagcagcaggagcagccgctgcagctggtgccacacttgcaggtgttgcagccgcagccgccgttctcggcgttctccaccgccatctccattcctccagagctcgccttgttggatggagcagcgaggacgaaggtcttggtggtggctgtggcctccacatcagggaaca

SEQ ID NO: 402955 - DNA, 511 bp, Oryza sativa nipponbare
tacaagttacgatttataaacacgaaaaattccgcaatcatgcgaattattcacagaatacaccaaagtatgtgtaactgcttgtccaagaagatagtgaaggttaatatagcattagcataacatcttacagtaggtgtctacgataagaactattgacaaagtttccacacgctgtaaaatgccaggggtcccttttacataagatggcactccatggatatatgtttacaccgacttgttcttgcaagaattccaacagtcacctcaggaattcagcttgatgccttttcttttacccttgctgttccattcaaagtttcttagttcttgtacttcatggtttctttctcaaacccaattgtggggaactgttttgcatattcctccacatcatggcgaaagttttgcaatctcggattgaatgttgctatcagattgcaaagtggcaacaaagtccttcagttttgttccacctgctgcagccttaaccttcaaagccaagttcact

SEQ ID NO: 402956 - DNA, 540 bp, Oryza sativa nipponbare
  unsure (1)..(540): unsure at all n locations
caagtatcaagtgtagtatatcatcatcatgcaagtacagtgttacatagattaatcacaatgcagtttgattaagcagtgggcatcatcacatcgcattcagaggaaggctatcttagattacagatgaatatgcagacacccagcttggtgttacatacatagactggatttgggtgaaatttagccggcgagggcgctggtgttgtagacgaggagggcgccgccgccgaggagcccggcgagggtcacggcccagatcagaagcccggtggttccaccaacgtaggtgtcaccggtgggagaccattcctccggcgagtagattgggctgtagccgtcgacgtttgcgccgtacttgtcaacgaattggtacacacccttncccgggccttttcttggcagatgcatcaatatcgactgacatgccacctccaatcccgtagggcttgtcggtcttgatcttcttcccaccgctgcagacgatggcgaaggaggatccccggcgggagatggacggaaggcccttggcccgggccg

SEQ ID NO: 402957 - DNA, 464 bp, Oryza sativa nipponbare
gacttaaatgctcctttcctaatcattggctgcatcaatgactacaaggaagattcaaatgtacgaaccgtttgcaactcatagcaggcatttcgattgaaggggaataaaatctatactaatgatagatgtacaaatagacatcaagttcaagcctttgaaacaatgtcattaaactcaaacaaaagccctcctgccgaactttttgatagaaaaccatttacctccagaataatttaggtgaagacttcataaaactttttaaccacgagcaatcctgagtcaattgattcaagtgggtccttccgaagccgatgccttaagcagttggggataacagtggcaatgtcctttacagtgacaaggtccctgccttttgagtgctgccaacgccttggcagccctgttagtcacaatgtcccctcttaatccatcaacattcaactttgcacacactttagaaa

SEQ ID NO: 402958 - DNA, 530 bp, Oryza sativa nipponbare
  unsure (1)..(530): unsure at all n locations
aaacaagctaattttataattaattcacaacaccatatttcattgatcaggttcagaacctgcacagaaatacacactaccggtacagatctcaccctctctccaatactcgtacatccatccacgcggtccacacgaatacgtacatctatacggtacacgtacgtacatctactgcaccgngtacacacacgcacactctcctgcagagacgcgcatcgtcgtcaacctagctagcttagctgaaggcgatgcgtcgccatggcagcacggcggcggcggcgctcacttgccggggacgaagttggtggcgtaggcccaggcgttgttgttgacggggtcggcgaggtggtcggcgaggttctcgagggggccctttgccgtgacgatgggctggacgaagaagccgaacatggagaacatggcgaggcggccgttcttgatctccttcaccttgagctccgcgaaggcctccgggtcgtcggcgaggccgagcgggtcgaaactgccgccggggtagagcgggtcga

SEQ ID NO: 402959 - DNA, 593 bp, Oryza sativa nipponbare
tagctggttaacaagccaagcatgtcattggatacaaaaaaatgttggcaactgtatagaaatttacaagactctgaaatctgaatctagaaaagcatcaactcatttgggcatacaaaaagtgcagttcagaaaatgtgcaggactcccatgctaccatgatcactccgaacttccttccttgaacaccttgacccaattctcagcactgtcaattatttcaccagtcttgaccaggtaccgaaccttcgttccatcctcaaggaatttgtgtccaaccctactcgccacattcttttcctttgagtagagcatcacatttgagctgtgaatggggccttcaatcatgacgatttcacccggttcatcttctgttcctttcttgtgctgggacttcaagttcaagtccttcactattacagtgctgttgtgcttaaaaagccgcgtaacttctccaactttacctttctcacggcctgcaatgacttgtactgtatcgccaatcctaacatgcatcttgtgcaggacaggaagactgtttggtttacacttcttcctctcccatcgcttaagcctcatttgaattgggcatg

SEQ ID NO: 402960 - DNA, 543 bp, Oryza sativa nipponbare
cgtgaagataggcacatatatgtatcgtacaatgtcctctccgcttgtcgaaatgcaaataacatcatcgggggatatgatcatcagttcacgagaacagaggaagaaacaaaagctaaaaattaaaaccatcaacagcccgatcgagtttgcattactagatacacacattgcagccttccttccctctctccatgtatcgatatatcaacccggccacgcacaaaacatttgttcattccctactcgagctgcgcgtaccacaccccttggatcttgacatccttgggcaccttggcgccgaggtctgtgtccgacggctgcacgctctcgaagacgccaatcacctcgccggtctctggcttgctcttggtgacgctcaacgtgatgttgcccgtcgacgacaaggcgttcttgacgttctccttagcgagctcctcctcgtctcctctgcctccggcggggagcgccacagcgttgtcgtagccggtagagccaccgcggccctttgggtcgaggaaggacgaaccacggtagctgggc

SEQ ID NO: 402961 - DNA, 382 bp, Oryza sativa nipponbare
tcagagaacgagcagcagctgtaaaacaaaataatttactttagtcccccaacttatacaaatttacagcaccaaaagtttcagaaagctgcgtgccaggccatgcggaactgcaggttatggcaaccgcagaagctgaaacagcaacagtaacatcaagttaactacaaagaaccgtaaaatagtatcatcaccatgttcatctagacatagtagaaaacattcacactctcgaaatgctctctatctttcagttttgtgttgctatacgtcttcttgttttgcattttttttagtattccatttctgttcagcagagtggcagtggcgcgccattccattccttgaggcattcgagcagcgggtcgatgcggacgcgtgg

SEQ ID NO: 402962 - DNA, 376 bp, Oryza sativa nipponbare
gatcataaggcaaagctgcgagcgccagggcaaacgcttactccaggttcctgataatgtgcttcaaaatacaggaagtggttggcagaaggtaacccactcgttatttacaacccgacacacacaccggccactaaacggtggaccgtgcgtacttgacgtgaccacaatggggcattactactccgtaagcgacgacacctcagctatacagggatccagcccgcggatgatccagtcatacagacggtggctgagttaatggactcacaaatagactctaggacagaatagtggccctgtgcttaagcttcgctgcttccttgatctggggaccaccatcctccgcattgtgagacgtccagagagtccgatt

SEQ ID NO: 402963 - DNA, 549 bp, Oryza sativa nipponbare
ttaaatatatatagccggagcttgcatatatttcattcacatatgcctcacccaacaacatatagtcgtagcagataccactcttacatcaagtcagagagagatcaggtgaaacaaaaacaaaagcagagcacggccggtaaaatcaaaagacgatgaacaaactgggaacacacgaaacaaggtgggagacatcatcgaatcagagatgaacaattaaacaaggctatatatgacgatgacggcttagttgccaccagactcctcgcagcccgggggcttgtaggcgatgaagctgatgagctgcacctgcctgacgttgtcgaagccgatgatacggacgaatgcatcagggtacgccttcttggcctcctcgagctccttgagcaccctggggggcgtcagtgcacccgaacatgggcagcttccacatggtccagtacctgccatcgtagtatccgggggatctgtggttctcacggtagacgaatccgaccttgctgaactcgaggcagggcacccacttggaacggagcaggtactcgatct

SEQ ID NO: 402964 - DNA, 576 bp, Oryza sativa nipponbare
  unsure (1)..(576): unsure at all n locations
taaatatatatagccggagcttggatatatttcattcacatatgcctcacccaacaacatatagtcgtagcagataccactcttacatcaagtcagagagagatcaggtgaaacaaaaacaaaagcagagcacggccggtaaaatcaaaagacgatgaacaaactgggaacacacgaaacaaggtgggagacatcatcgaatcagagatgaacaattaaacaaggctatatatgacgatgacggcttagttgccaccagactcctcgcagcccgggggcttgtaggcgatgaagctgatgagctgcacctgcctgacgttgtcgaagccgatgatacggacgaatgcatcagggtacgccttcttggcctcctcgagctccttgagcaacctggggggcggtcagtgcacccgaacatgggcagcttccacatggtccagtacctgccatcgtagtatccgggggatctgtggttctcacggtagacgaatccgaccttgctgaactcgaggcagggcacccacttggaacggagcaggtactcgatctgcttcaggaggtcctncacggtgagcg

SEQ ID NO: 402965 - DNA, 541 bp, Oryza sativa nipponbare
aaccccaacttttttcaggttctgaattctggatggatcatatcagattcatcacagcatcgtacaatctgtgcaagcattggtacatcgagcgatggagagagagagtagtctacaatggcggctgggccattcacgagcccggcgtgaacttggtggcgtagacccaggcgttgttggcgacggggtcggcgaggtggtcgagcaggttctccaaggggcccttgccggtgacgatggcctggacgaagaagccgaacatggagaacatggcgaggcggccattcttgatctccttgaccttgagctcggcgaaggtgacggggtcgtcggcgaggccgagcgggtcgaagtactggccgccggggtagaggtcgttgccgtcgccgaccccgggaggccgttgattcggtagccctcgacgaggcccatgaggacgacctggaatcccagcacggcgaggatgctctgggcgtgcaccaagttggggttgccgaggtagtccaggccgccgtcggagaaaaactgggcgccggccttg

SEQ ID NO: 402966 - DNA, 527 bp, Oryza sativa nipponbare
gtaagatcagctcaattttgtcttcatatataggagtacttgttacttgaactcctagtttggtgaatgtatacatgatgaggaatacatatacttgcacagggaatgaaacgcgtatcctgcactgtacacctgtatctttttacaatcatcatcagagccaagaaagaggctgcaacatgatactagtactagtagctagttgagcacaaacgcttccccaccgatggtgttggtgatggcacgccaagtcgcagcaatccaagcctttccattgtcctttcccttcaagtagggcacgatgtacttcatcatgtcagtcttggaaatacccaggtgcccccctggcacggacacgaatttcactctcccctcatcatccagcgtcttgagaccaatccagtcctccatgtacagctttgtcttctgagggggcaggacaggatcgaaacctccatctggatagtaaccaaaccatgctgtttcccgaggtatcaagacagcgtcatcctgaaacatgattaata

SEQ ID NO: 402967 - DNA, 522 bp, Oryza sativa nipponbare
tggatcctttacaacttatatagccataggaatagtacaattatatcaacatcataaacagggggaattaatccatggcgatccggccatgggggactagcagtacagtacagaggatttgcatggatggatcggatcaagaagaaggtgaggcagagacgaggaatttaatttagatcttgccgcgtgggccgggcgtcggcggcagctgcgggcccttcttgatcggaagcaggtctggcgacgccgacgcgctgacgtaggccaccagcgatccgccgccgagcagcaggaacttgagcaggagccccctcttggtgaagggccccgcgaacgtctcgaagaacttgctctggagagggttgtacggcgacggcgcgtcggaaccgtacaggtcccactgcccggtggtgttgccgatgtcctcgaggtcgaagtagacgctcttctcgccgtacttggccaccacggcggcgcccggcctgcgggtggtgcggcagaacgcccggggcgacggcctga

SEQ ID NO: 402968 - DNA, 549 bp, Oryza sativa nipponbare
  unsure (1)..(549): unsure at all n locations
aatggcactgaatcatttgtatttcctcatcctttttattcattcctcccagagagacggatccatggaagttttcttgccctcatcaggcaagcagagcacacacacacggtggcagtggaagtgctatgaacaagacgctaatcaacatccagagctaaaacaaacaaggggatcaatgcaaatcccgaaaaaaaaacacaggggaaagtccacatcttcttctcgtccccaactcctccgtgtcaccaccacgtcttgcggatttttttttaccctgttctattcgctcaggcgtccacgatctcgccgtcgtccttcgacgccaggatcagctccgggtgcgccgncgncgncgncgncttnttgatcgtgccgtcgatggcgttcggccggccgagcgccttcagcgccaggtgcgccgccttctggccggagatcatcatggctccgaacgtcgggcccattctcggggcgccgtcgatctcggcgacctccatgccggtgacgatcatgccggggacgacctcgcgggtgaggcggacgatc

SEQ ID NO: 402969 - DNA, 521 bp, Oryza sativa nipponbare
tcaatcaacactatatatgattttattgttatcgattgttccaatcgaatttccactgtgttacatgacttggagtcttggaccaaagaaaagaaaatttcctgatcagttggtatcgctggaaaacaacctagtgggcgcacgacgcccgttcctcgccatcgttgaagaaggcagactgcatgcgagcgactaggggaacgccgtcggaggcatcttcttgtcagccaagaagtggctgaagaggctgagcgcctgcctcggcgcgtgcaggggaacctcgtgcccggcgccgcggatcgtcacgaacgtcaggccctcgtagaggatcgtccatcctccaacctgctgatggtcgtaccacggcgtccactcctgcaccgtcttcaagcccaagcttgttcagggtgagcctcgtcgacgtcacggggatccttccatcggtgtcaccgctgaaaacccagaccctgatgccgccggcgacgagcttacggatgatggggagagtcgagaagggagca

SEQ ID NO: 402970 - DNA, 540 bp, Oryza sativa nipponbare
aacaaagcatcatccataaacacgcgtaccgtgccgtgcatgcatacagatacatacaggcactccacttattttacaaccattcacactctcacactgaaagtcccaaataaaactgacaacagacgcatgcatcgatcatatcatatgcatgatcgtccatagtcgtagattgtaaattgaacaacgaaatcaagaacaattaatcaagcagctgatcgatctctcgtatcaaatgaacatcgtcgtcttcctcacgccgtcacgctggtgctcctgaacgagctgagcgccttggcggcctcgccgcgcagcaccagcttgtggtacgccgccgccaagaacgccccgatcaccggccccacccagaagatccagtggtctttccaaagctgcgtgctggttgtacagcacggcggcgccgaggctcctcgccgggttgatgcccgtgccggtgatcggaatcgtcgccaggtgcacgacgaacaccgcgaacccgatcggcagcggcacgagtacggggatgaaggagtcgcgggc

SEQ ID NO: 402971 - DNA, 616 bp, Oryza sativa nipponbare
agaaatatgaaattattgacgaacaggacagccaactaataacatggcattacggcaacatatccttgagtattgacaaagggaaatcgacagcagtaatgcagtatcttcttgtaatctacacctatagacacatgaattcatgaaacatcattctgcgattatttgtcttgaattcttgatgcgtgaagttagctgctagaaggcaattcagttttcaactcctgaagccttcatggatcatcactaccgacttccatttcttcctcatatagtaattgattagacatcttagcagtcaggatgctgtcttcaccatcgacagctgcctcctctattgcatcggcagtgctatcgccaccctgttctacgagcaccttttttatggttccaaccctttacgtacttgctgctgaacttgtactcccagtcctgaagggcactgagttcaagtaaacttaggccagatatatcatcagtcagatcttgtggctcaaaggacatcttcgccaacgccctactggcatctttaccagcaaacaatgcatatggtccaccaggtccataagacaatctgctctgggagacgtcatagaatctgcccttgatcgccatg

SEQ ID NO: 402972 - DNA, 535 bp, Oryza sativa nipponbare
agagtagaagtagaacttatagcgccataattaactgttccttcaaatacatggcgtactgatacagcagctgtttacatcacacagaaaagcatgcctatctgaaaccaaaatgcgacacacatatgatacacaaagcgctgcaacaagtgcatcaaacaagcaacaacaagtgaccttctaccacgcctgcgcaacttataggcgatacaatatacaacgcgagactgtgcttgcataggatagggacgacgacattatattcttaattgataaactcaagaacgcatggagatggatcgagagatttataaatatggagcttgctcgattgatgacgatgaggtctttctccttgtggctctagatgacgacgacagacttggggtatgcgtaggaaggtgaggacccatccggcggcaacctggtagtcggtcaggaagctctggtaggactggtcgatctagccggagaccaccttgccggcgcaggaggagcatgagcccgcgcggcaagagtaaggcaggtcgatccc

SEQ ID NO: 402973 - DNA, 500 bp, Oryza sativa nipponbare
  unsure (1)..(500): unsure at all n locations
aagctagagatctgctcgatcgatcacacacacacacacaattaaggtacatacatacatgcactgctgcaactgcaactgcagggtcggtgcgtggctactacaagtgtacacatggtacgttggttggcaccatctcgatcgtgtcgttgtgctcacttgccggggacgaagttggtggcgtatgcccaggcgttgttggcgacggggtcggcgacgtggtcgaagaggttctcgatggggcccttgccggtgacgatggcctggacgaagaagccgaacatggagaacatggcgaggcggccgttcttgagctccttcaccttgagctcggcgaaggtgtcagggtcgtcggcgaggccgagcgggtcgaaagcgccggctgggtacacccttgtcgaggccctcgccgagcgggccgncgccgacgcggtagccctcgacgaatcccatgagcaccacctgggaccgccagatggcgaggatgctctgcgcgtgca

SEQ ID NO: 402974 - DNA, 427 bp, Oryza sativa nipponbare
gtatgtaaatattatattattggaaatcattttgaggagctagactagcgtgccttattaacaaggagatatgtaccattacatgatgattaacatataaatctgtagctacatggaattaaggtagtggagcagaggaggaaggatgatagaagactccaattctccatggatgggaatgggatcaggtggccttgcagaactctccgcccagatcgtcgcacgcctcctcggggaacaccgtggtgggctcgtcgtaggataggtagtccctgtcgacttcctccgccgccgcacgagaaacagcaacagcagccgatgatgagagcttggcctctgggtacatctgcacgttgcacgcctcgccgccgatgaggtcgcacgccttccatcggaaacaccgaaatgttagagctgtagtccacct

SEQ ID NO: 402975 - DNA, 377 bp, Oryza sativa nipponbare
tatacgtaagtgcttgctgatacaatatcaacatggagggtacattgccggttccatatgaacaaacataaaaacaccgaaaccccatatggccattatgccgatcctagcctagcttggcgaggacatcgccaagagcagatttgggcaacgtgtagtacttctccgactcttcggggctcttgatcttggctgcatgggcaagcccgtcaatgggggctaagagcttgacagtgaggtccttgaggcccttcttctcgtccttgggcttggagtcgatgacggctttgaggtcgtagcgcaagtaggaggccctgaggcggaggtcgtccctgacgaacgggcactgcttgtttttgatgagcgggttgaggtta

SEQ ID NO: 402976 - DNA, 550 bp, Oryza sativa nipponbare
  unsure (1)..(550): unsure at all n locations
tattaacaaggagatatgtaccattacatgatgattaacatataaatctgtagctacatggaattaaggtagtggagcagaggaggaaggatgatagaagactccaattctccatggatgggaatgggatcaggtggccttgcagaactctccgcccagatcgtcgcacgcctcctcggggaacaccgtggtgggctcgtcgtaggataggtagtccctgtcgacttcctccgccgccgcacgagaaacagcaacagcagccgatgatgagagcttggcctctgggtacatctgcacgttgcacgcctcgccgccgatgaggtcgcacgcctccatcggaaacaccgagatgttagagctgtagtccaccttcgcagnctncactggcaccgccgccgccgccgaacgaacgcgcaacgcaacacggcgaggagcctgaatctgcaggctgcgccccttcacagcagcgggcaacacgggcgacaatccaacgacactgctagcagcgggcngcatcttcttcttcttcttttcttcttcttcttctttt

SEQ ID NO: 402977 - DNA, 497 bp, Oryza sativa nipponbare
  unsure (1)..(497): unsure at all n locations
gttctcaagaatcttaagatggtaaatacacacaagagagaggtacggtatacaagacttagtttttcttaagtacaacagatcttccattcctccatgatcctatcagcttctacacccaaaccacacaaatcaccatgcacgagccctcttcctccactgccaaatcaactggggcttgagtagccaagcatccatgtggtgatcagtagccgatgtcagcgtcgtcgacgacgaggttgccggtgatgagctcacggtaggcggcgacgggccagatgaaccccctcgggaggagcttgacggcgagctcgacgtcgatgatgatctccctcatggccggcttcttctcgccgctgatggcgatgaggtagctcctgccgacccagccgatccagccggcgatgtagaggaagagcaagcccggggtgatgaactcgccccagtgccgctggtcgccgctgacgatgaggtgcgggaggccgtcngcgccgcaa

SEQ ID NO: 402978 - DNA, 501 bp, Oryza sativa nipponbare
atactacaatattataagaagagattatatcccaccatcgatcgattacaccatcatcaataactgaagagcagcctgacagatgattaaaattacatgtccatccacccaaaacacaagtaattaataggtcgattatgagagaagaagaagaagaagaagaagtctagatgtcgaagacgttcttgccggtgaacttgacctcgatggggctgacgttcttgccgatgctgcggaagttctggccgacgccctgcctgccggcgttgaccttctccgggtagacgccgtccttggggtggaggtactgcacctcgccattggggaagacgcggtagaactggtagttgatcttgtacttggagcggagcctggtgcccagggccaggcacttgctctttcttgccagcttcagcaggttggggccctcgcgcatgatggcggcgccgcccgtgggcatctcgaacacctgctccttgggcgacgtccatgtgatgacgt

SEQ ID NO: 402979 - DNA, 515 bp, Oryza sativa nipponbare
  unsure (1)..(515): unsure at all n locations
taaaaaaaactagaacaaacctttatttcataacttttttttcagatctttttcctaacttctaaggatgaaaactaccagtaatcctctttttgtttcttttttactactattacatagggttgtgacaacaacagatatcagtaataatcataggatctaaataaataagaacaagcaatggagttgggaatcactcatcttcgtcgggcctgctcgcgaggcacagctcatggagctcattgagaatccactcctccccagtgtggccacccaggacaagaaccctggtgccgccaaccacgcatgtgctatgaccccaggcgaacttgggtggctggccagggacgttcaaaatcctccatgtcggcttctcctccgctgggtccaggggggaacagttgtgagggcgagtgcagcccancgatggagccaccgaatatgattatccgtccacaggggaggctgaccgcgacatgatcgagcctcggaggtggaccgatgctcgggaaccc

SEQ ID NO: 402980 - DNA, 469 bp, Oryza sativa nipponbare
gtctggataaatatatatagggggagcttccatatatttcattcacatatgcctcacccaacaacatatagccgtagcagataccactgtgacatcaagtcagagagagatcaggtgaaacaaaaacaaaagcggagcacggccggttaaatcaaaagacgatgaacaaactgggaacacacgaaacaaggtgggagacatgatcggatcagagatgaacaattaaacaaggctatatatgacgatgacggcttagttgccaccagactcctcgcagcccgggggcttgtaggcgatgaagctgatgagctgcacctggctgacgttgtcgaagccgatgatacggacgaatgcatcaaggtacgccttcttggcctgctcgagctccttgagcacctgggtgcgtcagtgcacccgacatgggcagcttcacatggccagtacgctgcatcgtagtatgcggggatct

SEQ ID NO: 402981 - DNA, 572 bp, Oryza sativa nipponbare
aactaagaccagtttgatttcgtgtttgatacaaaaattaagatggacggattcacaagagagcaccctctacttaagctttacattacaaggccaaccagcagctgcctgccggccgaccactgcgtgcgcacgcgcgcgcaataatcaaccaatcacacacagtacgcacgcacataaaaaccacccatagccttcacgtacgcccggacgcacgcaccggttcgtgccaagctcaagggtagatggttctcgggatgatgatgtcgccgatgttgttgtgccacgggtccgagaggtggctggccaggttctccagtgggccggtgcccgggtacgccgactgttggacgcagaaacccacaaaaagccagcatggcccaatcgcccgttcttgatctccttgagcttgtactcctcgaacttgacggggtccttggagaagccgagggggtcgaaggcgccgccggggtacttcttcttctcggggtccttctccatggtgcgctggtgctcggcgaaggcgatggccacgaactcgatgaccaggatcgtcggcagcgtgccccatg

SEQ ID NO: 402982 - DNA, 542 bp, Oryza sativa nipponbare
  unsure (1)..(542): unsure at all n locations
atatatagccggagcttcgatatatttcattcacatatgcctcacccaacaacatatagtcgtagcagataccactcttacatcaagtcagagagagatcaggtgaaacaaaaacaaaagcagagcacggccggtaaaatcaaaagacgatgaacaaactgggaacacacgaaacaaggtgggagacatcatcgaatcagagatgaacaattaaacaaggctatatatgacgatgacggcttagttgccaccagactcctcgcagcccgggggcttgtaggcgatgaagctgatgagctgcacctgcctgacgttgtcgaagccgatgatacggacgaatgcatcagggtacgccttcttggcctnctcgagctccttgagcaccttgggtgcgtcagtgcacccgaacatgggcagcttccacatggtccagtacctgccatcgtagtatccgggggatctgtggttctcacggtagacgaatccgaccttgctgaactcgaggcagggcacccacttggaacggagcaggtactcgatct

SEQ ID NO: 402983 - DNA, 499 bp, Oryza sativa nipponbare
aattccagaatcacaagcatgtatatatacgcaaaactttgcagtaaccaaatcgattcacaggccacacatacaggtagtatacagattcgtctacacacaaggttattgcagaggcaaaacacgaggtatgtatatcaaacgctctagaaaagattcatgtgatgaaatacatgatgaaccacgtatgttctcaaggtaaaattaattaatgcagtatagttttaactttgtccatcgatctcaacctgtaactgtgacgacacactggctacagtgccctcgaggtactagcagtatagcagtagctgtagtacgtagcagcagcagcagcaggttcactgtcttgattggattggatcggattagtagacgtagttcttgacgaacatgccctctttggcctcggcggccttgccgtcgctggtgtacttgccgagctgcgccagcgagttggccttggcgcggaggagcagcgcgtcctgcgccgccttcacgt

SEQ ID NO: 402984 - DNA, 355 bp, Oryza sativa nipponbare
ccacgcgtccgcccacgcgtccgcgcagagcatcctcgccatctgggcggtccaggtggtgctcatgggcgccgtcgaggggtaccgcatcgccggcgggccgctcggcgaggtcgtcgacccgctctaccccggcggcagcttcgacccgctcggcctcgccgacgacccggaggccttcgcggagctcaaggtgaaggagatcaagaacggccgcctcgccatgttctccatgttcggcttcttcgtccaggccatcgtcaccggcaagggccccctcgagaacctcgccgaccacctcgccgaccccgtcaacaacaacgcctgggcctacgccgccaacttcgtccccggc

SEQ ID NO: 402985 - DNA, 418 bp, Oryza sativa nipponbare
ccacgcgtccgcccacgcgtccgacgggtcaaccggtggggttttgtacacgtaggagtgcgtggcaaggcattctgtgtggcttcgcgggatgtgtggtctcttttcgttctccgtgggatatcaaagctggttgattcagacctcactggttcattctgcttcctttctgctgtcacaggaggtgcattggcctcactagttgctggctcatgggcactagccatggataaagaacataaggagcttgctctgccagtagccatttattcatttctcatcggttattacatgtgccgaatgataattgcgtggccacaggcttgtgttgcaacatatcatgttgcatatgcagagaacccacagaaccctcacctggggacacttataccagaccatctgcgtgagctccaagcac

SEQ ID NO: 402986 - DNA, 410 bp, Oryza sativa nipponbare
ccacgcgttcgtttgtgactacacccgcttcgcttcctcccctctctaagccggggaagctaagccatggcgtccgtcaccgcccgcaccccggtcgcagccctccgctcgtcggcgtcgctcaagtctaccttcctagggcaatcctccacccgcctcgcccgcgcaccgactacgaggcgtaatgttcgggcggaggccaagggagagtggctccccggcctcccttctcccacctacctcaacggcagcttgccaggcgataacgggttcgacccgttgggtctggcggaggacccggagaacctgcggtggttcgtgcaggcggagctggtgaacgggcggtgggcgatgctgggggtggccgggatgctgctgcctgaggtgctgacgaagatcgggttgatcga

SEQ ID NO: 402987 - DNA, 387 bp, Oryza sativa nipponbare
ccacgcgtccgcccacgcgtccgcgcacgcacgcaccacacacgtagcagcagagcaatggcggcggccatggcgctgcaggtggtggccggcggcggctgctgttgccagcggcccgttcttggagctggtcggcggcggttggcggcggcgcgtgcggtggcgtcggacgcggcggcggcgaaagtgagcgaggaggaggggaaggtgaggctgggtgggtcggaagtggcggtgagcaagctcggcatcggcgcctggtcgtggggggacaccacctactggaacgactccgagtgggacgacaggagactgcaggaggctaaagcagcatttgacacaagcatagataatgggatgaccttatttgatacagcagaagtttat

SEQ ID NO: 402988 - DNA, 382 bp, Oryza sativa nipponbare
ccacgcgtccgaaaaaaccaacccaaccgccgccgcatcgccctcgttagaacgatggccgcgtcggcgctgcaccagaccaccagcttcctcggcaccgcccctcgccgggatgagctcgtccgccgcgtcggcgactccggtggccgcatcaccatgcgccgcaccgtcaagagcgcgccccagagcatctggtatggacctgaccgtcccaagtacctgggcccgttctcggagcagacgccatcgtacctgaccggagagttcccgggagactacgggtgggacacggcggggctatcggccgacccggagacgttcgcgaggaacaaggagctggaggtgatccactcgcggtgggcgatgctgggggcgctgggct

SEQ ID NO: 402989 - DNA, 381 bp, Oryza sativa nipponbare
ccacgcgtccgcgcctagccgcctcccgagagctccaccctcgcctccggcgaaatggcaccgaagcgaggcggcagggcgccggtgccggcgaagaagaagacggagaaggtgaccaacccgctgttcgagaagaggccgaagcagttcggcatcggcggcgcgctgccacccaagaaggatctgcacaggttcgtgaagtggcccaaggtggtgcgcatccagcgccagcgccgcatcctcaagcagcgcctcaaggttcccccggcgctcaaccagttcacccgcaccctcgacaagaacctcgcaaccaacctgtttaagatgcttctcaagtaccgccctgaggacaaggctgccaagaaagagaggcttttgaag

SEQ ID NO: 402990 - DNA, 487 bp, Oryza sativa nipponbare
ccggattcccggtcgacccacgcgtccgctttctgctccttttttctcatgaccacaatgcttgcagctagctctgtagtgaacagcaaccttccttgctcatcaaggatatcctcctgctcagacttcacatctggctactcctggcgtcctatagaggctgcaaaactctgccggacacgagctgtgcgctcgctgcagataacctgtactgccacaaagcctgcaaagtcaccagctgaagaagaatggaagatcaagaggcaagtgctagtagaaaagcgggtccgtagtgttgatgtgaaggaagcactgcgtcttcagaaggaaaacaattttgcaattcttgatgtcaggccagtagcggactttaaagaggctcatccacctggtgccgttaatgtgcaaatatatagattgataaaggaatggacagcatgggatattgcaagacgggcagcatttgcattctttggcatattttctg

SEQ ID NO: 402991 - DNA, 451 bp, Oryza sativa nipponbare
ccacgcgtccgcccacgcgtccggcggccaccatggcgctctcctccccggtgatggcccgcgcggcgccgtcgacctcctccgcgctcttcggcgaggcgcggatcaccatgcgcaagaccgccgcgaagcccaagccggcggcgtcgtcggggagcccgtggtacggcgccgaccgcgtcctctacctcggcccgctctccggcgagccgccgagctacctcaccggcgagttcccgggcgactacgggtgggacaccgcggggctcttcgccgacccggagacgttcgccaagaaccgggagctggaggtgatccactcccggtgggcgatgctgggcgcgctcggctgcgtcttcccggagctcctcgcccggaacggcgtcaagttcggcgaggcccggtggttcaaggcgggctcgcagatcttcagcgagggcgggctcgacta

SEQ ID NO: 402992 - DNA, 433 bp, Oryza sativa nipponbare
ccacgcgtccgcccacgcgtccggtcgaactctcctcaaccctagctcacagccgccgccacttcgccctccgcttccgccgccgccgcgccgccgccaccttcctcgttgcggaacagtgtgctcgcaccgccggcgccatgagtaagttgcagagtgatgctcttagggaggcaatctcacaaattactagtgaatcccgcgagaagcagcgcaagttcgtggaaaccattgaactgcagattggactgaagaactatgaccctcaaaaggataagcgtttcagtggatctgttaagttgcctcacatcccccgccctaagatgaaggtgtgcatgcttggtgatgcccagcatgttgaagaggcagagaaaatgggcctagactatatggatgtggaagctctcaagaagatgaacaaaaacaagaagct

SEQ ID NO: 402993 - DNA, 469 bp, Oryza sativa nipponbare
ccacgcgtccggtgcaatgcgtagagctcgcaatcgccaacccagcctaaccaggtgagttcagggtcttcaaccagttcaccgagcagttctcggtcaacgagctggcaaagctggttacggccgccggtgcaaagcttgggctggaggtgcagaccaagtcggtgcccaacccgcgggtggaagcggaggaacactactacaacgccaagcacaccaagctcatggagctcggcctggagccccacctgctgtcggactcgctcctcgactcgctgctcaacttcgccgtccagtacaaggacagggtcgacacggcgcagatcatgcccagcgtgtcgtggaagaagatgggggcgaagccgaagacggtgtccgtctaagaggaggctggttttgccatggcggggtataatgtcaaccgtgacattgacattataaatttggtgtgtagtaatgcaataattat

SEQ ID NO: 402994 - DNA, 436 bp, Oryza sativa nipponbare
ccacgcgtccggcataagcaacacaagggattaactcatcactcacttagctaattaaatcttcgaccatgtcggacaagtgcggcaactgcgactgtgctgacaagagccagtgcgtgaagaaaggtaccagctatggcgtcgtcatagttgaagccgagaagagccacttcgaggaggtcgccgccggcgaggagaacggcggctgcaagtgcggcaccagctgctcctgcaccgactgcaagtgcggcaagtgaagtcacgaagcaaccgaacactcgccgccggcgagtcacctaccttaattagtccacaataaaaaccacccatatgagtgtggtttgtgtgtgtgctgattattgctgaattaaacccgtgtgttatcgattaattaagcagctggtcgcttcggcgactatgcgtgtatcaacggatg

SEQ ID NO: 402995 - DNA, 299 bp, Oryza sativa nipponbare
ccacgcgtccgcaggcgggagcccggcctggtggcgctgatccaccacaccgtagccgcaggggttaccggccgtgacagcttctacatattacggccagccacaccaaccagctgccgatccacaaagcgctacatggaggcgagcgcgactagggtgacatgcacaccaaatgcggcgtagggctggcagacggcaagcgggacgcgcgcggtgacccggcgtacgagcgctcggggggcgagggcagcctacggcggataggagtaggcagcatctgccgacactaccagcaccga

SEQ ID NO: 402996 - DNA, 438 bp, Oryza sativa nipponbare
ccacgcgtccggagaaagatgctcaagagaaagaagcctcgaaagttccccaggacctcctttacaagagaatagcagaagtcaaagagaaggaaaggcagaacaccttggaagagatcatctactgttggattatttataagttcatggagaatgacatatcaatgacacctgcattagcaccattaggtggccctgtacgtgacatctcctcattgcctaaccaagaggataggttgcaaagcatacattccccggacgctcttgagatgatacaaaatcatctcaaccttataatgggtgaaaaggtagcagccccactagatacagttgttgaaatcagcaacttaaatctgggaaagctttatgcagcatccatcatgtatggctacttcctaaagagggtagatgagcgattccaactcgagaagaacatga

SEQ ID NO: 402997 - DNA, 343 bp, Oryza sativa nipponbare
ccacgcgtccgcgatcgcagcgagacccaccctcaagctccaagctccaagaaccatggccgccacctcgctgtcgccgccgaccgtggccgggctgcggctggcgccgtcgccgcgcgtgcggtcgccgtctgtggcgttcagggcggcgccggcgaggaggaggtcggtggcggcgagggcggagctgagcccgtcgctggtgatcagcctgagcaccggcgtctccctgttcctggggcggttcgtgttcttcaacttccagcgggagaacgtggcgaagcaggtgccggagcagaacggcaagacgcacttcgacgccggcgacgagcgcgccaaggag

SEQ ID NO: 402998 - DNA, 372 bp, Oryza sativa nipponbare
ccacgcgtccgctactagttagtttagtcgtctcgagggtaaattgtgctttgtgtgcggttttgaggggagtacatcggcatgaggatccagtgcgacgcgtgcgaagccgcggcggccacggtggtgtgctgcgcggacgaggcggcgctgtgcgcgcgctgcgacgtcgagatccacgccgccaacaagctcgccagcaagcaccagcgcctcccgctcgacgccgcgctccccgccgccctcccgcgctgcgacgtctgccaggagaaggcggcgttcatcttctgcgtggaggacagggcgctcttctgccgggactgcgacgagcccatccacgtcccggggacgctcttcggcaaccaccagcgc

SEQ ID NO: 402999 - DNA, 488 bp, Oryza sativa nipponbare
attccgggtcgacccacgcgtccgcccacgcgtccggagttgttggagatggcggaggtggcgcctccggcgccggcgccggagccgaccaaggacatcgccgaggagagggccgccgtgccggcgccggaggagtcgaaggccatgaccgtcgtcgatgatgctgagaaagctgcagcaacaggtggctcacacgaaagagacgctctcctgacgacggtcgccacggagaagaggatatcgctgatcaaggcgtgggaggagaacgaaaaggccaaggccgacaacaaggcggccaagaagttggccgacatcgcctcatgggagaactccaaggtggccgagatcgaggccgagattaagaagtaccaagagtacctggagaggaagaaggcggagcaggtggagaagttgatgaacggcgtggcgaaagtgcacagggcggcggaggagaagcgagcggcgacggatgcgcggcgaggggagga

SEQ ID NO: 403000 - DNA, 212 bp, Oryza sativa nipponbare
taccggacctgaaggcccggcccgaccgacccgccacgcgtccgccacgcgtccgccacgcgtccggttcgtttcgttctcgagcgagcaggccatgcgggacgccatcgaggggatgaacggcaaggagctcgacggccgcaacatcaccggcaacgaggcccagtcgcgccgctccggaggcggaggcagaagctgctacggccagcgcg

SEQ ID NO: 403001 - DNA, 355 bp, Oryza sativa nipponbare
ccacgcgtccgagatagtacaccggctatctatccatctatctactcagctttgcgtcctcccgcgaattcaccgcagcaatggcgtccctcgtcgccgtccagcctgtcgccgtgaagggcctcgccggcagctccatctccggcaggaagctcgccgtcaggccgtcgccccgggcgctctgccgcaccacccgcaggccgcgcgccgccgtggtggccaagtacggcgagaagagcgtctacttcgacctcgaggacatcggcaacaccaccgggcagtgggacctgtacggctccgacgcgccgtcgccgtacaaccctctccagagcaagttcttcgagacgttcgcggg

SEQ ID NO: 403002 - DNA, 447 bp, Oryza sativa nipponbare
ccacgcgtccgatcagcttctcgtcgagatgggccgcaagttcttcgttggtggcaactggaaatgcaacgggaccactgatcaggtggacaaaattgtgaaaattctgaatgagggacagattgcttctacagatgttgttgaggtggttgtcagcccaccttatgtgttccttcccgtggtcaagagtcagctgcgcccggagatccaagttgctgctcagaattgttgggtgaagaagggcggggctttcaccggtgaggtcagcgctgagatgcttgtcaaccttagtattccctgggttattcttggacactctgaaaggaggagtttgttgggtgaatcaaatgagtttgttggagacaaaagtggcatatgcgctctctcagggcttgaaggtcattgcatgtgttggtgagactctcgagcagcgggaatctggttcga

SEQ ID NO: 403003 - DNA, 391 bp, Oryza sativa nipponbare
ccacgcgtccgcccacgcgtccgttcccttttggccgtccatctctcctctcctcgctctcgctcgctcgctctctcgctcgctgctcccaaatggcggccacctcgagcctcacggcgaccgccgcctcccctccgctcctcctcaaacccgccccttccccgctcgctgcctcctttctccggcccgtctctcgcttctccaggttccagtccgtcaagaccaaggccacagaaaatgatcagaccgaaaagagtcctccgaagggaagcagccttgtctgccaggactgcgaaggaaacggtgcaatagtgtgcaaccagtgcaagggagatggggtgaattctgtcgatcacttcaacggccgatttaaagccggagccttatgccg

SEQ ID NO: 403004 - DNA, 212 bp, Oryza sativa nipponbare
ccacgcgtccgcccacgcgtccgcattgccgtattagtaaggggatgcaaacactggtttcagtcgtcttccctgatgaagaaaaccgaaccgtactagttgtagttgctgaacatttttctatctctccagtctctccggtgtgccatggaacttcttgcttgatttttctgtgtgaatctgttaaggcttgctctgatctctccgaaaaa

SEQ ID NO: 403005 - DNA, 464 bp, Oryza sativa nipponbare
ccacgcgtccgctcaagaagtactcgagcaaagaaggagagagcttggtgagctgcagagatggccccctccgtgatggcgtcgtcggccaccaccgtcgctcccttccaggggctcaagtccaccgccggcatgcccgtcgcccgccgctccggcaactccagcttcggcaacgtcagcaatggcggcaggatcaggtgcatgcaggtgtggccgattgagggcatcaagaagttcgagaccctctcctacctgccaccgctcaccgtggaggacctcctgaagcagatcgagtacctgctccgttccaagtgggtgccctgcctcgagttcagcaaggtcggattcgtctaccgtgagaaccacagatcccccggatactacgatggcaggtactggaccatgtggaagctgcccatgttcgggtgcactgacgccacccaggtgctcaaggagctcgagga

SEQ ID NO: 403006 - DNA, 385 bp, Oryza sativa nipponbare
ccacgcgtccgctctctctgaatctctggatctctgaaaactctgaacattccaagaactcataaatgacctgcgatctgagaagcttgagctgaagctgccacagtgtctcactgatcgacgatcactcatcttggctgctactgtgcattcactgcgtggttagctagctaactgagcacaagagctttagcattggcgacgccggggcagcagctgccgccagggttcaggttccacccgacggacaaggagctggtggtgcagtacctccggcggagggcgctgtgccagccggtccccaccgccggaatcccagacgtacactactccaccgcagctggacccctgtgacctcccctgagccagggatggtgaggcctac

SEQ ID NO: 403007 - DNA, 232 bp, Oryza sativa nipponbare
ccacgcgtccgcagcagcagcagcaatggccgccctcgccgccgcattcaccgccttcgccgccaagccgcgcctggcgcgcgcgccgtcttccccggccgcgcggttctccgtgtcgtgctccgcgtcgggcaacaacggcggcgccggcgagatggcgcagtcgctggcggcgtcggccaagacgttctccgcggcgctggcgctgtcctcggtgctgctctcctcggcg

SEQ ID NO: 403008 - DNA, 437 bp, Oryza sativa nipponbare
ccacgcgtccggccttatatttgtcgccgacagattgatgaagatggcgtcaaaccttttgatgtaacccaattgcaaggttattggagtcaagaagtgcttatgacaatgttcaatgcagcttcttctcttaaggtacgtttcaaggtcactaaaggtgcttctagttcagatggggcacaaaagaggaagcgtgatgcattcagtgaaaccgatccacagcagtgtgttccttccgctgcattcggttctgatagtctcaagaatgatttggaacataaaactcaaaagcagctatatcctggtagccgtgctgaagtcctatcacaggacagcggtataaggggctgctggtttagatgctttgtattaaagaggcgcggagacaaaatcaaggtgcgatatgaagatcttcaagatgctgatgagacaagaaa

SEQ ID NO: 403009 - DNA, 445 bp, Oryza sativa nipponbare
ccacgcgtccgcagcgcctcctgcgcttcaaaagctcagcaacaaattccctgggcttcatgtgtacacgggaacaattgattctgaagttgatgagagagggttcatagttccggggttgggagatgccggcgatagaagcttcgcgacttaactatgctaattatcgcagctgctgttctacctccacgagagggattggcgtaagctgaaatttccgaggattcgagcgcttttgacttgggagtcaggaacagtcgagttcacgttcacctgtagattgcctcgttcgagattctcccttcggaacttatcgttttgtaattatccattttgtgttgtcatgttgaatataggattagttcacgtccatccacgtttacaatttgttgggaatatgcatgtttaatgttttcaattatatcttacaaatttcttgatactc

SEQ ID NO: 403010 - DNA, 416 bp, Oryza sativa nipponbare
ccacgcgtccggaagcagcagcagcagctcagccgccgccgatggcgtccactatcatggccccaacctcccgcgtcctcgccgccaagacccccttcctcggccatccccgcccctccaatgcccccgtccgcgacatcggcgtcgtcgccaccggccgcatcaccatgagcaaggagctgtggtacgggccggatagggtgaagtacctggggccattctcggcgcagacgccgtcgtacctgaggggcgagttcccgggcgactacgggtgggacacggcggtgctctccgcggacccggaggcgttcgcgaggaacagggcgctggaggtgatccacggccggtgggcgatgctcggcgcgctgggctgcatcacgccggaggtgctcgagaagtgggtgcgcgtcgacttc

SEQ ID NO: 403011 - DNA, 426 bp, Oryza sativa nipponbare
ccacgcgtccgaccggctatctatccatctatctactcagctttgcgtcctcccgcgaattcaccgcagcaatggcgtccctcgtcgccgtccagcctgtcgccgtgaagggcctcgccggcagctccatctccggcaggaagctcgccgtcaggccgtcgccccgggcgctctgccgcaccacccgcaggccgcgcgccgccgtggtggccaagtacggcgagaagagcgtctacttcgacctcgaggacatcggcaacaccaccgggcagtgggacctgtacggctccgacgcgccgtcgccgtacaaccctctccagagcaagttcttcgagacgttcgcggggcccttcaccaagagggggctcctgctcaagttcctgctgctcggcggcggaatcgctggtggcctacgtcagcgcgtcg

SEQ ID NO: 403012 - DNA, 466 bp, Oryza sativa nipponbare
ccacgcgtccgagaaaatgagctgccctgcgatggcgcaattactgtccaacacgctctactacaaaaggttcttcccatactatgccttcaatgtgttgggtggacttgacagcgaaggtaaaggatgtgtcttcacatatgatgctgttgggtcttatgaaaggacaggttatagtgctcaggggacaggtgcagctttgatgatgcctgttctggacaatcagctaaaatctcctagcccattactacttccagctcgggatgcagtgacaccattatctcaatcagatgctgtcgatctggttaaggacgtttttgcatcagccacagaacgagacatatacactggagataaactggagattgttgtcattaaacagcgccggctctcaccgtgagttcattgagctaaggaaagattagcgtgggatactatcaaaccacctcgtacctgtgcaacaaca

SEQ ID NO: 403013 - DNA, 433 bp, Oryza sativa nipponbare
ccacgcgtccgccacgcgtccgaagcaacacaagggattaactcatcactcacttagctaattaaatcttcgaccatgtcggacaagtgcggcaactgcgactgtgctgacaagagccagtgcgtgaagaaaggtaccagctatggcgtcgtcatagttgaagccgagaagagccacttcgaggaggtcgccgccggcgaggagaacggcggctgcaagtgcggcaccagctgctcctgcaccgactgcaagtgcggcaagtgaagtcacgaagcaaccgaacactcgccgccggcgagtcacctaccttaattagtccacaataaaaaccacccatatgagtgtggtttgtgtgtgtgctgattattgctgaattaaacccgtgtgttatcgattaattaagcaactggtcgcttcggcgactatgcgtgta

SEQ ID NO: 403014 - DNA, 428 bp, Oryza sativa nipponbare
ccacgcgtccggcatgcaggtgtggccgattgagggcatcaagaagttcgagaccctctcctacctgccaccggtcaccgtggaggacctcctgaagcagatcgagtacctgctccgttccaagtgggtgccctgcctcgagttcagcaaggtcggattcgtctaccgtgagaaccacagatcccccggatactacgatggcaggtactggaccatgtggaagctgcccatgttcgggtgcactgacgccacccaggtgctcaaggagctcgaggaggccaagaaggcgtaccctgatgcattcgtccgtatcatcggcttcgacaacgtcaggcaggtgcagctcatcagcttcatcgcctacaagcccccgggctgcgaggagtctggtggcaactaaaccggcatcggcatatatagccctggtt

SEQ ID NO: 403015 - DNA, 358 bp, Oryza sativa nipponbare
ccacgcgtccgggaattgacgctgatggcatggaatcactgtacaagaaggtccatgctgccatccgcgccgatcctaccatggccaaatcgaccaagaaggaaccggctacccacaagagatacaacctcaagaagctgacctacgagcagaggaaggccagtctcgtcgaaagattgaatgctctcaactcctccgctggtgctgatgatgatgacgaggaagaggatgacgagtgagagagtagccttatcacagtagtttcatcttatgctgccaaacaaactccatatggcatttaagtttacctgtagtcttgcaatttgcaacaggcatttttgtttatgttctgcactct

SEQ ID NO: 403016 - DNA, 426 bp, Oryza sativa nipponbare
ccacgcgtccgcccacgcgtccgcccacgcgtccgggcgatgcagatcatggtgacgacgacgacgctgatgctgttcgcggggaggttcgggctggcgccgtcggcgaacaggaagtcgacggcggggctgaagctggaggcgcgcgactccggcctgcagaccggcgaccccgccgggttcacgctcgccgacacgctggcctgcggcgccgtcggccacatcatgggcgtcggcgtcgtcctcggcctcaagaacatcggcgtcctggaccagatcatcggctaatcaaattcattaagctagtcacacgaatcaatactcctatgtgtaatcgatgcatgagtgcctgtgtgatggacgatgtaatgatcatgtaaattgtgcgtggaatcagtgcttatctagcttaattttggttctggc

SEQ ID NO: 403017 - DNA, 415 bp, Oryza sativa nipponbare
ccacgcgtccgcggacgcgtgggcagcactgctactggacatactctactactactagccagtaagctagctaactaactacgtggctatggcccccaccgtgatggcctcctcggccacctccgtggctccattccaagggctcaagtccaccgccgggctccccgtcagccgccgctccaccaactcgggcttcggcaacgtcagcaatggcggaaggatcaagtgcatgcaggtgtggccaattgagggcatcaagaagttcgagaccctatcgtacctgccaccactcaccgtggaggatcttttgaagcagatcgagtacctgcttcgatccaagtgggtgccttgcctcgagttcagcaaggttggattcgtctaccgtgagaaccacaagtctcccgggtactacgat

SEQ ID NO: 403018 - DNA, 435 bp, Oryza sativa nipponbare
ccacgcgtccgcggacgcgtgggctcgagcaaagaaggagagagcttggtgtgctgcaaagatggccccctccgtgatggcgtcgtcggccaccaccgtcgctcccttccaggggctcaagtccaccgccggcatgcccgtcgcccgccgctccggcaactccagcttcggcaacgtcagcaatggcggcaggatcaggtgcatgcaggtgtggccgattgaaggcatcaagaagttcgagaccctctcctacctgccaccgctcaccgtggaggacctcctgaagcagatcgagtacctgctccgttccaagtgggtgccctgcctcgagttcagcaaggtcggattcgtctaccgtgagaaccacagatcccccggatactacgatggcaggtactggaccatgtggaagctgcccatgttcgggtgcactga

SEQ ID NO: 403019 - DNA, 373 bp, Oryza sativa nipponbare
ccacgcgtccgcggacgcgtgggctcgctcgctcgctcgctgacgtgtacgcttcgcggcggaggcggcggcggcggcttccgatggcggaggcggcgggggcggcggtggcgccggcgaagctgggtctgtactcgtactggcggagctcgtgctcgcaccgcgtccgcatcgccctcaacctcaaaggattggagtacgagtacaaggcggtgaacctgctcaagggggagcactctgatccaggttaggtgctacgccacctgtctgtcaaactgctttcctccccctatctatacttgtgtacggttttgtgctgcgtctagagactgttcgtgcaattaccgccgcaaatttgtgcttggatgttgag

SEQ ID NO: 403020 - DNA, 447 bp, Oryza sativa nipponbare
ccacgcgtccgcgagcaaagaaggagagagcttggtgagctgcagagatggccccctccgtgatggcgtcgtcggccaccaccgtcgctcccttccaggggctcaagtccaccgccggcatgcccgtcgcccgccgctccggcaactccagcttcggcaacgtcagcaatggcggcaggatcaggtgcatgcaggtgtggccgattgagggcatcaagaagttcgagaccctctcctacctgccaccgctcaccgtggaggacctcctgaagcagatcgagtacctgctccgttccaagtgggtgccctgcctcgagttcagcaaggtcggattcgtctaccgtgagaaccacagatcccccggatactacgatggcaggtactggaccatgtggaagctgcccatgttcgggtgcactgacgccacccaggtgctcaaggagctcg

SEQ ID NO: 403021 - DNA, 439 bp, Oryza sativa nipponbare
ccacgcgtccgttcacgcttttgctactaacacatacacttgatcaccacgctgctcatgccaaggtccaagagaggaccagaggtggaggtctctagcacccgcgcgagggggccgatgtggtgcggatggccgagtaccgaagcgcgtgcacgtcgctgtgccgcccaaggaggagcaaggcggtggcaggcgcgccgcgctgctgggtatggccaccatgttcaccgccaccgccgccgggcaggccaaggccggcgtgttcaacaagtacctcgagaagagcaaggccaacaaggagctgaacgacaagaagaggctggcgacgagcggcgccaacttcgcgagggcgtacaccgtcgagttcggcagctgccagttcccctacaacttcaccggctgccaggaccttgccaagcaaaagaaaggcccattcatc

SEQ ID NO: 403022 - DNA, 464 bp, Oryza sativa nipponbare
ccacgcgtccgcagcagcctgtaagagttgaaatcaccgaagctgcaatggaagtgggtgctgaaaaactttctgagctggtgaacgacgcctacaaggatgcacatcagaggagtgtccaggcaatgaaagagaggatggctgatctggcacagagcttaggaatgccagcaggccttggtgatggactcaagtgatagtgtggtacatgaatgcttttcaataaaaaaaaaagtgtatctcaattttgtatactagctgtattgagtcatcagtttaaaattcgtggcgagtactgttagctgtgtaagaactgtaatcgagaacatctgatcctgttttccttaatcattggcacaccataatgcattgacgcaagtgtgctgttttaaaaaaaaaaaaaaaaaaaaaaaaaaaaaaaaaattatttttattatattataaaatatatttttaaattatat

SEQ ID NO: 403023 - DNA, 294 bp, Oryza sativa nipponbare
ccacgcgtccgcgcagggcgtgcagctgccggccgggcccagtcgctccggcggcaggtccaggctcgccgtggtcagggccgacgccgccgccgccgacgtccagaccggtcgccgcgccgtgctcggcctcgtcgccaccgggatcgccggcggcgccctcgcgcaagcggcgctcgccgaggccgccaagcccatcaagctgggccccccgccaccgccctccggtggactccctgggacgctaaactcggaccaggcgagggacacggacctgccgatgatggaaagggt

SEQ ID NO: 403024 - DNA, 414 bp, Oryza sativa nipponbare
ccacgcgtccgctactactagccagtaagctagctaactaactacgtggctatggcccccaccgtgatggcctgctcggccacctccgtggctccattccaagggctcaagtccaccgccgggctccccgtcagccgccgctccaccaactcgggcttcggcaacgtcagcaatggcggaaggatcaagtgcatgcaggtgtggccaattgagggcatcaagaagttcgagaccctatcgtacctgccaccactcaccgtggaggatcttttgaagcagatcgagtacctgcttcgatccaagtgggtgccttgcctcgagttcagcaaggttggattcgtctaccgtgagaaccacaggtctcccgggtactacgatggcaggtattggaccatgtggaagctgcccatgttc

SEQ ID NO: 403025 - DNA, 386 bp, Oryza sativa nipponbare
tcgggaccctctttctctcgacacatggcatggcacgcaagcgctgcgcgccaagtgccacctcctcgccgcctgggcaccggcgaagccgcgctcatccaccctctccatgcccacctcgagggcacccacctccctcagagcggcggcggaggatcagcccgccgcggcggcgacggaggagaagaagccagcccccgcggggttcgtgccgccgcagctggaccccaacacgccgtccccgatcttcggcgggagcacggggggactcctccggaaggcgcaaggggaggagttctacgtcatcacatggacgtcgcccaaggagcagtgttcgagatgcccacgggcggcgccgccatcatgcgcgaggccccaacctgctg

SEQ ID NO: 403026 - DNA, 478 bp, Oryza sativa nipponbare
ccacgcgtccgagcaagggagcattgctttgtattgatagtacctttgcatccccaatcaatcagaaggcactaactctaggtgctgacttagttatccattcagcaacaaagtacattgctgggcacaatgatgttattggaggctgcatcagtggcagagatgagctagtttccaaagtccgcatctatcaccatgtagttggtggtgttctaaatccgaatgctgcctacttgattcttcgaggcatgaagacactgcatctccgtgtacaatgtcagaataatactgcaatgcggatggcccaatttttagaggaacatccaaagattgcacgtgtctactatcctggtctgccaagtcacccagaacatcacattgccaagagtcagatgaccggctttggtggtgtcattagttttgaggttgctggagactttgatgctactaggagatttattgattctgttaagatacc

SEQ ID NO: 403027 - DNA, 479 bp, Oryza sativa nipponbare
ccacgcgtccgcgcgcacctccacagcattagccatcaacgaccagcatctcagctttgctcgccttctcgaagcttctgctgccatggcggaccagctctccgaagagcagattggagagttcagggaggccttcagcctcttcgacaaggacggcgacggttctatcaccaccaatgagctaggaaccgtgatgcgaagtctagggcagaacccaacggaggcggagctgcaggacatgatcagcgaggtggacacggacagcaacggcaacatcgaattcaaggagttcctgggcctgatggcgcgcaagctgagggacaaggactccgaggaggagctgaaggaggcattccgcgtcttcgacaaggaccagaacggtttcatctctgccaccgagctccgccacgtgatggccaacatcggggagcggctcaccgacgaggaggtcggcgagatgatcagcgaggccgacgtcg

SEQ ID NO: 403028 - DNA, 419 bp, Oryza sativa nipponbare
ttccagggccgacccacgcgtccgcggacgcgtgggctagatgctgccgcagtaaagattcgtcaacaagggcgttctaaatatggggtcaaaaagccaaaaaaataagtgattcgtttttagcccttataaaaagaaaacggattcttgaacctctttcacgctcatgtcacgtcgaggtactgcagaaaaaagaactgcataatccgatccaatttttcgtaatcgattagttaacatggtggttaaccgtattatgaaagacggaaaaaaatcattggcttatcaaattctctatcgagccgtgaaaaagattcaacaaaagacagaaacaaatccactattggttttacgtcaagcaatacgtagagtaactcccaatttaggagtaaaaacaagacgttattaaaaaaggatcg

SEQ ID NO: 403029 - DNA, 381 bp, Oryza sativa nipponbare
ccacgcgtccgatcagagatcaggtagaacagtgagagtgaggtgcataaaaatttgagctgaagctgaggatggcaacatccatgatcacctcgccgctggtggcgccggcccgggccaagggccttccgtccatctcccgccggggatcctccttcgccatcgtctgcagcggtgggaagaagatcaagaccgacaagccctacgggattggaggtggcatgtcagtcgatattgatgcatctggcaagaagagcacggggaagggtgtgtaccaattcgttgacaagtacggcgcaaacgtcgacggctacagcccaatctactcgccggaggaatggtctcccaccggtgacacctacgttggtggaaccaccgggc

SEQ ID NO: 403030 - DNA, 462 bp, Oryza sativa nipponbare
ccacgcgtccgcccacgcgtccggtctccccctttctgaacacagctccaccccttctgctgcatctcccaccggcctctgaattgtgggcctgaggcgatggcggcgctcgccccgtccaagatgctcggcacccggctcaacttcgccggctcctcccgctacgccaccgcggcaccgaccaccggagcgcagaagatcgtctccctcttcagcaagaagcccgccccgaagcccaagcccgccgccgtcacctcctcgagccccgacatcggcgatgagctcgccaagtggtacggccctgacaggaggatcttcttgccggagggtctcctggaccgctcagaggtgccggactacctcaacggagaggtccccggagactacggctacgacccttttggcctcagcaagaagccagaggacttctccaagtaccaggcctatgagctgatccatgcc

SEQ ID NO: 403031 - DNA, 457 bp, Oryza sativa nipponbare
ccacgcgtccggttttctcgtccggcggcgtcacccctgcgaattatctaactagctaggccggccatggagacggtggccgcggccagctacacccgcggggcggcgacgcgctcgccagcgtgctgcgccgccatgtccttctcgcagtcctacaggcccaaggccgctagaccgccgagcacgttctacggcgagtcgctgcgggttaacacggcgaggtcgctgccgtctgggaggcagtccaaggcggcgagccgggcggcgctcagcacccggtgcgagatcggggacagcctggaggagttcctgaccaaggcgacgccggataagaacctcatcaggctgctcatctgcatgggggaggcgatgaggacgatctcgttcaaggtcaggacggcgtcgtgcggcggcaccgcctgcgtcaactccttcggtgacgagcagctcgccgtcg

SEQ ID NO: 403032 - DNA, 440 bp, Oryza sativa nipponbare
ccacgcgtccgcggacgcgtgggtaccgctcgccggcggtgcccgtctctcaccaagaccctcctcgaggacgtcaagcagatcttcaagaccaccaccggcacccccttcctcttccccaccaccgggacggtggcgtgggagagcgcgctgacgaacacgctgtcgccgggggacaagatcgtgtcgttcctgatcgggcagttcagcctgctgtggatcgaccagcagcaacgcctcaacttcaacgtggacgtggtggagagcgactggggctacggcgccgacctcgccgccctcgactacaagctccgccaggacccctcccactccatcaaggccatctgcatcgtccacaacgaagaccgcactggagtcaccaacgacctttccgccgtccgcaaaatcctcgacaagcacaggcacccggcgctactact

SEQ ID NO: 403033 - DNA, 369 bp, Oryza sativa nipponbare
  unsure (1)..(369): unsure at all n locations
ccacgcgtccgcccacgcgtccgcccacgcgtccgtgttgctctgtatgacgttgtcctaatggactggaacagggggatgttgctgcaatcagaagcacatacgctcttattaacatgatttgctgttatgcaaatcttttttctgccggtnnaaaaaaaaaaaaaaaaaaaaaaaaaaaaaaaaaaaaaaaaaaaaaaaaaattaaaaattttaaaaataaaacaaagtttaanaactctaaaaaaaacaaaanacaaaatattcaatatactgacactaaaacaaactaaatttggggggggcgccttcaagagaaccaaagttaaactccgggggttggaaagttaaaatcttttttttagggcc

SEQ ID NO: 403034 - DNA, 345 bp, Oryza sativa nipponbare
ccacgcgtccgcggacgcgtgggcggacgcgtgggcggacttcttgtttgacgcgtgggcgaaggcgcaggcggcggcgaggatcatgacggaggtggcgccgccgcagctggtgtcggtgatgccgcggaggaagcaggtggcgaagagcctcgacacgatcgccgaggacgacagggagctgatgcaccaagtgccctacgccggcgacgggcaccaccacggcgtcaagaagcaagcttgagcgaccagctcggcgagcaccttcgccacgccgacgttggccttcgagcgggaaccaaccggcgggccggcgccggcgccggcgagcgggttcatgagggg

SEQ ID NO: 403035 - DNA, 385 bp, Oryza sativa nipponbare
  unsure (1)..(385): unsure at all n locations
ccacgcgtccgcaagacgtccatgaagatgaagcgcaccatggctgctacttccatcctgttcttcttcctcgccggcgtggccgccgcccacggcagcacagcggacgacaccacgaccaccaccaccaacaccatacgcctcccgatcgacggagcagtggcggcgcgaaggaggacgaggccgtggaagtgctgcgacaacatcgtgaggctgccggagaggatcaacccgccgttctggcagtgcgacgacgagctggagcccgggcagtgcttccgccagtgcgaggcgtgccgggatcccgccgggcggncgttccccggccggccgctcatctgcgacgacgtcttctggggcgacgacccgggcacctcgtgcgcgc

SEQ ID NO: 403036 - DNA, 428 bp, Oryza sativa nipponbare
ccacgcgtccgaccccaccagcagcagcagcagtagctgagcttgaatcatctgagcgaggtagacatggccggcgccaccatggccctctcgtccccggcgctggccggcaaggccgccgcgaaagtgttcggcgaggggcgcatcaccatgcgcaagtcggcggcgaagcccaagcccgccgcgtcggggagcccgtggtacggcgccgaccgcgtgctctacctcggcccgctctccggcgagccgccgagctacctgaccggcgagttccccggcgactacgggtgggacaccgcggggctctccgccgacccggagacgttcgccaagaaccgggagctggaggtgatccactccaggtgggcgatgctcggcgcgctgggctgcgtgttcccggagctcctcgcccgcaacggcgtcaagtt

SEQ ID NO: 403037 - DNA, 419 bp, Oryza sativa nipponbare
ccacgcgtccgcaggtctcccgggtactacgatggcaggtattggttcatgtggaagctgcccatgttcggctgcaccgatgccacccaggtgctcaaggagctcgaggaggccaagaaggcctaccccgatgcctttgtccgtatcatcggcttcgacaacgtcaggcaggtgcagttgattagcttcatcgcctacaagcccccaggttgcgaggagtctggtggcaactaagctaagatcaagcatcgcgctggtggattgctgcctataataatagtatgcagctttgttttgggctatgttgatgatatatcaatatataatatgctatatatttttattttacagtttggttatgtaccatctcaatggcctctgctcttaacacatatgtaataatctcttccctccctctc

SEQ ID NO: 403038 - DNA, 474 bp, Oryza sativa nipponbare
cgacccaggcgtccggccacgcgtccgggcggccagaagctctccttccatgtcgtttagcgccacgccatggaaaagctctgtgaatggatcttgaggcagcatgaaaatggcttgaggctgacagttgctgatatagcctcgcacatccagcacgagatccagtatggaggtgacaatgcatcagcctctccaagatcacagcatgcaagccaaagcactcaagctacagtgcctattcccaacacaatgagccagcagccatcaccaaacttatttgcgctaggaaatacaggattggtgcagtccaagaactcagcggtcttttcaaatgcactatctagccccgttcgccggagcctgcaaccattccacctggagcagggtggcgatgcggggtacttcgcaaacggcgttaaccgcgatcaaaactcgacggcttcgaacgattcatccatggacatgcattcagac

SEQ ID NO: 403039 - DNA, 396 bp, Oryza sativa nipponbare
  unsure (1)..(396): unsure at all n locations
gggccgacccacgcgtccgcccacgcgtccgaagaagtactcgagcaaagaaggttagagcttggtgagctgcanagatggcccccggcgtgatggcgtcgtcggccaccaccgccgctccctttcaggggctcaagtccaccgccggcatgcccgtcgcccgccgctccggcaactccagcttcggcaacgtcagcaatggcggcaggatcaggtgcatgcaggtgtggccgattgagggcatcaagaagttcgagaccctctcctacctgccaccgctcaccgtggaggacctcctgaagcagatcgagtacctgctccgttccaagggggtgccctgcctcgagttcagcaaggtcggattcgtctaccgggagaaccacagatcccccggat

SEQ ID NO: 403040 - DNA, 366 bp, Oryza sativa nipponbare
ccacgcgtccgcccacgcgtccgcccacgcgtccgcccacgcgtcctttccacgcgtccggcttcggagtgcatgcaatcctttaccgtgttctacaagacccgtcatcttctgcagaggctctgagaaccaaggaacttgcaattacaaatcttaccaactacctcactaaagagaaccgggctgaggagctgcgaaaccttctaacccagctcaggcctttttttctcgttgattcccaaggcaaagactgcaaaaattggccgtggaatcatcgatgctgttgccaagataccaagaacatctgaacttcagatctcactctgcaaggagatggttgaatggacccgtgctgagaagcggaca

SEQ ID NO: 403041 - DNA, 470 bp, Oryza sativa nipponbare
ccacgcgtccgcccacgcgtccggacgaccacagaggtggctttctctggctgcggtggtggagaggccgcggcggcggcgaatggtgaggcggagctacccgtaccgcggcgtccggcagcggccgtgggggcggtgggcgtcggagatccgcgaccccgtcaagggcgcccgcgtctggctcggcaccttctacaccgccgtcgaggccgcgcgcgcctacgacgccgaggcgcgccgcatccacggccacaaggcaaggaccaacttcccgcccgacgagcctccgctgccggcgccatcgcaggcgccgttctgcttcctgctcgacgacgacgacgacgacgacggcgtggcccgtggaaacagcccggcgtcgtcgtcggcgccggacagagccttcgcttgcacgacatcttctacggtggcgttcggcgagcgaggcgatgagctcatactgctggagtgct

SEQ ID NO: 403042 - DNA, 433 bp, Oryza sativa nipponbare
ccacgcgtccgcccacgcgtccgcccacgcgtccgaagatttttgtttttgagggcttacatcccatgtttgatgaacgtgtgagggacctcctagatttcagcatctacctggacatcagtgacgaggttaaatttgcatggaaaattcagagggatatggcagagcgcggtcacagccttgaaagcatcaaggctagtatcgaagccaggaaaccagattttgatgccttcattgatccccagaagcaatatgctgatgcagtgattgaagttctgccaacccagcttattcctgatgacaatgaaggaaaggtgctacgggttaaattgatcatgaaagaaggtgtaaagaacttcaacccagtttacctcttcgacgaaggatcaagcatcacctgggtcccttgtggaaaaaaactcacatgttctta

SEQ ID NO: 403043 - DNA, 229 bp, Oryza sativa nipponbare
tcctcttcctcttcttcctcaatatgtagcatcatccgggcccctttcggcggcggcttaatcggaacaaccccgtttttcgccgccccgttttcccctgcggggatgaaccccgccgtcaacggcttaaaggttgggtcggccaagtccaagaccgtgttttatgacaggaagccgaagcttttcaagccgttaagggccggccagccccccagttccttgtggtttt

SEQ ID NO: 403044 - DNA, 213 bp, Oryza sativa nipponbare
  unsure (1)..(213): unsure at all n locations
ccacgcgtccgtgtagaagttgctttcaccgtttatgaggattttgcacactacaaatcangagtttacaagcacttcacaggtggattgatgggtggccttgctgtcaagttgtttggttggggaaccacggttgctgccaaggattactggctgcttgcaaaccattggaccagaggatggggcgatgatgggtccttcaagatcataagg

SEQ ID NO: 403045 - DNA, 391 bp, Oryza sativa nipponbare
ggacccacgcgtccgcggacgcgtgggagcaggatggctaaaagattctcaagccattccactgaccatgaccactcctatgtggagtttcctcaagaagcagagtccaaggaagatttccggccaccgtctcctgctccgtcttatactgaaaaggatgtcctctcatctatggtaagacgactaggcgagttggaggagaaggtgcaggcgctcgaaacgaagccatccgagatgccatttgaaaaggaggaattgctgaatgcagccgcccgccgtgtggttgctttagaagccgagttaatctctacaaagaaggctctctatgaagccctgatgcggcaggacgagctgcttgcgtacattgacaagcaagatatgatcaagtttc

SEQ ID NO: 403046 - DNA, 448 bp, Oryza sativa nipponbare
ccacgcgtccgcccacgcgtacggaacgacagctgcatggagttcctccgagacatggacgtcgtcgaggcgcccaccttcctcttcatcagggacggcgacatcgtcggccgatacgtcagctccggcaggagggagctcatcggccagatcctcatatacaacggcgtcaaggacacctacacatatacagattcatcactacgcagctcagctgcatgcagcaaccgtaattaaattaattactgtactactctcttgatcatgattggaatactacaccaccacactagctggagaagatcaagctcgttttacactggggacgatctgatcaaacctatctctgcgatttggtcccgcgtaatactagaatcttggaacgtcaattgcaagatcgcgacttgattctgcctatgattgtatctggatccatccatctatcata

SEQ ID NO: 403047 - DNA, 419 bp, Oryza sativa nipponbare
ccacgcgtccgcggacgcgtgggcgggtgggacaccgcggggctctccgccgtcccggagaccttcggcaaaaaaccggagcctgaaggtaaccaattcccgtgggcgattcttggcccccctcggttgctttttcccgaagctcctcgcccgaacgggtcaagttcgcgaggccggtggttaaggcggctcgcatatcttcatcgagggcggctcgactacctcggaacccgagcctgatccacgcgcagagcatcctcgccatctgggcggtgcaagtggtgctcatgggcgccgtcgaggggtaccgcatcgccggcgggccgctcggcgaggtcgtcgacccgctctaccccggcggcgccttcgacccgctcggcctcgccgatgaccccgagcgttcgcggagctcaggtgaa

SEQ ID NO: 403048 - DNA, 341 bp, Oryza sativa nipponbare
ccacgcgttcggtcttcttcttgtgtaccttacctagcagcagcagcttgcttgcttaattagctattacaagcatggcggcgacagcactgagcacacaggtccggttggcgatgtcccttcgggtggcgaacgggccagcgcccgcgcgcgtgtcggtgcttcccgcgagcaacaagctgggagacaagctggggatgcaagccaccttcaacgtggaggtgatcacaccggaccgcgaagtggaacttcaagtgcccgaccacctgtgcattcttgaccaagcggaggaaggagggatcgacctggcttaattctggcgggcgggcttctggttcttc

SEQ ID NO: 403049 - DNA, 469 bp, Oryza sativa nipponbare
ccacgcgtccgcccacgcgtccgcccacgcgtccgctccgaaccctatcctgcttctcctcctcctccccgccgccgccgccgcgagcacagacgacgcagccatgtccgggaggaagaagacgcgagagcccaaggaggagaacgtgacgctcggccccacggtccgcgagggcgagtacgtcttcggcgtcgcgcacatcttcgcgtcgttcaacgacaccttcatccacgtgacggatctgtccggcagggagacgctcgtccgcatcaccggtggcatgaaggtgaaagctgaccgtgatgagtcatccccttatgctgccatgcttgcatcccaggatgttgcacagagatgcaaggagcttggaattactgctctgcacattaagctccgtgctactggtggaaacaagacaaaaactcctggtgctggtgctcaatctgcgcttagagctcttgcacgttct

SEQ ID NO: 403050 - DNA, 465 bp, Oryza sativa nipponbare
  unsure (1)..(465): unsure at all n locations
ccacgcgtccgcccacgcgtccgcccacgcgtccgcccacgcgtccgcggacgcgtgggaaacagatcaccgatcgatcacgcgtccaccgccgcgccacccgctcggtcaccccaccatggccgccaccacctgccgcctcgccgccgcgccgctcgtcctcgcaccgctgcctcgccgccccaccacggtcgcctttgccgtcgccgccaccggcatcaagtacggtctcagggcgtcgaggggcgtggcgatcagggcggccgacggcaccggcagcgagacggaggtgccggaggtcgtcaaggcagcccaggacgcgtgggccaaagttgaggacaagtacgccgtcaccgccatcggcgtcgccgcgctcgtcggcctctggactgccataggcgccatcaaggccatcgacaggcttncacttttgcccggcgtgcttgagctcgttggaatcgggta

SEQ ID NO: 403051 - DNA, 429 bp, Oryza sativa nipponbare
ccacgcgtccgattcaagcgggccttctccgcgccatggccaaagacgctcagataccagggagatggacggccgttctggaggattgtggtggcagaggcaaccgaatgcaccaataatgattatttcgaagaagtatatgagtattacgctcatggagatgcatggcgtctgcctgctggggcttacgaaacactgcgtgatctaaaggatgctggagttaagctagctgttgtatctaacttcgacacacggttacgaaaattacttaaggaccttcatgtctcggatatgtttgatgccattgttgtatcatcggaggttggacatgaaaaacctgctccagagatcttcaagagagcattagatcaaattggcgtagaggccagcaaggcagtacatgttggagatgatgaaactgcagacaag

SEQ ID NO: 403052 - DNA, 400 bp, Oryza sativa nipponbare
ggagcacaaatttacatgttgcacccacaccctacacccatgcataataatacatcgtatatacgtacgtacatacatacccctctcgatcacacgcaccatcgatcgtacaaagttgcgtacatacatacgtacacacatatacgcatacgcacgtacatacatacataattaaaaactcgtaattaattaaatacgtagttgatggcatctctaatggaacttgaggctggtgaggatgttgttgtggacgggatcagcgaggtgatcaagcaggttctgcacggggccaaccccggtgaagagcgcctggacggagaagccgaggaaggcgagcatggcgagcctgccattcttgatctccttgagcttgagctccttcatctccgcctcgctcttg

SEQ ID NO: 403053 - DNA, 384 bp, Oryza sativa nipponbare
tataattaattcacaacaccatatttcattgatcaggttcagaacctgcacagaaatacacactaccggtacagatctcaccctctctccaatactcgtacatccatccacgcggtccacacgaatacgtacatctatacggtacacgtacgtacatctactgcaccgcgtacacacacgcacactctcctgcagagacgcgcatcgtcgtcaacctagctagcttagctgaaggcgatgcgtcgccatggcagcacggcggcggcggcgctcacttgccggggacgaagttggcggcgtaggcccaggcgttgttgttgacggggtcggcgaggtggtcggcgaggttctcgagggggcccttgccggtgacgatggcctgga

SEQ ID NO: 403054 - DNA, 393 bp, Oryza sativa nipponbare
tttttagctagaacactgctgctaccatgagatagtttatccccctgtagtactgtacatcagaaattcaccactcaactcaccccctcacccatgcatccagatccatgcatgcaggaaacaattaccacaacacacacagtaagtctgaatctcatcacatccatctctctctctctcctccccccaattcattaacatcttatacatgcatactccacaaaaaaaaaaaagaagaaacaagaagagaacatcttccatcgcccaatcatcggtttcaccagcctgaactcatcaagctccttgagatgccctggccctgatgaaatcgatcacacgctcagcctgacagcgtctggatgatggtgttgtgccacgggtcagacaggtgct

SEQ ID NO: 403055 - DNA, 373 bp, Oryza sativa nipponbare
ggctcaaagtcatataaaccttttctattcatgcaggcagaaatttctgactcattttctacaccttctacacattttatcgccgtaaaatgtttactattgcatggtacaatcaatacacatctcctatcatatacatgaaaaacttcttcagtttttacatgtctatgactcctcgatgggcatcttgatgcccttgatctcgcgtgccagagaccgcaactcttcgacctcgtcgccggtgaggctccagccgagcgcgtcggcgaactcctgcgcctggccggcgttcttggctccggggattggcaccacattgccttggcatgtcagccagttcagtgaaacctgggttgggttcttcccatagctt

SEQ ID NO: 403056 - DNA, 361 bp, Oryza sativa nipponbare
aattaagctagaaatctcctggatcgatcacacacacacacacaattaaggtacatacatacatgcactgctgcaactgcaactgcagggtcggtgcgtggctactacaagtgtacacatggtacgttggttggcaccatctcgatcgtgtcgttgtgctcacttgccggggacgaagttggtggcgtatgcccagccgtggtggccaccgggtccgcgacctggtccaagaaggtcttgaaggggcccttggccgtgaccaagggctggacaaagaaacccaacatggagaacatggcgaggcgggcgttcttgagcttcttcaccttgagctcggcgaaggtgtcagggtcgtcggcga

SEQ ID NO: 403057 - DNA, 393 bp, Oryza sativa nipponbare
ttttgtaaagctctgatatcttgcatagtttcccaacatggtccggtgaacagaaaatatatgaaactagacttcagaaaaccacagcactgtcgcatggtgctaactgagttcctcgtcaaaatcattacactgaaaaatgaaactacagggcgagctcaacggcggggggcgaatataatttaggtcatccgctgggcggcctccttagcgagaagcttttccctggccttggtcttcgcctgcgacttggagcccatgacgccgcctccccacttcttcctgacctcgtcgaacttgtcgttgaagttcgccttgatggcctccaagatcttgctgaactcaagcttgtcctcgttcttgacagtggtcaagcacagaacagatgcagtc

SEQ ID NO: 403058 - DNA, 401 bp, Oryza sativa nipponbare
tcatgagaaatctaacacatcttcatataggcaggaggtccaaggaggcatatccttttgggaaaggaagaagaaaggatcaaactagtgcactatttatccgagaagatgcctcgttacaactcatcacacctccatgttcatgaatactgatgcactaattacaagtaatatgtcctaattgcttattcttctccttcaacagccggtaggccttccttgaaccatgtgtagagtcctccatccagatggaacacattcttgtaaccattcaggaccaacaagtaagctgctatcagggacctcgattgcttcccatcaggaaagttctgtgttggtttcaatgttcctcctgtcgaacatgccacaataatctttgcatctttaccaagtttctcatc

SEQ ID NO: 403059 - DNA, 377 bp, Oryza sativa nipponbare
aaaatcattattgcagagacgtcatcttcttcttcatcttcttagtgtacacaacaccaactcgatcatcatctcgtcgcactaaacccatcttccccaacccaaagacaacgaactcgctggccacaaatccatccaaccacaattaaccactgctaagctacggtcccccacttcacttgccggggacgaagttggtggcgtacgcccaggcgttgttgttgacggggtcggcgaggtggtcggcgaggttctcgagggggcccttgccggtgacgatggcctggacgaagaagccgaacatggagaacatggcgaggcggccgttcttgatctccttcaccttgagctccgcgaacgcctcggggtcatcggcg

SEQ ID NO: 403060 - DNA, 394 bp, Oryza sativa nipponbare
aacagtgccaagtgtcacaatcttgccattcttgaaagaattatgattcacaggctggttctcagacaataatgtggtgcaggaaaaaataattcgcacagcaggttaccgaccacttggagtaccacagaaagatttcaacggttgaagtcaagttaatcgataacatcaaaaatgatttctgaacttgttgcacaaaaaaatgatagttgagaaaacaataaaagttccaagcagggaagtctctagaaattcgaggagcatgaagaaaaccatttagaacacccggatcacttttcccatagtgctcttcaggtacaagcatctcacgttctgccaattcttcttcaaaagagagacaaggaagttcacgctcatttgcacattttggaaa

SEQ ID NO: 403061 - DNA, 381 bp, Oryza sativa nipponbare
ttagaccaagaaattgttgaagttcgattgagtatgatagacctttttactaggcaaaccacacgaatacacgattgattaatttcactgagaatagcacgggtacatcacatcacacaaattcatacgttgatacacgcatagtcgccgaagcgaccagctgcttaattaatcgataacacacgggtttaattcagcaataatcagcacacacacaaaccacactcatatgggtggtttttattgtggactaattaaggtaggtgactcgccggcggcgagtgttcggttgcttcgtgacttcacttgccgcacttgcagtcggtgcaggagcagctggtgccgcacttgcagccgccgttctcctcgccggcggcgacc

SEQ ID NO: 403062 - DNA, 407 bp, Oryza sativa nipponbare
ttggacaaggatgatttgatttatgctccatggctgttgcggcttcgctcatcgctcatactgaaagcatatcagagctggatcctatcctatccagtgtacacaaatcatttccagattaacgaatacacgattaactgttaacaaaatggtatttggattctacatgactctcagcttcccacaaaaaggatccaaaagcagctgcctccaaaacaagatgggtgagttctatgaaagttattgttatcatttgaccatcctttgcattgacagagccatcatctaagactttaatatctggccgtccaaacaacgcctgtgtttgcttctctatcagtgagacggcctcttttgatctgatagtagcatacctttgcaacgtatcagcatccaagcgtgaaaca

SEQ ID NO: 403063 - DNA, 377 bp, Oryza sativa nipponbare
gcaaattcaggattgcaattcatgaatcatggagcactggtaattgagtttctgggtaagtgccagtgccacacatacgaagtctgaaactctgaaagtaactgatacctgagcctagcgaaagatcatcaaactgccaaatttcatgcggtcaatatacacacgcgattgcactactgttccaaattaatcaaccttttttcttttcttttttacccatctcatacataatcacgtagaaacaccagagatccattcagattacattgcatccatccaagatgagaatgatcagaagaagtttgggttgtatccgttgctgcaggtggcgaggatgtagtaggcgaccatgtggccgagggagccccaggcgagga

SEQ ID NO: 403064 - DNA, 393 bp, Oryza sativa nipponbare
ttgcaagcaaactttcgtcatgtcatagtacatcatagttcatgcccaacaccatgctgataagtattgggcccaaattgtcttacaattacatacgcccacagtaagatgtacttagcacacttagtacaaccgagatggcagtgttctttgcatacatacaaaattacatcacttgcatagcattactgttacataacaacatctcatccaagatcaggaacgatgaagaagtcctcgtcgtcatcgggtatctccacccgtggcttcttgctttggcgtgcaccgctcgccttgtagagccccatgttgctcgctggctgcggcgaggcgaagagctcaggcacctccgccgccgtgctgcctcccttggccggcgactggacatggaac

SEQ ID NO: 403065 - DNA, 351 bp, Oryza sativa nipponbare
ttgacgagagcggagcacactaagggtcattcattcattggatttgatcaaagcaaacacgagacgagctttcttcttgcgatcaaaaacacagatgggcaaccacacagtaacacaaactagatagtagttccacacaaaactaacgatgataacgatcggatgatgatgatggtagctcgattagatagatagataacttggccatgagggccccaccgctcagttcctccagttcccgtcggagttgccgccgccgcggctgccgtagccaccgccgtagccgccgccgccgccacggccgccaccgtagccgccgccaccgccgtagccgccttcacggcgctggcc

SEQ ID NO: 403066 - DNA, 382 bp, Oryza sativa nipponbare
aaaaccgaacacatgggatcgcagtacgtcgcatgcagcatcgaattggatcctttacaacttatatagccataggaatagtacaattatatcaacatcataaacagggggaattaatccatggcgatccggccatgggggactagcagtacagtacagaggatttgcatggatggatcggatcaagaagaaggtgaggcagagacgaggaatttaatttagatcttgccgcgtgggccgggcgtcggcggcagctgcgggcccttcttgatcggaagcaggtctggcgacgccgacgcgctgacgtaggccaccagcgatccgccgccgagcagcaggaacttgagcaggagccccctcttggtgaagggccccgcgaacg

SEQ ID NO: 403067 - DNA, 387 bp, Oryza sativa nipponbare
gatctgaaactcacatgatagataactcacgacaaaaggagctaaacattattggtatggtagtatgttcagtggtgtgcattattagcattgctcaagctgcaggtagcttcagggaagtgaaggggaggaaaaagagtagctgctccagcacaaaactactagcattacataagcacagaaaaaggtatgatctttttcagacatcttccaaccccaaggtgaatggggtgaaaaacttaagccgacttcaccggggccgagttgatgaagtccatgaattcaagcttcaatgaagcaccaccgaccagaaaaccattaacatcaagctttgctgccagctccttgcagttcgcaccagttacggaaccttcatagatgatcctt

SEQ ID NO: 403068 - DNA, 212 bp, Oryza sativa nipponbare
tttttcggagagatcagagcaggccttaacagattcacacagaaaaatcaagcaagaagttccatggcacaccggagagactggagagatagaaaaatgttcagcaactacaactagtacggttcggttttcttcatcagggaagacgactgaaaccagtgtttgcatccccttactaatacggcaatgcggacgcgtgggcggacgcgtgg

SEQ ID NO: 403069 - DNA, 361 bp, Oryza sativa nipponbare
ggaagggtatatagccggggcttccatatatttcattcacatatgcctcacccaacaacatatagtcgtagcagataccactcttacatcaagtcagagagagatcaggtgaaacaaaaacaaaagcagagcacggccggtaaaatcaaaagacgatgaacaaactgggaacacacgaaacaaggtgggagacatcatcgaatcagagatgaacaattaaacaaggctatatatgacgatgacggcttagttgccaccagactcctcgcagcccgggggcttgtaggcgatgaagctgatgagctgcacctgcctgacgttgtcgaagccgatgatacggacgaatgcatcagggtacgcc

SEQ ID NO: 403070 - DNA, 387 bp, Oryza sativa nipponbare
tgcacgaaggaattgttctcaagaatcttaagatggtaaatacacacaagagagaggtacggtatacaagacttagtttttcttaagtacaacagatcttccattcctccatgatcctatcagcttctacacccaaaccacacaaatcaccatgcacgagccctcttcctccactgccaaatcaactcacctggggcttgagtagccaagcatccatgtggtgatcagtagccgatgtcagcgtcgtcgacgacgaggttgccggtgatgagctcacggtaggcggcgacgggccagatgaaccccctcgggaggagcttgacggcgagctcgacgtcgatgatgatctccctcatggccggcttcttctcgccgctgatggcgatg

SEQ ID NO: 403071 - DNA, 376 bp, Oryza sativa nipponbare
gaaacagaactaagattactggaggcacggatcagagaagacaaatccttagcgtgcgcggaaaaacaaagggacgacctgtatcattaactggactttaaaactcatgttcaataaaagaaacacactcgcacacacacatgccggcacggcatttttctgagcaacgaactcaagcgatcagagtaggctgcgctcgggataacagagaggctgggagggcgatgtccacgatcatgctacggtaaaggagctcgatgccctgtagacgaacatggtggcgcgcaggaaccaccaggtcgacgacggccagcgccttgcagatgtacagctaagccgaactcgacggtggccgggatcaggtggcgcttgtcga

SEQ ID NO: 403072 - DNA, 379 bp, Oryza sativa nipponbare
ttttaggtctcgtatggatggattgcaaagtacacaaatgtacaaattaaaacatcaaaagagttaactaagcttaaagcagcagctgacacataagttgcaaaccccaacttttttcagtttctgaattctggatggatcatatcagattcatcacagcatcgtacaatctgtgcaagcattggtacatcgagcgatggagagagagagtagtctacaatggcggctgggccattcacgagcccggcgtgaacttggtggcgtagacccaggcgttgttggcgacggggtcggcgaggtggtcgagcaggttctccaaggggcccttgccggtgacgatggcctggacgaagaagccgaacatggagaacatggcgag

SEQ ID NO: 403073 - DNA, 337 bp, Oryza sativa nipponbare
ttttttttttttttgggcgagggagtaagtgtattatatgtatgtaaatattatattattgtaaatcattttgaggagctagactagcgtgccttattaaaagggagatatgtaccattacatgatgattaaaatataaatttgtagttacatggaattaaggtagtggaccaaaggaggaaggataataaaaaattcaaattttcaatggatggaaatggaataaggtggctttgaaaaattttccgccaaattggtggaaggcttcttggggaaaaacgggggggggttgttgtaagaaaaggaagtccttgtgaatttcttcggcggccgaagg

SEQ ID NO: 403074 - DNA, 382 bp, Oryza sativa nipponbare
aaaaccgaacacatgggatggcagtacgtcgcatgcagcatcgaattggatcctttacaacttatatagccataggaatagtacaattatatcaacatcataaacagggggaattaatccatggcgatccggccatgggggactagcagtacagtacagaggatttgcatggatggatcggatcaagaagaaggtgaggcagagactaggaatttaatttagatcttgccgcgtgggccgggcgtcggcggcagctgcgggcccttcttgatcggaagcaggtctggcgacgccgacgcgctgacgtaggccaccagcgatccgccgccgagcagcaggaacttgagcaggagccccctcttggtgaagggccccgcgaacg

SEQ ID NO: 403075 - DNA, 401 bp, Oryza sativa nipponbare
  unsure (1)..(401): unsure at all n locations
atgattatttncaagaaaaggttggtgagcaattcagatacgcatagttcagatagaaagactacaaaatgtcttacgtaaccacttccgtaataatggtgaacactgaataatacaacggtaatttaaatacatctggcaaggaaaaggcacattctgctagtaactgaatggtattgttgttgcacaggtacgaggtggtttgatagtatcccacgctaatccttccttagctcaatgaactcacggtgagagccggcgctgttgatgacaacaatctccagtttatctccagtgtatatgtctcgttctgtggctgatgcaaaaacgtccttaaccagatcgacagcatctgattgagataatggtgtcactgcatcccgagctggaagtagtaatgg

SEQ ID NO: 403076 - DNA, 401 bp, Oryza sativa nipponbare
tactaggcaaaccacacgaggacacgattgattaatttcactgagaatagcacgggtacatcacatcacacaaattcatacgttgatacacgcatagtcgccgaagcgaccagctgcttaattaatcgataacacacgggtttaattcagcaataatcagcacacacacaaaccacactcatatgggtggtttttattgtggactaattaaggtaggtgactcgccggcggcgagtgttcggttgcttcgtgacttcacttgccgcacttgcagtcggtgcaggagcagctggtgccgcacttgcagccgccgttctcctcgccggcggcgacctcctcgaagtggctcttctcggcttcaactatgacgacgccatagctggtacctttcttcacgcact

SEQ ID NO: 403077 - DNA, 390 bp, Oryza sativa nipponbare
aaagatatatagccggagcttccatatatttcattcacatatgcctcacccaacaacatatagtcgtagcagataccactcttacatcaagtcagagagagatcaggtgaaacaaaaacaaaagcagagcacggccggtaaaatcaaaagacgatgaacaaactgggaacacacgaaacaaggtgggagacatcatcgaatcagagatgaacaattaaacaaggctatatatgacgatgacggcttagttgccaccagactcctcgcagcccgggggcttgtaggcgatgaagctgatgagctgcacctgcctgacgttgtcgaagccgatgatacggacgaatgcatcagggtacgccttcttggcctcctcgagctccttgagcacct

SEQ ID NO: 403078 - DNA, 394 bp, Oryza sativa nipponbare
ggcaggcagaacacaattatatcaatatccaaacggcagcttctcacataaataagataactgatagctcaaggttgagaatcaaaaaccgaaagaaataggttctttgagcagagtgcagaacataaacaaaaatgcctgttgcaaattgcaagactacaggtaaacttaaatgccatatggagtttgtttggcagcataagatgaaactactgtgataaggctactctctcactcgtcatcctcttcctcgtcatcatcatcagcaccagcggaggagttgagagcattcaatctttcgacgagactggccttcctctgctcgtaggtcagcttcttgaggttgtatctcttgtgggtagccggttccttcttggtcgatttggccatggta

SEQ ID NO: 403079 - DNA, 386 bp, Oryza sativa nipponbare
gacagaaacaaaattaagctagataagcactgattccacgcacaatttacatgatcattacatcgtccatcacacaggcactcatgcatcgattacacataggagtattgattcgtgtgactagcttaatgaatttgattagccgatgatctggtccaggacgccgatgttcttgaggccgaggacgacgccgacgcccatgatgtggccgacggcgccgcaggccagcgtgtcggcgagcgtgaacccggcggggtcgccggtctgcaggccggagtcgcgcgcctccagcttcagccccgccgtcgacttcctgttcgccgacggcgccagcccgaacctccccgcgaacagcatcagcgtcgtcgtcgtcaccatgatctgca

SEQ ID NO: 403080 - DNA, 404 bp, Oryza sativa nipponbare
taaaataaaaatatatagcatattatatattgatatatcatcaacatagcccaaaacaaagctgcatactattattataggcagcaatccaccagcgcgatgcttgatcttagcttagttgccaccagactcctcgcaacctgggggcttgtaggcgatgaagctaatcaactgcacctgcctgacgttgtcgaagccgatgatacggacaaaggcatcggggtaggccttcttggcctcctcgagctccttgagcacctgggtggcatcggtgcagccgaacatgggcagcttccacatggtccaatacctgccatcgtagtacccgggagacctgtggttctcacggtagacgaatccaaccttgctgaactcgaggcaaggcacccacttggatcgaagca

SEQ ID NO: 403081 - DNA, 392 bp, Oryza sativa nipponbare
aaatatatatagccggagctgccgtatatttcattcacatatgcctcacccaacaacatatagtcgtagcagataccactcttacatcaagtcagagagagatcaggtgaaacaaaaacaaaagcagagcacggccggtaaaatcaaaagacgatgaacaaactgggaacacacgaaacaaggtgggagacatcatcgaatcagagatgaacaattaaacaaggctatatatgacgatgacggcttagttgccaccagactcctcgcagcccgggggcttgtaggcgatgaagctgatgagctgcacctgcctgacgttgtcgaagccgatgatacggacgaatgcatcagggtacgccttcttggcctcctcgagctccttgagcacctgg

SEQ ID NO: 403082 - DNA, 381 bp, Oryza sativa nipponbare
tttaggctagcaattttaagggtcatttatttggacagaagctttgaaaaacatatacacctattttcaattttcgcaacaagttctgtgcttattgttacagcttccaatgataagttgggtacaacttttaatctatttttcagatgaacatacactgtattttctaggtagaggaaggggcatctggttgtctgtctgggagtgctgcttgaaatgctggatgtttcatatactcctcatggagcctcgcgagagtgggataatttaacatgttaatttgaaaacgagtcactgctgcataaatctgaggtgcgaggaatacgtctgccaatcggacttcatctcctgttgcatacttcccagcacagccttttacta

SEQ ID NO: 403083 - DNA, 392 bp, Oryza sativa nipponbare
aaatatatatagccggagcggccatatatttcattcacatatgcctcacccaacaacatatagtcgtagcagataccactcttacatcaagtcagagagagatcaggtgaaacaaaaacaaaagcagagcacggccggtaaaatcaaaagacgatgaacaaactgggaacacacgaaacaaggtgggagacatcatcgaatcagagatgaacaattaaacaaggctatatatgacgatgacggcttagttgccaccagactcctcgcagcccgggggcttgtaggcgatgaagctgatgagctgcacctgcctgacgttgtcgaagccgatgatacggacgaatgcatcagggtacgccttcttggcctcctcgagctccttgagcacctgg

SEQ ID NO: 403084 - DNA, 299 bp, Oryza sativa nipponbare
gaaaaaacgcttcagatttgcactcacatgatacaaatacacattgagcacaacaagcgttcacatatgcatgcagtcgtgtcatatcacacaggcattaggtacaggaatgtttttatggctggccaatcgatcgatgatcatcaaaatatcatcaccatatggagaagacctacgatccgcacttgtacttttcctagccatcccactctaactcaagatcatctgagatgaatggcactaacttctgcttggcaaggtcctggcaggcggctaagaaaaatgtgaactggcagatg

SEQ ID NO: 403085 - DNA, 396 bp, Oryza sativa nipponbare
ttttgtttgaatcatgcgtgagtgcttgctgatacaatatcaacatggagggtacattgccggttccatatgaacaaacataaaaacaccgaaaccccatatggccattatgccgatcctagcctagcttggcgaggacatcgccaagagcagatttggtcaacgtgtagtacttctccgcctcttcggggctcttgatcttggctgcatggtcaagcccgtcaatggtggcgaagagcttgccggtgaggtccttgaggcccttcttctcgtccttgggcttggagttgatgacggttttgaggtcgtagcgcaggtaggaggccctgaggcggaggtcgtccctgacgaacggccactgcttcttctcgatgagcggcttgaggttgatgatgt

SEQ ID NO: 403086 - DNA, 396 bp, Oryza sativa nipponbare
aaaaacaaacataatgacgtgataccatccattttttttattgtcgacgaatttatcagatatgctctagatacatatcttgtgtgtatatagccggagctttgttttcacatatcctcacccaacgataattgtagtactcttacaataaaaccggccggagagggagggaagagattattacatatgtgttaagagcagaggccattgagatggtacataaccaaactgtaaaataaaaatatatagcatattatatattgatatatcatcaacatagcccaaaacaaagctgcatactattattataggcagcaatccaccagcgcgatgcttgatcttagcttagttgccaccagactcctcgcaacctgggggcttgtaggcgatgaagct

SEQ ID NO: 403087 - DNA, 380 bp, Oryza sativa nipponbare
ataagaagagattatatccgaccatcgatcgattacaccatcatcaataactgaagagcagcctgacagatgattaaaattacatgtccatccacccaaaacacaagtaattaataggtcgattatgagagaagaagaagaagaagaagaagtctagatgtcgaagacgttcttgccggtgaacttgacctcgatggggctgacgttcttgccgatgctgcggaagttctggccgacgccctgcctgccggcgttgaccttctccgggtagacgccgtccttggggtggaggtactgcacctcgccattggggaagacgcggtagaactggtagttgatcttgtacttggagcggagcctggtgcccagggccaggcact

SEQ ID NO: 403088 - DNA, 361 bp, Oryza sativa nipponbare
ggaaaaaacttattcgcaattctcagctggaatatcaaagttttccacggggtgcaggggcaaacaagatcagatgggtgacctttcatgatgggggtgcaatcaggggcttaaattttgtcaagcgcctgaacaacgttttttttaaaatcctaaaaatcctccactccaaggctgaacctgaccaaggtgcccttgattccataaatttctctctgctcctttgaatcccaaaaagacatgatggcgggctgatcaataatgctttcacagcccccaaatgagggggcatgatggggtattttaacagaatcaataaatctcctagtagcatcaaagtctcccgcccccttaaaactta

SEQ ID NO: 403089 - DNA, 404 bp, Oryza sativa nipponbare
ttactaaatttgattttagtattggtatgaaatttagcactgccaaatttaggaaacacgaggatagaaagagtaagttttggtctgttgcccatgggccggcacgggcccacagcgtacggactacggactacggctgtgaacttgcactggccagtgttatttctcgatctttcagtggagcatcatactacacgcccacacaattgttttgccattttacaacaacacacatcattcgtgtagctcattgactcatgagaatctcagtgctggctcaattattacaggatcacgcacttctggccacgcttgctcgccggcgcggcggagggccctgcactcttcgtcctgctgccgccgtcggggtccctcttctcctctatcctcttcctcctcttctt

SEQ ID NO: 403090 - DNA, 416 bp, Oryza sativa nipponbare
gtttgtttcgagaaagatggggggcgattctccttctattgattcttttccgatcgagatgtatggatccatgtgtctacatacctagattctgttcatggattaacgaaaatgtgcaagagctctatttgcctctgccattctatgagtcgcttcctttttgcgtatggcacccccaccccctttggcagcatctactaattcggaacttaatttgaaagccatatttcgacccggacgcttttgggatgcttctaataaccaacgaatggcaagtgctcttccttgtttagatcctatttcaatcggaactttccgcgtcgatccttttttattacgtcttgtttttactcctatattgggagttactctacgtattgcttgacgtaaaaccaatagtggatttggttctggct

SEQ ID NO: 403091 - DNA, 396 bp, Oryza sativa nipponbare
ttaatctccaaattcaggtgtcaagtgtagtatatcatcatcatgcaagtacagtgttacatagattaatcacaatgcagtttgattaagcagtgggcatcatcacatcgcattcagaggaaggctatcttagattacagatgaatatgcagacacccagcttggtgttacatacatagactggatttgggtgaaatttagccggcgagggcgctggtgttgtagacgaggagggcgccgccgccgaggagcccggcgagggtcacggcccagatcagaagcccggtggttccaccaacgtaggtgtcaccggtgggagaccattcctccggcgagtagattgggctgtagccgtcgacgtttgcgccgtacttgtcaacgaattggtacacaccc

SEQ ID NO: 403092 - DNA, 390 bp, Oryza sativa nipponbare
gatgaaaaccacttcgagacaatttactcaggtagcaaatatttctcagccacaaatccaaacacttggtccttcctatcagaagatcagaatgaacaggttttcaaattcatctcccaactcgacgataatttacacgtacatttaacacattcttccacccttctcaaactcctcccttcttcttcccgggtaagattaaaattaacttgaggccagccagcgtcgccggcggcgagatgtttacaggctgggcgtcctctcggcggcgccggagatgacggtgagcaggttgttgccgaaggggtcgctgaggtgcttggagaggttctcgacggggccctcgccggtgacgtaggcctggatgaagaaccccagcatggagaacat

SEQ ID NO: 403093 - DNA, 389 bp, Oryza sativa nipponbare
ttaaaacagaaatgcgaatttacctttatatgcaactgtttacaccaaaaggggaaaaaaacgggtaccttgcaaaaaggagtataactttgcagtttcaagtcccacttcaactacaacccaatctgcattacaggatgggagtctaaaacgactgcagtttcagcgtttttgaggcctgcagagacactgggctcgcgttgcagcaaaagattaggcggcggcgcccacggtggcgccggcggtgagcctcgacgagccgtagagagtctcctcgaaccggatgatctcgttcttggaaccgtaggccacttgagtccgctcgtcgaggttgttgatcaccttgtccagcaccgactgtttgccgtcgctgctgtacccgccggctt

SEQ ID NO: 403094 - DNA, 394 bp, Oryza sativa nipponbare
gatgattaatttaactgttcactgttgtatacatcgaggttcaagattaattaagtaaaagctgcagtaccttcacaaaattatactccttactccttagcatagagctgatcgatggagcgtataaaaatttaactttacatacagagaccaaattatatgcaataggattaatttgccgctgttccgttctgccaaactgcaggcagaaccatcgctgctgagaattgctttccttccttcgttcgttgtgcttcagatcctggacgggatgagcggcgtcgaattcgacaggtacgccgccgccgccgccacgccggagccgagcttcaccgggtagccgatgtccttgagcaccatctccactccactcagggcacccatcaattgcagc

SEQ ID NO: 403095 - DNA, 468 bp, Oryza sativa nipponbare
tataattaattcacaacacggtatgtcattgatcaggttcagaacctgcacagaaatacacactaccggtacagatctcaccctctctccaatactcgtacatccatccacgcggtccacacgaatacgtacatctatacggtacacgtacgtacatctactgcaccgcgtacacacacgcacactctcctgcagagacgcgcatcgtcgtcaacctagctagcttagctgaaggcgatgcgtcgccatggcagcacggcggcggcggcgctcacttgccggggacgaagttggtggcgtaggcccaggcgttgttgttgacggggtcggcgaggtggtcggcgaggttctcgagggggcccttgccggtgacgatggcctggacgaagaagccgaacatggagaacatggcgaagccggccgttctggatctccttcaccttgagctccgcgaaggcctccgggtcg

SEQ ID NO: 403096 - DNA, 459 bp, Oryza sativa nipponbare
gagtgtatatagccggagctttgttttcacatatgctcacccaacgataattgtagtactcttacaataaaaccggccggagagggagggaagagattattacatatgtgttaagagcagaggccattgagatggtacataaccaaactgtaaaataaaaatatatagcatattatatattgatatatcatcaacatagcccaaaacaaagctgcatactattattataggcagcaatccaccagcgcgatgcttgatcttagcttagttgccaccagactcctcgcaacctgggggcttgtaggcgatgaagctaatcaactgcacctgcctgacgttgtcgaagccgatgatacggacaaaggcatcggggtaggccttcttggcctcctcgagcttcttgagcacctggggggaatcggtgcagccgaacatgggcagtttccacatggtccaata

SEQ ID NO: 403097 - DNA, 360 bp, Oryza sativa nipponbare
ggggccttgtgtttgggggggagcaaacacgtacactcttcataatagtattattaaggcattatagctgatgtcttttgatcacactgcgatcaaattatgcatcataggcagtacaactccgcgtcaggaaaaagtagaggagatatatttcttgttattacttaatacagcattcacatatatcgaaccatccggtacgtacgtagtagtactccacgcgttcacatcgatgatcggggacgatatcctcaggtagtacttatgcaaaagcgttggcgtaaactgacgaactgaacggacggacggtcggatttaaggctcccataagtccaagttgtcggagacaaagtcgtagtg

SEQ ID NO: 403098 - DNA, 388 bp, Oryza sativa nipponbare
gaatcatacgtaggtgcttgctgatacaatatcaacatggagggtacattgccggttccatatgaacaaacataaaaacaccgaaaccccatatggccattatgccgatcctagcctagcttggcgaggacatcgccaagagcagatttggtcaacgtgtagtacttctccgcctcttcggggctcttgatcttggctgcatggtcaagcccgtcaatggtggcgaagagcttgccggtgaggtccttgaggcccttcttctcgtccttgggcttggagttgatgacggttttgaggtcgtagcgcaggtaggaggccctgaggcggaggtcgtccctgacgaacggccactgcttcttctcgatgagcggcttgaggttgatgatgt

SEQ ID NO: 403099 - DNA, 405 bp, Oryza sativa nipponbare
gcaggggaaatcgatggatcgacctctctccttaacttgttcttaattctcatgtacaatcaaagaaacacacacgcacacacacatgcgtgcactgcatctctctgagcaacgaactcgattgatttgattttgattcgctagggattaaagagaagctgagatagagatttcgacgatcatgcgacgctgaaggagctggctgcgctctcgacgaacttcctggcgcccttgaaccacctcttgtcgccggcctacgccttgcagatgtacagcttgccgtcgttgacggtggccgtgatcagctggtgcttgccgccctcgtcgccgtccgccgtcctcgtcagcaccgttacgctgtagtactgcttccctcccaccaccggcgccgagctcttcaagatg

SEQ ID NO: 403100 - DNA, 392 bp, Oryza sativa nipponbare
taatatatatagccggagcgtgcgtatatttcattcacatatgcctcacccaacaacatatagtcgtagcagataccactcttacatcaagtcagagagagatcaggtgaaacaaaaacaaaagcagagcacggccggtaaaatcaaaagacgatgaacaaactgggaacacacgaaacaaggtgggagacatcatcgaatcagagatgaacaattaaacaaggctatatatgacgatgacggcttagttgccaccagactcctcgcagcccgggggcttgtaggcgatgaagctgatgagctgcacctgcctgacgttgtcgaagccgatgatacggacgaatgcatcagggtacgccttcttggcctcctcgagctccttgagcacctgg

SEQ ID NO: 403101 - DNA, 388 bp, Oryza sativa nipponbare
gggaaacgaataaaatcattattgcaaaaacatcatcttcttcttcatcttcttagtgtacacaacaccaactcgatcatcatctcgtcgcactaaacccatcttccccaacccaaagacaacgaactcgctggccacaaatccatccaaccacaattaaccactgctaagctacggtcccccacttcacttgccggggacgaagttggtggcgtacgcccaggcgttgttgttgacggggtcggcgaggtggtcggcgaggttctcgagggggcccttgccggtgacgatggcctggacgaagaagccgaacatggagaacatggcgaggcggccgttcttgatctccttcaccttgagctccgcgaacgcctcggggtcatcggcg

SEQ ID NO: 403102 - DNA, 400 bp, Oryza sativa nipponbare
taaagaaacagcaaattgtatttgttcgcattcaagacagggtaccttttttagctaggagagaccaacatgcagaacaaaatgtcaatatgcaggattaaatgtctgtggagaccaacgggaactgaagcaatatgaaataatagccaacataactagcacatgactgtaaagacattttggcatttaagccatgatcttggcagacctcatgtaaagactgtcgacgaccttcccaacatttgaaatagtttcaagtgtagcagggaagattgcctcggtcttgggatcctcaaagataatgaggcagccagcaccttgatccagagttcctgcaaacttcttgtcaaggatcatctgcgacagcttcttctcaacatgatcaactggcaactcaatc

SEQ ID NO: 403103 - DNA, 403 bp, Oryza sativa nipponbare
ttggcactaaaggaaggacctattttttatagtagaaagcaaccgtatttctttctacattgaaatatagaagatgtacattgaaatgtgtcaagaagagatgtaggagcaccctcatggagagggatttttagaagttccattgcatggtttcacaagttatgcaatgaccatcctactttcttctagctgtaatatttccaaaactagttacaagaaatgcgaggatgcccattgtcattgatatggtatggtgatgaagagattcacgaaatatgaatgtggagctcattaaacttttgccgcttcagtaggtgcaccggccctctcagcaataatctgctcatagagatctctaatcttcagtcctacgatagtttggaagagacctgttccattggtg

SEQ ID NO: 403104 - DNA, 393 bp, Oryza sativa nipponbare
ttgactcagaaattcagattgccaatcttattagacatttgtgcccgagcagctaagcaattttattgcacaacatcaccatccatgaggaagagaaacacgatcgagccaagcgatcgaccactaccacacctgatcgaaatggttgaagaagaagaaaaaaaataaaacccaactcgatcgaccgaccgatcactctttctcagctgccagcattttgacgatgaggcatcaactcatgcctcctgatgaatgatcctttcccttgtttcattcatcaggaggcgagcgtggtggggaggcagctgtcgtgcacgcagctgagcacgtcgcggtaatccctctccacggtgaaggagtcatacaccttcccatcgctgctcttcttgtact

SEQ ID NO: 403105 - DNA, 393 bp, Oryza sativa nipponbare
agtaaagggggaaactcttcataataatattattaagacattatagctgatgtcttttgatcacactgcgatcaaattatgcatcataggcagtacaactccgcgtcaggaaaaagtagaggagatatatttcttgttattacttaatacagcattcacatatatcgaaccatccggtacgtacgtagtagtactccacgcgttcacatcgatgatcggggacgatatcctcaggtagtacttatgcaaaagcgttggcgtaaactgactaactgaacggacggacggtcggatttagggctcccataagtccaagttgccggagactaagtcgtagtggccgccgacgagcttgagggtgccgttggcgatcccctccttgacgaacgggta

SEQ ID NO: 403106 - DNA, 400 bp, Oryza sativa nipponbare
agagagaatacatctattatgcagatattattccaatgtgtttctggacaagtagcctaaactccgatcagtctcgagaagcctgcccgtgtgtgcaaaatccagaaatcacccaggacaaatttacatgatcccaaccgtatttgaggccattaacattgattaaagtcaaactatggccgttccgactccgaaggcgctatcatagttcctcaccatgttcttcgtcgagggcataccagcaacaacatcttcttcgatgccacattcgtttgtgccccttatgatcttgaagtacccatcatcgccccatcctctgttccactggtttgcaagcagccagtaatcctcgccagcatccgtggttccccatccaatcaacttgacagcatgaccaccc

SEQ ID NO: 403107 - DNA, 378 bp, Oryza sativa nipponbare
  unsure (1)..(378): unsure at all n locations
tacgtgtaaaaaaaggaggggtatttcattattggtgaattaaaataggtacatgagcagctcatcagcaataatagtattttgtctgctttgagccaggggataagatggaaataatggagggaccagtctcaaaacgttagcaacctcctcttcactggcatggctgccgacagatgcagtcctgctgctctctgattnatagccaaattgtccgacacaactgacaacagtttatcatccctaagatctcaaagtgtaggtgctcttgattttgctcaccagagcttccctgtctggctggaagatgaggttccggtatgtaaaccaccctgtatacccgattccaacgagctcaagcacgccgggcaaaagtgg

SEQ ID NO: 403108 - DNA, 394 bp, Oryza sativa nipponbare
tttgggatcgagggagtatgggttgccgatctaatagagatgagaaatccgctaatcagaataacaccacggataagtacctagaccattagttgggaaacgaataaaatcattattgcaaaaacatcatcttcttcttcatcttcttagtgtacacaacaccaactcgatcatcatctcgtcgcactaaacccatcttccccaacccaaagacaacgaactcgctggccacaaatccatccaaccacaattaaccactgctaagctacggtcctccacttcacttgcctgggacgaagttggtggcgtacgcccaggcgttgttgttgacggggtctgcgaggtggtcggcgaggttctcgagggggcccttgccggtgacgatggcctggac

SEQ ID NO: 403109 - DNA, 468 bp, Oryza sativa nipponbare
tagaactaggatatatagctgattagattaactgttctttcaaatacatggagtacgtatttgacagtagtatatatgacacagtaatgcatgcatatatgacaccaaaatgtgatatggatatgattaagcaggtgcagcaaaacgtacattaattaaacaacaacaattaaccctcgggcacgcctgtgttttgttatctcgctcaacatatacgtacgtaatactttgcttgcatagcatagggacgacgacattatattcttaattgataaactcaagaacgcatggagatggatcgagagatttataaatatggagcttgcttgattgattagatgaggtcgtcctccttgtgggtctcgatgacgacgtcggacttggggtaggcgtggcaggtgaggacccagccggccggaaacttgttcgtcgtcgaggaagctctggtcggactggtcgatctcgccg

SEQ ID NO: 403110 - DNA, 400 bp, Oryza sativa nipponbare
agataatcggctttatagggggaggtcattcatcttctaaagaacataacatagctcaaaatttataaatccacatccgatgctaagatcataatagagtacagaacaagttgcaaggacaaggatagatagctttgctttccccccataacaggcactacacggaattacagcctccttcctcttctgccaccctttctgcgggtactgtcagttgggactggagtaacatcctcaatgcgtccaatcttcatgccagaacgtgcaagagctctaagcgcagattgagcaccaggaccaggagtttttgtcttgtttccaccagtagcacggagcttaatgtgcagagcagtaattccaagctccttgcatctctgtgcaacatcctgggatgcaagca

SEQ ID NO: 403111 - DNA, 418 bp, Oryza sativa nipponbare
ccacgcgtccggctaattaagcaaaagaagaagaagaagaaagttgaagaagaagatgcagaccgctgctagcagtgtcgttggattgtcggccgtgttgcccgctgctgtgaaggggcgcagcctgcagattcaggctcctcgccgtgttgcgttgcgcgttcgtgcggcggcggcggcggtggcagtggaggctgcggaggtggactacagctctaacatctcggtgtttccgatggaggcgtgcgacctcatcggcggcgaggcgtgcaacgtgcagatgtacccagaggccaagctctcatcatcggctgctgttgctgtttctcgtgcggcggcggaggaagtcgacagggactacctatcctacgacgagcccaccacggtgttccccgaggaggcgtgcgacgatctgggc

SEQ ID NO: 403112 - DNA, 404 bp, Oryza sativa nipponbare
  unsure (1)..(404): unsure at all n locations
ccacgcgtccgcgaaatcaaaagcacacccaagagagagtagtggtagttccagagcggtctgcttgcgaagttgcgatgcctgccatggccaagcccgcctcccgcgctgccaagcccgcgtcggcgccgaagaagcagaaggcaaagccctccgccgccgccggtggctcctcccacccgccttatttcgagatgatcaaggaggcgatcacggtgcttaaggagaggaccggctcgagcgcgcacgccatcgccaagtacatggaggagaagcacggggcgtcgctgccggccaactacaagaagatgctctccatccagctgcgcgggttcgcttccaagggcaagctcgtcaaggttaaggcctnctacaagctctccgacgccgncaaggactcgccc

SEQ ID NO: 403113 - DNA, 411 bp, Oryza sativa nipponbare
ccacgcgtccggtcgtcgtcgtcgtcgcaggtcggcgatggcgatgatgatgatgatgatggctggatgcggatcagggcgctgatggcggagtacggcgaccacatggcgcgcatcgcccgcaagctgttcgacgccctggccgccgagctgggcctggatcatcaccaggcggcgtcctacctcgccgagcgccagggcttcctccgcctgtaccgctacccgccctgcccttcctccgcctcctgcctcgggatggagccccacaccgacagctccgtgctctccatcatcctcggccaggaccacgtcggcggcctgcaggtgatccgcgacggcgcgtggcgcgacgtcgcccccgcgcccggcgagctcctcgtcaacctgggcgacatgatgacggccatcagc

SEQ ID NO: 403114 - DNA, 390 bp, Oryza sativa nipponbare
  unsure (1)..(390): unsure at all n locations
ccacgcgtccggtctccccctttctgaacacagcaccaccccttctgctgcatctcccacctccctctgaggggtgggcctgaggcgatggcggcgctcgccccgtccaagatgctcggcacccggctcaacttcgccggctcctcccgctacgccaccgcggcaccgaccaccggagcgcagaagatcgtctccctcttcagcaagaagcccgccccgaagcccaagcccgccgccgtcacctnctcgagccccgacatcggcgatgagctcgccaagtggtacggccctgacaggaggatcttcttgccggagggtctcctggaccgctcagaggtgccggactacctcaacggagaggtccccggagactacggctacgaccctttt

SEQ ID NO: 403115 - DNA, 460 bp, Oryza sativa nipponbare
cgttcggaatccgggtcgacccacgcgtccgggcgagatcgaccgtgggaggaggaacaactttatgcactcgcaggagtacctgatgaggcagcagagcggccatggcggctacggctacggcggcggccagcagcaggagtactacaagcgggaggagcgcgagcacaagcagcgcgagcgcgtcggcgagatcggcgccctcgccagcggcgccttcgctctctatgaggggcaccaggcgaagaaggacccggcgaacgcgcagaggcacaggatcgagcagggcgtggcggcggtggcggcggtgggcgccggcggctacgcctaccacgagcaccgcgagcagaagcaggccagctacggcgccaaagagcagcagtacggctacgccaggatgccgcagcagcagggctactactgcaactgattaattattaatcacccccaaattattaat

SEQ ID NO: 403116 - DNA, 420 bp, Oryza sativa nipponbare
ccacgcgtccgcccacgcgtccggcaatacagaacacagttcctgccatcacctttgccatggctgccgggctcaggcttgagcaagtagacctaggcaagaggcatggggtggccaaggtggtgggcacggtggtgagcataggtggtgccacagtgataactctctacaagggcctaccactgttcaatcacaatctgaacatcaagtccctgtcttcctcgagcctcatcctcaactggactctgggctgcgtcttcatccttggccactgcctctcatggtctggatggatggttcttcaggtgccagttctgaagaggtacccagctaggctgtcagttctatcactgacctgcatctttgggctcctccagttcctggtcattgcagccttcactgaagaagacctgagcagat

SEQ ID NO: 403117 - DNA, 435 bp, Oryza sativa nipponbare
ccacgcgtccgcccacgcgtccgcgcctctaagtcagaatccattctattaagcggcgcctgcgcccggcggccggcccgacccacgttaggggcgcaagcccccaagggcccgtgccaccggccaagccggcccggccgacgcgccgcggccggccgcctcgaagctcccttcccaacgggcggcgggctgaatcctttgcagacgacttaaatacgcgacggggcattgtaagtggcagagtggccttgctgccacgatccactgagatccagccccgcgtcgcacggattcgtctaccgtgagaaccacagatcccccggatactacgatggcaggtactggaccatgtggaagctgcccatgttcgggtgcactgacgccacccaggtgctcaaagagctcgaggaggccaagaaggcgtaccctgatgca

SEQ ID NO: 403118 - DNA, 435 bp, Oryza sativa nipponbare
ccacgcgtccgagatgaagaagctcatcaattatcttatctgcttaagcatatggtcaacattctgagtcttttggcagattctgttgatggagagggcgatgagtctatggtattgacagcagagacatttgagcatctcggatttttatttcagttttctgaagggactcctttaagccaagtggctacattttttgcaaattctgatccagacatgcctgctgcacctgttcccgctgctcaggttcatgattggattctgcagaatatagctgcttcattagaaaatacagcagaaaaattgacagcaaaggaaaacagccaacagagtgcatctgatcctgatgtgacaatggctgaggctgtcacaaattcaagaattcaatagcagttcaccaactggaactgctgttccaaacaatcaaggacacta

SEQ ID NO: 403119 - DNA, 405 bp, Oryza sativa nipponbare
ccacgcgtccgcccacgcgtccgcggacgcgtgggtgtctatttacttgatcttatcttagacagggaggcttctaatggtgatgtgtacacccaccaccaaaatcaaataatcgagtcatctgcagagaccctgtacggataaatgcacccaaaacataaccaaaccagcaaggacctggctgaaacgatggataactcaagatctaccgatacccgaactgcccttcctccatcttctgcctgccaatggagccccacaccaacagctccatgctctccatcatccagggccaggaccacgtcggcggcctgcaggtgatcctcaacagtgcgtggctccacgtaccccccgcgcccggagagctcctagttaacctgcgcgacatgatgacggccatcagcg

SEQ ID NO: 403120 - DNA, 435 bp, Oryza sativa nipponbare
ccacgcgtccggtcttagcgaatccagcagcagaagcagcagctgcagctcagccgccgccgatggcgtgcacgatcatggccccaacctcccgcgtcctcgccgccaagacccccttcctcggccatccccgcccctccaatgcccccgtccgcgacatcgccgccgccgccaccggccgcatcaccatgagcaaggagctgtggtacgggccggatagggtgaagtacctggggccattctcggcgcagacgccgtcgtacctgaggggcgagttcccgggcgactacgggtgggacacggcggggctctccgcggacccggaggcgttcgcgaggaacagggcgctggaagtgatccacggccggtgggcgatgctcggcgcgctgggctgcatcacgccggaggtgctcgagaagtgggtgcgcgtcgact

SEQ ID NO: 403121 - DNA, 383 bp, Oryza sativa nipponbare
ccacgcgtccgagtagctgagcttgaagcagcagagcgaggtatacatggccgccgccaccatggccctctcgggcccggcgctggccggcaaggccgccgcgaaggtgttcggcgaggggcgcatcaccatgcgcaagtcggcggcgaagcccaagcccgccgcgtcggggagcccgtggtacggcgccgaccgcgtgctctacctcggcccgctctccggcgagccgccgagctacctgaccggcgagttccccggcgactacgggtgggacaccgcggggctctccgccgacccggagacgttcgccaagaaccgggagctggaggtgatccactccaggtgggcgatgctcggcgcgctgggctgcgtgttcccggagc

SEQ ID NO: 403122 - DNA, 420 bp, Oryza sativa nipponbare
ccacgcgtccgcccacgcgtccgctctcagctctcacagctcactgcatcaatggccgcggccaccatggcgctctcctccccggtgatggcccgcgcggcgccgtcgacctcctccgcgctcttcggcgaggcgcggatcaccatgcgcaagaccgccgcgaagcccaagccggcggcgtcgtcggggagcccgtggtacggcgccgaccgcgtcctctacctcggcccgctctccggcgagccgccgagctacctcaccggcgagttcccgggcgactacgggtgggacaccgcggggctctccgccgacccggagacgttcgccaagaaccgggagctggaggtgatccactcccggtgggcgatgctgggcgcgctcggctgcgtcttcccggagctcctcgcccggaacggcgtc

SEQ ID NO: 403123 - DNA, 432 bp, Oryza sativa nipponbare
ccacgcgtccgcccacgcgtccgagacgcttctctcctcctctaatctcaagtctctgtctcgtcgtcctcgcatctccactcgccatgggcaagattaagatcggaatcaacggtttcggaaggatcgggaggctcgtggccagggtggccctccagagcgaggatgtcgagctcgtcgccgtcaacgaccccttcatcaccaccgactacatgacctacatgttcaagtacgataccgtgcacggccaatggaagcacagcgacatcaagatcaaggactccaagactctgctcttgggcgagaagccggtcaccgttttcggcatcaggaaccctgacgagattccgtgggctgaggctggtgctgagtatgtcgtggagtccaccggtgtcttcactgacaaggagaaggctgctgctcacttgaagg

SEQ ID NO: 403124 - DNA, 447 bp, Oryza sativa nipponbare
ccacgcgtccgggccctgtgtgccctgtgattgctcctatgctattcgtttctttcttgccccctgtcacaagagagagagcgccagactctccccaggattcacccatgaagggggccaaatccaagggcgccgccaagcccgacgccaagttggctgtgaagagtaagggcgcggagaagcccgccgccaaaggcaggaaggggaaggccggcaaggaccccaacaagcccaagagggctccctccgctttcttcgtttttatggaggagttccgtaaggagttcaaggagaagaaccccaagaataaatctgtcgctgctgtaggaaaagcagccggtgataggtggaaatccctgaccgaagcggacaaggctccctatgtagccaaggccaacaagctcaaggccgagtacaacaaggccattgctgcctacaacaagggcg

SEQ ID NO: 403125 - DNA, 390 bp, Oryza sativa nipponbare
ccacgcgtccgaccggagccatagccggcgggagaggccagcccgactgccagagcctctacctacgactatccgcggccggatggcgccccgcgtgtccctgctcgccgccggcgccgtggccgtggccgtggtcctgcttctcgccgcgccggcgcgggcgtccaacgacgagggggacgcgctgtacgcgctgcggacgaggctgtcggatcccaacggcgtgctgcagagctgggacccgaccctcgtcaacccctgcacctggttccatgtcacctgcgaccacgccagccgcgtcgtccgcctggatttaggaaactccaacatctccggctcgattggccctgagctaggccgtcttgtgaacctccaatacctggagctcta

SEQ ID NO: 403126 - DNA, 416 bp, Oryza sativa nipponbare
ccacgcgtccgcggacgcgtgggttccgggtggcttctgataattgtgtattcaaattccatgcatacatcactaccagcccaccaatgcctgttttgcagcaagagaacatcaacccttataccagaaaaaagatatttatccttcaagtttgaatgacggtagaacagcatgagtttacgttcaattaaattcatgggtccgaacaagtcaaaacttacttggattaacaaaaccttgtggaagacgcacaagcaaaaccaacgagaacccaaagacaaagttgcataacaaattcattctgaaagagagccattctactgcagccatcaagtgaaaccatggtcttgaatgattgtcaagtagactcagatttgatctgtagaaccggtcttcttggcgaaatgctcgaatta

SEQ ID NO: 403127 - DNA, 406 bp, Oryza sativa nipponbare
ccacgcgtccggtgttcgaggaggaggaggaggaggagaagctagcggcggcggcggcaatggcgacgagcgggctgaggagctgcagcgcggtgggcgtgccgagcctgctggcgccgtcgtcgaacaggagccgcctgccggtctgcgcctacgccaccacctccgggcgcgtcaccatgtccgccgagtggatgccgggccagccacgccccgcccacctcgacggctcctctcccggtgacttcgggttcgacccgctgggcctcgccaccgtgccggagaacttcgagcggttcaaggagtcggaggtgtaccactgccggtgggccatgctcgctgtgcctggggtgttggtgccggaggcgctggggctgggcaactgggtgcaagcgcaagagtgggc

SEQ ID NO: 403128 - DNA, 377 bp, Oryza sativa nipponbare
ccacgcgtccgcccacgcgtccggaaagcataagcaacacaagggattaactcatcactcacttagctaattaaatcttcgaccatgtcggacaagtgcggcaactgcgactgtgctgacaagagccagtgcgtgaagaaaggtaccagctatggcgtcgtcatagttgaagccgagaagagccacttcgaggaggtcgccgccggcgaggagaacggcggctgcaagtgcggcaccagctgctcctgcaccgactgcaagtgcggcaagtgaagtcacgaagcaaccgaacactcgccgccggcgagtcacctaccttaattagtccacaataaaaaccacccatatgagtgtggtttgtgtgtgtgctgattatt

SEQ ID NO: 403129 - DNA, 411 bp, Oryza sativa nipponbare
  unsure (1)..(411): unsure at all n locations
ccacgcgtccggaacgaccgagctaccgagctaatccagccatggcctccaccgcgctctccaccgcctccaaccctactcagctgtgcaggtctcgcgcctcgctgggcaagcccgtcaagggcctgggcttcggccgggagcgcgtgccgaggacggcgacgaccatcacatgccaggccgcgagcagcatcccggccgaccgcgtcccggacatgggcaagcgccagctgatgaacctcctcctgctcggcgccatctcgctccccaccgtcggcatgctcgtcccctacggcgccttcttcatccccgccgggtccgggaacgccggcggcgggcaggtcgccaaggacaagctcggcaacgacgtgctcgccgaggagtggctcaagacacacggncccaacgacc

SEQ ID NO: 403130 - DNA, 439 bp, Oryza sativa nipponbare
ccacgcgtccgcccacgcgtccgcccacgcgtccggggcggtggtgagctactgcggcgagccggtggggacggtggcggcggaggaccccgagtgcacggagacgctcaactacgaccaggtgttcatcagggacttcgtgccctcggcgctcgccttcctcatgcgcggcgagaccgagatcgtccgcaacttcctcctccacaccctgcagctgcagagctgggagaagactgttgattgttacagccctgggcaaggcttgatgccagctagctttaagattagggctgtgcctcttgatgacaataacgaagcatttgaggaagttttggaccctgactttggagagtcagctattggacgtgtagctccggtggattcaggactttggtggattattttgctgagggcatactgcaagattacaggggacaat

SEQ ID NO: 403131 - DNA, 439 bp, Oryza sativa nipponbare
ccacgcgtccgcccacgcgtccgaacaatgtttgcgacttcaggttatcaccccgtagcaatgagtgtaaccatgtaatgggatacatatatgatcagtacgatatgatcgatattttcaatgtgtatgcacctaagtgcaacactgatgactcatccctcttttccacctcctacagtacagctgatatgaatgctaagaagaggcttaaaggcacgaggatgtactcagggtatgatccgtgctattcgtcacatatcgaagattacatgaacaagatggatgtgcagaaatcacttcatgcgaatacgagtggattgatcaaggacagaaaatggagtatctgcagttattcaatattcgacaattacgacatcacggtcttctctgttcttcctatttactctaagcttatcaaggctggcctacgaatatgggt

SEQ ID NO: 403132 - DNA, 443 bp, Oryza sativa nipponbare
ccacgcgtccgtgcttattgatagtgtgaggaacccagccttttttaactgggagattaaagagcagctggagaagatcaaggctgaaatagctgaagtttctgataatcctcaaggtttacttctagaggcactccattctgctggctattctggggcactggcgaagcccctaatggcacctcagtccgctattcataggttggacagtagtatccttgaggaattcattgctgaaaattacacagcacctaggatggtccttgcggcatctggagttgaacatgatgaactagtttcaattgctgagccacttctgtcggatcttcccagtgtgaagcgtccagaagagccaaaatcagtttatgtgggaggagactatcgttgtcaagcggactctgacaagacacatattgctcttgcttttgaagtaccaggtggat

SEQ ID NO: 403133 - DNA, 425 bp, Oryza sativa nipponbare
ccacgcgtccggtccggttggtgtgcaggtgcaaatggcttgtcttctgcaagggatttcctttccccaacagcatggtttgagcaagtccaccgcccaggatacacaattgtgcagaaatatggtggtgagctattcactgccactcaggacttttctccatttaatgtggtagcgtggcatggaaattatgtcccttacaagtacgacctgagtaaattctgtccatttaacactgttctattcgatcatgctgatccatcagtaaatacagtgctgactgcaccaactgataagcctggtgtcgcattgcttgattttgtgatattcccgcctagatggttggtcgctgagaacacatttcgccctccatactatcatcgcaattgcatgagtgaatttatgggattgatctatggaatata

SEQ ID NO: 403134 - DNA, 411 bp, Oryza sativa nipponbare
ccacgcgtccgcggacgcgtggggtctccccctttctgaacacagcaccaccccttctgctgcatctcccacctgcctctgaattgtgggcctgaggcgatggcggcgctcgccccgtccaagatgctcggcacccggctcaacttcgccggctcctcccgctacgccaccgcggcaccgaccaccggagcgcagaagatcgtctccctcttcagcaagaagcccgccccgaagcccaagcccgccgccgtcacctcctcgagccccgacatcggcgatgagctcgccaagtggtacggccctgacaggaggatcttcttgccggagggtctcctggaccgctcagaggtgccggactacctcaacggagaggtccccggagactacggctacgacccttttggcctcagc

SEQ ID NO: 403135 - DNA, 445 bp, Oryza sativa nipponbare
ccacgcgtccgcagctgcaaggagaaggagaaggtaggctccatccatggcttcccagctctccgccgccacatccgtgccgcagttccatggcctccggacctactcctctcctaggtccatggtgacgctgccatcgttgaggatgagcaagaagaggtcccagggcatccggtgcgactacatcggctcagccaccaacgttatcatggtgacgacgacgacgctgatgctgttcgcggggaggttcgggctggcgccgtcggcgaacaggaagtcgacggcggggctgaagctggaggcgcgcgactccggcctgcagaccggcgaccccgccgggttcacgctcgccgacacgctggcctgcggcgccgtcggccacatcatgggcgtcggcgtcgtcctcggcctcaagaacaatggcgtcctggaccagatcatcggg

SEQ ID NO: 403136 - DNA, 451 bp, Oryza sativa nipponbare
ccacgcgtccggcaaatcctctgtactgtactgctagttccctttggccggatcgccatggattaattgcgccctgtttatgatgttgatataattgtactattcctatggctatataagttgtaaaggatccaattcgatgctgcatgcgacgtactgcgatcccatgtgttcggttttaaaaaaaaaaaaaaaaaaggaaaaaaaaaaaaaaaaaaaaaaaaaaaaaaaaaaaaaaaaaaaaaaaaataaaaaaaaaaaaaaaaaaaaaaaaaaaaaaaaaataaaaaaaaaaaaaaaaaaaaaaaaaaaaaaaaatgggggggggcccttttaggggatccaagtttactaccccgggcttgcaaggtaatagtttttttttggggcccccaaaattaaattcacgggccgcggtttaaaaccgctgggacgggaaaaacccgggggt

SEQ ID NO: 403137 - DNA, 439 bp, Oryza sativa nipponbare
ccacgcgtccgtgatgacctaacatccatcaaggatcttgtttctggtgcaaacaattatgctgtgaagattgaggctgacagtgattcttggcaaaggcagatttcatcccttattgcgagagctaaaggccgagcaatttcgctcatggaatctacacttcagttgtcaaacattgaccttatttttacatacaccctttcaggggggaaaagcactcccaccaaagttacatcattttttcaaaatgatattctgagcccttcccttgatgacgcagcaaatttgctaagtgaatattctacatggttgagttctaccaatgtccgtgaagcaaatatatatgtggactgcttccatgagagatggggtgcattggttgcccaggagcaaaggattccgccagagaaaaatgaacttgtcaatgaagaagagaaac

SEQ ID NO: 403138 - DNA, 148 bp, Oryza sativa nipponbare
ccacgcgtccgcccacgcgtccgcccacgcgtccgcccacgcgttcgacctgattttcttcctttgcaagttgaaaataccaggtgatatgtagtcctagctcaactttgtagaggatgacaggtgtaaatcgccttgatacgttact

SEQ ID NO: 403139 - DNA, 434 bp, Oryza sativa nipponbare
ccacgcgtccgctgatccacacacagccgcgaggagagagaaagagagaggagagagagatggcggcggagctgacggcggcgcagctgcgggcgtacgacgggagcgacccatcgaagccgatctacgtctccgtccgcggcaaggtctacgacgtcacctccggccgcggcttctacggccccggcggcgcctacgccgtcttcgccggccgcgaggccagccgcgcgctcggcaagatgtccaaggacgacgccgacgtctccggcgacctctccggcctctccgacaaggagctcggcgtcctcgccgactgggagaccaagttccaggccaagtaccccgtcgtcgcccgcctcaccgaatgaaaaaaaaaaatccccccaaatcaacccttagattattgtatcctcttgtgctctacagcttaattc

SEQ ID NO: 403140 - DNA, 431 bp, Oryza sativa nipponbare
ccacgcgtccgcccacgcgtccgcccacgcgtccgagcagatgctcatacaccaagggaaaattctcaaggatgatacaactttggaaggcaacaaagttgctgagaacagcttccttgttataatgctgtctaaggccaaagcatcatcaagtggagcttcaactgcttcaaaggcacctgtgagccagtctcaaccagcaactccagttgcctcagttgcaagaacaccacctccacaagcacctgttgttacacctgaaccggcacctccaagtgcacagcctccagttgcttctgccactccagctgctgctgccactccagctgctgctgtgaccgcatcaagtgatgcggatgtctacagtcaggctgcatcaaatcttgtttcaggtagcaacctagaacagacaatccaacaaattcttgaca

SEQ ID NO: 403141 - DNA, 421 bp, Oryza sativa nipponbare
ccacgcgtccgacacaccccaccagcagcagcagcagtagctgagcttgaagcagcagagcgaggtagacatggccgccgccaccatggccctctcgtccccggcgctggccggcaaggccgccgcgaaggtgttcggcgaggggcgcatcaccatgcgcaagtcggcggcgaagcccaagcccgccgcgtcggggagcccgtggtacggcgccgaccgcgtgctctacctcggcccgctctccggcgagccgccgagctacctgaccggcgagttccccggcgactacgggtgggacaccgcggggctctccgccgacccggagacgttcgccaagaaccgggagctggaagtgatccactccaggtgggcgatgctcggcgcgctgggcttggtgttcccggagctcctcgcccgcaac

SEQ ID NO: 403142 - DNA, 430 bp, Oryza sativa nipponbare
ccacgcgtccgcggacgcgtgggcctcagtggagctcacccttatcccccccagctccagaaccttctccgctctcctctctcgctcgctcgcttctcgcggttgtcgtcggcggtagcgagctcatggcgtcggtgcagctgtccgccggcccgcgggtgtcagtgtcaccggcggcggcgctggtggcgatgccttcggtcgccgccgccgcatcgagggggcgccgcgggtaccgggggctcgtcgtgagggccgccacggtcgtgtcgcccaagtatacttctatcaaacccttgggagatagggtgcttgtgaagatcaagacctctgatgataaaactgttggaggaatattacttccaacatcagttcagtcaaaaccgcaaggaggacaagttggagcagttggagaggggagaagcatggg

SEQ ID NO: 403143 - DNA, 411 bp, Oryza sativa nipponbare
ccacgcgtccgcggacgcgtgggcggacgcgtgggcggacgcgtggggggagatggcggactacgtgtatgggccggggcggaaccacctgttcgtgcctgggccggtgaacatcccggaccaggtgatccgcgccatgagccgtcagaacgaggactaccgctcgccggcggtgcccgccctcaccaagaccctcctcgaggacgtcaagcagatcttcaagaccaccaccggcacccccttcctcttccccaccaccgggacgggggcgtgggagagcgcgctgacgaacacgctgtcgccgggggacaagatcgtgtcgttcctgatcgggcagttcagcctgctgtggatcgaccagcagcaacgcctcaacttcaacgtggacgtggtggagagcgactggggcta

SEQ ID NO: 403144 - DNA, 413 bp, Oryza sativa nipponbare
ccacgcgtccgcccacgcgtgcggctgagtggagtggagatggtgctcaaggacatcggctacccggtgaagctgggctccggcgtggcggcggcggcggcgtacctgtcgaattcgacgccgctcatgccgtccaggatctgaagcacaacgaacgaaggaaggaaagcaattctgagcagcgatggttctgcctgcagtttggcagaacggaacagcggcaaattagatcctattgcatataattcggtctctggatgtaaagttaaatttttatacgctccatcgatcagctctatgctaaggagtgaggagtataattttgtgaaggtactgcaggttttacttaattcatcttgggcctcggtgtatacaacagcggacagtgcaaatgatcatcatgccctaatgcc

SEQ ID NO: 403145 - DNA, 400 bp, Oryza sativa nipponbare
ccacgcgtccgctcagctctcacagctcactgcatcaatggccgcggccaccatggcgctctcctccccggtgatggcccgcgcggcgccgtcgacctcctccgcgctcttcggcgaggcgcggatcaccatgcgcaagaccgccgcgaagcccaagccggcggcgtcgtcggggagcccgtggtacggcgccgaccgcgtcctctacctcggcccgctctccggcgagccgccgagctacctcaccggcgagttcccgggcgactacgggtgggacaccgcggggctctccgccgacccggagacgttcgccaagaaccgggagctggaggtgatccactcccggtgggcgatgctgggcgcgctcggctgcgtcttcccggagctcctcgcccggaac

SEQ ID NO: 403146 - DNA, 380 bp, Oryza sativa nipponbare
ccacgcgtccgagttgttgtaaagttgcaagagagagatcagttgttgagtgcgtggaagcagagagcaggaagatgctggagaagctgtgggacgacgtggtggccgggcctcgaccggagaccggcctggagaagctccgcaaggccgctacaacccgcccccttgtcatcaacaaagatggcgacggcgaggcgagcggggcggcgtacaagcggacgcagtcgatgccgacgaccccgacgacgccggtgacgccgtcgtcttcgtctccgacgacgacggcgacgacgacgccgcggggcagcaacgtgtggaggagcgtgttccacccggggagcaaccttgccaccaagagcctcggcgccaacctcttcgac

SEQ ID NO: 403147 - DNA, 442 bp, Oryza sativa nipponbare
ccacgcgtccgcggacgcgtgggcagcgcgctcttctggctcgtcctcatgaccgccgtcatctccgtcggctccgagtacgtcgtcggcaccatcgagcccacctcgcagtcatggggcctctccgtcagcttcatcagcatcatcctcctccccatcgtcggcaacgccgccgagcacgccggcgccatcatcttcgcgctcaagaacaagctggacatcactcttggggtagctctgggatcggccacccagatatccatgttcgtggtgccactgagtgtgctcgtggcctggatcatgggggtccaaatggatcttgacttcaagctgctagagaccggctctctgttcatggcggtgctggtgacggccttcaccctgcaggatggaacatcacattacctgaaggggattctcctcctcctgtgctacattgtca

SEQ ID NO: 403148 - DNA, 438 bp, Oryza sativa nipponbare
ccacgcgtccgcccagatctagttttatttgttggggaagcattggttggtaatgatgctgttgatcaactcactaaatttaaccagaaattagcagacctttccgctgtccctactaccagattgatagatggcatcctgctcaccaagtttgacaccatcgacgacaaggtctgaactgtcacagaattttgatttactgcaattgccttcttttacagtatttttatttttatgactactcaatatatatataggttggagctgcactttcaatggtttatatatctggagctccagtcatgttcgttggctgtggtcagtcttacactgacctcaagaagctcaatgtcaaatccatcgttaaaaccctgctgaagtgaatgtggtgcgccgttgtgcggcacctcgaattcgtactgccagtattgctatcgt

SEQ ID NO: 403149 - DNA, 429 bp, Oryza sativa nipponbare
ccacgcgtccgcggacgcgtgggcggacgcgtgggcttggatctggacataaaaccgaaattctggagccagctgcagcgcctgctgaagagcatgttggcagctgctcgaccggcagcttctgtcggccaggccaacgccagcaacagcagaggagacaccgccaaactaaaagagatgtatcgtctgtcgctcaaatcaacctctctgggccagctgcacgcgttgcacaagatttgggtctcctaacacatctctgttgtacaaacatagacatcagattgctctacaaacgagtgttgtacatgttgattacatcgtcatcagcatctttgagcttgtaacttatgctgtcttttatgtttttatccatttgttatttattttttaaaatctctgggatgacttacatgctgattggaaatttgc

SEQ ID NO: 403150 - DNA, 364 bp, Oryza sativa nipponbare
ccacgcgtccgacccgcttcgcttcctcccctctctaagccggggaagctaagccatggcgtccgtcaccgcccgcaccccggtcgcagccctccgctcgtcggcgtcgctcaagtctaccttcctagggcaatcctccacccgcctcgcccgcgcaccgactacgaggcgtaatgttcgggcggaggccaagggagagtggctccccggcctcccttctcccacctacctcaacggcagcttgccaggcgataacgggttcgacccgttgggtctggcggaggacccggagaacctgcggtggttcgtgcaggcggagctggtgaacgggcggtgggcgatgctgggggtggccgggatgctg

SEQ ID NO: 403151 - DNA, 447 bp, Oryza sativa nipponbare
ccacgcgtccgcccacgcgtccgacgttagatgccacgcgagcagagctcggccttgttgttctgtacttgaacaaagccgaggccagggacaagatatgcagggcgatccaatacggctcgaagtttatcagtaacgggcagcctggcacggcacaggatgtcgacaggtccaccacccttgctcgcaaagttttccggcttctcaagtgggtcaatgatctgcatggtcttatcagccctcctgctaaggggactcctcttacactggtcttgcttgggaagtccaaaaatgcgctgctctcgactttcttgttcctggaccaatttgtatggttgggaagaacagggatatacaagaacaaggagcgcacagaccggattgtaaggatatccctctactgctggatggcctcttcagtctgtgcagggctagttgagcttggag

SEQ ID NO: 403152 - DNA, 432 bp, Oryza sativa nipponbare
ccacgcgtccgcacacaccttcaataacttgcaaggatatctcaaactacttgaatcagatcagacaaaaacatcataagaatatcacgatgtgtggaggagcactgatcccgaacgactacggcgacgacgactgggaggccgccttccgggagttcatcgctggcgacgacgacgacgacgacggcggcgtttccatgttcccttctggtgcagggacgatggagacgaccacagaggtggcgccggcggcggcggtggtggagaggccgcggcggcggcgaagggtgaggcggagctacccgtaccgcggcgtccggcagcggccgtgggggcggtgggcgtcggagatccgcgaccccgtcaagggcgcccgcgtctggctcggcaccttcgacaccgccgtcgaggccgcgcgcgcctacgacgccg

SEQ ID NO: 403153 - DNA, 372 bp, Oryza sativa nipponbare
ccacgcgtccggaaattctcagcttatagtcaggtgaggtctgatctgaggttgagagatggcacaggcggtggcgtccatgaccgggctgtcgcagggcgtgcagctgccggccgggcccaggcgcgccggcggcaggtccaggctcgccgtcgtcagggccgacgccgccgccgccgacgtccagaccggccgccgcgccgtgctcggcctcgtcgccaccgggatcgccggcggcgccctcgcgcaggcggcgctcgccgaggccgccaagcccatcaagctcggccccccgccaccgtccttcggtggactccctgggacgctgaacttggaccaggtgagggacacggacctgccgctgagggaaaa

SEQ ID NO: 403154 - DNA, 440 bp, Oryza sativa nipponbare
ccacgcgtccgagaaagggggggaaaaggaactcgaagtcgccttcggatttgggatttggagagcgcgcgaggtaaaccaaagttctttttccgatggctcgtactaagcaaactgctcgcaagtcaactggaggaaaggctcccaggaagcaacttgccaccaaggctgctcgtaagtctgctcccacaactggaggagtgaagaagcctcaccgttaccgccctggaactgttgctcttcgtgaaatccgcaagtaccagaagagcactgagctgctcataaggaagcttccattccagaggcttgttagggagattgcccaggattttaagactgatcttcgtttccagagccatgcggtgcttgcccttcaggaagctgccgaggcgtacctggtgggtctcttcgaggacaccaacctgtgcgccatccatgcc

SEQ ID NO: 403155 - DNA, 406 bp, Oryza sativa nipponbare
attccggggtggacccacgcgtccgagaaagcataagcaacacaggggattaactcattattcacttagctaattaaatcttcggcgcgggtcggacaagtgcggcaactgcgactgtgctgacaagagccagtgcgtgaagaaaggtaccagctatggcgtcgtcatagttgaagccgagaagagccacttcgaggaggtcgccgccggcgaggagaacggcggctgcaagtgcggcaccagctgctcctgcaccgactgcaagtgcggcaagtgaagtcacgaagcaaccgaacactcgccgccggcgagtcacctaccttaattagtccacaataaaaaccacccatatgagtgtggtttgtgtgtgtgctgattattgctgaattaaacccgtgtgttatcg

SEQ ID NO: 403156 - DNA, 444 bp, Oryza sativa nipponbare
ccacgcgtccgcccacgcgtccgccatgtccgccgagtggatgtcgggccagccacgccccgcccacctggacggctcctctcccggtgacttcgggttcgacccgctgggcctcgccaccgtgccggagaacttcgagcggttcaaggagtcggaggtgtaccactgccggtgggccatgctcgctgtgcctggggtgttggtgccggaggcgctggggctgggcaactgggtgcaggcgcaggagtgggcggcggagcccggcggccaggccacgtacctcggcaacccggtgccatggggcacgctgccgacgatcctggtcatcgagttcgtcgccatcgccttcgccgagcaccagcgcaccatggagaaggaccccgagaagaagaagtaccccggcggcgccttcgaccccctcggcttctccaaagaccccgtcaa

SEQ ID NO: 403157 - DNA, 375 bp, Oryza sativa nipponbare
  unsure (1)..(375): unsure at all n locations
ccacgcgtccgcccacgcgtccgggaagaagagtcactccacactccacactctatcccctggccctgtcttggatcatgagaaaccgcgcaacaaaattgcaattctaggcagcatttggaccgggacttggctacgtggtgtttggccatggatcgcagcgtggaattaagaccggcgaggactcagcgacggaggcacccgntcattcctacgcttctgtgcccgtcgcttctcgcatgagagagagagagagatcgaccaggcgttcactgaattttactagaactcggcatgaagcgacccggcggtgccggcggcggcggaagcagcccatcgctcgtcacgatggctaattctagtgatgatggatat

SEQ ID NO: 403158 - DNA, 441 bp, Oryza sativa nipponbare
ccacgcgtccggccggcctgctccggtccaacgaccccgtcggcttcaacctcgtcgacgtcctcgcctggggctccctcggccacatcgtcgcctactacatcctcgccacctgcagcaacggatacaacccaaacttcttctgatcattctcatcttggatggatgcaatgtaatctgaatggatctctggtgtttctacgtgattatgtatgagatgggtaaaaaagaaaagaaaaaaggttgattaatttggaacagtagtgcaatcgcgtgtgtatattggccgcatgaaatttgtcagtttgatgatctttctctatgctcatgtatcagttactttcagagtttcagacttcgtatgtgtggcactggcacttacccagaaactcaattaccagtgctccatgattcatgaattgcaatcttgaatttgcaaaa

SEQ ID NO: 403159 - DNA, 443 bp, Oryza sativa nipponbare
ccacgcgtccggagcacaagaaagcataagcaacacaagggattaactcatcactcacttagctaattaaatcttggaccatgtcggacaagtgcggcaactgcgactgtgctgacaagagccagtgcgtgaagaaaggtaccagctatggcgtcgtcatagttgaagccgagaagagccacttcgaggaggtcgccgccggcgaggagaacggcggctgcaagtgcggcaccagctgctcctgcaccgactgcaagtgcggcaagtgaagtcacgaagcaaccgaacactcgccgccggcgagtcacctaccttaattagtccacaataaaaaccacccatatgagtgtggtttgtgtgtgtgctgattattgctgaattaaacccgtgtgttatcgattaattaagcagctggtcgcttcggcgactatgcgtgtatcaac

SEQ ID NO: 403160 - DNA, 450 bp, Oryza sativa nipponbare
ccacgcgtccgctctactactactagccagtaagctagctaactaactacgtggctatggcccccaccgtgatggcctcctcggccacctccgtggctccattccaagggctcaagtccaccgccgggctccccgtcagccgccgctccaccaactcgggcttcggcaacgtcagcaatggcggaaggatcaagtgcatgcaggtgtggccaattgagggcatcaagaagttcgagaccctatcgtacctgccaccactcaccgtggaggatcttttgaagcagatcgagtacctgcttcgatccaagtgggtgccttgcctcgagttcagcaaggttggattcgtctaccgtgagaaccacaggtctcccgggtactacgatggcaggtattggaccatgtggaagctgcccatgttcggctgcaccgatgccacccaggtgctcaagg

SEQ ID NO: 403161 - DNA, 409 bp, Oryza sativa nipponbare
  unsure (1)..(409): unsure at all n locations
ccacgcgtccgggacgcgtgggcgtcggcggcgtggtcaccaactgggcgctggtgtcgatgaaccacgacacgcagtcggcatggaccccaacgtgatggagtcagggtggtggtgagctcctgcggccacgacgggccgttcggcgccacgggcgtaagcggctgcaggacatcggcatgatcgacgccggcccggcatgcgcgccctcgacatgaacaccgcgggacgagatcgtccgcctacccgcgaggtcngccccggcatgatcgtaccggcttgaggtcgccgagatcgacggcgccccgagaatgggcccgacgttcggagccatgatgatctccggccagaggcggccacctggcgctgaggcgctcggccggccgaacgccatcgacggacgatcaaa

SEQ ID NO: 403162 - DNA, 372 bp, Oryza sativa nipponbare
ccacgcgtccgcccacgcgtccgcccacgcgtccgaaccaaacttagaaaaccggtgatgcttcccgcggctcctcctcgtcgtcgccgtcggcgccgcgctcctcctcgccttccgccctccgctgccggccctcgccgcccgccccatcgtcgccgccgccggcggcaagcccgcccccaccgaggccgccgccaccgcgaggtggctcgccgcccagaacacgtggggcgtcctcagcacaatatcaagtgatctaagtggagctccttttggcaatgtagtttcatatagtgatggagtgccaggtgagagccatggaatcccctacttctatctgacaacgctagatcccactgcgagagatgcatt

SEQ ID NO: 403163 - DNA, 439 bp, Oryza sativa nipponbare
ccacgcgtccgcttcttcttcctcctcctcgcgctcccccgattcgaagcgtgaagagaggaacggcgcttgcgagaggagagagatggcccgtaccaagcagaccgctcgtaagtccacaggaggaaaggctcccaggaagcagcttgccaccaaggctgctcgtaagtctgctcccaccactggaggagttaagaagccccaccgttaccgccctggaactgttgccctccgtgagattcgcaagtaccagaagagtactgagcttttgatcaggaagctgcccttccagaggcttgttagggaaattgcacaggacttcaagaccgatctgcgtttccagagccatgctgtccttgccctccaggaggctgcggaggcataccttgttggtctcttcgaggacaccaacctgtgcgccattcatgccaagcgtgtg

SEQ ID NO: 403164 - DNA, 431 bp, Oryza sativa nipponbare
  unsure (1)..(431): unsure at all n locations
ccacgcgtccggccttcgacgcgcgcacgcctttccctccccttctcctccgcctcgcctcgcantgtggaagaaaggaaggaaggctaaaaccctagcgagcgcgcgagcgagcgagggctctctgcttccttgcgatgacggcgccggcggacaaggggaagaaggccaagaccgacgccgacggcggcgccgccgaggagaacgagcagatcgacggcgccctcgtcctctccatcgagaagctccaggagatccaggacgagctcgagaaggtcaatgaggaagctagtgacaaggttttggaggtcgagcagaaatacagtgagattcgcagacctgtctatctccgaaggagtgacgttatccaaacaatccccgacttctggctgacagcgtttctgagtcatcctctacttagtgagcttttg

SEQ ID NO: 403165 - DNA, 395 bp, Oryza sativa nipponbare
ccacgcgtccgcaagaagtactcgagcaaagaaggagagagcttggtgagctgcagagatggccccctccgtgatggcgtcgtcggccaccaccgtcgctcccttccaggggctcaagtccaccgccggcatgcccgtcgcccgccgctccggcaactccagcttcggcaacgtcagcaatggcggcaggatcaggtgcatgcaggtgtggccgattgagggcatcaagaagttcgagaccctctcctacctgccaccgctcaccgtggaggacctcctgaagcagatcgagtacctgctccgttccaagtgggtgccctgcctcgagttcagcaaggtcggattcgtctaccgtgagaaccacagatcccccggatactacgatggcaggtact

SEQ ID NO: 403166 - DNA, 320 bp, Oryza sativa nipponbare
ccacgcgtccgcccacgcgtccgcccacgcgtccgcccacgcgttcgagctctcacagctcactgcatcaatggccgcggccaccatggcgctctcctccccggtgatggcccgcgcggcgccgtcgacctcctccgcgctcttcggcgaggcgcggatcaccatgcgcaagaccgccgcgaagcccaagccggcggcgtcgtcggggagcccgtggtacggcgccgaccgcgtcctctacctcggcccgctctccggcgagccgccgagctacctcaccggcgagttcccgggcgactacgggtgggaccaccgggggc

SEQ ID NO: 403167 - DNA, 418 bp, Oryza sativa nipponbare
ccacgcgtccggtttccttagaagatcagcttaaaatgtggtctgatcgggttgggaaacttcaagaggatggatggcaacaatctgtttcattgagtaattaccaaagaaagctggttgatgtgcacagagatgctcaaaagcttatgcaatcattggatggaatacaagcgaatgttggaagcagtcgtttggaagtcgctgatctgcttatagaacttgagaaagagaggtttagtaagaagagaatagaggatgatttggaggttatgtcaaggaaagctagctctcttagagccaaggcacgtgaatcagcagtcctggaaaagcttcgtcatgaggtcaaggagtatagggggataatgaagtgtggtatctgccatgataggcagaaagaggttgtgattaccaagtgcta

SEQ ID NO: 403168 - DNA, 430 bp, Oryza sativa nipponbare
ccacgcgtccgaagaagtactcgagcaaagaaggagagagcttggtgagctgcagagatggccccctccgtgatggcgtcgtcggccaccaccgtcgctcccttccaggggctcaagtccaccgccggcatgcccgtcgcccgccgctccggcaactccagcttcggcaacgtcagcaatggcggcaggatcaggtgcatgcaggtgtggccgattgagggcatcaagaagttcgagaccctctcctacctgccaccgctcaccgtggaggacctcctgaagcagatcgagtacctgctccgttccaagtgggtgccctgcctcgagttcagcaaggtcggattcgtctaccgtgagaaccacagatcccccggatactacgatggcaggtactggaccatgtggaagctgcccatgttcgggtgcactg

SEQ ID NO: 403169 - DNA, 403 bp, Oryza sativa nipponbare
ccacgcgtccgcgctccccggcgccgccagggcctcctccttcctcggcggcgccggcaggagcggcaggctgctgctgaggcaggccgagtcgtcgtccgcgcgggcgtcgttcgccgtgcgcgccgcggcgcccgacaggccaatctggttccccggcagcaccccgccgccgtggctcgacggcagcctccccggcgacttcggcttcgaccccctgggtctcggatcggacccggagagcttgcggtggaacgtgcaggcggagctggtgcactgccggtgggcgatgctgggcgcggcgggcatcttcatcccggagttcctgaccaagatcggcatcctcaacacgccgtcgtggtacaccgccggcgagcagcaatacttcaccgacaccaccacc

SEQ ID NO: 403170 - DNA, 343 bp, Oryza sativa nipponbare
ccacgcgtccgcgatgaaccacgacacgcagtcgtgcatggaccccaacgtgatggagtccagggtggtggtgagctcctgcggccacgacgggccgttcggcgccacgggcgtcaagcggctgcaggacatcggcatgatcgacgccgtgcccggcatgcgcgccctcgacatgaacaccgccgaggacgagatcgtccgcctcacccgcgaggtcgtccccggcatgatcgtcaccggcattgaggtcgccgagatcgacggcgccccgagaatgggcccgacgttcggagccatgatgatctccggccagaaggcggcgcacctggcgctgaaggcgctc

SEQ ID NO: 403171 - DNA, 406 bp, Oryza sativa nipponbare
ccacgcgtccggtgactacacccgcttcgcttcctcccctctctaagccggggaagctaagccatggcgtccgtcaccgcccgcaccccggtcgcagccctccgctcgtcggcgtcgctcaagtctaccttcctagggcaatcctccacccgcctcgcccgcgcaccgactacgaggcgtaatgttcgggcggaggccaagggagagtggctccccggcctcccttctcccacctacctcaacggcagcttgccaggcgataacgggttcgacccgttgggtctggcggaggacccggagaacctgcggtggttcgtgcaggcggagctggtgaacgggcggtgggcgatgctgggggtggccgggatgctgctgcctgaggtgctgacgaagatcgggtgatcga

SEQ ID NO: 403172 - DNA, 350 bp, Oryza sativa nipponbare
ccacgcgtccgcccacgcgtccgcggacgcgtggggtatgctcaagcatatcggatgaaggaaggtgaggcgaagttcattgaacataatgtgtaaggcaccgttcaatatgctgtctttgcttgccttcaacacaagagtgttcctacaatactgacgaaatatcaacctgtgaatttgtgaatgataattatatgaaaagcaaagcataggtttttaggtggcgtttgtgcctccagccatatattgtaaatcgcagtggtattccaccttgcttgcttcattgttgattgttgtatttagggattgtaaacaccctctagtggatgtttgaatgggaggaactttgt

SEQ ID NO: 403173 - DNA, 416 bp, Oryza sativa nipponbare
  unsure (1)..(416): unsure at all n locations
ttgtatgtaaatatgatatgattgtaaatcatttggaggagctagactagcgtgccttattaacaaggagatatgtaccattacatgatgattaacatataaatctgtagctacatggaattaaggtagtggagcagaggaggaaggatgatagaagactccaattctccatggatgggaatgggatcaggtggccttgcagaactctccgcccagatcgtcgcacgcctcctcggggaacaccgtggtgggctcgtcgtaagataggtagtccctgtcgacttcctccggcgccgcacgagaaacagcaacagcagccgatgatgaaagcttggcctctgggtacatctgcacgttgcacgcctcgccgccgatgaggtcgcacgcctncatcggaaacaccgagatgttagagc

SEQ ID NO: 403174 - DNA, 261 bp, Oryza sativa nipponbare
gggggaagaaaaccacttggagacaatttactcaggtagcaaatatttctcagccacaaatccaaacacttggtccttcctatcagaagatcagaatgaacaggttttcaaattcatctcccaactcgacgataatttacacgtacatttaacacattcttccacccttctcaaactcctcccttcttcttcccgggtaagattaaaattaacttgaggccagccagcgtcgcccgcggcgagatgtttacaggctgggcg

SEQ ID NO: 403175 - DNA, 368 bp, Oryza sativa nipponbare
  unsure (1)..(368): unsure at all n locations
ggcggcgaaattgtgggtgggcaacgtatatacgtgtgacgggcgtacatccttgctcatcttattgtaccgtatatatacgtacgtagtagccagtatttatttagtggtacgtacgtacgcatggattattaataatttgggggtgattaataattaatcagttgcagtagtagccctgctgctgcggcatcctggcgtagccgtactgctgctccttggcgccgtagctggcctgcttctgctcgcggtgctcgtggtaggcgtagccgncggcgcccaccgncgccaccgncgncacgccctgctcgatcctgtgcctctgcgcgttcgccgggtccttcttcgccttgtgcccctcatagaga

SEQ ID NO: 403176 - DNA, 293 bp, Oryza sativa nipponbare
tttaaatatatatagccggagctgccatatatttcattcacatatgcctcacccaacaacatatagtcgtagcagataccactcttacatcaagtcagagagagatcaggtgaaacaaaaacaaaagcagagcacggccggtaaaatcaaaagacgatgaacaaactgggaacacacgaaacaaggtgggagacatcatcgaatcagagatgaacaattaaacaaggctatatatgacgatgacggcttagttgccaccagactcctcgcaacccgggggcttgtaagcgatg

SEQ ID NO: 403177 - DNA, 355 bp, Oryza sativa nipponbare
gagtttctgggtaagtgcgagtgggacacatacgaagtctgaaactctgaaagtaactgatacatgagcatagagaaagatcatcaaactgacaaatttcatgcggccaatatacacacgcgattgcactactgttccaaattaatcaaccttttttcttttcttttttacccatctcatacataatcacgtagaaacaccagagatccattcagattacattgcatccatcccagatgagaatgatcagaagaagtttgggttgtatccgttgctgattcacacgggattccacgtgccccatgctactcgggtcaaaagcgtagctagtgatgctttcggctactggacttta

SEQ ID NO: 403178 - DNA, 341 bp, Oryza sativa nipponbare
  unsure (1)..(341): unsure at all n locations
aaacaagctaattttatagttaatgcacaacaccatatttcattgatcaggttcagaacctgcacagaaatacacactaccggtacagatctcaccctctctccaatactcgtacatccatccacgcggtccacacgaatacgtacatctatacggtacacgtacgtacatctactgcaccgngtacacacacgcacactctnctgcagagacgcgcatcgtcgtcaacctagctagcttagctgaaggcgatgcgtcgccatggcagcacggcggcggcggcgctcacttgccggggacgaagttggtggcgtaagcccaggcgttgttgttgacggggt

SEQ ID NO: 403179 - DNA, 512 bp, Oryza sativa nipponbare
  unsure (1)..(512): unsure at all n locations
attgcaaaaacatcatcttggtcttcatcttcttagtgtacacaacaccaactcgatcatcatctcgtcgcactaaacccatcttccccaacccaaagacaacgaactcgctggccacaaatccatccaaccacaattaaccactgctaagctacggtcccccacttcacttgccggggacgaagttggtggcgtacgcccaggcgttgttgttgacggggtcggcgaggtggtcggcgaggttctcgagggggcccttgccggtgacgatggcctggacgaagaagccgaacatggagaacatggcgaggcggccgttcttgatctccttcaccttgagctccgcgaacgcctcggggtcatcggcgaggccgagcgggtcgaaggcgccgncggggtagagcgggtcgacgacctcgccgagcggcccgncggcgatgcggtacccctcgacggcgcccatgagcaccacctgcaccggccagatggcgaggatgctctgcgcgtggatc

SEQ ID NO: 403180 - DNA, 296 bp, Oryza sativa nipponbare
  unsure (1)..(296): unsure at all n locations
agaaacaatttaatctaacggacgggaactaatattatcacggtgttanccnatnacaatggaaanagtaatctangtacaagcggatcattgacggtggagacaagacattggctgcaccacaacacccaccagtggcgccaacaaggagcgctatccgttataggacgagagaaaaagtaaaacatcaccatgtgaagtgaaactgaataattctagtagactatgatgatgatggataggctccttaggacgcccgccgcccttaactgttttctgctcccatcttttccact

SEQ ID NO: 403181 - DNA, 388 bp, Oryza sativa nipponbare
aaagcaggttggaatttacatacatagtacctgtatcatgaatataagtaaaacttctctgaatacattctttgttcatgctgcctgggtacattaaccttccctctttagctctgcagctctgctgcatatgtgaactcacaacatacatgctagctttcctatttgtactactatattcttttccatttatcaacggacgacatgcattgctgtgctacttcaccaacatggagctcttaacatccaaagtcataaggaaccaaaccttgcagctctgggccgttgagcctgttgttgttctcaaagcttccaagagggaaggttgagaagggaccgtcaacaggaatagttccacagaggtcattgttagacaagtcaatgactt

SEQ ID NO: 403182 - DNA, 476 bp, Oryza sativa nipponbare
tttaggacaaacaatgggcatcgtatatttgagatcttgtgattattcaataatcttgtccatattattattgatatttatttctctcgctaaaataaattgctcatatctatatttttactggcaaggagaagccctgttacataaccattaacattggctctatacattttttgcagaaatgcctgatgggggtcctaagggataaaactgtgttatacgtcacgcaccaagttgaatttctagttgatgcagaccttattatggtaagcccctcacagctgctcgaggtggtcttttcattcctatgataattgcagcacaatgcttctttcagatatttgaagtgggaagcaactattggatggcatcagcttgccatccacgaactggaagcaaatcaaaaatggaatccacccagttcatggtatatgtatttatatcagttggcagcgccttgtgtatcttgattcgag

SEQ ID NO: 403183 - DNA, 318 bp, Oryza sativa nipponbare
aactaaaaccagggggatggcgtgtttgatacaaaaattaagatggacggattcacaagagagcaccctctacttaagctttacattacaaggccaaccagcagctgcctgccggccgaccactgcgtgcgcacgcgcgcgcaataatcaaccaatcacacacagtacgcacgcacataaaaaccacccatagccttcacgtacgcccggacgcacgcaccggttcgtgccaagctcaagggtagatggttctcgggatgatgatgtcgccgatgttgttgtgccacgggtccgagaggtggctggccaggttctcca

SEQ ID NO: 403184 - DNA, 265 bp, Oryza sativa nipponbare
aaaccgcccgcctttttttttttttttaaaggattatcttctataagagagggttcatctcacagattcataaccctcaaaaagggttacttattcaatgaaaagggttttatgctctttcatacactgtgacagtgtgtgtacatataatttggaaaaacaaagtgaagatggatttacaccaacgtttctcagatacagcggacttatatctacaagctgatcacacaagtgaactctgctgctgatgatgatatggatcatg

SEQ ID NO: 403185 - DNA, 229 bp, Oryza sativa nipponbare
gactgggcaaaccacaccaatacacgattgattaatttcactgagaatagcacgggtccatcacatcacacaaattcatacgttgatacacccatagtcgccgaagcgaccagctgcttaattaatcgataacacacgggtttaattcagcaataattagcacacacacaaaccacactcatatgggtggtttttattggggactaattaaagtaggtgactcccccgc

SEQ ID NO: 403186 - DNA, 523 bp, Oryza sativa nipponbare
gcagtgaaaagggttttatgctctgtcatacagtgtgacagtgtgtgtacatataatttggaaaaacaaagtgaagatggatttacagcagcgtttctcagatacagcggacttatagctacaagctgatcacacaagtgaactttgctgctgatgatgatatggatcatgttgttatagcttacgcccaccacgggttgtcgccggtcctgaagtcggtctccacccacggcacgaagagaaccttgccgtcgtcgacgtcggcgtgcaccaatgccagcgacaggggagcaggtccacggacgaccctgccctggttgttgtactgcgagccgtggcaggggcagatgaacttgttctcggcggcgttccacggcacgacgcacccaaggtgcgtgcacacggcgttgatcccgtacgtggccagcgtcttgtcggcctccacgacgaggtacgtcgggtcacccttgagcccctgggtgagggtgcggtcgttggggccgtgtgtcttgagccactcctt

SEQ ID NO: 403187 - DNA, 505 bp, Oryza sativa nipponbare
tttgaccacaagcaattttgaacaaactacaagagtacatgtttgacacaaatacacaattcaaatctaaaacactaaagagtccagtacaggtgcacttagaagggcttgaagaagcataagctattacagttagtttctactactaacagaaaatctagaattgatgccattgacatacaccaaacaacacattaaagaccctaaagctggtcctaaactgaaaaccaacagctgaatgcatatccattgggcattctatctcatgagggtctttacagcgagtcaaattcttggttcttcagacataagccatagagggatccaccatcaagctctggctctcttgctactactgctgcagttcgggcacttgtagtgcttgatgtgctcagccttggcaggggttatcttgacacacttaccgtggaaccatgtctcacaagcatcgcagcagatccagaactcatcctgtccatagttgtcaccacatgcaccacataat

SEQ ID NO: 403188 - DNA, 375 bp, Oryza sativa nipponbare
  unsure (1)..(375): unsure at all n locations
ttgagagaaaaaaaattgggattaggatgtctggacagatatggtantantatacatagtagatacacgggctgaaaaaaaaaaatctcttcttcaatctcagttctgggacttctccaccttcgccttgatcttctgctcaatgatcgccttctcggtgtcgaggctgaacatcctgttgagggcgtgcatgttctccagcgtctcatcgagggtgcggctgtcgctgccgtcacatctcaggtgctgcaatgggccgtggagaagcttgttcacgatgccggtgctgagctcctcgatggatcttctcatcttcttggtgagggcgtcttcgccgatcttctggaggcacttctcaagctccgaagccctgat

SEQ ID NO: 403189 - DNA, 364 bp, Oryza sativa nipponbare
gggtagagttaagctagaaatctcctcgatcgatcacacacacacacacaattaaggtacatacatacatgcactgctgcaactgcaactgcagggtcggtgcgtggctactacaagtgtacacatggtacgttggttggcaccatctcgatcgtgtcgttgtgctcacttgccggggacgaagttggtggcgtatgcccaggcgttgttggcgacggggtcggcgacgtggtcgaagaggttctcgatggggcccttgccggtgacgatggcctggacgaagaagccgaacatggagaacatggcgaggcggccgttcttgagctccttcaccttgagctcggcgaaggtgtcagggtcgtcg

SEQ ID NO: 403190 - DNA, 479 bp, Oryza sativa nipponbare
aaattatggatcaatataggaaagggaaagaataaaaaggacagtcagcatcatcgccgtttgagtaactattatttgcttaaaattaaaatatctaagaaaaataagtctagacaatttattattgtgaattccagcggttagggccaaggaccagtagagttacacgtctgcaactttagaagtcgggggcaagccatgcgataggcttgcttactttgagaaaaacttctggctaacagattcatagctcgggacatgaataacgtcaccccatgatgccagtgtaaggggtgatgaaatgatcttcttggcagtagaagaaatgtcattcaaggtgattgcttcaagatctttcaagaaatgctcaatgggtttccttttcccatacgtcaaaatctgccttcctatgtcttcagatgctacgactctggattccaagttcatcaaaactgcaaacttggttgcctggttagctc

SEQ ID NO: 403191 - DNA, 386 bp, Oryza sativa nipponbare
agaatgaacaggttttcaagattcgtctcccaactcgacgataatttacacgtacatttaacacattcttccacccttctcaaactcctcccttcttcttcccgggtaagattaaaattaacttgaggccagccagcgtcgccggcggcgagatgtttacaggctgggcgtcctctcggcggcgccggagatgacggtgagcaggttgttgccgaaggggtcgctgaggtgcttggagaggttctcgacggggccctcgccggtgacgtaggcctggatgaagaaccccagcatggagaacatggccagccgcccgttcttgatctccttcaccttcagcagcgccgcctggtccgggtcgctcgccagccccagcggggtcgaaa

SEQ ID NO: 403192 - DNA, 519 bp, Oryza sativa nipponbare
tgaagaaaatttcagatggagttgaaacctcatgattcatgaagattttgaatttcaactttcaaagtttggagcttacgctcaacagtggacaactcaccctgaacaccctgcagccaatctatcttttgctgacatgcatcttgataaggtttgctgacagtctcaacaaaatggactaattgattagcactacgggatatatcctgctgaatagcttcgtcaactttagaagaaagtttttcagcagccttgccgatcttctctactgcaagtttccgacgggtaggaaaatttgatattgcaaagaacccgccagctgagcaaagagctagagcaagaaggtcttcaagtgtacttgtcaaaacagaggtcaaaagagaagctgacaatccagcaacccctagccctccaaaggttccccaagccacttcacgaatttcttcttcaaaaaccttagcagcagcactagcactgaagccatccagtgcctttacacagagtttctcttcttcattg

SEQ ID NO: 403193 - DNA, 464 bp, Oryza sativa nipponbare
ttaatatgtgaatatgaaagtaatatgtactttaaaagcattcccaagacacaggaaattaaaacatagtcagcggcattgcacacacggccaggtatctctcagcagtcagaaataataacgatactgaactgcactgcttctgcctcgatttcattttttttttggggtctcccagccacgatgagaccaaactaacaacacctattgttgatcctcaaactcatggccatgatccaaaagatagttggcagccagctcttcatccttgttgcatgcgaagaagacctccaaaacgagctcacggttgaaccccattgcctccagccgctgaatggcctcccgttcctctggagtaactgtaagtgcctgtggcatagcggctgctagttgacctagtatgtttcccccagcagcgctgctatcaggagattcattcaccagacggagaaaatcagcctgat

SEQ ID NO: 403194 - DNA, 372 bp, Oryza sativa nipponbare
ttaaatcattattgcaaagacatcatcttcttcttcatcttcttagtgtacacaacaccaactcgatcatcatctcgtcgcactaaacccatcttccccaacccaaagacaacgaactcgctggccacaaatccatccaaccacaattaaccactgctaagctacggtcccccacttcacttgccggggacgaagttggtggcgtacgcccaggcgttgttgttgacggggtcggcgaggtggtcggcgaggttctcgagggggcccttgccggtgacgatggcctggacgaaaaagccgaacatggagaacatggcgaggcggccgttcttgatctccttcaccttgagctccgcgaacgcctcggggtca

SEQ ID NO: 403195 - DNA, 241 bp, Oryza sativa nipponbare
  unsure (1)..(241): unsure at all n locations
tcgacctactctttcttttatttaaaccattacttgacaggcatcaaatatggtttgattttattaatacacacaacaacaactcnatcatcatataatctcactaaacccatattcattcaacccaaagacaacgaactatcttcccacaaatatatccaaccacaattaaccacttttaaattacatttccccactttacttgtccaatactaaattggttgcttactcccagacgttt

SEQ ID NO: 403196 - DNA, 280 bp, Oryza sativa nipponbare
cgataaatattgcttcacttgtacagaagtacagataaaaatacattgatacatgacacggagagagccatgcacaccacttatttggacacacagagggcaaggctgcagagaaaatcaagcaacacaagctgaactcacggccccacctgtcagcctctcactggtcgaggccggagactcttgtgaaaaacagcaacaccacgcatgcagaagaagacaaattattacacacacaaatcgacgacacggcggccggcgacgtacggcgaggtcgtcg

SEQ ID NO: 403197 - DNA, 387 bp, Oryza sativa nipponbare
tgttaaccactagtaagtagatatggcagggtaaaacaggtaaaacctgtgatacaaagcagtcacataactgaaaaagcgcacgatagtttgtgctactacaacagtaaaccaggacagaacacatccaacacgatgacgacgaggtcatgggggtttcgacgatagcaatactggcagtacgaattcgaggtgccgcacaacggcgcaccacattcacttcagcagggttttaacgatggatttgacattgagcttcttgaggtcagtgtaagactgaccacagccaacgaacatgactggagctccagatatataaaccattgaaagtgcagctccaacctatatatatattgagtagtcataaaaataaaaatactgtaaaaa

SEQ ID NO: 403198 - DNA, 415 bp, Oryza sativa nipponbare
tgacaagcaattaagcgtagtttgtccaccataattaagatcgagaccatgagatagctagaacactgctgctaccatgagatagtttatccccctgtagtactgtacatcagaaattcaccactcaactcaccccctcacccatgcatccagatccatgcatgcaggaaacaattaccacaacacacacagtaagtctgaatctcatcacatccatctctctctctctcctccccccaattcattaacatcttatacatgcatactccacaaaaaaaaaaaagaagaaacaagaagagaacatcttccatcgcccaatcatcggtttcaccagcctgaactcatcaagctccttgagatgccctggccctgatgaaatcgatcacacgctcagcctgacagcgtttggatgatg

SEQ ID NO: 403199 - DNA, 492 bp, Oryza sativa nipponbare
gaatcatacgtaagtgcttgctgatacaatatcaacatggagggtacattgccggttccatatgaacaaacataaaaacaccgaaaccccatatggccattatgccgatcctagcctagcttggcgaggacatcgccaagagcagatttggtcaacgtgtagtacttctccgcctcttcggggctcttgatcttggctgcatggtcaagcccgtcaatggtggcgaagagcttgccggtgaggtccttgaggcccttcttctcgtccttgggcttggagttgatgacggttttgaggtcgtagcgcaggtaggaggccctgaggcggaggtcgtccctgacgaacggccactgcttcttctcgatgagcggcttgaggttgatgatgtcctgggccgacttctttgccctcgccgccgcctccggcggcggaagcggctgcaggtagaacctttccctcagcggcaggtccgtgtccctcgcctggtccgag

SEQ ID NO: 403200 - DNA, 381 bp, Oryza sativa nipponbare
caggacttcagatgagaaactactagatacacatccatcagatggatggatgaaatcaacagtcgagacaacttactagcaaaatatccagttctagaacacagaaacagagtacttcactaacaatctactactacatgtgagtagtattagcaccattcacgacaccaaataagagttcagcagcaaaagcaggaagtagtcacagatgaaacaccagagcccctcccagagatgagaaagcctaagccctctcaccacggatcctcctagccagctgaatgtccttgggcatgatggtcacacgcttggcatggatggcgcacaggttggtgtcctcgaagagacccaccaggtacgcctcggcagcttcctgaaggg

SEQ ID NO: 403201 - DNA, 350 bp, Oryza sativa nipponbare
agaccaagaaattgttgaagttcgattgagtatgatagacctttttactaggcaaaccacacgaatacacgattgattaatttcactgagaatagcacgggtacatcacatcacacaaattcatacgttgatacacgcatagtcgccgaagcgaccagctgcttaattaatcgataacacacgggtttaattcagcaataatcagcacacacacaaaccacactcatatgggtggtttttattgtggactaattaaggtaggtgactcgccggcggcgagtgttcggttgcttcgtgacttcacttgccgcacttgcagtcggtgcaagagcagctggtgccgcacttgc

SEQ ID NO: 403202 - DNA, 403 bp, Oryza sativa nipponbare
gagtttaactaagaccagggtgatttcgtgtttgatacaaaaattaagatggacggattcacaagagagcaccctctacttaagctttacattacaaggccaaccagcagctgcctgccggccgaccactgcgtgcgcacgcgcgcgcaataatcaaccaatcacacacagtacgcacgcacataaaaaccacccatagccttcacgtacgcccggacgcacgcaccggttcgtgccaagctcaagggtagatggttctcgggatgatgatgtcgccgatgttgttgtgccacgggtccgagaggtggctggccaggttctccagtgggccggtgcccgggtacgccgactgttggacgcagaaacccacaaagccagcatggccaatcgcccgtcttgatct

SEQ ID NO: 403203 - DNA, 353 bp, Oryza sativa nipponbare
ggcaaaagagactagagaggtgcgtagaggtccattttttttacaaaattgcagataagaccctgctttcctgcagaattctttattcccccaggcatagtgttttccaactctctctctcggctgcggttacgccggatttgcttcagttccagtgctccgtgggctcggcccaccacgacgacagcggcgggggctgatcgtcggcgaagaacccgccgcacgggtcgtcgtccacgaggaaccccggatggtcctcctccaccttgaggaaactgccgtggaagaacaccgtttcgagaggtggctggccaggttctccacgggcccggtgcccgggtacgccgactgtt

SEQ ID NO: 403204 - DNA, 438 bp, Oryza sativa nipponbare
tgcaaattcaagattgcaattcatgaatcatggagcactggtaattgagtttctgggtaagtgccagtgccacacatacgaagtctgaaactctgaaagtaactgatacatgagcatagagaaagatcatcaaactgacaaatttcatgcggccaatatacacacgcgattgcactactgttccaaattaatcaaccttttttcttttcttttttacccatctcatacataatcacgtagaaacaccagagatccattcagattacattgcatccatccaagatgagaatgatcagaagaagtttgggttgtatccgttgctgcaagtggcgaggatgtagtaggcgacgatgtggccgagggagccccaggcgaggacgtcgacgaggttgaagccgacggggtcgttggaccggagcaggccggccggacgcgtgg

SEQ ID NO: 403205 - DNA, 523 bp, Oryza sativa nipponbare
actaggcaaaccacacgaatacacgattgattaatttcactgagaatagcacgggtacatcacatcacacaaattcatacgttgatacacgcatagtcgccgaagcgaccagctgcttaattaatcgataacacacgggtttaattcagcaataatcagcacacacacaaaccacactcatatgggtggtttttattgtggactaattaaggtaggtgactcgccggcggcgagtgttcggttgcttcgtgacttcacttgccgcacttgcagtcggtgcaggagcagctggtgccgcacttgcagccgccgttctcctcgccggcggcgacctcctcgaagtggctcttctcggcttcaactatgacgacgccatagctggtacctttcttcacgcactggctcttgtcagcacagtcgcagttgccgcacttgtccgacatggtcgaagatttaattagctaagtgagtgatgagttaatcccttgtgttgcttatgctttcttgtgcttcggacgcgtgg

SEQ ID NO: 403206 - DNA, 374 bp, Oryza sativa nipponbare
gtgtgtatatagccggagctttggtttcacatatcctcacccaacgataattgtagtactcttacaataaaaccggccggagagggagggaagagattattacatatgtgttaagagcagaggccattgagatggtacataaccaaactgtaaaataaaaatatatagcatattatatattgatatatcatcaacatagcccaaaacaaagctgcatactattattataggcagcaatccaccagcgcgatgcttgatcttagcttagttgccaccagactcctcgcaacctgggggcttgtaggcgatgaagctaatcaactgcacctgcctgacgttgtcgaagccgatgatacggacaaaggcatcggggt

SEQ ID NO: 403207 - DNA, 514 bp, Oryza sativa nipponbare
  unsure (1)..(514): unsure at all n locations
aaacaaacataataacgttgttattcaagatgaacaagatgtgttcacagtatgtaaatatgtacatagcatatataattaatttactgtttatctttacaacatacatataaacgtggtgcgtcgcttaggatgacttcagcaaggcccggttcttctcatattcaaggtattcagtgggggatataggcttaggacccccaaaccaatcaatcaaaaatatgtttttgatttccaatttgaagatttggaaatgatgattctttggccaaccctccatttcaggatgtttagtaaaaagtgcttctttggccaaatctgcttcagatgattgagggtcaatcaacttcaactttccagtaagagtaagttttgcacaagttgggttttcaggatcaatcttnccacatgtcccaagagggaactcgctaagggtaaaggaggtcctttcatcctccaatgcatctctcgcagtgggatctagcgttgtcagatagaagtaggggattccatg

SEQ ID NO: 403208 - DNA, 509 bp, Oryza sativa nipponbare
  unsure (1)..(509): unsure at all n locations
gacagcaacggaacacttacattaacacggattagagacaggtgaattacaatgtaattgtatctagccatgcacagtgccaaagaggcagcaccgctagaataagacgcaaacgaatcagactaacaaaataagagtcaccagacacactgacaatatgctgagtatttttgacagatccaccaataagacgaatacagcaccatcatgagaaacatattgttccacaaaatacaccctactcagattgttcttataagcaaaagattaaaacccactactaacactacgacgcatgcttcatttgtcaaaggaatcgccgaggggaatttaagccctctcaccacgaatcctcctagccagctgaatgtccttaggcatgatggtcacacgctnggcatgaatggcgcacaggttggtgtcctcgaagagaccaacaaggtatgcctccgcagcctcctggagggcaaggacagcatggctctggaaacgcagatcggtcttgaagt

SEQ ID NO: 403209 - DNA, 524 bp, Oryza sativa nipponbare
ttaaatatatatagccggagcttccatatatttcattcacatatgcctcacccaacaacatatagtcgtagcagataccactcttacatcaagtcagagagagatcaggtgaaacaaaaacaaaagcagagcacggccggtaaaatcaaaagacgatgaacaaactgggaacacacgaaacaaggtgggagacatcatcgaatcagagatgaacaattaaacaaggctatatatgacgatgacggcttagttgccaccagactcctcgcagcccgggggcttgtaggcgatgaagctgatgagctgcacctgcctgacgttgtcgaagccgatgatacggacgaatgcatcagggtacgccttcttggcctcctcgagctccttgagcacctgggtggcgtcagtgcacccgaacatgtgcagcttccacatggtccagtacctgccatcgtagtatccgggggatctgtggttctcacggtagacgaatccgaccttgctgaactcgaggcagggcacccact

SEQ ID NO: 403210 - DNA, 361 bp, Oryza sativa nipponbare
gggaaacgaataaaatcaggattgcaaaaacatcatcttcttcttcatcttcttagtgtacacaacaccaactcgatcatcatctcgtcgcactaaacccatcttccccaacccaaagacaacgaactcgctggccacaaatccatccaaccacaattaaccactgctaagctacggtcccccacttcacttgccggggacgaagttggtggcgtacgcccaggcgttgttgttgacggggtcggcgaggtggtcggcgaggttctcgagggggcccttgccggtgacgatggcctggacgaagaagccgaacatggagaacatggcgaggcggccgttcttgatctccttcaccttgagc

SEQ ID NO: 403211 - DNA, 411 bp, Oryza sativa nipponbare
  unsure (1)..(411): unsure at all n locations
ttgaactattctgagtatgatttattatttttgacttttcaccaagtactaattaataacgtctacattatggtggtgcactatttgcatgggacaatgaaaaaaaaacaatatcacccaaaggttacaatttgtatggagagaaaacaatatcacccagctactaatccgtattttgataatgaaatatggatacaaaatgttacaataagatcaagcagaggctttcagctctgccagttctccgattgggatagcagcaggagcaggagcaccaccagttgttggcaggccaaccataactttgaaagaatcatagatcacccactgagttccagtcagggtaccgatcatgaggatgcnaagaggaaggccgcgggtgaaaaggccccagaggcaaggttcttgaca

SEQ ID NO: 403212 - DNA, 319 bp, Oryza sativa nipponbare
gtataaatatatatagccggagctggcatatatttcattcacatatgcctcacccaacaacatatagtcgtagcagataccactcttacatcaagtcagagagagatcaggtgaaacaaaaacaaaagcagagcacggccggtaaaatcaaaagacgatgaacaaactgggaacacacgaaacaaggtgggagacatcatcgaatcagagatgaacaattaaacaaggctatatatgacgatgacggcttaattgccaccagactcctcgcagcccgggggcttgtaagcgatgaagctgatgagctgcacctgcctga

SEQ ID NO: 403213 - DNA, 366 bp, Oryza sativa nipponbare
gatgaagagaacttcacttgtaagagagtatcaacttgttttttacatcggttacatcatagtacaggtacacaatcaacaaggcatgcagtgctccatccacaattacatcccaatacaccaccaccattcacagcctactccgatcccaaaaaagagaggtaagtcgcgtcgacgaacagtcttttcatcttcctccattggcagccattgctaacactccaacacctgaagaactcctcatttgggggtgaaggcctggaagatggtggcgtggccggggtcggcgagatgggcgaagaggttgtcgatggggccggtgccggtgtactctgcctggaaccaaactcccatgacggcgagcat

SEQ ID NO: 403214 - DNA, 402 bp, Oryza sativa nipponbare
acctacgcgttcggtgtgctttacaattacatgatgggtgagcacaaacactggttctaccatgagataagttatccccctggtgtactggacatcagaaattgaccactcaacttaccccctgacccatgcatacagatccatgcatgctggaaacaattaccacaacacacacagtcagtctgaatctcataacatccatctatctttctatactccccccaatttattaacatcttatacatgcatactccacaaaaaaaaaaagatgaaacaagaagagaacatcttccatcgcccaatcatcggtttcaccagcctgaactcatcaagctccttgagatgccctggccctgatgaaatcgatcacacgctcagcctgacagcgtttggatgatggtg

SEQ ID NO: 403215 - DNA, 309 bp, Oryza sativa nipponbare
ccacgcgtccgcggacgcgtgggcggacgcgtgggcgccgtcgtttacggtatcgacttcttcatcgaccagggcgccacggagcactacgacgagctggcgcggcggctgtacgcgcacaacaaggactacaaggggaggctcggggtgatgctgacggcgacggcgaggtgcgtgttcccggaccagcggctgcaggcggcgctgtccacggggctcttctcgcggatccacgtcaaggtgttcggcgacgggcggtgcgcgtcgaggagggaggagctggagaagtggatggcggcgtccccgcag

SEQ ID NO: 403216 - DNA, 377 bp, Oryza sativa nipponbare
ccacgcgtccgcccacgcgtccgaagaaggagagagcttggtgagttgcagagatggccccctccgtgatggcgtcgtcggccaccaccgtcgctcccttccaggggctcaagtccaccgccggcatgcccgtcgcccgccgctccggcaactccagcttcggcaacgtcagcaatggcggcaggatcaggtgcatgcaggtgtggccgattgagggcatcaagaagttcgagaccctctcctacctgccaccgctcaccgtggaggacctcctgaagcagatcgagtacctgctccgttcccaagtgggtgccctgcctcgagttcagcaaggtcggattcgtctaccgtgagaaccacagatccccccgatacta

SEQ ID NO: 403217 - DNA, 299 bp, Oryza sativa nipponbare
ccacgcgtccgcggacgcgtgggcgccgccgccgccgctgttccagtgctggtgcttcgccactgtcacgccgcgctcccgcgccacagtcgtcgtcagcctcgcctccccatcaccgtcctcctcctcctcctcctccaacagcagcaaccttccggcccccttccgcccccgcctgatccgcaacacccccgtcttcgccgcccccgtcgcccccgccgcgatggacgccgccgtcgaccgcctcaaggatgggttcgccaagttcaagaccgagttctatgacaagaagccggagc

SEQ ID NO: 403218 - DNA, 327 bp, Oryza sativa nipponbare
ccacgcgtccggcttgggaagaggaggaggagcttgagcttggagtgagacaacaatggcggctcaggctctgctctctgggaggcagctgctggggaggccattgcaatcttcagtctccaggtcttcttcctccaggaaggcacccttcatggtcagggcagaggccactccccctgccaagcaaggtgctgacaggcagctgtggttcgcatccaagcagtccctgagctacctggatggcacgcttccgggagacttcgggttcgacccgctggggctatcggacccggaggggaccggtgggttcatcgagccacggtggct

SEQ ID NO: 403219 - DNA, 373 bp, Oryza sativa nipponbare
ccacccgagcacccagccccttcctcctcctcctcctcctttcgtttttccgcctccggccatgggggccgggctgtccgccgtcgtctccgccaagctcggctgcccgccggcggcggcgctcggtagctggaagggaagcagaatttcaagcagaaacctggtctccatgaagacgatgacagcaaggagaggcctcgtctccctcagatcccctcgcttccgcgtcttctgcgcggcgaaggcggagacggtggggaaggtgatgcagatagtgaagcagcagctggcgcctggggaggaggcgaagctggcgccggagtcgcagttcacggagctgggagcggactcgctggacaccgggggagatcgt

SEQ ID NO: 403220 - DNA, 434 bp, Oryza sativa nipponbare
cccgtaaagactgcaaagaaaaggcctgtgtcaaggagagggttttagcaccttgctctcctttgcgcttgggagaaaccggaagcaatggcgtctgctactctcctcaagtcatctttccttcccaagaagtctgaatggggtgccacccgccaggctgccgcccccaagccggtgactgtctccatggttgtccgcgctggtgcctacgacgatgagcttgtcaagaccgcgaaaaccattgcatcaccaggaaggggtatccttgccatggatgagtcgaacgcgacctgcggtaagaggcttgcgtcaattggccttgagaacaccgaggccaaccgccaggcttaccggaccctccttgtcaccgcaccgggcttgggacagtacatctccggtgctatcctcttcgaggagactctgtaccagtcaac

SEQ ID NO: 403221 - DNA, 399 bp, Oryza sativa nipponbare
ccacgcgtccgaagctaattaagcaaaagaagaagaagaagaaagtttaagttgaagatgcagaccgctgctagcagtgtcgttggattgtcggccgtgttgcccgctgctgtgaaggggcgcagcctgcagattcaggctcctcgccgtgttgcgttgcgcgttcgtgcggcggcggcggcggtggcagtggaggctgcggaggtggactacagctctaacatctcggtgtttccgatggaggcgtgcgacctcatcggcggcgaggcgtgcaacgtgcagatgtacccagaggccaagctctcatcatcggctgctgttgctgtttctcgtgcggcggcggatgaagtcgacagggacttccttatcctacgacgagcccaccacggtgttccccga

SEQ ID NO: 403222 - DNA, 401 bp, Oryza sativa nipponbare
ccacgcgtccgcaacaatctggaaccttccaattatgagacaccattagatgttcatgttgtagagaaaacggacatgacacccatgaatgctactgttacctctctgactagtaatatcaaagaactagctcatggagaagtccaaaaggattcacagcgatctgcaattgcatcatctgttacgagttcatatagcactgcacacccaactgaggacgcagactctagaaccctctatgttagcaatgttcattttggtgccaccaaggacgcgctatctcgccatttcaacaagtttggtgcggtgctcaaagtagttattgttactaatgcagcaacagggcagccaacaggatctgcttacgtagaatttttacataaagaatcagctgaacgtgc

SEQ ID NO: 403223 - DNA, 237 bp, Oryza sativa nipponbare
gggccgacccacgcgtccggagagagcttggtgagctgcagagatggtcttcttcgtgatggcgtcgtcggccagggccggggctcccttccaggggctcaagtccaccgccggcatgcccgtcgcccgccgctccggcaactccagcttcggcaacgtcagcaatggcggcaggatcaggtgcatgcaggtgtggccgatgagggcatcaagaagttcgagaccctctcctacctg

SEQ ID NO: 403224 - DNA, 438 bp, Oryza sativa nipponbare
ccacgcgtccgcctgagctgaacaccgcatcagcagcagcaagcatctaatcgcgcacgtacgcacaccgcgacccggggcgagatggcgcagtcgatgctggtgtcgggagccaatggcacggtggccgccgcgagcaccagcaggctgcagcccgtgcggccgacgccgttctcgcggctcgtgctgtcgcagccgtcgtcgtcgctggggcgcgcggtgtccgtcaagacggtggcgctgttcggcaggtccaagaccaaggccgcgcccgcaagaaaggctgagccgaaaccaaagttcaagaccgaggacggcatcttcggcacgtccggtgggatcggtttcaccaaggagaacgagctgttcgtcgggcgtgtcgccatgctcgggtttgccgcgtcgatcctgggtgaggccatcaccgggaagggaatc

SEQ ID NO: 403225 - DNA, 340 bp, Oryza sativa nipponbare
ccacgcgtccgccacgcgtccgaaggagctcaagctcaaggagatcaagaatggcaggctcgccatgctcgccttcctcggcttctccgtccaggcgctcttcaccggggttggccccgtgcagaacctgcttgatcacctcgctgatcccgtccacaacaacatcctcaccagcctcaagttccattagagatgccatcaactacgtatttaattaattacgagtttttaattatgtatgtatgtacgtgcgtatgcgtatatgtgtgtacgtatgtatgtacgcaactttgtacgatcgatggtgcgtgtgatcgaaaggggtatgtatgtacgtacg

SEQ ID NO: 403226 - DNA, 373 bp, Oryza sativa nipponbare
ccacgcgtccgcacggattgcatctggtggtggaaggatgtatgttaccatggaccgctatgagaatgactgggatgtggtcaaacgtgggtgggatgcccaggtgcttggcgaagcaccctacaaattccaaaatgcagtcgaagcagtgaaaactctaagagcagagaccaaggctagtgatcagtatttgcctccatttgtgatcgtggatgagagtggcaaatctgttgggcctgttgtagatggtgatgcagttgtgactttcaatttccgagcggatcgtatggttatgcttgccaaagcactagagtatgcagactttgacaaaattgatcgtgttcgtgtaccaaaaaatccgtacgctgggatg

SEQ ID NO: 403227 - DNA, 377 bp, Oryza sativa nipponbare
ccacgcgtccgcacagctcactgcatcaatggccgcggccaccatggcgctctcctccccggtgatggcccgcgcggcgccgtcgacctcctccgcgctcttcggcgaggcgcggatcaccatgcgcaagaccgccgcgaagcccaagccggcggcgtcgtcggggagcccgtggtacggcgccgaccgcgtcctctacctcggcccgctctccggcgagccgccgagctacctcaccggcgagttcccgggcgactacgggtgggacaccgcggggctctccgccgacccggagacgttcgccaagaaccgggagctggaggtgatccactcccggtgggcgatgctgggcgcgctcggctgcgtcttcccggagc

SEQ ID NO: 403228 - DNA, 369 bp, Oryza sativa nipponbare
ccacgcgtccgcccacgcgtccggacgggaaggtgcagcgcacgtttgaggcgctggacggcatcctcgagagggtgatcgacgatcaccgtcgccgccgtgaaggcggccggcgtatggacgacgacggcggcggcgatcaccgggatttcgtggacgtgttgctcgacgtgaacgagacggacaaggacgctggcattcagctcggcaccgtcgaaatcaaggctattatcatggacatgtttgtagggggctcagacactacgaccacgatgatggcatggaccatggccgagctgatcaaccacccacgcgccatgcgcaaagcgcagaacgagatctgggcagtcgtgggcaacactagtcatg

SEQ ID NO: 403229 - DNA, 338 bp, Oryza sativa nipponbare
ccacgcgtccgcacacgcgcagctcgagccatggccggagtgagcaccagtgtcgtcggcctcaagcccgccgcggcggtgccgcagtcggccgcctcgccggtgccgaagcgcgtgcacgtcgctgtgccgcccaaggaggagcagggcggtggcaggcgcgccgcgctgctgggtctcgccgccgtgttcgccgccaccgccgccgggcaggccaaggccggcgtgttcgacgagtacctcgagaagagcaaggccaacaaggagctgaacgacaagaagaggctggcgacgagcggcgccaacttcgggagggcgtacaccgtcgagttcggcag

SEQ ID NO: 403230 - DNA, 407 bp, Oryza sativa nipponbare
ccacgcgtccgcccacgcgtccgccccctttctgaacacagcaccaccccttctgctgcatctcccacctccctctgaattgtgggcctgaggcgatggcggcgctcgccccgtccaagatgctcggcacccggctcaacttcgccggctcctcccgctacgccaccgcggcaccgaccaccggagcgcagaagatcgtctccctcttcagcaagaagcccgccccgaagcccaagcccgccgccgtcacctcctcgagccccgacatcggcgatgagctcgccaagtggtacggccctgacaggaggatcttcttgccggagggtctcctggaccgctcagaggtgccggactacctcaacggagaggtccccggagactacggctacgacccttttggcctcagc

SEQ ID NO: 403231 - DNA, 362 bp, Oryza sativa nipponbare
ccacgcgtccgattattactgcaggaattgctattgtcaagttgataaagggacaaattccaatgcctaagttgtttcctgatgttcccgacttggcatctatttgggaacttttcacagcagtgccagttcttgtcactgcttatgtttgccattataatgtccacccaattcataacgagctgaaggacccttctcagattaagccaatagtacacacatcattggttctatgctcaactgtctatatcacaacaagtttctttggatatctcctctttggtgaatctacccctgtctgatgtgctcgccaacttcgactccaatcttggtattccatacagtcagatgctaaatgatgc

SEQ ID NO: 403232 - DNA, 326 bp, Oryza sativa nipponbare
ccacgcgtccgagcataacacacacagagggttgaactcatgacttatgtcagataataaaatattgtaccatgtgggacaagtgctgctacagtgactgtgctgacaagagcctgcgcgtgacgaaaggtacgatctatggcgtcataatagatgaagtcttgaactgccactatacggagggcggcgacagagaggagaacggcagatgcaagagcaggactctgctgcttctgcaccgactgcaagtgcagcaagagaagtcacataaatagctcgaacacttatgcgtcggcgatgcacctaccttaatatgttcacattaa

SEQ ID NO: 403233 - DNA, 441 bp, Oryza sativa nipponbare
  unsure (1)..(441): unsure at all n locations
ccacgcgtccgagaagattgggtactggaggtacatcaccatcttcaggcacctcaaggcgaacccggagtaccaggtgtaccccatcttcaagtactttgagaactggtgccaggatgagaaccgtcacggtgatttcttctccgcgctgctcaaggcgcagccgcagttcctcaacgactggaaggccaagctctggtcacggttcttctgcctctcggtgtatgtgaccatgtacctaaatgattgccaacgtactacattctatgaagggattggtctggacaccaaagaattcgacatgcatgtgataattgagaccaaccgcacaacagcaaggattttccccgctgttcttgacgtcgagaaccctgaattcaagaggaagttagacaggatggtggagatcaacanaaagatcattgccataggcgagtctga

SEQ ID NO: 403234 - DNA, 417 bp, Oryza sativa nipponbare
ccacgcgtccggcctgagctgaacaccgcatcagcagcagcaagcagctaatcgcgcacgtacgcacaccgcgacccggggcgagatggcgcagtcgatgctggtgtcgggagccaatggcacggtggccgccgcgagcaccagcaggctgcagcccgtgcggccgacgccgttctcgcggctcgtgctgtcgcagccgtcgtcgtcgctggggcgcgcggtgtccgtcaagacggtggcgctgttcggcaggtccaagaccaaggccgcgcccgcaagaaaggctgagccgaagccaaagttcaagaccgaggacggcatcttcggcacgtccggtgggatcggtttcaccaaggagaacgagctgttcgtcgggcgtgtcgccatgctcgggtttgccgcgtcgatcctgggtga

SEQ ID NO: 403235 - DNA, 355 bp, Oryza sativa nipponbare
ccacgcgtccggtctcgaaatcaaaagcacacccaagagagagtagtggtagttccagagcggtctgcttgcgaagttgcgatgcctgccatggccaagcccgcctcccgcgctgccaagcccgcgtcggcgccgaagaagcagaaggcaaagccctccgccgccgccggtggctcctcccacccgccttatttcgagatgatcaaggaggcgatcacggtgcttaaggagaggaccggctcgagcgcgcacgccatcgccaagtacatggaggagaagcacggggcgtcgctgccggccaactacaagaagatgctctccatccagctgcgcgggttcgcttccaagggcaagc

SEQ ID NO: 403236 - DNA, 408 bp, Oryza sativa nipponbare
ccacgcgtccggtctagcaagaagaccatggagatcaacccggagaatgccatcatggacgagctccgcaagcgtgccgatgcggacaagaatgacaagtccgtgaaggacctggtgatgctgctcttcgagactgccctgctgacctccggtttcagcttggaggaccccaacaccttcggcaccaggatccaccgcatgctcaagctcggcctgagcatcgacgaggacgagtccgccgaggctgacgccgacatgccgccgctggaggacgacgcccggcgagagcaagatggaggaggtcgactaaacgtcatggacccatggatgccattctgtcccttctagttatccctctcctagttctcttctcatagctatctgactgctgctgttcgctttcttttt

SEQ ID NO: 403237 - DNA, 202 bp, Oryza sativa nipponbare
ccacgcgtccggtctcccaccttgtttcgtgtgttcccagtttgttcatcgtcttttgattttaccggccgtgctctgcttttgtttttgtttcacctgatctctctctgacttgatgtaagagtggtatctgctacgactatatgttgttgggtgaggcatatgtgaatgaaatatatggaagctccggctatatatattt

SEQ ID NO: 403238 - DNA, 430 bp, Oryza sativa nipponbare
ccacgcgtccgctcaagaaggtgatggcgaagaagcccaagacgaagaggctatccgggtttggccttaaaccctctgctgctttctccaggccccatgtgccgtcggcggcggcctccctgcagccaagccgtcgcgtccgcgtcgtgttcgaggaccctgacgcgacggactccgactctgacgacgacgaggacgccggcgccgcctcaaagaagcgctactttgagctcttcattggcaagccagcttcgtcgacgaagcaggcctctccggcgtccaccgtcgctgcctacgccaacatcggcaaggttgggagcacctgctaccgtggtgtgcgcctccggaagtggggcaagtgggcggcggagatccgcaaccccttcaccggccctagggagtggcttggcacctttgacactgctgatgc

SEQ ID NO: 403239 - DNA, 390 bp, Oryza sativa nipponbare
ccacgcgtccggccgcgtcggcgctgcaccagaccaccagcttcctcggcaccgcccctcgccgggatgagctcgtccgccgcgtcggcgactccggtggccgcatcaccatgcgccgcaccgtcaagagcgcgccccagagcatctggtatggacctgaccgtcccaagtacctgggcccgttctcggagcagacgccatcgtacctgaccggagagttcccgggagactacgggtgggacacggcggggctatcggccgacccggagacgttcgcgaggaacagggagctggaggtgatccactcgcggtgggcgatgctgggggcgctgggctgcgtcttcccggagatcctgtccaagaacggggtgaagttcggggaggcggtgt

SEQ ID NO: 403240 - DNA, 440 bp, Oryza sativa nipponbare
ccacgcgtccggagaaggccatggcgtcgaaggaggaggtggccgtggagacggtggagggcggagcggcggcggcgaaggcgccgtactgggacccgccgccggcgccgctgctggacacgagcgagctgggtaagtggtcgctgtaccgtgccctcatcgcggagttcatggcgacgctcatcttcctctacgtgagcatcgccaccgtgatcgggtacaagaaccagagggccaccgtcgacgcgtgcaccggcgtcggctacctcggcgtggcgtggtcgttcggtgccaccatattcgtcctcgtctactgcaccggcggcgtctccggcgggcacatcaaccccggcggtgacgctgggcctcttcttcgggcggaagctgtcgctcgtccgcaccgtgctgtacgtcgtggcgcagtgcctcggcgccatcgc

SEQ ID NO: 403241 - DNA, 362 bp, Oryza sativa nipponbare
ccacgcgtccggcgcggatcaccatgcgcaagaccgccgcgaagcccaagccggcggcgtcgtcggggagcccgtggtacggcgccgaccgcgtcctctacctcggcccgctctccggcgagccgccgagctacctcaccggcgagttcccgggcgactacgggtgggacaccgcggggctctccgccgacccggagacgttcgccaagaaccgggagctggaggtgatccactcccggtgggcgatgctgggcgcgctcggctgcgtcttcccggagctcctcgcccggaacggcgtcaagttcggcgaggccgtgtggttcaaggcgggctcgcagatcttcagcgagggcgggctcgac

SEQ ID NO: 403242 - DNA, 441 bp, Oryza sativa nipponbare
ccacgcgtccgaagtactcgagcaaagaaggagagagcttggtgagctgcagagatggccccctccgtgatggcgtcgtcggccaccaccgtcgctcccttccaggggctcaagtccaccgccggcatgcccgtcgcccgccgctccggcaactccagcttcggcaacgtcagcaatggcggcaggatcaggtgcatgcaggtgtggccgattgagggcatcaagaagttcgagaccctctcctacctgccaccgctcaccgtggaggacctcctgaagcagatcgagtacctgctccgttccaagtgggtgccctgcctcgagttcagcaaggtcggattcgtctaccgtgagaaccacagatcccccggatactacgatggcaggtactggaccatgtggaagctgcccatgttcgggtgcactgacgccacccaggtg

SEQ ID NO: 403243 - DNA, 422 bp, Oryza sativa nipponbare
ccacgcgtccgcccacgcgtccgcccacgcgtccgggcagctggaggagcttgccgccgccgtgctgaaggcggcacgcgccgagatcgccgcggcgctcaacaagatgaagaaggagaccacccaggagctggaggcgaagctggacgaggggcgccgccgcgtcgaggccgagctcgtggaggcgctcgccaacctcgaggcgcagaaggaggaggccgtcaaggcgctcgacgcccagatcgcctccctcagcgacgagatcgtcaagaaggtgctcccatccgcgtaatggccgccccgccgccggccgttcttgcctcccaaacaccaaccatctctcgtaaagattttctccgtgttttatccgtgtgtatacgctgcttctcctaagaatgtaatttcagtgaacttctcgtgat

SEQ ID NO: 403244 - DNA, 412 bp, Oryza sativa nipponbare
ccacgcgtccggttggcttctcctccccctctttaccttttcctcctcggttcggttccgtggttcgtctagggttgagtgggttgagatggcggcgccggatgtcgagtaccgctgcttcgtcggcggcctcgcctgggccaccgacgaccgctccctcgaggccgccttctccacctacggcgagatcctcgactccaagatcatcaacgacagggagacggggaggtcacgtgggtttggcttcgtcaccttctcctccgagcagtcgatgcgcgacgccatcgaagggcatgaacggcaaggagctcgacggccgcaacatcaccgtcaatgaggcccagtcccgccgctccggcggcggaggcgggggctacggcggcggcggtggcggctacggcgcggtcgtgga

SEQ ID NO: 403245 - DNA, 396 bp, Oryza sativa nipponbare
ccacgcgtccgaaaaaccaacccaaccgccgccgcatcgccctcgttagaacgatggccgcgtcggcgctgcaccagaccaccagcttcctcggcaccgcccctcgccgggatgagctcgtccgccgcgtcggcgactccggtggccgcatcaccatgcgccgcaccgtcaagagcgcgccccagagcatctggtatggacctgaccgtcccaagtacctgggcccgttctcggagcagacgccatcgtacctgaccggagagttcccgggagactacgggtgggacacggcggggctatcggccgacccggagacgttcgcgaggaacagggagctggaggtgatccactcgcggtgggcgatgctgggggcgctgggctgcgtcttcccggaga

SEQ ID NO: 403246 - DNA, 436 bp, Oryza sativa nipponbare
ccacgcgtccggctgagcaacgggaagtacaggagcgtgtggcaccgggcggtggtgaactccgacagggagaggatgtcggtggcgtcgttcctgtgcccgtgcaacagcgtggagctcggcccggccaagaagctcatcaccgacgactcgccggcggtgtaccggaactacacctacgacgagtactacaagaagttctggagcaggaaccttgaccaggagcactgcctcgagctgttcaggacttagctcatcgcaagctcactctacgagtcgacattaaaaccgggggggcgaacactacacactgtgaccctgaccacctccgaattaagtttgagttctctcttggatgcctatttgctctctgttaattggacactaaattcctcagcggcctccattcctagcttcacttataaggaaaaagaga

SEQ ID NO: 403247 - DNA, 466 bp, Oryza sativa nipponbare
ccacgcgtccggcaacacgtgcgcatcttgcatcagtaagggggtgatggttgctggctctcctacaactggcagagagtgcgtcttgctaacggctagttcgcagggagagagcgtgctgctgcgcgagtatctctccgagtatcaacgatcatgatgttctgtgagagactgaccagtcgtgactggcggctggctccttaccgtgaactcttacagaaagtacagacataatgatcgatacctacaatgaggacgacctaatgtaattaatcaagcaggctgcatatctataaatcgctggagccatctacatgcgttcttgagcttatcaattaagaatataatgtcggcgtccctatgctatgcacgcaaagtattacgtacgtatatgttgagcgagataacaaaacacaggcgtgcccgaaggttaattgttgatgtttaattaaagtacgttttgctg

SEQ ID NO: 403248 - DNA, 427 bp, Oryza sativa nipponbare
ccacgcgtccgggcaaactatagtgtgaacgggagcttttcaggtggccataatggaaacaatgggcaaagaggacctagtactgctcccaatgttgggaggccaaacatggagactgttaatggtatcgtggctccattccaagggctcaagtccaccgccgggctccccgtcagccgccgctccaccaactcgggcttcggcaacgtcagcaatggcggaaggatcaagtgcatgcaggtgtggccaattgagggcatcaagaagttcgagaccctatcgtacctgccaccactcaccgtggaggatcttttgaagcagatcgagtacctgcttcgatccaagtgggtgccttgcctcgagttcagcaaggttggattcgtctaccgtgagaaccacaggtctccccggtactacgatggcaggt

SEQ ID NO: 403249 - DNA, 414 bp, Oryza sativa nipponbare
  unsure (1)..(414): unsure at all n locations
ccacgcgtccgcccacgcgtccgcccacgcgtccgcgcaaacattcttatccacctctgccattgataccaccatcacagatcggatcttcatggacttcagtgtctgccctagctactttcgctctgaccgcactttaggagctgagcttgctacatgtcctgattctgaacctcttggtcgtgtaatttttggtttgtatggtcgactcctccccctcactactgccaacttcaaagctgcttgcacttctgctgcataccggggaacacttgtccacaagctccttcagggccagttcttcgttgctggccgccaaggtcctcggcgtgacaggggcgaggtccaacctcccaccggacttgtgaggaatgctgagactattgaccctaaagcatntgaactaaagcatgc

SEQ ID NO: 403250 - DNA, 442 bp, Oryza sativa nipponbare
  unsure (1)..(442): unsure at all n locations
ccacgcgtccgctcactcaagtctcaggatttaacagcactatttctggctgttaggctgtactgcagttttgttatggagtatgacatccataccatacttgatacagctacactagcagctactctctttgtcatctacatgattcggttcaaactgaggtcaacttatatgctggacaaggacaattttgcattgtactacgtggtgttaccttgtgctggcctagctctcctggttcatccttcaacatcgcataacatcatcaacaggatctcctgggctttctgtgtttatttggaagctgtttcagtgctgccacagttgcgtttgatgcaaaacacaaagattgtggaaccatttacagctcattatgtgtttgcattgggtgttgcaaggtttcttagctgcgcacactgngtcctttaggttttggataccc

SEQ ID NO: 403251 - DNA, 427 bp, Oryza sativa nipponbare
ccacgcgtccgaccacgcgtccgctggacaggaaagttgagtttggtctgccagacctggagggccggacccagatcttcaagatccacactcgcaccatgaactgcgagcgggacatccggcttgagctgctcgctcgcctctgccccaactccactggggccgacatacggagtgtgtgcacggaggctggcatgtacgccatccgcgctcgcaggaagacggtgacagagaaggatttcttggacgcggtgagaaaaggtgatcaagggttaccaaaagttcagcgcaacgcccaagtatatggtgtacaactagagggcactgaccttgatttcccgtttcttcctgtgcccctcctttggaccttcagaaagattgagcctgtttgtttccctttcttactcaaaagaaacctgggctgttt

SEQ ID NO: 403252 - DNA, 390 bp, Oryza sativa nipponbare
ccacgcgtccgggcagaagaggcttgttttccaagtctgtactgctaaaatgaacttgagtgatgaggttgatttggaagattatgtttccagaccagataaaattagtgctgctgatattgctgctatctgtcaagaagctggtatgcatgctgtgcgcaaaaatcggtatgttatcctccccaaggacttcgagaagggttaccgaaccaatgtcaagaagcctgagactgactttgacttctacaaatgaggcaacatattgttgaactgcatgcttgttcccctccggagctatcattaacattaaagatgatttcctggatagtcgcctcagcgatatttagtttatgtacctagaagctcgtcagtgccccaatctggtttatc

SEQ ID NO: 403253 - DNA, 442 bp, Oryza sativa nipponbare
ccacgcgtccgcccacgcgtccgcccacgcgtccggctaattaagcaaaagaagaagaagaagaaagaagaagaagaagatgcagaccgctgctagcagtgtcgttggattgtcggccgtgttgcccgctgctgtgaaggggcgcagcctgcagattcaggctcctcgccgtgttgcgttgcgcgttcgtgcggcggcggcggcggtggcagtggaggctgcggaggtggactacagctctaacatctcggtgtttccgatggaggcgtgcgacctcatcggcggcgaggcgtgcaacgtgcagatgtacccagaggccaagctctcatcatcggctgctgttgctgtttctcgtgcggcggcggaggaagtcgacagggactacctatcctacgacgagcccaccacggtgttccccgaggaggcgtgcgacgatcttggc

SEQ ID NO: 403254 - DNA, 404 bp, Oryza sativa nipponbare
ccacgcgtccgccgacaccttgccggacgcaatatcggtctcaatagttcaggtcccgtatactgacacctggcgcagggggtgcagctgccatactcaaacaggaaccgtctgatacaatatcatgggcccatactgctgttgcccattttccataatccctttactgaatctttgcctgccctcccatggccccatacatgtcattcgggacagcatcaacggacggattatcatgcgctatgttctttggtaccggcccgatagggtgaaataccttgggccattcttggcgcagacgccgtcgtacctgaggggcgagttcccgggcgactacgggtgggacacggcggggctctccgcggacccggaggcgttcgcgaggaacagggcgctggaggtga

SEQ ID NO: 403255 - DNA, 442 bp, Oryza sativa nipponbare
ccacgcgtccgcccacgcgtccgctgggcggtccaggtggtgctcatgggcgccgtcgaggggtaccgcatcgccggcgggccgctcggcgaggtcgtcgacccgctctaccccggcggcagcttcgacccgctcggcctcgccgacgacccggaggccttcgcggagctcaaggtgaaggagatcaagaacggccgcctcgccatgttctccatgttcggcttcttcgtccaggccatcgtcaccggcaagggccccctcgagaacctcgccgaccacctcgccgaccccgtcaacaacaacgcctgggcctacgccaccaacttcgtccccggcaagtgagcgccgccgccgccgtgctgccatggcgacgcatcgccttcagctaagctagctaggttgacgacgatgcgcgtctctgcaggagagtgtgcgtgtgtgt

SEQ ID NO: 403256 - DNA, 360 bp, Oryza sativa nipponbare
tcgtccacaaggaagctgaggagaagagagcaatggtcgaggcaaagcgcggcgaggaagtcctaaaggccgaggagatggcagccaagtaccgtgccaccggccatgctcccaagaaactcatcgggtgctttggggcctaaagaaattttcgattcacaacgagcaaacgtgaaagtgttcatcagtggttgctttgcttctttcaccctcccaagtgcgtagtgtgtttgttggtgcaagaaaggtcgtgcctggtgtgtaaagtctggtgttgctgtatataacatattactcccaagacagatatgtttggtgctgtacatgtttgatgcttgacaggcaacattcttatgtgta

SEQ ID NO: 403257 - DNA, 398 bp, Oryza sativa nipponbare
  unsure (1)..(398): unsure at all n locations
ccacgcgtccgggtgctcgttcacggtgtggccggcggcgacgccggtgggcggcggcgtgcagctgagcccggggcagacgtggaccatcaacgtgcccgccgggaccagctccggcagggtgtggggccgcacgggctgcagcttcgacggctccggccgcggcagctgcgccaccggcgactgcgccggcgccctgtcgtgcaccctctccggccagaagccgctgacgctggcggagttcaccatcggcggcagccaggacttctacgacctgtcggtgatcgacggctacaacgtcgccatgagcttctcctgcagctccggcgtgacggtcacctgcagggacagccgctgccccgacgcttacctngtccccgagacaacaccagacacac

SEQ ID NO: 403258 - DNA, 373 bp, Oryza sativa nipponbare
ccacgcgtccgcccacgcgtccgcccacgcgtccgatctgagtggattttctcagccaccctcttcacgttctcttatcagtcatgagcagggatgggtgactttgcaactaactagagatccaggatatggaagggggttcttttctcctagatctgttactggctttctgtctgatgtttcttcagctgctgctgatgaagttggcaaaattttccttacagcagatgagaaggttcaaggtgcagttttcgatttacctgaggagattgcgagggatttgcttagtatggaactgcccccaggaaacaccataaccaaagtgacaaagctacctgcattacaagatgatggtcctgctactgatagttat

SEQ ID NO: 403259 - DNA, 351 bp, Oryza sativa nipponbare
ccacgcgtccgcggacgcgtgcgccaaagcagagagatggtcactgattatgctcccatggcaagccaggtgatgaagagcatcttgctgtgcttcaagccgtgggggcctgttggtgcttacctgacatggcggcccacattcacaggcaacgtcatccagtatgagaagccaacgtaccaggtgatgcatcccatcaatggcgaccacttcatctgcaggctgcagacgccggtgacctacagcccgctggtcgactggaacctatacaacctcccgtcgtaccgcacacgcttcagccccctgatgcgtgctattgaagcctgactagcccactgctacctgcttgtt

SEQ ID NO: 403260 - DNA, 275 bp, Oryza sativa nipponbare
ggccgacccacgcgtacgcccacgcgttcgcaaacgcatacacaaatttatttcttaatcagccaacgctgacaagcggggggggagtaccatacccatattcccacccactcacacaacggcagatgcaaagagagggaaggcacattttccagaatacatgaacagaaagtaggtatgaagacacatggatacatacatctcgatcggaaaccaatcaatagaaggacagtagatccatatgtccttcgaaacactagtcaataactacatga

SEQ ID NO: 403261 - DNA, 395 bp, Oryza sativa nipponbare
ccacgcgtccgcggacgcgtgggtcattaggtgcctgtggagatctcaacagaaatgtacttgcacctgcagcaccttatgtcaggaaggatattctttttgctcaagaaacagcagagaatatcgcagctcttcttacaccacaatctggggcttattgtgacctgtgggtggatggagaaaagataatgtcagccgaagaacctcctgaggtcacgaaagctcgcaatgacaacacatatggaacaaatttccccgattcccctgaaccaatatatggcacacagtatctgccaagaaagttcaagattgctgtcactgtcgctggagataactctgttgatattctgaccaatgacatcggtgttgttgttgtttcagatagtgcaggagag

SEQ ID NO: 403262 - DNA, 414 bp, Oryza sativa nipponbare
ccacgcgtccgcaagaaagcataagcaacacaagggattaactcatcactcacttagctaattaaatcttcgaccatgtcggacaagtgcggcaactgcgactgtgctgacaagagccagtgcgtgaagaaaggtaccagctatggcgtcgtcatagttgaagccgagaagagccacttcgaggaggtcgccgccggcgaggagaacggcggctgcaagtgcggcaccagctgctcctgcaccgactgcaagtgcggcaagtgaagtcacgaagcaaccgaacactcgccgccggcgagtcacctaccttaattagtccacaataaaaaccacccatatgagtgtggtttgtgtgtgtgctgattattgctgaattaaacccgtgtgttatcgattaataaagcagctggtcgc

SEQ ID NO: 403263 - DNA, 441 bp, Oryza sativa nipponbare
ccacgcgtccgcccacgcgtccgagaagatctgctgggatgctctaggagtacctttttcccatcccatcttcctcattttttacgcgcacactttttaaactgctagtgctttgaaaaaaaattctatacaaaagttacttaaaaaaatcaaagtaatctatttttgaaaaaaattagctaatacttaattaatcatgtgctaatgaatcgttccgttttccgtgcttgccggttaagaacatggcatgtcaaacacaagagtatgccatatattattatttggtactacctcgtcccattagaaaaccaaaaaatgccatgggacgaccattgatccataaagcactcagaccgtaaaaccattgatactttttttccttagagcaagtttcaccgtatagtgaactactggttctaaattgtctatagtcaatctaat

SEQ ID NO: 403264 - DNA, 443 bp, Oryza sativa nipponbare
ccacgcgtccgcccacgcgtccgatgagagttccatatggagcagaaaaggagttcttcagatactcgctttttcttgttttctgtaaccgtatcaccacgtctacggtgtctgcgctggtgctaacggcaagtaagaaatccctggaccctgtggctccacttcagaagtactgtgtggtctctgtatcaaacatactgactacaacttgccaatatgaggcactcaagtatgtgagcttccctgtccaaacacttgccaaatgtgcaaagatgatacctgtgatgatttggggcacaattataatgaggaagaagtacggtggaaaagattacttctttgcagttgtcgtgactgttggttgctcgttgttcattctatacccagcatcaatggatgccagtccattcaacagaggcagagaaaacactatttggggcgtt

SEQ ID NO: 403265 - DNA, 331 bp, Oryza sativa nipponbare
ccacgcgtccgcccacgcgtccgcccacgcgtccgcccacgcgtccgagatcactcttatccatacggccgggaagacaatccagttcctctgctctcgaggtctcgcctgagtcctcatcctgccaagtgctagctatggttgaagtggacgatggatccaaacggcagatcggcgtggattagcagggcggggctgggcatcctcaccgtcaactccggcctcgccatctaccgctccaggggggacgcagccgcggtcgccttcgttcttgggctcgtacaccgccctgctcctcctcttctcctgcctctccgccttcgagcgcgcg

SEQ ID NO: 403266 - DNA, 320 bp, Oryza sativa nipponbare
cgggccgacccacgcgtccgcccacgcgtccgcccacgcgtccgcccactttttttatatcactctaatccatacgcgcggggggacaatccaggtcctttgttctccacctctaacctgagtcctcatactgacaagtgctagctatggttgaagtggacgatggatccaaacggcagatcggcgtggattagcagggcggagctgaacatcctcaccgagaactgcagcctctgcatctaccgctacaggggggacgcaggcgaagtcgccaagcaactcagcacgtacaccggcctagtcatcctcttttattggct

SEQ ID NO: 403267 - DNA, 333 bp, Oryza sativa nipponbare
ccacgcgtccgcggacgcgtgggcgagaagaaggagagcgtcatcttcgccgtccccaagaccaccctcgccagcatcatcgacaagtacgtcagcagctgattgcatcatcatcgtcgtcttcttcctcttcttcttcagctgcatcaatcaaatcagacttgatcgatcagagcttcgtttgtaagttgtaactaagctaccccctgctttgcctctctatgtgtatcgccagccacccctttctcttcatcgtccttaattgttgtaatcctactactccatggaatcaatactgtaactattattgattgatgataccatcttttgact

SEQ ID NO: 403268 - DNA, 395 bp, Oryza sativa nipponbare
ccacgcgtccgcactgatcttccgttggatgtgcatctgatgattgtggaacctgagcaacgagttccagattttatcaaggcaggtgctgatattgttagcgttcactgtgagcaatcgtcaaccatccatctacaccgaacagtcaatcagatcaaaagtcttggagcaaaggctggagttgttttgaatcctgcaacccctctcactgcgatagattatgtacttgatgttgttgatctagtattgattatgtcggtgaatcctgggtttggtgggcagagctttattgaaagccaagtgaagaagattgcagagttgagaagattatgtgcagagaagggagtaaacccttggattgaggttgatggtggagttggtcccaaaaacgccta

SEQ ID NO: 403269 - DNA, 408 bp, Oryza sativa nipponbare
  unsure (1)..(408): unsure at all n locations
ccacgcgtccggctcgctcatcgccatctctctcagctctcacagctcactgcatcaatggccgcggccaccatggcgctctcctccccggtgatggcccgcgcggcgccgtcgacctcctccgcgctcttcggcgaggcgcggatcaccatgcgcaagaccgccgcgaagcccaagccggcggcgtcgtcggggagcccgtggtacggcgccgaccgcgtcctctacctcggcccgctctccggcgagccgccgagctacctcaccggcgagttcccgggcgactacgggtgggacaccgcggggctctccgccgacccggagacgttcgccaagaaccgggaggctnaggtgatccactcccggtgggcgaatgctgggcgcgccttcggtgcgtcttcccggagc

SEQ ID NO: 403270 - DNA, 241 bp, Oryza sativa nipponbare
ccacgcgtccgcccacgcgtccggcggcttgaagagcttgctgagataaattatttggctgggaataagtgttttgtttttcctgaagtagtacaggcggattcggtcattgatctttacttgaaccatagcatgtcagccttagccagtgagcctgatattcttatcaaaggggcattcaatggttggagatggaaaaaatttacccaaaaaatgcataaaagtgagttaacaggggatt

SEQ ID NO: 403271 - DNA, 412 bp, Oryza sativa nipponbare
ccacgcgtccgcaatttttgatatcacgaagcagatatgtgacgctttccatgcaagggctgaaaaggacaaaaatcatggtgttgtacttattcctgagggacttgttgaaagtatccctgaattatatgctttgcttcaggaaattcatgggctacatgataaaggtgtttctgttgagaacatatcttctcatctttcgccttgggcttcagctctatttgaatttttgcctccatttattaggaaacagctacttcttcatcctgaatccgatgactccgctcaactttctcagattgagactgagaaacttctagcccaattagttgaagcagaaatgaacaaacgtctgaaggaaggcacttacaaaggaaagaagttcaatgcaatttgtcacttctttggctac

SEQ ID NO: 403272 - DNA, 250 bp, Oryza sativa nipponbare
ccacgcgtccgccaaaagcgtccgggtcgaaatatggctttcaaattaagttccgaattagtagatgctgccaaagggggtgggggtgccatacgcaaaaaggaagcgactcatagaatggcagaggcaaatagagctcttgcacattttcgttaatccatgaacagaatctaggtatgtagacacatggatccatacatctcgatcggaaaagaatcaatagaaggagaatcggacgatatctttctcg

SEQ ID NO: 403273 - DNA, 443 bp, Oryza sativa nipponbare
ccacgcgtccgcaactagcatataaactttctgatgagattgcttctgatttgttcagggagcatgcaaagaagttagttgaagaaaacatttcaacagccttgaacaacttgaataaccgaacacaggttgttgaagaagtgaaaagcatcctttcatttaatggtatgcttacagtactgagcaatttcccgggagaagaaagatttgtccgcgggcttgggcctattacattaggtggagacagtgatcatgaaaagagggtagaggatctaaagatgctctatagtgcctatgcaatggaggtactttcagatggacatcttaacgatgacaagcttgcggctttgaatcaactgaggaatatatttggactggcgaagtacgaagcagaagcaatcatatacagatgtcaaggctcgagtattcagacctactaaatt

SEQ ID NO: 403274 - DNA, 372 bp, Oryza sativa nipponbare
ccacgcgtccgcggacgcgtgggcggacgcgtgggcggactcgtgggctgacagacacattccacaagcctggtttcaagcttcatgttttggtgctgcagcacttattttgtgtgggtgatggtctgacggagcctctctgggatgcatcctcagtaccataccaatatactgacaacgctatgtttgtccgagattacacaataaaacttttaggttcatcatttcccaacatgacacctactgaggttacaaaatttgttgatgggcttcttagttcaaaacatgaccttccaagcttcaaaaaccatattagggatttcctggtgcaatcaaaggagttctcggctcaagataataaggatttgtatg

SEQ ID NO: 403275 - DNA, 423 bp, Oryza sativa nipponbare
ccacgcgtccgagcacaaaaaggtaactcaaggagtgcatacgtgtatatgtacttttaagagtaccactaccttcactaaccatttgccttttgggttcattacaaaccatgcatatcttcagaagaaaaattgtgaaaactttagaatgttttttatgcctgttttaattcccactatggttatctctatcattacaattgcattaacatatgatctgcataataagcataatgcttgcacgcattagcagctaaatcattcttccatatcatccacttatccacttaggctgtgttcggaatcggacgttcccagcgtgcacagtaagtacggaaaacgaagcggttcattagcgtgtgattaattaagtattggctatttttttttcaaaaatggatcaatatgatttttttaagcaac

SEQ ID NO: 403276 - DNA, 309 bp, Oryza sativa nipponbare
ccacgcgtccgcccacgcgtccgcccacgcgtccgatcaccgggaacacgaacacgctggcggggaacgtgccgccgaaggcgaacctgggggacctccgggggctcgcctcgggcctcgacggcgtgtcgagctccgccatgatcgacggcggcgagttcgacggcgccaaggcctacaaggacagcaaggtgtgcaacatgctgacgatgcaggagttccaccgccggtaccacggcgagaccggtgtgacgttcgcgtcgctctaccccgggtgcatcgccaccacgggcctcttccgggagcacg

SEQ ID NO: 403277 - DNA, 430 bp, Oryza sativa nipponbare
ccacgcgtacgccaacgccctcgctttcggttatagctcgaggaggacaagattgcggaccctgatgcctgcgagatggtgatctccttggacagcaagcgggagaagcagctgctcacgctgaggcggtagatcgcgcagcccttctacgacaagaaggaggcggacaaactcgccgcgcaggccgccgtgctcgaggcgcccgcgctgacggtccgcgcgcctccgccgtcgttcaaggattccggcggctgccgcgccgccttcagcttggcatcggccatggacgttgagatggcggatgaaggaaataacaagtccaagtccttcttgaagccaattggtagcaatagcatgaaggaggtacaactttacttggagatcaagaaaggtaaaagaaaagcttggaagaaggggagggttagttaaa

SEQ ID NO: 403278 - DNA, 380 bp, Oryza sativa nipponbare
ccacgcgtccgcccacgcgtccgggaggagaagctagcggcggcggtggcaatggcgacgagcgggctgaggagctgcagcgcggtgggcgtgccgagcctgctggcgccgtcgtcgaacaggagccgcctgccggtctgcgcctacgccaccacctccgggcgcgtcaccatgtccgccgagtggatgccgggccagccacgccccgcccacctcgacggctcctctcccggtgacttcgggttcgacccgctgggcctcgccaccgtgccggagaacttcgagcggttcaaggagtcggaggtgtaccactgccggtgggccatgctcgctgtgcctgggggtgtggtgccggaggcccctgggctggtcaactgggt

SEQ ID NO: 403279 - DNA, 439 bp, Oryza sativa nipponbare
ccacgcgtccgtttcattcctatggaacatggagagggactccaagttctgcactatgaagtcgggcagaagtacgagcctcactttgactattttcttgatgagtacaacaccaagaatggtggtcagagaatggctactcttctgatgtatctatctgatgttgaagaagggggtgagactattttccctgatgcaaatgtgaacagcagttcattaccatggtataatgaactttcagagtgtgccagaaagggccttgctgtcaaaccaaagatgggagatgcgcttcttttttggagcatgaaaccagatgccactctagaccctttaagtttgcatgggggttgtcctgtcatcaaaggaaacaaatggtcatcaaccaagtggatgcatgtccgtgagtacaaagcttgagctttctgaagtcgtgattacc

SEQ ID NO: 403280 - DNA, 366 bp, Oryza sativa nipponbare
cgacccacgcgtacgcggacgcgtgggcggacgcgtgggcggacgcgtgggtggtgtcacactgtctgaggagcagcttaaatattgccagagaaaagtgaaggaagctggtctagaggaccacatgactttcctgctgtgcgactaccgtcaaataccaacagttcgaaaatatgacaggatcatatcttgtgaaatgatcgaaggggtaggccatgaatacatggacgatttcttcggctgctgcgagtctctcctggcacaggatggcctgttcgtcctccagttcatctccatccctgaagaacggtacgaagaatacaggaggagttcagacttcatcaaggaatacatatttcctggggg

SEQ ID NO: 403281 - DNA, 246 bp, Oryza sativa nipponbare
ccacgcgtacgccaaaaccctagctcgagcgctcccttcttccccccacctctgcggcggcggcgggcggcgagatggcgaagtcgctgcggtcgaagcgggagaagcggctgcgcacgctgcggcgggagatcgcgcagcccttctacgacaagaaggaggcggccaaactcgccgcgcaggccgccgcgctcgaggcgcccgcgctgccggtccgcgcgccttcgacgccgtgcaaggattccg

SEQ ID NO: 403282 - DNA, 423 bp, Oryza sativa nipponbare
ccacgcgtccgcggacgcgtgggcggacgcgtgggcggacgcgtgggatgatgacaagtggttaaagaaatgtaaaaaacatatgcttgaagtttttcccagagaagacccgttcaccatggtctttcctgctggtttcaacatggaggaacatcaaggacagatcaagctgccacctcaggatgatgatgttcttctaagagttgatttcatcagggaagttgatgagctcttgaaggaagttcaagctgcacatgaaaacaataaggtcccaactggtaatgacccggaagctgttgcgaccaagttgaagtatcaagagaagctgcggaccatacgtcaagtggaatctctcctggaactggcatcctccctgaaatggtgaggatggagtttgcagaggaccatgaaattctgcgcaca

SEQ ID NO: 403283 - DNA, 425 bp, Oryza sativa nipponbare
ccacgcgtccgcctcgggaagccggcggagtacctgcagtttgagctggactcgctggaccagaacctggccaagaacaacgccggcgagatcatcggcacccggttcgagaccggcgaggtgaagtccaccccgttccagccctacaccgaggtgttcggcctccagcgcttccgcgagtgcgagctcatccacggccgctgggccatgctcgccaccctcggcgccctctccgtcgagtggctcaccggcgtcacctggcaagacgccggcaaggtggagctggtggatgggtcgtcgtacctggggcagccgctgccgttctcgatctcgacgctgatctggatcgaggtgctcgtcatcggctacatcgagttccagcgcaacgcggagctggaccccgagaagagcttgtccccgggggg

SEQ ID NO: 403284 - DNA, 471 bp, Oryza sativa nipponbare
  unsure (1)..(471): unsure at all n locations
ccacgcgtccgctcttcccccctctcacaagagagagagcgccagactctccccaggtgaggattcagccatgaagggggccaaatccaagggcgccgccaagcccgacgccaagttggctgtgaagagtaagggcgcggagaagcccgccgccaagggcaggaaggggaaggccggcaaggaccccaacaagcccaagagggctccctccgctttcttcgtttttatggaggagttccgtaaggagttcaaggagaagaaccccaagaataaatctgtcgctgctgtaggaaaagcagccggtgataggtggaaatccctgaccgaagcggacaaggctccctatgtagccaaggccaacaagctcaaggccgagtacaacaaggccattgctgcctacaacaagggcgagagcactgccaagaaggcacccgccaaggtaggaagaggaggacgacnaggaggaatctg

SEQ ID NO: 403285 - DNA, 489 bp, Oryza sativa nipponbare
ccacgcgtccgccacgcgtccgggatttcttgcaattccattttggcacttttcttctgacctatttctctggctgctgcttcctgataatcgaccagttctctagtcttgctccctgcactcctccctcctccatctccggcacagtgttctgaccaacctgctccaatgggtgtcttgtctgctgctgaccctcccccagtctcagcaattgggtttgagggctatgagaagcgccttgagatcactttctctgaggcacctgtctttgctgaccctgatggacggggtttgcgcgccctctccagggcccagattgactctgatctggatcttgcacggtgcaccattgggttcgagctgtccaacaaggtctttgactcctatgttctttctgattccagcctggttatctattctgataagattgtgattaagaacctgtggacaacatagctcctgctcactatttccaggattcttgagctt

SEQ ID NO: 403286 - DNA, 469 bp, Oryza sativa nipponbare
ccacgcgtccgccacgcgtccgcaactgtctgctttggactggcggcttccatgggtgcatttttgctagctgctgggacaaaggggaagagattttgcatgcctaatgcgagaattatgatccatcaaccatcagggggtgctggtgggaaggtcacagagatgggattacagatacgagagatgatgtatgagaagataaagatcaacaaaatactgtcaagaatcaccgggaagcctgaagagcagattgatgaggatacaaagtttgactatttcatgagtccttgggaagccaaggattatggcatagttgacagcgttatagatgaagggaagccggggttggttgctcctttggcaggagctgtgccacctccaaaatcgcgtgtgtggtacttatggaatgcttcaggaccaactagaaaaatcatgaaaaatctaccttcagaggagaagcttattcaaa

SEQ ID NO: 403287 - DNA, 407 bp, Oryza sativa nipponbare
ccacgcgtccgcccacgcgtccgctccgccatgatcgacggcggcgagttcgacggcgccaaggcctacaaggacagcaaggtgtgcaacatgctgacgatgcaggagttccaccgccggtaccacggcgagaccggggtgacgttcgcgtcgctctaccccgggtgcatcgccaccacgggcctcttccgggagcacgtcccgctgttccgcctcctcttcccgcccttccagaagtacatcaccaagggctacgtctccgaggaggaggccggcaaagccgctgggcaggtcgtcagtgaccccagcctcaccaagttcggggtgtactggagctggaacaacaactctgcctcgttcgagaaccagcttctcgaggaggcctccgatccggagaaggccaagaa

SEQ ID NO: 403288 - DNA, 432 bp, Oryza sativa nipponbare
gcgtccgcacggtaccctcctctctcctcctccgaccaccatggccatgggcacgcaagcctccgccgccaagtgccacctcctcgccgcctgggcaccggcgaagccgcgctcatccaccctctccatgcccacctcgagggcacccacctccctcagagcggcggcggaggatcagcccgccgcggcggcgacggaggagaagaagccagcccccgcggggttcgtgccgccgcagctggaccccaacacgccgtccccgatcttcggcgggagcacggggggactcctccggaaggcgcaagtggaggagttctacgtcatcacatggacgttgcccaaggagcaggtgttcgagatgcccacgggcggcgcctccatcatgcgcgagggccctaacctgctgaagctggccaggaaggagcagtgcct

SEQ ID NO: 403289 - DNA, 223 bp, Oryza sativa nipponbare
tgtgtaccaattcgttgacatgtacggctcaaacgtttactgctacatcccaatctactcgccggaggaatggtctcccatctgtgacacctacgttggtggaaccaccggtcttctgatctgtgtcgtgaccctctacgggctcctcggcggtggttcccttcttttctacaacaccttttcttttttcttttaaattttcctcaatttctgtttatttatt

SEQ ID NO: 403290 - DNA, 503 bp, Oryza sativa nipponbare
  unsure (1)..(503): unsure at all n locations
ccacgcgtccgaaaaaccaacccaaccgccgccgcatcgccctcgttagaacgatggccgcgtcggcgctgcaccagaccaccagcttcctcggcaccgcccctcgccgggatgagctcgtccgccgcgtcggcgactccggtggccgcatcaccatgcgccgcaccgtcaagagcgcgccccagagcatctggtatggacctgaccgtcccaagtacctgggcccgttctcggagcagacgccatcgtacctgaccggagagttcccgggagactacgggtgggacacggcggggctatcggccgacccggagacgttcgcgaggaacagggagnctgaggtgatccactcgcggtgggcgatgctgggggcgctgggctgcgtcttccccgagatcctgtccaagaacgggggtgaagtcggggaaggcgttgggtcaaggccggtgcgcatatcttcttcgagggggggttcgactacctggggaaccacaacctggtgc

SEQ ID NO: 403291 - DNA, 295 bp, Oryza sativa nipponbare
ccacgcgtccggtagcttagagtgagaaaataatggcgttggagacgtgcttcagagcctgggcgactctgcacgccccacagccaccgtcctccggcggcagtagggacagactcctcctctccggcgccggcagcagccagtccaagccaaggttgtccgtcgcctcgccgtcaccgctccgacctgcctaccgtttcgcctgccagtgcagcaacgtcgtcgacgaagtggtggtggctggacgagaagaactggtacagcttgttgctgtgtagctgaggtgccggtgctg

SEQ ID NO: 403292 - DNA, 388 bp, Oryza sativa nipponbare
ccacgcgtgcgcccacgcgtccgcccacgcgtccgcggacatcggccacaccacccaccaactgagagctgagcaggcgagcgagcggacatggcagcatcgctccaagccgcggccaccctgatgcagccggccaagctcggcggccgggcctcctccgccgcgctgccatcgcgcccgtcttcgcacgtcgccagggcgttcggcgtcgacaccggtgccgccggcaggatcacgtgctccctgcagtccgacatccgggaggtcgccaacaagtgcgccgatgccgacaagctcgccggcttcgccctcgacaccttagctctgttctgctcggtcgccagcacggagggcgtgccttgtaggcttacctttttcgtgattcata

SEQ ID NO: 403293 - DNA, 487 bp, Oryza sativa nipponbare
ccacgcgtccgctccggcctcgtctacgacgtcatcgtcgagccccccggcatcggcagcgtccaggaccccgccaccggcgccgtccgccccgtcgtcttcctccccggccgcgtcaacggccagtacatcatcgaggggctctcctccggcatcatgttcgtcatcggcggcatcgggatcatcctcctcgaccttgccgtcgaccgcaacaggccccggagccttcgcgtctccttcggtggctccggcggcgccgccatcgtcatctggtacgctatggccatgcttttcctccgtatcaagatccctggctacctatggtgaggaacaagcttctttactttgatcgatagatcagagttgtaacaagatactctacctctagatctggttgctgttgctgatgaactattgcacattcaaatgatgttattgaattatttcggatgattttgaggttaaatcatttgtctgaagattatct

SEQ ID NO: 403294 - DNA, 531 bp, Oryza sativa nipponbare
ccacgcgtccgcccacgcgtccggggatttctttatcaactatagaccacaaccgctccagagatcagaggaatggatgaggcagagagccaagaggctcaagatgaatgtccgcacactattctggacttccaatgatgtggttgtaaggatgaacttagtggatgcagtccaacgtctaggaattggtcacctcttcaaagatgagataaggcgcacactaaatgatatacaccaaagtgaatttactagctctagcctccatgaggttgctcttcggtttcgcttgcttagggagcacggcttatgggtatctccagttacattcaacaaattcaaaggtgacgatgggaggttcatgaatggaatagctgatgaaccaaggggtttattaagtttatacaatgcagcttacctccttgttcatgatgagccagaacttgaaggggcatctctttttttaggtcccatctaaaatcaatggtgcagggcaataaccttaacaacccttatttgaccaagtcaagcgtc

SEQ ID NO: 403295 - DNA, 516 bp, Oryza sativa nipponbare
ccacgcgtccgcccacgcgtccggcgtcggcggcgataacgtgcgggcaggtggggtcggcgatcgcgccgtgcatctcttacgtgacggggaggggtggcctcacccagggatgctgcaacggcgtcaaggggctgaacaacgccgcccgcaccaccgctgaccgccaggccgcctgccggtgcctcaagaccctcgccggcaccatcaagtctctcaacctcggcgccgccgccggcatccccggcaagtgcggcgtcaacgtcggcttccccatcagcctctccactgactgcagcaaggtcagctagatcgattaatcctgcgtagaccgaccgatcgatatatcgatcgatgctggcctgcagttgatcaactagccaaaataatagctacagtaaaaataacagctggggcatatcattcagcgctggtcatctctctctgtatctctgtatactttatgttgcacgctccgtgcgtgcatcagcatgctatcttaaattccttgagtct

SEQ ID NO: 403296 - DNA, 487 bp, Oryza sativa nipponbare
ccacgcgtccgcccacgcgtccggcaacagctacaaacgcccacatcacacgcagaaatccgcatcaacagccagccatggcgtccacgctgaccaacgtcggcctgtctaccccggcggcggcggcgtcgtccctcgttaggccggtcgccggagctggacgcgtggtgtttccccgtgttggccgcggcgggttcgcggcggtgagggcgagcgggccggcgacgccgccggacatctcggacaagatgtcggagagcatcgacaaggcgaaggaggcgtgcgcggaggacacggcgagcggcgagtgcgcggcggcgtgggacgaggtggaggagctgagcgcggcggcgagccacgcgcgcgacatgctcaaggagacctccgacccgctcgaggcctactgcaaggacaacccggagaccgacgagtgccgcacctacgacaactgattcttaccattatatgtttgctaatctctctgaaa

SEQ ID NO: 403297 - DNA, 493 bp, Oryza sativa nipponbare
ccacgcgtccggctagactctgacaacattttcctccagaacactgatgaattatttcagtgtggccagttctgtgctgtcttcattaacccttgtatcttccatacagggctctttgtgcttcagccctcaatggacgtttttaagaacatgctacatgagctagctgttgggcgtgataacccagatggtgcagatcagggcttccttgctagctatttcccagacttgcttgaccgaccaatgttccatccaccagttaatggtaccaaacttgaaggaacatatcgtcttccgttaggctatcaaatggacgcatcttactattatttgaaactccgctggagcattccatgtgggccgaacagcgtgattacatttcctagcgctccatggtttaagccatggtattggtggtcttggccagttttacctctgggactttcttggcatgaacaacgctcggagaacttgggtattcatcggagctacc

SEQ ID NO: 403298 - DNA, 470 bp, Oryza sativa nipponbare
ccacgcgtccgcaagggctggggttactccaactgcgacatcagagcttacatcgtggccatagagatcatgcagaattactacccggagaggctcgtcaaggccctgatgatccatgtaccctacatgttcatgaaggcctggaagatgatctaccctttcatcgacaatgtcaccagggacaagttcgtgttcgtggacgacaagagcttgcaagaggtgctgcaccaggagatcgacgatagccagatcccggatacgttgggcgggaagctggcaccggtttccctcaagatcaacgcgcgaattaaccttgattatgagctaggctcaattagcacgcagttataccgattatcatgctcaagattatactcacacgtattctatacatggatctgatgggatgaacaaaagatatgtgtattagtaatcatgcagctctcatattaaatcgtatatctttacta

SEQ ID NO: 403299 - DNA, 535 bp, Oryza sativa nipponbare
ccacgcgtccgcgtgtacatcctggaccaggcggaggaggaagggatcgacctgccttactcctgccgcgcgggctcctgctcctcctgcgccggcaaggtggtctccggcgagatcgaccagtccgaccagagcttcctcgacgacgaccaggttgccgccggctgggtcctcacctgccacgcctaccccaagtccgacgtcgtcatcgagacccacaaggaggacgacctcatctaatcaatcaagcaagctccatatttataaatctctcgatccatctccatgcgttcttgagtttatcaattaagaatataatgtcgtcgtccctatgctatgcaagcaaagtattacgtacgtatatgttgagcgagataacaaaacacaggcgtgcccgagggttaattgttgttgtttaattaatgtacgttttgctgcacctgcttaatcatatccatatcacattttggtgtcataatatgcatgcattactgtgtcatatatactactgttaaattcgtactccatgtatttg

SEQ ID NO: 403300 - DNA, 210 bp, Oryza sativa nipponbare
ccacgcgtccgcccacgcgtccgcccacgcgtccgcgctcgctcatcgccatctctctcagctctcacagctcactgcatcaatggccgcggccaccatggcgctctcctccccggtgatggcccgcgcggcgccgtcgacctcctccgcgctcttcggcgaggcgcggatcaccatgcgcaagaccgccgcgaagcccaagccggctgc

SEQ ID NO: 403301 - DNA, 424 bp, Oryza sativa nipponbare
ccacgcgtccgaccgagcatgacgacgagcgaagaggcaacatgatgcatcaccgctgctcgcagtgacgccggattgtacgccgtgtcgtacgatgatgcgatggggcgcaagctgctcattcaagctctttgccacaccgagcagggctgcacccaggtcggcggcctccggccattcggggctgcttactctgactacagtggtacaagcaccatggcttccagctatacatgagcgatccttgcggcaactacaggggatggaaggacgtggccagaggggccaacagccaggtcgggcagtgcatgctcaagcaggactaccgcgacggactgaccccgggaggaggccgtactactacgagtcaaggtcctgagcaagaccatggattcgaccagatcgaccgccgagaagctggaac

SEQ ID NO: 403302 - DNA, 428 bp, Oryza sativa nipponbare
ccacgcgtccggaagtactcgagcaaagaaggagagagcttggtgagctgcagagatggccccctccgtgatggcgtcgtcggccaccaccgtcgctcccttccaggggctcaagtccaccgccggcatgcccgtcgcccgccgctccggcaactccagcttcggcaacgtcagcaatggcggcaggatcaggtgcatgcaggtgtggccgattgagggcatcaagaagttcgagaccctctcctacctgccaccgctcaccgtggaggacctcctgaagcagatcgagtacctgctccgttccaagtgggtgccctgcctcgagttcagcaaggtcggattcgtctaccgtgagaaccacagatcccccggatactacgatggcaggtactggaccatgtggaagctgcccatgttcggtgcactga

SEQ ID NO: 403303 - DNA, 409 bp, Oryza sativa nipponbare
ccacgcgtccgcccacgcgttcgcggacacgtgggatcataaacactattgaagtcacacgcacagaaaaaatgtctggttcaactggttttgtgctggcaacttcacttacaatatgagagatacgcttgctgctagtgtcagcaggcatgtagcctactgtttttgatgctattatctgcaatagtggaagttatatctattattctttgtattcgggagatactctaagtagttctcaggtaactcctgcagttgatcaaaatcaccaagctcatattgtgtttttatggggaggagaaggcctaagaaatgtttctagagaattgggctttttcattggttgtaagaatgggtagaatcttttgacaatttatttttgaagaccttgaacactctttaacctatt

SEQ ID NO: 403304 - DNA, 486 bp, Oryza sativa nipponbare
  unsure (1)..(486): unsure at all n locations
ccacgcgtccggatggacaaggaagatgagtccggcgccacggccacggccatgttcctcaggaacgatgtccttgttgtctcgcacattggcgactcctgcttggtcgtatcacgcggtgggaggcctcaagctgtgaccaacttccaccgaccgtacgggaacaagaaagcgtctcttgaagaggtgaagcggatcagagcagcaggtggatggattgttgatggacgcatatgtggagaaatttctgtgtctcgtgcttttggagacattagatttaagacacggaagaatgagatgttggtaaaaggagttaaagaagggagatggactgaaaagtttatctcacgaataaattttaaaggagaattaatagtctcttcacctgacgtatccctggtcgaacttggaccagatgtgngatattgtttgctagcaacagatggtctttgggatacattaaaagctctgaagcagttgcattag

SEQ ID NO: 403305 - DNA, 347 bp, Oryza sativa nipponbare
ccacgcgtccgcaaaaatattttaaaattaacagaaaaatagtaagaactttacatacgagattagatagttctcaacaatttttacctgacgccttaattatttgcttgctttgtgcgtgcgtgcagccacttcgaggaggtcgccgccggcgaggagaacggcggctgcaagtgcggcaccagctgctcctgcaccgactgcaagtgcggctagtgaagtcacgaagcaaccgaacactcgccgtcggcgagtcacctaccttaattagtccacaataaaaaccacccatatgagtgtggtttgtgtgtgtgctgattatggttggatttaacttctgtggtatt

SEQ ID NO: 403306 - DNA, 83 bp, Oryza sativa nipponbare
ccacgcgtccgcggacgcgtgggcggacgcgtgggcaagtgtgtatcaattatcaatagcaatgagacgaacaattcaacgat

SEQ ID NO: 403307 - DNA, 448 bp, Oryza sativa nipponbare
ccacgcgtccgcccacgcgtccgcccacgcgtccgcacaattatattgagctgccattgcttctcacctctgctttgcatccatccatccatcagagatcaggtagaacagtgagagtgaggtgcagaaaaatttgagctgaagctgaggatggcaacatccatgatcacctcgccgctggtggcgccggcccgggccaagggccttccgtccatctcccgccggggatcctccttcgccatcgtctgcagcggtgggaagaagatcaagaccgacaagccctacgggattggaggtggcatgtcagtcgatattgatgcatctggcaggaagagcacggggaagggtgtgtaccaattcgttgacaagtacggcgcatacgtctacggcttcagtccaatctactcgtcggaggaatggtctttcaccggagacacctacgttggtg

SEQ ID NO: 403308 - DNA, 325 bp, Oryza sativa nipponbare
ccacgcgtccgcccacgcgtccgcggagggtgcgcgcggcgaggcggcccgcgcagccgccggcgacgtggatcgaggcggtgggcacgctggcggagacgctgcggttcacctactcggagacgctcgggaaatggcccatcggggacctcgcgttcgggatcaagtaccttatgcgccgtcagggaaatttacatgtcgctagtgtatatgctggtaacaattgcattgaactgaaagggcctgtaatattgtaagagcatattgttctgagacgattaatctatctttgctatttgttttttaatagaccatttccggtctt

SEQ ID NO: 403309 - DNA, 269 bp, Oryza sativa nipponbare
ccacgcgtccgcccacgcgtccgcccacgcgtccggaactcccctccctcggcccctcttccccctcgttcccagcggctcgccaccggcgacggccggaagaggggtctagcctcctcctagcctagtgtgagtcgggtcccttccgttttctggtctttcccgtagttcgggctctgtcccgtttagcacaaggtcgccggtgtcgtccccatgcatggtagcccgaggtggtggtgggttctggtggcgtggtatcttgctgcttt

SEQ ID NO: 403310 - DNA, 507 bp, Oryza sativa nipponbare
  unsure (1)..(507): unsure at all n locations
ccacgcgtccggcaagctgtaggtctggagagtggagaggaagaggaatcctcctcagtcctcaccttcagatttcagaacacaggcaatcggccctagctgcaatccaacaagatgggcatgcctctgctgctgctgctgctgatcctcgtcgctgctggcccccaggcaggcagagctgcaaagccaatcccaaatctccagctcatgaccaaggagggcggcagttcaagaatcatccaggacgacatcataaaggcaatcaacaagcatcccaatgctggctggacggctgcacggaatccatactttgcaaactatactactgcgcaattcaaacatatccttggagtgaagccaacaccgcatagtgtgctaaatgatgtccctgtcaaaacttatccaagatcgctgatgcttccaaaggagtttgatgccaggtctgcatggtcacagtgtaacacatatgggaccatactngatcaagggcactgttgctcgtgttgg

SEQ ID NO: 403311 - DNA, 488 bp, Oryza sativa nipponbare
ccacgcgtccgcccacgcgtccggaagaggaggaggagcttgagcttggagagagacaacaatggcggctcaggctcttctctctgggaggcagctgctggggaggccattgcaatcttcagtctccaggtcttcttcctccaggaaggcacccttcatggtcagggcagaggccactccccctgccaagcaaggtgctgacaggcagctgtggttcgcatccaagcagtccctgagctacctggatggcacgcttccgggagacttcgggttcgacccgctggggctatcggacccggaggggaccggtgggttcatcgagccacggtggctggcctacggcgaggtgttcaacggccggacggcgatgatgggcgtcgtcggcatggtcgccccggagctcctcggcaagctgggcctcgtccccgccgagaccgcgatcccgggtccagacccggcggatcccccccgcgggcacctacacctac

SEQ ID NO: 403312 - DNA, 544 bp, Oryza sativa nipponbare
ccacgcgtccgcggacgcgtgggtgggccagaaatctgggaggattctaaagggaaggtggatgtattcattggtggaattggaacaggtggaacaatatctggtgctggccgtttcctgaaagagaaaaatcctggaattaaggttattggtattgagccttctgagagtaacatactctctggtggaaaacctggcccacataagattcaaggcattggggcaggatttgttccaaggaacttggatagtgaagttctcgatgaagtgattgagatatctagtgatgaggctgttgagacagcaaagcaattggctcttcaggaaggattactggttggaatttcatctggggcagcagcagcagctgccattaaagttgcaaaaagaccagaaaatgctggaaagttggtagtggtttgtttccaagctttggtgagaggtacctttcatctattccttttcagtcgataagagaagaatgtgagaagttgcaacctgaaccttgagcctaacttcagtgttcacaacattattattgttt

SEQ ID NO: 403313 - DNA, 363 bp, Oryza sativa nipponbare
ccacgcgtccgcggacgcgtgggcggacgcgtgggcggacgcgtgggcggacgcgtgggcaaggcaatgcggctctttgtgggagagcctgtctggacgccgtacaaccgtccccatgaccatctgccagctagaaaggagtatgtctaaaaaattatcaacaggggtggaactcaagctgtcgaagcttgttaaaggcatatcaagatgtgcttcctagttcggtgttctgttacactctacatatactgaataaactgagctatcagctgttgcaatgggctcctaccgacatcttacattatttggcagtttcttgctcagaccctcttaaaatctttctagaaatacgcacgttactat

SEQ ID NO: 403314 - DNA, 224 bp, Oryza sativa nipponbare
ccacgcgtccgacacgcgtccgccacgcgtccgcccacgcgtccgcccacgcgtccgatcagaggtgggttggcttctcctccccctcccggtatcggttcggttcgggtccggttcgatttcgttattttttattcttcgtggggttggtgggaaagcatggcggccccgtatgttgagtaccattgcttctttagcggtctcctatgtgcaaacgactaccg

SEQ ID NO: 403315 - DNA, 372 bp, Oryza sativa nipponbare
ccacgcgtccgcccacgcgtccgaactaagctaagatcaagcatcgcgctggtggattgctgcctataataatagtatgcagctttgttttgggctatgttgatgatatatcaatatataatatgctatatatttttattttacagtttggttatgtaccatctcaatggcctctgctcttaacacatatgtaataatctcttccctccctctccggccggttttattgtaagagtactacaattatcgttgggtgaggatatgtgaaaacaaagctccggctatatacacacaagatatgtatctagagcatatctgataaattcttcgacaataaaaaaaatggatggtatcacgttaataaatataatt

SEQ ID NO: 403316 - DNA, 352 bp, Oryza sativa nipponbare
ccacgcgtccggctttgtgtgcggttttgaggggagtacatcggcatgaggatccagtgcgacgcgtgcgaggccgcggcggccacggtggtgtgctgcgcggacgaggcggcgctgtgcgcgcgctgcgacgtcgagatccacgccgccaacaagctcgccagcaagcaccagcgcctcccgctcgacgccgcgctccccgccgccctcccgcgctgcgacgtctgccaggagaaggcggcgttcatcttctgcgtggaggacagggcgctcttctgccgggactgcgacgagcccatctacgtcctggggacgctctgcgttaaccaccagcgctacctcaccaccgtca

SEQ ID NO: 403317 - DNA, 422 bp, Oryza sativa nipponbare
ccacgcgtccgcccacgcgtccgagctctcacagctcactgcatcaatggccgcggccaccatggcgctctcctccccggtgatggcccgcgcggcgccgtcgacctcctccgcgctcttcggcgaggcgcggatcaccatgcgcaagaccgccgcgaagcccaagccggcggcgtcgtcggggagcccgtggtacggcgccgaccgcgtcctctacctcggcccgctctccggcgagccgtcgagctacctcaccggcgagttcccgggcgactacgggtgggacaccgcggtgctctccgccgacccggagacgttcgccaagaaccgggagctggtggtgatccactcccagtgggcgatgttgggcgcgctcggctgcgtttttccggagctattcgcctggaacggctttaagttcg

SEQ ID NO: 403318 - DNA, 516 bp, Oryza sativa nipponbare
  unsure (1)..(516): unsure at all n locations
ccacgcgtccgccacgcgtccgctagtttttaactatgcctctgtggctacaaatgtcaagtatgggccatatattgctggttcaatggctggaacggtacatgaaaccttccttgcaatatacagtgggaaacttctccaaagcctagccgtagctactacccaaggttcattcttgtcggtagatcagataatttacaacggccttggcttctcagttgctgcagtttctaccgctgcaataactatttatgcgaagaaagcacttcaaaaactccaagcagatgatgagctgtgttgactcttgatgagcacaggagatcctactccggatcagaccttggtgctagtttttccttaaaatgtactatatatatacagaggtgctactaatctggtttctagtgtctgctacctgactacatttgatctgagagaggtacntgcaacacttgtaagagaaaatagagaaccagaaaaacactcccccttttttttctctttntggtttgtttt

SEQ ID NO: 403319 - DNA, 499 bp, Oryza sativa nipponbare
ccacgcgtccgcgcgcacacgacacgacgcaccaatggcgctcgtctccgcctcctcctccaccaccgccgtcgcggcgctccccggcgccgccagggcctcctccttcctcggcggcgccggcaggagcggcaggctgctgctgaggcaggccgagtcgtcgtccgcgcgggcgtcgttcgccgtgcgcgccgcggcgcccgacaggccaatctggttccccggcagcaccccgccgccgtggctcgacggcagcctccccggcgacttcggcttcgaccccctgggtctcggatcggacccggagagcttgcggaggaacgtgcaggcggagctggtgcactgtcggtgggcgatgctggacgtcgcgggcttcttcatcccggagttccagaccaagatcggcattctcaacacgccgtcgtggtacacctgacggtaagcagcaatacttcaccgacaccaccaccctcttcatcaacgagctcatccttatcgg

SEQ ID NO: 403320 - DNA, 436 bp, Oryza sativa nipponbare
ccacgcgtccggaattattggcgagggtggttttggacgtgtttatgaaggtattcttgaggatggagaacgggttgctgtcaaaattcttaagagggacgaccagcatgttacacgggaatttatagctgagcttgagatgcttagccgattgcatcacagaaacctggttaagttgataggtatatgcacagaagaacatatccggtgtcttgtgtatgagcttgttccaaatggtagtgtggaatctcacttgcacggatcatataagggaactgctccacttgattgggatgctaggcttaaaattgcacttggtgctgcacgggctcttgcttatatgcatgaagattctagttctcgtgtcatactccttgacttcatgttaagtaacatcttatttggacatgtcttctcctccaaggtgtcatacttt

SEQ ID NO: 403321 - DNA, 368 bp, Oryza sativa nipponbare
ccacgcgtccgcccacgcgttcgcgccaagaaccaccacgagcaatggcgtcgctgtccatggccacaacgctgccgtcgctggccggcgccgcaccggcggcgaggaagaggagcggcgtgacgtacgtggaggggatgaacgcgtacagcgggctcaaggcgctcaacaaggtgaccctgctcggcgtgcgcaagaccgccgactactcgttcgccaaggtggtggccaagctgagccccgccggcgggaagagccgcggcggcgcgttcggggcgcagtgcaacgccgccggtgagatattcaggatcgccgtcatcatgaacgggctcgtgctcgtcggcgtcgccgacggcttcgtgctgctc

SEQ ID NO: 403322 - DNA, 379 bp, Oryza sativa nipponbare
ccacgcgtccgccacgcgtccgaacacgacaacagcagcagcgttccaggcgcttgattaacacctcatcagaaaacgaggatggagacggtgctggtgctgaggatatgaacatcaactgacctgctcagggagtgttctgttgggaacctcatgattcaaagcagctcattgttcgtggatcgcagggaaggatatgatgtctctgatgtttccatagatatgaaaagaaatgttgtatttttcaaagaccgatgttaattcatcgcacagcttacctatatctgtgccaaatttcagcatagactaaaccattgtttgcatacggcgttgcactccagtcgggctacggtctatttgtcaatggatatttttaaac

SEQ ID NO: 403323 - DNA, 347 bp, Oryza sativa nipponbare
ccacgcgtccgcccacgcgtccgctcaggcaggcaatcagcggcgaggcaccagcccaccggccggcaatggcgtccacctcctgcttcctccaccagtccacggcccgcgtcgccgcgcgcgtcgcctccccgtccccggcgacacggacccacctcctcgtctgccgcgcccagaagcaggacgacgccgacgtctcccgccgcgcggcgctcgcgctgctggccggagcgacggcggcggtgggggtgaaggtggcgcccgccgctcgttcctacggcgaggcggcgaacgtgttcggaaatgccaaagacgaacacggtgttcatcgccttctgcggcgaggg

SEQ ID NO: 403324 - DNA, 262 bp, Oryza sativa nipponbare
ccacgcgtccgggccccctccgtgatggcgtacgcggacaccaccgccgctcccttgcaggggctcaagtccaccgccagcatgcgcgttggccgtcgcttcggcaactccagcttttgcaacgtctgcaatggcggctggatcaggtgcatgcaggagtggccgactgaaggcatcaagaagtccgatatcctttcgtacctgtcaccattcaccacgttggaccttctgaagcatattgagttcctcggtcccagtcaag

SEQ ID NO: 403325 - DNA, 547 bp, Oryza sativa nipponbare
ccacgcgtccgcctccacgcgctcctccccacctcgtctcgaacccagcttgttgaaacatatacagtatgtcggggaagccatctgatgatacaacaggtcaagtgaggcccgaagtagatggttccgatgagaaagtagaaattgccaaccagaatgaaaaagaggtgatgccttcacctcaggaagaggaagcagcaataaagaaaaagtatggtggaatagttcccagaaagccagcgcttatagccaaggatcatgagcgagcttactttgattctgctgattgggctttggggaagcaaggaggacaccctcaaaaacctaaagggccgcttgaagcactccgaccaaaattgcagcctactcaacagcaagcacgttcgcgtcgatttcttcatgcttctgttgacaacgaaaagggtcttaattcaccgactgatgatgcttgccagaaccaggtattcatgaggtcaggacgataatgattgttttaccgatatcatgttactacaaactctgtccggttaatacagaagctttacag

SEQ ID NO: 403326 - DNA, 459 bp, Oryza sativa nipponbare
ccacgcgtccgcggacgcgtgggtcggccacctccgtggctccattccaagggctcaagtccaccgccgggctccccgtcagccgccgctccaccaactcgggcttcggcaacgtcagcaatggcggaaggatcaagtgcatgcaggtgtggccaattgagggcatcaagaagttcgagaccctatcgtacctgccaccactcaccgtggaggatcttttgaagcagatcgagtacctgcttcgatccaagtgggtgccttgcctcgagttcagcaaggttggattcgtctaccgtgagaaccacaggtctcccgggtactacgatggcaggtattggaccatgtggaagctgcccatgttcggctgcaccgatgccacccaggtgctcaaggagctcgaggaggccaaaaaggcctaccccgatgcctttgtccgtatcatcggcttcgacaacgtca

SEQ ID NO: 403327 - DNA, 346 bp, Oryza sativa nipponbare
ccacgcgtccggtacaccggctatctatccatctatctactcagctttgcgtcctcccgcgaattcaccgcagcaatggcgtccctcgtcgccgtccagcctgtcgccgtgaagggcctcgccggcagctccatctccggcaggaagctcgccgtcaggccgtcgccccgggcgctctgccgcaccacccgcaggccgcgcgccgccgtggtggccaagtacggcgagaagagcgtctacttcgacctcgaggacatcgtcaacaccaccgggcagagggacctgtacggcttcgacgcgccgtttccttcaatccttttcagagcaagttctttctagacgttcg

SEQ ID NO: 403328 - DNA, 281 bp, Oryza sativa nipponbare
ccacgcgtccgcttgtgactacacccgcttcgcttcctcccctctctaagccggggaagctaagccatggcgtccgtcaccgcccgcaccccggtcgcagccctccgctcgtcggcgtcgctcaagtctaccttcctagggcaatcctccacccgcctcgcccgtgcaccgactacgaggcgtaatgttcgggcggaggccaagggagagtggttccccgttctttcttgtcccacctacctcaacggctgtttgtcatgctataacgggttcgacccgtt

SEQ ID NO: 403329 - DNA, 441 bp, Oryza sativa nipponbare
ccacgcgtccggcgtgactctgctctagcacctcaccaagcagaaagctagagagctagcaatggcgcccaccgtgatggcctcgtcggccacctccgttgctcccttccaggggctcaaatccaccgccgggctccccgtcagccgccgctccaacagcgccggcctcggcagcgtcagcaacggtggaaggatcagctgtatgcaggtgtggccgattgaaggcatcaagaagtttgagaccctgtcgtacctgccaccgtttacggtcgaggaccttttgaagcagatcgagtacctgctccggtccaaatgggtgccttgcctctagtttagtaaggtcgggttcgtctaccgtgagaaccacaggtcttctgggtactatgatggcaggttctggaccatgtggtagctgcctatgttcggatgcactgatgccac

SEQ ID NO: 403330 - DNA, 406 bp, Oryza sativa nipponbare
ccacgcgtccgcggacgcgtgggcaagaagtactcgagcaaagaaggagagagcttggtgagctgcagagatggccccctccgtgatggcgtcgtcggccaccaccgtcgctcccttccaggggctcaagtccaccgccggcatgcccgtcgcccgccgctccggcaactccagcttcggcaacgtcagcaatggcggcaggatcaggtgcatgcaggtgtggccgattgagggcatcaagaagttcgagaccctttcctacctgccaccgttcaccgtggaggaccttctgaagcagatcgagtacctgctctgttccaagtgggtgccctgcctctagtacagcaatgtcggattcatctactgttagaaccacagattcccctggatactacgatggcatgtt

SEQ ID NO: 403331 - DNA, 484 bp, Oryza sativa nipponbare
ccacgcgtccgctctcactagctctagctacctcctccctcctcctcatcttgctcagctccggccatggcggcgtcaccggctttcctcgttcttgccgtgcttctgtgcgcggcggcggcggtggcgcgggcggcggacgacggcgcggcggggatgaccaagttcaaggtgtacttccacgacgtggtgggcgggacgaagccgacggcgatcagggtggcgcaggcggcgtcgacgaacggctcctccaccttcttcggcgccgtggtggccatcgacgacccgctgacgaccgacgcggcgtcgtcgtcgtcggaggtggggcgcgcccaggggagctacacgttcgccgaccagaagacgttcggcctcctcatgaacatgaacttcgtgttcaccgccggcgaccacaaggggagcaccctcgccatcgtcggccggaacgaggtgcttctcggcggtgagggagatgatcatcgtc

SEQ ID NO: 403332 - DNA, 197 bp, Oryza sativa nipponbare
ccacgcgtccggaacagtgagagtgaggtgcagaaaaatttgagctgaagctgaggatggcaacatccatgatcacctcgccgctggtggcgccggcccgggccaagggccttccgtccatctcccgccggggatcctccttcgccatcgtctgcagcggtgggaagaagatcaagaccgactagccctacgggatt

SEQ ID NO: 403333 - DNA, 224 bp, Oryza sativa nipponbare
ccacgcgtccgaaaaaccaacccaaccgccgccgcatcgccctcgttagaacgatggccgcgtcggcgctgcaccagaccaccagcttcctcggcaccgcccctcgccgggatgagctcgtccgccgcgtcggcgactccggtggccgcatcaccatgcgccgcaccgtcaagagcgcgccccagagcatctggtatggacctgaccgttccaagtacctgggc

SEQ ID NO: 403334 - DNA, 439 bp, Oryza sativa nipponbare
ccacgcgtccgcccacgcgtccggtccatcaagaagctccagtcgtcgctcaagaagtacgcgccggactccgcgccggcgctcgccatcaacgccaccatcgagaagacgaagcgccgcttcgagaactacggcaagttcggcctgctctgcggcgccgacggcctcccgcaccttatcgtcagcggcgaccagcggcactggggcgagttcatcaccccgggcttgctcttcctctacatcgccggctggatcggctgggtcggcaggagctacctcatcgccatcagcggcgagaagaagccggccatgagggagatcatcatcgacgtcgagctcgccgtcaagctcctcccggaggggttcatctggcccggcgccgtctaccgggaggctattaccggcaaccttgtctgcgacggacctgactcggcttctg

SEQ ID NO: 403335 - DNA, 525 bp, Oryza sativa nipponbare
ccacgcgtccgagcccaccgaattccattcctcgcgattcctctcccctcgcctcctcgtcctccccctcctaggggatcgccggagaggaatcgcgcggaggaaaaaaaaagaaaagggcttcctcgtcgtctaagttaaaaggaagccatggagcacaaggagactggatgccagcagccagaaggcccgatcctttgcatcaataactgcggcttctttggcagtgcggctaccatgaacatgtgctcaaagtgccacaaggagatgataatgaagcaggagcaggccaagctggcagcctcctctatcgacagcattgtcaatggtggtgattccgggaaggaaccaattattgctggtcacgctgaagtagctgttgctcaagtcgaggtgaagacgcttgttgcgcagcctgctgagattgctggtcctagtgagggggtcacggtgaaccctcaggggagggaaggaccaaatcggtgctccacttgtcggaagagggtggtcttaccggattcactg

SEQ ID NO: 403336 - DNA, 461 bp, Oryza sativa nipponbare
ccacgcgtccgagagcacaagatagcataagcaacacatgggattaactcatcactcacttagctaattaaatcttcgaccatgtcggacaagtgcggcaactgcgactgtgctgacaagagccagtgcgtgaagaaaggtaccagctatggcgtcgtcatagttgaagccgagaagagccacttcgaggaggtcgccgccggcgaggagaacggcggctgcaagtgctgcaccagctgctcctgcaccgactgcaagtgcggcaagtgaagtcacgaagcatccgaacactcgccgccggcgagtcacctaccttatatagtccacaataaaaaccactcatatgagtgtgtgttgtgtgtgtgctgatattgctgaattaaacccgtgtgttatcgatttattaagcagctggatgcttcagtgattatgcttgtttcaacttatgaatttgtatgatg

SEQ ID NO: 403337 - DNA, 541 bp, Oryza sativa nipponbare
ccacgcgtccggacgacctgctgcgcccgtgcatcacctccctcggctgcctgtcgcgcacgttcacggcgagcgagacccgcgtggtccgcccgctggtggagctgctcgacgagcgcgagctgccggtcaccaaggaggccgtggtcgcgctcaccaagttcgcgtgcaccgagaaccacctgcacgtgagccactgcaaggccatcgtcgacggcggcggcgcgcggcacctcgtccagctcgtctacctgggtgaccaggtgcagatcgaggcgctcatactgctctgctacattgcgctgcacgtcccggagaacgaggagctcgcgcaggccggagttctcgccgtgctcctctgggcgtccaagcagccacacatggtgcaggacctgcgcgtcgacgcgctgctcccggatgccaagggtcggctcgagctcttccagtccagagcatcttggtgatcaactggtgacggcattggcggcgaacaccggagttcaagaagatgagttagccctcgatttactgcaaaaacgaa

SEQ ID NO: 403338 - DNA, 551 bp, Oryza sativa nipponbare
ccacgcgtccgtcaagacgtactcgagcacagaaggagagagcttggtgagctgcagagatggccccctccgtgatggcgtcgtcggccaccaccgtcgctcccttccaggggctcaagtccaccgccggcatgcccgtcgcccgccgctccggcaactccagcttcggcaacgtcagcaatggcggcaggatcaggtgcatgcaggtgtggccgattgagggcatcaagaagttcgagaccctctcctacctgccaccgctcaccgtggaggacctcctgaagcagatcgagtacctgctccgttccaagtgggtgccctgcctcgagttcagcaaggtcggattcgtctaccgtgagaaccacagatcccccggatactacgatggcaggtactggaccatgtggaagctgcccatgttcgggtgcactgacgccacccaggtgctcaaggagctcgaggaggccaagaaggcgtaccctgatgcattcgtccgtatcatcggcttttacaacgtcaggcaggggcagctcatcagcttaatcgcctac

SEQ ID NO: 403339 - DNA, 439 bp, Oryza sativa nipponbare
ccacgcgtccgcgagaacaagcagcccatcatcatcgactggatggctagttggtgtcggaaatgcatatatctgaagcccagactggagaagatagcaggagaatttccaggagtcaggttctactttgtcgatgtcaacaaagttccacagactgtggtgaaaagagggaatataactaaaatgcccactatccagttatggaaggatggagaatgggcagcggaagtgataggaggccataaagcatggcttgtgatggatgaggttagggaaatgatccagaagcacaagtgactaactacctaaatcaagcaattgatatatactgtaaatagagatttgagatgatctcttcagatattaagttgtaacgagatcaatatttaatgcaatattctctaatatattgacgggcaattctattgtgcgttcgctg

SEQ ID NO: 403340 - DNA, 386 bp, Oryza sativa nipponbare
ccacgcgtccggtacatctcctgtgctatcctcttcgaggaggctctgtaccagtcaactgtagatggcaagaagattgtcgacatcctcactgagcagaaaatcgttccaggtatcaaggtcgacaagggtcttgtgccccttgctggctccaacaacgagtcatggtgccaaggtcttgacggtcttgcctcgcgcgaggcggcatactaccagcagggcgctcgcttcaccaagtggcgcactgtagtcagcatcccctacggcccatctgaacttaccgagaaggatgctgtctggggccttgtccgttacgccttcatttctcatgacaactggctgttgccgattgttgagctctgatatccttcttgacggtgagcatg

SEQ ID NO: 403341 - DNA, 407 bp, Oryza sativa nipponbare
ccacgcgtccggtacgtcgtgacagcgctattggctgaaaccacaattctttgggagccaaccctcgaagcggaggttcttgctgctaagaagttggccctgaaggtatgaagaacttggacgatgaatcggggcaaataaatcccagcaaaatttgtttgctgcccaccagtcttgatcttgtatttcttctgtctggggattggtctgtacaaatctgcagtttctagaaaaccacgccaccttccattcgccagttaacattttggttgaacaccacacttgatctgggtctgtattttgagtccatttgtgagtgacagaacggatgatgaaacacatcagggacacttttaagtttcttcagtcctgcgtccttccctcgaaattaaaatgtttcctggttt

SEQ ID NO: 403342 - DNA, 521 bp, Oryza sativa nipponbare
  unsure (1)..(521): unsure at all n locations
ccacgcgtccgcaggtttccgtgataggggggaatggcaaaaggcatttgcggtgctccgcgagatgcatgcgagtggggttcgccctgaccgccatttctacaatgttatgatagatacatttgggaagtacaactgccttgggcatgccatggatgcatttgatcggatgcgagaagaagggattgagccggatgttgtcacatggaacacacttattgatgcgcactgtaagggaggacggcatgaccgtgccatagagctgtttgatgagatgcgtgaaagcaactgcccgctaggcacaaccacatataacatcatgatcaacttgcttggtgaagagcaacgatggggagggggtagaagcaatgctagcagagatgaaggaacagggattggtgccaaacattatcacatacactacacttgnggatgtatatggtcggtctggcaggttcaagggagcagttgattgcattgaggcattgaatgcggatggcctgaaaccatcacctaccatg

SEQ ID NO: 403343 - DNA, 521 bp, Oryza sativa nipponbare
ccacgcgtccgccacgcgtccgcccacgcgtccgcccacgcgtccgcccacgcgtccgcccacgcgtccgattaaatcttcgaccatgtcggacaagtgcggcaactgcgactgtgctgacaagagccagtgcgtgaagaaaggtaccagctatggcgtcgtcatagttgaagccgagaagagccacttcgaggaggtcgccgccggcgaggagaacggcggctgcaagtgcggcaccagctgctcctgcaccgactgcaagtgcggcaagtgaagtcacgaagcaaccgaacactcgccgccggcgagtcacctaccttaattagtccacaataaaaaccacccatatgagtgtggtttgtgtgtgtgctgattattgctgaattaaacccgtgtgttatcgattaattaagcagctggtcgcttcggcgactatgcgtgtatcaacgtatgaatttgtgtgatgtgatgtacccgtgctattctcaagtgaaataatcaatcgtgtattcgtgtgggtt

SEQ ID NO: 403344 - DNA, 456 bp, Oryza sativa nipponbare
ccacgcgtccggaagtactcgagcaaagaaggagagagcttggtgagctgcagagatggccccctccgtgatggcgtcgtcggccaccaccgtcgctcccttccaggggctcaagtccaccgccggcatgcccgtcgcccgccgctccggcaactccagcttcggcaacgtcagcaatggcggcaggatcaggtgcatgcaggtgtggccgattgagggcatcaagaagttcgagaccctctcctacctgccaccgctcaccgtggaggacctcctgaagcagatcgagtacctgctccgttccaagtgggtgccctgcctcgagttcagcaaggtcggattcgtctaccgtgagaaccacagaacccccggatactacgatggcaggtactggaccatgtggaagctgcccatgttcgggtgcactgacgccacccaggtgctcaaggagctcga

SEQ ID NO: 403345 - DNA, 245 bp, Oryza sativa nipponbare
cgcgtccgtccacgcgtccgcccacgcgtccgcccacgcgtccggagagaaatggcctctttcaagcagcagctgatgctcctcaggagggtgatggcgatgaagccctagacgaagaggctatccgggtttggccttaaaccctctgctgctttctccaggctccatgtgccgtcggcggtggtctccctgcagtcaagccgtcttgtcctgtgtgtgtttgatgaccctgacgcgactgactc

SEQ ID NO: 403346 - DNA, 473 bp, Oryza sativa nipponbare
agaaacaatttaatgtaacgtacgcaaactgatattatcacaatgttagccgatgacaatggaaagagtaatctaggtacaagcggatcattgacggtggagacaagacattggctgcaccacaacacccaccagtggcgccaacaaggagcgctatccgttataggacgagagaaaaagtaaaacatcacgatgtgaagtgaaactgaataattctagtagacgatgatgatgatggataggctccttaggacgcccgccgcccttagcgtcttgctgctcccatcttgtccactggaaggctcactcgtcatcgtcttcatcctcttcgctgccctcgtcgtcatcctcatcattgacctcggacttggacttgtcagattcctcctcgtcgtcctcctcttcctccttggcgggtgccttcttggcagtgctctcgcccttgttgtaggcagcaatggccttgttgtact

SEQ ID NO: 403347 - DNA, 482 bp, Oryza sativa nipponbare
aggcaggggaaatttcccgcaaatgcttattcatatgttttgacaacatttctcccgacgcatgctcattgtggcagacgcagctgaccacctagagcttttagttcaccattattatttagaccaagcatacgtcccaagatcagaacacatgcttacaagcgaaaatactaatagcctggctggctgcttcacagaataaccaaacgacaacctcaacagataaaaatgccacggaatgaaaacaaagcagcgaatcgtcaccagaagtcccatcttactcatcaaacactccatcattctcctccaacgcatcctctccccaggggagaagattgcccagtttaccttccttaacaggagcagggttcaccatattctcagcctcgaagcagtgcagaacagatttgggcgacccaacagcaacaggtacgtcttcagtagcgtcgaagctctggtagatgaggaggccaccacagggc

SEQ ID NO: 403348 - DNA, 456 bp, Oryza sativa nipponbare
agttttcgatcacccgagcgcttattaccaaaagtaatcccaaaaaagaaaacacttgagttacatcttacaacaatcccatattcccatcccatgatccaccagtgaacaacacaactttcactctgcaccatcatatcgtacacatcaagctgatcattaacagctaagtaattcgtgagaaacgcgtcctacaaattctcctccatcgatctttcttggtagagaggagaagaagaagaagagcacagcaaaatcctagacgaaaatcaatagcacatcactctcactcactgatcgtgatcggccaagccgacgagcttctcgctgagctcccagaccttcttggccttctccggatcggaggcctcctcggagagctggttctcgaacgaggccgagttgttgttccagctccagtacaccccggacttggtgaggctcgggtcactgacg

SEQ ID NO: 403349 - DNA, 437 bp, Oryza sativa nipponbare
  unsure (1)..(437): unsure at all n locations
tttgtgcccttgtgggggtgcatttcatttatacaagtagaaggcactcaaatcagccaccacatgaacacacacatgttccatcatcgatcgatctacacatgcatcacccggtcatgcacttacaaacaaaagatctacttgaagaagtacgggaggtcgagcacgtagaggaggaagtaggcccagaggacgccggagatgccgccgaagaagaagccgccggtgaacttggcccagccgtcggcggtctgcagcttgtcggcctccttcttgcggccggtgagcgtcagcgtcggcgccgtggacggctcgccctcgccgaaggaggcgacgccgtacatggtgaggcagacgctgaggatggcgacnaggcctgcggcgccnagggcgccggcctggccgtgcaccggcgtgttgcggaacgggccggtgag

SEQ ID NO: 403350 - DNA, 337 bp, Oryza sativa nipponbare
gttttaatttgggtggggggcaaattcaagtgtcaagtgtacattttcatcatcatgcaagtacagggttacatagattaatcacaatgcagttggattaagcagtgggcatcatcacatcgcattcagaggaagggtatcttagattacagatgaatatgcagacacccagctcggggttccatacatagactggatttgggtgaaatttaacccacaaggccgcttgtgttttagactaggagggcacctcccaccagaatcccggcaagggtcacggtccaaatcaaaaacccggtggatccaccaacgtatgtgtcaccggtgggagaccatt

SEQ ID NO: 403351 - DNA, 278 bp, Oryza sativa nipponbare
  unsure (1)..(278): unsure at all n locations
tgatgacagagagaagttaattaagctagaagggtcctcnatcgatcacacacacacacacaattaaggtacatacatacatgcactgctgcaactgcaactgcagggtcggtgcgtggctactacaagtgtacacatggtacgttggttggcaccatctcgatcgtgtcgttgtgctcacttgccggggacgaagttggtggcgtatgcccaggcgttgttggcgacagagtcagcgacgtggtcgaaaaagttctcgatggggcccttgccggtga

SEQ ID NO: 403352 - DNA, 427 bp, Oryza sativa nipponbare
gctagtcaaaagatggtatcatcaatcaatagtagttacagtattgattccatggagtagtaggattacaacaattaaggacgatgaagagaaaggggtggctggcgatacacatagagaggcaaagcagggggtagcttagttacaacttacaaacgaagctctgatcgatcaagtctgatttgattgatgcagctgaagaagaagaggaagaagacgacgatgatgatgcaatcagctgctgacgtacttgtcgatgatggtggcgagggtggtcttggggacggcgccgatgacgctctccttcttctcgccgttcttgaacatgaggacggtggggatgctccggatgccgtaattggtggcgatgtttggtgaggtctccgtgttcaccttgcaacacttgatcttgcccacgtactccttg

SEQ ID NO: 403353 - DNA, 497 bp, Oryza sativa nipponbare
ttttacaatacgatacgaggggacacaatgggataaactgtacagtatcctttgttttccaaacaatcgaccatacagcagtttttgccctgacagacatgttacatgcacattaccagcttgtatgtgttccacttcaacaaacaccgaagctaattatcaagacgccgttggcctgggcaacctcttcgcaatttcctcaaatacttggtttatattatcagctgtctttgctgatgtctcgatgaaaaccatattattcttctctgcatactcttgtgcttcctgagaagatacatgtcgattttcatgtagatcagctttattaccaaccaaaaccatgataatatcaggactaccatgtttttgaagttccttcacccagtattgtgctttgctaaatgattctggactagttatgtcgtagacaacaactgcagcagcagctcctctgtagtaaagaggtgccaaggcagcatacctctcttgtccagcgg

SEQ ID NO: 403354 - DNA, 498 bp, Oryza sativa nipponbare
tggaaggcaaatgtgcgtgaagataggcacatatatgtatcgtacaatgtcctctccgcttgtcgaaatgcaaataacatcatcgggggatatgatcatcagttcacgagaacagaggaagaaacaaaagctaaaaattaaaaccatcaacagcccgatcgagtttgcattactagatacacacattgcagccttccttccctctctccatgtatcgatatatcaacccggccacgcacaaaacatttgttcattccctactcgagctgcgcgtaccacaccccttggatcttgacatccttgggcaccttggcgccgaggtctgtgtccgacggctgcacgctctcgaagacgccaatcacctcgccggtctctggcttgctcttggtgacgctcaacgtgatgttgcccgtcgacgacgaggcgttcttgacgttctccttagcgagctcctcctcgtctcctctgcctccggcggggagcgccacagcgttgtcg

SEQ ID NO: 403355 - DNA, 489 bp, Oryza sativa nipponbare
taagctgcacaggatggatatatacccagtataataattaccacgacaacatacgcacacatattgacataattaagcctgctacgtaacaaagcatcatccataaacacgcgtaccgtgccgtgcatgcatacagatacatacaggcactccacttattttacaaccattcacactctcacactgaaagtcccaaataaaactgacaacagacgcatgcatcgatcatatcatatgcatgatcgtccatagtcgtagattgtaaattgaacaacgaaatcaagaacaattaatcaagcagctgatcgatctctcgtatcaaatgaacatcgtcgtcttcctcacgccgtcacgctggtgctcctgaacgagctgagcgccttggcggcctcgccgcgcagcaccagcttgtggtacgccgccgccaagaacgccccgatcaccggccccacccagaagatccagtggtctttccaagctgcgtgctgg

SEQ ID NO: 403356 - DNA, 459 bp, Oryza sativa nipponbare
tttccatgtaaggccgtgtttatttctattgcaaaacgataatcttcagataactaatttaaactcaaaatcatccagaattttacaataacatcattaggaagcgcaatagttcctcagcaacagcaaacagatctagaggtagagaatcttgttacagatctgatctaacgatcaaagtaaagaagcttgttcctcaccataggtagcccgggatcttgatgcggaggaagagcatggccatagcgtacgcgatgactatggcggcgacgccggagccaccgaaggagacgcgaaggctccggggcctgttgcggtcgacggcgaggtcgaggaggatgatcccgatgccgccgatgacgaacatgatgcctgaggagagcccctcgatgatgtactggccgttgacgcggccggggaggaagacgacggggcggacggcgccggtggcggggtcct

SEQ ID NO: 403357 - DNA, 495 bp, Oryza sativa nipponbare
  unsure (1)..(495): unsure at all n locations
ggtgacatggcatggaagaaatataattaattagtgggaggcaagttaatttgaaaaaatcatacaatatagattttgtttcatctatccctccaaaagtaaaaagaaaaaaaaatagataatatttgacaatacagtctaaaaggggaactacatggtaatgggattgatgaaaagattcctaacaatctcttgtagatgtgtggagaatgtgtacgcatcctttctcttgtcataaaagaacattatacaaatagccaagttcacaactcgttgcactaccgggagtagctgatgatgttcacaacgggcttggttgatggttctccattcatcttctaccagtgaatcgagtttggcaaaggccacctcacttatgatgttgtgctcattcatgtagcactcaacggtgctcgcaatttcccctttgttcttcccacgctcaaatgaagcaatgtcattcatgaaacgcattatctntgcacatgatgtcac

SEQ ID NO: 403358 - DNA, 458 bp, Oryza sativa nipponbare
agctggggccaagtctggacaagatgcaattcatcaacgtaggattacacgtacacagagcagtgtacagactcaagaaaattaagatagcatgctgatgcacgcacggagcgtgcaacataaagtatacagagatacagagagagatgaccagcgctgaatgatatgccccagctgttatttttactgtagctattattttggctagttgatcaactgcgagccagcatcgatcgatatatcgatcggtcggtctacgcaggattaatcgatctagctgaccttgctgcagtcagtggagaggctgatggggaagccgacgttgacgccgcacttgccggggatgccggcggcggcgccgaggttgagagacttgatggtgccggcgagggtcttgaggcaccggcaggcggcctggcggtcagcggtggtgcgggcggcgttgttcaaccccttga

SEQ ID NO: 403359 - DNA, 374 bp, Oryza sativa nipponbare
tttaaaaaaccttttttttgccatttcccccttgaactatccgtaaataccaccattccaccaaactcccctctgtcttctacgacaaataatcttttcaacccagtaacttataattaattacagagagattagcaaacatataatggtaagaatcagttgtcgtaggtgcggcactcgtcggtctccgggttgtccttgcagtaggcctcgagcgggtcggaggtctccttgagcttgtcgcgcgcgtggctcgccgccgcgctcagctcctccacctcgtcccacgccgccgcgcactcgccgctcgccgtgtcctccgcgcacgcctccttcgccttgtcgatgctctccgacatcttgtccgagatgtc

SEQ ID NO: 403360 - DNA, 444 bp, Oryza sativa nipponbare
gatatgagagctgcatttttcacaattacacatatcttttgttcatcccatcgatccatgtatagtatacgtgtgggtataatcttgggcttgattatcggtataactgcgtgctaattgagcctcgctactaatcaaggttaattcgcgcgttgttcttgagggaaaccggtgccagcttcccgcccaacgtatccgggatctggctatcgtcgatctcctggtgcagcaccttttgcaagctcttgtcgtccacgaacacgaacttgtccctggtgacattgtcgatgaaagggtagatcatcttccaggccttcatgaacatgtagggtacatggatcatcagggccttgccgagcctctccgggtagtaattctgcatgatctctatggccgggatgtaagctctgatgtcgcaattggagtaaccccagcccttgcgga

SEQ ID NO: 403361 - DNA, 389 bp, Oryza sativa nipponbare
ggggtgggttttttttttttttttttttttttaaaactaggatatatagcttattaattaactggtctttcaaatacatggggtacgtatttgacagtagtatatttgacacagtaatgcatgcctttatgacaccaaaatgggatatggatttgattaaacaggggccgcaaaacgttcattaattaaacaacaacaattaacccttgggcacccctgggttttgttatttcgctcaacatatacgtacgtaatactttgcttgcatagcatagggaccaccaccttttattcttaattgataaactcaaaaacccatggggatggatcgagagatttataaatatggagcttgcttgattgattagatgagggcgtcctccttgggg

SEQ ID NO: 403362 - DNA, 477 bp, Oryza sativa nipponbare
aaatatatataggcggggcttccatatatttcattcacatatgcctcacccaacaacatatagtcgtagcagataccactcttacatcaagtcagagagagatcaggtgaaacaaaaacaaaagcagagcacggccggtaaaatcaaaagacgatgaacaaactgggaacacacgaaacaaggtgggagacatcatcgaatcagagatgaacaattaaacaaggctatatatgacgatgacggcttagttgccaccagactcctcgcagcccgggggcttgtaggcgatgaagctgatgagctgcacctgcctgacgttgtcgaagccgatgatacggacgaatgcatcagggtacgccttcttggcctcctcgagctccttgagcacctgggtggcgtcagtgcacccgaacatgggcagcttccacatggtccagtacctgccatcgtagtatccgggggatctggggttctcac

SEQ ID NO: 403363 - DNA, 404 bp, Oryza sativa nipponbare
gcaaaaacatcagctggttcttcatcttcttagtgtacacaacaccaactcgatcatcatctcgtcgcactaaacccatcttccccaacccaaagacaacgaactcgctggccacaaatccatccaaccacaattaaccactgctaagctacggtcccccacttcacttgccggggacgaagttggtggcgtacgcccaggcgttgttgttgacggggtcggcgaggtggtcggcgaggttctcgagggggcccttgccggtgacgatggcctggacgaagaagccgaacatggagaacatggcgaggcggccgttcttgatctccttcaccttgagctccgcgaacgcctcggggtcatcggcgaggccgagcgggtcgaaggcccccccggggtagagcggg

SEQ ID NO: 403364 - DNA, 349 bp, Oryza sativa nipponbare
ttttgtatgtgaggattatattatagcaaattatttggaggagcttgacttgcgtgccttattaacaaggagatatgttccattacatgatgattaacatataaatttggagctacatggaattaaggcaggggagctaatgaggaaggatgcttgaagactccaattgcttatggaggggaatgggatcaggcggccttgcataagtctccgctcagataggccgacctctgctaggagatcaccgatgtggtctggggagcagatagggagctgctgttcactggctccggggtggaagaacaaataggaacggtacacgttgttgagagctaggcctgtggaatca

SEQ ID NO: 403365 - DNA, 371 bp, Oryza sativa nipponbare
ttttaattccatgatggaattttcattggcgacgaattgattgttggacacatatgctctaggattcacatccatctcgtaccctttgtataaatatatatagccggagcttccatatatttcattcacatatgcctcacccaacaacatataggcgcagcagataccactcttacatcaagtcagagagagatcaggtgaaacaaaaacaaaagcagagcacggccggtaaaatcaaaagacgatgaacaaactgggaacacacgaaacaaggtgggagacatcatccaatcagagatgaacaattcaacaaggctatatatgacgatgacggcttagttgccaccagactcctcgtcacccgggggctt

SEQ ID NO: 403366 - DNA, 493 bp, Oryza sativa nipponbare
gcattttagagctctgtcgctctgaaccattctattctttatgtatggttttttttcccgtaatcatggatgtttaaaccatctttgtgtctggtttttgatgtatccacatggttcacttcaaaaaagaacttagcacaaacaaaaggagggagagttattcacagctcaggaatggaacacacacacaaactctgcatcctacaaaacaaaatcggcatttccatcaagtatggaaatagtggttcttggtttggttctttactttcccttttcgttttctttgtgtggtatgcaagctagaaggtgttattgtgtcagcacaccaatctgctgcagagctgacttcatgtcatctgtactgtaaccctcaatgccaatgatatttgagctgtccagggcgacgacatcttgtaacggatatctcctgacagtatggattctgttcgcggggatgttgaactcgcccttcaggatgacggtcctgtggaga

SEQ ID NO: 403367 - DNA, 483 bp, Oryza sativa nipponbare
  unsure (1)..(483): unsure at all n locations
ccagagaaagagaaaaagagccccattaatatcttggccagcaggagctgaagtacatattcaacggatatcctatgcatttaccctataagaatgtacattatttgcagctagaagttgcagaccgtaaaactgtaagtactatacacacttgaaagaactacctaggcctactgcaacgcaaggagcgatgaaatataaatccctaatgagacggccccaactgttgcaactgcttgagttaactccaagaataaatttggcctttgagcaggcagctccttccagtttgtcctccccaagtcagctatgactatactaatgttgtcttgcgaccgacgatccagagctatctgaccaannncctcacaggcaacctggacatccccatgttgccggagttgatccctaactaatgctactggttcagagcttttaatgtaatcccaaagaccatctgttggtagcaaaacaaattccaca

SEQ ID NO: 403368 - DNA, 474 bp, Oryza sativa nipponbare
acattcaactggtcagggccggcctggagttcattcctgcttgaacaacaaaggtacagagatcatactacacacccagaacactgaagcacttgccatgcaggcagtacttctcttttatgaaaagatgatacagatcagttgcaactatgttacaccaccaccatgtacaacgaccggacaccgaaacatcatcctagtgcagagctgtgaggattgcagtggcgctctcaaccttgaaggttgcaccacagatctcttcttcatttgcaggaacagcagtcaccttgttctttgggttctcatagcacttcaagcctccaagagcattggaatagaagcaaccttgtgggaaaggtgcaagtgacttgccacatgatcctttaagcaggtcaatgtcgttagagaaggcaacagatccatcagcagttatcccccagaacagaggcaccttgccctctggatcagaggcca

SEQ ID NO: 403369 - DNA, 399 bp, Oryza sativa nipponbare
tgttgaagttggatggggtatgatagaccttgttactaggcaaaccacacgaatacacgattgattaatttcactgagaatagcacgggtacatcacatcacacaaattcatacgttgatacacgcatagtcgccgaagcgaccagctgcttaattaatcgataacacacgggtttaattcagcaataatcagcacacacacaaaccacactcatatgggtggtttttattgtggactaattaaggtaggtgactcgccggcggcgagtgttcggttgcttcgtgacttcacttgccgcacttgcagtcggtgcaggagcagctggtgccgcacttgcagccggcgttctcctcgccgggggcgacctccttcgaattgggtgcacgcacgcccaaagc

SEQ ID NO: 403370 - DNA, 83 bp, Oryza sativa nipponbare
aggggggaattgttcgtctcattgctattgataattgatacacacttgcccacgcgtccgcccacgcgtccggggacgcgtgg

SEQ ID NO: 403371 - DNA, 474 bp, Oryza sativa nipponbare
caagtgtgaggtgtagtatatcatcatcatgcaagtacagtgttacatagattaatcacaatgcagtttgattaagcagtgggcatcatcacatcgcattcagaggaaggctatcttagattacagatgaatatgcagacacccagcttggtgttacatacatagactggatttgggtgaaatttagccggcgagggcgctggtgttgtagacgaggagggcgccgccgccgaggagcccggcgagggtcacggcccagatcagaagcccggtggttccaccaacgtaggtgtcaccggtgggagaccattcctccggcgagtagattgggctgtaaccgtagacgtttgccccgtacttggcaacgaattggtacacaacctttccctgtgctcttgctgccagatgcatcaatatcgactgacatgccacctccaatcccgtagggcttgtcggtcttgatctttttcccac

SEQ ID NO: 403372 - DNA, 447 bp, Oryza sativa nipponbare
  unsure (1)..(447): unsure at all n locations
tatgaggaatagttgccgttaataaacatccattaattctatttttcatttacattttacatatcatatcatccacaactctcttaactaattcaggacagcatctcttctatattgtaattcaggacagcatctcttttctatattgcatatcaggagcatatcaggtggttaaagctaaacagaaagaactactatacacttcgatgttacaagtcatccatattattctactgtcgagtctgtacagaaattttcatcattgttcgcaaacttctcaatcaatatttccattgttttcttatacatcggcatgtaatggtcattgatcatggtgttggatagacggattntactgtaaagatcccttggggtctcgtatattcccacactgcactcatcaacagcaacccgatcatcagggcaagaatctgcaggaggcatggc

SEQ ID NO: 403373 - DNA, 471 bp, Oryza sativa nipponbare
gggatactagtaaggggcggacagatcgcatatcatttgacttacagcatacacattaattcttcaagtctcaacttggattacagcgagattaacgtgcgctcctccctaacacctctacgtcacatcccgtagttaaccggacgtagagagagagagagagagagagagagagagagagagagaatacatctattattcagatattattccaatgtgtttctggacaagtagcctaaactccgatcagtctcgagaagcctgcccgtgtgtgcaaaatccagaaatcacccaggacaaatttacatgatcccaaccgtatttgaggccattaacattgattaaagtcaaactatgggccgtccgactccgaaggcgctatcatagttcctcaccatgttcttcgtcgagggcataccagcaacaacatcttcttcgatgccacattcggttgtgccccttatgatcttg

SEQ ID NO: 403374 - DNA, 460 bp, Oryza sativa nipponbare
agcaaatcgatccaggcgaggcatgcgtgcaaatcagttggagcacaaatttacatgttacacccacaccttacacccatgcataataatacatcgtatatacgtacgtacatacatacccctctcgatcacacgcaccatcgatcgtacaaagttgcgtacatacatacgtacacacatatacgcatacgcacgtacatacatacataattaaaaactcgtaattaattaaatacgtagttgatggcatctctaatggaacttgaggctggtgaggatgttgttgtggacgggatcagcgaggtgatcaagcaggttctgcacggggccaaccccggtgaagagcgcctggacggagaagccgaggaaggcgagcatggcgagcctgccattcttgatctccttgagcttgagctccttcatctccgcctcgctcttgggcccgaagccgagcgggttg

SEQ ID NO: 403375 - DNA, 491 bp, Oryza sativa nipponbare
ttttcacggctctgggaggcatttgtttacaattaccaaacacccagctttaaatttacgtatgtattacaaactgctcccagattgatttaaggataaaagagaagagtagaagatgttcagagaaatttcacagtaccctcacaagcctcattataagtgcaaaggtaactgttttatttatcgaacaaacagctatggagtggtatgatacttctcagaaaaaaaaaactaatggccagaaatctcagaaacaattatgatgttgtgaacactgaagttaggctcatggttcaggttgcaacttctcacattcttctcttatcgactgaaaaaggatagatgaaaggtacctctcaccaaagcttggaaacacaaccactaccaactttccagcattttctggtctttttgcaactttaatggcaactgctgctgcttgcccagatgaaattccaaccagtaatccttcctgaagagccaattgcttt

SEQ ID NO: 403376 - DNA, 437 bp, Oryza sativa nipponbare
agacaggggagtgatcactatttatagctatcgatcatcatcatcatccaaacatttcccacatctgaaaaattagatgtcgaactggaggaggaagagcatgacagtaagcaaacaacttccttgccatgttccctactctcttcagtctctctcatctctctcaccacacaaccgaaacaatatacacatgccacagctgcggtcattattgtataacaaaaggcgctaggcttacttggtcacggttactgatcgatctcattcgtcgatgaactcgaactcgtcctcgcggaggtggacgaagaacctgaccggcttgtcctggccctccacgctgagatggaactccaccttgaaggggaaattggccgggatgcgcttccccttccagacggccacgtactgcttgacgacgccctccattcccttgatgt

SEQ ID NO: 403377 - DNA, 407 bp, Oryza sativa nipponbare
  unsure (1)..(407): unsure at all n locations
ggtacacaagtcatggtngtaaaaaaaacagtgcagagattcagacactcggtttgatcattgtggtttcatcacacacaccacaagtacaatgattggcattagtcccttgctgactggggactgaagtgtcattattgtatataaacactctgacatggtgacgtgcgtattttcagggagattttaagcgggtttgtgcaaaatactgccaaatgatgtaagatgtcggtaggagcccattgcaacagctgatagcacagtttattcagtgtctgtggagggtgacacaacaccgagctaggaagcacattttggtatgcctttaacgagcttcgacaggttgagtgacacccctggtggtaatttgttcgacatacttcctttctagctgggagatggtcatt

SEQ ID NO: 403378 - DNA, 305 bp, Oryza sativa nipponbare
tttacctattttttggtcagagcaaacacaagacgagctttctttttgcgatcaaaaacacagatgggcaaccacacagtaacacaaactagatagtagttccacacaaaactaacgatgataacgatcggatgatgatgatggcagctcgattagatagatagataacttggccatgagggcccaaccggtcagttccttcagtttccgtcggagttgccgccgacggggatgccgtagccaccgccgaaaccatagccgccggcacggtcgacaccgtagcctgcggcacctaatgagtgagc

SEQ ID NO: 403379 - DNA, 378 bp, Oryza sativa nipponbare
gggggttgggggcaaaacagaaatgcgaatttacctttatatgcaactgtttacaccaaaaggggaaaaaaacgggtaccttgcaaaaaggagtataactttgcagtttcaagtcccacttcaactacaacccaatctgcattacaggatgggagtctaaaacgactgcagtttcagcgtttttgaggcctgcagagacactgggctcgcgttgcagcaaaagattaggcggcggcgcccacggtggcgccggcggtgagcctcgacgagccgtagagagtctcctcgaaccggatgatctcgttcttggaaccgtaggccacttgagtccgctcgtcgaggttgttgatcaccttgtccagcaccgactgtttgccg

SEQ ID NO: 403380 - DNA, 297 bp, Oryza sativa nipponbare
acgggaaaccatccattttttttattggcgacaaatttataagaaatgctctaaaaacatattttggggggataaaaccggagctttgttttcacatatcctcacccaacgataattggagaacttttacaaaaaaacccgccggagagggggggaagagattattacatttgggttaaaagcaaaggcccttgaaatgggtcataacccaactgggaaataaaaatttatagcgttttatatattggtatattatgaacctagcccaaaacaaagggggttactattattttaggg

SEQ ID NO: 403381 - DNA, 487 bp, Oryza sativa nipponbare
gggggacagaaaaattctatgaacagaacatatgcaacaataatctacgaacagaacacacgctgcaagcaaactttcgtcatgtcatagtacatcatagttcatgcccaacaccatgctgataagtattgggcccaaattgtcttacaattacatacgcccacagtaagatgtacttagcacacttagtacaaccgagatggcagtgttctttgcatacatacaaaattacatcacttgcatagcattactgttacataacaacatctcatccaagatcaggaacgatgaagaagtcctcgtcgtcatcgggtatctccacccgtggcttcttgctttggcgtgcaccgctcgccttgtagagccccatgttgctcgctggctgcggcgaggcgaaaagctcaggcacctccgccgccgtgctgcctcccttggccggcgactggacatggaacaggtcgatgtcatcgagccactccagatcctt

SEQ ID NO: 403382 - DNA, 480 bp, Oryza sativa nipponbare
  unsure (1)..(480): unsure at all n locations
ggtggggtggaaaatttgatgatttatttcccacttatatcatcatatacaaatactaacacatgcgaaaattatcaagcagaaaagttccatacaaattcatccagacaaacaagtgtaaaaaaccttttttttcccatttcccccttgaactatccgtaaataccaccattccaccaaactcccctctgtcttctacgacaaataatcttttcaacccagtaacttataattaattacagagagattagcaaacatataatggtaagaatcagttgtcgtaggtgcggcactcgtcggtctccgggttgtccttgcagtaggcctcgagcgggtcggaggtctccttgagcttgtcgcgcgcgtggctcgccgccgcgctcagcttcttcaccttgtcccacgccgccgggcactcgccggtcgccgtgttctccgggcacgcctccttngccttgtcgatgctttccgacattttgt

SEQ ID NO: 403383 - DNA, 431 bp, Oryza sativa nipponbare
gggaaacgaataaaatcattattgcaaaaacatcatcttcttcttcatcttcttagggtacacaacaccaactcgatcatcatctcgtcgcactaaacccatcttccccaacccaaagacaacgaactcgctggccacaaatccatccaaccacaattaaccactgctaagctacggtcccccacttcacttgccggggaccaagttggtggcgtacgcccaggcgttgttgttgacggggtcggcgaggtggtcggcgaggttctcgagggggcccttgccggtgacgatggcctggaccaagaagccgaacatggagaacatggcgaggcggccgttcttgatctccttcaccttgagctccgcgaacgcctcggggtcatcggcgaggcccagcgggtcgaagggcgccccggggtagagcgggtcga

SEQ ID NO: 403384 - DNA, 476 bp, Oryza sativa nipponbare
  unsure (1)..(476): unsure at all n locations
ttgatgaanagaactgcggttctaaaagagtatcaacttgttttttacatcggttacatcatagtacaggtacacaatcaacaaggcatgcagtgctccatccacaattacatcccaatacaccaccaccattcacagcctactccgatcccaaaaaagagaggtaagtcgcgtcgacgaacagtcttttcatcttcctccattggcagccattgctaacactccaacacctgaagaactcctcatttgggggtgaaggcctggaagatggtggcgtggccggggtcggcgagatgggcgaagaggttgtcgatggggccggtgccggtgtactctgcctggaaccaagctcccatgacggcgagcatggcgagccgcccgttcttgatctccttggtgcgcagctccttgatcttctccggcgagccggtgccccagccgagcgggtcaaaccacagaccaccagggtacccgac

SEQ ID NO: 403385 - DNA, 470 bp, Oryza sativa nipponbare
ggttggggcctccaaaacgtgtttcgttccaagggtattcaccaatcgtcatgggtacaaaacgaaagcaaattttaatcgaaacatacatcacagttatatatcacggcttatcggggccaaccagccatggctggctgggccctgcctgctatggctcgatcggggtccactactccgactcctcgacggccgcctccacccggagcagcacgaagccgacggcgacgccgacgagcacgagcccgttcatgatgacggcgatcctgaatatctcaccggcggcgttgcactgcgccccgaacgcgccgccgcggctcttcccgccggcggggctcagcttggccaccaccttggcgaacgagtagtcggcggtcttgcgcacgccgagcagggtcaccttgttgagcgccttgagcccgctgtacgcgttcatcccctccacgtacgtgacgccggtccttttcctc

SEQ ID NO: 403386 - DNA, 378 bp, Oryza sativa nipponbare
gtttaaaaatggcagtgacaaataggccgtagcacgactggagtgcaacgccgtatgcaaacaatggtttagtctatgctgaaatttggcacagatataggtaagctgtgcgatgaattaacatcggtctttgaaaaatacaacatttcttttcatatctatggaaacatcaaagacatcatatccttccctgcgatccacgaacaatgagctgctttgaatcatgaggttcccaacagaacactccctgagcaggtcagttgatgttcatatcctcagcaccagcaccgtctccatcctcgttttctgatgaggtgttaatcaagcgcctggaacgctgctgctgttgtcgtgttcggacgcgtggcggacgcgtgg

SEQ ID NO: 403387 - DNA, 499 bp, Oryza sativa nipponbare
tttcacagaaaatcaatccgtgcatgcaggggaaatcgatggatcgacctctctccttaacttgttcttaattctcatgtacaatcaaagaaacacacacgcacacacacatgcgtgcactgcatctctctgagcaacgaactcgattgatttgattttgattcgctagggattaaagagaagctgagatagagatttcgacgatcatgcgacgctgaaggagctggctgcgctctcgacgaacttcctggcgcccttgaaccacctcttgtcgccggcctgcgccttgcagatgtacagcttgccgtcgttgacggtggccgtgatcagctggtgcttgccgccctcgtcgccgtccgccgtcctcgtcagcaccgttacgctgtagtactgcttccctcccaccaccggcgccgagctctccaggatgttcgccgtcgccaccgcgtccgactcaaacccaccctcggaatctgtcttgccggagtaggcctgcttg

SEQ ID NO: 403388 - DNA, 422 bp, Oryza sativa nipponbare
acgtgataccagtgccagtttttttattgtcgacgaatttatcagatatgctctagatacatatcttgtgtgtatatagccggagctttgttttcacatatcctcacccaacgataattgtagtactcttacaataaaaccggccggagagggagggaagagattattacatatgtgttaagagcagaggccattgagatggtacataaccaaactgtaaaataaaaatatatagcatattatatattgatatatcatcaacatagcccaaaacaaagctgcatactattattataggcagcaatccaccagcgcgatgcttgatcttagcttagttgccaccagactcctcgcaacctgggggcttgtaggcgatgaagctaatcaactgcacctgcctgacgttgtcgaagccgatgata

SEQ ID NO: 403389 - DNA, 455 bp, Oryza sativa nipponbare
  unsure (1)..(455): unsure at all n locations
taaaaccgaacacatgggagcgcagtacgtcgcatgcagcatcgaattggatcctttacaacttatatagccataggaatagtacaattatatcaacatcataaacagggggaattaatccatggcgatccggccatgggggactagcagtacagtacagaggatttgcatggatggatcggatcaagaagaaggtgaggcagagacgaggaatttaatttagatcttgccgcgtgggccgggcgtcggcggcagctgcgggcccttcttgatcggaagcaggtctggcgacgccgacgcgctgacgtaggccaccagcgatccgccgccgagcagcaggaacttgagcaggagccccctcttggtgaagggccccgcgaacgtctcgaagaacttgctctggagagggttgtacggcgacggcgcgtcngagccgtacaggtcccactggcccg

SEQ ID NO: 403390 - DNA, 471 bp, Oryza sativa nipponbare
agcaagagatgtaacagctttatgtaggcagatccacctctctacatcatcatagtcatagtacaagaactcgacgaattcagaagaaacattggcagctacacctagagaaagaaaaatgaaaagaaaagaagatctaatatattacaagggatccttggatatatgctcatagcattggtacatcccgagcaccgagtcgcgacttgtggcgaaaacgggtgccatttccatgcttatgccattactgcttcgcctgagagtagatgaaagttccgagaatcgcaatggcggctccgagggcgttgatgggctggaccggcgtgtggaagatgatgatggaggcgacaatgacggagatccgcttcatggtgttgccgatgctgaatgtcagtggtgagatctcgtccaatgacatgtaggacacttggttgtacaagtggtagaacacactctgcgcctgcacccacc

SEQ ID NO: 403391 - DNA, 499 bp, Oryza sativa nipponbare
ttgacaagcaggtaagcgtggtttatccaccataattaagatcgagaccatgagatagctagaacactgctgctaccatgagatagtttatccccctggagtactgtacatcagaaattcaccactcaactcaccccctcacccatgcatccagatccatgcatgcaggaaacaattaccacaacacacacagtaagtctgaatctcatcacatccatctctctctctctcctccccccaattcattaacatcttatacatgcatactccacaaaaaaaaaaaagaagaaacaagaagagaacatcttccatcgcccaatcatcggtttcaccagcctgaactcatcaagctccttgagatgccctggccctgatgaaatcgatcacacgctcagcctgacagcgtctggatgatggtgttgtgccacgggtcagacaggtgctgcagcaggttgtcgaagggccccttctgcgtcacgttgtgctggaccaggaaccc

SEQ ID NO: 403392 - DNA, 443 bp, Oryza sativa nipponbare
gaaacaaaaacgaaaggagagcacggccggtaaaatcaaaagacgatgaacaaactgggaacacacgaaacaaggtgggagacatcatcgaatcagagatgaacaattaaacaaggctatatatgacgatgacggcttagttgccaccagactcctcgcagcccgggggcttgtaggcgatgaagctgatgagctgcacctgcctgacgttgtcgaagccgatgatacggacgaatgcatcagggtacgccttcttggcctcctcgagctccttgagcacctgggtggcgtcagtgcacccgaacatgggcagcttccacatggtccagtacctgccatcgtagtatccgggggatctgtggttctcacggtagacgaatccgaccttgctgaactcgaggcagggcacccacttggaacggagcaggtactcgatctgcttc

SEQ ID NO: 403393 - DNA, 468 bp, Oryza sativa nipponbare
gaaaatcaaccaaagatgaggataaacaatatttaatgcactcggaatgaaaagactaatcaattaattaagcacgtacaaacacggcgctcaataattgccagtagcgttttaatttgcaggtagatctctcttctctacgccttgacgaagacggtgtactcgacgatggtctcgccggagttggcgccggagtcgacggtgcgggcctcgacgtagcccctcgccatgcggaacttgccggagccgccgacgatgctcatctccctcaccgccgagagcacctcgttccggccgacgatggcgagggtgctccccttgtggtcgccggcggtgaacacgaagttcatgttcatgaggaggccgaacgtcttctggtcggcgaacgtgtagctcccctgggcgcgccccaccttcgacgacgacgacgccgcgtcggtcgtcagcgggtcgtcgatggccaccacg

SEQ ID NO: 403394 - DNA, 470 bp, Oryza sativa nipponbare
ccaaattcaagggtcgggtgtagtatatcatcatcatgcaagtacagtgttacatagattaatcacaatgcagtttgattaagcagtgggcatcatcacatcgcattcagaggaaggctatcttagattacagatgaatatgcagacacccagcttggtgttacatacatagactggatttgggtgaaatttagccggcgagggcgctggtgttgtagacgaggagggcgccgccgccgaggagcccggcgagggtcacggcccagatcagaagcccggtggttccaccaacgtaggtgtcaccggtgggagaccattcctccggcgagtagattgggctgtagccgtcgacgtttgcgccgtacttgtcaacgaattggtacacacccttccccgtgctcttcctgccagatgcatcaatatcgactgacatgccacctccaatcccgtagggcttgtcggtcttgatc

SEQ ID NO: 403395 - DNA, 484 bp, Oryza sativa nipponbare
gtagatcctatggtagcgatacatcattaatgcgatcatcccttggatgcggcctgcggcttacattaaatctcgatccaaagaagcaaagatgatgacagacagaaattaattaagctagaaatctcctcgatcgatcacacacacacacacaattaaggtacatacatacatgcactgctgcaactgcaactgcagggtcggtgcgtggctactacaagtgtacacatggtacgttggttggcaccatctcgatcgtgtcgttgtgctcacttgccggggacgaagttggtggcgtatgcccaggcgttgttggcgacggggtcggcgacgtggtcgaagaggttctcgatggggcccttgccggtgacgatggcctggacgaagaacccgaacatggagaacatggcgaggcggccgttcttgagctccttcaccttgagctcggcgaaggtgtcagggtcgtcggcgaggccgagcgggt

SEQ ID NO: 403396 - DNA, 345 bp, Oryza sativa nipponbare
ggcacgaaggaattgttctcaagaatcttaagatggtaaatacacacaagagagaggtccggtatacaagacttagtttttcttaagtacaacagatcttccattcctccatgatcctatcagcttctacacccaaaccacacaaatcaccatgcacgagcccttttcctccactgccaaatcaactggggcttgagtagccaagcatccatgtggtgatcagtagccgatgtcagcgtcgtcgacgacgaggttgccggtgatgagctcacggtaggcggcgacgggccagatgaaccccctcgggaggagcttgacggcgagctcgacgtcgatgatgatctc

SEQ ID NO: 403397 - DNA, 486 bp, Oryza sativa nipponbare
gggttgtaccatataacggacgattgctgattactattactggttgcaatgtaacacttcggatacaatagtacattacagagctagctaaatgcgaagccacaataccgtcagcgcaagacgatcataaataaagcttacacaacatagccaacatgcaaaccattcggactgaccagagatgagggttcttgaagctgccgtggtgtgccatgcatcacaaatgccgaacaactagattgtagcagccaacatgaaaggaaaaggcatggataatgcagcaaagatggatgatgaagaccgcagattgtgacgcttcgttcaccaaccatatgaaacccctaaattttgtcaagtttctccgccttcaccaccggattagccttggcaatagcatccctagcagcggtccgatagtcaaactggcagtcatgcttatcggaatagcggtgcattgcgcagtacaagttgccacatcggcagttg

SEQ ID NO: 403398 - DNA, 495 bp, Oryza sativa nipponbare
tgaagttcgattgagtgtgagagacctttttactaggcaaaccacacgaatacacgattgattaatttcactgagaatagcacgggtacatcacatcacacaaattcatacgttgatacacgcatagtcgccgaagcgaccagctgcttaattaatcgataacacacgggtttaattcagcaataatcagcacacacacaaaccacactcatatgggtggtttttattgtggactaattaaggtaggtgactcgccggcggcgagtgttcggttgcttcgtgacttcacttgccgcacttgcagtcggtgcaggagcagctggtgccgcacttgcagccgccgttctcctcgccggcggcgacctcctcgaagtggctcttctcggcttcaactatgacgacgccatagctggtacctttcttcacgcactggctcttgtcagcacagtcgcagttgccgcacttgtccgacatggtcgaagatttaattagcta

SEQ ID NO: 403399 - DNA, 481 bp, Oryza sativa nipponbare
tactaatcaatacacggaggagtttctttgagacaaagcaacaaattgaaggtgtgatatatacattctaacaacaaaacaacaagaatttggaactactaatgaacaatcgacatagatctacttcgattttgcagtaaatcgagggctaactcatcttcttgaactccggtgatcgccgccaatgccgtcaccagttgatcaccgagatgctctggactggaagagctcgagccgacccttggcatccgggagcagcgcgtcgacgcgcaggtcctgcaccatgtgtggctgcttggacgcccagaggagcacggcgagaactccggcctgcgcgagctcctcgttctccgggacgtgcagcgcaatgtagcagagcagtatgagcgcctcgatctgcacctggtcacccaggtagacgagctggacgaggtgccgcgcgccggcggcgtcgacgatggccttgcagtggctcacgtgc

SEQ ID NO: 403400 - DNA, 472 bp, Oryza sativa nipponbare
  unsure (1)..(472): unsure at all n locations
ggataggatagatatagccggagcttgcatatatctcattcacatatgcctcacccaacaacatatagtcgtagcagataccactcttacatcaagtcagagagagatcaggtgaaacaaaaacaaaagcagagcacggccggtaaaatcaaaagacgatgaacaaactgggaacacacgaaacaaggtgggagacatcatcgaatcagagatgaacaattaaacaaggctatatatgacgatgacggcttagttgccaccagactcctcacagcccgggggcttgtaggcgatgaagctgatgagctgcacctgcctgacgttgtcgaagccgatgatacggacgaatgcatcanggtacgccttcttggcctnctcgagctcttgagcacctgggtggcgtaagtgacccgaacatgggcagcttcacatggtccagacctgccatcgagatncggggatctgggtctac

SEQ ID NO: 403401 - DNA, 439 bp, Oryza sativa nipponbare
tcgcgaacgcacaagggaggtgcacgtcaatatattagagaatattgctttaattattgatctcgttacaacttaatatctgaagagatcatctcaaatctctatttacagtatatatcaattgcttgatttaggtagttagtcacttgtgcttctggatcatttccctaacctcatccatcacaagccatgctttatggcctcctatcacttccgctgcccattctccatccttccataactggatagtgggcattttagttatattccctcttttcaccacagtctgtggaactttgttgacatcgacaaagtagaacctgactcctggaaattctcctgctatcttctccagtctgggcttcagatatatgcatttccgacaccaactagccatccagtcgatgatgatgggctgcttgttctcgcggacgcgtgg

SEQ ID NO: 403402 - DNA, 469 bp, Oryza sativa nipponbare
atacgcaaaactttggagtaaccaaatcgattcacaggccacacatacaggtagtatacagattcgtctacacacaaggttattgcagaggcaaaacacgaggtatgtatatcaaacgctctagaaaagattcatgtgatgaaatacatgatgaaccacgtatgttctcaaggtaaaattaattaatgcagtatagttttaactttgtccatcgatctcaacctgtaactgtgacgacacactggctacagtgccctcgaggtactagcagtatagcagtagctgtagtacgtagcagcagcagcagcaggttcactgtcttgattggattggatcggattagtagacgtagttcttgacgaacatgccctccttggcctcggcggcctcgccgtcgctggtgtacttgccgagctgcgccagcgagttggccttggcgcggaggagcagcgcgtcctgcgccgccttc

SEQ ID NO: 403403 - DNA, 407 bp, Oryza sativa nipponbare
aaacaggggggcatttttatttcgagggaaggacgcaggactgaagaaacttaaaagtgtccctgatgtgtttcatcatccgttctgtcactcacaaatggactcaaaatacagacccagatcaagtgtggtgttcaaccaaaatgttaactggcgaatggaaggtggcgtggttttctagaaactgcagatttgtacagaccaatccccagacagaagaaatacaagatcaagactggtgggcagcaaacaaattttgctgggatttatttgccccgattcatcgtccaagttcttcataccttcagggccaacttcttagcagcaagaacctccgcttcgagggttggctcccaaagaattggggtttcagccaatagcgctgtcacgacgtaccggacgcgtgg

SEQ ID NO: 403404 - DNA, 415 bp, Oryza sativa nipponbare
tacacaatcagggaagggaacatacgcaaactgatcttatcacaatgatagccgatgacaatggaaagagaaatctaagatcaagcggatcattgacggaggaaacaagacattggctgaaccacaacacctacaaagggcgccaacaaggagcgctattcgttatgggaccagagaaaatgtaaaacatcacagatgtgaagggaaactgaataattctagtagacaatgatgatgatggataggctccttaggacgcccgccgcccttagcgtgttgctgctgccatcttgtccactggaaggctcactcgtcatcggcttcatcctcttcgcgtgcctcgtcggcatactcatcattgacctcggacttggacttgtcagattcctcctcggcggcctcctcttgctccttg

SEQ ID NO: 403405 - DNA, 501 bp, Oryza sativa nipponbare
gcaacacaactgcgtggaactgatcacagacggcctggagttcattcctgcttgaacaacaaaggtacagagatcatactacacacccagaacactgaagcacttgccatgcaggcagtacttctcttttatgaaaagatgatacagatcagttgcaactatgttacaccaccaccatgtacaacgaccggacaccgaaacatcatcctagtgcagagctgtgaggattgcagtggcgctctcaaccttgaaggttgcaccacagatctcttcttcatttgcaggaacagcagtcaccttgctctttgggttctcatagcacttcaagcctccaagagcattggaatagaagcaaccttgtgggaaaggtgcaagtgacttgccacatgatcctttaagcaggtcaatgtcgttagagaaggcaacagatccatcagcagttatcccccagaacagaggcaccttgccctctggatcagaggccacaaggagagaagaggg

SEQ ID NO: 403406 - DNA, 430 bp, Oryza sativa nipponbare
gggacaatagtagaagctacaaactaacattttggaagcacattatcaacctttaaatcaacataaccaaaaaaaaaaatctcaaaattggcgccttggctttgattctgcaactgtaactcggatctgcctgccgtccaggtcaacgccgtcaagatttgatatggcattgtataccaactcattgatctcattgacggaggtttgcaaatgagcaggatagagatccaggtcaggattctttgcgatctcgttgaactcagtgttgagcattcggatgatctttgagctctcattgttcaccacagtcttgagctgcttgtcccacagaaccggaacagttggtttcccgatgtaatttgggctggcaatctcatatagctccctgatggtcttggctccgttgaaaggatccgggtctgcgccgggc

SEQ ID NO: 403407 - DNA, 315 bp, Oryza sativa nipponbare
ggactaggcaaaccacacgaatacacgattgattaatttcactgagaatagcacgggtacatcacatcacacaaatttatacgttgatacacgcatagtcgccgaagcgaccagctgcttaattaatcgataacacacgggtttaattcagcaataatcagcacacacacaaaccacactcatatggggggtttttattggggactaattaagggaggtgactcgccggcggcgagtgttcggttgcttcgtgacttcacttgccgcacttgcagtcggtgcaggagcagctggtgccgcacttgcagccgccgt

SEQ ID NO: 403408 - DNA, 477 bp, Oryza sativa nipponbare
acccggggtataaatatatatagccggagcttccatatatttcattcacatatgcctcacccaacaacatatagtcgtagcagataccactcttacatcaagtcagagagagatcaggtgaaacaaaaacaaaagcagagcacggccggtaaaatcaaaagacgatgaacaaactgggaacacacgaaacaaggtgggagacatcatcgaatcagagatgaacaattaaacaaggctatatatgacgatgacggcttagttgccaccagactcctcgcagcccgggggcttgtaggcgatgaagctgatgagctgcacctgcctgacgttgtcgaagccgatgatacggacgaatgcatcagggtacgccttcttggcctcctcgagctccttgagcacctgggtggcgtcagtgcacccgaacatgggcagcttccacatggtccagtacctgccatcgtagtatccgggggatct

SEQ ID NO: 403409 - DNA, 498 bp, Oryza sativa nipponbare
aatgtaatcaaaactgatttttctttccataacagagacgacagccccaaatacttgacttgtccactatgattttcttgacaaacttaggtaccagataacattgagaaaagaaaaagaaaaacataacataccacctataacttaccatacttttaacctaacaaaattactctccgaatgctaaatgtgcgttggagttcttatgggcggaactgaaatctcaagggcacgagcagattgattttgctcggggaaaaaacccaagaaatctcctcccaagcacccacactcacaggcccatcacaccaacatgaataactttagcaagctcttaattcacacgcagaaatccacctgccggaacatatcaccacggccgaagtcgtagccgctgggtatctctgggaaatcctcgcagaagtcatcaccgatgtcgtcgaggtcgaggtcatcttcttcagcgaagtctccaagcagcatgtcctcagtgaagag

SEQ ID NO: 403410 - DNA, 472 bp, Oryza sativa nipponbare
gggtcgacccacgcgtccgcccacgcgtccgcccacgcgtccgatgcggtgaatgagtgggagtcccaccgggaatggtcaggctcatatgaagatggtatctttagaaataactgaaaataatttattaataaacgtttaactatatttttcatggttttaaaccgatgctgaaaaatatactactgcaacgataaacaaaaacactgaaatcaaacttaaaattaagtttcagaattcaatttttggttgggctaataaactaacaagcaacgagggtagaattgctactaggtattctggaaaaaaagagagagaaagaattgctactagtcatggacaatgttattaaaaaaaatattcatacatttttatatgaaagcaaatggcatccatcataattcttcaaaaggtgtaattctgacatgcatattatgcgtagttctgtagatttgacaattctacatcagct

SEQ ID NO: 403411 - DNA, 395 bp, Oryza sativa nipponbare
ccacgcgtccgaagaaagcataagcaacacaagggattaactcatcactcacttagctaattaaatcttcgaccatgtcggacaagtgcggcaactgcgactgtgctgacaagagccagtgcgtgaagaaaggtaccagctatggcgtcgtcatagttgaagccgagaagagccacttcgaggaggtcgccgccggcgaggagaacggcggctgcaagtgcggcaccagctgctcctgcaccgactgcaagtgcggcaagtgaagtcacgaagcaaccgaacactcgccgccggcgagtcacctaccttaattagtccacaataaaaaccacccatatgagtgtggtttgtgtgtgtgctgattattgctgaattaaacccgtgtgttatcgatt

SEQ ID NO: 403412 - DNA, 277 bp, Oryza sativa nipponbare
ccacgcgtccgaaaaaccaacccaaccgccgccgcatcgccctcgttagaacgatggccgcgtcggcgctgcaccagaccaccagcttcctcggcaccgcccctcgccgggatgagctcgtccgccgcgtcggcgactccggtggccgcatcaccatgcgccgcaccgtcaagagcgcgccccagagcatctggtatggacctgaccgtcccaagtacctgggcccgttctcggagcagacgccatcgtacctgaccggagagttcccgggagacta

SEQ ID NO: 403413 - DNA, 347 bp, Oryza sativa nipponbare
cgcgtccgcgcaaagaagcgagagagcttggtgagctgcagagatggccccctccgtgatggcgtcgtcggccaccaccgtcgctcccttccaggggctcaagtccaccgccggcatgcccgtcgcccgccgctccggcaactccagcttcggcaacgtcagcaatggcggcaggatcaggtgcatgcaggtgtggccgattgagggcatcaagaagttcgagaccctcttctacctgccaccgctcaccgtggaggaccttctgaagcagaacgagtacctgcttcgttccaagtgggggcccctgcttgaggtcaacaagggccgattcggcttccgggagaacc

SEQ ID NO: 403414 - DNA, 485 bp, Oryza sativa nipponbare
ccacgcgtccgtactactactagccagtaagctagctaactaactacgtggctatggcccccaccgtgatggcctcctcggccacctccgtggctccattccaagggctcaagtccaccgccgggctccccgtcagccgccgctccaccaactcgggcttcggcaacgtcagcaatggcggaaggatcaagtgcatgcaggtgtggccaattgagggcatcaagaagttcgagaccctatcgtacctgccaccactcaccgtggaggatcttttgaagcagatcgaggacctgcttcgatccaagtgggtgccttgcctcgagttcagcaagggtggattcggctaccgtgggaaccacaggtcttccgggtactacgatggcaggtattgaaccatgtggaagctggccatgttcggctgcaccgatgccacccaggtgctcaaggagctcgaggaggccaagatggcctaccccgatgccttt

SEQ ID NO: 403415 - DNA, 459 bp, Oryza sativa nipponbare
ccacgcgtccgcaaagagggcgcgtccagcactacttcctcaacagaaaccggcaaggtgtccaagttgcagattgctggtcttgtggcagatgtcttctccaacgtggcagtcgcggagaacaaggttgtccaagtttccactagctcatcagtaacatccaagaccatagaggaggctttctcagctatccctgaggacagtagaaggaaggagtaccaagatgctgttgcaaaagcacaggcagaagaggagactcgggcttcgcagcgaactcgtcaggcagaagaggacactactacggtcaaagccggggggaagaagacgctctctgatgaggcagctgcaagtgaggcgcaagcttctctggagaaccttctgagcagagccaaagggttcggcacggacttctcatgggagaagctcagcacacaacttgcaggaggggccactcaggac

SEQ ID NO: 403416 - DNA, 400 bp, Oryza sativa nipponbare
ccacgcgtccgcgaaactcagctgcaaggagaaggagaaggtaggctccagccatggcttcccagctctccgccgccacatccgtgccgcagttccatggcctccggacctactcctctcctaggtccatggtgacgctgccatcgttgaggatgagcaagaagaggtcccagggcatccggtgcgactacatcggctcagccaccaacgttatcatggtgacgacgacgacgctgatgctgttcgcggggaggttcgggctggcgccgtctgcgaacatgaagtcgacggcggggctgaagctggaggcgcgcgactctcggctggagaccggcgaccccgccgggttcacgcttcgcgacacgctggcctggggcgccgacggatacattatgggcat

SEQ ID NO: 403417 - DNA, 226 bp, Oryza sativa nipponbare
ttccacgctcgacgtcacgcgtccgagcacgaggcgaagaaggacccggagaacgcgcacaggcacaagatcacggaggagatcgcggccactgcggctgtcggcgccggcggctacgccttccacgagcaccacgagaagaagaaggaccacaagagcgccgtggagtccaccggcgagaagaagcatcacctcttcggctgatcgacctcatcacaacgtttcc

SEQ ID NO: 403418 - DNA, 481 bp, Oryza sativa nipponbare
tccacgcgtccgtccacgcgtccgcccacgcgtccgcaaggataccttctggccaattgtcaagtcggcagggcccaaggtcgtcgtcctcgacatgtacacccaatggtgcggcccttgcaaggtgatggcaccgaaattccaggagatgtccgagaaggaccaggacgttgtgttcctcaaactcgactgcaatcaagacaacaagtctcttgcaaaggagctgggcataaaggttgtgccaacattcaagattctcaaggacgggaaggtcgtcaaggaggtcacaggtgccaaactagatgaattaatccaagcgatcgagacggtgaagtcaagctgaggaatgccctgaaaatttgcatcagttagcttgttgtcactagtgtacgttatgggtgaaccaccagttattgaagtgggtattcgacatggagacaaacagttaatctagttcttctgcctatgatgatttatcaag

SEQ ID NO: 403419 - DNA, 428 bp, Oryza sativa nipponbare
ccacgcgtccgggattgttcacagagacgtaaaaccccaaaatgtgatattttcggaaggatctcgtacgttcaaaattattgatcttggagcagcagctgatttgcgagtgggcatcaactatattcctagtgagttccttttagatccaaggtatgctgcaccggagcaatatataatgagcactcaaacaccatctgctccctctgctccagttgcaactgctttatctccagtcctttggcagttgaaccttcctgacagatttgacatatatagcctgggccttatattcttacaaatggcatttccatcattgagaacggacagcagcctcatacaatttaaccgccaactgaagaggtgcaactatgacttaaaagcttggaggaatttggtagagccacgagctaccccggggcttcgga

SEQ ID NO: 403420 - DNA, 482 bp, Oryza sativa nipponbare
cgtccgcaagaagtactctagcaacgaaggagagagcttggtgagctgcatatattgccccctccgtgatggcgtcgtcggccaccaccgtcgctcccttccaggggctcaagtccaccgccggcatgcccgtcgcccgccgctccggcaacttcagcttcggcaacgtcagcaatggcggcaggatcaggtgcatgcaggtgtggccgattgagggcatcaagaagttcgagaccctttcctacctgccaccgctcaccgtggaggaccttctgaagcagatcgagtacctgctccgttccaagtgggtgccctgcctcgagttcagcaaggtcggattcgtctaccgagagaaccacagatcccccggatactacgatggcaggtactggaccatgtggaagctggccatgttcgggtgcactgacgccacccatgtgcttaaagagctcgagggggccaagaaggcgtaccctgatgca

SEQ ID NO: 403421 - DNA, 194 bp, Oryza sativa nipponbare
  unsure (1)..(194): unsure at all n locations
ccacgcgtccgcggacgcgtgggcccggccgacgtcgccatggtgcggatgcaggccgacgggcggctcccgctcgccgagcgccggaactaccgcagcgtcggggacgccatcggccggatggcgcgcgacgagggcgtccgcagcctgtggcgcgggtcgtnnntgacggtgaaccgctccatgatcgttac

SEQ ID NO: 403422 - DNA, 85 bp, Oryza sativa nipponbare
ccacgcgtccgcggacgcgtgggcggacgcgtgggcggacgcgtgggccgtcacacgacacgacgcatcaatggcgctgggctcc

SEQ ID NO: 403423 - DNA, 490 bp, Oryza sativa nipponbare
ccacgcgtccgacgccccccgctaccccatcccctccgccaccctcaccggccgccgcgagaaggtggtgattgccaaggagaacaacttcaagcagccaggggagaggtaccgttcatgggatccggcaaggcaagaccggttcatcaagagatggatcgacgcactctctgaccctcgcctcacccacgagatcaggagcatctggctctcctactggtctcaggctgacaggtctctgggtcagaaactggcgagccgtctcagcgcgaagccgagcatgtaaggagatcgatcagcgttgcaatctgcttcagtcacggaaggcctcagcctcactctatcggataataattgctactcatactctagcaataccgatcgatcgagtctattttggaaagaggacatatatgatttctatcaccgcacaattcgtgtaccaccatcatgtaataatctgtaacctgaagacacgtttctcctgata

SEQ ID NO: 403424 - DNA, 485 bp, Oryza sativa nipponbare
  unsure (1)..(485): unsure at all n locations
ccacgcgtccgcctgcttcttctgaaggcggatgcgaccgtatccattgttcactcccggaccccaaaccctgaaagtattgtccgtgaagcagacattgtcattgcagcggctggccaggctatgatgatcaaaggagactggatcaaaccaggcgctgctgtcatcgacgttgggacgaactccatcagtgacccaaccaggaaatcggggtacagactcgtcggcgatgtggatttcgcagaggtgagcaaggttgctggtcacctgactccagtcccaggtggcgttggccccatgacggtggcgatgttgctgaagaacacggtggatggagcgaaacgtggtatagttcagtaaagtttccatcttgtatgctgtaactgcaaggatgaagttgtnattgagtgcatttctggacaaattcggtctcaattttgttgtgtggagggtatttcgagaataataagaataagtttgctgtc

SEQ ID NO: 403425 - DNA, 244 bp, Oryza sativa nipponbare
ccacgcgtccgcggacgcgtgggcgaatccagcagcagaagcagcagcagcagctcagccgccgccgatggcgtccacgatcatggccccaacctcccgcgtcctcgccgcctagacccccttcctcggccatccccgcccctccaatgccctcgtccgtgacatcgtcgtcgtcgccaccggccgcatcaccatgagcaaggagctgtggttcgggccggatagggtgatgtacctggggcca

SEQ ID NO: 403426 - DNA, 173 bp, Oryza sativa nipponbare
ccacgcgtccgctaatttatcacacgtgactggatcagtggccacgaccaccatggcgctgtccaccgcggtgatggtccgcgcggtgccacttatctcctccgcgctattgggcgaggggcggatcaccatgcgcaagaccggatctaatcccaagccgacgtagtcgtttt

SEQ ID NO: 403427 - DNA, 348 bp, Oryza sativa nipponbare
ccacgcgtccgcaaaaaaccaacccaaccgccgccgcatcgccctcgttagaacgatggccgcgtcggcgctgcaccagaccaccagcttcctcggcaccgcccctcgccgggatgagctcgtccgccgcgtcggcgactccggtggccgcatcaccatgcgccgcaccgtcaagagcgcgccccagagcatctggtatggacctgaccgttccaagtacctgggcccgttctcggagcagacgccatcgtacctgaccggagagttcccgggagactacgggtgggacacggcgggactatgggctcgttcctgaaacatattggtgaaggagcgaaccgtgtggtt

SEQ ID NO: 403428 - DNA, 433 bp, Oryza sativa nipponbare
ccacgcgtccgcccacgcgtccggcttttcttggttatggtgatgtggtccagagatgcttgatagctcgatctcttctgttcaactttggcatccaggcaactgttgctaatgcgagattttgcaagccacttgacattgatctgataagaatgttgtgccagcaacacgatttcctaatcaccgtggaagaaggaacggttggtggttttggctcacacgtctcgcaatttatttcactcgatgggttgcttgatggcaaaataaagtggcgacccattgtactaccagacaggtacatcgaacacgcttcgctcacagagcagctcgacaatggctgggttgactgctcatcacatcgcagcaaccgcactgacccttttagggcgacaccgagacgcacttttgttgatgaaataagaaggaaaaatga

SEQ ID NO: 403429 - DNA, 378 bp, Oryza sativa nipponbare
acccacgcgtccgcacaaagtgaggttgaacgccggagatgttattggggatattcttttgaaaatcttgcaactgagaattccattgatgaggatggaagaggtattgatgcaaatgtagagttctgtgctgtaataaaaacgaaattgggtgcacatcgtattatcatgggtgctgagatggactgctgtgacgcaactgatgatggtaggcggttctacgtggagttgaaaacaagcagagagctggagtaccatacagtggaaaaatttgagaaagagaagttgcttcgattctggattcaatcatttattgctggcgttccatatgttgttgtaggatttaggaatgatgcttgtgtccttatacggactgag

SEQ ID NO: 403430 - DNA, 155 bp, Oryza sativa nipponbare
ccacgcgtccgctcaagttcgacatcatccccaccgtccacctctaccgtcacgacccgcgcgagctccccggactcgcccgcatcggcgagcgcgagtggtacttcttcgtcccccgcgaccgcaagcaggccaccggcggcggctgttttatg

SEQ ID NO: 403431 - DNA, 313 bp, Oryza sativa nipponbare
ccacgcgtccgcccacgcgtccgcccacgcgtccgcccacgcgtccgctgagctgaacaccgcatcagcagcagcaagcagctaatcgcgcacgtacgcacaccgcgacccggggcgagatggcgcagtcgatgctggtgtcgggagccaatggcacggtggccgccgcgagcaccagcaggctgcagcccgtgcggccgacgccgttctcgcggctcgtgctgtcgcagccgtcgtcgtcgctggggcgcgcggtgttctgtaagactgtggggctgttcggcaggtccaataccaaggccgcgcccgcatg

SEQ ID NO: 403432 - DNA, 138 bp, Oryza sativa nipponbare
  unsure (1)..(138): unsure at all n locations
gccgtaanncccgnnncgacccacgcgtccgcactcctctcctcctcgtctaccttacctagcatcagcagctagctagcttaattagctatagcagccatgggggcgtcggcactgagcagtcaggtccggttgccg

SEQ ID NO: 403433 - DNA, 385 bp, Oryza sativa nipponbare
ccacgcgtccgcccactcgtccgcccacgcgtacggttcagcaaggtcggattcgtctaccgtgagaaccacagatcccccggatactacgatggcaggtactggaccatgtggaagctgcccatgttcgggtgcactgacgccacccaggtgctcaaggagctcgaggaggccaagaagggtaccctgatgcattcgtccgtatcatcggctttgacaacgtcaggcaggtgcagctcatcagcttcatcgcctacaagccctcgggctgcgaggagtctggtggcaactaagccgtcatcgtcatatatagccttgtataattgttcatctctgatacgatgatgtctcccaccttggttcgcgtgttcccagtttgttcatc

SEQ ID NO: 403434 - DNA, 350 bp, Oryza sativa nipponbare
ccacgcgtccgtcctcttcgaggagactctgtaccagtcaactgtagatggcaagaagattgtcgacatcctcactgagcagaaaatcgttccaggtatcaaggtcgacaagggtcttgtgccccttgctggctccaacaacgagtcatggtgccaaggtctcgacggccttgcctcgcgcgaggcggcatactaccagcagggcgctcgcttcgccaagtggcgcactgttgtcagcatccccaacggcccatctgaactcgccgtgaaggaggctgcctggggccttgcccgctacgccgtcatttctcaggacaacgggctggtgcctattggtgtgccttgaatcc

SEQ ID NO: 403435 - DNA, 213 bp, Oryza sativa nipponbare
ccacgcgtccgacaccctccatttcttgcttccatttgtcttgcttggctcttcactctccccctgttcctgcaggggtcaggcactgcctgctacaagagtggtgtaggtgattcggctagctcagcgcgaagatgggggagatcaccaatgtcacggagtaccaggccatcgcgaagcaaaagcttccgaagatgatctacgactactatg

SEQ ID NO: 403436 - DNA, 333 bp, Oryza sativa nipponbare
ccacgcgtccggcagcacgagagaaagccctggcgctaaaagaggaggaggccgtggagacggaggaaggcggagcggcggcatggcaatgctccgccactcgaccacccgctcccttccaggggctcaagcacaccgccggcatgcccgtcgtccgctcgctccggcaactccagcttcggcaacgtcagcaatggcggcaggatcaggtgcatgcaggtgtggccgattgagggcatcaagaagttcgagaccctcttctacctgccaccgttcaccgaggaggacctcctgaagcagatcgagtacctgcttcgttccaagtgggttgcc

SEQ ID NO: 403437 - DNA, 328 bp, Oryza sativa nipponbare
ccacgcgtccgggcaggatcaggtgcatgcaggtgtggccgattgagggcatcaagaagttcgagaccctctcctacctgccaccgctcaccgtggaggacctcctgaagcagatcgagtacctgctccgttccaagtgggtgccctgcctcgagttcagcaaggtcggattcgtctaccgtgagaaccacagatcccccggatactacgatggcaggtactggaccatgtggaagctgcccatgttcgggtgcactgacgccacccatgtgcttaaggagctcgaggaggctcaataaggcgtaccctgatgcattcatccgtatta

SEQ ID NO: 403438 - DNA, 363 bp, Oryza sativa nipponbare
acgcgtccgattttttgacatgtaggatttagcacggtgttcgagacgtgctgcgggtcaggcggcggcaagttcaactacaacaacaacgcgaggtgtgggatgtcaggcgcatcagcgtgctccaacccggcgtcgcatcttagctgggacggcatccacctcaccgaggcagcttacaagcagatcactgacggctggctcaacggcccgtactgtagcccggtcatcctccacagctaaggcaaaatgactggaaagaacgagccattagttaatttattactttattattaaggctggtgtgttaataataagcgggatttaaattaaaggggaattggttgggaccttgatttttca

SEQ ID NO: 403439 - DNA, 220 bp, Oryza sativa nipponbare
ccacgcgtccgcccacgcgtccgctagccagtaagctagctaactaactacgtggctatggcccccaccgtgatggcctcctcggccacctccgtggcttcattccaagggctcaagtccaccgccgggctcctcgacagccgtcgatgcaccaactcgggctatagctgcgtcagcaatggcgggaggatcaagtgcttgcatgtgtggccaattgagg

SEQ ID NO: 403440 - DNA, 493 bp, Oryza sativa nipponbare
ccacgcgtccgcccacgcgtccgcccacgcgtccgggtggattgggaggacctcatcctcgaggacaccgtgccgctcgtcggcttcgtccggatgattctgcactccggcaagtatgaaaatggtgatcgactgagccctgaacatgaaaaggcaattttggaacgattgcttccttatcacccacaatatgagaagaaaattggatgcggtattgactaccttacggtagggttacatccagaatttgagaactcaagatgtcttttcatagttaggaaggatggtgagcaagttgatttttcattctggaagtgcatcaaaggtctcatacgacaaaagtaccccatgtatgcagatagtttcattctcagacattttcgcaggaggcaagattaccgaattagtgactcgtaaaaatatttcttggaacatttctctgattttgatttggcccatttgcccttaatgccctgtgatcttgcatacgttc

SEQ ID NO: 403441 - DNA, 395 bp, Oryza sativa nipponbare
ccacgcgtccggaagaatttggtgtgattgctagctataaaggtcaagggagaattgcacagcctggcttcaaaaatccccggtgggtggatggtgagctattggtgctcaatggcaagagcacgatcccacaccttggaggtgcggagcttggtttcctgtacagcgtgcctgagcagagtttcttggtactctttgaccggcttaaacttccagagtgatgagattatgctgaatcgagctgttctcacatgcaaattgcatgagtacagatagaagctgacacagtttcaagagaaacgtatagatgtcccgtcatcttcctgaaatcctgagatgcctcaacttctttattagtcagcttctacttgacaggagcttgactgtttgagctt

SEQ ID NO: 403442 - DNA, 279 bp, Oryza sativa nipponbare
ccacgcgtccgctttctgggaaccagcagcctgtaagagttgaaatcaccgaagctgcaatggaagtgggtgctgaaaaactttctgagctggtgaacgacgcctacaaggatgcacatcagaggagtgtccaggcaatgaaggagaggatggctgatctggcacagagcttaggaatgccagcaggccttggtgatggactcaagtgatagtgtggtacatgaatgcttctaaataaaaaaaaaagagtctctcacttgcggatactagctgtattga

SEQ ID NO: 403443 - DNA, 148 bp, Oryza sativa nipponbare
cccacgcgtccgggagagtaaagaagatgttgggagtgttcagcggcgacgtggtggaggtgccggcggagctggcggccgccggcagccgtactccttcgacgaagacgcggtcttttgagctggtcagtcgcttcctcggcggctc

SEQ ID NO: 403444 - DNA, 282 bp, Oryza sativa nipponbare
ccacgcgtccggaagactggcctgtcgttgattcttggaatctatgatgagccgatgaccccaggccagtgcaacatgattgtggagaggcttggcgattatctgatcgagcagggttgctaagtcctcaatatgctattttggtcatttgggactaagtttactccctatttggttcagtaatgtgagcttgcatctgcttgcgtatcacatgatatggagtgaataattcagctccggatagttgtatggtgaacgtgtttaaaattatttacctgtggt

SEQ ID NO: 403445 - DNA, 192 bp, Oryza sativa nipponbare
ccacgcgtccgcccacgcgtccgcccacgcgtccgaaaaataaaaaaaaaaaaagaataaaaaaaaaaaatagaggagagttattaataaacttgaagaatatagaaccaaaaaagggggggctccctttggggaccccagcctcctaacgcttgtgttcctatagctggttcttcaagcgtgggccgttat

SEQ ID NO: 403446 - DNA, 324 bp, Oryza sativa nipponbare
ccacgcgtccgcagaattcaaatttccgcagataaaagcatgcccatggcacaagatcttccacaagcgaatgcctcccgaagcaatagatcttgtgtcccgtctccttcagtattcgccaaatctgcgatgtactgcgctggaggcatgtgctcattcattttttgatgagttacgagaaccacatgcaaaactgccaaatggccgtcccgttccgcctctggtcaactttaagcaagaattagcaaatacacacccagagctcgtgagcaggctggtaccagaacatgcccagcggcattcaagattttaattcattggttt

SEQ ID NO: 403447 - DNA, 131 bp, Oryza sativa nipponbare
ccacgcgtccgctttgaggtgggttggcttctcctccccctctttaccttttcctcctcggttcggttccgtggttcgtctagggtttagtgggttgagatgtcattactttttttcttttctctcttttt

SEQ ID NO: 403448 - DNA, 443 bp, Oryza sativa nipponbare
ccacgcgtccggcgccgacttcctccggtccccgggcgcccagacccccgtcatcgtccgcttctccaccgtcatccacgagcgcggcagcccggagacgatccgcgacccgcgcgggttcgccgtcaagttctacacccgcgagggcaactgggacctcctcggcaacaacttccccgtcttcttcatccgcgacggcatcaagttccccgacgtcatccacgccttcaagcccaacccgcgctcccatgtccaggagtactggagggtcttcgacttcttgtcccaccaccccgagagcctccacaccttcttcttcctcttcgacgacgtcggcatccccaccgattaccggcacatggacggcttcggcgtcaacacctacaccttcgtcacccgcgacgccaaggccaggtacggtaagttccactggaagcccacct

SEQ ID NO: 403449 - DNA, 482 bp, Oryza sativa nipponbare
ccacgcgtccgcgcttggagtcactcagtgatctcagatcaactctataagcatgtcaacaatgtttgcgacttcaggttatcaccccgtagcaatgagtgtaaccatgtaatgggatacatatatgatcagtacgatatgatcgatattttcaatgtgtatgcacctaagtgcaacactgatgactcatccctcttttccacctcctacagtacagctgatatgaatgctaagaagaggcttaaaggcacgaggatgtactcagggtatgatccgtgctattcgtcacatattgaagattacatgaacaagatggatgtgcagaaatcacttcatgcgaatacgagtggattgatcaaggacagaaaatggagtatctgcagttattcaatattcgacatttacgacatcacggtcttctctgttctttctatttactctaagcttatcaaggctggcctacgaatatgggtctacagtgg

SEQ ID NO: 403450 - DNA, 401 bp, Oryza sativa nipponbare
ccacgcgtccgcccacgcgtccgcggacgcgtgggcgcactgaccgtggacactccgcgactgggacgcagggaagctgacatcaagaacaggttcgttctgccaccatacttgacactgaagaatttcgaaggcctggacctcgcagagatggacaagagcaacgattccgggctggcctcctacgtcgccgggcagatcgatcgcacgctcagctggaaggatgtgaagtggctgcagagcatcacgtcgctgccgatcctcgtcaagggcgtcatcaccgcggaggatgcgaggctggccgtgcactccggcgcggcggggatcatcgtgtcgaaccacggcgcgcggcagctggactacgtcccggcgaccatcagcgccctggaggagggggtcac

SEQ ID NO: 403451 - DNA, 429 bp, Oryza sativa nipponbare
ccacgcgtccgtgcacgtctacagcgccgctgcggactacaagaagaggcaggagatagatttcttcggcgagatctccggcatctcgcttagcccagacgacgagtcactgttcgtcggagtgtgcgaccgtgtgtacgccagcttgctgcactacagaatggtccactcctttggatacctcgactcgttcatgtagagagggaataaaagtggtgtttctgtatgtgataggccacccatctcggtggcgattctgatgtgcgtgttcagggaatgtatctgcctgttcaagtgcatgtttagtcaaaggctcaagcgtgcagcgtgatccttgccttgtgaatagttagctagtaaatcatagactgtatggaccaatactctctctgggcaataatgcagaagtaatctatatcttcggttgtt

SEQ ID NO: 403452 - DNA, 276 bp, Oryza sativa nipponbare
ccacgcgtccgcccacgcgtccgcaccacccacacattctcgaagaaggagaagaaggagaggagcagccatggcgtcgtcggtggcagcggcggcgagcacgttcctggggacgaggctggcggacccggcgccgcagagcgggaggatcgtggcgaggttcgggttcggcggcgggaagaaggcggcggcgaagaaggcggcgaggccgtcggcgccgacgacggacaggccgctgtggttccccggcgcggtggctgccgactacctggacgg

SEQ ID NO: 403453 - DNA, 375 bp, Oryza sativa nipponbare
ccacgcgtccgcggacgcgtggggtgctgatcttgctaacttgatagtatctgggcgtgttcgcaatggatttgcaatggtgagacctcctggccatcatgcaggggtgaaacaagccatgggtttttgtcttcacaataatgcagcagtggctgcattagctgcacaaagagctggtgccaagaaagtcttaatagttgactgggatgtccaccatggcaatggaacacaggagatatttgatggggacaattctgtcttgtacatatcattacatcggcatgaggatggaagcttctaccctggaactggggcagcaaatgaagtgggagttatggatggccaaggattctcagttcaatatacccttggagc

SEQ ID NO: 403454 - DNA, 212 bp, Oryza sativa nipponbare
ccacgcgtccgggcgctctcctccccgtgatagcccgcgcggcgccgtcgacctcctccgcgctcttcggcgaggcgcggatcaccatgcgcaagaccgccgtgaagtcccaagccggcggcgtttattgttatgtttttaattttttattataaatttttcttatttttattatttcttttatatttatttattttatatgtattttatat

SEQ ID NO: 403455 - DNA, 401 bp, Oryza sativa nipponbare
ccacgcgtccgcggacgcgtgggcggagagcttgcggtggaacgtgcaggcggagctggtgcactgccggtgggcgatgctgggcgcggcgggcatcttcatcccggagttcctgaccaagatcggcatcctcaacacgccgtcgtggtacaccgccggcgagcagcaatacttcaccgacaccaccaccctcttcatcatcgagctcatcctcatcggctgggccgagggccgccggtgggctgacatcatcaagcccggctgcgtcaacaccgaccccatcttccccaacaacaagctcaccggcaccgacgtcgggtaccctggtggtctgtggtttgaccccgtcggttggggcaccggctcgccggagaagatcaaggagctgttcaccaaggaga

SEQ ID NO: 403456 - DNA, 89 bp, Oryza sativa nipponbare
ccacgcgtccgcccacgcgtccgttcaggacaacgggctgttgcctattgtcgagcttgatatccttctcgacggtgagcatggcttcg

SEQ ID NO: 403457 - DNA, 339 bp, Oryza sativa nipponbare
ccacgcgtccgcccacgcgtccggccacgcgtgcgcccacgcgtacgaaaaaaccaacccaaccagccgctcgctatggacctcgttagaacgatggccgggtcggcgctgtaccagaccaccagcttcctcggcaccgcccgttgccgggatgagctcgtccgccgcgtctgcgactccggtggccgcatcaccatgcgccgcaccgtcaagagcgcgccccatagcatttggtatggacctgaccgtcccaagtacctgggcccgttttcggagcagacgccatcgtacctgaccggagagttcccgggagactactggtgggacacggtggggtta

SEQ ID NO: 403458 - DNA, 493 bp, Oryza sativa nipponbare
ccacgcgtccgtccacgcgttcgcccacgcgtccgcccacgcgtccgcccacgcgtccgcccacgcgtccggtcgcatcgcacttgtagctctcgacccccgcatctcatccctcctctcgcttagttcagatcgaaatcgcaaatggcgaagattaagatcgggatcaatgggttcgggaggatcgggaggctcgtggccagggtggccctgcagagcgacgacgtcgagctcgtcgccgtcaacgaccccttcatcaccaccgactacatgacatacatgttcaagtatgacactgtgcacggccagtggaagcatcatgaggttaaggtgaaggactccaagacccttctcttcggtgagaaggaggtcaccgtgttcgggtgcgtgaaccctgaggagatcctatggggtgagactggcgctgagtttgttgggagttcactggtgttttattgacaaggcaaggccgttgctcacctgaaggtggtgc

SEQ ID NO: 403459 - DNA, 437 bp, Oryza sativa nipponbare
cgcgtccgcccacgcgtccggcctacgacgatgagcttgtcaagaccgcgaaaaccattgcatcaccaggaaggggtatccttgccatggatgagtcgaacgcgacctgcggtaagaggcttgcgtcaattggccttgagaacaccgaggccaaccgccaggcttaccggaccctccttgtcaccgcaccgggcttgggacagtacatctccggtgctatcctcttcgaggagactctgtaccagtcaactgtagatggcaagaagattgtcgacatcctcactgagcagaaaatcgttccaggtatcaaggtcgacaagggtcttgtgccccttgctggctccaacaacgagtcatggtgccaaggtctcgacggccttgcctcgcgcgaggcggaatactaccagcagggcgctcgcttcgccaagtggcgcact

SEQ ID NO: 403460 - DNA, 457 bp, Oryza sativa nipponbare
ccacgcgtccgcccacgcgtccgaccaatggaagtattttgagtaccaattgaattttttgaaatgaattgaatgaagaagaattggaagaagaaaagttttctcaacacgagggaaaaggtcccttcgaaattgcattattgtaaggggattttgagtatttatctaaaggaaggaacaaatgaggataagagaaaattgcttctaatttgtccaagtgggatatatggcgtaatattcttccattttcatccgaaaggacttttttctatttctctattccactccatctagatctaagaaagaactcaatgcaatgaaattctactagtatagaaaaaagaggaatagataccaggtctcaaaccttgttatagaatttttccttcaaagaaaaagaaatatcatatagagtcagcgaataaagcggattcattaacaactcaatttacagatc

SEQ ID NO: 403461 - DNA, 516 bp, Oryza sativa nipponbare
gggtcgacccacgcgtccgcggacgcgtgggcggacgcgtgggcggacgcgtgggcggacgcgtgggcggacgcgtgggcaggtggctcaagctgccagtgaagatgcccgttctatttgtttgagggaatatggatcagctcctgagattgacatctatggagacccaacttttacatttccatatgtttcatcacatctacatctcatgctatttgaattggtgaagaactccttgcgtgcagtacaggaacgatatatgaattccgataaagatgttcctccagttagaattatcgttgctgatggggcagaggatgtaacttatcaaggttagtgatgaaggtggtggaataccaaggagcggtcttccaagaattttcacatatctatatagcacttgcaagaatccacctgatatggattgccctaatgaaggagtaactatggctggatatgggttttggtctttcaatcagtcgcctgtatgctcgatattttggtggtgacctgcaa

SEQ ID NO: 403462 - DNA, 301 bp, Oryza sativa nipponbare
ccacgcgtccgtgcatgcaggtgtggccgattgagggcatcaagaagttcgagaccctctcctacctgccaccgctcaccgtggaggacctcctgaagcagatcgagtacctgctccgttccaagtgggtgccctgcctcgagttcagcaaggtcggattcgtctaccgtgagaaccacagatcccccggatactacgatggcaggtactggaccatgtggaagctgcccatgttcgggtgcactgacgccacccaggtgctcaaggagctcgaggaggccaagaaagcgtaccctgatgc

SEQ ID NO: 403463 - DNA, 342 bp, Oryza sativa nipponbare
ccacgcgtccgcccacgcgtccgggttattatccttgcaagggagtctggtctgaggctcgagctttccgatattcccgtaaagagccttgtgccagaggcactgaggtcatgttcgtcagcagatgaattcatgcagaagctaccgtcctttgatcaggactgggacaggcaacgcgatgaagctgaagctgcaggagaagtgctgcggtatgtgggcgtggtggacgtggcgaacaggaagggccgggtagagctgcagaggtacaagagagaccaccccttcgcgcagctgtccggctccgacaacatcatcgccttcaccacgtcgaggtacaaggag

SEQ ID NO: 403464 - DNA, 346 bp, Oryza sativa nipponbare
ccacgcgtccgcccacgcgtccgcccacgcgtccggaggattctacaagctcccactggaagagaagcagaagtactccaacctggtgaacggcaaggatttcaggatcgaagggtacggcaacgacatggtcgtgtcagagaaacagatcctgaactggtgcgaccggttctaccacatcgttgagcctgagtcccggatagcccatagcctctggccaacacagcctccttctttcagagatgttctgcatgagtacactatgaggtgcagggagatcaccagccttgtgctcgccagattggccaggctgctcggcctgcgagagggctacttcgtcgacatg

SEQ ID NO: 403465 - DNA, 466 bp, Oryza sativa nipponbare
ccacgcgtccgactagccagtaagctagctaactaactacgtggctatggcccccaccgtgatggcctcctcggccacctccgtggctccattccaagggctcaagtccaccgccgggctccccgtcagccgccgctccaccaactcgggcttcggcaacgtcagcaatggcggaaggatcaagtgcatgcaggtgtggccaattgagggcatcaagaagttcgagaccctatcgtacctgccaccactcaccgtggaggatcttttgaagcagatcgagtacctgcttcgatccaagtgggtgccttgcctcgagttcagcaaggttggattcgtctaccgtgagaaccacaggtctcccgggtactacgatggcaggtattggaccatgtggaagctgcccatgttcggctgcaccgatgccacccaggtgctcaaggagctcgaggaggccaagaaggcctac

SEQ ID NO: 403466 - DNA, 352 bp, Oryza sativa nipponbare
ccacgcgtccggtaggtagaaagattaactggatgaaggcagggatcactgaatgtgatctggttatgacggttagtccacattatgtcaaagaactcgcttctggcccagataaaggtgttgaattggatggcatccttcgcacaaagccccttgaaactggaattgtcaatggcatggatgtttatgaatggaatccagcaacagatcagtacatcagcgtgaaatacgatgcaacaacggtaactgaagcaagggcactcaataaggaaatgctacaagctgaagttgggttgcctgtggactcgagcattcctttaattggttttggtgggccgtctggaaaagcaaa

SEQ ID NO: 403467 - DNA, 269 bp, Oryza sativa nipponbare
cggtcgacccacgcgtccgcccacgcgtccgagcatctagctagggagagaaaggaagagacgagaggagagagatggccactgcttatgctcccatggcgagccagctgatgaagagctgcttggtgtgctccaagccgagggggctagctgttgcttttatgacacggaggccctgtttgacagttaaggccattcagtctgagaagtcaacgtaccatgtggtgaatcctatcttttggtgaccctttcatctttatttttgtata

SEQ ID NO: 403468 - DNA, 395 bp, Oryza sativa nipponbare
aatggatgacacacgggtttaattcagcaataatcagcacacacacaaaccacactcatatgggtggtttttattgtggactaattaaggtaggtgactcgccggcggcgagtgttcggttgcttcgtgacttcacttgccgcacttgcagtcggtgcaggagcagctggtgccgcacttgcagccgccgttctcctcgccggcggcgacctcctcgaagtggctcttctcggcttcaactatgacgacgccatagctggtacctttcttcacgcactggctcttgtcagcacagtcgcagttgccgcacttgtccgacatggtcgaagatttaattagctaagtgagtgatgagttaatcccttgtgttgcttatgctttcttcggacgcgtgg

SEQ ID NO: 403469 - DNA, 481 bp, Oryza sativa nipponbare
gaatgcgatcatcccttggatgcggcctgcggcttacattaaatctcgatccaaagaagcaaagatgatgacagacagaaattaattaagctagaaatctcctcgatcgatcacacacacacacacaattaaggtacatacatacatgcactgctgcaactgcaactgcagggtcggtgcgtggctactacaagtgtacacatggtacgttggttggcaccatctcgatcgtgtcgttgtgctcacttgccggggacgaagttggtggcgtatgcccaggcgttgttggcgacggggtcggcgacgtggtcgaagaggttctcgatggggcccttgccggtgacgatggcctggacgaagaagccgaacatggagaacatggcgaggggggcgttcttgaactccttcaccttgagctcggcgaaggtgtcagggtcgtcggcgaggccgagcgggtcgaaggcgccgcctgggtacacct

SEQ ID NO: 403470 - DNA, 521 bp, Oryza sativa nipponbare
aaatatatatagccggagcttccatatatttcattcacatatgcctcacccaacaacatatagtcgtagcagataccactcttacatcaagtcagagagagatcaggtgaaacaaaaacaaaagcagagcacggccggtaaaatcaaaagacgatgaacaaactgggaacacacgaaacaaggtgggagacatcatcgaatcagagatgaacaattaaacaaggctatatatgacgatgacggcttagttgccaccagactcctcgcagcccgggggcttgtaggcgatgaagctgatgagctgcacctgcctgacgttgtcgaagccgatgatacggacgaatgcatcagggtacgccttcttggcctcctcgagctccttgagcacctgggtggcgtcagtgcacccgaacatgggcagcttccacatggtccagtacctgccatcgtagtatccgggggatctgtggttctcacggtagacgaatccgaccttgctgaactcgaggcagggcacccac

SEQ ID NO: 403471 - DNA, 521 bp, Oryza sativa nipponbare
taaccaaactgtaaaataaaaatatatagcatattatatattgatatatcatcaacatagcccaaaacaaagctgcatactattattataggcagcaatccaccagcgcgatgcttgatcttagcttagttgccaccagactcctcgcaacctgggggcttgtaggcgatgaagctaatcaactgcacctgcctgacgttgtcgaagccgatgatacggacaaaggcatcggggtaggccttcttggcctcctcgagctccttgagcacctgggtggcatcggtgcagccgaacatgggcagcttccacatggtccaatacctgccatcgtagtacccgggagacctgtggttctcacggtagacgaatccaaccttgctgaactcgaggcaaggcacccacttggatcgaagcaggtactcgatctgcttcaaaagatcctccacggtgagtggtggcaggtacgatagggtctcgaacttcttgatgccctcaattggccacacctgcatgcacttgat

SEQ ID NO: 403472 - DNA, 405 bp, Oryza sativa nipponbare
taagcgaacaattctcacctgcagggaatgttatacggttttgcagccaattttatacaactgtcactcattcactttccaagaatacaccaagagcttcatagatatagcatacaaaagattaagaaaaatggcagagtctgcattagctcagtcctcatccacaaagattgtttcttgcttgaagagtcccccaaacacgggcctcacatccggcttggattccggctgctttggtgttggtcttgtcttctgcgccgcgggcttcacaacagctctctgtggtgccagcttctttgcttttgcctggcctctcacggtggcgatctgcgcttttggttccacctcgtctgagtcctgagtggccactcctgcaagttgtgtgctgagcttctcccatgagaa

SEQ ID NO: 403473 - DNA, 511 bp, Oryza sativa nipponbare
ttttaagctagataagcactgattccacgcacaatttacatgatcattacatcgtccatcacacaggcactcatgcatcgattacacataggagtattgattcgtgtgactagcttaatgaatttgattagccgatgatctggtccaggacgccgatgttcttgaggccgaggacgacgccgacgcccatgatgtggccgacggcgccgcaggccagcgtgtcggcgagcgtgaacccggcggggtcgccggtctgcaggccggagtcgcgcgcctccagcttcagccccgccgtcgacttcctgttcgccgacggcgccagcccgaacctccccgcgaacagcatcagcgtcgtcgtcgtcaccatgataacgttgggggctgagccgatgtagtcgcaccggatgccctgggacctctttttgctcatcctcaacgatggcagcggcaccatggacctaggagaggagtaggtccggaggccatggaactgcggcacggatgtggcggc

SEQ ID NO: 403474 - DNA, 389 bp, Oryza sativa nipponbare
ttcgataaatattggtgcagttgtacaaagtacagataaaaatacattgatacatgacacggagagagccatgcacaccacttatttggacacacagagggcaaggctgcagagaaaatcaagcaacacaagctgaactcacggccccacctgtcagcctctcactggtcgaggccggagactcttgtgaaaaacagcaacaccacgcatgcagaagaagacaaattattacacacacaaatcgacgacacggcggccggcgacgtacggcgaggtcgtcgccgccgccggcgacgttgtgatgaggtcgatcagccgaagaggtggtgcttcttctcgccggtggactcctcggcgctcttgtggtccttcttcttctcgtggtgctc

SEQ ID NO: 403475 - DNA, 485 bp, Oryza sativa nipponbare
ggaaatagttatttacatggtgcattccatataaatggccgtatattgttctggatgcttgataaatcatcataggcagaagaactagattaactgtttgtctccatgtcgaatacccacttcaataactggtggttcacccataacgtacactagtgacaacaagctaactgatgcaaattttcagggcattcctcagcttgacttcaccgtctcgatcgcttggattaattcatctagtttggcacctgtgacctccttgacgaccttcccgtccttgagaatcttgaatgttggcacaacctttatgcccagctcctttgcaagagacttgttgtcttgattgcagtcgagtttgaggaacacaacgtcctggtccttctcggacatctcctggaatttcggtgccatcaccttgcaagggccgcaccattgggtgtacatgtcgaggacgacgaccttgggccctgccgacttgacaattg

SEQ ID NO: 403476 - DNA, 476 bp, Oryza sativa nipponbare
gttatgaacttatcataagggtctctgaaaattttggttccatgtcaaatatatgtacacctatttggacatcggtatatgctattgtggtctttttccgatggaacgacgatttgtactcaccagaggtagggaagtaagtaggctgtaccattaccattgctacatggcgaggtttctacagaagaaatgggcgatgcacagagggacagagctgcgtctgcctactcctcctttggtatccaccggctccaccaaatgcttttgctctggctgctaagctcatccatgctttcgttgattgtcctcacgacctttctctgtacacgcagcacggaagcaagcaagttcctccgtgcactacctttctttggtttgatttccctaagctcttgaagttgtgcctctgtaaaacctccttctggctttggtcctgatcttggcatgaggccgacgacccaacgggctgtttcact

SEQ ID NO: 403477 - DNA, 480 bp, Oryza sativa nipponbare
ataaatatatatagccggagcttggatatatttcattcacatatgcctcacccaacaacatatagtcgtagcagataccactcttacatcaagtcagagagagatcaggtgaaacaaaaacaaaagcagagcacggccggtaaaatcaaaagacgatgaacaaactgggaacacacgaaacaaggtgggagacatcatcgaatcagagatgaacaattaaacaaggctatatatgacgatgacggcttagttgccaccagactcctcgcagcccgggggcttgtaggcgatgaagctgatgagctgcacctgcctgacgttgtcgaagccgatgatacggacgaatgcatcagggtacgccttcttggcctcctcgagctccttgagcacctgggtggcgtcagtgcacccgaacatgggcagcttccacatggtccagtacctgccatcgtagtatccgggggatctgtggttctcacg

SEQ ID NO: 403478 - DNA, 375 bp, Oryza sativa nipponbare
ggtggttaaaaatgcggattccattgaagtttttgatcaaatccatccaaattcgttcgaatgcaggaacagaaggaacatatgccatggggaggcaggctaaggtacaatctctcaaccaggctgtagtagtaattattcatagcagcagcatcagcagcagaggtagtactagcagaagtaatactagaggtggattgttcgtcgtcatcatcgtggcggtggcctttagaactcgacgccgttgaagaccttgcgcacctgctcgagcgtgacgaagagcacgacggtgaaggggccctggcgcgacacggtggggatgaaccctttgtacagggccatgacgcccttcgaccggactctttttgagcgcgc

SEQ ID NO: 403479 - DNA, 512 bp, Oryza sativa nipponbare
gatgaagagaacttgacttgtaaaagagtatcaacttgttttttacatcggttacatcatagtacaggtacacaatcaacaaggcatgcagtgctccatccacaattacatcccaatacaccaccaccattcacagcctactccgatcccaaaaaagagaggtaagtcgcgtcgacgaacagtcttttcatcttcctccattggcagccattgctaacactccaacacctgaagaactcctcatttgggggtgaaggcctggaagatggtggcgtggccggggtcggcgagatgggcgaagaggttgtcgatggggccggtgccggtgtactctgcctggaaccaagctcccatgacggcgagcatggcgagccgcccgttcttgatctccttggtgcgcagctccttgatcttctccggcgagccggtgccccagccgagcgggtcaaaccacagaccaccagggtacccgacgtcggtgccggtgagcttgttgttggggaagatggggt

SEQ ID NO: 403480 - DNA, 471 bp, Oryza sativa nipponbare
  unsure (1)..(471): unsure at all n locations
aaataattaatttactgtatataaattattgataaaaggtgtgcttacaataatgatgaagtatcaggagaaacgtgtcttcaggttacagattattacatgatggtggtacacgaattgtgcggtgatagaaatcatatatgtcctctttccaaaatagactcgatcgatcggtattgctagagtatgagtagcaattattatccgatagagtgaggctgaggccttccgtgactgaagcagattgcaacgctgatcgatctccttacatgctcggcttcgcgctgagacggctcgccagtttctgacccagagacctgtcagcctgagaccagtaggagagccagatgctcctgatctcgtgggtgaggcgagggtcanagagtgcgtcgatccatctcttgatgaaccggtcttgccttgccggatcccatgaacggtacctttcccctggctgcttgaagttgttct

SEQ ID NO: 403481 - DNA, 489 bp, Oryza sativa nipponbare
tttgacagacaaacttattcttattattctcgaaataaccgtcacacaacaaaaatgagaacgaatttgtccagaaatgcactcaattacaacatcatccttgcagttacagcatacaagatggaaactttactgaactataccacgtttcgctccatccaccgtgttcttcagcaacatcgccaccgtcatggggccaacgccacctgggactggagtcaggtgaccagcaaccttgctcacctctgcgaaatccacatcgccgacgagtctgtaccccgatttcctggttgggtcactgatggagttcgtcccaacgtcgatgacagcagcgcctggtttgatccagtctcctttgatcatcatagcctggccagccgctgcaatgacaatgtctgcttcacggacaatactttcagggtttggggtccgggagtgaacaatggatacggtcgcatccgccttcagaagaagcaggcggacgcgtgg

SEQ ID NO: 403482 - DNA, 452 bp, Oryza sativa nipponbare
agcaataatcaaacactagggctcgtatggatcattacaaagtacacaaatgtacaaattaaaacatcaaaagagttaactaagcttaaagcagcagctgacacataagttgcaaaccccaacttttttcagtttctgaattctggatggatcatatcagattcatcacagcatcgtacaatctgtgcaagcattggtacatcgagcgatggagagagagagtagtctacaatggcggctgggccattcacgagcccggcgtgaacttggtggcgtagacccaggcgttgttggcgacggggtcggcgaggtggtcgagcaggttctccaaggggcccttgccggtgacgatggcctggacgaagaagccgaacatggagaacatggcgagggcggccattcttgatctccttggacctgagctcggcgaaggtgacggggtcgtcggcgag

SEQ ID NO: 403483 - DNA, 398 bp, Oryza sativa nipponbare
aattaagctagaaatgtcgtggatcgatcacacacacacacacaattaaggtacatacatacatgcactgctgcaactgcaactgcagggtcggtgcgtggctactacaagtgtacacatggtacgttggttggcaccatctcgatcgtgtcgttgtgctcacttgccggggacgaagttggtggcgtatgcccaggcgttgttggcgacggggtcggcgacgtggtcgaagaggttctcgatggggcccttgccggtgacgatggcctggacgaagaagccgaacatggagaacatggcgaggcggccgttcttgagctccttcaccttgagctcggcgaaggtgtcagggtcgtcggcgaggccgagcgggtcgaaggcgccgcctgggtacacct

SEQ ID NO: 403484 - DNA, 499 bp, Oryza sativa nipponbare
tttatgatctcattcagagaggattcactgcatccaaagttctgaagggttactcgattacaatttagacacagctctctcttcacttggagtcatacacacacacacacagcacatttattcctcgagtatttacatcagcaagatgattatccccttcctgttacaagcacttgatagggtttaacataatcatcatcaaaacagggtttatagtatgtacagcccccatgaacagattacagtaagcatctggagcacagataaaaacttgcaagctctttcagtggtgcacacaggctgtatctgccatggcaatctcagtttcctctgaaagactgaagaatatccatgaaacagcaatttggctgtcttctaccagctcaaacttgctgcacaacttttcattcttttctagctcatttttccttcttacttcatcaacaaaagtgcgtctcggtgtcgccctaaaagggtcagtgcggttgctgcgatgtga

SEQ ID NO: 403485 - DNA, 478 bp, Oryza sativa nipponbare
gcacggtaattttctccatgggcattaattaacaactaattaaacaaggtacgtctttacacctacacgtacacagtacatatacacttgaaagaaagtctcaatgatgcgcaagcacaacaatggcggcgaaacctcggtagatcgatcgatcctcgtaattctactcttcgtcgtcgtcgctgacaaacttgccggtgccggggttgatggcggcgatgaaaaagaagacgacgttgaagaggacgagcggctcgatctcgttgatggggacgccggtctcgatgttgagctgcgcgagggcgcccttgccggtgatgatctcgccgatgatggagaaggcgatgccgagctgcgcgagccggccgacaaacagcttgttggcctttgtgaaaccaaacagcgggccgccctcgttgaggcccagcgcggagcggaagcccttgcccggggcgatgacggccttgtcgaggcccgt

SEQ ID NO: 403486 - DNA, 435 bp, Oryza sativa nipponbare
gacaccaaaatgtgatatggataggattaagcaggtgcagcaaaacgtacattaattaaacaacaacaattaaccctcgggcacgcctgtgttttgttatctcgctcaacatatacgtacgtaatactttgcttgcatagcatagggacgacgacattatattcttaattgataaactcaagaacgcatggagatggatcgagagatttataaatatggagcttgcttgattgattagatgaggtcgtcctccttgtgggtctcgatgacgacgtcggacttggggtaggcgtggcaggtgaggacccagcctgcggcatcctggtcgttgtcgaggaagctttgtttgtactgttcgatctagccggagactatattgctcgtgtataagtggcatgagtcctcttggcaggtatttagttatgtttaatactt

SEQ ID NO: 403487 - DNA, 375 bp, Oryza sativa nipponbare
tctcaaaccctttctataagtagagataaccggagctcccatatatatcatacaaatatgcctcacccaacaacatatagacgtagcacataccactctaacatcaagacaaagagagatcaggtcaaacaaaaacaaaagcagagcacggccggtaaaatcaaaaaacgatgaacaaactgggaacacacgaaacaaggtgggagacatcatctaatcagagatgaacaattaaacaaggctatatatgacaataacggctaaattaccaccagactcctaacagaccgggggcttgtaagcaatgaagctgatgagctacacctgcctgacgttggccaagcccaaaatacggaccaatgcatcagggtaccc

SEQ ID NO: 403488 - DNA, 427 bp, Oryza sativa nipponbare
ggcggcgaaattgtgggtgagcaacgtatatacgtgtgcgtacgtacatccttgctcatcttattgtaccgtatatatacgtacgtagtagccagtatttatttagtggtacgtacgtacgcatggattattaataatttgggggtgattaataattaatcagttgcagtagtagccctgctgctgcggcatcctggcgtagccgtactgctgctccttggcgccgtagctggcctgcttctgctcgcggtgctcgtggtaggcgtagccgccggcgcccaccgccgccaccgccgccacgccctgctcgatcctgtgcctctgcgcgttcgccgggtccttcttcgcctggtgcccctcatagagagcgaaggcgccgctggcgagggcgccgatctcgccgacgcgcttcgcgctggttgggctc

SEQ ID NO: 403489 - DNA, 511 bp, Oryza sativa nipponbare
tttataaatatatggggccggagcttccatatatttcattcacatatgcctcacccaacaacatatagtcgtagcagataccactcttacatcaagtcagagagagatcaggtgaaacaaaaacaaaagcagagcacggccggtaaaatcaaaagacgatgaacaaactgggaacacacgaaacaaggtgggagacatcatcgaatcagagatgaacaattaaacaaggctatatatgacgatgacggcttagttgccaccagactcctcgcagcccgggggcttgtaggcgatgaagctgatgagctgcacctgcctgacgttgtcgaagccgatgatacggacgaatgcatcagggtacgccttcttggcctcctcgagctccttgagcacctgggtggcgtcagtgcacccgaacatgggcagcttccacatggtccagtacctgccatcgtagtatccgggggatctgtggttctcacggtagacgaatccgaccttgctgaactcg

SEQ ID NO: 403490 - DNA, 415 bp, Oryza sativa nipponbare
gaacatagaaacagtaccgagaaaggaactgtagaaactttattccagatttatcatttattacccatccctaggacggtaacattcttgtgatgaaaatacatatgcccatgcttaaggtaactggatacaaggaacttcacatcacgtcgaaaaggaaatattacaatacaggcatgaacgacacggggaaaaaaaggcttgaagtaactccggtagactcatcagaattacagcgtgcagtactgaacaagtagtaagattttgcaggaaacagttcatagatatacatgactggaatagatccggataccggatgaccagattcaccggtagttgcggtaaagtgggctgtacatgcagctctctgcatacttaaccaggtcctttggccgagggcgcctgcttgccaaac

SEQ ID NO: 403491 - DNA, 461 bp, Oryza sativa nipponbare
aaaataactgggtggaataccattgatgattcatttgattctggaagagaaacaattatcaaattacaacagtaaccaacatttattctacagatgccatcgctttctttgcttttttggcaacgcaagtaaaccatttcaccgtcacaccacccaccatatatgccacccaaataaaaatcaagaacccaaacaattcccctttaattaattcccgcttaattaataaacaccagccttaataataaagtaataaattaactaatggctcgttctttccagtcattttgccttagctgtggaggatggccgggctacagtacgggccgttgagccagccgtcagtgatctgcttgtaagctgcctcggtgaggtggatgccgtcccagctaagatgcgacccccggttggagcacgctgatgcgcctgacatcccacacctcgcgttgttgttgtagttg

SEQ ID NO: 403492 - DNA, 512 bp, Oryza sativa nipponbare
ttcagccaagaactagcaggtgggtaacttctcaagaatgagcgtgctgcaaagtcaggcgaagttcaactggaagactaccctatatgtacacacaggagaaggaaattgtatcgagcccaacgagatacttagaacgggaaccttccacgtgtgcttgaacgtatgcaagatcacagggcattaagggcaaatgggccaaatcaaaatcagagaaatgttacaagaaataattttacgagtcactaattcggtaatcttgcctcctgcgaaaatgtctgagaatgaaactatctgcatacatggggtacttttgtcgtatgagacctttgatgcacttccagaatgaaaaatcaacttgctcaccatccttcctaactatgaaaagacatcttgagttctcaaattctggatgtaaccctaccgtaaggtagtcaataccggatccaattttcttctcatattgtgggtgataaggaagcaatcgttccaaaattgccttttcatgttca

SEQ ID NO: 403493 - DNA, 303 bp, Oryza sativa nipponbare
caaaaaaaaaaaaaaacctgtcctgatttttttttcaggggaagaggggtttaggacccggtttaattaaggcttaattcccccaatttccaggtaattcccactccattccattccaccgtttgggcggccccccgaaaattcctttgagtttaatttttgcaaacgtcctccccaggggggatacttaaccctttacctacaaccctgcccgggtcgggtcccccaccccctattttccattgtttccggttaggactacgggggtctttaatcccattggcccccctagctttggttttt

SEQ ID NO: 403494 - DNA, 516 bp, Oryza sativa nipponbare
tatttgcaacacaactacagtcggctgacacagctgggcctgaagttcatttccgcctgaacagcataggatacagatcatacacacacccaaacactgaaaagtgctaaccatgctggcagcactagtctttacggaagatgatgatacagatcagatgcatgccttgcgactatgttacaccaccatttacagactacagagttttcctttcccaacaacagctggagatccaaaaatctcctaatgcagcgctgtgaggattgtagatccttccaccttgaagggtgcaccgcaaatttcttcttctttggcaggaactgcggtcaccttgtgctttgggttctcatagcacttcaagcctccaactccaagagcattggaatagaagcagccttttggggaaagtgcaagaaacttgccacacgatcctttaagcaggtcaatggtgtcagagaagggaacagatccatcagcagtaatcccccaatacagagacacctttccctccggatc

SEQ ID NO: 403495 - DNA, 377 bp, Oryza sativa nipponbare
cagagatcaggtagaacagtgagagtgaggtgcagaaaaatttgagctgaaactgacgatggcaacatccatgatcacctcgccgctggtggcgccggcccgggccaagggccttccgtccatctcccgccggggatcctccttcgccatcgtctgcagcggtgggaagaagatcaagaccgacaagccctacgggattggaggtggcatgtcagtcgatattgatgcatctggcacgaagagcacggggaagggtgtgtaccaattcgttgacacgtacggcgcaaacgtcgacggctacagcccaatctactcggcggaggaatggtctaccaccggtgacacctacgttggtggaaccaccgggcttctgatct

SEQ ID NO: 403496 - DNA, 367 bp, Oryza sativa nipponbare
agtaatggcggggtaagttgatcataatagaaacaacagtcaattcgcatataatggcatacgaatcgaccatcattgacacattcaattttatcatgattacatcagttgtgaatatgaggttgaatggatgcaggtgcggtacaggcatggaacatacagcaaaggaagtttcaacataaaagtcaccctccacagcttaacaatacacccaccatccctccagctattcgggctcctcttggcagaacactggacacaatggcctcctcaaggtttaacatttgattgtagtacggcacaccgcacactaccttgtcaggggagcccattttcagctttgcaagaagatgattaggttctaaaa

SEQ ID NO: 403497 - DNA, 382 bp, Oryza sativa nipponbare
ttttcgaactctttgtttggtccttgttttctatttcatttcattccgatagatagcaacaagcagttcaaacaccataaccaaagcgaactcaattcatggtaacatcacggacgaagaacacctaacactggatggatggatagagggcttctcgactcgagagagccactggacacgataacgactcgactcgatgataagatgattctgacacggatagctaaggataactggccacgatgggccccaccaatcagttcctccagttcccgccggagtcgccgccgtagccgccgccacggctgccaccgtagccgccgccgccgccgccacggccgccgccgtagccgccgccgccaccgtaagccgcctcacgggg

SEQ ID NO: 403498 - DNA, 449 bp, Oryza sativa nipponbare
gataatttaaatacttaatagtaatagactctttgatggagtattacaacatgcagcagtggcattaatacgccagtacattaattaagttacacatatgcaggctccattttggtttcttttaatttatcgtattacagaatttctgtagccttgctgatgatcacttggatatcatgtactagtaattaacaataggatgcatacaaaagatggcccaacgacaacagaagatgcgtgcatctgacattgtctggccttatttggttggtagtactccaattaattaacaagagatgatgcattcttgtgccttagtttcttcacatgcttggcttcacgttgagcctattcgcaatcttcacccccaacgactcatcacactgggagaggtagttgacccagatggcgcggagcttaagggagaccttgggtgcgcgagctcgccg

SEQ ID NO: 403499 - DNA, 373 bp, Oryza sativa nipponbare
  unsure (1)..(373): unsure at all n locations
gagaccaagaaattgttgaagttcgattgagtatgatagacctttttactaggcaaaccacacgaatacacgattgattaatttcactgagaatagcacgggtacatcacatcacacaaattcatacgttgatacacgcatagtcgccgaagcgaccagctgcttaattaatcgataacacacgggtttaattcagcaataatcagcacacacacaaaccacactcatatgggtggtttttattgtggactaattaaggtaggtgactcgccgggatgcgccccgccgccgccgtgaccacctcctccagggcgctgatggtcgccgggacgtantccagctgccgcgcgccgtggttcgacacgatgatccc

SEQ ID NO: 403500 - DNA, 429 bp, Oryza sativa nipponbare
aacaaccgaagatatagattactgctgcattattgcccagagagagtattggtccatacagtctatgatttactagctaactattcacaaggcaaggatcacgctgcacgcttgagcctttgactaaacatgcacttgaacaggcagatacattccctgaacacgcacatcagaatcgccaccgagatgggtggcctatcacatacagaaacaccacttttattccctctctacatgaacgagtcgaggtatccaaaggagtggaccattctgtagtgcagcaagctggcgtacacacggtcgcacactccgacgaacagtgactcgtcgtctgggctaagcgagatgccggagatctcgccgaagaaatctatctcctgcctcttcttgtagtccgcagcggcgctgtagacgtgcacggacgcgtgg

SEQ ID NO: 403501 - DNA, 511 bp, Oryza sativa nipponbare
tgatagcgagacacctgtggtagggttattaatatcaatacatgtcaggtaaagtctatgcagtgtgcatatgtgcattcacagtcacactcacttagtcaaataccaagatcgatcgatcgatgtacaagtggatgcattaattcatcatcttgggtgttcttatattacaaatcaccaccatgcaagtcgccattaaccaccaacccagctttcctaatttaagtagtaatcaacaaaaggatgacctctcctctctccataccctcccagctcgctcgtcatcacaaaactaaacagcgcgcgcgaacgcacaccaacgcatcgatcccgtttgaattgcgcgcgaaagagcttaaattaagaggatgaggagaaggtgtcgaagatggtggtgtggagcgggtcgctgaagtgggtggcccagttgttgaggggccccttgccggtggcggcggcctgcacggcgaagccgaggaaggcgaccatggcgaggcgggcgtgcttgatc

SEQ ID NO: 403502 - DNA, 385 bp, Oryza sativa nipponbare
tttagttgggaaacgaaggggagggttattgcaaaaacatcatcttcttcttcatcttcttagtgtacacaacaccaactcgatcatcatctcgtcgcactaaacccatcttccccaacccaaagacaacgaactcgctggccacaaatccatccaaccacaattaaccactgctaagctacggtcccccacttcacttgccggggacgaagttggtggcgtacgcccaggcgttgttgttgacggggtcggcgaggtggtcggcgaggttctcgagggggcccttgccggtgacgatggcctggacgaagaagccgaacatggagaacatggcgaggcggcccgtcttgatctccttcaccttgagctccgcgaacgcctcggg

SEQ ID NO: 403503 - DNA, 399 bp, Oryza sativa nipponbare
tcacttctaaaagagtatgggcttgttttttacatcggttacatcatagtacaggtacacaatcaacaaggcatgcagtgctccatccacaattacatcccaatacaccaccaccattcacagcctactccgatcccaaaaaagagaggtaagtcgcgtcgacgaacagtcttttcatcttcctccattggcagccattgctaacactccaacacctgaagaactcctcatttgggggtgaaggcctggaagatggtggcgtggccggggtcggcgagatgggcgaagaggttgtcgatggggccggtgccggtgtactctgcctggaaccaagctcccatgacggcgagcatggcgagccgcccgttcttgatctccttggggcgcagctccttgatc

SEQ ID NO: 403504 - DNA, 491 bp, Oryza sativa nipponbare
  unsure (1)..(491): unsure at all n locations
ggagggaatacatgatgaaccacgtatgttctcaaggtaaaattaattaatgcagtatagttttaactttgtccatcgatctcaacctgtaactgtgacgacacactggctacagtgccctcgaggtactagcagtatagcagtagctgtagtacgtagcagcagcagcaggttcactgtcttgattggattggatcggattagtagacgtagttcttgacgaacatgccctccttggcctcggcggcctcgccgtcgctggtgtacttgccgagctgcgccagcgagttggccttggcgcggaggagcagcgcgtcctgcgccgccttcacgttctccggctgcccgccccacgttttgaggcacgtgttctgcagcgcccttcggttcgagaacgacacgtgccaacgggtgggcccctggttcatcgggttcaggttttgggtngcctccacctccgactggccacccgacaagaacatgatgccggg

SEQ ID NO: 403505 - DNA, 376 bp, Oryza sativa nipponbare
gctataataacgatgcgtcgtaaatgcgagcatcccttggatgcgggctgcggattacattgaatttggatccaaagaagcatagacgatgacagacagacattaattaagctagaaatatcctagatcgatcacacacacacacacaagtaagggacatacatacatgcgctgctgcaactgcaactgcagggtcggagcgtggctactacaagtgtacacatggtacgttggttggcaccatctcgatcgtgtcgttgtgctcacttgccggggacgaagttggtggcgtatgcccaggcgttgttggcgacggggtcggcgacgtggtccaagaggttctcgatggggcccttgccggtgacgatggcctgga

SEQ ID NO: 403506 - DNA, 511 bp, Oryza sativa nipponbare
caaaaaccacgatttatggagtgccggagatgaagtacacaaattaacattacatcgagttttaataaaacatcatgcgaaaagccagcaaaaacaaaaggcagcatacagctaatgaagctctactggagtagctcgcaaaaggtccgacttattttcagtagcactctactccatttcttccgaaagagtgaccatcttctactgggtgttgtacatgtgacggatcaggtcaacaacgcgagagctgtatccccattcgttgtcataccaagacacaagcttaacaaagttgtcattgagagcaataccggcctttgcatcaaagatgcttgacctgttgtcaccctggaagtctgtggaaacaaggtcctcctcaacgtaacccagaatacccttgagttttccctcagactcctccttgatagctgccttaatctgatcataggatgctggctttttaagcctggcaggcaaatcaacgacagagacatccacggttggaacacgg

SEQ ID NO: 403507 - DNA, 395 bp, Oryza sativa nipponbare
ttgaagagattcacgaagtgatgaatgtggagctcattaaacttttgccgcttcagtaggtgcaccggccctctcagcaataatctgctcatagagatctctaatcttcagtcctacgatagtttggaagagacctgttccattgttgctgccggggaagtctgcatgctttagcatttgctgtgtcacctctccataaaatttggttgagaggttgcttaaatggctctcaacatagataagctcatctagtctgtcaaattggccatccatctccagcactgatacctcatgcccaaagtaagtgtctgggccataggcaaatttgatgccaggataagaacatgtgagttttcttccacaagggacccaggtgatgcttgatccttcgtcga

SEQ ID NO: 403508 - DNA, 319 bp, Oryza sativa nipponbare
  unsure (1)..(319): unsure at all n locations
gaatcatacgtaagggctggctgatacaatatcaacatggagggtacattgccggttccatatgaacaaacataaaaacaccgaaaccccatatggccattatgccgatcctagcctagcttggcgaggacatcgccaagagcagatttggtcaacgtgtagtacttctccgcctcttcggggctcttgatcttggctgcatggtcaagcccgtcaatggtggcgaagagcttgccggtgaggtccttgaggcccttcttctcgtccttgggcttggagttgatgacggttttgaggtcgtagcgcangtaggaggccc

SEQ ID NO: 403509 - DNA, 459 bp, Oryza sativa nipponbare
atatcaaacgctctagaaaagattcatgtgatgaaatacatgatgaaccacgtatgttctcaaggtaaaattaattaatgcagtatagttttaactttgtccatcgatctcaacctgtaactgtgacgacacactggctacagtgccctcgaggtactagcagtatagcagtagctgtagtacgtagcagcagcagcagcaggttcactgtcttgattggattggatcggattagtagacgtagttcttgacgaacatgccctccttggcctcggcggcctcgccgtcgctggtgtacttgccgagctgcgccagcgagttggccttggcgcggaggagcagcgcgtcctgcgccgccttcacgttctccggctgcccgccccacgtcttgaggcacgtgttctgcagcgccctcgcgtacgagaacgacacgtgccacgggttgggcccctggttcat

SEQ ID NO: 403510 - DNA, 401 bp, Oryza sativa nipponbare
tagtcaaaagatggtatcatcaatcaataatagttacagtattgattccatggagtagtaggattacaacaattaaggacgatgaagagaaaggggtggctggcgatacacatagagaggcaaagcagggggtagcttagttacaacttacaaacgaagctctgatcgatcaagtctgatttgattgatgcagctgaagaagaagaggaagaagacgacgatgatgatgcaatcagctgctgacgtacttgtcgatgatggtggcgagggtggtcttggggacggcgccgatgacgctctccttcttctcgccgttcttgaacatgaggacggtggggatgctccggatgccgtagttggtggcgatgtttggtgagtcgtccgtgttcaccttgcagcac

SEQ ID NO: 403511 - DNA, 457 bp, Oryza sativa nipponbare
ttagaaagcgaagaaattgggttgaatttcgaagaaacaactgatagtaggtttgatacagtttttgcactacgctgttactgcacatgggagcagaacatattctcgtagagatatacaaacatcacacagaggaagcagcagcaagcactctagagagtcaccccccaaaacttccccggacaaatgcagctgcttaattactccgttccagcgatcttcttcttcaaggtctcgatgtcggtcgccaactctttcctgctctccttgaagaggaggtagcggtagacgaaccagccggtgtagccgaggccgacgagctccaggatcttggggagcagcggcacggagttgatggcgccgacgacgacggtggtgagccagagggcgacgacggcgccggccgtgtagaggaggaacgtcggcttgtcctcgatcgcctcccactttgccttga

SEQ ID NO: 403512 - DNA, 489 bp, Oryza sativa nipponbare
tgtataaatatatatagccggagcttccatatatttcattcacatatgcctcacccaacaacatatagtcgtagcagataccactcttacatcaagtcagagagagatcaggtgaaacaaaaacaaaagcagagcacggccggtaaaatcaaaagacgatgaacaaactgggaacacacgaaacaaggtgggagacatcatcgaatcagagatgaacaattaaacaaggctatatatgacgatgacggcttagttgccaccagactcctcgcagcccgggggcttgtaggcgatgaagctgatgagctgcacctgcctgacgttgtcgaagccgatgatacggacgaatgcatcagggtacgccttcttggcctcctcgagctccttgagcacctgggtggcggcagtgcacccgaacatgggcagcttccacatggtccagtacctgccatcgtagtatccgggggatctgtggttctcacggtagac

SEQ ID NO: 403513 - DNA, 515 bp, Oryza sativa nipponbare
tataattaattcacaacaccataggtcattgatcaggttcagaacctgcacagaaatacacactaccggtacagatctcaccctctctccaatactcgtacatccatccacgcggtccacacgaatacgtacatctatacggtacacgtacgtacatctactgcaccgcgtacacacacgcacactctcctgcagagacgcgcatcgtcgtcaacctagctagcttagctgaaggcgatgcgtcgccatggcagcacggcggcggcggcgctcacttgccggggacgaagttggtggcgtaggcccaggcgttgttgttgacggggtcggcgaggtggtcggcgaggttctcgagggggcccttgccggtgacgatggcctggacgaagaagccgaacatggagaacatggccaggcggccgttcttgatcttcttcaccttgagctccgcgaaggcctccgggtcgtcggcgaggccgaacgggtcgaagctgccgcccgggtagagcgggtcg

SEQ ID NO: 403514 - DNA, 488 bp, Oryza sativa nipponbare
tcataaaattttgtgttttgtttcgagcttcatgaccatgtgtttagtgtgaaaacacacacggtagattcacgagacaatgattttgtacagacatgcagaagctcttgaatgctaagtacacaactaagaacaaagagctctgatgattttattctattcctgccgcaaatggtcatggctggctttttctggttggataagggagggctttattccacctcagatgactaatccatctgcaattatcgagttctttaatacgatggtgatgcctgatcggatgtagaagccttcagaggtcctatctgcttcctgtacaccctcagagttggaaattgttacattcttccctatcctcgcattcttgtctattatgcagttctgaatctttgtattctccccgattccaataggaaccttttctttaaccagcagttcttcctctttccagatcagtctcatagaaatcagcaccaagcattact

SEQ ID NO: 403515 - DNA, 387 bp, Oryza sativa nipponbare
  unsure (1)..(387): unsure at all n locations
ctcagcaaaaagaaatttaagccattattattagatcactccaaatcaccaatacaatgtggcagttcgatagcaagcggctctggattgtgtggcaaaaacaacacctgatccaaggaccatctagcacctctaagaccttatttcctcgcacttattcagaaacaacatacatactgcatactaccagtcccatatatgatgtaataaccagtcgggcacaatcaatacgcctcatcttcctccagacaatttttgtcgaggaaggcaggacgctcaaggttaaagcctaggagggtgctcccaggtaggacgccagccgcaggatgtcgcagaagacgccaccggcggtgacctccgcgccggcgccggggcctngcacgatca

SEQ ID NO: 403516 - DNA, 519 bp, Oryza sativa nipponbare
taaccaaactgtaaaataaaaatggatagcatattatatattgatatatcatcaacatagcccaaaacaaagctgcatactattattataggcagcaatccaccagcgcgatgcttgatcttagcttagttgccaccagactcctcgcaacctgggggcttgtaggcgatgaagctaatcaactgcacctgcctgacgttgtcgaagccgatgatacggacaaaggcatcggggtaggccttcttggcctcctcgagctccttgagcacctgggtggcatcggtgcagccgaacatgggcagcttccacatggtccaatacctgccatcgtagtacccgggagacctgtggttctcacggtagacgaatccaaccttgctgaactcgaggcaaggcacccacttggatcgaagcaggtactcgatctgcttcaaaagatcctccacggtgagtggtggcaggtacgatagggtctcgaacttcttgatgccctcaattggccacacctgcatgcacttg

SEQ ID NO: 403517 - DNA, 340 bp, Oryza sativa nipponbare
ttttgattttttaaccatgcgggggggctgtttgtgcccttgtgcagatccatttcatttatacaagtagaaggcactcaaatcagccaccacatgaacacacacatgttccatcattgatcgatctacacatgcataacccggtcatgcacttacaaacaaaagatctacttgaagaagtacgggaggtcgagcacgtagaggaggaagtaggcccagaggacgccggagatgccgccgaagaagaagccgccggtgaacttggcccagccgtcggcggtctgcagcttgtcggcctccttcttgcggccggtgagcgttagcgtcggcgccgtggacg

SEQ ID NO: 403518 - DNA, 398 bp, Oryza sativa nipponbare
aaaaaaaaatgtgacctgagaactgtatttattattcgcacacgtactgcgcacaaactaataaaaccacactttacaacaccactagctaggttttagacacaaacaagcataagcgatggtttaacaagagcgagcaacgcgtgtgatacagtgaacacttatacaaaatctggtgtgtgctctgacattagagctaaatttgaagcgggattttgtatttgaacatatgaaaacgtttactgtgctttccaagacgacaatggaggggtctaagaatccttccaagtgccggccgtctgagcatagcggacaccttgaacaacatgtgtgctggcataggactcaagttcagtcatttccccaggggtgagcttcacagatagagctgctacatt

SEQ ID NO: 403519 - DNA, 273 bp, Oryza sativa nipponbare
ccgtaccccacccgaattaccgagtccacccacacataccaccacacgtgcgaaggaatactggtggagaaaacaaagaaggcggagaggtgtataggtagagtgatgtcagatgccagaagaatgagatgcgaaagtgttttcatctgtctgaaggtgataatgccagattcttttgtgctgacatacacgaatatgatcagatgctaccagaggactatacagactacagaatgatcgagaccaaggaactataacactgtgtattctagc

SEQ ID NO: 403520 - DNA, 170 bp, Oryza sativa nipponbare
caggccgcgtgcatgggctccctcctgctcgccgccggcgcgcgcggggagcgccgggcgctgcccaacgcgcgggtcatgattcaccagccatccgggggcgcgcagggccaggccaccgacatcgccatccaggccaaggagattctcaagctgcgcgaccgcctcaa

SEQ ID NO: 403521 - DNA, 448 bp, Oryza sativa nipponbare
cgccgcgcatcgcccccgcgaagcgggtgacggaggcggtgaagctgatcaaggaagccaaggacgcggaggtgcggggcctggagaagatggcgcagctggcgaagcaggtcgagcagaggaggcaggcgctcgaggcggcgaccatggaggtcgaggaagcggagttcagtaagctggcggcggagcgggagctcaggcaatggcgcgccgagcacgagcaccagcggcggttgaccggcgagggcatggcgtcgccgcgcacggggctcgcggagatctccgtgttcgacggcggcgaggggcgcgggaacccgcacatactgagcccgagaggagggtatatgccgaggactgatatggcggcggcggaggtggaggcgggcgcgaagcagaggcctaccttcttcccgcgcatggtgatgtttctggcgcgcaagaaagctca

SEQ ID NO: 403522 - DNA, 497 bp, Oryza sativa nipponbare
  unsure (1)..(497): unsure at all n locations
gatcgcgaggttcgggcacgacccacgcgtgcgcgcgaggaggcggaggtccggatggtcaccaccaccctccagaccgccgaccttgcgcacatgctgttctacggcccgcctggcaccgggaagaccaccaccgcgcttgccattgcttaccagctctacggtccagagctctacaagtcaagagttctagaacttaatgctagtgatgatcgtggaattaatgtggtgaggactaagatcaaggactntgctgctgttgctgttggttctgcacgaaaaggcggttatccctgcccaccatacaagattattatactagatgaagcagattcgatgacagaagatgcccagaatgctttaaggcgtactatggagacttactccaaagtgacaagattctttttcatatgcaattacatcagcaggataatagaaccacttgcatcaagatgtgcaaagtttagattcaagcctctttcagaagaagtaatgag

SEQ ID NO: 403523 - DNA, 411 bp, Oryza sativa nipponbare
cgcgtccgcatgtcatcgccgaatggggagattcaggtgtatccgtcgctgatggcctctccaatctggtgaagtgccgcctatcaaccaccatccgctgtctttcgcacccaagcgcgcatgtccgtgcactcagcatgtccgtacttcgcgacatcttgaacagcggacaaataaactgcagtaagctcatccaaggggaacactggactgggatccagagaccaacctaccaatgcttggcagtaagcatcatcaactggcaagccgatgtggagagatgcatagagtgggaagcccacagccgccgcgccaccgggctgacgctcgcctttctcaccagggcggcgaaggagctcggctgcccactcacttgctgacaaggccacaccatgactgtcactgcaagca

SEQ ID NO: 403524 - DNA, 361 bp, Oryza sativa nipponbare
ctatagcaggcatggcggcgacggcactgagcagccaggtccggttgccgatgtccctgcgggtggcgacggcgccggcgccggcgcgcgtgtcggtgctgccggcgagcaacaagctgggagacaggctgcggatgcaggcgacgtacaacgtgaagctgatcacaccggacggcgaggtggagctgcaggtgccggacgacgtgtacatcctggaccaggcggaggaggaagggatcgacctgccttactcctgccgcgcgggctcctgctcctcctgcgccggcaaggtggtctccggcgagatcgaccagtccgaccagagcttcctctactacgaccaggttgccgccggctgggt

SEQ ID NO: 403525 - DNA, 348 bp, Oryza sativa nipponbare
cgcgtccgcagtaacccaaccagagagcttgcggaagcgggggtttggtgcgggcgcgcgcgtgggaggggggagagaaggccaggaggaggccactccttctcccgagggaggcaaaaatccgatcctcctcctgccctgctcgctcgctcgctcgcctgcgctgcgcgcacttggccccgtcccgtccgttcccgctcgccaggcatagaaagatggtgctctgggtcttcggctatggcttcctgatctggaaccccggattccacttcgatgagaagatcctgggcttcgtcaagggcttcaaacgcacctttaatcttgcttgcattgaccattggggcacgc

SEQ ID NO: 403526 - DNA, 455 bp, Oryza sativa nipponbare
cgtccgcccacgcgtccgggaatgggtgcttatcttgctcggttaggcatgaggtgtatacagcgtcttgatcagccaattattttgacaggattttctgcgctgaataagcttctggggcgggaggtatacagctctcacatgcaactaggtggccccaaaatcatggctacaaatggtgtcgtccatctgactgtgtcagatgaccttgaaggtgtttctgcaatcttgaaatggctcagctatgttcctccttatgttggtggtcctcttcctatcatgaagcctcttgacccaccggatagacctgtaacatacttccctgagaattcatgtgatgctcgtgcagctatctgcggtgtgcaggacagtcaaggcaagtggatgggtggtatgtttgacagagaaagcttcgtggagacattagaaggctgggcaaaaactgttgtcaccgg

SEQ ID NO: 403527 - DNA, 427 bp, Oryza sativa nipponbare
cccacgcgtccgcccacgcgtgcgtccgaaacctgagcctaagccacacccagagcctgagcctaagcctgaacctaagcctgagcccaagccacaccctgagcctgaaccaaagcctgagcctaagcctgagccaaagccagaaccaaagccggagccaaaacctgaacctaaaccagagcctaagcccgaaccaaaaccggagcctaaaccatacccagagccaaagcctgaaccgaaacctaagcctaagcctgagccaaaacctgaagcacctccgaagaagcacaagccggcgcacataccgtcagcgaccgaccagggacggcgatcaccggagaccgagcacttgctgctgcacgattgaggcattgacgacattatttcgccagagggaggagcgagcgagtcactacactggaccggt

SEQ ID NO: 403528 - DNA, 479 bp, Oryza sativa nipponbare
tctgcattctcgtcccaccccatccggcagagagagcgtctgggtagggagagacacgcccaggcgagagtgagaggtgagttccagaggggtctgcttgcaaagttaccatgcctgccatggccaagcccgcctcccgcgctgccaagcccgcgtcggcgccgaagaagcagaaggcaaagccctccgccgccgccggtggctcctcccacccgccttatttcgagatgatcaaggaggcgatcacggtgcttaaggagaggaccggctcgagcgcgcacgccatcgccaagtacatggaggagaagcacggggcgtcgctgccggccaactacaagaagatgctctccatccagctgcgcgggttcgcttccaagggcaagctcgtcaaggttaaggcctcctacaagctctccgacgccgccaaggactcgcccaaggccaagcctgccgccctcgcccccaaggcagcagcgccg

SEQ ID NO: 403529 - DNA, 416 bp, Oryza sativa nipponbare
cgacccgcacgcttccgaggacgggccggcgccaccgacgagggccccctcgagaacctagacgaccacctcgccgaccccgtcaacaacaacccctgggcctactccaccaacttcgtccccggcaagtgagcgccgccgccgccgtgctgccatggcgacgcatcgccttcagctaagctagctaggttgacgacaaagcgcgtttctgcaggagagtgtgcgtgtgtgtacgcggtgcagtagatgtacgtacgtgtaccgtatagatgtacgtattcgtgtggaccgcgtggatggatgtacgagtattggagagagggtgagatctgtaccggtagtgtgtatttctgtgcaggttctgaacctgatcaatgaaatatggtgttgttaattaattataaaaattaaaataa

SEQ ID NO: 403530 - DNA, 480 bp, Oryza sativa nipponbare
cgtgccgtaccggttcgcatttcgacccagacgacccgttcacgcgcgtgggggaagggagtccatacgggtggctatggaacgtgcctgtgcatttgtgacgtacactacaagagaaggtgctgagaaagctgcagatgagcttgccaacaagttagtcatcaacggtatacgcctgaagctcatgtggggtaagcctcaagcaccaaagccagaagacgatgaagctggaaggcaagggcatgttgcacatggaggaatgctccccagggctgttatatctcaggagcagagtggtgaccagcctcaaccacctggaatggagggacaacagcaggcaccatcgggatcatactacttaaacattccagcaccgccaggagcagagcggacactgtaccctcaattggatccccagaggatgggtgcctgggtcaagtcacaggagggtgatggcaaacccggtccacagaaggcagc

SEQ ID NO: 403531 - DNA, 409 bp, Oryza sativa nipponbare
  unsure (1)..(409): unsure at all n locations
tcttctacatcaaccctactttcataaacaatctcttcttccacatttccaataacttcattaccctccccaacatcaaagtcccactcatcctgtttatctgnngaggcaagggtcagggaaaatccttccagtgtgagctcgtcttcgccaagatggggatcaaccccatcatgatgagcgccggagagctggagagcggcaacgccggagagccggcgaagctgatcaggcagcggtaccgtgaggcggcagacatcatcaagaaggggaagatgtgctgcctcttcatcaacgatctggacgcgggtgcaggtcgcatgggaggcaccacccagtacacggtgaacaaccagatggtgaacgccaccctgatgaacatcgccgacaacccaaccaacgtgcagct

SEQ ID NO: 403532 - DNA, 387 bp, Oryza sativa nipponbare
tctacgctgatcgtcatcgagttcatcctgttccactacgtggagatccggcggtggcaagacatcaagaaccctggctgcgtcaaccaggaccccatcattaaaagctacagcctcccgccgcacgagtgcagctaccccggcagcgtcttcaaccccctcaacttcgagcccaccctcgaggccaaggagaaggagctcgccaacgggaggctggcgatgctggcgttcttggggttcctggtgcaacacaacgtgacgcagaaggggcccttcgacaacctgctgcaacacctgtctgacccgtggcacaacaccatcatccagacgctgtcaagctgagcgtgtgatcgatttcatcagggccagggcatctcaaggagcttg

SEQ ID NO: 403533 - DNA, 468 bp, Oryza sativa nipponbare
cccaatttcgacccagacctacccgtccgacgacttcgacaacaccatggtaggcttctacatcggccctgctttcatggacaagctcgcagaccacatctccaagaacttcatgaccctccccaacatcaaggtcccactcatgctgggtatctggggaggcaagggtcatggaaaatccttccagtgcgagctcgcgtcaagcaagagggagatccaccctatatcagcgcgcgctggctagttagcatggctccactgcccgactgaaaccacattcaagcaggcaggccttccggctggcgacatgatggaatatggtatgacgggtgcgctgcctattcataaacgatctgcgcgcgcatgctgttcgttgggacacgcccataccactgggatcaaacaactggcttgcgcgaccctgatcaacatggacaacagcgcagcccacgtgcagccaacggggat

SEQ ID NO: 403534 - DNA, 476 bp, Oryza sativa nipponbare
cccggtcccgagttccgcccacgcgtccgcgtgcttttggtcgagatgctacaaaaattgcggactatgttcaatgttctcctaatggagctggcaagggaaagaaaatggctcctgaatgcgcatctgctggtatagaaggttttccgacatggattatcaacggcaaggttttgggtggcgaccaggaacttccaatccttgctgaagaatctggtttcactgttgagggaaccgagcaatcataaggccagacacgacagcaagtttcattcaattgaaggcgagtgttttatggttttagtgaagaactcaggttgtgaaggctgactacaacaattccgcatgacataccgtcacaccgagggaaggttttcgttccacggttgcatagcctacctaatacagcccctaaccactgtaataatcagtaaaagctgctcttctctcatacggagattgggagatgatagaag

SEQ ID NO: 403535 - DNA, 330 bp, Oryza sativa nipponbare
tcgacgcacgcgtcacgcgtgcgttcagatgagatgctacaaaatatgccgactttttacattctacaacagtttgagaatcttgcagacccaaaaatgcactatgaaagaactggtcctgagatttaaaaggccactgctaggaaagttgatatgcatgaatgtggcattcataaccgagcctacagaaaccaccacacagaaagtacctgatggagcacaaccctgagatcatgatctatcgtgacgaacccacagaaagcgcaattctatatgatggaagactgcgcccgaacaacatgacacagcgagcagatctgttactgttac

SEQ ID NO: 403536 - DNA, 509 bp, Oryza sativa nipponbare
  unsure (1)..(509): unsure at all n locations
gcctgcggcaccggtcccgaatcccgaattccgagccacacccacgcgtccaccaatacatccaggaagcgcggggagcgctagtcaatgtgcgtgggctacacatgaagatgggtcctgcaagggctttggccatgttcaatccgcttcatctgaagaagctaagacggcgctcgaattgcatggctgtgatctggatggccgaccagcgagacttgacttggctcatgaaagaggtgcatacacccctcacagcaggaatgatactggatcattccagaaacaaaacagaggttccagccagtctatatttgtcaagggttttgattcatctcttgaggagagcaagatccgagaatctctnnnaggacattttgctgattgcggagagatcacacgagtcnnagttcccatggatcgtgaaactggtgcaagcaaagggatagcatacatagattttaaggatcaggcttccttctcgaaggcacttgaactaagtgggtctgacc

SEQ ID NO: 403537 - DNA, 507 bp, Oryza sativa nipponbare
  unsure (1)..(507): unsure at all n locations
tgtgcggtaccggtaccgaatcgcaatttcgagctagacctacgcacgcgttcaaggatggagcaccagcactccttgcacttggtaacggactgggtcatgaccggtttccccgccaagaagaaggttgcagaccgtgcacgccttgctggctttcgatgaccaatgcgccatcttggagaaggaggccgtgaaccaatccctggagaacctcaagacctacccgttcgtcaaggaggggatcgccaacggcaccctcaagctcgtcggcggccactacgacttcgtctccggcaacttggacttatgggagccctaaatccgaccgtccgtccgttcagttcgtcagtttacgccaacgcttttncataagtactacctgaggatatcgtccccgatcatcgatttnnnncncgtggagtactactacgtacgtaccgnatggttcgatatatgtgaatgctgtattaagtaataacaagaaatatatctnctctactntttcct

SEQ ID NO: 403538 - DNA, 474 bp, Oryza sativa nipponbare
  unsure (1)..(474): unsure at all n locations
gcctgcggtaccggtaccggatcccaatttcgggccacgcctacgcaagaaagcgtatgcagcagacgggatcaactgatgactcacttagctaattaaatcttcgaccatgtcggacaagtgcgtcgactgcaactgtgctgacaagagccagtgcgtgaagaaaggtaccagctatggcgtcgtcatagttgaagccgagaagagccacttcgaggaggtcgccgccggagaggataacggcggctgcaagtgcggcaccagctgctcctgcaccgactgcaagtgcggcaagtgaagtcacgaatcaaccgaacactcgccgtcggcgagtcacctacctgaattagtccacaataaaaaccacccatatgagcgtggtttgtgtgcgtgctgataatggntgaattaaacccgtgtgttatcgattaattaagcagctggtcgcttcggcgactatgcgtgtatcaacgt

SEQ ID NO: 403539 - DNA, 501 bp, Oryza sativa nipponbare
  unsure (1)..(501): unsure at all n locations
ggtaccgaatcccaatttcgacccacacgtaccgctcacgcttcctgccacgcgtccggcaaaaggagcgcatgagggctttggaggagatactctatgcacttgttgtccagaagtttgttgaagctggtgtttctttggttccagctctttcccactctatcagttcttctggaagagttgatcagtgggcagaatctgtggaagggaaacttgagaagatgcattcacaggaggcatatgaaatgatcgagaaccacctcgctctcatcctggggcagcggcaagctgatgccactgttgcggccataagtaaactccgagttggtcaggtgtatgctgcttctgtganntatggttacttccttaagagagtcgatcagagatttcagntcgagaagtcatatgaagaccctcccttggggatcagaagaggaagacaagctcaaccaagttatgacaacggactcaaggccctcaccccagacttctacttcacat

SEQ ID NO: 403540 - DNA, 289 bp, Oryza sativa nipponbare
  unsure (1)..(289): unsure at all n locations
cacgctgttcgtacagctgtgaccacaacagccaccaactccgcgcaacttcttgaaagggtgtaggtgggaggatgntcggtggcggcggcatgttcnntaggaagccnttggactacgaggtgctgatcgagaacntgaagaaggtgcagtacgcggtgcggggggagctgtacctgctcgcctccgagctccagaaggagggcaagaagatcatctttaccaacgtcggtatcccacactttctcgggctgtagccgctcaccttcccccgccaggttgtggcgct

SEQ ID NO: 403541 - DNA, 468 bp, Oryza sativa nipponbare
  unsure (1)..(468): unsure at all n locations
cgtgactctgctctagcacctcaccaagcagaaagctagagagctagcaatggcgcccaccgtgatggcctcgtcggccacctncgttgctcccttccaggggctcaaatccaccgccgggctccccgtcagccgccgctccaacagcgccggcctcggcagcgtnnncaacggtggaaggatcagctgtatgcaggtgtggccgattgaaggcatcaagaagtttgagaccctgtcgtacctgccaccgctcacggtcgaggacctcttgaagcagatcgagtacctgctccggtccaaatgggtgccttgnctngagtttagtaaggtcgggttcgtctaccgtgagaaccacaggtctcctgggtactatgatggcaggtactggaccatgtggaagctgcctatgttcggatgcactgatgccacccaggtgcttttngagctcgaggaggccaagaaggcata

SEQ ID NO: 403542 - DNA, 390 bp, Oryza sativa nipponbare
  unsure (1)..(390): unsure at all n locations
gggtcggcccacgcgtccgaccgtccgccaccggaagagagagcccccctacgacgacgacgaccatggcgctcgcctctnnntncgccagggcagtgggcggaggtgcgggagacnnncttcctcggggcgaagcgcgcgctcgccaatgccgtcggcgtcgcgggcggnaagcccgcgccgcgccgcgcgctcgtcgtgtcggccaagaagtcgtggatcccggccttcaagagcgacgccgagttcatcaacccgccgtggctcgatggctcgctccccggtgacttcggcttcgacccgctggggcccancaangacccngcgttcctcaagtgggacaggggggcggagctgaggcactggcggtgggcgatggcggcggtgctg

SEQ ID NO: 403543 - DNA, 233 bp, Oryza sativa nipponbare
accgcgcagggatcgccgagttgatgggcaccttcctcttcctttacatcaccgtcctcaccgtcatgggggtcaacaactccacctccaagtgcgccaccgtcggcatccagggcatcgcctggtccttcggcgcatgatcttcgcctcggtactgaccggcgcatctgcgcggcacataacccgacgcaccttcggctcttctgcagaactgcctcatagggctctgtaca

SEQ ID NO: 403544 - DNA, 319 bp, Oryza sativa nipponbare
atgctgaacccctcgagttgtggaaaaagctagatgagaaggagaaatcacgagcccagataactgaagatcaagataaatcgtcagggaatatttctgttgaaaacattgagggtttaaaagaagcacttattgaagtccgtttgtgctctagagtggaagaacttgtactgaagaagaagtcaatatcacctggagactctctggagatccattctcagaagattgataaattaaagatcttggcagattcccttgcgaattcatcctccaaggcagagcagcgtattttggagaacaagcgccagaaagaagatgc

SEQ ID NO: 403545 - DNA, 236 bp, Oryza sativa nipponbare
ccacgcgtccactttgctggtcagggacaagatgactgacactgtactcagggggtgtattcatttgagtagaaatcactctcaaggcaggtggacacattctgtgttcatggtggacctgatggttacatcaccggtattctgagaagggtgcaatgcctgtcccaaaaggacattgcgagtgctgagacagatcttgaaaggcaggggcggcggcccggtacttgctggagggg

SEQ ID NO: 403546 - DNA, 477 bp, Oryza sativa nipponbare
cgtaccggatctccaggtccgacccgcgcgtccgattagaagtctgaaaaatggcattgagctcaatatgctccggatgggtgctgcagttctcggcatgcaagcaactgttggggctttggtagcaaaagctcttactacctctgcagtaccttactatcaagcaacttcccctggtcaaagtactgttttggctctagatgatctcctagttcaggcttcagcgaacatcatcctgtcacattttcttggcctggcgagctccctggagttgctgcgctccgaggccatccctccatcataagctgctgccgcgtgagcatatcaacgcatatgccaaaggcaagggctccccgtgatcatcttgctcttcatttgctgcttcaggctttggtattcgctaggagtagcaccgctcgtacgcctgtatgtttcttgtccagacaaaatttaaaaaaaatctagctttcactgcgt

SEQ ID NO: 403547 - DNA, 410 bp, Oryza sativa nipponbare
cgcgtccggaaaaagctcacctaaatgagcttatcagattataataagctgggctccagattataataaggtgggctccagattataataagctatagcaataaggtgtctgtttctttcagcttactccaaataatctggattataataatcccaatctgaaaaaaaacagggcctaaggtgggaatttaatcatatccccttaatccactccaactcctcccttattagggcatggacaacagttagagataatatgggttttaaacattaatgtatccaaatactgtttttttctctcctttcctttctttcactatcatgcaacagaatttactctaataaatgctaagagtcgactttgagccggtgtcatgcataacaaccatacttctttctctttctttcat

SEQ ID NO: 403548 - DNA, 472 bp, Oryza sativa nipponbare
cccacgcgtccgcccactccgatcgcaaatactctctctcgccgatagcagcagcagcagcaatggccgccctcgccgccgcatccaccgccttcgccgccaagccgcgcctggcgcgcgcgccgtcgtccccggccgcgcggttctccgtgtcgtgctccgcgtcgggcaacaacggcggcgccggcgagatggcgcagtcgctggcggcgtcggccaagacgttctccgcggcgctggcgctgtcctcggtgctgctctcctcggcgggacgtcgccgccccccgccgccgccgacatcgccgggctgacgccgtgcaaggagtccaaggcgttcgcgaagcgggagaagcagtccatcaagaagctccagtcgtcgctcaagaagtacgcgccggactccgcgccggcgctcgccatcaacgccaccatcgagaagacgaagcgccgcttcgagaactacggcaagttc

SEQ ID NO: 403549 - DNA, 224 bp, Oryza sativa nipponbare
ggcaatgcaaatgattgatgtatatacaatattttcatacgatcaagctgtaatccggggggtttctggtcgaaaatcaagagtggaaacgtttgctggtgctaatcggacctacactatagaatctattatggggtacaggaatgttttacaggctggaaccagtcacatccttggacagaacttctttcgttcctttggaacacagtttatggattaatatt

SEQ ID NO: 403550 - DNA, 221 bp, Oryza sativa nipponbare
  unsure (1)..(221): unsure at all n locations
tcgcactctcgcacgctcgcactctcgcaccgtcgaccggcggttcgcgcacataacccgcgtgcctggcctctcttggcggaagctgcgtcgtcgcaccgtgctgtacgtngtggcgcagtgcctcggcgccatggccggcgccggcatggtcaaggggatcatgaagcgcccctacgacacgctcgggggcggcgccaacaccgtgagcgacggctact

SEQ ID NO: 403551 - DNA, 289 bp, Oryza sativa nipponbare
  unsure (1)..(289): unsure at all n locations
gtcccggattggagagtccgggccagacgtacgcgtacgcgtncggccacgcgtgcggactattattagaaacatgtggagaccagtcagcacagtttgcaaatttatgttacaccaaggttcctgtgcatgacctggaagtgggttctcatattttggttagagcgggcgaggctgtgcctgttgatggagaagtttaccaaggttcatcgacagttactattgaacaccctactggtgaaacaaaacctctggaaaggacagctggggatgctataacctgtggtgc

SEQ ID NO: 403552 - DNA, 369 bp, Oryza sativa nipponbare
cgcgtccgctgacaggcgtcaccggtggagaccaagttgctgctgccatgggcatctatggccctcgcactacttacattatcgctctcaaagattgtcctggaactcatgaattccttcttcttgatgaaggaaaatggcagcatgtcaaggacaccacaaccattggagaggggaaaatgttctctcctggtaacctgagggctacatttgataatcctgaatatgacaagctcatcaactactatgtcaaggagaagtacacattgcgttacactggaggaatggttcctgatgtcaaccagatcatagttaaggagaagggcatcttcaccaacgtgacgtctccgacagccaatgccaagctga

SEQ ID NO: 403553 - DNA, 478 bp, Oryza sativa nipponbare
gacccacgcgtccggcagttcacttccaaaatggagggcatggttactgatctcactgtggcaagagatcaccaggctaaatttgaagagttcataagcacacactcagagttgaatcctggaatagccttagctgttactgtcctcacaacaggattttggccaagttacaaatcttttgatataaatctacctgcagaaatggtgaaatgtgtagaggttttcaaggagttttaccaaacaagaacaaaacacaggaaacttacctggatttattcactgggaacctgtaatattaatgctaaatttgaggccaaaactattgagctcattgttacaacttatcaggctgcattgctgctgctgtttaatggagttgatagactcagctattctgagattgtgacacagttaaatctctcagatgatgatgttgttcgattgctccattctctatcttgtgcaaaatacaagattc

SEQ ID NO: 403554 - DNA, 428 bp, Oryza sativa nipponbare
cgtgggcggacgcgtgggcggacgcgtgggcgcccacatcacacgcagaaatccgcaggaacagccagccatggcgtccacgctgaccaacgtcggcctgtctaccccggcggcggcggcgtcgtccctcgttaggccggtcgccggagctggacgcgtggtgtttccccgtgttggccgcggcgggttcgcggcggtgagggcgagcgggccggcgacgccgccggacatctcggacaagatgtcggagagcatcgacaaggcgaaggaggcgtgcgcggaggacacggcgagcggcgagtgcgcggcggcgtgggacgaggtggaggagctgagcgcggcggcgagccacgcgcgcgacaagctcaaggagacctccgacccgctcgaggcctactgcaaggacaacccggagaccgacgagtgcc

SEQ ID NO: 403555 - DNA, 354 bp, Oryza sativa nipponbare
  unsure (1)..(354): unsure at all n locations
ccggaatgaatggcnggaccgacgcgtgcggagcaagacgctcaggtcctcctcctctcgcatggcagccatggccaccaccgcgtccagcctgctcaagacctccttcgctggcgcgcgcctccccgccgccgtccgcaaccccaccgtctccgtcgcgccgcgcaccggcggcgccatctgcaactccatctcgtcgtcgtcgtccactctcccctacgacctcaacgccatcaggttcagccccatcaaggaggacatcgtgtctcgcgagatgacgccggggcacatgacctagatgatcacctacgcggacacatacttcgtgggagcacgggcggactcctccgggat

SEQ ID NO: 403556 - DNA, 434 bp, Oryza sativa nipponbare
cggcccggactggactggctcgaccgacccacgcgtcctctgcatagcacaagggattaactcatgactcacttagctaattaaatcttcgaccatgtcggacaagtgcggcaactgcgactgtgctgacaagagccagtgcgtgaagaaaggtaccagctatggcgtcgtcatagttgaagccgagaagagccacttcgaggaggtcgccgccggcaaggagaacggcggctgcaagtgcggcaccagctgctcctgcaccgactgcaagtgcggcaagtgaagtcacgaagcaaccgaacactcgccgccggcgagtcacctaccttaattagtccacaataaaaaccacccatatgagtgtggtttgtgtgtgtgctgattattgctgaattaaaccccggtgttatcgattaattaaacaactggtcgct

SEQ ID NO: 403557 - DNA, 386 bp, Oryza sativa nipponbare
gccggggagccgtcggaggacgaggcgcagagggagtgggaggcggagatggcgcggcggctgaaggaggccgaggagatggaggagctcgagcgcaccgccgaggagctgcagagccaggccgccgccgaggcccccgacgagtccgaggaggagaagcgcgagcgcgtccgccgcgagctccagaaggtggcaaaggagcaagcagagaggcgggcgacggcgaagcaaatgtttgatttggggcaaagggcctacggaagaggaatgtatggccgctctattgaattcttggaggctgcactcacaattattcgcccttcatcgttccttggggggagatccaaatttggcttgcaatggcgtatgaggccaataggaggcac

SEQ ID NO: 403558 - DNA, 465 bp, Oryza sativa nipponbare
cgacccaggcgtacgcggacgcgtgggatcgaaacagggatccaaacagtggcccacttgatgttgtgcaggtttgtgtgaggaaggtgcgcaacaaagtgattggacaaataggagatgctttcttgtcatatgaacgggttagtggtgagttcagggatgctgataaagatactgcaaagaaggctgctgttgcagccgctaatgtagcaaaagccccacagaggaaaggatagatccgctgatttgatttactcactcactgaccaatcgcacaaggtggagcgatattgttcttgatgctgcacactactggagaccgtggccaacttcatatgctggagctgactggtcagtattttttttgcgacaagaccctttggaggtcacctgtctgctgcagaatttggtgggaagatggttaaccttgttacatggcctacaagacattatttgggcgatgta

SEQ ID NO: 403559 - DNA, 437 bp, Oryza sativa nipponbare
  unsure (1)..(437): unsure at all n locations
gcgtccgtccttgaagatgaagatgtctatactaatgggtgtaacccaaatgaacttgngggtggtattgagttattttgatgcaaagtttcatggaaatgctcttgacataaggtatcaattcataccacagatgatctttctgaacagcctctttggctacttagcactcctaattctcatcaagtggtgcacgggctctcaagctgacctatatcatgtgatgatatatatgttccttgatccttctggcaatcttggagaaaatcaactattttggggccagaaggaacttcagatacttttgttgcttatggctattgtagctgttccgaggatgctcttcccaaagccttttaatcttgaagaaacttcacaaggagagggtttaaggtcacacctatcgctttcttgggactctataaatggatccatat

SEQ ID NO: 403560 - DNA, 404 bp, Oryza sativa nipponbare
cggaacgaccgcgacgcgtccgatcggaagcttgtagaactttagcaaagaaggagagagcttggtgagctgcagagatggccccctccgtgatggcgtcgtcggccaccaccgtcgctcccttccaggggctcaagtccaccgccggcatgcccgtcgcccgccgctccggcaactccagcttcggcaacgtcagcaatggcggcaggatcaggtgcatgcaggtgtggccgattgagggcatcaagaagttcgagaccctctcctacctgccaccgctcaccgtggaggacctcctgaagcagatcgagtacctgctccgttccaagtgggtgccctgcctcgagttcagcaaggtcggattcgtctaccgtgagaaccacagatcccccggatactacgat

SEQ ID NO: 403561 - DNA, 384 bp, Oryza sativa nipponbare
aggtacacaggtccgaattgcaccgatgcgacccacgcgtccagctcattctcctacaccgttaggagagcgcaaccctagcgacagcacaggcaggggcacgaggggtcctatattgattgtcttgttctcacatcgggtatctcacaccatgctctcggctatctgacgcgtcggcggctgcctgaccgtggaggcgctggtggcagaggcagcagggaaggcgacatcccgaccgcggatagcttcaaaggaagcgaggacatgaactccgccatctccggtgaggtcgtagaggataacgacaagctctctgagacacccggcctgattaactcaagcccgtacgaggacgggtggatgatcaaggttgaagccgacagc

SEQ ID NO: 403562 - DNA, 439 bp, Oryza sativa nipponbare
cgtccgggaggatttctactatacgagaatcgatggtgttgatggagagaccattggattatttggcgtattctacggccatggcggagctcgagcggctgaatatgtcaagcagcaccttttcagcaatttaattaagcatccaaagttcatcagtgatatcaagtccgctatcgctgaaacgtacaaccatacagattcagaatttctgaaagccgaaagtagtcacactagggatgctggctcaactgcctcaacagctattcttggaggcgatcgcttgctggttgctaatggtgggggatttagagcagttgtttggagaggccggggtgccatttccggttttaggggttacaaaccccgccaggcagatgagagacaaagaattgaggacgctgggggctttgtgatgtggcttggacgtggcgtgtcggtg

SEQ ID NO: 403563 - DNA, 429 bp, Oryza sativa nipponbare
gtccgcggacgcgtgggttcgccatttgttcgtgacctttgcaagaagcatgggctgccttatgccgccgcctcgttctggcaggctaatgtgttgacatggaagacattgagggctgctgcattgcaggccaggaaagccactagtggtgctgcgccaaagaatttggtttgggaagctgtgaacactcatggatgaattggagcctgaggcaactgcttgtgtgcatgcaatcacctcaatgcttcttaattgtgtagggagattgatctttttacctttacccgttggagttggatcggatttttcgtgttggcaagtgtcttgtcttttgcagctgaagagtgtgtttatgcttcaattgtctacctgttcttcatgtattagattgaccgattctttgcattaattaaaaaaaaaaatgggcgg

SEQ ID NO: 403564 - DNA, 226 bp, Oryza sativa nipponbare
  unsure (1)..(226): unsure at all n locations
aacccacacgacccacccacgcctaacagagaggcagacgcccacacaaactcatgcaaaacagaacaggcaaggcaganacggcgcannttcatccncaagtcantacatgatagcttaggttccactggagctgaatcggacagaaaaccaagtggaccagacgaatctggtaatgcacagagcaacatcaacatatacatgagttcgtcaggtctcaaagagc

SEQ ID NO: 403565 - DNA, 305 bp, Oryza sativa nipponbare
  unsure (1)..(305): unsure at all n locations
accccagcaaaaaaaccaacnagcnaggccggccanggagacggnggccgcggccagcaacacccgcggggcggcgacgcgcccgccagcgngcagcgccgccaagnccnncncgcagnccaacaggcccaaggccgcnagaccgccgagcacgnncaacggcgagncgcngcgggnaaacacggcgaggncgcngccgncagggaggcagnccaaggcggcgagccgggcggcgcgcagcacccggngcgagaacggggacagccnggaggagnnccagaccaaggcgacgccggaaaagaacc

SEQ ID NO: 403566 - DNA, 110 bp, Oryza sativa nipponbare
gaccggaatgccgtagaccttgtgcttccacaacttaagggggaactcaaacgggtcgggctgcacctgcctaccccgaacgtgtccgtggtggacctggtgatcaacac

SEQ ID NO: 403567 - DNA, 340 bp, Oryza sativa nipponbare
  unsure (1)..(340): unsure at all n locations
cgcgtcacgccacgcgtacgatttatgtaaaaacagtcagccaaaatgattaattggaagttcaattaatcattgaagaaatgaaaaagggattaaataaaataaaaatccaagtcttaaatgaaaggatccggttggcatcataagtgtggcnacgtgaacgccgcgttcctgatggccgcggccgggccactcatcggcatccttgacgtctgcgacgtgccgcttgtgttcgtcgacttccgctgctccgacatcttctgcaccattgacgcctcgctcaccatggtcatgggcgacgacatggtcaaagtggtcgcctggttcgacaaccagtggg

SEQ ID NO: 403568 - DNA, 216 bp, Oryza sativa nipponbare
gtggtacaccgccggcgagcatctatactggaccgacaccaccaccctcttcatcatcgagctcatcctcatcggctgggccgagggccggcggtgggctgacatcatcaagcccggctgcgtcaacaccgaccccatcttccccaacaacaagctcaccggcaccgacgtcgggtaccctggtggtctgtggtttgacccgctcggctggggcac

SEQ ID NO: 403569 - DNA, 290 bp, Oryza sativa nipponbare
agtgtgagctcgtcttcgcaagatggggatcaaccccatcatgatgagcgccggagagctggagagcggcaacgccggagagccggcgaagctgatcaggcagcggtaccgtgaggcggcagacatcatcaagaaggggaagatgtgctgcctcttcatcaacgatctggacgcgggtgcaggtcgcatgggaggcaccacccagtacacggtgaacaaccagatggtgaacgccaccctgatgaacatcgtcgacaacccaaccaacgtgcagctccccgggatgtaca

SEQ ID NO: 403570 - DNA, 457 bp, Oryza sativa nipponbare
acgtgcacgtaccggtatcggaatttcggacctagacctacccgtaacgacatcgacaacgtcatctagaggcacatacctcttcggcatctacaccaggctggccgtggaggcatgggggctcaagaactgcacgcataatgaggagtggttcagcgacaccttcaccgccgttgtcatgccggcggacatctactgcgccgacatctttagatatgcctggaactcggtcaatctcagcctacgactcggactaaacaaggccgtctgcaaggtgttcacgatcggccacctgtgtcaccttaaccagctgaaattgatgggtgccctgagtggagtggagatggtgctcaaggacattagctaccctgtttgggacgacaagctcaagagctacatggacagcctcaaggagcccgggccgtccgggaagccatactccgcgcgctacatcggc

SEQ ID NO: 403571 - DNA, 243 bp, Oryza sativa nipponbare
aaacccggccggacccacgcgtccggagcaaataaggatagatcttgttgagctgcatatatggccccctccgcaatggcgacgaccgtcactaccgtcgctcccttccatgagctcaagtccaccgtcggtatgcccgtctcccgcctctctggcatctccagtttcttcaacgttagctatgtccgtaggatcaggtgcattcaggtgtgtcctatctccgtcattaagaacttccattac

SEQ ID NO: 403572 - DNA, 322 bp, Oryza sativa nipponbare
gtaccgaatcgcattcccgctcaacccacccgtacgtatccatggtattaggaaggaagtcgccgagttcatcgagaggcgtgatggttatgcaagtgatccagaacttatttacctcacagatggtgccagcaaaggtgtgatgcaaatgctgaataccattatcagaaatgagagagatgggattctggttcctgttccacaatacccgctttattttgctggcattttcctttttggagggtttcttctggccattattactttaaagataaggttaattgggaacttgattttttaattttctgaaattttttggttt

SEQ ID NO: 403573 - DNA, 258 bp, Oryza sativa nipponbare
ggcaatgtgatagtcactgatagcataccgaacatctctgccgtccggcgatgtcatcctatccttaattatgtccacatataataaaccaaacccatatgagtgtggtttgtgtgtagtgctgattattagctagaattaaacccgtgtgttatcgattaattaagcagctggtcgcttcggcgactatgcgtgtatcaacgtatgaatttgtgtgatgtgatgtacccgtgctattctcagtgaaattaatcaatc

SEQ ID NO: 403574 - DNA, 481 bp, Oryza sativa nipponbare
acccaagcgtcccgtcacgcattcgcatggacccttgtggaagatgacatactatggtactgcaccacgagtagttcatcagccacattttgctgcaacatcgacattcatagcaagagaggttgcaaaaggtctcatgaaataccaaccagatgtaattatcagtgtccatcctttaatgcagcatgtcccactccgaatcctaaggtcaaaaggtttactggataagattccgttcacaacagttgtcacagatctgagtacttgtcacccaacatggtttcacaagcttgttactagatgttactgtccatcagctgaagtgtcaaagagagcactaaaagctggattgcagccctcgcaaattaaagtctatggcctcccagtacgtccatcttttgtcaaacctattcgaccagaggatgaactgcgaaaggagttaggtatggatgaatatttgcctgctgttctactaatgggt

SEQ ID NO: 403575 - DNA, 199 bp, Oryza sativa nipponbare
cccagacctacgcgcacgccttaatgatgatcaagcctgacggcgtccagagaggcctgattggacacatcatgagcgggctccagaagaaaggattctacctgagggggatgaagttcatgaatgtggagaggtcctttgcacagtagcactatgccgacctttccgacacgcccttattacctggggttggtggagt

SEQ ID NO: 403576 - DNA, 454 bp, Oryza sativa nipponbare
ccacgcgtccggttaaagagatcagatgcatagctattcctccacagcacggaactcatcagatggggacactgcctgcaaaccttcctgagcacgagttccttaatgatttggagccactgggctggatgcatacccagcctaatgaagctccccagctatcaccacaggatttgacatcgcacgccaagatcttggagaacaacaagcaatgggatggtgagaagtgcatcattttgacatgcagctttaccccaggatcttgttcattgaccgcgtacaagttgacgccaagtggttacgagtggggccgtagcaacaaggacagtggaagcaacccacatggatatctcccgactcactacgagaaggtccagatgcttctcagtgacagattcctaggattctacatggtgccggataacaccccttggaacttcaacttcatgggagt

SEQ ID NO: 403577 - DNA, 464 bp, Oryza sativa nipponbare
acccgcgcatgcgatgtcctcccgcaaagaaggagagagcttggtgagctgcagagatggccccctccgtgatggcgtcgtcggccaccaccgtcgctcccttccaggggctcaagtccaccgccggcatgcccgtcgcccgccgctccggcaactccagcttcggcaacgtcagcaatggcggcaggatcaggtgcatgcaggtgtggccgattgagggcatcaagaagttcgagaccctctcctacctgccaccgctcaccgtggaggacctcctgaagcagatcgagtacctgctccgttccaagtgggtgccctgcctcgagttcagcaaggtcggattcgtctaccgtgagaaccacagatcccccggatactacgatggcaggtactggaccatgtggaagctgcccatgttcgggtgcactgacgccacccatgtgctcaaggagctcgaggaggcc

SEQ ID NO: 403578 - DNA, 422 bp, Oryza sativa nipponbare
  unsure (1)..(422): unsure at all n locations
cgcgcggnagacacgtggtggtgaggcctatgtgccgttcgggacggcgcgtgataatgagggagatgtgctaacttcctcaacatatgatagcagaattggaagagaggacggcggacagcctgtcacagaggatgtcagagggacataaccaccggcagcccctttagaggttcacccatgcccagaggacgcaaaagcacagctcgagtacaagctggagctgccggagcggatgcatgtgataagacgctcgagattatgcgcaaattctctgagcagtgcggccgacggttcaacaccttactttgatacgagaagtgcgacaccgccgttggtatcaagggacttgctgaacacaaggatcaacttggagcacctatatgcccttggaggcagttatgatgacatagctgctgagg

SEQ ID NO: 403579 - DNA, 490 bp, Oryza sativa nipponbare
cgtgccgtaccggaacggcagggtcgacccgcgcgacccgtccgaaagggagcattctgtcgccagctgggcatcacaccactcttgaagtacacaccaaatgcgagcctcgggtcgatagttatttgtgcggggatcggacttgtggactacaaagcacctattatcattgggagggtctgcaaaatgggtcccatttctggcatgggagcattctttggtgtggtcttcgcatctgttgagataggtcttttaatagctgtatcgatttcatttgctaaaattcttcttcaagtaacaaggccaaggactgtacttctgggaaaccttccaggcaccacaatatacaggaacactgatcagtatccagaagcaagacatattcctggggttgtaatagtgagggttgattctgctatctacttctccaactcaaactatgtccgggagagaactcttaggtggttgacggaggaagaagagaaagcca

SEQ ID NO: 403580 - DNA, 460 bp, Oryza sativa nipponbare
  unsure (1)..(460): unsure at all n locations
attccccgggcggccgcccacgcgncctcatgggtgctctaccaggcaacatcttgtaatcagaaaaccttggaaatctgcgggataaatacttccatttcacatcaaactctgtgttcatggttgaagagaaaagtgagcttatatttttatcaaaagagagatcattcttggttggcctgatcgatcgaagaggagaagctagccaagatgtacaaccctccggcgcagcaggacatgtcctactacgatcactgcaccaagcggcatgaggagaagggctgcctctacgcatgcatcttcactgcactgtgctgcttctgctgctacgagacctgcgagtgctgcctcgactgcctctgctgctgctgcaactaggctgccatatcaagccatagcaagaacatgatcaagatgaggatggagatcgcctccatctctcttacccctgagatttcat

SEQ ID NO: 403581 - DNA, 342 bp, Oryza sativa nipponbare
ccggaatcgccgccacgccccacacatcacgggagagagaggtgcaaaaaacttagcgctgaaactgaggatggcaacatccatgagcacctgcgcccttggtggcgaccggcccagtccaacgacctaccgtccatctcccgccggggatcctgcttcgccatcgtctgcagcggtgggaagaagatcaagaccggcaggccctacgtgataaggaggtggcatgtcagtcgatattgatgcaatctggcaggacgagcacggggaagggtgcgatccaattcggtgaccagtaccgtgcaatcgtggactggtacatgccactctactcgccggaggaat

SEQ ID NO: 403582 - DNA, 429 bp, Oryza sativa nipponbare
aattcccgctacgcccacgcgtaccacacggggaagggtgtgtaccaattccttgacaagtaccgcacaaacattaaccgcgtcaggctaatctactcgacggaggaatctactcccacctttgacacctacctttgtgcaaccaccaggcttctgatcttggcccttaccctaacctggctcctcggctgcctctctctcctagtctacaacaccagcgccctcaccatctaaatttcacccaaattcaatctatgtatgtaacaccaagctgggtgtctgcatattcatctgtaatctaagatagcctttctttgaatgcgatgttatgatgcccactgattaatcaaactgtattgtgattaatctatgtaacaacttactttcctgatgaagatatactacacttgatactttgaattttagatt

SEQ ID NO: 403583 - DNA, 260 bp, Oryza sativa nipponbare
aagccttagcgagatgcgtgggctggtatatctcgaaacaggtagtcgcagtaactcaggaaaatactctgttggacaacactgccagaatagagggatggtttgctagatataccatgtttgactgggttggcggaagaacatcagatatgtcaggtgtcggattgcttacagctgcgttacaggtgatggatatgaaagaaatgtttggtcaggcaactctaatgggtgaggtaaccaggactactggggcttaagaa

SEQ ID NO: 403584 - DNA, 604 bp, Oryza sativa nipponbare
cgaccaacgcgtgcggccaaagcctgagcccaagccacaccctaagactgagcctaagcctgagcccaagccagaaccaaagccagagccagaggctgaaccaaaaccagagccgaagcctgaacctaaaccagagcctaagcccgaaccaaaaccggagcctaaaccatacccagagccaaagcctgaaccgaaacctaagcctaagcctgagccaaaacctgaagcacctccgaagaagcacaagccgccgcacataccgccagcgaccgaccagtgacggcgatcaccggagaccgagcacttgctgctgcacgattgaggcattgacgacattatttcgccagagggaggagcgagcgagtcactacactgtaccgtttctggaataaagtgatgagctagctttctgcttgctttttttcccttttatttcacgttgttttttcagatgtgccactgctagctagtgtaattaaattatttcttatgtatctactgccatttttattaccgtgtctgtggcattcttttctacttagtagtgtatataaataataatatatatgtgtgtgcatcttctatgctgtccagttctgtttaa

SEQ ID NO: 403585 - DNA, 480 bp, Oryza sativa nipponbare
  unsure (1)..(480): unsure at all n locations
ccggacgacccagcgcgtccgcccacgcgtgcgcaaacacatgaaaaaaaaaagagaggccacaaatatgagctcacctgctgcctatagcttactgcgtgataacaacgacgatgaggaggagcgcacttacactgctggacttcacggctacaccgtgccgctactggtgcccaatggcgctcgcatacaagaagctccactaccactactcctagcaggagctcctcggcaccaagagcaacctcctcctctgctccaaccgcatacacgccaaggtcctccgtcctcctgcacggctacggagacagccgcgctccctgcgacgtcctcgtcatcctngagtacctagacgactccttaccggacgccacccctagcctcctcccctccgcctccgacgacccgtacgcgcgcgcctcggccaggttctgggccgactactttgacaagacagtgtacccggtggcgacgcgtctg

SEQ ID NO: 403586 - DNA, 450 bp, Oryza sativa nipponbare
gtccgagttccaggacgaccacgcgtacgcaagaagtgctcgagcaaagaaggagagagcttggtgagctgcagagatggccccctccgtgatggcgtcgtcggccaccaccgtcgctcccttccaggggctcaagtccaccgccggcatgcccgtcgcccgccgctccggcaactccagcttcggcaacgtcagcaatggcggcaggatcaggtgcatgcaggtgtggccgattgagggcatcaagaagttcgagaccctctcctacctgccaccgctcaccgtggaggacctcctgaagcagatcgagtacctgctccgttccaagtgggtgccctgcctcgagttcagcaaggtcggattcgtctaccgtgagaaccacagatcccccggatactacgaaggcaggtactggaccatgtggaagctgcccatgttcgggtgcactga

SEQ ID NO: 403587 - DNA, 434 bp, Oryza sativa nipponbare
cgacgcacgcgtccggcccgctttatctctatcaccaagaacacattcctgaagaaatatgatggaaggttcaaggatattatccaggaggtctatgaagctgggtggaaatccaagtttgaggctgccggaatatggtatgagcatcgtctcatcgatgacatggttgcttatgcacttaagagtgaagggggctatgtgtgggcttgcaagaattacgatggagatgtgcagagtgatttcttagctcaaggctttggttcattgggtttgatgacatcagtattggtgtgccctgatggaaaaacaattgaagctgaagctgcccatggcacggttacccgtcatttccgtgttcaccagaagggaggtgaaaccagcacaaacagcattgcttcaatctttgcttggaccagaagacttgcacacagggc

SEQ ID NO: 403588 - DNA, 420 bp, Oryza sativa nipponbare
ccgagttccaggcacgacccacgcgtacgcatgaagtgctcgagcaaagaaggagagagcttggtgagctgcagagatggccctctacgagatggcgtataccgccaccagtttgaaagtacccgtgttattgggaataggcaatttctaaaggctagagatctctttgattcagcttctgaagaaatacaaggcaaaattgactataggcacacttatttagatttctcaaaacttgaagttaaagtttctacaagtgcaggcggtcagcagaccgtgaaaacatgcccagcagcaatgggctttgcttttgctgctggaaccacagatggccctggagcttttgatttcagacaaggagatgtcaagggaaaccctttctggaagttagtaaggaacttgttaaagacaccaaggaag

SEQ ID NO: 403589 - DNA, 215 bp, Oryza sativa nipponbare
gacgcgtgggctcagctgcaaggagaaggagaaggtaggctccagccatggcttcccagcgtctccgccgccacatccgtgccgcagttccatggcctccggacctactcctctcctaggtccatggtgacgctgccatcgttgaggatgagcaagaagaggtcccagggcattcggtgcgactacatcggctcagccaccaacgttatcatggt

SEQ ID NO: 403590 - DNA, 500 bp, Oryza sativa nipponbare
cgtccggcacaacgggctggtgccgattgtcgagcctgagatcctcctcgacggtgagcatggcatcgacaggaccttcgaggtggcgcagaaggtgtgggcggagaccttcttctacatggccgagaacaatgtgatgttcgagggcatcctcctcaagccaagcatggtgacacccggtgccgagtgcaaggacagggccacccctgagcaagtatctgactacaccctcaagctcctccacagaaggatcccccctgccgtccccggcatcatgttcttgtcgggtgggcagtcggaggtggaggcgacgcagaacctgaacgcgatgaaccaggggcccaacccgtggcacgtgtcgttctcgtacgcgagggcgctgcagaacacgtgcctcaagacgtggggcgggcagccggagaacgtgaaggcggggcatgacgcgctgctccttcgcgccaaggccaactcgctggcgcaagctcggaagtacaccaacg

SEQ ID NO: 403591 - DNA, 165 bp, Oryza sativa nipponbare
  unsure (1)..(165): unsure at all n locations
cgtccgcccacgcgtccgcccacgcgtccgcggacgcgtggcgcggacgtggagtgcgcgtacgggatgtccggcgcggagctcctcgcggggtggcgcanttctacgcgctcatcgtgcgcagcggcaccaaggtgacgagggaggtgctggaggccggacgcg

SEQ ID NO: 403592 - DNA, 265 bp, Oryza sativa nipponbare
acgcgtcagactaagatgtgagaccctatcgtacctgcaccactcaccgtgaggatctctgaagcagacgagtcctgtcgatccagtggtccctcgcctcgagttcagcaaggttgaatccttctaccgggagaaccacaggtctcccgggtactacgatggcaggttttggaccttgtggaagctgcccatgttcggctgcaccgatgccacccaggtgctcaaggagctcgaggaggccaagaaggcctaccccgatgccttt

SEQ ID NO: 403593 - DNA, 470 bp, Oryza sativa nipponbare
tcgagccacgcgtccgcacctctctcgcgccgccgccgccgccgagcgcctggagcagcgtcagccatggccgtaggtaagaacaagcgcatctccaaggggaagaagggatccaagaagaagaccgtcgatccctttgctaagaaggactggtatgatatcaaggccccgtcggtgttcaatgtgcggaacatcggcaagaccctcgtgtccaggacacagggtacaaagattgcttctgagggcctaaagcatagagtgtttgaggtctccttagctgatctccagaacgatgaggatcaggcgtacaggaagatcagacttcgtgctgaggatgtgcaagggaagaacgtgctcaccaacttttggggcatgtcgtttactaccgataagctcagatcacttgttaagaagtggcagacactgattgaggctcattgtgatgtcaaaaccacagacggctacatgct

SEQ ID NO: 403594 - DNA, 158 bp, Oryza sativa nipponbare
  unsure (1)..(158): unsure at all n locations
cgcgtccgcttttcctcctcggttcggttccgtggttcgtctagggtttagtgggttgagatggcggcgggggagggccagtaccaggtgnggtgaacacccccttctcctaaccggacagaccatgttctagaatactacaaggtcctgtacttctt

SEQ ID NO: 403595 - DNA, 392 bp, Oryza sativa nipponbare
  unsure (1)..(392): unsure at all n locations
cgtaccggaatcgcgcacagggtccgacccacgccgtccgcggacgcgtgggttagcttctncctccccctctttaccttttcctcctcggttcggttccgtgggtcgtctagggtttagtgggttgagatggcggcncccgatgtcgagtaccgctgcttcgtccgcggcctagcctgggccaccgacgaccaggtcctttaggcctgcttccacaactactgcgagatctccaacttcaagatcaccaacgatagggagacttgttggttgccttgatttgtactaaaggtcatccgcttattagattgcatgttgatttccattttgatattgaactagaagaatcttatcttgatagaatattatcgatttgtcatgttattttttat

SEQ ID NO: 403596 - DNA, 425 bp, Oryza sativa nipponbare
ccagccgtcccgtgccacatttacaggagtacaaaaaaacatacaaatccacctgtttcattgactggccagttgctgtggagggactttttctacacagtggcctttggcactcctaattttgatcaaatgaaaggaaacaaaatatgcaaacagattccatggacagagaacgaagagctatttcctgcgtggagggacggtcggacaggatatccttggattgatgccatcatgattcagctgaggaagtggggttggatgcatcatcttgcacgccactctgttgcttgttttctaacacggggtgatctgtttatccactgggagaaaggtcgggatgtctttgaaaggctactgatagattctgactgggctattaacaatggcaactggatggggcttttctggtcatccttctttta

SEQ ID NO: 403597 - DNA, 473 bp, Oryza sativa nipponbare
  unsure (1)..(473): unsure at all n locations
cgaatcgcaagtgccgacgccaggcgtacccaatgacagaggctncgannncgacgacgaaacgatacctaaggagctgcggaatggctgggacgggtgtgcatcctgatgaaaaggctctaagtggtgcaatggagagagcgttcaactactacaatagaaagcctgaggtctggaaacagctggtgcagaaggacatgaggatagatttcagctgggcctcttcagcttcccagtacgaagatatctatcaaagagcagtggctcgagcgagggcagcagcatgaactcttgcggtttagtgagacctgagcctttctctgacgcggcgcttgatgccacaggcacagattctgccttctgaagaagccgcaccatgcacctctctgatgtgcgaacatggcttcatctgcagcttcgattcttggaatggaacccaagatatttaaagacatgatccgtcagactcatgc

SEQ ID NO: 403598 - DNA, 462 bp, Oryza sativa nipponbare
  unsure (1)..(462): unsure at all n locations
cggaatcgcaattcccacctcagacccacccatacgctcccttcgcctgtatgagctcgtcccggcgcggcgtctatcctcctccaccgggggcagggcatctgagctcaacagcaagcaaatggcaggtggcagaattgcacatgcgaccctcaaggggccgagcgtggtgaaggagatctgcattgggctcacccttgggctggtcgctggtggtctgtggaagatgcatcactggaacgagcagaggaagactagatccttctacgacatgctcgagaagggccagatcagtgttgtcgtcgaggagtagtcttttgtgttgaaagtcttttgcctttgttttttgcaagttatttctgaaactctctggagagcatgacaaagctagtgccgtggagattgtcatgaaaaataagcatagcaatttgagaacatttgatctcgttgaattngcttctt

SEQ ID NO: 403599 - DNA, 243 bp, Oryza sativa nipponbare
cggcgccctcgccgccggcgccttcgccctgtatgagaagcacgaggcgaagaaggacccggagaacgcgcacaggcacaagatcacggaggagatcgcggccacggcggcggtcggcgccggcggctacgccttccacgagcaccacgagaagaagaaggaccacaagagcgccgaggagtccaccggcgagaagaagcaccacctcttcggctgatcgacctcatcacaacgtcgccggcg

SEQ ID NO: 403600 - DNA, 481 bp, Oryza sativa nipponbare
ccgcaggcgccgttccggaatcgccccacgcacccacacagccaagagttgaagctgctatggttaatgcaagaatccggaagactgttagagcgacacaagctaaggttgcttatattggacctccaactgacttcaactatgaccatgagcatcttggcactggaccacaaacccttgttgagattgcagagggtcggcatcccttctgttcaactctgcagtctgctaagaatcctgtcatcattgctggggccgggttatttgaccgggaagaccaagatgcccttttctcaacgatagacactgtggccaaaaaattcaatgtgggtagaccagactggaacgggcttaacgttctattgctgcatgctgcacaagctgcagcgcttgatcttgcgctcgatgctgattctacagagagcatcaagtccacaaagtttctgtatctgatgggagctgatgatgtagacttggacaa

SEQ ID NO: 403601 - DNA, 457 bp, Oryza sativa nipponbare
gtcgaccacgcgtccgcccacgcgtccgcccacgcgtccgaccacgcgtccgccaatgtgcatggagatgagctcatcatcacaacgaccagtccatacgagcaacaagcatttgcatcaaagactgattggcgtgttagggctatctctgccacaaacttgtatcttcgtgtcaatcacatttatgttaactcagatgatataaaggagactggctacacttacattatgccaaagaatatattaaagaagttcatatgcatagcagatttaaggacacagattgcagggtttctgtatgggctgagcccacaggataatccccaagttaaagagatcagatgcatagctattcctccgcagcacggaactcatcagatggtgacactgcctgcaaaccttcccgagcacgagttccttaatgatttggagccactgggatggatgcatacccaac

SEQ ID NO: 403602 - DNA, 283 bp, Oryza sativa nipponbare
ccacgcgtccgcccacgcgtccgcgagctcaaaagacacacattccaaaagcatctgtggccatctcctcctagtcctaggctcgcgtcaatggcggcgtccaccatggcactctcctcccctgccgccctcgccggcaaggcggtcgccaatgccaaggtgttcggcgagggccgcgtcacgatgcgcaagtcggcggccaagcccaagcccgccgcggcgtcggggagcccgtggtacggcgccgaccgcgtgctctacctcggcccgctctccggcgagc

SEQ ID NO: 403603 - DNA, 455 bp, Oryza sativa nipponbare
cgggacgaccgcacgcgtccgcaccaccctcaactacttcggcaacagcatccccatcaacctcatcgtcgccgtcgccgccgaggtcgtcctcgtcggcggcgccgagtactaccggatcatcaacggcctggatctggaggacaagctccacccaggtggcccattcgacccgctggggctggcgagcgacccggaccaggcggcgctgctgaaggtgaaggagatcaagaacgggcggctggccatgttctccatgctggggttcttcatccaggcctacgtcaccggcgagggccccgtcgagaacctctccaagcacctcagcgaccccttcggcaacaacctgctcaccgtcatctccggcgccgccgagaggacgcccagcctgtaaacatctcgccgccggcgacgctggctggcctcaagttaattttaatcttacccgggaagaa

SEQ ID NO: 403604 - DNA, 470 bp, Oryza sativa nipponbare
cgcccgcggtaccggtcccggattccggctacgcctacgcatgaaagcatacgcagacacaagggattaactcatcactcacttagctaattggatgctgtacctagatcgcgtcacacttgaccgactacaaacagccaatgcttttcctcaacaccattgcggttctggtactagtggtagcaaagctgccaaacatgcacaaggtccgtatatttggaatcaatgcagatatctgaggaccatatgaagaacatcacggcacaagcttctgtgtgtttgcaacgagggacaagcgaactttgtgcaaacacggtatctaaagtagtgaaaaaactaaactttttcaccactgcaatctgtagtatgtgcataggtgtaggaagaacctgtaaatgttactgtagcttataatttgcctacaggttggaggctgcttgatgtttgctcatgccacttcctttaagaac

SEQ ID NO: 403605 - DNA, 77 bp, Oryza sativa nipponbare
acacatgggatttacttcatcactcacttagctaattaaatcttcgaccatgtcggacaagtgcggatgttttaatt

SEQ ID NO: 403606 - DNA, 238 bp, Oryza sativa nipponbare
  unsure (1)..(238): unsure at all n locations
gctggtgctcccgaacctcaangggaagctgaacgggatcgcgctccgggtgccgacgccgaacgtgtccgtggtcgacctcgtggtgcaggtgtccaagaagaccctcgccgaggaggtgaaccaggcgttccgagacagcnccnncaacgagctcaagggcatccttgaggtctgcgacgtgccgctcgtgtccgtcgactttaggtgctccgacgtgtcgtgcaccatcgacgcg

SEQ ID NO: 403607 - DNA, 311 bp, Oryza sativa nipponbare
ggcaactccagcttcggcaacgtcagcaatggcggcaggatcaggtgcatgcaggtgtggccgattgagggcatgaagaagttcgagaccctctcctacctgccaccgctcaccgtggaggacctcctgaagcagatcgagtacctgctccgttccaagtgggtgccctgcctcgagttcagcaaggtcggatttcgctaccgggagaaccacagatcccccggatactacgatggcaggtactggaccatgtggaagctgcccatgttcgggtgcactgacgccacccaggtgctcaaggagctcgagga

SEQ ID NO: 403608 - DNA, 472 bp, Oryza sativa nipponbare
cgagtacctgctccgttccaagtgggtgccctgcctcgagttcagcaaggtcggattcgtctaccgtgagaaccacagatcccccggatactacgatggcaggtactggaccatgtggaagctgcccatgttcgggtgcactgacgccacccaggtgctcaaggagctcgaggaggccaagaaggcgtaccctgatgcattcgtccgtatcatcggcttcgacaacgtcaggcaggtgcagctcatcagcttcatcgcctacaagcccccgggctgcgaggagtctggtggcaactaagccgtcatcgtcatatatagccttgtttaattgttcatctctgattcgatgatgtctcccaccttgtttcgtgtgttcccagtttgttcatcgtcttttgattttaccggccgtgctctgcttttgtttttgtttcacctgatctctctctgacttgatgtaagagtggtatct

SEQ ID NO: 403609 - DNA, 279 bp, Oryza sativa nipponbare
tcgaccacgcgtgcgctgatctgtgccgtgaccctcgccgggctcctcggcggcggcgccctcctcgtctacaacaccagcgccctcgccggctaaatttgacccaaatccagtctatgtatgtaacaccaagctgggtgtctgcatattcatctgtaatctaagatagccttcctctgaatgcgatgtgatgatgcccactgcttaatcaaactgcattgtgattaatctatgtaacactgtacttgcatgatgatgatatactacacttgatacttg

SEQ ID NO: 403610 - DNA, 562 bp, Oryza sativa nipponbare
  unsure (1)..(562): unsure at all n locations
acttctccaagtaccaggcctatgagctgatccatgccaggtgggcgatgctcggcgcgtctgggttcatcatccccgaggcctgcaacaagtttggcgcaaactgcggccccgaggccgtctggttcaagaccggcgccctcctcctggacggcaacaccctcaactacttcggcaacagcatccccatcaacctcatcgtcgccgtcgccgtcgaggtttttnttttntttttgttntttttctcttttttttttcctttctggttttctttttttttcttgtgcctttttgttccttttttttgtttctgttttgttcactttttttttcttttctttttccctcctttgtgtgaggtggggttgctatnctcttttttctaatatttatatagtatttttttttaaaattttttcataattatttttctaaaatatttttaacatttgtttctcaaaatttttttcaggtttttttgccattattttttaatattttttattatatttttttttatttgtactatcatctttgttcatttatttttagattttttatt

SEQ ID NO: 403611 - DNA, 343 bp, Oryza sativa nipponbare
gcgtccgcggacgcgtgggtggctccccggcctcccttctcccacctacctcaacggcagcttgccaggcgataacgggttcgacccgttgggtctggcggaggacccggagaacctgcggtggttcgtgcaggcggagctggtgaacgggcggtgggcgatgctgggggtggccgggatgctgctgcctgaggtgctgacgaagatcgggttgatcgacgcgccgcagtggtacgacgccggcaaggccacctacttcgcgtcgtcgtcgacgctgttcgtcatcgagttcatcctgttccactacgtggagatccagcggtggcaggacatcaagaaccct

SEQ ID NO: 403612 - DNA, 201 bp, Oryza sativa nipponbare
gtccgcgctcatcttcctctacgtgagcatcgccaccgtgatcgtgtacaagaaccagagggccaccgtcgacgcgttgaccggcgtcggctacctcggcgtggcgtggtctttcggtgccaccatattcgtcctcgtctactgcaccggcggcgtctccggcgggcacatcaacccggcggtgacgctgtgccttttttt

SEQ ID NO: 403613 - DNA, 289 bp, Oryza sativa nipponbare
gtatgtgggcccatatccatgatatatggccaattaacaccgatggtgctcagaagcttatacatctagttggccaaaagagaggtggcttattgatggaagagacagatgaacaaccaaagaagaagatcaggatgggtatgcctgcaacacagtggattagtgtttataatgccagacggcctatgaaacataggtatcactacaacgttgcagattcaaggcttgtacaacacatgggattaactcatcactcacttagctaattaaatcttcgaacatgtcggac

SEQ ID NO: 403614 - DNA, 380 bp, Oryza sativa nipponbare
gcggacgcgtgggtttggaacccttactcctgatattgttgtcctgacttctttgtatagcatagctgggctagggattgctattgtaaatgactttaagagtgttgagggagatagagctctggggcttcagtcactcccggttgcttttggtatggaaactgcaaagtggatatgtgtaggagcgattgacataactcaattatccgttgcaggctaccttttcagttccggcaagccttattatgccctggcactgctaggactcacaattcctcaggtggtcgttcagttccaatacttcctcaaggaccctgtgaagtatgacgtcaaataccaggcaagcgcgcaaccgttcttcgtcttgggccttctggtga

SEQ ID NO: 403615 - DNA, 242 bp, Oryza sativa nipponbare
gcgtccgttttttttggccgggagagagagcatctagctagggagagaaaggaagagacgagaggagatggattgccactgcttatgctcccatggcgagccagcttatgaagagcagcttggtgtgctccaagccgagggggctgtctggtgcttcgctgacaaggaggccccggttcacagtcaaggccatccagtctgagaagccaacgtaccaggtggtgcatcccatcaatggctac

SEQ ID NO: 403616 - DNA, 253 bp, Oryza sativa nipponbare
  unsure (1)..(253): unsure at all n locations
cgcgtgcgatgagcttgagcttggagagagacaacaatggcggctcaggctcttctctctgggaggcagctgctgnggaggccattgcaatcgggagtctccaggtcttcttcctccaggaaggcacccttcatggtcagggcagaggccactccccctgccaagcaaggtgctgacaggcagctgtggttcgcatccaagcagtccctgagctacctggatggcacgctttcgggagacttcgggttcgacc

SEQ ID NO: 403617 - DNA, 429 bp, Oryza sativa nipponbare
ctctgttgggtatgctcctccgatttggcagagcatgcaggagcaggaactgcttgcagatgatgtcttctcgttggggcggaaccgagacccggatgcatgctctggtggtgagctcgtctttggtggcatggatccgaagcattataagggggatcacacctacgtccctgtttcccgcaaaggctactggcagattaacatgggggatctccttattgatggccactcaactggcttttttgcaaaaggctgtgcagctattgatgactccgtttctcccttgcttgttgtacattatctaaagttgtttacgtatactcttctaaattggctgaaagatttttcttatcttttattcaaatatgggggtgggggggttgggggtgattttcccaatattttatatttccaatatttcaaattttt

SEQ ID NO: 403618 - DNA, 527 bp, Oryza sativa nipponbare
gcgtccggcgcggcggctgcttccgtgatggcgtacgcggcggatgggagagcggcgcggctgatgcgataccgttagaagcgcaagaaccggcgggtggagaagacgatccggtacgcgtcgcgcatggcctactccgagacgcgcccccgcgtcaagggccgcttcgccaagcgcgccgactaccactatcgcctcgcgccagcgtcgtatttcatgctcgtcttcatcatttactgtgtcgtgtctaccttttatagtttagatatcgatctatctttattgtctgaaattatttcttttttttatatttttctcttttttttatatttttttgtgtttttaaaatatttttttttggagggggtgtgtggtgttttctttattttttttttatttttatttatttctgttttgttaatatttttaattttttttatttttttaatatttttttattttttttatatttttttgtttttttaattttttaatatttttctatattttctatttttttttatatt

SEQ ID NO: 403619 - DNA, 382 bp, Oryza sativa nipponbare
gcgtggtgcttggtgagctgcatagatggccccctccgtgatggcgtcgtcggccaccaccgtcgctcccttccagggtcgcaagtccaccggcgggatgcgccgtcgcccgccgctcctgcaactccagcttcggcaacgtcagcaatggcggcaggatcaggtgcatgcaggtgtggccgattgagggcatcaagaagttcgagaccctctcctacctgccaccgctcaccgtggaggacctcctgaagcagatcgagtacctgctccgttccaagtgggtgccctgcctcgagttcagcaaggtcggattcgtctaccgggagaaccacatatcccccggattctacgatggcatgtactggtccattgtgggaggtgt

SEQ ID NO: 403620 - DNA, 287 bp, Oryza sativa nipponbare
  unsure (1)..(287): unsure at all n locations
tgagctaccaaaacatcgacttcttgttcgtgatgagaaatatcctcatattgtgcatgtgtgataaaggagcaacgaacagtaatgaatcataagctcgttctgatctttatgacccagaagaggagatgattagaggccttacacaagtaccgtgtgaacgtgtngatgtgagcttccagaaaagtagtcaaagattggttgcgcataacaccatccaggtgaagagctatnggctaaactcagacgggcgcgacgttatcaatcacatgatggataattttatc

SEQ ID NO: 403621 - DNA, 291 bp, Oryza sativa nipponbare
cgcgtgcggcacgcgtccgtatgccagtaagctagctaactaactacgtggctatggcccccaccgtgatggcctcctcggccacctccgaagtccattccaagggctcaagtgcaccgccggtctccccgtcagccgccgctccaccaactcgggcttcggcaacgtcagcaatggcggaaggatcaagtgcatgcaggtgtggccaattgagggcatcaagaagttcgagaccctatcgtacctgccaccactcaccgtggaggatcttttgaagcagatcgagtacct

SEQ ID NO: 403622 - DNA, 358 bp, Oryza sativa nipponbare
cctctcgaaacgcggcttcgacatggcggcggcggcggcgcacaaggaggaggtgatcgggaagctcagcgtccgcgtggtgcggtgctccaacctcatcatcgccgacccgctcacccacaccagcgacccctacgtcgtcctctcctacggcccacagaaagtgaagaccagtgtccagaagaagaattccaatcctgtctggaatgaagtactgcagctcgcagtcacaaatcctacaaagccagtaaaacctgaagttttcgatgaggataaattcacagcagatgacagcatgggcgtagctgagttcaacgtgactgacatctacgatgctgctaagctggatctaaagcat

SEQ ID NO: 403623 - DNA, 295 bp, Oryza sativa nipponbare
gtggatgatcctgaagccgtacgggctcaagttcgccaagggccgcgacggcggcacctacatcgaggggatcctccccggcgccgccgccgaccagaccggcaagttcgaagtcggcgacaaggtcctcgccaccagtgctgtatttggggaggaaatctggccggcagcagggtacggacagaccatgtactgcatccgtcagagtgttgtgcccctctacatgaagatggagaagagatttgggaaatgggatggtgctgttgagctcagtgtgatggagatcatcagggct

SEQ ID NO: 403624 - DNA, 506 bp, Oryza sativa nipponbare
ttccttaaagtctatataatgatctatgctcaagccacaagaaacttctcggaggctaaccttattggcaaaggaagcgtgatggtacggtgtacagaggtaagttgaaggaatgtaagttggaagtagccgtgaaggtttttgaccttgagatgcgaggtgccgaaagaagcttcatatcggaatgtgaagctctcagaagcattcaacatagaaatcttcttccaatcataactgcatgctcgaccgtggacagtacgggcaacgttttcaaagctttagtttacgagtacatgcctaatggcaacttggacacttggatacatgacaaagagggtgggaaagctccccgacgtttgggtttaagacaaacaattagcatatgtgttaacatagccgatgcactggactatttacaccatgaatgcggaagaacatctattcattgtgattagaaacccatcattatacttttagctgatgacatgaatgcttttttgggagat

SEQ ID NO: 403625 - DNA, 251 bp, Oryza sativa nipponbare
ctctccgccaagctggatgcgtgaaagcaagaggaattcaagaagaacattgagggtgccaccaagtacttgcttggaaagctcaaggaccttcagttctttgttggcgagagcatgcatgatgatggcggcttggtgttcgcctactacaaggacggagccaccgacccaaccttcctttacttctctcatgggctgaggaggcaagtgctgagcggtccttctgctcgacactgatgttttatctatgc

SEQ ID NO: 403626 - DNA, 487 bp, Oryza sativa nipponbare
acgcgtccgagcatagcaacacaagggattaactcatcactcacttagctaattaaatcttcgaccatgtcggacaagtgcggcaactgcgactgtgctgacaagagccagtgcgtgaagaaaggtaccagctatggcgtcgtcatagttgaagccgagaagagccacttcgaggaggtcgccgccggcgaggagaacggcggctgcaagtgcggcaccagctgctcctgcaccgactgcaagtgcggcaagtgaagtcacgaagcaaccgaacactcgccgccggcgagtcacctaccttaattagtccacaataaaaaccacccatatgagtgtggtttgtggtgtgctgattatagctgaattaaacccgtgtgttatcgattaattaagcagctggtcgcttcggcgactatgcgtgtatcaacgtatgaatttgtgtgatgtgatgtacccgtgctattctcagggaaattatatcaatcgt

SEQ ID NO: 403627 - DNA, 209 bp, Oryza sativa nipponbare
cagcatgcatgcaaagtcgatcgatcgtcagcacacacgaccaagatcgagatggcccgtgcgcagctggtgttggtcgccctcgtggcatgctctgctcctggcgggcccacacaccaccatggccgccatcagctgcggccaggtcaactccgccgtgtcgccctgcctcagctacgcccgcggcggctccggcccgtcggtggtct

SEQ ID NO: 403628 - DNA, 241 bp, Oryza sativa nipponbare
tttacacaagtgctaggtgctgaacaacctccggaaggagggcaaaagcatcagggctgtattgatacacgctctgacactatcagtggttatggtgcaaatggagctataacacactacagaccatctccagagagctgcagctctgtcggaagcgacattctgtttgtgctagatagaggtgctgaatacatgtgtggaactactgacataacatggactgttcactttggtgagccaa

SEQ ID NO: 403629 - DNA, 277 bp, Oryza sativa nipponbare
  unsure (1)..(277): unsure at all n locations
cgtcagcaatggcggaaggatcagatgcatgcaggtgtggccgattgagggcattaagaagttcgagactctgtcgtacttgccgncattgacagtggaggaccttntgaagcagatcgagtacctgctccgatctaagtgggtgccttgcttggagttcagcaaggtcggattcgtctaccgtgagaatcacagatcacccggatactatgacggtaggtactggaccatgtggaaactggccatgtttggatgcaccgatgccacccaagtgctc

SEQ ID NO: 403630 - DNA, 378 bp, Oryza sativa nipponbare
  unsure (1)..(378): unsure at all n locations
taattgggattgcaaatgttgacgcggatgattggaggaacgagattgttgcatatctgaagaacctatctgttgacgaaaaacacgaggcctgtgagatctgcttaactcagtgcaggttcaaagctcgtcttcgggcgtgttagcataccagntgatttgatcctgcaatcaacaagaaatagatacaaagaaaccacggttaaatntataaacgatagccaatcggcttagtgccgatgacatttcatttatctttgagctgatgtcatatgtaaatcgatgcgcagttgtaaatagacgataaagaactaaatctacttgatcggctgtagatattaacaatatataattcctatatcaatatatacttaaatc

SEQ ID NO: 403631 - DNA, 334 bp, Oryza sativa nipponbare
gtttgcactgcattgtacagtgacaatgagatgaacataaaatatcgttacaaggatgaagagttatcatttattccaagcctctgtttaccatccaattcactatcctttgcatttaagcgccaattcactccttcagacaagttaagctaccggtaccagtttgacacaaactactggagttttatctataaacacaaggccagtaagcatgtcaagtggaaagctggttatgagtctgaccaaaggcttggatgggcatctctttgggttggagatgcagggggcatgacgaatgaggtgcctatgaaggctaaagttcagttgacgctta

SEQ ID NO: 403632 - DNA, 478 bp, Oryza sativa nipponbare
ggcggctcatgctcttctctctgagaggcagctgctgaggaggccattgcaatcttcagtctccaggtcttcttcctccaggaaggcacccttcatggtcagggcagaggccactccccctgccaagcaaggtgctgacaggcagctgtggttcgcatccaagcagtccctgagctacctggatggcacgcttccgggagacttcgggttcgacccgctggggctatcggacccggaggggaccggtgggttcatcgagccacggtggctggcctacggcgaggtgttcaacggccggacggcgatgatggtcgtcgtcggcatggtcgccccggagctcctcggcaagctgtgcctcgtccccgccgagacggtgatcgcgtggtttcagaccggcgtgatccccctcgtggtcacctacacctactgggccgatccctacaactcttttgtcttcgagctcggcctcgtcggtttg

SEQ ID NO: 403633 - DNA, 297 bp, Oryza sativa nipponbare
ggacctcctcgaggacgacgacgagttcgaggagtttgagatcgaccaagaatgggatgacaaggaggatggtgatgaggccatccagcaatgggaggatgattgggatgatgacgacgtcaatgacgacttctcgcttcagctgaggaaggagctggatgaatgcaacacccagaagatctgaactacttttttttcccagtatgtttagctgtagcacctatgctgtgtcaggcacttttgtaccctttgtgccccattgctttctcatacctcaatgttcctactatacttcta

SEQ ID NO: 403634 - DNA, 342 bp, Oryza sativa nipponbare
ccggtcgaccacgcgtccggcgagttccccggcgactacgggtgggacaccgcggagctctccgccgacccggagacgttcgccaagaaccgggagctggaggtgatccactccaggtgggcgatgctcggcgcgctgggctgcgtgttcccggagctcctcgcccgcaacggcgtcaagttcggcgaggcggtgtggttcaaggcggggtcgcagatcttcagcgagggcgggctcgactacctcggcaacccgagcctgatccacgcgcagagcatcctcgccatctgggcggtccaggtggtgctcatgggcgccgtcgaggggtaccgcatcgccggc

SEQ ID NO: 403635 - DNA, 251 bp, Oryza sativa nipponbare
tgtgggaatggtatggctggtggagagctggttgtagttcctgtagaaaaaacaggatttgttcctgaggatgcggctatagttggtaacacttgtctgtatggagctactggtggtcaggtatttgtgagaggcaaaacaggtgaaagatttgcagttagaaactcccttggtcaagcagtgtgtgagggcactggagatcattgctgcgagtacatgactggtggctgtgtagttgtacttggcaaagt

SEQ ID NO: 403636 - DNA, 434 bp, Oryza sativa nipponbare
  unsure (1)..(434): unsure at all n locations
gattccggtcgaccacgcgtccgtactcgagcaagaaggagagagcttggtgagctgcagagatggccccctccgtgatggcgtcgtcggccaccaccgtcgctcccttccaggggctcaagtccaccgccggcatgcccgtcgcccgccgctccggcaactccagcttcggcaacgtcagcaatggcggcaggatcaggtgcatgcaggtgtggccgattgagggcatcaagaagttcgagaccctctcctacctgccaccgctcaccgtggaggacctcctgaagcagatcgagtacctgctccgttccaagtgggtgccctgcctcgagttcagcaaggtcggattcgtctaccgtgagaaccacagatccnccggatactacgatggcaggtactgaccatgtgtgtngctgccatgttcgggtgcactg

SEQ ID NO: 403637 - DNA, 429 bp, Oryza sativa nipponbare
  unsure (1)..(429): unsure at all n locations
tgtgatcaggatggttcccccatattagcagttagtagtttagcaattcactcaaagaatctgtctgaaaatcctaaatgctcgcttctggttgccaaagaccctgaggacagaacagatactgtgattactgtatatggtgatgccacacctgtttcagaccaagaaaaagatgcagtacgaagtgcatacttacgaagacatcctgaggcattttgggtagattttggtgacttccgttttctgcacatcaagccaaaagccgtgcgatatgtgtctgaagttgcaactgccatccttggttctggagaattcagtgctgctgagttcaaggaggcaaaagtggacccaatatctcaattctcaacccctattacgagccacatgaataaggatcattctgatgatacaanagctcattgtgcaata

SEQ ID NO: 403638 - DNA, 80 bp, Oryza sativa nipponbare
gtccatcgtgtctcagcgagatgacccggcggtgcatgaccgacatgatcacctacgccgacaccgacgtcgtcgtcgtc

SEQ ID NO: 403639 - DNA, 332 bp, Oryza sativa nipponbare
cgcgtgcgcggcatcgtcatgcaatggcggcaggatcaggtgcatgcaggtgtggccgattgagggcatcaagaagttcgagaccctctggtacctgccaccgctcaccgtggaggacctcctgaagcatatcgagtacctgctccgttccaagtgggtgccctgcctcgagttcagcaaggtcggattcgtctaccgtgagaaccacagatcccccggatactacgatggcaggtactggaccatgtggaagctgcccatgttcgggtgcactgacgccacccaggtgctcaaggagctcgaggaggccaagaaggcgtaccctgatgcat

SEQ ID NO: 403640 - DNA, 173 bp, Oryza sativa nipponbare
tcctattattccttgttggcaccccttcttttatgggaagtggagggggagttcccacgcctgcaaaaaaatattttctttcgaaaggggttcctgtatcaaagaggagcaaatcattggctttcgggtttaggggaatgtaccttgggtcagggacagggcttgcattttcc

SEQ ID NO: 403641 - DNA, 474 bp, Oryza sativa nipponbare
cgccgtgttccggctagacctacgcgttacgcatataggtagctgcgagccagaggatcgtacatgtgcatgcgttaacacaaactctgtatctgccaccaagctagctaccaagtgtgaaaacggggctaatgtgtcatgtgatggtgtgggtagtactggacagacacctcccttgcagcagcacagccatagtcgagagatccactcaaatatgaatggcttcactgccttgccaaacacaattagtcaatacgcagggcaaggattcttgggacagatgcagttgacacatgctcaagttcttgggatgttttccggagtcaatggcagaacaaatggctttatccatgggcacccactggtggctaatagcattaaagcaccacaaaatggggatgttggaaaggtagccactaatccatcaccagatgcaagtcatgattcaaaagctgcattatcacaaaccatgac

SEQ ID NO: 403642 - DNA, 340 bp, Oryza sativa nipponbare
gacccgttacgcatatcgggtgctggtagcacgcaggaacgaccatggcggaggagtcagagcagagcatgtagcggcggccgcgtcagggtgtgcgtcaccggcggcgctgggttcatcggctcgtggctcgtcaagaagctcctcggcgccggctacaccgtgcacgccaccctgcgaagcatatgggacgaggtgaaggtgggccttctgcggcggctcgtccccggcgacgcgccgacggagcggctgcgcctgttcgaggccgacctctaccacgccgtcaccttcgctcctgtcatcgccggcttgcagttcgtcttactcgtcgccacgccct

SEQ ID NO: 403643 - DNA, 365 bp, Oryza sativa nipponbare
ggattccgggttcgagccacgccgtcacggccgctggggcgcacgatcatggccccaacctcccgcgttctcgccgccaagacccccttggtggggcatccgcggccctccaatgccctcgtccgggacattgtcgtcgccgtcaccggccgcatgaccatgagcaaggaggtgtggtacaggccggatagggtgaagtacctggggccattctcggcgcagaccgccggcttacctgatgggcgagttcccgggcgactactggtgggacacgggggggctctccgtggacccggaggcgttcgcgaggaacaaggcgctggaggtgatccacggccggtgggcgatgctcggcgcgctgggct

SEQ ID NO: 403644 - DNA, 363 bp, Oryza sativa nipponbare
gcggcaccggtcccgattcccggttcgcccacgcctacgcttgcatatctttacagggaagaactctacctaacatggtaaaacctctggggcatcagctgatggagccatttctcaaagcggggaaagtggcagtgaaagctctagtgaaggaagtgaagcaaattctcagaacgattcacattacatggcaagggggcaatgacaagatcgaaaggttcgaaattcccaaaatggtgtatcacgttcaccatcccaagcaaagatgaatcaaactatggcaatcatgccaatgacaataagtggtccaagtcccgctccaactaccaactttaacataggaatggactactgggccaacac

SEQ ID NO: 403645 - DNA, 379 bp, Oryza sativa nipponbare
tgtatggcaagaagacggcaccaccggtaccggcgcagcagaagcagcgcagggggaggagggaagatgccgtcatgccactttctgctggctcggacgcgcgacctcttgacgcgttcgttccgcatgaagggttacatcccgttcaccacctacctgaggacggacaagatcggcgattacgtcggggtcatggtgaacggcgccgtgcacaaggacatgccgcacaagttttaccacgggcttaccggccgcttttggaacgtcatcaagcacgccatcggccactagatcaataagcaggtactttaccgcatcatcatgaagaggatccatgtttcggtggagcattgctagccattcaggtgcaccgagtagc

SEQ ID NO: 403646 - DNA, 467 bp, Oryza sativa nipponbare
cacctagacccacgagaagatggcaggtgctgtgcgcaccggggggaagggtagcgtgcgcagaaagaagaaggcaggccataagactacaaccacagatgacaaaagacttcagagcactctgaaaagagtaggagtaaacaccatccctggcattgaagaggttaacattagcaaggatgatgtggctattcagtttctgaatcctaaagtgcaggcttcaattggtgctaatacatgggttgtcagtggaactccacaaacaaagaagctgcaagatctgctgccatcaattatcaaccaacttggtcctgacaacttggataatctgcggaggcttgcagagcaattccaaaagcaggctcctggtgcttctggtgaagaggctggtgccagtgctggagctgctcagggtgacgatgatgatgttcctgagcttgtccctggtgagacatttgaggaggcag

SEQ ID NO: 403647 - DNA, 281 bp, Oryza sativa nipponbare
ctgcgcctcgcaggtacgcgatcccggattcgaggcacgacgcacgcgtacggaccgatccaccagaaattgacaaaaagaagtaccttgtccctgctgatcttactgttggccagatcgtctatgtcgctctgcagaggattaatcttagtccagaaaacgccatatgtgtctttgtgaagaacacattgacgccaactgctattttgatgtctgcaatctacaaagagaacaaggatgacgactgcttcctctacatgacttacagtggccagaacaca

SEQ ID NO: 403648 - DNA, 469 bp, Oryza sativa nipponbare
cggtccgggattcgagctacgcgtccgcccacgcgtccgggaaggccttcttcagctgccaagtgacaaagccctcatggctgacccagccttccgtccactggtggagaaatatgctgcggatgaggacgccttctttgcggattacgccgaggcccacctcaagctctctgaactgggatttgctgaggaataagaagcctttagagagcgggatatccgcaaaagattaatgccgatttgtattttgcgccttagagtcagtacgatcaagactgtcgtggcggttgtaataaaaattagtgtgctttgggccatctttttatgtgattccaattgtctttctcttcattcttgctttgatgctctttgtctggacctctagaccggcgtattggactggggagtttcaaaagtaccaaagcttttgcttgcaaagatactaatggatggattcccttggaggatg

SEQ ID NO: 403649 - DNA, 415 bp, Oryza sativa nipponbare
  unsure (1)..(415): unsure at all n locations
cggaattatacgggngacgccccacgcgcccgcgcttgaagagtcatattacgacgccgccgtctacggtatccacgcgcctgctccttctccgccgccgccgccgacaccgaagtatcagccatggccgaagtggagctcccgcagcaggaggtcaagctcttcagccgctggtccttcgaggacgtccaggtgaacgacatctcgttggcggactacctggcggtgaacccgacgaagcacgcgacgtacctgccgcacacggcggggaggtactcggcgaagaggttccggaaggcgcagtgccccatcgtggagcgcctgaccaactcgctcatgatgcacggccgcaacaacgggaaagagatcatggccgtgcgcatcgtcaagcacgccatggagatcattcaccttc

SEQ ID NO: 403650 - DNA, 462 bp, Oryza sativa nipponbare
  unsure (1)..(462): unsure at all n locations
ggcgctaggcgtccgatttgttctcgatcagagaaagaaagatcggcatactctttgaggacgtcgaggtgagggtacttggcggcgaagtgttcgacgatgtcgtggatggtcgggtaggcggcggagcagaggaagcggccggcgagcgacggctgatccatgcagaagacgagcgcgtcgcagacgtcgtcggcgtgcaccagcggcaccgacccgaccagcctctgcagcagcctcaggaacgcgaaggacggctcgttccgggacaccggcgacacggcgttctccagcgtctccggggcgcggccgaggaccgtgtcgccggcgacgaggccgcacggcagggtgaccacctcgaacgcccggccctcgccgtcgttgtagcccaggagctccttctccgacatcatcttcgacagcacgtacttctgcaaaacaatgttntaattggtttcttct

SEQ ID NO: 403651 - DNA, 480 bp, Oryza sativa nipponbare
ccccctccgtgatggcgtcgtcggccaccaccgtcgctcccttccaggggctcaagtccaccgccggcatgcccgtcgcccgccgctccggcaactccagcttcggcaacgtcagcaatggcggcaggatcaggtgcatgcaggtgtggccgattgagggcatcaagaagttcgagaccctctcctacctgccaccgctcaccgtggaggacctcctgaagcagatcgagtacctgctccgttccaagtgggtgccctgcctcgagttcagcaaggtcggattcgtctaccgtgagaaccacagatcccccggatactacgatggcaggtactggaccatgtggaagctgcccatgttcgggtgcactgacgccacccaggtgctcaaggagctcgaggaggccaagaaggcgtaccctgatgcattcgtccgtatcatcggcttcgacaacgtcaggcaggtgcagctcatcagcttca

SEQ ID NO: 403652 - DNA, 301 bp, Oryza sativa nipponbare
  unsure (1)..(301): unsure at all n locations
ggataactcatactcactagctaataaatcttcaccatgtcggcaagtgcggaactgcgactgtgctgacaagagccagtgcgtgaagaaaggaccagctatggcgtcgtcatagttgaagccgagaagagccacttcgaggaggtcgccgccggcgaggagaacggcggctgcaagtgcggcaccagctgctcctgcaccgactgcaagtgcggcaagtgaagtcacgaagcaaccgaacactcgccgncggcgagtcacctaccttaattagtccacaataaaaaccacccatatgagt

SEQ ID NO: 403653 - DNA, 382 bp, Oryza sativa nipponbare
cgccgatccggtcgccacgcgtccgccatgaaggggaagaagctaagccattctgttcctctagtatccgtgacagatggtgtgcacggttcatacattggagtgaaaggggaagcgatatacatccctccaccaccatgtgtacctatagatacatgtggggctggtgatgcatacgcttcagggattctatatggcattcttcggggctcttcggatttgaagagcattggcctgctcgcttcgcgagtagctgctattgtcgttgcgcagcaaggtacacgcttacgggttcaggacgccgacagattggccgaatcattcacacttcacctagataaccctggagttttgttcagatattgaaaacagaccatgtttc

SEQ ID NO: 403654 - DNA, 325 bp, Oryza sativa nipponbare
acctctctctccagtcctggaatcatgctcgtaatttatcacaagtcagctaatcatgttccattaaagatactctcaattgaggatggaaccccactgaaaacctctacccagttgcttcatcggagcagaaaggttgacttcatcgagcagtttaatgaaaaacttcttgtgaaacaagacaaggaaaacctacagattattgatgttagaaactccaacttgattgaggtcaacaaaaccgaattcatgactccttcggcattcatcttcctctacgaaaataatctattcctgacattctgcaataggacagttgcagcat

SEQ ID NO: 403655 - DNA, 151 bp, Oryza sativa nipponbare
cgcgtccgccacgcgtccgaggtggtggccgccgcgagatgcaaggccgcgcgatgcaaggctgtcgcggcaagcggacacggctgcggacaggcaaaatcaactgtgtgcgattcatgatactacagctactaatgccacaaggtcctca

SEQ ID NO: 403656 - DNA, 309 bp, Oryza sativa nipponbare
ctaacatggtgtacccatgccgtgccttccacccgataggcctcttcgacgtccctgacaccttcgccgagctaaggtgaaggagctcaagaacggccgtctcgccctgttctccatgttcggcttcttggggcaggccatcttaaccggcaagggccccatcgagaacctcttcgaccacgtcgtcgaccccggcgacaacaacgcctgggcatacgccaccaacttacgtcccggcaagtgagcacaacgacacgatcgagatggtgccaaccaacgtaccatgtgtacacttgtagtagccacaca

SEQ ID NO: 403657 - DNA, 402 bp, Oryza sativa nipponbare
ccggccgaattcccggtcaccacgcgtcgtacgttactaatccgatcaatcaatcaagacaggacctgctgtgctgtgctatcttactacagctactgctatactgctagtacctcgagggcactgtagccagtgtgtcgtcacagttacaggttgagatcgatggacaaagttaaaactatactgcattaattaattttaccttgagaacatacgtggttcatcatgtatttcatcacatgaatcttttctagagcgtttgatatacatacctcgtgttttgcctctgcaataaccttgtgtgtagacgaatctgtatactacctgtatgtgtggcctgtgaatcgatttggttactgcaaagttttgcgtatatatacatgcttgtgattctggaaataa

SEQ ID NO: 403658 - DNA, 219 bp, Oryza sativa nipponbare
tccgattcccggtcgaccacgcgtcgcgtcgccatctctctcagctctcacagctcactgcatcaatggccgcggccactcaatgcgctctcctccccggtgatggcccgcgcggcgccgtcgacctcctccgcgctcttcggcgaggctcggatcaccatgcgcaagaccgacgcgaagcccaagccggcggcgttaatggcagatatccatctatac

SEQ ID NO: 403659 - DNA, 273 bp, Oryza sativa nipponbare
cacgcccgtccgggaaaatagcagtgccaccaaaaaaagtgcagcaagtcacggagatgtacatatcctatgacgaagaacccaaagcctgtatattttctacttctcaaactttttaagctgtcacacaaccaggtactctccaggaacttttactggctacatcttcctggaaaagactacaagttgtggacagatcgcagaacaatcactgagacacttaattcattagcttgatcggcaatgcataacaacaaacaaacctacttacat

SEQ ID NO: 403660 - DNA, 159 bp, Oryza sativa nipponbare
ctgcagagatggccccctccgtgatggcgtcgtcggccaccaccgtcgctcccttccaggggctcaagtccaccgccggcatgcccgtcgcccgccgctccggcaactccagcttcggcaacgtcagcaatggcggcaggatcaggtgcatgcaggtgt

SEQ ID NO: 403661 - DNA, 460 bp, Oryza sativa nipponbare
tcgcgtcacgcatgcggatctgaggaaggagctggacgacgttgataacctcaccgaggaacggctggacgaggtgctggacagcttcctgaaagacttcgaggccggcgcgctggaggcgcacgggtggccgacggcgccgttcgtggcgtacaagatggccaaggtggccatgaacgcgtacacgaggatcttggcgaggaggcacccggagctgcgcgtcaactgcgtgcacccgggctacgtcaagacggacatgaccatcaactcggggttcctgacgcccgaggagggcgggaggaacgtcgtgacggtggcccttctgccggacggcggtccgaccggggcgtactttgacgagggcagggaggcgttatttctggaatgacggctgggaggtctcaaaaacgaggcccattgaagacggatgaaagcaagtttaatagtataggcaacttat

SEQ ID NO: 403662 - DNA, 160 bp, Oryza sativa nipponbare
gaacgtcatcaagaggcacaaccgccttggcaccgccacctggctggccgtggaggcgtgggggctcaagaactgcacgcagaaggaggagtggttcagcgacaccgtcaccgccgtcgtcgtgccgtcgtacatcgacagcgccgagatcgtgaagcac

SEQ ID NO: 403663 - DNA, 231 bp, Oryza sativa nipponbare
acccacgcgtcgcgggctacctcttcatctactagcaggtcagggagaagctcgtcaagatcgacccctacttcgtcaagctagcccatcaccccttcgggtgatttgagcctctacatcgagctgaacccctccacttctctctcctagaacagcatggccaagtacattgatccagcgtgcttctgtttcgcatgaacaatactaccacttaaatgaaactgtacctgt

SEQ ID NO: 403664 - DNA, 162 bp, Oryza sativa nipponbare
cgtcgtcggcaccaccgtcgctcccttccaggggctcaagtccaccgccggcatgcccgtcgcccgccgctccggcaactccagcttcggcaacgtcagcaatggcggcaggatcaggtgcatgcaggtgtggccgattgagggcatcaagaagttcgagac

SEQ ID NO: 403665 - DNA, 546 bp, Oryza sativa nipponbare
  unsure (1)..(546): unsure at all n locations
accacgcgtccggacaatgtgaccatttatcatgttaaaagtcaccttcagaaatacagaacagctcgatacagaccagaattgtctgaaggttcttcagaaaagagggcagcctcaaaagaggacataccatcaatagatctgaaaggagggaactttgatctcactgaggcattgcgtctccagttagaactccaaaagaggcttcatgaacagcttgagatccaaagaagtttgcagctgagaattgaggagcaagggaagtgccttcagatgatgctcgagcagcagtgcatacctgggacagacaaggcggtggatgcttcaacctcagcagaaggaacaaagccatcttctgatcttccagaatcttctgccgtgaaggatgttccagagaacagtcagaacggaatagccaaacaaacagaatcaggtgacaaataattgagatgtgatgagggtctcttcaagatgtggacccaagtgccatngaatgggctcgatggctatttgactgatgtttggcaaagctaaaattaaatcgtt

SEQ ID NO: 403666 - DNA, 253 bp, Oryza sativa nipponbare
  unsure (1)..(253): unsure at all n locations
ccgcgagcacgacatgcgtcacctgctcctgctgtcgcgccagcaggcggcggcctcnctccaatgcggcctctccttccggaggcagaccggcaggctcgccggtgggtcgtcggacccgagcgtgcggtgcatggcggacgtcgacacggtctcggggcccgccgcgacggaggctagcaagaagagcagctacgagatcaccacgctgacgacgtggctgctgaagcaagagcaggccgggaccatcgac

SEQ ID NO: 403667 - DNA, 135 bp, Oryza sativa nipponbare
tcccggtcaccacgcgtccgccactccgatcgcaaatactctctctagccgatagcagcagcagcagcaatggccgccctcgccgtacgatacaccgccttcgccgccaagccgagcctggcgcgcgcgccgtcg

SEQ ID NO: 403668 - DNA, 409 bp, Oryza sativa nipponbare
gggcttacgggtaggtcggtatggaggggtcgctagtccagtccgcgattgctccgaccatatacaggaggagcggcaccgcgcggttccgcgtgcgcgcgagggccacgatgatgcgtaccatgccaacacggaccctcaccctggggggtttccagggcctgcggcagacgaatttcctggactcgaggtcggtgattaagcgtgacttcggctctattgtcgcgagccagatttcacgcccccgagggttggggtcaagaggggtggtccgcgccatgtttgagcgcttcacggagaaggcaatcaaggtgatcatgcttgcacaggaagaagcgaggcgcctgggccacaactttgttgggacggcatcgtggtgtattatttgttttggttagcaccgattttt

SEQ ID NO: 403669 - DNA, 358 bp, Oryza sativa nipponbare
gtcgaccacgcgtccgggcggcgcgaattccgagccttcgcgggaggagctagggtttgtgtgtgtggttgggcgcgcggcgagcggcgggagatgtcggcgtacgacgaggtggagatcgaggacatggagtggaacgcggagctcggggcgtacacgtacccgtgcccctgcggcgacctgttccagatcacgctcgccgaccttcgcctttgggaggagatctttcgttgccctttctgatacttattttttatctttatttacaactatgtccgactcttcttctcatttttattcctttttatttcttttatatatttctctattttttgtatatttatttattttttctttc

SEQ ID NO: 403670 - DNA, 570 bp, Oryza sativa nipponbare
gccaccgctcaccgtggaggacctcctgaagcagatcgagtacctgctccgttccaagtgggtgccctgcctcgagttcagcaaggtcggattcgtctaccgtgagaaccacagatcccccggatactacgatggcaggtactggaccatgtggaagctgcccatgttcgggtgcactgacgccacccaggtgctcaaggagctcgaggaggccaagaaggcgtaccctgatgcattcgtccgtatcatcggcttcgacaacgtcaggcaggtgcagctcatcagcttcatcgcctacaagcccccgggctgcgaggagtctggtggcaactaagccgtcatcgtcatatatagccttgtttaattgttcatctctgattcgatgatgtctcccaccttgtttcgtgtgttcccagtttgttcatcgtcttttgattttaccggccgtgctctgcttttgtttttggttcacctgatctctctctgacttgatgtaagagtggtatctgctacgactatatgttgttgggtgaggcatatgtgaatgaaatatatggaagctcccgctat

SEQ ID NO: 403671 - DNA, 343 bp, Oryza sativa nipponbare
ctcttgtcctctatggatccggtgctttggttgtcctatgggttctatcttcagttgttgctgcaatcgattccattcccttggttccaaaagttcttgaactcataggaactggttactcaatttggttcacttcacggtacctcctcttcaaggaaagcagggacaaactgtttgcgaaattcgaagatctgaaagagaggattatttgagctcacgatgaatgatcctatggtgtatgttaagcttcgcagccaacttattattaggtcttcttttttctattactgaaaaggaaaaaagttgtgtatgtaagccacgtttctttcgcttcaaatatgat

SEQ ID NO: 403672 - DNA, 482 bp, Oryza sativa nipponbare
gcgtccgggcgttgtaaagttgcaagagagagatcagttgttgagtgcgtggaagcagagatcaggaagatgctggagaagctgtgggacgacgtggtggccgggcctcgaccggagaccggcctggagaagctccgcaaggccgctacaacccgcccccttgtcatcaacaaagatggcgacggcgaggcgagcggggcggcgtacaagcggacgcagttgatgccgacgaccccgacgacgccggtgacgccgtcgtcttcgtctccgacgacgacggcgacgacgacgccgcggggcagcaacgtgtggaggagcgtgttccacccggggagcaacctcgccaccaagagcctcggcgccaacctctttgaccgcccgcagcccaactcccccaccgtctacgactggctgtacagcgacgagaccaggagcagccatcgctgaactaaataattccattgatcggaggctggtcgatc

SEQ ID NO: 403673 - DNA, 406 bp, Oryza sativa nipponbare
gcgcctccccaagacgagtcgcggctgaacagaagagggggagtaggcggcgatctccatctggcgactcgcgagcagagcaggggaggggatcctggtggagagactgagctgagctatggacaacttgtggcatctcggggatgagttccgtgggcagtcgaaggtagtggaggaccgtcagtggtctctcatgacatcgaagttggctgagatcaacaagtccaaggcggagaggacgaatgagcttgactatgcgcggatgaacaccatccctgatgtcaagcaatgggataaggtatcctaccaccaagatgagagcaagatggaccacctcaatcttggccttatgaatctagatcttaagatgaacgacatcaggatgaatgacgcaactatgaagaat

SEQ ID NO: 403674 - DNA, 197 bp, Oryza sativa nipponbare
tggaagtcgatgaagtctggtgttgctgacatggttaacaccggtggccgcagggtggttctattactgctgcactcttcctgaaacagtttgtggatgagaaggtgcagtggatgcacattgacatggccggcccagtgtggaacgacaagaagcggccggccaccggattcggcgtctccaccctggttgagtgg

SEQ ID NO: 403675 - DNA, 543 bp, Oryza sativa nipponbare
cgaattccggtcgccacgcgtgtgggggaggtctatgaaattagactgtgcccgacataatagagaagctgattcacctattacaattttcaaagaacaggtaaatggagccatctgaaggcaggtgtcccctgaagcagagacggaattacgcttgcaagcctataatgaaattactaaaaatatcgataatgataatatcttctctcaatacatgcataagattctaccaactgggaatcacctatggaccttcaagaaacagtttgcaatccaagtggctctgtactgtttcatgtcgtacatgttgcagattggtggtagggctcctaacaaaatattatttgctaaaaatactggcaagatcttacagaatgatttccatccagcttatgatccaaatggaatgattgagttcaatgagctagttccctttaggctgacacgcaatatgcaagctttcttcttaaaatttggagttgaaggtctcattgtgtctgccatgtgttctgctgcccagtcttgggttcaccaaaacaaagc

SEQ ID NO: 403676 - DNA, 229 bp, Oryza sativa nipponbare
  unsure (1)..(229): unsure at all n locations
acggacacggccacaccacccaccaactgagagctgagcaggcgagcgagcggacatggcagcatcgctccaagccgcggccaccctgatgcagccggccaagctcggcggccgggcctcctccgccgcgctgccatcgcgcccgtcttcgcacgtcgccagggcgttcggcgtcgacaccggtgccgncggcaggatcacgtgctccctgcagtcccgaccatccgga

SEQ ID NO: 403677 - DNA, 507 bp, Oryza sativa nipponbare
cccacgcgtgcggaggtattcaatgaaataaacagcagagaaatgcagaagatcaatgttttccgtggtatcatcagcaattggatcttgattgcagtcatagctgcaaccgtagcatttcaagtggtgatcatagagtttcttggcactttcgccagtactgttccgctcaactggcaacattggctgctcagcgtcggccttggctccatcagcctgattgttggtgtcatcttgaagtgtataccagttggttcaggtgaaacctctgcaactccaaatggatacaggccacttgccaatggccctgatgacatatagctgaagaataatcactaataagggaaagtagaatccagggtgcaatacggcatccagctgcccagctcaattcagttgttttggaatacactaaccatccactgattttgttcaaattttgccaaactgcactatatccggccatgtaatggttactacataacacgttactgatgtgcaccttta

SEQ ID NO: 403678 - DNA, 508 bp, Oryza sativa nipponbare
cgacgccagacagcacgcggacgcagtaggggactgtcgtgggccggcacatggggaagctggagacggagagcctgctggagacccgggacgtgaactggacgtgcgatcaggccggtgtacatctacggcccgctcaactacaaccccgtggaggagtggttcttccaccggctcaaggctggccgccccatccctgtccccggtgccggcaaccaaatcacccagctcggccatgtcaaggacttggcgacggcgttcgtgctggcgctcggcaacccgaaggcgagcaagcaggtgttcaacatctccggcgccaagtacgtcaccttcgacggtctagcacgggcgtgcgccaaggctggaggattccccgagccggagatcgtccactacaaccccaaggacttcgatttcgggaagaagaaggccttccccttcagagaccagcatttcttcgcgtcaatcgagaaggcgaccttggagctcgggtggaagccggagtacg

SEQ ID NO: 403679 - DNA, 272 bp, Oryza sativa nipponbare
ttccatggcctccggacctactcctcttctaggtccatggtgacgctgccatcgttgaggatgagcaagaagaggtcccagggcatccggtgcgactacatcggctcagccaccaacgttatcatggtgacgacgacgacgctgatgctgttcgcggggaggttcgggctggcgccgtcggcgaacaggaagtcgacggcggggctgaagctggaggcgcgcgactccggcctgcagaccggcgaccccgccgggttcacactcgccgacac

SEQ ID NO: 403680 - DNA, 377 bp, Oryza sativa nipponbare
tggaggcgcgccgcgctgctgtgtatagccgccgtgttcgccgtcaccgtcgccgggcaggctcaaggccggcgtgttcgacgagtacctcgagaagagcaaggccaacaaggagctgaacgacaagaagaggctggcgacgagcggcgccaacttcgcgagggcgtacaccgtcgagttcggcagctgacagttcccctacaacttcaccggctgtcaggacctcgtcaagcagaagaaagtcccattcatctcagatgatctcgagatcgagtgcgaggggtaagagaagtacaagtgcggctccaacgtcttctggaaatggtgatgatctggtgatgctcatctatcgattggacagtcatgaaaacattcct

SEQ ID NO: 403681 - DNA, 295 bp, Oryza sativa nipponbare
  unsure (1)..(295): unsure at all n locations
gtaccgtccgnnatcccgntcgaccccgcgtccgcccacgcgtccgccacgcgttcggccacacgtccgtcgccatcatcctcaatgacacctacgagaagtgcttgcttgtgaagggatggaagaacagcgccagctggagttgaactagtgggaagaggaggaaagatgaagaagatcatacatgtgctgttagagaagttctagaggaaactgggtgcgatgcgtacaagctactaaactcaccagaatatatagcagtatcatcagcagcatcagcagcaacacctgatgc

SEQ ID NO: 403682 - DNA, 301 bp, Oryza sativa nipponbare
ccgtccgattccggtcgccacgcgtcgaacaatgtatatcacagcgtataatatgccaggtcaaatggttgaaggccagacattacattagaaccgggcctatccatgggaagcattgattgcgacatgtgggacgacggctggacggccgtcacgacggacggcagcctagccgagcagttcgagcacacgatactgattaccaagacaggagcagaaatcctgacgaaatgctagtaagatcggtgcccagcattagccactggagtagcagtgatctctgtgtttgtaggacgagtat

SEQ ID NO: 403683 - DNA, 426 bp, Oryza sativa nipponbare
tcgaccacgcgtccggtctgaagggggtgccacccgccaggctgccgcccccaagccggtgactgtctccatggttgtccgcgctggtgcctacgacgatgagcttgtcaagaccgcgaaaaccattgcatcaccaggaaggggtatccttgccatggatgagtcgaacgcgacctgcggtaagaggcttgcgtcaattggccttgagaacaccgaggccaaccgccaggcttaccggaccctccttgtcaccgcaccgggcttgtgacagtacatctccggtgctatcctcttcgaggagactctgtaccagtcaactgtagatggcaagaagattgtcgacatcctcactgagcagaaaatcgttccaggtatcaaggtcgacaagggtcttgtgccccttgctggctccaacaacgagtcatg

SEQ ID NO: 403684 - DNA, 323 bp, Oryza sativa nipponbare
  unsure (1)..(323): unsure at all n locations
gtccgggacgctgacaagtaggtggcggctatgcaagccaagacggatggaaaggctgtgatcgtcggaggtggctacataggacttgagcttagcgcagccttgaagaccaacaattttgatgtcactatggtgtaccctgaaccttggtgcatgccccgtctcttcacttctggccttgctgctttctacgagggatactacgctaacanaggaatccatatcataaagggaaccgtggctgttgggtttgatgctgatgccaatggagatagtactgcggtgaagctaaagaatggaaacgtgctggagctgacattgta

SEQ ID NO: 403685 - DNA, 132 bp, Oryza sativa nipponbare
  unsure (1)..(132): unsure at all n locations
ccgactgcaagtgcggcaagtgaagtcacgaagcaaccgaacactcgccgncggcgagtcacctaccttaattagtccacaataaaaaccacccatatgagtgtggtttgtgtgtgtgctgattatttgctg

SEQ ID NO: 403686 - DNA, 206 bp, Oryza sativa nipponbare
taaaattgtgatggttacgtattgcttagaatcaaacgaaagaaaaagagacatgttgattatagaaaaattaggaggaacctagaatagagtttatgggcaggacctatgctgattactaacctctataagaaacgcggacatgaataaaaaaggaactgttcgggtagtatctacaaatattaccgaaaacattgttaaaatac

SEQ ID NO: 403687 - DNA, 247 bp, Oryza sativa nipponbare
  unsure (1)..(247): unsure at all n locations
agggtttaactcatcactcacttagctaattaaatcttcgaccatgtcggacaggtgcggcaactgcnactgtgctgacaagagccagtgcgtgaagaaaggtaccagctatggcgtcgtcatagttgaagccgagaagagccacttcgggaggtcgccgcggcagagacggcgtgcagtgcgaccgtgtctgccgtgaggcgaggagacacacgacctccgagatctatgcaaaaccctaggtggg

SEQ ID NO: 403688 - DNA, 320 bp, Oryza sativa nipponbare
aggagagagcttggtgagctgcagagatggccccctccgtgatggcgtcgtcggccaccaccgtcgctcccttccaggggctcagggccacggccggcatgcccgtcgcccgccgctccggcaactccagcttcggcaacgtcagcaatggcggcaggatcaggtgcatgcaggtgtggccgattgagggcatcaagaagctcgagaccctctcctacctgccaccgctcaccgtggaggacctcctgaagcagatcgagtacctgctatgctccaagtgggtgccctgccttgagttcagcaaggtcagtttcgtctac

SEQ ID NO: 403689 - DNA, 554 bp, Oryza sativa nipponbare
  unsure (1)..(554): unsure at all n locations
ccgaattccggtcgaccacgcgtccgcaagtttggcgcaaactgcggccccgaggccgtctggttcaagaccggcgccctcctcctggacggcaacaccctcaactacttcggcaacagcatccccatcaacctcatcgtcgccgtcgccgccgaggtcgtcctcgtcggcggcgccgagtactaccggatcatcaacggcctggatctggaggacaagctccacccaggtggcccattcgacccgctggggctggcgagcgacccggaccaggcggcgctgctgaaggtgaaggagatcaagaacgggcggctggccatgttctccatgctggggttcttcatccaggcctacgtcaccggcgagggccccgtcgagaacctctccaagcacctcagcgaccccttcggcaacaacctgctcaccgtcatcttcggcgccgccgagaggacgcccagcctgtaaacatctcgccgncggcgacgctggctggcctcaagttaatnttaatcttacccgggaagaagaggggaggagttgagaagggtgaagat

SEQ ID NO: 403690 - DNA, 497 bp, Oryza sativa nipponbare
  unsure (1)..(497): unsure at all n locations
attccggtcgaccacgcgtccgtcctacttcgtcttcttgctggtgtgttcgaggaggaggaggaggaggagaagctagcggcggcggcggcaatggcgacgagcgggctgaggagctgcacggcggtgggcgtgccgagcctgctggcgccgtcgtcgaacaggagccgcctgccggtctgcgcctacgccaccacctncgggcgcgtcaccatgtccgccgagtggatgccgggccagccacgccccgcccacctcgacggctcctctcccggtgacttcgggttcgacccgctgggcctcgccaccgtgccggagaacttcgagcggttcaaggagtcggaggtgtaccactgccggtgggccatgctcgctgtgcctggggtgttggtgccggaggcgctggggctgggcaactgggtgcaggcgcaggaatgggcggcggaaccccgcggtcaggccacgtacctcggcaacccggggcccatgggcacgct

SEQ ID NO: 403691 - DNA, 301 bp, Oryza sativa nipponbare
  unsure (1)..(301): unsure at all n locations
tcgcgcacgcgtccggtgaacgcgaacatcgacaacttcttctcggagatcgagcagctggcgtactgccccgggatcatcgtgccggggatctactactgcgacgacaagctgctgcagacgaggatcttctcctactccgacacgcagcgccaccgnctcggaccaaactacctgctgctcccgcccaacgcgcccaagtgcgcccaccacaacaaccactacgacggcttcatgaacttcatgcaccgcgacgaggaggtcgactacttcccatcccgctacgatcctgccaagcacg

SEQ ID NO: 403692 - DNA, 283 bp, Oryza sativa nipponbare
acgtaccagataccagaattctccagctcgagctactcctgaaacaacaactgcatagttcgacgattggtgatcaaacagatgccagagagtatgatgatgaacaaattgaggcatgtcttataagcaggcaagaggctacagtaagaagggagagggcgctcgcatatgcattttcacataagggggagagcacttcaatgtccgtcatcacattgtttgtagaccataacaacccacaatggggatggagctggatagaacgctggatggcagcaaagcc

SEQ ID NO: 403693 - DNA, 172 bp, Oryza sativa nipponbare
acccacgcgagcgaacatcatatacactcgcttgagcttaattacagactgaaagaagatgtgttgcagctgagaatctagctgcaactacgactcatactgctcctgcagatagaagcaccctgacctggaagagaagagcagcatagccaacgccaccgtcgcgctaggt

SEQ ID NO: 403694 - DNA, 325 bp, Oryza sativa nipponbare
tattgatgctgatctactcattctgagaacatgccattgtatgatgcaaagccgaaatcactgagccgggacaatgccacactgaccaactatggagtaatggtgtattgagccttcaaactgcacatttcatacgttgatggaccacatcgatgcgataacatgctactatggtggtgacctaggatacctgaatgagatatccacatggaggcatcgtatgccgaagcacatgaacttgttaaaacatttctgacatggggatgaagagcgagcgcaagtgaacaatactcggttgactagtgctgacccaacaaatctctat

SEQ ID NO: 403695 - DNA, 374 bp, Oryza sativa nipponbare
ctctcgcgagtacgacccactcacccaatgatatgaacctggaacagtatatccatagaccaatgatctgaatctcgacgctgatatcaaagcagatactgctactaggaactggactcattcctactagagaacgccaaatgaaagtgacacatgctgacttaaagaaggcgtacgagaaggtgatgacctataataagctcagtgtgccgcagggactgtacatgtgacgtgctcactcgaatacatagacggtgtatgtcacctgctatgacgactatatatgtgatataccacataagctatgctggcttcgtttggaaaatacttgtgaatattgctttgttacttcttgggatggagttggatagaac

SEQ ID NO: 403696 - DNA, 274 bp, Oryza sativa nipponbare
cacgtaccgtaccggtctacccacgcgtacgacacgatcatgttacttggagagagctgatgaagcgcccaatactgtgactgtacacagtatattagaactgcagctgaccgagcataccaagtcacactgaaccggagttgacctcttctacgatcacaccctgaacctaactgatgccacttcaggctgccagttagctatcactcactcggacaacaggcaaatgctgattaagtccaagctcggagaaactaggacgtccgattcatcc

SEQ ID NO: 403697 - DNA, 324 bp, Oryza sativa nipponbare
ctgaggtaccgctcccagttcccggtcggcggcgcgtccgacttaacgctgcaaaaaaaatcttggagggtataactgagtaagctttgctcaatggcctaggagaacaagtccggctgcggcgacctgatggccacctgcaaggtggtcacagacgctaccatgtccgtgttccagcataagagcgtggagggcgtctacaagaaggaggtcgccggcgcccccgctgacctgctgcactcggcggccacctacggcaagctcgacgacaagccggtcgggcagtacatctacaaggctgaggggtacctcaaggacttcagc

SEQ ID NO: 403698 - DNA, 348 bp, Oryza sativa nipponbare
ggcggggcgtccgctccaacttaaaatgaccacacaactaactaatatcgagacatgccgtggaaatcaaggagggggggtggggctatctgtactggcagggagatcacaaagactcacaatactcagtcgggcatccattgatgctattgcctttacatacattcgcgctgacggcaaagaacatcttccacgaccttgtcggggacggcgtggaaatccaactaccattacactaccatctcagcaattactgaaaggaaactccggaactttcaccaacggccttacaaaccttaaactagacaccaatgggaccacttataattatcgacaagggggtcgaac

SEQ ID NO: 403699 - DNA, 412 bp, Oryza sativa nipponbare
  unsure (1)..(412): unsure at all n locations
gggcgcgtccgcccacgcgtccgtaggggtttgtgggcccccattcctcccccaccccggtgtcctgcgcgtccggcgctcgcggcggcggcgggtggccctatggcgctgccgaatcaggggaccgtggattaccccagcttcaagctgggcatcgtcggggatggggggactggtaaaactacatttgtgaagaggcatctcactggagagtttgaaaagaaatatgagccaaccattggtggcgaagttcacgctctagattttaccaccaactggggtaagatccggttctactggtgggacactgctggacaagacaagtttgggggacttagggatggatactatatccatggtcaatgggcnataattatgtttgagggcacttcaagggtgacttacaagaatg

SEQ ID NO: 403700 - DNA, 505 bp, Oryza sativa nipponbare
  unsure (1)..(505): unsure at all n locations
ccgaattcccggcgggcgggcgtgcgcttcatttctcccaggtaaggaaaaagggctccccgatggcgccntcgcanccgaantcctgggtcttcgggggcatcaacagagggcgcacgtcntcaccaaccgcgagctgccgcctcgcccgtccgaccgcaaggggaaatccaccaagagggtgacctttgtcangaacttgatcagggagggtgctggatttgctccctatgagaagcgtatcactgagcttctcaaagttggcaaggacaagcttgcactgaaggtggcaaagagaaagcttggcacccacaagagggccaagaagaagagagaggagatcgctggtgtcctcaggaagatgaagtctggtggccgtcacgctcacaccgagaagaagaaatagagtatctccaaggtcatgaagtccatggcaatattggctggggaggttactcttggaaaaccctactactagaattgcactctattatccagctaaaca

SEQ ID NO: 403701 - DNA, 272 bp, Oryza sativa nipponbare
  unsure (1)..(272): unsure at all n locations
ggtgccggtccggagttcgggggggggccggggcgtccnagatcatcaacgatcgggagacggggaggtcgcgcgggttcgggttcntnacnttcgggagggggcgntccatgggcgagggcgtctantggatnaactggaaggagctctacgggcgcaacatcaccgtcaacgaggcccattctcgccgcgtccggaggctgangctgangctgctactggcagcgcggcggatgcggaggctactggggctgcngcggctactgtggtgg

SEQ ID NO: 403702 - DNA, 369 bp, Oryza sativa nipponbare
tcgggggcgcgtgcgtgttcaatcaacatcctacagtgcaacaacagcacgtaactttggctctgcccaggctttaccgtataggcacatgcacaggagggaccttcatatggacacgcacagctaccatcctcatatggattagcgcaagcatcatttccatttgccccagcgcaaggggtgtcaccctatgggtcaggtgcacagcctccgcagtatggagctgggcaagcagcaactaatcctggcagtgcttaccaagcacctcatggacgtaaataaatcggcaaaaggtgtctactgatggattggtattggcaaaagagacaatgcgctggtttgtacaccagagttcagtttcctttccac

SEQ ID NO: 403703 - DNA, 407 bp, Oryza sativa nipponbare
  unsure (1)..(407): unsure at all n locations
gggcgcgtccgccatgattctaaaagccagccccacttgcatttccaacttagagaagcgaattggcgtgcaaggggaccatgccactctggaggagctactgctgccaaatttctcatacacaatggaaactctgtataacgtcnagtgtgtgcagaggattcttgatcatttcttggcaatggaccaggctaatggtgccgcctccccatgtttggatgacgtcatggcatccccttctttggcaccaatcactactggagccaagttaattgatgggtatcttgcagagatcgcaccagatatcaatgtgaaactttcaaaatttcaagctctggcatctgctgggccttagtatgcccgcgccgtggatgatgggctctatcgngccattgatatatatttga

SEQ ID NO: 403704 - DNA, 313 bp, Oryza sativa nipponbare
  unsure (1)..(313): unsure at all n locations
gcgcgcgtgcgcccacgcgtccggcgcagatcatcgacgggaaggcggtcgccgccgacatccgccgcgagggcggcgccgacgtcnccggcctctggtccggccacaacctcgtgcccgggctggcggtggtgatcgtggggagcaggaaggactcgcagacgtacgtgcagatgaagcgcaaggcgtgcgccgaggtcggcatccgctccgtcgacgtcgacctcgccgaggacatctccgaggcggcgctcgtcgccgaggtgcaccggcttaacgcccacccagccgggcatgggatacttgtgcagct

SEQ ID NO: 403705 - DNA, 302 bp, Oryza sativa nipponbare
cgggtccgcccacccgtccgcccacgcgtccgcccactcgtcctctttaccttttcctcctcggttcggttccgtggtgcgtctagggtttagtgggttgagatggcggcgccggatgtcgagtaccgctgcttcgtcggcggcctcgtctgggccaccgacgaccgctccctcgaggccgccttcttcacctaccgggagatcctccactccaagatcatacaccacccggcgacggggaggtcacctgggtgcggcttatgataccttgtactccgaccaatcaacagcgcgaccccctc

SEQ ID NO: 403706 - DNA, 248 bp, Oryza sativa nipponbare
  unsure (1)..(248): unsure at all n locations
gcgtccgcccacgcgtccgcccacgcgtcctgcctctgcaccatcgcccccatcgccatcgggggcatgggcnncacgaacatccggggcggcggctctttctactgctcctccattaacccggccgtctccttcagcccnnccctcggcaggtgggcctgggagtcccattgggtgtactgggttgggccactcatctgcagggggctggcctgcgtcatctacgaggtcctgtgtatcttccacac

SEQ ID NO: 403707 - DNA, 212 bp, Oryza sativa nipponbare
  unsure (1)..(212): unsure at all n locations
tgcttattacattgagtgcagctcaaacacacggcagagtgtcaaaggggtgtgggagtgcggctatcaangtantaatccaccctccaactaancatatggaaaagaanaaaaagaaatcacgagcggggtgctctatnatgaacatttttcccgtgaaagaaaatatcatgcttcaaatcctgattgatcgagatgtcccttacatgatg

SEQ ID NO: 403708 - DNA, 495 bp, Oryza sativa nipponbare
  unsure (1)..(495): unsure at all n locations
cgtccggggaagccgatcaagtgctcatggggcaacaaacctaccccacctggtacatcctccaagccatgggcaccggcacttccttcatatcaacccgtaccaatggcaggtgtgccacaaggtttctcggcagctgatatcgtagcatatcagaggcaacttaccttaagccaggtcgcagctgggcagattgctggccagcatggccttgcaggtcaggtatccgcagggcttcttgctgctggctcccaggccctctacgacgggtacccgaaccagtcatcagcgcaacagcttatgtactacaactaggtgcttaaggaggaggaaggcatttgtagtgttcggcttgttcggcgcaagcctggccttcctctntcggttcctattttctggtttctgtactatttgagtgaaggctcctcttccgggtcactgcttggcgcggaattgggtattatcttcttattattggtgactatggccattttc

SEQ ID NO: 403709 - DNA, 424 bp, Oryza sativa nipponbare
ggcgcgcgtccgcccacgcgtccggacaaaatcaaggtgcgatatgaagatcttcaggatgctgatgagacaggaaatctggaggagtgggttttgctaacaaggattgctaaacctgatcagttgggtatacgcatccctgaaagaccaatggtgcggccatatcatgtacatagcaaggatccatgctctttcgatgctggttccattgttgatgcatggtggaatagtgggtggggggaggggattgtattgcagcagggaaatgacagacgccttcaagtttattttcctggagaaaagcagattgctgatttttgtgaagatgatttgaggcattcacgtgagtgggctggtggcaaatggaattccttgggggaaagaaaagatatcacacacctgttgccccccacttcagttcatg

SEQ ID NO: 403710 - DNA, 496 bp, Oryza sativa nipponbare
gccgggcgtccgatcatctccagctgatcaagagctcttaattagctagctagtgattagctgcgcttgtgatcgggcgatctcgggtacgtagcaatggcgtccaaggcgttcgctctgttcctggccgtgaacctcgtcgtgctcggggtggcaagcgcctgcggcggcagcccgtcgtgcccgacgccgacgccgtcgaccccgacaccgtcaacgccgacgccgacgccgtcggcgttcgggaggtgcccccgcgacgcgctgaagctgggcgtgtgcgccaacgtgctgggcctgatcaaggccaaggtgggcgtgcctccggcggagccgtgctgcccgctgctggaggggctcgtcgacctcgagggcggggtgtgcctctgcacggccatcaggggcaacatcctcggaatcaacctcaacctccccatcgacctcagcctcatcctcaactactgcggcaagaccgtccccaccggctttaagtgct

SEQ ID NO: 403711 - DNA, 444 bp, Oryza sativa nipponbare
gccgggcgtccgtgtaccgatacatttgtgacaccaagggagtctttgtccagcctgcattctatgaagcgtttgggctgactgtcatcgaagccatgacatgtggtttgccaacaatcgcaacatgccatggtggccctgctgagattattgttgatggggtgtctggtctgcacattgatccttaccacagtgacaaggctgctgatatcttggtcaacttctttgagaagtgcaagcaggattcaacctactgggacaatatttcacagggaggtctgcagaggatttacgagaagtacacctggaagctgtactctgagaggctgatgaccttgactggtgtatacggattctggaagtacgtaagcaaccttgagaggcgcgagactcgccgttacattgagatgttctatgctctgaaataccgcagcctggccagcg

SEQ ID NO: 403712 - DNA, 460 bp, Oryza sativa nipponbare
  unsure (1)..(460): unsure at all n locations
gggggggcgggggggcgtccgcccacgcgtccgtgaccggctcattgcctacatcaaggcgcacggcgaangttgctgggtatcggtgcccaagggcggcgggcgtcctccgctgtggcaagagctgccgcctccggtggatcaactacctccggcctggcctcaagcgcggcaacttcaccgaggaggaggatgagctgatcatcaagcttcacaggcttttaggcaacaaggacgtggggtcatctcaatgatactaggatttggatgcatgaatatgagttggatcagtttcaggttttatatataaagagctcgggtgtgatactggtctgattggtaaaacgggtggttggtggtggtggtggtggtactcctggttgatgcatatgggctctgatagcgcggagggtgccaggaagaacggacaactggatcaaggactactggaacacgcaca

SEQ ID NO: 403713 - DNA, 455 bp, Oryza sativa nipponbare
  unsure (1)..(455): unsure at all n locations
gcgggcgggcgtccggaggagctcaaggaggcgttcagggtgttcgacaaagaccagaacgggttcatctccggcgccgggctccnccacgtcatggcgcaacctcngcnagaanctgaccgacgaggaggtcgacgagatgatccgcgaagccgacgtcgacggtgacgggcagatcaactacgaggagttcgtcaagggcatgatggccaagtgaggcaccacttcccctgccgatgatggcatagtaccctgggaggaggaaaccgtgcattgccgtattagtaaggggatgcaaacactggtttcagtcgtcttccctgatgaagaaaaccgaaccgtactagttgtaggtgctgaacatttttctatctctccagtctctccggtgtgccatggaacttcttgcttgatttttctgtgtgaatctggtaagggttgctctgatctctccg

SEQ ID NO: 403714 - DNA, 362 bp, Oryza sativa nipponbare
  unsure (1)..(362): unsure at all n locations
ccactcttgcacccacgcttccggcngcgcttnttctgggggtnaggctcctcgggggggggggggggggaaactccttctacacctactgcccgccggcaccgagggcgaggccgagcaccgggtcttgcccgggcggggcgttgaatctgggggtgtgcgccaacgtgctggggctcatcaagggcaangtcggcgcggtggcgccttacgagccctgctggtcgctgctcaacgggctcttcaacctcaacgccggcgtctggctctgcaccggcgtcaagggcaacgtgctcggcatcaagctcgacctccccgtcgacctcagcctcatcctcaacaactgcggcaagatctggcca

SEQ ID NO: 403715 - DNA, 451 bp, Oryza sativa nipponbare
  unsure (1)..(451): unsure at all n locations
ggggtcgggggggcgtccgcccacgcgtccgggccaggctggtgcactgatccccatctgccaccatgtgcancatgggttgagagcatngcaaccgtggggtctagggatccatggccctgtgtctggcatatgattcagaatgacttggtccatggatggggtcttgatttcgctctaaggaaatgtgtggagcctgctcatgagaagattggagtcgtcgatgctcaatggattgttcatcaagctgtgccatcacttggaaaccagggcaacgcagagaatggaaaagcaccatgggaaggggtaagagcacgctgtaggaaagaatgggagatatttcaaacgaggctggccgatgccgagaaggcatactacttatcacaaggaatcacaccacccaactcgaccctagtttagaagaacacactaacacgacacgacctcacct

SEQ ID NO: 403716 - DNA, 427 bp, Oryza sativa nipponbare
  unsure (1)..(427): unsure at all n locations
gcgcgcgtgcggagaaattggaggtactgctgaggaggatgctgcanccttcattcaggagagcaaaacacaaaagcgctggggtgcattcatagctggactcactgctccacctgggcgtcgcatgggtcatgctggagcaattgtgtcagggggcaagggtacggcacaagacaaaatcaaggctctcagagaggctggggttactggtgttgagtcaccagcgaagattggttcaactatgttcgaaattttcaagcaacgcggaatgttagaatagggagagcaaatggtacagtagagaaacattggaaaactttttggtgctcgtgggcaacagcgagcaattcctttgtagagccgcattgctggccgcggaactactcaaatcttccttttaccctagcctttcctcttgcttatcttc

SEQ ID NO: 403717 - DNA, 421 bp, Oryza sativa nipponbare
  unsure (1)..(421): unsure at all n locations
ggcgcgcgtccgctcatttcatccaactatacaagttcaagagtttacaagagacccagacgatcaaaatgtcntggggtggaagttgcaactgggggtcctgcggatgcggcggtggctgcggaaagatgtaccctgacctggctgagaagatcaccaccaccaccactactgcaaccactgtcctaggtgttgcacctgagaaggggcactctgagggggttggcaaggcagctgaatctggcgaggctgcccatggctgcagctgtggctccagctgcaggtgcaacccctgcaactgctaaggccaaggcgatctatgactgaattgccaatgcaccagcctgtctacatgatgaataaataaagagtccatccagtgtgatggctcatgcctgtgtgagtgtgactgaatccatca

SEQ ID NO: 403718 - DNA, 348 bp, Oryza sativa nipponbare
  unsure (1)..(348): unsure at all n locations
acaatggggggggggggctttttaaattgatcattaaagaaggggtaaaggacttcaacccagtttacctcttcgacgaaggagcggggatcacctgggtcccttgtggaagaaaactcacatgttcttatcctggcatcaaattntgctatgggccagacacttactttgggcatgagggatcagggctggagatggatgggcaatttgacagactagatgagcttatctattttgagaggcatttaagcgacctctcaaccaaattttatggaggagggacacatcatatgctaaagcattcagacttccccgggaggaacaatggggcagggctgttccaaacta

SEQ ID NO: 403719 - DNA, 376 bp, Oryza sativa nipponbare
  unsure (1)..(376): unsure at all n locations
gccgggcgtggcggcaccttancgaggaggtgcggagaaggttctacaanaactggtgcaaaagcaagaanaangctgtcactaggtatnccctgaagggtggcagggatgctggcaagaaagaaatccagatgcaacttgagaagatgaagaagtacgcatctattggtcgggtgatgggccacactcagatcagaaagatgaagggcttgaagcanaataaggctcacctcatggagatccagatcaacggtggcactatcgccgacaaggtggactatggctacaagttctttgagaaggaaatccctggtgatgcgagcttccagaagggcgagatgattgacatcattggtggcactaaaggtaaggggta

SEQ ID NO: 403720 - DNA, 447 bp, Oryza sativa nipponbare
  unsure (1)..(447): unsure at all n locations
gccggggcgtccncgcaaattaactgtcngccatggcggctgctggtgaanaagcttcangaggcngngacaagtgcgggtcnttcatgtacggggaggggganaaggacaccgtgtggaggcttggatcccctccaaactacgacgtcgtcaacaagctcttcgaggaagagagaaccaaggaatggccagaggggtctctggaggagaaggtccagagattgctgaagacctgggagatggagctcgtccacaaggtgcgaccagaggaccagaagagtgtccactcgcagaaattctgctccagcaccaatgggatgaggtttctgaatcggaaggatttgatggccatcggcagctacaacgcgttcttgcagactaagctgccaccggagcaccgcatctactacccggacaaggagacgctggagtccggcatggccacct

SEQ ID NO: 403721 - DNA, 336 bp, Oryza sativa nipponbare
  unsure (1)..(336): unsure at all n locations
cgggccggagttcccgggtcggccgcgcgtccggccagactgttcancgagaacaagcgcgagtacaaccgcaaagtccgggagattgtggagcagagctggacggcctactggggcaaggacatnattgagttgcagtttctgcaacaagcttctcctaaagatatgcaattctggctttcccgggctgggtgacctactaaaaacataaaaaatcttcaggtggtggaattcctgagcttgatcccctggcttcccctacttggtttcccaatggaggggctacctatttggtgaatttataagggattgatgcttatgtaaagaattatactc

SEQ ID NO: 403722 - DNA, 435 bp, Oryza sativa nipponbare
  unsure (1)..(435): unsure at all n locations
ggcgggcgtccggtaagatccgcttctactgctgggacactgctggacaagagaagtttggtggacttagggatgggtactatatccatggtcaatgtgcgataattatgtttgatgtcacttcaaggctgacttacaagaatgttccaacatggcatagggacttgtgcagggtgtgtgaaaacatccccattgtcctgtgtggtaacaaggttgatgtgaagaacaggcaggttaaagccaagcaggtcacattccacaggaagaagaatctccagtactatgaaatttctgccaagagcaactacaactttgagaagcccttcctttatcttgcaaggaagcttgctggtgacccgaacctgcatttcgntgaagctggtgctcttaaacctccggaagttcccattgaccctgcaatgcagcaacagcatg

SEQ ID NO: 403723 - DNA, 382 bp, Oryza sativa nipponbare
aacgaacctggcaaaatttcacacttgatgccagctctttgaatatggaagatacaaacatcagcacatctgtgctgcatctatacactgttacaaattgtatgctaaaatattacacttgctctgtaatctgtactccccccaaatcctccagtgaacgtgatgtacttttcttaaccttttattacaaccggcaatggacacatttcacatctacactaacaagaaactaaggcatacatgatacatgggactaaaattttttattccctatctcctgttgttgtgttgtttagtgaaaatgaataacaggatcaaggctcataggttggagaaggagctaggtgcctttggtgcccttttttaaaaaaaaaaaattaat

SEQ ID NO: 403724 - DNA, 314 bp, Oryza sativa nipponbare
gggagatatggcggcgagcaatgggaacgccggggccggggcgtgcgcgctcgggcttgtgcttcttgccgtgggcgccgatgcccaaggcgggggcgggggggaatgcctgccccaactgaacaagctggtggcgtgccgcgcgtacgcggtgccccgcgccggtgaccccagcgccgattgcttggatgcgctcaactccatcttccaagggtgcgccctgatgcgccttagcatcatgaacaggctgccttccatatgccaccttaggcagatcaactgctcttgctaagacgagacgagagttaaccccg

SEQ ID NO: 403725 - DNA, 364 bp, Oryza sativa nipponbare
  unsure (1)..(364): unsure at all n locations
gcgtgcggggccgtgccgacacgaacccctgtcgactccggtgagttcatcaccggcgttcacgaggatgactggctcaaggcgtcttgctgacaggaagagcgcaaagttccagaagaatatcacgaagaggggttcagtgcctgagactactggtgaagaaggggaatgactaccctgttggacccatgggangctggggtccttcattgtttgcgccattggatcatccttgttccagataatcaggacggcaactagtggcgggatggcttaaattggagctaaattcagttatttatgctgtgtctgagagagaggctgtacctgtactttgtagtgaagtttgttcctggatgatatc

SEQ ID NO: 403726 - DNA, 504 bp, Oryza sativa nipponbare
gtgccgtaccgataccggagtgttcgagcccagagcgtacccgtcgggaaccattttgcagctcttgcgtttgaggcagatctttaatggagtgttcttgaaggtcaacaaagccaccattaacatgctgcgcagggttgagccatatgttgcatatgggtacccaaatttgaagagtgtccgtgaattgatctacaagaggggctatggaaagctcaacaagcaaagaatccctcttacaaacaacaaagtcatcgaggagggtttgggtaagcatgacatcatctgcattgaggatcttgttcatgagatcatgactgttggcccacatttcaaggaggccaacaacttcctctggccattcaagctgaaggcaccactgggtgggctgaagaagaagaggaaccactacgttgagggtggtgatgctggtaaccgtgagaactacatcaacgaactcatcagaaggatgaactagttccatgagctcatttgtagcgcact

SEQ ID NO: 403727 - DNA, 459 bp, Oryza sativa nipponbare
ccggaactgccttcccgacccacgcgtcccgtgctggaccccttgacatatctatgacagagatgggagtggttatatcacagttgacaagcttgaacgagcttgtggagaacataacatggaggattcactccttgaagagattatttcagaggttgatcaaaacaatgacggccaaattgactacgccgaatttgtagccatgatgcaaggcagcaacgttggactagggtggcaaacaatggaaagcagtttgaatgtagcattaagagacgcacctcaagtacattgatgcacgaatgtatagattttgttctcttctcttgtccattcattcttcactacccaattcgggtctgtgacttgtatgagaagagatcaagtcaattcatttagttggtatttattccaagcaagtgtgagttgataagtagcgtagtctctatggagacaatagca

SEQ ID NO: 403728 - DNA, 154 bp, Oryza sativa nipponbare
ccgttccaaatcctccaaggcccgttccaataaattcgtgaaggaagtctcttcctacctgaggagggtcggttacaaccttgacaagattcctttcgttcccatttttgggttggagggtgacaccttatttgaaaggtccaccaaccttgac

SEQ ID NO: 403729 - DNA, 473 bp, Oryza sativa nipponbare
cggacgcgtgcttctcactcccaaatcacatcctcaaattcatattcagagtcgtcgaaatcagggcatgggatcataatggagcgggtgagctcatccatgcagtcgtgggtggaggaacacaagctcgccagcatcggagggctgtgggcgacggcggtgggcgcatcggtggcgtacgggcggaggaagacgccgcatatgcggctgatccacgccaggcttcacgcgcaggccctcaccctcgccgtcctcggcggcgccttcctcgcgcaccactactacaacccatcatccaagaccaacaacagcagcagcttggactacgacttctactcgcatctgccgccggccaccaccgacgacgggcaggagaacgagaggtggagctggtagtgctacccttccttcctgctgcaagatgcagacaaatgaagatgatgacgatcacgatgatcaaatagtaataatct

SEQ ID NO: 403730 - DNA, 348 bp, Oryza sativa nipponbare
  unsure (1)..(348): unsure at all n locations
ccggnncggaannccgggggcggccggggcgtacgcccacgcgtccgcccacgcgtccggcttcgcctcgtctctccnngcccnaatccccaaaccgctncgttctcctattctgggggggggcccncccctcnctcagatcgctccccccgggggcagcagctagatcccgatggcttcgcgccgccgcacccttctcaaggtcatcatcctcggcgacagcggggttgggaagacgtccctgatgaaccaatatgtgaacaagaagttcagcaaccagtcgtgctcgtctacaccggcttctccgccaccgaccccaagcgcaacgcccgtgactcacatgtcccg

SEQ ID NO: 403731 - DNA, 354 bp, Oryza sativa nipponbare
  unsure (1)..(354): unsure at all n locations
acttagcatcaaggggtatttgtcatgattagtcaatatatggtaattacaacagagacaaaatggagcagcaagagcagcagaggagatgttatctctctctctctctctctctctctctctctctgagtgtgntcacctaaaagagaagcttacctatatccgagtgacaaaacgaaagaagatactaccgaggaggaggcgctcatttcatttccaagcttctgaagtccagcatggctgtcctgagtcccacgaagctgctgcacttgcaggctgtgctcttgggtgagccccaagctgcagctgaagcaaacgccggtctccctctttaccgggtttatcattatgggc

SEQ ID NO: 403732 - DNA, 413 bp, Oryza sativa nipponbare
ccgggattcgccggcccgccccggggacgcgtgggcggacgcgtgggcaccccgcacgccacggggcgctggatcggcaccctcgccgtcgccgccatctacgccctccgcgtctacctcgtccagggcttctacatcgtcacctacggcctcgggatctacctcctcaacctcctcatcggcttcctctcccccatggtcgaccccgaggcccacgccgctggcctcctccgacggccccgccctccccacccgcggcttcgacgagttcaagcccttcatcaggcgcctccccgagttcaagttctggtatgcaatcacaaaagcttttcttatagcttttgtgaagaccttcttctctgtatttgatgttccctgcttctgggcgaaacttctctggtactggggtggtc

SEQ ID NO: 403733 - DNA, 402 bp, Oryza sativa nipponbare
aggtccggaatcgacggacggacccacgcgtgcgaccacgcgtccggctaggtctatgattaggttaaaggtaataaacatggaatggggtaactggaagtcctcacatcttccacttactgaatttgatcaagagttggatgcataaagtttgaaccctggcaaacaggtattacccttatgttgttgctcccttttgtgggtacatgactcatgataaggatattgccctaccaggtttacgagaaatcgatttctggtatgtatatgggggaacttgttcgaagaatcttactaaagatggctcaagaaactcgcatttttggtgataatatacctccaaaacttgagagaccatacatcttaaggacacttgacatgctgatcatgcatcatgataca

SEQ ID NO: 403734 - DNA, 343 bp, Oryza sativa nipponbare
  unsure (1)..(343): unsure at all n locations
gtccgctgagctggtgcaccagtcgtcgacggacgcggcgtcntcgctgctggggacggcgctgggcgagggtggtgacntcatggtggacgggaccctctcctgggagccggtcgtccagcataccatcgccatggggcgcgacgtccaccggcggcggtaccggatgggccccgggtacaagggcgaccccgacaccggcgacatcaccgagaactactgggagcccgccgacgcctacgccggctcgccggcggcgaccaggaagccttaccggatcgagggctccggcgtgggctgcgacgcgtacctcgccgtggcgagggggatccggcgcgccatc

SEQ ID NO: 403735 - DNA, 285 bp, Oryza sativa nipponbare
  unsure (1)..(285): unsure at all n locations
ttccgggtcgggcgagcgtccgcccacgcgtccgcccacgcgtccgcccacgcgtccggcgaggcgaggcgaatcaaacatggcggcggctgcngtgtacggcgccggcggctctaatgaaggcgggaagctcggcatggaggaggcgcgggagctgcactcaaccgcatccgcatcaccctctcctccaagaacgtaagaacctcgaaaggttgcgctgatctggaaggcgccaggacagcagctcgcgtcaagccccgtaggatccccaccaaggctcacatc

SEQ ID NO: 403736 - DNA, 425 bp, Oryza sativa nipponbare
ggcaggcgtgcgggcctcttctactgcctgcttctcctcgccggatgcgttgctgccgagatcaacagcccctgcttggctggggttctacaccatcttggctgtcgttatgatgctcctcgaagctgctctcgccgctgatttattctttaacaaacactggatccaggatttgccatatgaccgcactggagaactcgataatctactttccttcatccaaactaatctcgacctctgcaagtgggctgctcttgctattggtgctacacaggcactttcacttctcctggcaaccatcttacgatccatgctttctaccccgagtgcgcgactatgacagtgatgaagattttgtggtcataaggaggccacttctggttgcccaaggggctcccgcttatcttcctaccaccggcgatact

SEQ ID NO: 403737 - DNA, 473 bp, Oryza sativa nipponbare
ggcgcgcgtgcgcccacgcgtccgcccacgcgtccgcccacgcgtccgatctgcgaggacgtctactggggcgccggggcgggccccttgtgcacgccgcggccatgggggaaatgctgcgacaaggccttctgcaacaagatgaacccgccgacctgccgctgcatggacgaggtgaacaagtgcgccgccgcgtgcaaggattgccagcgtgtggagtcgtcagagccgcctcgctacgtctgcaaggaccgcttcaccggccagcccgggcccatgtgcaaaccccgagcggagaactagctagctacagatgatcgatgatcgatctgtgtgtccatcaataaaactcgccctagcttgcagctagctgatcgttcgttcgatcattcagagttggtatagctagaggctagagcttatctccatccagatttttcagtgctctgcagcttttgtgcatcttgcatgct

SEQ ID NO: 403738 - DNA, 348 bp, Oryza sativa nipponbare
ggcgggcgtccggaaaaatggtgcagcttctaaaatagtgttcacaaatggctctcaagatccatggcgccatgccgcgaaacagaaatcggcgagatatatgccatcatacataatcaaatgtagaaattgcggacatggcactgatctgagaggatgcccccaactccctttcaggattgaaggtgacccttcaaattgctcatccccggcagccgtgagcacagtgaggaagcagatcgccagccacatcagcttgtggctatcacaatgccaagaaccaacaagggcatggtgatgatgactcgggagtcggggctacaataaacacaggtacacagaccaatc

SEQ ID NO: 403739 - DNA, 359 bp, Oryza sativa nipponbare
  unsure (1)..(359): unsure at all n locations
gggggcgggcgtccgcccacgcgtccgctgcctcctgcgcctccgccgccgccgccttcttcggctgctganttgggaggcggctcgaggtgggcggcgtgtcntccatcgaggtcncctgcacgctcgccgccctcatcctccacgacgatggcatccccatcacctctgagaagatcgccaccctggtgaaggcggccaacatcaagggcgaggcctactggcccggtctcttcgccaagctcctcgagcaccggagcgtcgatgacctcatcctctccgtcggatctgggggtggtgctgctccagttgctgctggtgctgcccctgctgctggcgggggtgctgctgctgcccca

SEQ ID NO: 403740 - DNA, 303 bp, Oryza sativa nipponbare
  unsure (1)..(303): unsure at all n locations
tttttcntccttttctctatttttttaatatccaaaccattttaatatattcatcactgcatgtgtggatacaccattacaagcatattaccttaatantnaaaccaataacatancacattnattaacccatcacacacacacacacaccccatatatatttttcaatcaccaacccaaatttccaatcctttttatttttcttcatcacaattcacacccccacatgatatattttatattcaagcaatcattttaacactttcaaattttttcacccttatctttaacccccatcttcat

SEQ ID NO: 403741 - DNA, 458 bp, Oryza sativa nipponbare
  unsure (1)..(458): unsure at all n locations
gcgccgcgcgtgcgctcgcggcggcggcgcggcgtctatcctcctccaccggcggcaaggcatctgagctcaacancaagcaggtggcangtggcagaattgcacatgcaaccctcaaggggccgagcgtggtgaaggagatctgcattgggctcacccttgggctggtcgctggtggtctgtggaagatgcatcactggaacgagcagaggaagactagatccttctacgacatgctcgagaagggccagatcagtgttgtcgtcgaggagtagtcttttgtgttgaaagtcttttgcctttgttttttgcaagttatttctgaaactctctggagagcatgacaaagctagtgccggggagattgtcatgaaaaataagcataacaatttgagaacatttgaatctcgtgaaattgcttcttttcttgattatcctaaaatctgctttaatatatg

SEQ ID NO: 403742 - DNA, 445 bp, Oryza sativa nipponbare
  unsure (1)..(445): unsure at all n locations
ggccgggcgtgcgcccacgcgtcctcccactcgtccgcccacgcgtccgatcatgctccacatgtgcgggtaaaatggggcgggagaanttgatcaggggggagggtccttcctcnacnagaaccanatgggcgagggatacgttctgacatgcatttcgtaccctaagggggattgggtgattcacacccacaaggaggaagaactctactaggtcgctctttttatgcttctgtgggcacatttgctgatttcaaagtggactcgctgttcagttagttttcgctatccaaaaaatgggcatatctttgtattagtcttttgatgggaccgtgtcatatgagttgggacaataattggcgtagtcctgttcaacatttcaaattgggtttgttcaatttaacaagagggcaacttccaacgatgacatggtttcagaaggtgg

SEQ ID NO: 403743 - DNA, 312 bp, Oryza sativa nipponbare
  unsure (1)..(312): unsure at all n locations
ggccgcgcgtgcgcccacgcgtccgcctcgagctgctcaccggcaaggcgccgacgcacgccgtcgtcaactaggagggactggacctgccgcgctgggtgcagtccgtcntccgggaggagtggaccgccgaggtgttcgaccaggagctcctcaggtaccagaacgtcgaggaggagatggtgcanctcctccagctcgccatcgactgctcggcgcagcaccccgacaggcggccgtccatgtccgaggtggccgcgaggatcgacgagatccgccgctccagcctcggcgaccgtccggccaccgaca

SEQ ID NO: 403744 - DNA, 501 bp, Oryza sativa nipponbare
ggcgggcgtccgcccacgcgtccgggaagatttgaccgtttgatcttatgtgattttcctggatggcatgagcgttgggaagttctgaaaggtcactctagagaggtttcactggcaagtgatgccagtctggaagaggttgcttctttgactgaaggatttacaggtgcagatcttgcagctattctaagagatgctaagctggcagcagtgcataaagttctggaggacagaaataatggtatctcagacacacagccatgtatcagcaaagaactcctaatatctactgctagggaggctagaccttcgacatcagcagaacaaaaaatgcagtatgacatggacttcggtcaatttgtatcgtctaggaagtctgtttcaacgaaggcgagggaatctaaaggaaaaaaggtcacgctggcttgagtctctctgcattggacaagtacaattacgttatgttcattggcgcagaacaagaatggcgagcgccttttt

SEQ ID NO: 403745 - DNA, 402 bp, Oryza sativa nipponbare
  unsure (1)..(402): unsure at all n locations
ggcagcgcgggcgcccacgcgtccggcaagagtcaaaagagcatgaacttggatccaacttggaaactacaganaacacagcggtctcgttggacatgagaacaccacttattcacttcccacctttccgctttggagttgagtttgaagatgtgcacaggctcgcagatagtcaggtgaagcattcgactgaagtattttatgcaggctctctttggaaggtaagtgtgcaggcattcaacgacgaggatcctcatggacgtcgcacccttggactctttctgcaccgacgcaaggctgagcctttagacccattgaggaaggccaacatgtatgtagaccaccgggaaaaggtcactgctcggtatcagcttatctgtccatcgaagagagaggtcatga

SEQ ID NO: 403746 - DNA, 292 bp, Oryza sativa nipponbare
ggcggcgcgtgcgcccacgcgtccggggtatccgacatgaagtacaaggattaggcggcatcgtgcacatcgtcctctgtctgttgccctgaactttggcgcccttgaaacctgattactgtggcgtgaatcgtggtgtatggattttgctgaactctgggtagtctctaaccgctttcgtctacctgagctggttgtgccattcagtcgttaaatgctggaattgtaatgatgtggtataataataataactagcatggtggtccgcgcagattgcgcggctagcatcatt

SEQ ID NO: 403747 - DNA, 390 bp, Oryza sativa nipponbare
ggcgggcgtccgatttcatccaactatacaagttcaagagtttacaagagacccagacgatcaaaatgtcgtgcgggggaagttgcaactgcgggtgctgcggatgcggcggtggctgcggaaagatgtaccctgacctggctgagaagatcaccaccaccaccactactggaaccactgtcctaggtgttgcacctgagaaggggcactctgagggggttggcaaggcagctgaatctggcgaggctgcccatggctgcagctgtggctccagctgcaggtgcaacccctgcaactgctaagggcaaggcgatctatgactgaattgccaatgcaccagcctgtctacatgatgaataaataaagagtccatccagtgtgatggctcat

SEQ ID NO: 403748 - DNA, 533 bp, Oryza sativa nipponbare
tcccggtcgcccagcgtccgattgtgatgcgaggactccggcagtttcctttgttggttccaatatagctggtatgcatatatattctagagcatcggcaaaggggaagcgtgttcagtctaatatgggtgcaaagaatcatgcaattatccttcctgatgctgaccgagatgccacactgtttgcccttattgctgctggttttggtgctgccgggcaaaggtgtatggcattgagcactgctgtttttgttggaggttcagagccatgggaggatgagctagtcaaacgtgcaagcagccttgtggttaattcaggaatggctagtgatgcagaccttggtccagtgatcagcaaacaggctaaggaacgtatctgcaaattaatacaaagtggtgctgataatggtgctcgtgtgctgcttgatggaagagatattgtggttcctaacttcgagaatggtaattttgttggtccaacactccttgctgatgttaaaagtgaaatggaatgttacaaggaggagatttttg

SEQ ID NO: 403749 - DNA, 606 bp, Oryza sativa nipponbare
  unsure (1)..(606): unsure at all n locations
ttcctgggtcgaccagcgtccgggactgtgggcggactttggggtgagttgttgaaagttgcaagagagagatcagttgttgagtgcgtggaagcagagatcaggaagatgctggagaagctgtgggacgacgtggtggccgggcctcgaccggagaccggcctggagaagctccgcaaggtttttacaacccgcccgcttgtcatcaacaaagatggcgacggcgaggcgagcggggcggcgtacaagcggacgcagtcgatgccgacgaccccgacgacgccggtgacgccgtcgtcttcgtctccgacgacgacggcgacgacgacgccgcggggcagcaacgtgtggaggagcgtgttccacccggggagcaacctcgccaccaagagcctcggcgccaacctcttcgaccggccgcagcccaactcccccaccgtctacgactggctgtacagcgacgagaccaggagcagccatcgctgaactaaataatcccattgatcggaggctggtcgatctctctgtcacgccacgtttgctggtccttgtggttatctaatacngtattaattatctagtatgttgctatcttatcttggtact

SEQ ID NO: 403750 - DNA, 410 bp, Oryza sativa nipponbare
aaaggattcccggttatttaaaaccattcctttttttggaaggcaacacctttccaaggattattttttttttaccaggaaaggcaaccatcccactgcatgaccaccctgaaatgacggggttcagtaaactacttatcggatcgttgcacataaggtcgaatgattgggttgatcctgagcctgccttaagttgtagttcatcgtcgggggatcaattgaggttggcaaagagagtggtgaatggcgtttttacagcaccatgtgatacatcagtcctgtatcctacaccaggagggaacatgcaccggtttcgagctattgcgccgggtgcaattttcgacattcttggccccccttattccacggaagatggccgagactgcacatattaccgcgctattccctac

SEQ ID NO: 403751 - DNA, 322 bp, Oryza sativa nipponbare
  unsure (1)..(322): unsure at all n locations
gtcgacccgcgtccgggaccgtggggnccgtggttcgtctagggtttagtgggttgagtggcgggccggatgtcgagtaccgctgcttcgtcggcggctccctgggccaccganaccgctccctcgaggccccttctccacctacggcgagatcctcgactccaagatcatcaaccacagggagacggggaggtcacgtgggtttggcttcgtcaccttctcctacgagcagtcgatgcgcgaccccatcgagggcatgaacggcaaggagctcgacggccgccacatcaccgtcaatgaggcccaccccccccgctccgcc

SEQ ID NO: 403752 - DNA, 384 bp, Oryza sativa nipponbare
  unsure (1)..(384): unsure at all n locations
gcggcgcgtccgcttattgtcacttccatctcattctcctaattgtgcatcactagcttctagctagcttaatgtagtgaattanccatggggggggggaagcaccaccaccacctgttccaccacaagaaggacgacgagccggccaccggagtagactcctacggggagggcgtctacacgtcggagacggggaccaccgaggtggtcgcctgcggccatgacgagtacgagaggtacaagaaggaggagaagcagcacaagcacaatcagcacctcggcgagggcggcgccctcgccggcggcgcctttcccctgtatgagaagcacgaggcgaagaatgacccggagaacgcgcacaggcacaagatcacggaggagatc

SEQ ID NO: 403753 - DNA, 330 bp, Oryza sativa nipponbare
gccgggcgtccgtgtaccgccacctgacgtacaaggacaacttcaccgtcgccgacgccggcgcgggcaaggagctgcacgaccagcgcaacggggggcgtcggacacatcgagcaccaccgcctcgccggcgtcgtcctcttcgccggcctcggtgacacgttcgacctccggttgttcgaccagctccggcagatcaggacattcggcgcgtggccggtggcaacgatgtcgcagaacgagaggaagggggtcgtccagggcccagcgtgcagctcctccagcgtcgctggctgggtctccatggacctcagcaacgccacctccccc

SEQ ID NO: 403754 - DNA, 400 bp, Oryza sativa nipponbare
  unsure (1)..(400): unsure at all n locations
gccggggcggcctggcggacnaccgatctgaggctgagctatggctagggcacccacctcctccccttccntatccgggatgggtgctggtcgggggtggaccanctcctacggagaacactccataatcaggcctcaggctcatctctgctatcctcggtccggataaagcatgaagaatcctccgctggactgagagcattggctcttcttggaggtggtgcttctggtcttttaagctttgctacaatagcttctgcagatgaagctgagcatgggttggcagcagctgaatatccctggccacatgctggcattcttagctcttatgaccatgcatctattcggcgtggacatcaaggttatacacaagtgtgtgcctcttggcattccatgtcat

SEQ ID NO: 403755 - DNA, 359 bp, Oryza sativa nipponbare
  unsure (1)..(359): unsure at all n locations
ggggcgacgcgtccgccgccgccggcggcggcgaggcatccgcggcggagccagcgcatgaatcgcancaagaggcgcgcgaggangtgctctgggggcatangaaananaaatccaaactccangataaggaaacaagcctcaagaaagcagccgctaaaggcagcaaaggtgggcagaagggcaagaagaagcagggagaggaggagatttcacgcctctcagctgagttagaggcgaaacatgccgcanagctcgctacttttgggtacaaatcctcaggcagctcagaaaaggggaacatggacaccttagtaaaggctatagctggtgtgtctgtgaccagcaacgcggattcc

SEQ ID NO: 403756 - DNA, 335 bp, Oryza sativa nipponbare
ctgcagtaccgtccggattcccggtcgagcgggcgtccgcccacgcgtccgcccacgcgtccgcccacgcgtccgggcatcgcgtgggcgttcggcggcatgaggtggtcctcgtctactggaccggcggcgtctccggcgggcacatcaacccggcggtgacactcggcctcttcctggcgcggaaggtgtccctggtgcgcgccctcctgtacatggcggcgcagtgcctcggcgccatctgcggcgtcgcgctcgtcaaggggttccagagctcgctctacgacaggtacggcggggcgccaacgatgctcgccgcggctactcaccggacc

SEQ ID NO: 403757 - DNA, 448 bp, Oryza sativa nipponbare
cgacgcgtgcgccctcgcctccttcccctttcccccctcacctctctgctcttctccgccgcaccaatccgccccctggcggttcgaccagatcggcgcgagggcatatcatggcatcgaagcggatcctcaaggaactaaaggacctgcagaaagatcctccaacatcatgcagtgcaggtcctgctggtgaggatatgttccattggcaggcgaccattatgggtcctccagatagtccctatgctggtggagttttcttagtgaatattcatttccccccggactaccccttcaagcctccaaaggtatctttcaagacaaaggtcttccatccaaacatcaatagcaatggaagcatatgccttgacattcttaaggagcaatggagccctgctttgacaatttctaaagtgttgctttcgatctgctcgctgctcactgaccc

SEQ ID NO: 403758 - DNA, 248 bp, Oryza sativa nipponbare
cgcgtccgcaagcccaagtcgcgtcgcaccgaagcagagtagagaaggagaggagcggagcgccatcagccgtcggagggagtgatccggtggctctcgctctctccacctctgctgctgctgccgctgccgccgctgcgcgggcgctctcggttagttttaccacggcgaggggttactccttgttttttgatatctctgatgttaacctactcattcctctttttcctactctcttcgtcttcttt

SEQ ID NO: 403759 - DNA, 415 bp, Oryza sativa nipponbare
taccgtcccgatcccggtcgaccacgcgtccgcccacacctacccccacgcttcttgatatgttcccacagtactactcgtctcggaacaacatttgctgcattagctgctcccatctctggggatggggacacgcaccccactcattattctaacgagctcaaagtccgcttccctaacatccaaaaaattaaccgtggtggtcaggtgatatcggaaattgttgagtcttgccgttcgcattatatcacccaccctgttttggtgcattaacatcgtggccagcccgatggtttaatcgtctgccatcttccatttgggccaactgcatattttgggttgctcaatgtggtgacacgccaccatattaaagataggaaggccatggttaaaatgtcaaaaacccacccccatt

SEQ ID NO: 403760 - DNA, 328 bp, Oryza sativa nipponbare
  unsure (1)..(328): unsure at all n locations
cgcagagctcacaagcccaagtcgcgtcgcaccgaagcagagtatagaaggagaggagcgtancgccgtcaggcgtcccatcgagggggcggcggggtctaagcttcagaaggcgatggtggcggtggacgagagcgagttcagccaccacgcncntttnntgggcggtgttcaacctctggccgaccattcgtgccgccggtgctcgtgctcaccgtgcagccgttcctccccctcggctacgtctccgccgcctccttcggctcccctctgggcacccccgttgtagccccggagctgatcaaggcgatgcaagagcagcagcagc

SEQ ID NO: 403761 - DNA, 419 bp, Oryza sativa nipponbare
taccgtccgaattcccggtaggcctaccgcgtacgcgtgcgtatcacatagcatagtatagacacatactacaaattaaactgaccacacaacttgctacgagcgttacatggagcgggacgggaggaggatatgcacacacatctctacctcctttagactgaaaagcgtgacaatccgtagtgcagcacccattgatgctatcgcctatacatacattttcacatatattaaggcacatcttgcaggtccttttggtggtgtctgaggaaatccaactacaattacacttacatctccagaatccgtgaagggattctccggaactattaccaacttcttgacaaacgttattatagttcccaatgtcaccacttataattttggactaaatggtggaactgtttttagacttcctt

SEQ ID NO: 403762 - DNA, 393 bp, Oryza sativa nipponbare
  unsure (1)..(393): unsure at all n locations
cacttccacaactgcttttcccaaatctctaacgcgtctattctcctttgcggtcagaggcataatgggggggggggctcgcttccatcttaaaccatccttcatacactaatactactttttaatcacgtcgaggccatctgcatccagaccgtctcctccgcctacatcctttccgtcaccgcccaaaactacataattctctactatttaactgcccttctttataccaaccctatccaatcataatttagtttttgaactgcgaaccaaagccaatcaaatacctacctccctgccccttcctctatcctctctcaacttatcggcaatttctccaaaaacggactcctatnnnanccacatggttgctctctcaagcgcacacactat

SEQ ID NO: 403763 - DNA, 359 bp, Oryza sativa nipponbare
  unsure (1)..(359): unsure at all n locations
accgctcctcattcccgaatcaccgcactcgggcgcccactcctccgatcgatcaaccgatctccccgcagaatgaagatgagcaaacatgtcntctttggtcaacagcgattagacggcgccgggggttcggcttcctcaacgccacctccaacctcatcttctcatgcatgggtgcggcttacgggactgcgaagagcggcgtctgcttngcgtccatgggcgtgatgcgccctgagctcgcgatgaattccatcctgcccgtgctcatggcttgtgtgctcgggatctacggcctcatcatcgccgtcatcatcagtacaaggatcaaccccaatgctaagccctactacctcttt

SEQ ID NO: 403764 - DNA, 453 bp, Oryza sativa nipponbare
cccacgcgtccgcaaggtcgccagcttcgcgcagagctacgcggccaagcgcgccggcgactgccggctgcggcactccggcgggccgtacggcgagaacatcttctggggctcggcggggcgcgcctggagcgccgccgacgcggtggcgtcgtgggtgggcgagaagaagaactaccactacgacaccaacacgtgcgacccgggcaaggtgtgcggccactacacccaggtggtgtggcgcaagtcggtgcgcatcggctgcgcccgcgtcgtgtgcgcggcgaaccgcggcgtgttcatcacctgcaactacgaccccccgggcaacttcaacggcgagcgcccgttcctcaccctcgacgccgcggtcaagtagacgaccactcactcgtacacagtcgtgttgaactgcatgctatgtcgctgccgcagtacatttcatcgatgttt

SEQ ID NO: 403765 - DNA, 418 bp, Oryza sativa nipponbare
attgctcgaagcattgacacatggctcatatcagacttctggccctacttcatgctatcagaggctcgagtttcttggagatgctattttggatcatcttttcactgaatattactacagcaaataccctgactgtactccagaattgttgacagatcttagatctgcctctgtgaacaacaattgttacgcgcatgcagctgttaaatcaggattaaacaagcatatccttcactcatcatcagaactgcataggaagatgagctactaccttgggcagtcatttacaggtccatcttatggctgggaagcgggcattggtctaccaaaggttctcggggatgtgattgaatcaatagctggtgcaatttatctcgacagcaagtgtgaccaaggaggtgtttggagaagcatgaag

SEQ ID NO: 403766 - DNA, 430 bp, Oryza sativa nipponbare
ggcggacgcgtgcgctcaaaagctcttcttcttctccttagttgatttcatcttcaggtgcttgagcttaattgcggacggagagaagatgtgttggagctgtggatctagctgcagctgcggctcaaactgctcctgcggaaagaagtaccctgacctggaagagaagagcagcagcaccaaggccaccgtcgtgctgggtgtggcgccggagaagaaggcgcagcagtttgaggcggccgcagagtccggcgagaccgcccatggctgcagctgcggttccagctgcaggtgcaacccttgcaactgctaagatgcctgcctgcatctaccatctatcatgtgtgcgtgtgaattgtgatgcagaaaaataaagaagcttggccatttgggttggtgcttgaccaatatatatttgggtgtgtgtgtg

SEQ ID NO: 403767 - DNA, 370 bp, Oryza sativa nipponbare
acccaaacgaccatgatgtcgtgcggtggaagttgcaactgctgttcctgcggaggcggcgttagctgggggaagatgtaccctgacctggctgacaagatcaccaccaccaccactactgcacccactgtcctaggaggcgcacctgagaaggggcactctgagggggttggcatggcagctgaatctggcgaggctgcccatggctgcagctgtggctccagctgcatgcgcaaccactgcatctgctaatgccaaggcgatctatgactgaattgccaatgcaccagcctgtctacatgatgaataaataaagagtccatccagtgtgatggctcatgcccgtgcgagtgggaactgacccatcagt

SEQ ID NO: 403768 - DNA, 293 bp, Oryza sativa nipponbare
gcgtccgcggactcgtgggcggactcgtgggcgcctaggaggtgcccggggtactccttccgggatgcgatcctggtgggggcggcggggctgactctcgcctaggtgcgcgcggtcatggcggacctcgccggggacttccccggcgacgcctacagcctcgtctcccgcaactgcaaccacttatgcgacgccgcgtgccggcgtctcgtgcggtcccggattccgggctggggcaaccggcttggcaagatcggggtcggcttcacctggggcatcccggtcatcggggg

SEQ ID NO: 403769 - DNA, 336 bp, Oryza sativa nipponbare
  unsure (1)..(336): unsure at all n locations
aggcggtccggcgactatggtccacgtcagcttctaccncaggtgtggggagacattcaagaagggcgcgctcccttactagaaggagcgtcttgatgcatagcttaagctagtgggtgagtatggactgaggtgcaagcgtgagctgtggcgtgttcattatgctttgagccgtatccgtaacaatgcaaggcacctgctcacacttgatgagaagaatccacgccgcatctttgagggtgaggcactgcttcgccggatgaaccgttatgggctccttgctgatgggcagaacaagcttgattatgtccttgccctcactggtgaaaactttct

SEQ ID NO: 403770 - DNA, 423 bp, Oryza sativa nipponbare
  unsure (1)..(423): unsure at all n locations
ccttccaccccttcagcctccactcgaatggangaggatgagggggagaggacaccaatgctgctgggcagcccatgcgcgcccctaagctcaacgagaggatcctgtcctccttgtggaggagatcagtagctgcacatccgtggcatgatcttgagatcggccctggtgctcctgctgtcttcaacggtgttggtgagatcaccaagggaagcaaagtgaaatatgagcttgacaagaaaactggactgattaaggtcgaccgtgtcctatactcatcagttgtgtatccccataattatgggttcattccaaggacactttgtgaagacaatgatccaatggatgttctggtcctgatgcaggagcctgttattcctgggtcctttctccgtgctagagcaattggccttatgcccatga

SEQ ID NO: 403771 - DNA, 461 bp, Oryza sativa nipponbare
  unsure (1)..(461): unsure at all n locations
gcgtccgattcctggaagggaagttcttcagcaggcgtacaaggaattggaacaaaantattctggtggcggcgtgatcccaaggcctggttactggggtgggtacagattaacaccaaaactttttgaggtctggcaaggccaacagtctcgactggatgaccggcttcagtattcactgcgagaaggagataggagcacagtatggcacatcgagagggtggccccttgactaggaaccccatcccagctctttggtaataaaaaggatctcatcttattatcaagaatcaaatcttatcccagctgcaaggagtcccaattgctcgatgatgttagtgccatgattaggtcgcgtgtttgagactgtgagtgcctgaagctctgctttttgacatgcccttcacacatctgatgttctctgaagcacagagtggatgaatccatgaaggcccttctct

SEQ ID NO: 403772 - DNA, 384 bp, Oryza sativa nipponbare
  unsure (1)..(384): unsure at all n locations
cgtctcatttcatccaactatacaagttcaagagtttacaagagacccagacgatcaatatgtggtgcggtggaagttgcaactgcggttcctgcggatgcggcggtggctgcngaaagatgtaccctgacctggctgagaagatcaccaccaccaccactactgcaaccactgtcctaggtgttgcacctgagaaggggcactctgagggggttggcaaggcagctgaatctggcgaggctgcccatggctgcagctgtggctccagctgcaagtgcaacccctgcaactgctaaggccaaggcgatctatgactgaattgccaatgcaccagcctgtctacatgatgaataaataaagaggccatccagtgggatggctcat

SEQ ID NO: 403773 - DNA, 475 bp, Oryza sativa nipponbare
gggcgcgcacgcgtccgcccactcgtccgcccacgcgtccgtccacgcgtccgggccaccgaaacaatcaaagggtggggtgccaccacctgcgggtgtgtgaagctccttcttccaagaagggacatcacatgggcgacttcattcctcaagaagaacttgaaaaggttatggcacgttgtaacgatgctgctgcacaaaaagctaccaaagaagctgcagagaaggctaagattcaggctgacaatatcggacacaaacttctgtctaagatgggatggagggaaggtgagggtcttggcagtgagagaagtggacgtgcagatcccattatggctggagacgtgaaaaaagaccatcttggtgttggcgctgtccaacctggtgagggcacatctgaagatgatatctatgagcaatacaagaagcgaatgatgcttggctaccgttataggccaaacccactgaacaatcc

SEQ ID NO: 403774 - DNA, 460 bp, Oryza sativa nipponbare
ctgccgtaccggacttccattctcgacggcgcgtccgcgacccgcagtcggcgccgtcgagcagctgctgctcggcggtgcacaccatcgggcataggccgggctgcctgtgcgccgtgaggctgtccaacacggccagggtcgccgggatcaagccggaggtcgccatcaccatccccaagcgctgcaacatggccgaccgccccgtcggctacaagtgcggagattacacgctgccttgacccttgaggccttgagggggactgtggcacttatcgatatcaagacgtacggatgccgtgggagcttatgctttgtgtcggaataagcgagagtccttcatgttcggggctctgccacttatatggactatgcacgtggtggttgtgaaaatatgtatcctgtgtttcgtctgagtaaactggtaaatataataagaatatacaaaagcttgcttgac

SEQ ID NO: 403775 - DNA, 424 bp, Oryza sativa nipponbare
ggagggcgcgtccgctgctctgagctccagtacctcgccaaccccatcaccaaccatgtccatagcgcgtatcaggacggccaggacgtgaactgggtgggtctcgtctcggccaggaagaccctggaggcggtggacatcctcaagctcatgacctccacctacatcgtcgccctgtgccaggccgtcgaccttcgccacctcgaggagaacatcaagagctccgtcaagaactgcgtcacccaggtggccaagaaggtgctcaccatgaaccccaccggcgacctcttcagcgcgcgcttcagcgagaagaacctcctcaccggcatcgaccgcgaggccgtgttcagctatgccgacgacccgtgcagcgccaactacccgctcatgcagaagctccccgccgtgctcgtcgagcacgccc

SEQ ID NO: 403776 - DNA, 491 bp, Oryza sativa nipponbare
tttggacggacgcgtgcgcatggagctcattggcgccgaacatatagccaacaagtttattcaccgttccttgttgctgttgcgcgatgaggacgaacgcgggtggaaatccaacaatattgcaaaagcaagtacggtagaaggaaactatagtcttcctgataatgttgcaatcatcaccttgcagagtcttgatgatggcaccacactccttcgattggcgcatctttttcaggctcaagaggacacacaatattcagtaatggcaaaggttgaattgagaaagctgtttggaaagaggataatcaaagatttgactgagactagcctatctgcaaaccaaaagaagtcagagatgaagaagctcaattggagagtaaccggggagagcaaaactgatcctgcaccattgaagggtggcccagttgacagccacgcccttgttgttgagcttggaccgatggagatacgcacattcttgctgaaattct

SEQ ID NO: 403777 - DNA, 437 bp, Oryza sativa nipponbare
cccacgcgtccgattgatccagcttctcatccgcagcttcacgtcttcctaaagcaggttgtagggttagatttggttgatgatgagagtaaacctgaaaggcgtccaacaaagcatatgcctacacctgaacaatggaccaatgtcttcaacccagcattttcatattatgcatattactgctatgctaacttatacacactcaataagttgcgtgaatcaaaagggatgaccacaatcaaattccgtccacatgctggcgaggctggagacatcgatcacttggcagcaacatttcttctttgtcacaatatatcgcatggaatcaacttaaggaaatctcctgggcttcaatatctatactatcttggccagattggtctggcaatgtccccattaagcaacaacctcttggtttttgattaccaccggaattc

SEQ ID NO: 403778 - DNA, 416 bp, Oryza sativa nipponbare
ctgtccggcgtgggcgcgttcgagggcgtggtgatggagatcatcgtcaccttcgggctggtgtacaccgtgtacgccaccgccgccgaccccaagaaggggtcgctcggcaccatcgcgcccatcgccatcggcttcatcgtcggcgccaacatcctcgtcgccggccccttctccggcggttccatgaacccggcgcgctccttcggccccgccggcgccagcggcgactacaccaacatctgggtctactggggcggccccctcgtcggcggcgggctcgccggcctcttttaccggtacgtctacatgtgcggggaccacgcccccgttgcctgcagtgagttctaattacccatttcgccattgggaacacgcatatatatggtggccacttcatcggtcagaatcttgtg

SEQ ID NO: 403779 - DNA, 472 bp, Oryza sativa nipponbare
  unsure (1)..(472): unsure at all n locations
cgcgtccgcccacgcgtccggatgggcaaggctgacccatttgtagtcctgtacctgaagaagggagaaaccaaaaagaagacaagggttgtaactgatacactgaatccaatatggaatcagacgtttgattttgttgttgaagatgccttgcatgatttactcatggtggaagtatgggatcatgatacgtttggaaaggattacatagggagatgcatcttgacacttacgagagtaatactcgaaggcgagtttcaggatgagtttgttttgcaaggtgctaaatccggaaagctgaacttgcacttcaagtggacgccgcagccaatttatcgtgatcgtgatcgggaccagtgaaatctgtttagatacatcacgtcaagcagcttataaatatttcttcccctacggtgccttgacattagttnttctgtacagttaattcacttatcttgtagcaacaaggtgt

SEQ ID NO: 403780 - DNA, 482 bp, Oryza sativa nipponbare
cgcctcaggtaccggttcgcagattcggcccacgcgtacgcgtacgcgtgggcggacgcgtgggcggacgcgtgggtgtgatcaaagaagagaatgtgcatgaaacagttgatggtaacactcaagctgtgaagataaaatctaatgaagagaaagaactttttgattcacaggttcaggaacgtggtctcaatgtggtttcacccaaagcaacttctgaggccgacgaataatttgtggagataacaaagccagaattcagcacagatgaagaacatagtccaaaggcggatgaatcaaataagccagacgagaatacttgtgatgagaaaacaaaggctgaagaggaaactaataatatcactgatgaagcaacagtgaaaatagaagaacgaggagcagaacagagggtatcacataaaaacataacattttgtctggtgttggatcaaaggtgaagcatcaactagcataagtgaaga

SEQ ID NO: 403781 - DNA, 428 bp, Oryza sativa nipponbare
cgcaaaggcacaaagcccggattccaccgccggagccgacccgcttcgaggcgaatcgagagttagctttccagccagcaatcgaggatgtcgtcggtgcagctctccggtgccggagtcgccgcggtggccttcaccaagaatggcgcgtcttccttcgacgggctccgcctcgcgccgccatctgtgcgagtctgctcctccaggcgcccgtctcgtagcctcgtcgtcaaggccgccacggtcgtcaccccaaagtatacctcgctcaagcctctgggagacagagtgcttgtgaagcttggtgctgcagaggagaagactgttggtgggattctgcttccgtcaaccgcacagtctaagcctcagggaggtgaggttgttgctgttggagagggaagaactattggggataagaaagttgaggt

SEQ ID NO: 403782 - DNA, 337 bp, Oryza sativa nipponbare
tatccggtcatccatatttaaacaaggagggaaagccaagcccctcaaggctcccaatgccgagaagaatgagtacgacgagagtgatctcgcgtatctgcagaagaagaaagattaggaaaaggcactgaatgagcttaaggccaatgcaggacagaatggtgcactgggaggctctggtctgaagaagagcgggaagaaatgatgctgataccaatctgtaatgcctgaaaaatgataaaccagctacctgtctgtgttacatcactatttgcggatgtaacaaaactaccttaagcatgttatcattaacaatgttgaattggtagtttaatcc

SEQ ID NO: 403783 - DNA, 415 bp, Oryza sativa nipponbare
  unsure (1)..(415): unsure at all n locations
gggatgagctccacaggatgctgaacgaggatgagctacgtgatgctgtgctgcttgtctttgctaacaagcaagatctgccaaacgctatgaatgctgctgagatcactgataagcttggactgcactcccttcgccagcgacactggtatatccagagcacttgtgctacaacaggtgagggattgtacgagggcctggactggctgtccagcaacattgccagcaaggcctaaattttaacaagatttgcataagctaggggagctttggatggatcgatgggtatttagggctgtggttgctatcccaatatgtaaggtgtaattccggagctcaatagttattgagctntggttatgatttcacagttaaatggtttactgtactttgagccttaacatgtttctgaatt

SEQ ID NO: 403784 - DNA, 301 bp, Oryza sativa nipponbare
cacgcgtccgggcgagggaggaggcggggagcggcggggcagggtgcgtccacacggcgaggagggaggaggcggcgcagagcgccacgacggcggccatggcggggagcgggagcttcatggtacgcagcagcatggccgctgacttctcctcccctttgccagctactggaaatttgggaataatcactgaatcaatcaccgatcaagaactgaaatttgctatctcctcggtcagatagttcagattcgttcactggtgtgcaattcagatcgtgtggagaagggaggaagagagggg

SEQ ID NO: 403785 - DNA, 368 bp, Oryza sativa nipponbare
  unsure (1)..(368): unsure at all n locations
gcggggacgcgtccggatttctgcgccttctgtggggatcgccttcgcgcccaagccgccaccttcatcggggggggggtcttaccggggagggaaggtcctgtgctcggtggccttggctcctgcgccggcgccggcggggactctgtactacgtggtggggctgcgtgccggcgccacggtgcgggagatcaagggggcgtaccggcgcctcgcgcgggagcggcaccccgacgtggccggcagcgccggggccgacgacttcgtcaggctccacgacgcctacgccacgctctccgaccccgacaggcgggcgcgctacgaccccgacgtcnncgccgtcgccttcattggccggcgggcgcacc

SEQ ID NO: 403786 - DNA, 443 bp, Oryza sativa nipponbare
  unsure (1)..(443): unsure at all n locations
gcgggcgcgcgtccgcccacgcgtccgtgcttgagcttaattacagactgagagaagatgtcttgcanctgggggtggtagctggaggtgggggtcaaactgctcctgcggaaagaagtaccctgacctggaagagaagagcagcagcaccaaggccaccggcgggctgggtgtggcgccggagaagaaggcgcatcattttgaggcgggcgcagagtccggcgagaccgcccatggctgcagctgcgggtccagctgcaggtgcaacccttgcaactggtaagatgcctggctgcatctaccatctatcatgtgtgcgtgtgaattgtgatgcagaaaaataaagaagcttggccatttggggtggtgcttgaccaatatatatgggggtgtgtgtgtgtgtgtgaagggtaaacgatgtgctatgttattgggttcactat

SEQ ID NO: 403787 - DNA, 281 bp, Oryza sativa nipponbare
ggggggggcgccaccaccaccttttccaccacaagaaggacgactagcctgccaccggagtatactcctacggggggggggtctacacgtctgagactgtgaccaccgaagtggtcgccggcgggcatgacgagtactagaggtacaagaagggggagaagcatcacatgcacaagcagcacctcggggagggcgggtccctcgccggctgggccttctccctgtatgagaagcacgatgcgaataatgacccggagaacgcgcacaggcacaagatcacg

SEQ ID NO: 403788 - DNA, 440 bp, Oryza sativa nipponbare
  unsure (1)..(440): unsure at all n locations
gcgggggcgcgtccgcgctctacaacaagtactacgtcggggtcgccaacaacctgggcctcttcacttcggaccgggcgctgctcacgaacggcacgctcatggcgtctgtggactagttcgtcaagagcgagacgcggtggaagagcaagttcgtgaagggcatggtgaanatgggcggcatcgaggtgaagaccgggacgacgcatggcgaggtcaggctcaactgcagggtcgtcaacaagaggagcgccaacgctgagctcgagctcgagctcgccgccgccatggatgatggggatgaagtggcagcgagctaattaattaaggtggtagtagctgatctgatgtcgcgtgttcttcagaggtgtcagcaataagtttgtgatcggggttgttacttgttagatgtatgctgctgctgtttttaacgagaataa

SEQ ID NO: 403789 - DNA, 443 bp, Oryza sativa nipponbare
  unsure (1)..(443): unsure at all n locations
cgggcgcgcgcgtgctcggactcgtgggtctagaaccggtgccgcttctccgtctaggtgatctactccttgggcggcgatntaggaggtgagcgtntcnnaatcagattatcgccgttcggcgacttcatggactggttcgactccgacccggggggtgtggggtcatacatggtgcagcaactcaacaagcacccaggggttctctactggcacatgggggagccaagaatgggcataatcgaagggcgaagggagatcggccatggcctcctaccattcagggagcaggtcaatggcactttcatcggtgctggcgggtatgaccgggaggaggggaacaagggggtggctgatggctatgccgatctcgtcngctatgggaggctcttcttggctaaccctgacttggcgaggagggttgagcttgacgcaccattgaa

SEQ ID NO: 403790 - DNA, 401 bp, Oryza sativa nipponbare
  unsure (1)..(401): unsure at all n locations
ggggcgggccactcttcctcggactcgtgtgcgcgcttaagactaacatcaccaccctcggncctctcgggcgcgcnggntcgggggagggggtgttcatngccacattggttngcaanaagggcctcaanatgaagatcaagccatacattcccgggggggggtggcatttgagcatttctggatccatgccggggggcgtgccgggctggatgagctggagaagaacttggaggtggctggctggcacatggagccatctagggtggcactggaccgggttggcaacacatcgaggaggtcactctggtgtgggctgggggacaccgaggcgaatgggaggagcatggatcgggacagggtctggcagattggatttggatctgggttcaagggcaaca

SEQ ID NO: 403791 - DNA, 424 bp, Oryza sativa nipponbare
  unsure (1)..(424): unsure at all n locations
gaatagggtctccaaattttggaactctaccgaaggatttatgaagaatttttaggaggggggtttctaggggggggagaagtnanatngaaaaatttgctggtggactgtatacaacaagggttgagggcttcattccaaacacaggacgtggtgtacaaggggcaacatcacattgtcttggtcaaaactttgcaaagatgtttgatatcacttttgagaatgataagggctcaagatccatggtgtggcagaactcttgggcatacaccacccgctcgattggggtgatggggatgacacacggagatgacaaaggtttantgcttccaccaagggtggcacctctgcaggtcattggtattcctgtgccatacaaagatgttgacacaacatctattgtgaacgaatgcaaaaagactgg

SEQ ID NO: 403792 - DNA, 445 bp, Oryza sativa nipponbare
  unsure (1)..(445): unsure at all n locations
gcgggggacgcgtgcggccccaccttgcttgaggctcttgaccagatcaacgagcccaagaggccatcaggcgagcgcgtgcttcttggggttggggacttntacaagatcggtggtattggcaccgtgcctgtgggtcgtgttgagactggagtcctgaagcctggtatggtggtgacctttggtcccagcgggctgaccactgagggcaagtcggttgagatgcaccacgaggctctccaggagggtcttcctggtgacaacgtcgggttcaacgtgaagaacgttgcggtgaaggatctgaagcgtgggtacgtggcctccaactccaagggtgaccctgccaaggagggtggcagcttcacctcccaggtgatcatcatgaaccaccctggccagatcggggacgggtactccccattgctggactggcacacctcccaca

SEQ ID NO: 403793 - DNA, 445 bp, Oryza sativa nipponbare
  unsure (1)..(445): unsure at all n locations
acttttcctgaatgccgggggcgggccactcttccttgacaatctcccattcatccactaccattatagcagatgtggccaccaaagggnggggccattcagggaggggggagcttaatanatatctttctcanacaaactcatcatatgactctnataagttggctaagagaatcgcagagctttctggcggagttgctggtataaaggtaggagctgcaaccgatacatatcttgaggatcgcaagcttcttatcgaggatgccaataatgcaacatttgctgctattgaggaaggtatagtacctggatgtggggcggcctatgttcacctgtcaaaattttgaccatccatcaaggggaagttggatgaccctgaatagcgccttggtgctgatatcattcaaaagctctattggcaccggcagcactaataccacacaat

SEQ ID NO: 403794 - DNA, 434 bp, Oryza sativa nipponbare
  unsure (1)..(434): unsure at all n locations
cgcgtgcgctccaccgtcgccgccgccgccaccggagcggatcaaccacatcatgctagggacgggaaatcactggcgggggggagaagaatcaatttanatggattgagatggcgtgtatttgacgcaaagggccaggtccttggacggggggcatcccaaatagctgttgtgcttcagggaaaggataagccaacttatgcaccacatgtggaaaatggagacatgtgcgttgtgcttaatgcaaaagatatcagtgttacaggaagaaaaatgaccgataaaatctactactggcacacagggtatattggccatttgaaggaaagaagactcaaggaccagatggaaaaagacccaactgaagcaattcgcaaagctgtcatgcgcatgcttcctcgcaatagattgcgtgatgacagggatcgtaaact

SEQ ID NO: 403795 - DNA, 422 bp, Oryza sativa nipponbare
cgtccgcccacgcgtgcgcccactcgtccgggcagagtggataccactatggacgtccgcgcagggggtgtgagcgcgacagggggactggccgtggctatgatttgaagcgtgaggggtctggccgcggcaattggtgaactgtcaccgatgaaggccttgcacaggaagttgcggaggctgttaacactgaggaggctcctgcaactgcagaggatgagaagaaacctgaagatgtgccacagtctgaggtcgacaaggacaaggagagtccacagaatgaagaagaataaaaagaacctgaggataaggagatgactttggaggaatatgagaaagtgctggaggagaagcggaaagctttgcttgcactgaaggctgaggagaggaaagttgaagtcgacaaggagttgcaggccatg

SEQ ID NO: 403796 - DNA, 171 bp, Oryza sativa nipponbare
cctgttcgacccactcgtccgaagaaatcggaaagagagatggaattgaaagagaaatttgagaagaaccttgcgggaagcatcatataagggtgataactctaacctttacctgaaaaacttggatgtttgtgtttttgttgattttttttatgtttctattctttttta

SEQ ID NO: 403797 - DNA, 292 bp, Oryza sativa nipponbare
cacttatgggggcgggtgatctcactttagtattaccttctcttgcaatgacccaaccaaagtttacctcattgtatcatacgtctcaagtcaagcttacaagaacattgtttctattgacctttctcacctcttcattttccaattatcatactccattcgtttcccataaccactgtccgtattctttcacacatactgcactttcaagatcccttacaagtatatccttaaaaattttaaggtaaacttatacttcatgcccttcattatcatcatcaaaccttacctc

SEQ ID NO: 403798 - DNA, 438 bp, Oryza sativa nipponbare
gcgggcaggcgtccgcttctactggggaacccggcgggacatgatgctgcccaactgcctgttcctgatgggcgcgggggctatcctggtggcgaacaggatgagggaggctaggagggccaattacaggctgatgcacgtggtccgcacgcacaagggcgccgacgaccgcgcgtaccggtgcgtgtactaggaggaggacgagcaggggcactcggggatctcgctgtccaaggagctgatggccatcgccggcgacgcgctcaagtcgaacatcaccaccatcggcccgctggtgctgcccatgtcggagcagctgctcttcttcttccgcctcgtcggccgcaagctcatcaacaagaagtggaagccgtacatcccggacttcaagctggcgttcgagcacttctgcatccacaccgggggacgcgccgtgat

SEQ ID NO: 403799 - DNA, 431 bp, Oryza sativa nipponbare
acgcgtccgcccacgcgtccggtgtagccatgctggcatacagggaacaagccgccctgctcattatcatgtgctgtgggatgagaacaaatttactgcatacgagttgcaaaccctcacgaacaacttgtgctacacgtatgcaaggtgcactcgctctgtatcaattgtgcctcctgcgtactatgctcatctggcagcctttcgagctcgcttttacatggagccagagacatctgacagtggatcaatggctagtggagctgcaacgagccgtggccttccaccatgtgtgcgcaacgccagggttgctggaaatgtatccgtcaggcctctacctgctctcaaggaaaacgtgaagcgtgtcatgttttactgctaagagcttgtgctgtacccccgttgcgccaaggaatgtagtactatgctat

SEQ ID NO: 403800 - DNA, 407 bp, Oryza sativa nipponbare
cccacgcgtccgtccacgcgtccgcacgcggctcgcatcagtaccgcgccctcactgtccctgagctcgcccagcagatgtgggacgccaagaacatgatgtgcgccgccgacccgcgccacggccgctacctgacggcctcggccatgttccgcggcaagatgagcaccaaggaggtggacgagcagatgatcaacgtgcagaacaagaactcgtcctacttcgtggagtggatccccaacaacgtcaagtcgagcgtgtgtgacatcccgccgcgcggcctttccatggcgtctacgttcgtgggcaacttcacctccatccaagagatgtttcgccgcgtcagcgagcaatttcacggccatgttcaggaggaagggcgtcttgcactggtacacgggcgaggg

SEQ ID NO: 403801 - DNA, 418 bp, Oryza sativa nipponbare
cgcgtccgcccacgcgtccgtgaatgtggagaggtcctttgcacagcagcactatgccgacctttccgacgggcccttcttgcctgggtggggggagtacatcatctctggccccgtcgttgcgatggtttgggaagggaaggatgttgttgcctctggccgcatgatcattggggccaccacgcccttggtggcaacccccggctccatccgggctgactatgccgtggaagttggcaggaatgtcatccatgggagcgactcctgggacaactggaagaaggagatcgctctctggttccctgaatgcttagccgagtggaggatcaaccttcacccttggatctatgagtctgagagcttctcgcctataatccttcacctctaggtggttagttttcggtaaatatttgagttt

SEQ ID NO: 403802 - DNA, 271 bp, Oryza sativa nipponbare
accgtttccgtaattccagcttcgacggaggcgtccgagtttgtgctgatacatttatggctggtgctttcgatcagttaaaacaaaatgcaacaaagaccaagattccttttgggggagagctcatgcagtatgatccattgaaaattgctgttgagggtgtggagaggttcaagatagaaaactgtgatctcatcattgtacatacgatgtggaatgcactatacaattaagcatctccttttttgatagaaatagcgccatagtttca

SEQ ID NO: 403803 - DNA, 432 bp, Oryza sativa nipponbare
cgcgtccgcccacgcgtccgccaaccttctgggacggcgccgtcctcgtcgcgccgatgtgcaagatatcggagaaggtgaagccgcatccgttggtggtgacgctcctgacgcaggtggaggagatcatccccaagtggaagatcgtccccaccaaggacgtcatcgactctgccttcaaagaccccatcaagcgcgaaaagatcaggaagaacaagctgatctaccaggacaagcccaggctgaagacggcgctggagctgctgcgaaccagcatcagcgtcgagcaaagcttgtcacaggtgagcatgccgttcttcatcctgcacggcgaggccgacaaggtgacggacccggaggtgagccgtgcgctgtacgagcgcgccgccagcgccgacaagaccatcaagctctacccggtgatgtggcacg

SEQ ID NO: 403804 - DNA, 331 bp, Oryza sativa nipponbare
ccacgcgtccgggcggtgggagccaacatctccggcgggcatcgtgaacccggcggtgacattcggcgcgttcgtgggggggaacatcagcctggtgaaggcggtggtgtactgggtggcgcagctgctggggtcggtggtggcgtgcctgctgctcatgatcgcgacgggcggcgccgccgtgggtgccttctcgctgtcggcgggcgtgggcgcctggaacgcggtggtgttcgagatcggcatgaccttcggcctcgtctacaccgtgttcgccaccggggtggatcccaagaagggcgtcctgggtgtcatggcccccatcggcatc

SEQ ID NO: 403805 - DNA, 429 bp, Oryza sativa nipponbare
tcggcccacacctacggttaagccatctactagtaccaagtagaggaaatagctcaaggctttggaacgcaagaacatcaccatgaagagcagcactctcttggtgatcctggctgtccaggccgctcttatcatgggaatctttgctgctgttgcaaaagaaaatgccgtgggtgagagcaaggcgatcgacatcaacccggggcagctcaagtgctgcagcaactgcaacttctccttctcggggctctacacctgcgacgacatcgtcaagaaatgcgaccctgtctgcaagaaatgcgccgtcgtcaagacctaccctgtgaagatgttcaagtgcaccgacaccttcctcggcatgtgcggccctccctgcaagcactgatcgatcgatcgatcgatgatgacctgaataatgcatgaacgcga

SEQ ID NO: 403806 - DNA, 401 bp, Oryza sativa nipponbare
ggggcgacccacgcgttctgtgggccttcaaggttcccggacccaaggcctagatcagactttcccatcaggtgtgcgatcgtccggcccgagcgccccctcattctcagcgcaccgactgcaaagtccggttctgatttcgaaggtagggtccgcttcgcatttggggattactattagccagcactgcttccaggatggactgatggatttttttgtttctttcgatttgttgatgagggattaactcgccggatgttgctgtacatcgctgtggtttaggtgggtacttatcttttagcccttgaagctagcgcttggcatgcacatattatcgaaccatggcttgattttataatatttttcaccttttattcgggtacatgttactttctggtgtg

SEQ ID NO: 403807 - DNA, 431 bp, Oryza sativa nipponbare
cacgcgtccgcggacgcgtgggcggacgcgtgggcggacgcgtgggcggacgcgtgggtgggccgggtcggagaagacaaatctactgtagctgcttgtctctgttcgccggtggcgaccgtgagaggaggaggtagtcctagtcctagtaggcgagatgagcggcgccaccaagttcatcaagtgcgtcaccgtcggcgacggcgccgtcggcaagacctgcatgctcatctgctacaccagcaacaagttccccaccgattacatccccaccgtgttcgacaacttcagcgctaatgtttcagtggatgggaacatcgtcaacttgggattatgggacactgctggacaagaggattacagcaggctgaggccactgagctacaggggagcggatatatttgtgctggcattctcactgatcagcagag

SEQ ID NO: 403808 - DNA, 470 bp, Oryza sativa nipponbare
gcgggcccggattccggggtcgagcgcacgcgtcacgcgtccgcccacgcgtccgcccacgcgtccgggtttcacgctggggttctgacccgaactcgctgggttcctactcgtgcgacctggtcgggaagccggccgacgtgtcggcgcggttcgccgcaccggtggagaacctctacttcgccggcgaggcggccagcgccgaccactcggggtccgtccacggcgcctactcgtcggggatcgccgccgccgatgagtgccggaagcgcatcctgatgcagaagggcatccctgacctcgtccaggtcaaggcctacgaggagatggccggagtcattgctccccttcagatttgcaggacctgaaaaaactgaacctgctccaccctgccattgtcatggaatctggattgattcaattgccatgcctatgccctggaatcttgatgattcaatcactcatacaag

SEQ ID NO: 403809 - DNA, 395 bp, Oryza sativa nipponbare
gttcgacgccacgcgtccgcccacgcgtccgcccacgcgtccgaacgcactctgcagctagctatacaatctctgtttaattagctaggtagctagcgagtcataaatcaagaagccatggacttttacgggcggcgcgagcagtacggcgggtatggcgggtacggtggcggcggcgccctggcgacgccggggtacgcgccggcggcgccgtacgggatgtcgcaggtgaacatcgaggggaacgggtgtggcaggacgctgccgccgcagccgacggtgaaggtgtactgccgggcgaacccgaactacgcgatgacggcgcggaacggcgcggtggtgctggcgccggcgaaccccaaggacgagtaccagcattggatcagggacatgag

SEQ ID NO: 403810 - DNA, 338 bp, Oryza sativa nipponbare
atcacttccaaaacagatataccaaactcgttttctatacttctcttctctggtctcggtgcagctatgggggagaggaacgcccaggtcgacgagatgggcggcggaaatgggcctaattctgacatggcgagggagaggaacatggagatgaacaagggcgccaaggggagccagcttgaagccaacaagaaggccattaaccttcaatgcaagatatgcattctgactttcatctgcaccacctctgagaccaagtgcaaagagcatgccggggcgacgcattcgaagagcgaccttaccggttgcttccataacctcaagaaatatcggttgtt

SEQ ID NO: 403811 - DNA, 442 bp, Oryza sativa nipponbare
gtccggttcccgtttcgaccacgcgtcccgtgactcctgggaaggcgcattgccacacgcgtgggcagtcacaaaactgatgttaatgatggctgcatcggtactccctcctatactgacatcttagaaccacacgcagcactattcataggattcaaacaggcgtttgctgcctggaccatccgaagcatcttgaatacactagtgtgacttgctttggggagcatgttgggaccagcggattcagaaaaagtggtgattgataataacctaataagctccatcggcgatgcttgtaccatatgcagcgttatataatcttagaattataggagagctagagctcgttttatgcgaacaaatgcgttcctggcggtccgtgtcattgacggacagggtatacaacatacgctgatacacagcatcagtgccattcatacgc

SEQ ID NO: 403812 - DNA, 594 bp, Oryza sativa nipponbare
  unsure (1)..(594): unsure at all n locations
gggacgcgtccgcggacgcgtgggcgcccgtctccaaggatacccgtgaaatgttcagaatgtgggcatccctctgggggtcggctccctcaggtgtccacactagatgatgttcaagtagacgtggctacaaaagccaacgcccaagcttttaacaatggtcttatcagtcgtgcactattcggagccaccggtatgcctgatgtctccgtatacatctttgctcttttcaacgagaatttgaagggcggagcatctgtagaacaaaactttggcttattctacccagacgggacggaggtttaccaagttgactttcacaatggtggtggtggtaatgtttgccctacaaaagcaagttggtgtgtggcaaattcagcagttgggagcacccggctgcaagcagcgttggattgggcttgcagtaatggtgcagattgtggtgctatccaaccaggcaagacatgcnttgcaccaaacaccttggtcgcacacgcatcttacgcgttaatggctactaccaacgtaagagccaagctagcggtacatgtgacttctctgggtgctgtttttattgtctacaagccttcacca

SEQ ID NO: 403813 - DNA, 450 bp, Oryza sativa nipponbare
acgacgtacgcttccggcaaggcttgtggccggcggagccgtggaggcgacccctgccccgccggcgccaagatgcagatcttagtgaagaccctgacggggaagaccatcacgctggaggtggagtcctctaacaccatcgacaacgtgaaggccaagatccaggacaaggaagggatccccccggaccagcagcgcctcatcttcgccggcaagcagctcgaggatggccgcaccctcgccgactacaacatccagaaggagtccaccctccacctcgtgctccgcctccgcggcggcgccaagaagcgcaagaagaagacgtacaccaagcccaagaagatcaagcacaagcacaagaaggtgaagctcgccgtgctccagttctacaaggtggacgacgccaccggcaaggtcaccaggctcaggaaggagtgccccaacaacgac

SEQ ID NO: 403814 - DNA, 374 bp, Oryza sativa nipponbare
cagacggccatggagaacgacaccatgcttacccggaaactcaagggtttgagccggaggctttcatcggttgacctgacggggctctcccatcagcagaagctggcattctggatcaacatctacaattcgtgcatgatgaatgcatttctcgagcaagggatacctaccacccctcatatgctcgtggcaatgatgccgaaggcgacaataaatgtgggtgggcgcacgcacagcgccatgtcgatcgagcatttcatcctgcggctgccctacagcgtgaagcatgtgaatcctggtggagtgaccaagggcgccgtcgacgacgtgacgatgcgaggcgtgttcgggctggagtggtctgagcccctggt

SEQ ID NO: 403815 - DNA, 422 bp, Oryza sativa nipponbare
cggaggcgggaggccatcgacgctgaagtgaaggggatcgcgatctccggcgagcgtgcgggggaagatggctgacccagagttggaagctatcaggcagaggagaatgcaagagctaatggcacagcatggtgcggcaaatccgcaaaatgctgggcaacaaaaagctcaagaagatgcaaagcaggaagctgaggaacggcggcagatgatgcttgctcagattttatcttctgaagctagagaaaggctctcccgcatagctttggtcaaacctgataaagcaagaggggtggaggatgttcttctgagagctgctcagtccggtggaatatctgaaaaggtgtctgaagaaaggcttatctcacttctggagcaaatcaatacccacactagcaaacagacgaaagttacgattcaga

SEQ ID NO: 403816 - DNA, 201 bp, Oryza sativa nipponbare
atcgtcttttccttctatcgtcatgccccggggagcggcagcttaaccatctacatggtgcagggcaattgcaccggactgggggggttacttcacagcatccctagtcgtctaaccaaccatccatgtttcaacccggactccaagagccttatattgaccttcaactactccgtcatctcccccgagccggtctccaac

SEQ ID NO: 403817 - DNA, 455 bp, Oryza sativa nipponbare
  unsure (1)..(455): unsure at all n locations
gcgtccgcccacgcgtccgcccacgcgtccgcccacgcgtccgaaaatggcaaaggaaatagtantggtgagggtgctcctttttgtggtggccggcactactaangccgacacgcaaagcgggtatgggcatgggtgtagctccttatgcaatagttcagcgccgacacacatacacttctacttccatgacaagattaccggcccctcgccatccgctgtgcaggtggtcagcccaccgaacaaaacatcaccaacctctttcgggacggtgtatgtcatggatgacccattgaccgaggggcctgacccaaggtccaagcccgtgggtcgagcccagggcatgtacctctcatcagaccaagtccggataggcttnctacaggctatgaacatcgtgctcactggtgggccgtacaatggcagcgtgataaccgtgctcggcagcaaccaca

SEQ ID NO: 403818 - DNA, 299 bp, Oryza sativa nipponbare
gtaccggaaccccaggcccggcccacgcgtccggtatgagcatgctgagttcaagaagatgtttgaccttattgagcaatacaacttgaatggccacatggcggtggatctacttgcagatgaaccgcgtccgtaacggtgagctctaccgttacatctgcgacaccaagggtgcttttgtgcagtccgctttttacgaggcattcggtctcactgttgttgagtacatgacctgtggtcttccgtcattcgcaatccgctatggtggtccagttgagatcattctgtacggattgttt

SEQ ID NO: 403819 - DNA, 554 bp, Oryza sativa nipponbare
atcgccgggtacccgcggaagaagaagaagaagaaaagatgagctactacggccagcaacctcccgtcggcgtcccgccgcagcaaggttacccggggaaggacggctacccgccgccggggtacccaccggccggctacccgccggcgcagggctacccaccggctgggtaccccccgcagcagggctaccctccgccgtacgcgcagccgccgccccagcagcagcagcacagcagcggcccttccttcatggagggatgcttggctgccctctgctgctgctgtctcctggacgcctgcttctgaggatagaggcgacgggtgcaagagagctgaagagatttgtttcatggagctgatcaaaccgaactgctatgagaaaatgctgctagatttcgtgttcggcattattacctgttattcgccttgtttatgaacctctctgaacctgatttatttgatcagtgtttgatggatggctaaaactatatagttgtgtactactgttgattccaatcttgctgggggaattcaacccgggttgcggagggc

SEQ ID NO: 403820 - DNA, 552 bp, Oryza sativa nipponbare
gggacgcgtccggcgtctgatctttgctggcaagcagctcgaggatggtaggacccttgctgactacaacagggggaatgagtccacggttgggggtgttctccgcctaaagggaggaatgcaaatcttcgtgaagacccttactggcaagaccattacgcttgagggtgagtcatcaaacacgatcgacaacgtgaaggggaagatccaggacaaggagggcattcccccagatcaggagcgtcttatttttgcctgcaagcatctggaggatggcatgaccctctctgactacaacatccagaaggagggcacccttcaccttggtctgcgcctaaggggtggaatgcagattgttctgaagactctcactggcaagactattaccctggagggtgagagctcatacaccattgacatacatgaaagcgaatagccaggagtttgacggcatccccccggaccagcagagactcatcttcgcttgtaaacaactggaggattggcgcacccttgccgactacaacattcagaaggaggctaccctacact

SEQ ID NO: 403821 - DNA, 595 bp, Oryza sativa nipponbare
cggtgccggaattccctgggggggcgcacgcgtccgcggcctcctctactggatcgcccagctcctgggctccaccgtggcgtgcttcctccgggggttctccaccgggggggggggcaccggcaccttcggcctgaccggcgtctccgtgtgggaggccctggtgctggagatcgtcatgaccttcggcctcgtctacaccgtgtacgccaccgccgttgaccccaagaagggcagcctcggcaccatcgcccccatcgccatcggcttcatcgtcggcgcgaacatcctcgtcggcggcgcgttcgacggcgcctccatgaacccggccgtctccttcggcccggccctcgtcagctggtcctgggagtcccagtgggtgtactgggttggcccactcatcggcggtggcctcgccggcgtcatctacgaggtcctcttcatctcccacacccacgagcagctccccaccaccgactactaagctcatcgccgccggcggcgcttgtccatgatcgcctcgtgtgcgactccgatccaaccggttagtttctcgcatcagtgcatcattaaacctgggttatttgcttggatc

SEQ ID NO: 403822 - DNA, 586 bp, Oryza sativa nipponbare
ttgggggcgagggacgcgtccgggttatagctacattaagtgtgaggcagtcctagaagagaacaaaatatgtgggcatatggggcaccttgattgtgctctgcgtacttttatggctggaacagttggaggatgtattgacttggacatgcagtattgttgcagacgttgtgataacaaaacgaacttgatgctgcacgtagaaaaattcttggaaatatgccaatctcttcaatcaagggatgacattgaacctatcctgaatactggcttatgcctagtgcgtggttcaagacaaacaagagcaaaaagcttggagagcattatgagatcagcaatggcaaagctaaagtgtggggttgatcttgctgaagtttggaaaatggaagataatggtatcaactcaactccaagtgcagaagtttcccctgctaccggtggtgtaacagtgcttgggatccagcaagctccagaagaggatgctcctccagggtttccatattatgttgatttggctgacaatgatttgcagagggctgttgaaaatcttccagcttacattaccgaggatcaacacacactgtct

SEQ ID NO: 403823 - DNA, 640 bp, Oryza sativa nipponbare
gattcccgggtcgcggacgcgtccgcggacgcgtgggcaccttcgtgctcgtctacaccgtcttctccggcaccgaccccaagcgcggcgcccgcgactcccacatgggggtgttggctcctctcccaattggattcgcggtgttcatggtccatctggccaccatccccatcaccggcaccggcattaacccggcgaggagcttgggaaccgcggttatctacaacaaggacaaggcctgggatgaccaatggatcttctgggtgggccccctgatcggcgccgccatcgccgccgcctaccaccagtacgtgctgagggccagcgccgccaagctcgggtcctaccggagcaacgcctgagatcggcggcggcggcgcgcgcgaggtggcgctgaagtgtatatacgcgtacaagatggccgcctctgtccagcactagatcaacgaattcagccttcgcatcctgcatttcgcctcgtggatagattctactgcactattatgtactatgtatccatgcatatggtctccattcctttgaactatgtccgccatatgttgcttcccgctggtgcttccaagtttgggtaattttccttcacattcttcatgtatgtaatattcatatgagaatttgg

SEQ ID NO: 403824 - DNA, 569 bp, Oryza sativa nipponbare
  unsure (1)..(569): unsure at all n locations
gcggcgcgtccgttctcatgccaattcactggtgatcttatcgccatgaatcacactgatttcatcatcagcgggacattccaaggaatgggtggaagcaaggacactgtggggcagtatgaatcacacattgcattcacccttcctgggctttaccgaggtgtgcatggcatagatgtttttgatcccaagttcaacattgtctctcctggagctgacatgagtgtctacttcccgtacaccgaggctgacaagaggctcactgctttccaccctgaaattgaggagcttctctacagtgaagtcgagaacgatgaacacaagtttgtattgaaggacaagaacaagccaatcatcttctccatggctcgtcttgaccgagtgaagaacatgacaggtctggttgagatgtatggtaagaatgcacatctcagggatttggcaaaccttgtgattggttgtggtgaccacggcaatcattccaaggacagggaggagcangctgagttcaagaagatgtacggtctcattgaccagtacaaggtgaaggggcatatccgctggatctc

SEQ ID NO: 403825 - DNA, 611 bp, Oryza sativa nipponbare
gcgtccgggggaagttcgatcgatccctcaccatggcgtcggagaaggaggcggctctcgccgcggtgcccaacgacgggggagggggattttacaagatcatcaataaggaaataccttccactgtggtatttgacgatgagaaggttctggctttcatagacataaatcctcaagctccgacccacattgtgatcattcccaaagtgaaggatggattaactggcctatcaaaggcagaagagaggcatgtagaaatactcggttacctcctctatgttgccaaagttgttgcaaagcaggagggacttgaagatggctaccgtattgtcatcaatgatggccccagtggatgccaatctggttaccacatacatgtacatctcctcggaggcaggcagatgaactggccgccgggctaacgagtgcccgtctgttgaactgccttcatggcaaggatgtcacactggctctccgttgaataattccctggactggcataacaattggtgccctgaacttatgctatatgttttggggatgttaccaggacaggacatgacccatccggttttgattaatggacaagatacatttgcgtcttcactcat

SEQ ID NO: 403826 - DNA, 488 bp, Oryza sativa nipponbare
cgcgtccgatatatactctctcaaaagtttacattaattgctgatagctcatcatcagtttgatcgtgtccggaggtgtgaggtcgtcggcgagatgagctccggcggcgaggaggggaagacgtcgtggccggaggtggtggggctgcgggcggaggaggcgaagaaggtgatcctcaaggacatgcccgacgccgacatcgtcgtggttccggtggggacgccggtgaccatggacttccgccccaaccgcgtccgcatcttcgtcgacaccgtcgccggcacccccaccatcggctagagctagctactagcctcatctgcctgccttcagcatcctgcttatcttaattaaataatcacatgcacgcaagtgatatgtactgtgcatgtttcgatcgatccatcccccatctgaataatgttggttttaccctacgcacgtgttaatgtttttctcctacgaattaataaagagaccttcattt

SEQ ID NO: 403827 - DNA, 440 bp, Oryza sativa nipponbare
ggggctcggcttcctccgcggcgcgccggcgctggcgcatcgcgcccgtggcgtgcgtcttcagcggctccatcaccgagttcacctccgacgacgcgaccgccacgctggtgctcccgctgctcgccgagctgggcaagtccatcggcgtgcacccgctcctcctcatggtccccggcgccgtcggcgcgcagctgtcctacctgctgcccaccggctcgccgggcaacgtcgtcggcttcagcacgggctacatcagcatcaaggacatggtgatcgccggaacgcccctgataattgtcggggttgcagctctcaccatcctactgccaacgttaggatccgtgcgttttggcatggatcaaaagctatagaaactttagtcaaagtgcaattggatgttttttggactatccaatttggaggctggaggttattac

SEQ ID NO: 403828 - DNA, 343 bp, Oryza sativa nipponbare
tcgacgccacgccccacgccacatatgaactaaagtttatttttgcacaatctttgtatcagagcttgtgaaagtggagaataaatgcatcaaaagtagataaaaagaagaataattcattgggatttgataaaagttagatttttttattagtatatgtgtggaatgggtaaaaataaactacatgacagatgcagtaaaatacgtacatgacaaaacagagacccaaatctgacgtgacaaaatggtgttatttttttcaggcgatcgaactaccaagcagccaggaacgcgctggagctggacctggtaggcgacccgacctggtgtccaccaacgccgt

SEQ ID NO: 403829 - DNA, 258 bp, Oryza sativa nipponbare
  unsure (1)..(258): unsure at all n locations
ttcaagtccctgatgaggatgggggtgaattcaagtcaattnacaacctcacgatcttcaataccaacaacctgtgggtgaacttgaaggccatcaagaagcttggtagaagcttgaaccacttaagattggaaatcattcctaacccctaaggaaggttgatgggtgtgaaaagtttttgcaacttcgaaactggcagcgggagcagccattcgggttttttgaaaaagcaattggcattaatgttccccgctcgag

SEQ ID NO: 403830 - DNA, 217 bp, Oryza sativa nipponbare
acgcgtcccgcccacgcgtgcgcgggcgttaccaggtgcccgcggggcggcccgccggccggacctccttggaggacgacgcgctcaacttcctgccgccgccaacgtcaacggccgccgacctgttggccaacttcaccgccaagaaccttaccgccgaggacatggtcgtcctttccggcgcccaaaccatcggggtttcccactgcgactcctt

SEQ ID NO: 403831 - DNA, 444 bp, Oryza sativa nipponbare
ggcaccacactccttcgattggcgcatctttttcaggctcaagaggacacacaatattcagtaatggcaaaggttgaattgaggggggtgtttggaaagaggataatcaaagatttgactgagactagcctatctgcaaaccaaaagaagtcagagatgaagaagctcaattggagagtaaccggggagagcaaaactgatcctgcaccattgaagggtggcccagttgacagccacgcccttgttgttgagcttggaccgatggagatacgcacattcttgctgaaattctgaactgcggttgttttggccttttattcttctctcttttgctgtgagggaaaggcttaatttggatagttgcctggatttatctgaggatgatgttgctgttggtcactggtaataatagatttataagtgctttcagcttatgtaataatg

SEQ ID NO: 403832 - DNA, 350 bp, Oryza sativa nipponbare
tcgaatcccggtcgaccacgcgtccgaaagtggctaatctttcaatcacgctccaatggatatcagtcctgtgcccaatcctgttgaagctccggtcaaaagaaaaaaaaccattggccatcaaactcattctaattcacacaaaggtatcaggacgttaagaaagttcttgcagatacggggttggctccttctgaggttcgagtgtatagtccatgagtgcagaatacactatacctgatgggtaaagcagaattcaacttgttcgccgctatatcatatgttcagctaaggatgcccaacctccaatttataacttttaacttagggaacaaagtttcttccaggat

SEQ ID NO: 403833 - DNA, 426 bp, Oryza sativa nipponbare
acacacgcatacaccttttttttttctttcaagatgacagcacatttattcaaaaatgtttgccttcatccttatgatacatgctgcatagagtttgtgagcgttacacactatttcccgccagcaagaagcagagcagagacttcttcatgacaggttctttactacgagtacgcagggcactgcaacattcttcatgacagaacctctggcactcatgcttcggcagccttctcttcacccttttgtgctagcttcgccttctttgcttcatagtctttcacggcagctttaattgcatcctcagcaagcatgctacaatggagctttactggtggaagtgacaagtgcttggcaatctcagtgttttttatagtcactacttcctccatttgcttgccctttacccattcagtagcgacggag

SEQ ID NO: 403834 - DNA, 470 bp, Oryza sativa nipponbare
agaatgcaacgggcacattcaagctatcgggtcacatggcagtctcctcaagtctgctgttctgcgacacatcagtgctccaaaaccatctattttacctgctgtatattcacgctccatgtcagtttcatctgctcaaatagaggagagtggatttgagactgccactgtggcagatattttgaagtctaaggggaagagtgctgatggatcttggctctggtgcactactgatgactctgtctatgatgctgtcaaatctatgacgcaacacaatgttggagctctggtggttgttaaacctggacaggataaatcaattgctggtattgttactgagagagattacctcaggaaaatcatagtgcagggacgatcttccaagtcaactaaagttggagacatcatgactgaagagaaccagctgatcacggtgaagcctgataccagagtcctgcaagcaatgcagc

SEQ ID NO: 403835 - DNA, 428 bp, Oryza sativa nipponbare
agggcatgaacgagaaggagctcgaccgccggaacatcaccgtcaatgaggcccagtcccgccgctccggcgcaggaggcggcgactacggcggagacaggggtacataccgcgctagtggctacagcttcggcatcggacgcgctaggccatgtccatggcaatgccaatgggattctaggatgtcgagccactgcattcaccatagccaacaatgccgtatgtggctcctccaaaacggacaacctacaaggtccccacacatcatctagcttagatttagctagagcatgcgatgctgctgcttggctcatctcacctcagtgagttcagttgtgaccctccggtcaaagcaatggttcgcctctccatgtagacccgtcctcctcttcgtcagcagactactgatcgaggattagtgatagata

SEQ ID NO: 403836 - DNA, 432 bp, Oryza sativa nipponbare
cgaccacgcgtccgcggacgcatttgtcgactacagtgatgagtaccgggttgtcacgtcgaaggcgcacagtgtggggggggcccattgtaccattgctgatgctttggagataaccgaatacctgaactcagacttatacttggacaagtatgacagccagtgccactgaattatgccaatgttactgatgatcttatcgacatgtattatactgatgatcattataaccagttcattctattaaattgatggaagcaaggtcactgtggtgtacagtgaataacacattgcattcacgctccttgagctttaccgttctgtgcatgttatagaagattttcattcttagtaataacagtggctcttctggatactgaatgaatttgtatttattggacacaaaagcttgcaagatgttaaatgattttt

SEQ ID NO: 403837 - DNA, 481 bp, Oryza sativa nipponbare
ttcccgccacgccccacgcgtccggccaagaagagggagagcaccaaggacacgcgactagcagaagccgagcgaccgcctcctcgatccatatcttccggtcgagttcttggtcgatctcttccctcctccacctcctcctcacaggttcttggtgtagcttgccactttcaccagcaaagtttcatgtctgatctcgacattcagatcccaactgccttcgatccctttgctgaggccaatgctggagactctggtgcggctgcaggatcaaaggactacgttcatgtacgcatccagcagcgtaatggccgtaagagcctgaccactgtccagggattgaagaaggaattcagctacaacaagatcctcaaagatctcaagaaagagttttgctgcaatggtactgttgtccaggacccagagcttggccaggtcattcaacttcagggtgatcagaggaaaaacgtatcaaattttc

SEQ ID NO: 403838 - DNA, 193 bp, Oryza sativa nipponbare
ccaccaccacctgttccaccacaagaaggacgacgagccggccaccggagtagactcctacagcgagggcgtctacacgtctgagaccgtgaccaccgaggtggtcgccggcggccaggacgagtaccagaggtcaagaaggaggagaagcagcacaagcacaagcagcaccttcgcgagggcggcgccctcg

SEQ ID NO: 403839 - DNA, 367 bp, Oryza sativa nipponbare
  unsure (1)..(367): unsure at all n locations
atcaaaaagcagctccagcttcttctgatcgatcgatcgagctgagctataggcagtagctgctaattaagctaattaattgctaagcagtagtagagctagctaattaattaagatggccggcaagaaggtgcaggtttgtgcgctgttccttgccctcaatgtgctcttcaccatgcagatgggtgcagtagtgcaggcatgcgagccctactgncccacaccgacgccgncggtgacgccgccttcgtcgccgccgtcgggtggagggaataagtgcccgatcgacgcgctgaagctgagcgtgtgcgccaacgtgctcaacctgctgaagctgaagatcggcgtgccggagagcgagcagtgc

SEQ ID NO: 403840 - DNA, 452 bp, Oryza sativa nipponbare
  unsure (1)..(452): unsure at all n locations
taccggaatcggcagggtccggcccacgcgtccgattggatgtgcacagtcatatgcgaaaaacatgggactttatggacaaagagcaggatgccttagtattctatgtgatgatgagatgcaagcagttgctgttaagagccagttacaacagattgctagacctttgtacagcaacccacccgttcatggtgcattaattgtttcaactattcttggtgatccggagttgaaaagtttatggctgaaagaggtcaagggtatggctgatcgtatcattggaatgcgaacagcactcaaagagaaccttgaaaagttgggttcaccaatgtcatgggaacatatcactaatcagattgggatgttctgctacagtggtatgacacctgaacaagtcgatcgcttgacaanagagttccatatctacatggctcgtaacgggcggataagca

SEQ ID NO: 403841 - DNA, 518 bp, Oryza sativa nipponbare
taccggtaccggcagtgcccggcgccgagcccacgcgttcgccaacaagtcgctcaccgccgaggagatggtcgtcctctccggcgcccacaccgtcggccgctccttctgctcctccttcctcgcccgcatctggaacaacaccacccccatcgtacgtacatagatcgatcgccggcgacggcgacggcgacctcgcggccattgaccatttcgccattgacgtacggctcacatggcggcggccggtgtgttcgatcgtgtgcaggtggacacggggctgagcccggggtacgcggcgctgctgagggcgctgtgcccgtcgaacgcgtcggcgacggcgacgacggcgatcgacgtgagcacgccggcgacgctggacaacaactactacaagctgctgccgctcaacctggggctcttcttctccgacaaccagctgcgggtgaacgcgacgctgggcgccgcggtgagcagcttcgcggcgaacgagacgctgtggaaggagaaagtcgtcg

SEQ ID NO: 403842 - DNA, 465 bp, Oryza sativa nipponbare
ccggtgccgtaccggaatcccaggtccggcccagaccgacccgtccttgctcgcctgcgtcggcatgttgccggcattcggcggtaccggcaacacccatacgcggaagcgggaggtcgccaagttcctgagccaaacctgccacgagaccaccggcgggtggccgaccgcgcccgacggccccttctcctggggctactgcttcaagcaggagcagaacccgccgtccgactactgccagccctcgccggagtggccgtgcgcccccggccgcaagtactacggccgcggccccatccaactctccttcaacttcaactacgggccggcggggagggcgatcgggtggacctgctgagcaacccggacctggtggcgacggacgccgacggtgtcgttcaagacgggcgctgtggttctggatgacgccgcatgggaacaagccgtcgagcccacgactgatca

SEQ ID NO: 403843 - DNA, 76 bp, Oryza sativa nipponbare
acccacgcgtccgcccacgcgtccgcggacgcttgatctctaagctagtataaacatacacgaatacaattacttt

SEQ ID NO: 403844 - DNA, 279 bp, Oryza sativa nipponbare
gcgtccgcggacgcgtgggcggacgcgtgggcggacgcgtgggttcagtgcttatacccgcactacgaactgttggaaatattgtaactggaggtgacgcgcaaactcagtgcatcattgatcatcaagccctcccttgccttctaagtctgttgacacaaaatctcaagaaaagcatcaagaaagaggcttgctggactatttcaaatattactgctggtaacaaagatcagatacaggctgtcataaatgctggcatctttggtaccctggtgaata

SEQ ID NO: 403845 - DNA, 150 bp, Oryza sativa nipponbare
cacctctctctgtcggggtcgcgcgcgcgatgcgggacgtcacatcgcaacaggcgtcaccggtggcgcggctgcgcggcgacggaatcattcacccgggcagaagctggccgtgtacgtgccggcgggcaccaagggcgcgcgcgtgtg

SEQ ID NO: 403846 - DNA, 347 bp, Oryza sativa nipponbare
  unsure (1)..(347): unsure at all n locations
aatcgacccacgcagtccgnggcattgccaagcgcctctacaccgcgctcgtcatccttccgccgccgctccacaagccgtctatgccgcgctctcccctcccgacgccagtgcgtccgcctcctcgcctccctcccctgcgcccccaattccttcatgctcaacaccacgctccgtgccctcgcctcctcccccgacccggcctccgccctcagcttcttctccctgtccgccgcgacagcggcagcagcggcggcggcggctcgtactcgcctcactccctcccgggcacgcgcgtatgggaaaggggaagaggaacgaaggagctagagccgtgccgagctccc

SEQ ID NO: 403847 - DNA, 398 bp, Oryza sativa nipponbare
  unsure (1)..(398): unsure at all n locations
tcctgtaccctgatcccatgacatgcaatccatggaggtggctggagaagaacatggaatcacatccacacttcatgctgtttggaggaggtagtcgaatgtgcccggngaaggaagtangcaccgtagaaaattgcaacattcttcactatntcgtgactcaatacagatgggaggaagaaggtaacaacacaatattgaagttccctcgagttgaagctcccaacgggttacatatccgcgttcaagattactgatcctggaacattttgcgaagttagataggaattcaaatcagattgaaaatagaatgcaattctgatgctgcttgcctgatgacaggattagaacagccgttttgctcttggaacatatgtccattgaaaataggaattttt

SEQ ID NO: 403848 - DNA, 384 bp, Oryza sativa nipponbare
cgacccacgcgttcgtaagaaccccgactaatacgacccccaccgctactcaccacgcaaggaggaggacacggcagctggcgccttgtagtacatgtcctttggaggcggcaggcacagatctctcagagagccacttgcctacctacagatcaaggccatatggactcaccctgttaagcactttgaggttgagctgttctacgccttccacgggaccaactgggaagccattgtcggtcgcaataacgactaggtgcattgtctactttcaacgggcgaaggctcacggcttcaaccaagatgacgacgtcaaacttaataaggccttcttttgctcggcataacgcttttcttcactactctacctttgtgacaactttt

SEQ ID NO: 403849 - DNA, 494 bp, Oryza sativa nipponbare
ccggccggattccggtcgcccacgcgtcggataccttcacacatagctgggggtgcaaataagaaagcatcaaatgttggacaattcaaagatggtgctaatgtagcaaaagttgaagatggtcatgtggatagaagtataggtgtgaaaaaaccccgatattctgcagatgaagggccttctttgactgaactgagtggatacaattcaaagagacatgaatttgacccagagtatgataacgatgctgaacaggcactcgctgagatggagtttaaagaaactgattcggaaactgatcgtgaactgaagctaagggtattgcgtatttacttgtcaaggcttgatgaaagaaaaaggagaaaagagttcatactggaaagaaacttactatttcctaatcctttggagaaggatctcacaaatgaagacaaggaagtttaccatcgctataaggtgttcatgcgtttctttctaagaggaacatgaagcac

SEQ ID NO: 403850 - DNA, 431 bp, Oryza sativa nipponbare
ggtgattccagcatggtggtggtcggatcggcggagtccttcaccagcatcatgtccaaggtggaagcggagaagcttccggccgtgttctactacacggcggtatggtgcgggccttgtagagcgatggcacccgtgatttcaaaactgagcagccggtaccccaagatacctatctacaaagttgacattgacatggatggggttggaagcaaactaagtgatctaaaaatattctctgggccaacattccatttctactaccaaggtcggaagacaggtgaggtggttggtgctaatgcgacaaaacttgaatcaaccatggaaagtcttcacaagcaactatagaagttttgtggaagaatatgaccgggaggtggccagatgtcttcatgtgcctttcatcaacgtgtttgacattgatatttctg

SEQ ID NO: 403851 - DNA, 444 bp, Oryza sativa nipponbare
  unsure (1)..(444): unsure at all n locations
gaccacgcgnncgatcaacccccgcatccgccaccgccgccaccaccccctaactccgatttgaagcgaccagaggccgcggctaaggtccgggatgtcggggcgcaaggagacggtgctggacctggccaagttcgtcgacaagggcgtccaggtcaagctcaccggcggcaggcaagttacagggactttgaagggctatgaccagcttctaaacttggtgcttgatgaagcggttgaatttgaaagagagcaagatgatccattgaaactatcagggaaaaccagacagcttggtcttattgtctgtaggggtacagcggtgatgcttgtatcgccaaccgatggaacggacgagattgccaaccccttccaatctgatggtgcataaacctgcaggagctgatggttctcctagtcaagatccatgcctctccagtagag

SEQ ID NO: 403852 - DNA, 404 bp, Oryza sativa nipponbare
  unsure (1)..(404): unsure at all n locations
cgcgtccgcaacgagccatcgcagatctccatcgacacgaacgcttactgcctcgctcgctataccatcatatgccacgcgaaccgagttccgccgcatgtcccgcctgacatacttgacgatggctctcatcacattgcgcgcttcacctatgtcacccagtagatcctgcttggctactacacgacgtcaataacacatgttctaaggacagctagcctcatgaagccaaacatagctacacgaggatctaaatccaagaaggtttgccctaacgtcatcgccgagtacaccgtgcgngccctacaaaggactgtacctgctgccgtgcctgccattagcttcctatctggtggacagagcgaggaggaggcaaccgagaactctaacgccatgaacaagct

SEQ ID NO: 403853 - DNA, 282 bp, Oryza sativa nipponbare
accgtgatcctgtcagaggcattttctgataccagtagcgtgggtaaacttttagccactaaaagactggatgatcatgacatcagaagcgccgaatcattggtactatgccattattggttagcctggttcgtgatggctacagcatacatgatgcagacatcctgcacatggagctcagcctgcatggtggtatgcagatcttggacgagaccgtcagaggcaagatcattaccctggaggttgagagctcggacaccatcgacaacgtcaaggccaaga

SEQ ID NO: 403854 - DNA, 482 bp, Oryza sativa nipponbare
cgcgacgcccgcggtccgggaggccatgggagacctcaacacagagtctgagaagaagctgggcgagctggttcataccaagtatgacactgatttctacatgctctgccggtacccgtcggcggtgaggccattctacaccatgccctgctccgacgacccacgctacagcaactccttcgacgtgttcgtccgaggggaggagatcatctcgggagcgcagagggtgcacgtcccggaggtcctggcacgacaggcggaggagcgggggatcgacgtcggcagcatcgccgcctacgtcgacgcgttcaggtacggcgcgccgccgcacggcgggttcggcgtcgggctggagagggtgtgatgctcttctgcggcctcggcaacatcaggaaggcttctctcttcccacgcgaccccaggaggctgaacccttgaaaacaaaaaaacacaaccaactatccaccccaaaaccaactggt

SEQ ID NO: 403855 - DNA, 290 bp, Oryza sativa nipponbare
  unsure (1)..(290): unsure at all n locations
ccgaaagtcagggttaacaaggtagggagggcagctggagtgctcgagaaccatgaggagggaaggcgctacgcaagcatggctaagaaactatgtcgcacaggaccctggatcatgcagtataacangttttactgccacaaatgtaagattagtgtgtgtgttgtatatctatggtgttatgttacattagctctattgtatctatgagctaagcttgtgagtcatttgtggcatgtgtattcatcattgtgtatgtaggtataaaaaaaaatgcgcgttaagtcagt

SEQ ID NO: 403856 - DNA, 421 bp, Oryza sativa nipponbare
cggaattcgggtcgcccagccgtccgattgacgctctgaaaaccatgtacattgcttaaaaccgtggaaggccccaggtcttattcgggcctcgtgaaaggtgatcatcaagttcctcatcgtcatgcaaaagcatgggtacattggtgagtttgagtttgttgatgaccaccggtctggcaagatcgtggttgagctgaatggacgccttaacaagtgtggtgtcatcagcccacgctttgatgttggtgtcaaggaaatcgagtcctggactgctaggctgcttccctcccgtcagtttgggtacattgtccttaccacctctgccggaatcatggaccacgaagaagcgaggcggaagaacgtcggaggcaaggtgctcggcttttctactagagatattcatctcacatggaagatt

SEQ ID NO: 403857 - DNA, 447 bp, Oryza sativa nipponbare
cgcgtacgcgcacgcgtctcgtccacgcgtccggcgcctccgaaacccccacctccgcgagctcccagtctctctccggcggcagaagcggcggcgacgacgagatggtgaagggacgcaccgggcagcgcgtgcggctctacgtccgcggcaccatcctcggatacaagaggtcgaagtcgaaccagtacgagaacacgtcgctggtgcagatcgagggggtgaacaccaaggaggaggtggcgtggtactgcgggaagaggatggcgtacgtgtacaaggccaagaccaagagcggcggcacgaactaccgctgcatctggggcaaggtcacccgcccccatggcaactccggcgtcgtccgcgccaagttcaagtccaacctgccccccgcttccatggggcgcaaggtcagagtcttcatgtacccgagcagcatctaaagac

SEQ ID NO: 403858 - DNA, 387 bp, Oryza sativa nipponbare
agaagaaaaatttaacatctgttaaatttatcttcttgaacagacacaagcacagatcacaaggttcaacgacaccaccatagattaaatcaacagcattagactactaacagacacacatcccgtccaatctactccagctaaacaagcaaagcgaggcgccgacgcctaggccttcttgggggacttcccggcggccttcttgggcgacttggcctccttgccggcggcggcggccttctccgccgtcttcttgggcagcagcaccgggttgatgttgggcagcacgcctccgtgcgcgatggtcacgccggccagcagcttgccgagctcctcgtcgttcctgatcgccagcagcacgtggcgcgggatgatcctgttcttctt

SEQ ID NO: 403859 - DNA, 371 bp, Oryza sativa nipponbare
gggcccgtgagaggggggtccggcgacgatggttcacgtaggcttctggggcaagtggggtaagacattcaaaaatccccctcccccttacaagaaggagcgttttgtttcaaacctgaacttagtgggggagtatggactgaggtccaggcgtgagctgtggcgtgtgcagtatgctttgatcccaatccgaaacaatgcaagggttattctcacacttgatgagaagaatcaacgcctaatctttgagggtgaggcactgtttccccgcatgaaccgcttagggctccttgctgttgggcagaacaagcttgattttgtccttaccctcactgttgaaaacttcctggcagggcgttttaaaacttttt

SEQ ID NO: 403860 - DNA, 432 bp, Oryza sativa nipponbare
aacagatgcagaaagaagggtttgccagcctaatgggctgcaggaactgatagatggggagatgggaaattactctcatgggcgatgtttcgtgcggacatctggtaccgaggatgtggtgcgtgtatatgcagaggcatcttcagaggaagcaactgattgccttgcaaaacgagtggcgcagcatgttgagcgcattcttggataatttgccttccctttttttatctcttcattttgcagaagtttaaagtgttcactttagctcaattgcctgacacattgggagaatatcaaaatccatttggttgtaatgcaacacttcatgtttatttgaaattttcagattgtacatactgtgtgtagaggcctcaattattggaccaaaaaaaaaggatgaacagattgaggtccaacgcttctttttttaag

SEQ ID NO: 403861 - DNA, 361 bp, Oryza sativa nipponbare
  unsure (1)..(361): unsure at all n locations
tcgaccacgcgtccgcccacgcgtccgaccacgcgttcgnccacgcgtccgtgcaaagctgagtgcttcagagtcagaacgggaatggcagaagttggtaaagaaagagaacaaggacaccaaaaggcttgagatgtgggaccgccaaaaggcaaagcttcaggaggacattgctgaatgcaagacaaagattacgcaggtggacagggaacttgctgggatcaacaaggcaataagaaatatggagatgaaaataagagaagacacaaaggccaaagaagaaaacctggcgcttgcagaacaggagcacgcgaagcgggaatctgccaaagcgaatgctgaacgccgactggaagaaata

SEQ ID NO: 403862 - DNA, 396 bp, Oryza sativa nipponbare
acgcgtgggccgacacattggttccgatgaagaccccttcttttctgattactcctagggcgaggttaagctctcttaacttggattttcttatgaataaaaaacccttaaagagcgggatattcgcaaaagaataatgccgatttgtattttgcgccttatgagtcaagacgaacaagactgtcgtggcgggtgttataaaaattagtgtgctttgggccaactttttatgtgattccaagatggccttttcttcattcttgcggtgatgctctttggctggacccctagacccgcggattggtccgtgggggttcaaaggtacccagctatttggtgtccagaaaacattggagggggggtcccctaaaaaaaaaaaaaaaagggcgggcggtc

SEQ ID NO: 403863 - DNA, 156 bp, Oryza sativa nipponbare
ctttttcccgccgccttccgccgggcgcacccggccgccgccttggggaggaaacttgcagggggttttggccgaatcaaaaccaagccgtcccccaagtaaaggtcctgccggggggtccttgaccccaaaatcaggatctacaatgtcggattg

SEQ ID NO: 403864 - DNA, 443 bp, Oryza sativa nipponbare
ccacgcgaccgcccacgcgtccgtctggctcttcgaaaggtccctcagtgtaatagctcctggatgaatgattttatgcgccaataccacaacgtgaacatcaatgttgctgtacagactgagcatggactgtttgttccagtaatcagggatgcagacaagaaaggacttggtatgattgcggaggaggtgaagcagttggctcaaagagcaagggataacagtttgaaaccagatgattatgagggaggcacattcaccatatcaaacttgggaggtccttttggaattaagcaattttgtgccatcataaatcctcctcagtcggcaatcttggccattggttctgctgagaggagggtgatacctggcagcgccaatggtcaatacgagtttggtttctttatgtcgggaacaatgagctgtgatcacagggttattga

SEQ ID NO: 403865 - DNA, 241 bp, Oryza sativa nipponbare
  unsure (1)..(241): unsure at all n locations
tagggtttagtgggctgagatcgcnacccctgatgtcgagtaccgctgcttcatcggaggactctgctgaggcaccgacgaccgatccctcgaggggcgcttgtccacctacggtgagatactggactccaagatcatcaactacacggagacagcgaggtcacgtgggttgggcttctttaccttgtcctcctcacacacgatgcgcgacgccatccaaggcatgaacggtaaggagctc

SEQ ID NO: 403866 - DNA, 243 bp, Oryza sativa nipponbare
  unsure (1)..(243): unsure at all n locations
gacccangcggccggcacagcatattgagaaagttatgcgcgcacttggtgactatctcagtgccaaggttcatgcttgtgttggtggtacgggtgattctgaggaccaaaggattcttgctagtatagctcatgtttttcttggaacacctgtgcgtgtgtctgacatgctgcgtgcgcagtccctacacacggattacatctagatgcttggccttgatgaacctgaggaaatggtttctg

SEQ ID NO: 403867 - DNA, 362 bp, Oryza sativa nipponbare
  unsure (1)..(362): unsure at all n locations
cacgcgtacggaaaatggcaccttccaaggtcagcctcgccgccgtgctcgccgtggccatcgggctgggcgtggcggtcaccaccaccacctcnncncanaacacgccgtatgactacctcaacctgcacaacagcgcgcggcgcgcggacggcgtcggcccggtgagctgggaccccaaggtcgccagcttcgcgcagagctacgcggacaagcgcgccggcgactgccggctgcagcactccggtgggccgtacggcgagaacatcttttggggctcggcggggcgcgcctggagcgcctccgacgcggaggcgtcttgggtgggcgtgatgaaaaactaccacttcgacaccaacacg

SEQ ID NO: 403868 - DNA, 407 bp, Oryza sativa nipponbare
  unsure (1)..(407): unsure at all n locations
cggtccggggtccgccgcacgcgcccgcccacgcgtccgcccacgcgtccggacgcaggcgaaggacgggtcgtcgtcgtcggcggcgagggaggtgtggtgggtgcccgaccccgtgacgggccactaccggccctccaacttcgccggcggcgccgacgccgccgacctccgcgccgcccacctcgcccgcagctacgcccgcgcgtgatgcgcgcgacctcgccgtcgtccgaccnacnacnacgccatccatccatatatatctgctccgcgtcaactactcatcacctctcgaccgcgccgcgccgcacgccggtccgcctccgcgtgcacctgaacgacgacgacgacgcatcttcgccgggcggcggatcggccggtggcggcggcgggattcctaccgt

SEQ ID NO: 403869 - DNA, 444 bp, Oryza sativa nipponbare
  unsure (1)..(444): unsure at all n locations
tccgggtcaccatcgcccccgcgcaactactacccaaagccatcactcgcatttttacaggattcgctgggcaatcggttttcagtgacactccaagcagtcactaggggcagcaagcttaaaaaatggatggctggagattatgttggatcgtagactaactcaggacgatggtcgtggtctgggccagggagtggtggacaaccggcctatgaatgtaatcttccacctcctcagggagtcaaatgtttctgccttgcctaaaactcacagcttgctaactctacaaccatctcttctctcccaccgtgtgggtgcacacctgaactacccaatgcatgcntttgtgagcaaaaaagctcatgaaaaatcgttcaagcttggtcaacaaacatttgctccattaactttttcttcgcccttgatgtacatgtggtgaacttg

SEQ ID NO: 403870 - DNA, 285 bp, Oryza sativa nipponbare
  unsure (1)..(285): unsure at all n locations
gcgacccacgcgtgcgccacgcgttcgcccacgcgtgcatccactcttccacaaatatcaaatgttaagctttaatcgaatcttgtcaagaccttaccagattggtcatgcttcaagtaaagttacattacgtcaagtttggcaccgatgctaaatacatttccctatgttctatngatcgtaacctacacatattttggcatccgggagaagattatcaaatatacgactcatatccatctgaagaatgatgaaaccaattgtacttcatttcgcctgcttaaa

SEQ ID NO: 403871 - DNA, 488 bp, Oryza sativa nipponbare
gaccacgcgtccgcccacgcgtacgtccacgcgtgcgccacgcgtgcgcaagtagcacatgttaagcttgaatggaatcttgtcaagaccttaccagatgtgtcaggcacagggaaagtgacaaacgtcaagtttggcaccgatgcgaagtacattgccgtaggttctatggatcgtaacctacggatatttgggcattcgggagaagatgatcaaatggacgacgcaaagccatcggaagagtgatgaaaccaattgtacttcatttggcctgcgtaaactgctccctgtttgtgtgtcatgacagcggatgagctggctgagattggaggcacataacaacgggagacgagaagttccttgcaggagcacattggtgggctatggtcgatgtaaacaaacttgacattgttattgtatttgtaggccttactacctaatgaggatactggttgttttggagataatacaatgcctgagtgctcgac

SEQ ID NO: 403872 - DNA, 221 bp, Oryza sativa nipponbare
  unsure (1)..(221): unsure at all n locations
cgtcgtggccggcaggtcgttcagcgtcaacatgttcaggctgacgtggcggacggcgttcgtggtcgtcagcacggtgctcgccatcgtgatgcccttcttcaacgacatcctgngcttcctcggcgccgtcgggttctggccgctgacggtgtactacccggtggagatgtacatccggcagcggcggatacagcggtacacgtccaggtgggtggcgc

SEQ ID NO: 403873 - DNA, 342 bp, Oryza sativa nipponbare
cgcgtacgaccacgcgtccgcaggcctacccgggcgtctccttccgctacatcgccgtcggcaacgaggttcaaggcagcgacaccgcgaacatgcttccggccatgcagaacgtcaacagcgcgctggtggccgccggcctcggcaacatcaaggtatccacgtcggtcaggttcgacgcgttcgccgacaccttcccgccctccagcggcaggttcagggacgactacatgaccccgatcgcgaggttcttggccaccaccggcgcgccgctgttggcgaacgtgtacccctacttcgcctacaaagacgaccaggaaagcgggcagaaaaacatcatgc

SEQ ID NO: 403874 - DNA, 170 bp, Oryza sativa nipponbare
  unsure (1)..(170): unsure at all n locations
aatcgatgcagtgctcctatgattccagaggaaacagtgtcccaacaattctcttgatgatgcanagacgtctttatgaacaaggcggtcttcgggcagaaggtatttttcgcataaatgcagagaatagccaagaagagcttgtgagagaccaattaaatggtgggatc

SEQ ID NO: 403875 - DNA, 257 bp, Oryza sativa nipponbare
  unsure (1)..(257): unsure at all n locations
ccggtcgaccacgcgtccgccacgcgtncgcccacgcgtncgcccacgcgtccgcccacgcgtccgcccacgcgtccgtgaacatttcgctatctgtcaatgaccgagtggcatgctgcggtttcatgtgcggcaatggttggaatggaggctatcctatcatggcatggcgctactttgttcggaatggtgttgttaccgatgagtgcgatccatactttgatcaggtcggttgtaagcatccaggatgcgaacct

SEQ ID NO: 403876 - DNA, 304 bp, Oryza sativa nipponbare
tcccggtcgaccacgcgtccgggcttctcctccccctctttaccttttcctcctcggttcggttccgtggttcgtctagggtttagtgggttgagatggcggcgccggatgtggagtaccgctgcttcgtcggcggcctcacctgggccaccgacgaccgctccctcgaggccgccttctccacctacggcgagatcctcgactccaagatcatcaacgacagggagacggggaggtcacgtgggtttggcttttgcaccttttcctccgagcattcgatgcgcgacgccattcaaggcatgaa

SEQ ID NO: 403877 - DNA, 409 bp, Oryza sativa nipponbare
  unsure (1)..(409): unsure at all n locations
gttgaacatgatcagctagccgtcattaatgccanggaagcacgttatgatggcattgagatccatggtgctcatggctatatcattgatcaattcctaaaggatggaatcaatgaccgcactgacgagtatggtggctcactttccaaccgctgccggttcctacttgaggtaactagggctgtggtttctgccattggagcagaccgagtcgcggtgaggatatcaccagccattgatcaccttgacgcctatgattcagaccccattaagctcggcatggccgttgttgagcggctgaatgctctccagcagcagtcagggcggctcgcctaccttcacgtcacgcagccacggtacaccgnctacgggcagaccgagtctgggcagcaatggagtgccgaggagg

SEQ ID NO: 403878 - DNA, 279 bp, Oryza sativa nipponbare
  unsure (1)..(279): unsure at all n locations
gccacgcgtncagccacgcgtccggagagagatcagttgttgagtgcgtggaagcagagatcaggaagatgctggagaagctgtgggacgacgtggtggccgggcctcgaccggagaccggcctggagaagctccgcaaggccgctacaacccgcccccttgtcatcaacaaagatggcgacggcgaggcgagcggngcggcgtacaagcggacgcagtcgatgccgacgaccccgacgacgccggtggacgcccgtcgtnttcgtcttccgacgacga

SEQ ID NO: 403879 - DNA, 325 bp, Oryza sativa nipponbare
ggtctccacgggtgcggattgaacccacgggagtatcttggacgggaggggacaaatccgtggagattattttggacgcgattgaacaggaaagtgtgattgatttggggaaaagatgctcatggtgacgctcacgttatggcgagaacagtcgtatctagactgttacttcacatcctgtacagccggatccagatgctatcgtaggatactgtctagacggtggtgggagatatcggaggtgcatgtatacacctgggcgcgtaaatgctgtttgacatctaaacaacttgcatggttaagagggttctgctcgctatgaaac

SEQ ID NO: 403880 - DNA, 250 bp, Oryza sativa nipponbare
cggtcgcccaggcgtgcgacatgaccttgatcttatttgccgggcacatcaggttgatcgaggatggatatgagccctctgccgacagagggcgtgtcaccatattgtcaggtccaaactatagatgtgaattcgataatgcaagtgcaatgatgagtgttgatgaaactttgatgtgtgcgtttcaaatttttaaagttgcttagagtatgggcaaatttatggcataaaccaaaatgtgaaatggtgt

SEQ ID NO: 403881 - DNA, 137 bp, Oryza sativa nipponbare
cagacccaacgttcgtttgcttattcatgacacacatgagggaattatgctctgatgatggctactcagaatgttgaacatgctctggctgctgggtgtacagatgtattaaagtatctgaattgttacatgacatg

SEQ ID NO: 403882 - DNA, 427 bp, Oryza sativa nipponbare
tggtttgactacgcgtgcggaacggcttctttcttctttcactggcggcgggggatcggagtttatcctcctgcaccggcggcatggcatatgagctcatcagaacgtaaatgggacgtgggagaatagcgcatgctaccttgaacggaccgtgcgtgtggaaggtgatctgcattggactaaccattggtctgaccagtggaggaatactgaagatgcataactggtactagcagaggaagacttgatccttgtacgacatgcttaagatgggccagatcaaggttgtcgcctaggagtagtgtttggtgttgaaagaactttgcctatgagatttgcaagttatgtgtgaaactatctggatagcatgacaaacctagagccggggagaatgtgatgaaaaataaacatagtaattttgtgaaca

SEQ ID NO: 403883 - DNA, 213 bp, Oryza sativa nipponbare
ttcccccaaatccaccgcaggagaaagccaagtcgccgccgagaagcgaagaggagatggcccgtccgaagcaaaccgcccgcaagtccaccggcggcaaggccccgaggaagcagttcgccaccaaggcggcgaggaagtctgctccgaccaccggcggcgtgaagaagccccaccgctacaggccggggacggtggcgctccgcgagatcc

SEQ ID NO: 403884 - DNA, 399 bp, Oryza sativa nipponbare
  unsure (1)..(399): unsure at all n locations
ctagggttttgttggcccccattcctcccccaccccggtgtcctcccctccgccgctcgcgtcgccgcctttttcccctatggcgctgccgaatcaggggaccgtggattaccccagcttcaagctggtcatcgtcggcgatggcgggactggtaaaactacatttgtgaagaggcatctcactggagagtttgaaaagaaatatgagccaaccattggtgtcgaagttcaccctctagattttaccaccaactgtggtaagatccgcttctactgctgggacactgctggacaagagaagtttggtggacttagggatggatactatatccatggtcaatgtgcgatanatatgtttgatgtcacttcaaggctgacttacaagaatgttccaacatg

SEQ ID NO: 403885 - DNA, 354 bp, Oryza sativa nipponbare
gcgtcgccccacgcgtgccgttgatcctacgtacggtgatacactttgtcctcctcggttcggttccgtggttcgtctagggtttagtgggttgagatggcggcgccggatgtcgagtaccgctgctcgtcggcggcctcgcctgggccaccgacgaccgctccctcgaggccgccttctccacctacggcgagatcctcgactccaagatcatcaacgacagggagaccgggaggtcacgtgggtttggcttcgtcaccttctcctccgagcagtcgatgcgcgacgccatcgtgggcatgaacggcaaggagctcgacggtcgcaacatcaccgtcaaagaagcccagtccc

SEQ ID NO: 403886 - DNA, 537 bp, Oryza sativa nipponbare
  unsure (1)..(537): unsure at all n locations
gagccacgcgtnccggggaatcaagaaaatatggtacaaccattgctcctggtctgtatgcacctgttcaccaacacttttttgttgcccgtatggacatggctgttgattgtaaacctaacgaggctcataatcaggtggttgaggtaaatgtgaaagttgaaaatgcaggcacacataatgtgcacaacaacgctttctatgccgaggaaaaactactgaaatctgagctgcaagcaatgcgagattgtgacccttcatctgcacggcattggatcgtaaggaacacaagggctgttaatcgtactgggcagccaaccggctacaggctcgtgcctggttcaaactgtttgccgctggctctacccgaggcaaagtttctgaggagagcgggtttcctgaagcacaatctctgggtcacgcagtacaagagcgacgaggtgttccctgggagggagttccccaatcagaatccacgtatccacgagggcttagctacctgggtcaagaaggataggcccctggaggaaactgaca

SEQ ID NO: 403887 - DNA, 436 bp, Oryza sativa nipponbare
cgtgcgcggcgcgtgctactacaactgccagcccggcgcggaggccaacccctactcccgcggctgctccgtcatcacccagtgcaggggatgatccatccatccagctgccaccaccaaaactgttgaaattgggatttgtgattcaaagttcgtctcgtctactctatacatattttgtttatttttgtcttcttttattggtcgtctccttttgaaatgtgaacgaattggtagggattggtgcccgctaatctaaagtcaagagagatgtacactgtacatgtgtccggtactcctactctgtatcaattataaataaatcgtgtattctcccaatttgatggatggattcatcaattcatcattcatggatgattagctgtcctgtcctttgtgaattattacttcttgttccaaataagccatttctctc

SEQ ID NO: 403888 - DNA, 321 bp, Oryza sativa nipponbare
gcgtacgcgtcacgggcgctcgatgacacaatgacatgttttatgtacggtctgcgtcaaagccgttcgtcgcaaggctcattgcagtacttctagacaacactatccagaggcgcgacaatggggtgaggagagacaggggataccactggtgggacaagttcaggagcttcaagacggacacccggagcgaggagttctactctctgccgttcaacttgaacaagttcttcccttccgtgtgatccgccttagctcgggttcggaccgcagcagaatgggggggagcttcagcttctacttgtatgggggcatgttttt

SEQ ID NO: 403889 - DNA, 196 bp, Oryza sativa nipponbare
gtacgcgtacgcgtccgcagaaaaataaagaagcttggccatttgggttggtgcttgaccaatatatatggtgtgtgtgtgtgtgtgtgatgggttaatcgatgtgctatgttattggtttcactattcacgtactatgcttgtaatggtgtatccacagatgaagtgatgaatatattaaactggtttggctttt

SEQ ID NO: 403890 - DNA, 340 bp, Oryza sativa nipponbare
gtccgatagtcatattcttgcctcccagcaggcaaatttggacggggagtcattgaggctggattacctaactctttttttgagacatttgactgatccactgaagacaatgcccaaggatgaagctgtgcaaaaagtggtggagtttatggatacctactctttaagccaggaagactttgacacaattgttgaattatcaaaatttaagggtcatccaaatcctatggatggtattcaaccagctgttaaaggtgccttaacaaaggcttccaaacaaggaagtagttctcgtgttgttcgagcagcagatctagtaaatatcccaggcatgaaaaag

SEQ ID NO: 403891 - DNA, 268 bp, Oryza sativa nipponbare
tcaactgagctggttaatcccaagtgcaaggcttgcgggagcacgccttgtgtccgcgacacggatcacttggtcttggagctccctctgctgagggagaaacttgagaagtatatcgacgagacttcgttgactggatcatggagccaaaacgctattcatgcaacaaaagcttgggtgaaggaagggttgaagcctcgctgcattaccagggatctgaacaggggtgtgcctgtcccacatgagaagtaccaagacaagggggtct

SEQ ID NO: 403892 - DNA, 296 bp, Oryza sativa nipponbare
  unsure (1)..(296): unsure at all n locations
cgcgtccgccaagccaagaagagggagagcaccaaggacacgcgactagcnaagccgagcgaccgcctcctcgatccatatcttccggtcgagttcttggtcgatctcttccctcctccacctcctcctcacaggttcttggtgtagcttgccactttcaccagcaaagtttcatgtctgatctcgacattcagatcccaactgccttcgatccctctgctgaggccaatgctggagactctggtgcggctgcaggatcaaaggactacgttcatgtacgcatccagcagcgtaat

SEQ ID NO: 403893 - DNA, 499 bp, Oryza sativa nipponbare
  unsure (1)..(499): unsure at all n locations
ctcctaattnntacaacntnncttgatcnnagataagnnagtaatagaaaatcgcaagcagagggaagtagcgctcatggggatggggcncatnnngtgtgacncnnttcttnntggtctggatcnncagagngnnatgctgtnnagatggtnntggggattaaaagtccaaacgaggtgggcaggattcctatnttgnngtggaaatgttnnngtttcttnncttttaacnncacacaaaccaacanntagactatnnatttgccgtgcctcaatcaacnntagtcatggaaagggtttaaaggtggatgttcaataaccaagattgtcacttgtatggtcttgctcctaactacttgctacaggtgtggcaatgttgctgcaatcctagagcttgatgagaatttgaataaaccagtccgtgtatttgaagctgccccacatgaatcaaagagggttnctgcaaagaggcagcgccagataccttctggaggccgag

SEQ ID NO: 403894 - DNA, 334 bp, Oryza sativa nipponbare
ttacacactgaaaaggggtttcttttcaaaagtctgctctgcacaagtgcaacatggctggaaagcctgctgttgttactcgtgttgtggacagtatgactgacaacctcaggcctactcgtgcggaggctactgatgtggcaaatgctgtacttgacgggagtgatgccattctccttggtgctgagactctacgtggtctgtacccagttgagactatctcaattgtgggcaaaatttgcgctgaggcaaagaaggtattcaaccaagatttatacttcaagcggactgtgaaatatgttggggagcccatgacccacttggagtctatcgc

SEQ ID NO: 403895 - DNA, 324 bp, Oryza sativa nipponbare
ccacgccccaggcgtacggttgcaggcaaaatgctatacattgttgaggaaaacgacggcaggagaaggagctactggcccaaatacgaagcagcatgaaaaggttcttgaggaaggtgtcctcaacccagaatcaactgtcgttgcaatcttcccctctccaatgcattatgcagggccaactgaagtgcaatggcatgctaaggctcgtataaatgctggtgcaaacttgtacatagttggaagagatcctgctggtatgggccacccaactgaaaagagggacctgtatgatgctgatcatgggaaaaaaggtgttgagca

SEQ ID NO: 403896 - DNA, 512 bp, Oryza sativa nipponbare
cacgcgtccgaccggcgaccatctccagcgcgcgcttcagggagaagagctcctcaccgccatcgaccgcgaggccgtgttcagctatgccgacgacccgtgcagcgccaactacccgctcatgcagaagctccgcgccgtgctcgtcgagcacgccctcaccagcggcgacgccgagcccgaggccttcgtgttctccaagatcaccaagttcgaggaggagctccgctctgcgctgccccgggagatcgaggccgcccgcgtcgccgtcgccaacggcaccgcccccgtcgccaaccggatcgtcgagagccggtcgttcccgctctaccgcttcgtccgcgaggagctcggctgcgtattcctcaccggcgagaagctcaagtcccccggcgaggagtgcaacaaggggttcctcggcatcagccagggcaagctcatcgaccccatgctcgactgcctcaaggagtggaacggcgagccccttcccataactaagccaagatcccatc

SEQ ID NO: 403897 - DNA, 271 bp, Oryza sativa nipponbare
agctgcgggagtgaaaatcatactgtgaaatgcccttaaaatttatcagaaacctattccaggaacttcattggaagaaattgctaccggtttaactgatgtttcagccatttatgaaaccatgaatgagcatgagcaagcactcaagttactccataaggccttaaaaatgtacaacaattctgccggtcaacagagcacaattgctggaattgaggctcaaatgggcgtcttgcactatattttggggaactatggagaagcttatgac

SEQ ID NO: 403898 - DNA, 420 bp, Oryza sativa nipponbare
acgcgccaggcgtccgccgccagatcttgtattattcctcctgcctttaccatctcgacgaggcgacccggcgcgagagaagaagagatcgatcgatcgatcaaccgatctcgccggagaaggaagaggagcaaagatgtcgtcggtgttcagcggcgatgagacggcgcccttcttcggcttcctcggcgccgcctccgccctcatcttctcatgcatgggtgcggcgtacgggacggcgaagagcggcgtcggcgtggcgtccatgggcgtgatgcgcccggagctcgtgatgaagtccatcgtgcccgtggtcatggctggtgtgctcggtatctacggcctcatcatcgccgtcatcatcagtacagggatcaaccccaaggctaagccgtactacctctttgacggctacgcgca

SEQ ID NO: 403899 - DNA, 288 bp, Oryza sativa nipponbare
acactcatttctgagcttttagtttgagagagagcagcagaagggagtagtgcaagatgccgatccgcaacatcgccgtggggagccaccaggaggtgtaccacccgggtgcactcaaggcggcgttggccgagttcatctccaccctcatcttcgtcttcgccggccagggctccggcatggccttcagcaagctgaccggcggcggagcgacgacccccgccgggctgatcgcggcggcggtggcccacgccttcgcccttgtccgtggcggtgtccgtcggcgcc

SEQ ID NO: 403900 - DNA, 328 bp, Oryza sativa nipponbare
ccggaatcgaccgcacgcgtccggcaggagctgaccaagtggtcgctgtaccgcgcggtgatcgcggattcatcgcgacgctcctcttcctgtacatcacggtggccaccgtgatcgggtacaagcaccagtcggacgccaccgtcaacaccaccgacgccgcctgcagcggcgtcggcatcctcggcatcgcctgggccttcggcggcatgatcttcatcctcgtctactgcaccgccggcatctcaggtgggcacatcaaccccgcggtgacgttccggctgttcctggcgagggaggtgtcgctgatcaagggccgggctgtaca

SEQ ID NO: 403901 - DNA, 210 bp, Oryza sativa nipponbare
atccatccactgttaggtatttcttcgtccgtgatgttaccatgaattgagttccctacggttatagtgtatgaactgcttgatgctatcctatcggaatgaaatgaaatactaaaacagggagaaaaaatagagttcgccagcaatccgttcatggcacactgtattgtcatcactttcacttcgccttgtctactagatctcaaaatt

SEQ ID NO: 403902 - DNA, 361 bp, Oryza sativa nipponbare
tcgacccacgcgtgcgatagaacagacagtagatgaagtcgttcgacgagaagcactacgccgatctgtcctccaagcccttcttcggagggctcgtggagtacatcgtctccggccccgtcgtcgccatggtctgggagggcaagcaggtcgtctccaccggccgcaagctcgtcggggccaccaaccccctggccgctgagccgggcaccatccgtggcgacttcgctgtcgacattggcaggaatgtcatccacggaagcgactcggtcgagaacgccaggaaggagattgctctgtggttccctgagggcatcgccgagtggaggagcaccgcacccatggtctatgaggctaaatg

SEQ ID NO: 403903 - DNA, 405 bp, Oryza sativa nipponbare
gtccgaaggcccgctctgcgccgccatcgactgttacaccgaggctatcgttctttgccccgacgtcgccgtttactggctcaaccggggcctctgccatttcaagcgcagggaatgggctaaggtcgaagaggatagcaggagagctcttgcccttgatgacactctggtcaagggtcactatttgctgggatgtgccatgcttgagaaggaacaatgtgctcttgctatcaaggaattcaacaaggctttggatcttcttaagtcttcgaatttgggggacaaaatggcggaggacatttggcaggttcttgcgaaggcaaaataccaagattgggaaatacacttcactaagagagttttgaagatgcaaaggttaaaggaagcatgtgaaaatgctttgca

SEQ ID NO: 403904 - DNA, 524 bp, Oryza sativa nipponbare
cccggtcgaccacgcgtccgggctccggggaagcaacgaggcaaggccaaaggggccccaccgccgcccgccgcccccaacgccgccgccgccggaggcttccgggcctgcctccgcctgatgccgccctccaccgtcgccatctccatccaagccaagccaggctccaagctcgccaccatcaccgagatcggcgacgaggccgtcggcgtccaaatcgacgcgccggcgagggacggggaggccaacgccgctctcgtcgacttcatcagctccgtccttggagttaagaaaggagaagtttctattggttctggctcaaaatcgagggaaaaggttgtgctggtgcaagatgcgattcttccagggggtctttgatgctctgaagaaggcttgtgcttttgcatgatgtatggttaaatgtgcttatgtgaaaactctcacttaattgaataaaagagtgtcaacttactaagggcctttatctggccaatttgtctgattgaaccttgtaaccggtaatt

SEQ ID NO: 403905 - DNA, 300 bp, Oryza sativa nipponbare
actcacccctccggttcggagcatgtgttaccacaaggagctacctcctctcctacatctacaagatgctgcgcatcaagattccgtcggaggcgaggcacgccagcgaggacggcggcagcggtggcctgacggagtgctccctctgtctctccaggatccgtgtcggcgaggcgacgaggcgtctgccctgccggcatgcgttccaccgggactgcgtcgaccggtggctcctctcatgcaggcggacgtgcccgttttgccgggtttacgtcgtcgtcgacggtaacaagccagggg

SEQ ID NO: 403906 - DNA, 256 bp, Oryza sativa nipponbare
cgcgcgcggaggcgctggtgaagcactacgagaagcaggcggtgccggtggcccctctggctgctgctacattaatcagcacccacttccacgactgcttcgtcagggggtgcgacgcgtcggtgttgctgaacgggacggacggggcggaggcggagaaggacgcggcgccgaacctgacgctgcgggggttcgccttcatcgaccgcatcaagagcgtggtcgagagcgagtgccccggcgtcgtctcctgcgc

SEQ ID NO: 403907 - DNA, 347 bp, Oryza sativa nipponbare
cacgacccacgcgatccgtgcgactccagaaccttctatgagtccttgtttcgatcatcccctaaccctttctttgttcatcttgttcttcctcttgtcgtctcgtcgagatggccgggattggtccgatcaggcaggactgggagccggtggtggtgcggaagaaggcgcccaccgccgccgccaagaaggatgagaaggccgtcaacgccgcccgccgctccggcgccgagatcgagaccatgaagaagtataacgctggaacaaacaaggcggcgtccagtggcacatccctcaacaccaagcggctggatgacgacaccgagagccttgcccatgagcgtgtc

SEQ ID NO: 403908 - DNA, 322 bp, Oryza sativa nipponbare
tcgaccacgcgtacgccacgcgtgcgcgtcaacagaggctaggagagagaggtagagctcctccggcgaatggagtacgtgaaccctctcaccggcttccgcgtcgacggccggcgccccaacgagatgcggcagctcaagggcgaggtgggcgtcgtcgccagggcagacggatcggcgctgttcgagatgggcaacaccagggtcattgccgctgtctacggccctcgagaggtccagaacaaaggtcagcaagtcaacagcaaagatgctttggtgcgttgtgagtataggatggcagaatttagtactggggatcgaa

SEQ ID NO: 403909 - DNA, 498 bp, Oryza sativa nipponbare
gactgaccatattgttgctttagtcatcaattttgggggaggaggcatcatagggagcgctgctgtcactgctgtgcagctattgtgggttaatatgatcatggatacattgggagctttatcactagcaacagagccttcaaatgatgaaatgatgaacaggccacctgtccgaaaaggggaaagtttcattaccaagttcatgtggagaaatatcatggggcaaagtttatatcagctatttgtacttggagctatcatgtttggtggggaaaggcttctgaacatcaagggtgcagattccaaatccatcataaatacactgatattcaactccttcgtgttttgtcacgtattcaatgaaataaacagcagagaaatgcagaagatcaatgttttccgtggcattattagcaattggatcttcattgcagtcataacagcaaccggagcatttcaagtggtgatcatagaggttcttggcactttcgccagtac

SEQ ID NO: 403910 - DNA, 450 bp, Oryza sativa nipponbare
  unsure (1)..(450): unsure at all n locations
ccgcagatcgagcacctcctccagaccgccgaggccatccgcaaggatttccccgacgaggactggctccacctcactggcctcatccacgatctgggcaaggtgctgctgcatcccagctttggggagctcccacagtggtcagtcgtcggtgacaccttccccgtcggctgcgcattcgacgaatgcaacgtccacttcaagtacttcaaggagaaccctgactacctgaacccaaagctcaacaccaagtttggggcctactccgagggctgtggccttgacaatgttctcatgtcctgnggccatgacgactacatgtacctggttgccaaggagaacaagaccactcttncttctgcaggcttgttcatcatcagatatcattcattctaccccctgcacaagcatggagcctacatgcatctgatgaacgatgaggacaaggag

SEQ ID NO: 403911 - DNA, 217 bp, Oryza sativa nipponbare
gattagggctgcgtatgtcaaaatgtgtcgagctgaagtacccagtggacacagtttatgtgcactacattgcttccgtgacttatttactagttaattagcaactttcaaccacttcctgtatttgcagcacattattagtatcgctgtattagcgttttccatgggctggttatgattgagaatacaggccaggcattgcatgtcctttatttgt

SEQ ID NO: 403912 - DNA, 226 bp, Oryza sativa nipponbare
gcgtccgcggacgcgtgggcggacgcgtgggcggacgcgtgggggcgaaaccccaaatccgccgcgatggccgccgccgccctggggacgggctcgccggcggcgcgcgccctcctctccccggcgctctccttccgcctagtagcctccaagccccactcgtaggaccccgcgccgccggcgccgacgtggaaggcgggggcgaacaccaagacgttctcgatct

SEQ ID NO: 403913 - DNA, 356 bp, Oryza sativa nipponbare
  unsure (1)..(356): unsure at all n locations
gccgggctcatcattgactccaccactggtggttttgaggctggtatctccaaggatggccagacccgtgagcacgctcttcttgctttcactcttggtgtgaagcagatgatctgctgctgcaacaagatggatgccaccactcccaagtactccaaggcccgttacgatgaaatcgtgaaggaagtctcatcctacctgaagaaggtcggctacaaccctgacaagattcccttcgttcccatctctgggtttgagggtgacaacatgattgagaggtccaccaaccttgactggtacangggccccaccttgcttgaggctcttgaccagatcaacgagcccaagaggcatca

SEQ ID NO: 403914 - DNA, 349 bp, Oryza sativa nipponbare
gcgtccgtcaaaacaatacgagtctactgaaactgaagctgtagatgatataccttggagaggccttcaactggaaggcgaccaagacagcacgttcccatggtagctagacacaggtctatactcatcacgtgactgatagcattctgggcactcttgtctgtgcatacatgcagcagagcaactattcagccgctgaattggtgtatcgcaaggcgcaaagcattgagcctgattccaatagggcatgcaaccttgggctgttcctaatcaagcatatcatgcatgtttaatcaagacaatgtcttcatgatgtttgtcttctcataatcttctcatcgttttttac

SEQ ID NO: 403915 - DNA, 331 bp, Oryza sativa nipponbare
  unsure (1)..(331): unsure at all n locations
acgccgatccgtcaccactcaccttataacctaggatggtatattagggctacatggcatggagggaattactacactaggaaggtagttgtctgaagaatgaagcattgtagatccccgacgaaaaggtacttgagcatggcatgaaaggcaaggaacttaagagtagtgatgctccttgcaaggcctgaattgttttccagaggtcaacttatgaagccatgtaaaggaatattactttntggcccgcctggtacatgaaagacaatgcttgccaaagctgtggctacagaggctggtgcgaatttcataaatatatcaatgtcgagca

SEQ ID NO: 403916 - DNA, 273 bp, Oryza sativa nipponbare
  unsure (1)..(273): unsure at all n locations
caccgtcgcaccgtcagcttttttctctcacccccagcttccgcgcgatcggtctcacaggaatggtgggcagcctgtcccgagatcgcaagaagccaggtctgtgtcaggactaccaaccacacaagtcacctacacctacccacaatggcgcgcatcactgctccagacanagaagctgatctgatttttggtgagatccaatcacagataaagaacaagaacatcactgtagatgtgaaaagcaaactcagacctcaaatgtttgttact

SEQ ID NO: 403917 - DNA, 318 bp, Oryza sativa nipponbare
  unsure (1)..(318): unsure at all n locations
tcgcatcgtcaccacctcgagtaaatcaaccttctgtgtcgccatagagtctcaacctgcacgggcgtcggcatctcgacgcgctncccccgagcgaagcagagatggatacatcaggacctgcagcattcgtcaatggagagattctgaagatgtntcgtcggccgaagagtgcgcacggtggtccaagcccagcgcgaggaaggcgggttgcttattcgggcagtccaccgatggtcatcagctaaccatcaaaggggcctncggtgcccctatgtcgcactatgtggagattattgggatcgctgaacccaatca

SEQ ID NO: 403918 - DNA, 147 bp, Oryza sativa nipponbare
gaagtgacctcgtcaatggtggttgctgtctgcagttgaatatctagttctagattcgtaagttgtgcccacggccatggctctcgtttcatggaccgttaatatctgctcgcaatgtgcactatgtcagtcgtgtaagactgcgct

SEQ ID NO: 403919 - DNA, 177 bp, Oryza sativa nipponbare
ccgcgatcttgagcctaccgtgattgatgaggtgaggactggtgactaccgccagctcttccaccctgagcagctaatcagtggcaaggaggatgcagccaacacctttgcccgtggtcactacaccattggcaaggagatggttgatctgtgccttgaccgcatcaggaagcttgc

SEQ ID NO: 403920 - DNA, 500 bp, Oryza sativa nipponbare
  unsure (1)..(500): unsure at all n locations
ccggaatcgacgcatcgactccagcgcgtccggaagtttacagtgatccgcttgagcaccctcaaacagaggcctactggggaaatgttaacccaattggagtcaggagttgctatgacgagggtaagcgtgtcgcagaaacactgatgtttgactatcacaggcagcatggcattgagatccgaattgccaggattttcaacacctatggacctaggatgaacattgatgatgggcgtgttgttagtaacttcattgctcaggccgtacgtggcgagcccctgactgttcagaagccaggaacacaaactaggagcttctgctatgttgctgacatggttaatggtcttattaagctgatgaacggngacaacactggaccaattaatttgggaaacccaggtgaattcaccatgctggaacttgctgagaatgtgaaggagtgatcaaccccaaggttaccgtcacaatgactgaaaacactcctgatgatcctcgtc

SEQ ID NO: 403921 - DNA, 426 bp, Oryza sativa nipponbare
gacctgcacacagactgtgatcgatctgcgcaaccctgttctgaaccaagctggcgtgctacttgcctgcggagcaacattgtactgggctgatggaaagattgccaccttcaactgttctttcctcaccaacctcaccatggacatgaccatcgttggaacaaacggtacgcttcacgtcaccgactttgtcatcccatatgaagagaagtacgcggcattcaacatggcgtccaagtcaaagtttgctgaactccacatcggatgggatccactgccgagcaagcatgtcgtctctacagacctgccacaggaagccctcatggtccaggaattctcaaggttagtgcagaacatccgagacgcaggtggcaaacctgagggaaagtggccagccatcacccggaagactcaggttgtgatgga

SEQ ID NO: 403922 - DNA, 322 bp, Oryza sativa nipponbare
gttccactggcaggcaacactgatgggtccatcagatagcccttatgctggaggcgtgtttttggttaccattcattttcctcctgattatccattcaaaccgcctaaggtggcattgaagacaaaggtgttccacccaaacattaatagcaacggaagcatatgccttgatatcttgaaggagcagtggagtcctgcattgactatttcaaaggtgctactctcaatttgctcgctgttgacggatccaaatcctgatgatccattggttccagagattgctcacatgtacaagactgatcgggccaagtccgagtccacc

SEQ ID NO: 403923 - DNA, 555 bp, Oryza sativa nipponbare
tccggcgcccacgcgtcggtaaggccacaacaatctccgcgtgctgcagctcctgcgggagctcggctgcggcgccgtcctcgtcagcgggaacgagctccgccttgccctccgggcaggattcgatcccactaggtgtatatttaatggaaatggaaagacattggaagatcttgttttagctgcagagagcggagtgtttgtaaacatagacagtgaatttgatttggagaatattgtcactgctgcgagagttgctgggaagaaagtccctgttttgctcaggataaacccagatgtggatccacaggtccatccttatgttgcgactggaaacaaaacctccaaatttggtatccgtaatgagaaactacaatggttcttagactctatcaagtcatactcaaatgatatcacactggtgggtgttcattgtcatctgggatctaccattacaaaggtcgatatatttagagatgcggcaggtcttatggtgaaatatgttgatgaaattcgagcacaaggttttgaactgggatatctcaatattggcgg

SEQ ID NO: 403924 - DNA, 536 bp, Oryza sativa nipponbare
ccacgcgtccgcccacgcgtccgtgctattgttggagcccttaaacaaagcttgaggcaactagaatctctaggagcacagagagcaggtcttgaagacatgcttaaagaaatgaagagaaaggatgacatactccctaaattgatggccggtgttggatcacacgatgatctttttaagaaggagatttcaaagtatgatcctgtctgtgctgagatagctgataacattgtggcgcaagaacaactgctgctacaaatacaggcacaaaatgaacagtttgctgcggtgttcaacctagaggattacaaagttgctcgtgagagatgttacaagcaaattgctgcggctgttgctaaataccgagatattaagaagaacattaatgaaggcctcaatttttatgtgacattacaggaagcaattggcaaaataaagcagcagtgcagtgacttcataatgacccgaaacattcaatgccgtgaaatgatcgaagatgtgcagaagaagctagcaggtttcagcttctcatcttc

SEQ ID NO: 403925 - DNA, 510 bp, Oryza sativa nipponbare
cggtcgaccacgcgtccgcgaaggttttcctttcagtgcagagaagctcgaaattcttgctgagaaggcaaaagctaaagcagaatcacagaccctggagtcccttctggtcactggtgatttggactttgtccttgggaaagatggggcaaaggttcctgtatcagaacttgttgggaagactgtcctcctctacttttcagctaaatggtgccctccatgccgagccttcctgcctaaacttgtaaacgaatacaacaagatcaaggagaagcacaatgattttgagatcgtatttatttctagcgatcgagagcagagttcctacgatgagttcttctctggcatgccatggcttgctcttcctttgggagacgaaaggaagcaacaattgagtaagatcttcaaaatcactgggatcccttcgcttgtcgccattggtcctgatgggaagacagtgaccaaagatgcgaagaccccacttgtggcccatggcgccgacgcttttca

SEQ ID NO: 403926 - DNA, 517 bp, Oryza sativa nipponbare
gatcccggtcgaccacgcgtccgggtggcggcgcgggcagtcggcaggcaggcggcgtggcggcgagtcggaggagactccggtggggacgccgcgggcgcgggggggagagccgctgacgccgacgtcggcgtggcgcgcggcggagcagctggccaaggtggccatcatgcgcaagtccatgaaccgtgtcagcgatctccacggtttcgagaacgccagattctgattctcatcatctatcaatctcagctcagcttgtaatcaatgataattttcttttctttttcattttcattttcattttcttcttatgtgaaatgaatcaacaaacacaagatatgtcttcacgacgaagaagaaagaagaaaggcagaattaagaagagggaggagtccctgccggagcgcggcggacgtaaattacatctactcccttcattactggtgtctttttctcttctctttttgcactcctattcaaaaatttgaactagtttagacagtctcatccttct

SEQ ID NO: 403927 - DNA, 337 bp, Oryza sativa nipponbare
atcccggtcgcccacgcgtccggcccaagtcgcgtcgcaccgaagcagagtagagaaggagaggagcggagcgccatcagccgtccgatcgagtgatccgatggctctcgctctctccacctctgctgctgctgccgctgccgccgcggcgcgggcgctcgcggcgagggtgacgacgacgaggggttacgccgcgtcggcggcgtcgtcggcgatgaggcgggcggcggcggcggtggaagggaagggcgctgcggggatgacgcaggcgaaggacgggtcgtcgtcgtcggcggcgagggaggtgtcgagggtgcccgaccccgagacgggccat

SEQ ID NO: 403928 - DNA, 531 bp, Oryza sativa nipponbare
cacgcgtccggcagctggaggacgggcgcaccctcgccgactacaacatccagaaggagtcgaccctccacctggtgctccgcctccgcggcggcgccaagaagcgcaagaagaagacgtacaccaagcccaagaagcagaagcacaagcacaagaaggtgaagctcgccgtgctccagttctacaaggtggacgacgccaccggcaaggtcacccgcctccgcaaggagtgccccaacgccgagtgcggcgccggcaccttcatggccaaccacttcgaccgccactactgcggtaagtgcggcctcacctacgtctacaaccagcaggcttaggcgtaggctcctgttctttgggggcggaagtaaggaaggaggaggaaatcgaactggttattagatgataattaatccttttttgtcatgtcgtattaaactagtctccttggaactgaacaccttagcatcacctctgtgaagattgtgatgccctacttttggttttgaaatcatgttatgtactactgtcgaa

SEQ ID NO: 403929 - DNA, 388 bp, Oryza sativa nipponbare
  unsure (1)..(388): unsure at all n locations
tcgccacgcgtncgcatcttgatcataacctggtcggtgttgttgctggtatctcatacgcgatcaacagcggctaccaatcatggggaccgctctttggcaagctcttctttgccttctgggtgattgtccacttgtaccccttcctcaagggtcttatgggtcggcaaaaccgcactccgaccatcgttgttgtttgggcaatccttctggcttcgatcttctcattgctgtgggttcgcatcgatccattcaccacccgtgtcaccggcccagatacccaaacatgtggcatcaactgctaagaaagcaggggattgtagagacagaaatactgccaagttgtgtttttcagaatacaaagtgccactgccaccaattgtggttt

SEQ ID NO: 403930 - DNA, 271 bp, Oryza sativa nipponbare
acgcgtccgcacacgcccatagtcgcgtcgcaccgaagcacagtagagaaggagaggagcggagcgccatcagccgtccgatcgagtgatccgagggctctcgctctctccacctctgctgctgctgccgctgccgccgcggcgcgggcgctcgcggcgagggtgacgacgacgaggggttacgccgtgtccgcggcgtctactgcgatgaggcgggcggcgtctgcagtggaaggtaagggcgctacggtgatgacacatgcgaaggacg

SEQ ID NO: 403931 - DNA, 519 bp, Oryza sativa nipponbare
cgcgtccgctcatccctcctctcgcttagttcagatcgaaatcgcaaatggcgaagattaagatcgggatcaatgggttcgggaggatcgggaggctcgtggccagggtggccctgcagagcgacgacgtcgagctcgtcgccgtcaacgaccccttcatcaccaccgactacatgacatacatgttcaagtatgacactgtgcacggccagtggaagcatcatgaggttaaggtgaaggactccaagacccttctcttcggtgagaaggaggtcaccgtgttcggctgcaggaaccctgaggagatcccatggggtgagactggcgctgagtttgttgtggagtccactggtgttttcactgacaaggacaaggccgctgctcacctgaagggtggtgctaagaaggtcgtcatctctgctcccagcaaggatgcccccatgtttggtgttggtgtcaatgagaaggagtacaagcctgacatcgacattgtgtccaatgctagctgcaccaccaact

SEQ ID NO: 403932 - DNA, 530 bp, Oryza sativa nipponbare
atcccgtcgcccacgcgtccggatagttaacaactctgccgatgcaaaagttttgtttggttccatcaaggcctgtggagagggaatctcccttgttggtgcatctcgagtcatcattctagatgttcatttgaacccatctgtcacccgtcaagcaattggacgtgcattcaggcccggacagcagaagaaagtgtttgtgtacaggcttgttgctgctgattctccagaggtgaagttccatgaaactgcattcaagaaagaagttatcccaaagctatggtttgaatggagtgagctctgcactactgaagacttcaaactgaatcaagttgatattgatgactctgaagatgaacttttggaggctaatgctatccgccaggatatcaaggctttgtatagaaggtaacaagttatatgtggctgctgtacaccatgtacataatgcaatgctgatctttctggctgatcatcgctgtgaagatgttacagtagccccttctaatgccggagttccgttcatgcta

SEQ ID NO: 403933 - DNA, 529 bp, Oryza sativa nipponbare
cggtcgccacgcgtccgctcagatgaggctcgggttaaggagttcaacctaaagcaaatgtggaagagccccaatggcacaattaggaatattatcaatggcactgtattcagagagccaattatatgcaaaaatgtcccaaggcttgttccaggatggactaagcccatttgcattggaaggcatgcttttggtgatcagtaccgagcaactgatgcagttctgaaggggcctggcaagctcaagctggtttttgagggaaaggatgagcagattgatctggaggtgttcaacttcactggtgctggaggagttgctttgtctatgtacaacactgatgagtcaatccgagcttttgctgaagcttctatgacaactgcttatgagaagaaatggccgctttatcttagcaccaaaaacacaatcctgaagaaatatgatggaaggttcaaggatattttccaggaggtctatgaagctgggtggaaatccaagtttgaagctgccggaatatggtatgagcatcgtc

SEQ ID NO: 403934 - DNA, 542 bp, Oryza sativa nipponbare
cgatcccggtcgaccacgcgtccgccagtgcctcatgaagctcccggcgagcaacaacaagttcacctacaactgcgacggccacacgttcaactacctcgtggaggacggcttcacatactgtgtcgtagctgttgaatcagtagggcggcagattcccattgcattcttggatagagttaaggatgatttcacaaaaagatatgctggtggaaaagctgctactgctgctgcgaacagcctcaaccgagattttggatcgaaacttaaagaacacatgcagtactgtgtggatcatcctgaagagattagcaagcttgcgaaagtgaaggcacaagtttcagaagtcaaaggagttatgatggaaaatattgagaaggttcttgatcgtggagagaaaattgaactgctcgttgacaagaccgagaatctgcgttcacaggcccaagatttcaggcaggcaggaacacaggttaagagaaagatgtggcttgcaaacatgaagatcaagctgattggtcttggcataataattgcgctca

SEQ ID NO: 403935 - DNA, 552 bp, Oryza sativa nipponbare
gatcccggtcgcccacgcgtccggtcgatatcggagctcatcccacatgaaatagctaccattgagaagcggggaaagaaggacaaggacaagaagccatccatcacagacattcagggccctaagcctggcaagccgacagacctctcacgaatgcgccagatcttagtgaagctgaagcacgctcctccaccgcacatgatgcaacctccaccagcgtctgctgctaaagacggcgcaaaggatggtgctaaagacggcacaccagccccagcaaatggaaccaagaagcctgcagagagcaaagagaaacctgccaacggatcgcctgcggaagcagagaaggagcagcctgcagcatcggagtaacttatggtagctctacaggaacgcccgaaccttgactgcagatatggaaatgcattttatttctaatccctggatctgtctatcctgtatttatctttttatggagaattgcgtcaggatggctatgtatcagctctcagaacattcagcttagtatcacagcaattgtactctttacttgtt

SEQ ID NO: 403936 - DNA, 530 bp, Oryza sativa nipponbare
cacgcgtccggccactacaaggcctgcatctacgccgggatcaacatcagtggcatcaacggggaagtcatgcccggccagtgggagttccaagttggcccgtcagttggcatcgccgctgctgaccaagtgtgggttgcccgctacatcctcgagagggtcacagaggtggccggagtcgtgctctcccttgacccgaagccgatcccgggtgactggaatggcgctggtgcccacaccaacttcagcaccaagtcgatgagggagccgggaggctacgaggtgatcaagaaggcgatcgacaagctcgcgctgaggcacaaggagcacatcgccgcctacggcgagggcaacgagcgccgcctcaccggccgccacgagaccgccgacatcaacaccttcaaatggggcgtggcgaaccgcggcgcgtccatccgcgtggggcgcgacacggagaaggagggcaaggtgtacttcgaggacaggatggccgcgttcaacatggacccatacgtcgcaccggcatgatc

SEQ ID NO: 403937 - DNA, 502 bp, Oryza sativa nipponbare
gattccggtcgccacgcgtccgactgatttatcatcaccagtacattccaagaaattgctggaagcaaggacactgtggggcagtatgaatcacacattgcattcacccttcctgggctttaccgagttgtgcatggcatagatgtttttgatcccaagttcaacattgtctctcctggagctgacatgagtgtctacttcccgtacaccgaggctgacaagaggctcactgctttccaccctgaaattgaggagcttctctacagtgaagtcgagaacgatgaacacaagtttgtattgaaggacaagaacaagccaatcatcttctccatggctcgtcttgaccgagtgaagaacatgacaggtctggttgagatgtatggtaagaatgcacatctcagggatttggcaaaccttgggattgtttgtggtgaccacggcaatcagtccaaggacagggaggagcatgctgagttcaagaagatgtacggtctcattgacc

SEQ ID NO: 403938 - DNA, 467 bp, Oryza sativa nipponbare
cacgcgtccgcaggctctccaagatgaatacaatgggatacttagtcctagatttgtagaggacttcacagcatacgcggatgtctgcttcaagaactttggtgatagagtgaagcactggagcactgtcaatgagcctaacatcgagccgattggcggatacgatcaaggaatccttccgccacggcgatgctcattcccctttggtgtcctcagttgtgacaatggcaactctaccacagagccatacatagtagcacatcatcttcttcttgcacattcctcagcagtgtccctctacagagagaagtaccaggccactcaaggaggacaaattgggctcacattgctcggttggtggtacgagcccgggacgcaagatcctgaagatgtaacatcagctgctaggatgaatgattttcacattggatggtacatgcatcctttggtgtacggtgactacccct

SEQ ID NO: 403939 - DNA, 568 bp, Oryza sativa nipponbare
gattccggtcgaccacgcgtccgacgcgggcgccgagggtgccatgaagaagctgttctgcttccgcggcggcaccgtggcgaggaggtcggagagggccccgatggctgaatggtgcgtgttctgccccatcgcccgccgcgaccccgcttgcaacaccgtcctcctctactccgatgacagggtcatggcgttcaaggacatcaacccgtcggctttcaggcactatcttgtcatacccattgaacatatacctactgtcaataatctccaaagaaccaccgaagatcaccagttagttagtcacatgttggcagtaggaagagatttactcaatcgggatgctcccaattcggaggaacagagatttggttttcaccagccaccatttaatagtgttgatcaccttcatcttcactgcttggcattgccatttacgcccagctggaggcaagtaaaatatacacctctaggtccccttggagggtttattgaagctgagagtctattggaaagaatacgcccatagtctaccggtatcacatctaccggtacaagctattcttgc

SEQ ID NO: 403940 - DNA, 373 bp, Oryza sativa nipponbare
  unsure (1)..(373): unsure at all n locations
cgtccgagtcgtctgagccctagccgccgccgccgccgcgcgccaccaccgccgcaaccatggccgccgcgctcacccgcccgccgccaggcacggtccagtgcttcgggcgcaagaagacggcggtggccgtctcctactgcaagccggggcgcgggctgatcaaggtgaacggcgtcccgatcgagctgatcaggccggagatgctccgcctcaaggcgttcgagcccatcctgctcgcggggaggtcacgcttcaaggacatcgacatgaggatccgcgtccgcggcggagggaagacgtcgcagatctacgcgatccgncaggccatcgccaaggccctcgtcgcctactaccagaagtacgtcgacga

SEQ ID NO: 403941 - DNA, 390 bp, Oryza sativa nipponbare
cgcgtccggtcggtgctgaagaagcggaagcgggaggacgcacgtgggcggcggacaggaaggagaaggcgctcgccgagaagaagaaggccgtcgagagccggaagctcatcttcgcccgcgccaagcagtacgcccaggagtacgacgcgcaggagaaggagcttgtgcagctcaagcgtgaggctcggatgaagggtgggttctacgtcagccctgaggccaaacttctgtttgtggtccgcatccgtggtatcaatgccatgcaccccaagaccaggaagatcttgcagcttctgcggttgaggcagatcttcaatggtgtcttcctcaagggtaacaaggcaaccattaacatgctgcgcagggttgagccatatgttgcatatg

SEQ ID NO: 403942 - DNA, 358 bp, Oryza sativa nipponbare
  unsure (1)..(358): unsure at all n locations
cgacccacgcgtgctcggacacgtgggatggggatacagcacccgtgtgatcgacctgatccgtcacatgcacagcaccaactagaccagccctgctcatggaggcctgcagatacaggggagttgtgttttgccccaaagaagagtagatgaagcctcttccgagaataaatattaaattctgtatggttttatgtgcgtcgaaacctaaaactatacttggttgtatcatggtggttggttgggcctggtcatggctcatattttgtgtctaattttcttgcgcttaatctaaatcgaagtgttgcttcgcagatgcacnnnnnnaaaagaaaactgaaaaaatattaattttttt

SEQ ID NO: 403943 - DNA, 431 bp, Oryza sativa nipponbare
cgtccgatcccggtcgccacgcgtccggcaatccacgagagggccttggaagaagaggaagcagcggcaacccccgcagccgaccgaccccccctgtagagcgcattcactggtttagattggaattggatggcatccggaggaggcatcgcccgcgcccgcctcgccgaggagcgcaaggcgtggcgcaagaaccacccccatggcttcgtggccaagccggagaccctgccggatgggtccgtcaacctcatggtctggcgatgcatcatccccggcaaagaagggactgattgggagggtggatatttcccacttactatgcaattcactgaagactatccaaccaacgctccttcttgcaagttcccatcgggtttcttccacatcaatgtctatgactctgggggcagtatgcctatcaatcctga

SEQ ID NO: 403944 - DNA, 343 bp, Oryza sativa nipponbare
tccgaattccgggctaaagccaagttgcaacatctgcgagaagacatcgacggagaagcggcacatgtacatctctgatgagtggctgagggccaacccgtcggtgacggcgtacatgtccacctcgctcaacgtacggcagcaggtcgccgaggagggcatccctcggctcggtgcggaggcggcgcgcaaggccattgacgactgggggaagccggcgtcgagcatcacccacatcgtcttcgccaccaccagcaccggctggctgcccagcgccgacgtcgtgctcatcaagctcctcggcctcccgctgtcgaccaagcgtgtcatgctctaccaggct

SEQ ID NO: 403945 - DNA, 434 bp, Oryza sativa nipponbare
  unsure (1)..(434): unsure at all n locations
cggtcgaccacgcgtccggccggagcctgtggaggcgcaaatcgcagccgcggccgccgggaaggaccccaccttttcggccgtggcatgaatgggtcgagacagaacattgtgatgcctggaaggtatatatacacgcagaggctgaaaggcgccaatgtcaatgatcagataatattaaacaaggtattactggtatcaactagagacaaggcttacattggcatgccagtggtgaccaatgctgctgttcatgcagtggttgaggaacagggacgggatgataaagtgatagtcttcaaatataagaagaagaagaagtcccaganggaaacttggtcacagacagccaaaacacaaggttaagaattaccggcataagtggatacgaggacttccctgctgacccgatacttgagtatgttccagcttaa

SEQ ID NO: 403946 - DNA, 476 bp, Oryza sativa nipponbare
cgcgtccggtcgacattgatgatgggcgtgttgttagtaacttcattgctcaggccgtacgtggcgagcccttgactgttcagaagccaggaacacaaactaggagcttctgctatgttgctgacatggttaatggtcttattaagctgatgaacggggacaacactggaccaattaatttgggaaacccaggtgaattcaccatgctggaacttgctgagaatgtgaaggagttgatcaacccagaggttaccgtcacaatgactgagaacactcctgatgatcctcgtcagaggaagccagacattacaaaggcaaaggaagttttggggtgggagcccaagatcgttctgcgtgatggcttggtgctcatggaagatgatttccgggagcgcctccaagtgcccaagaagaaccaggcctaagctgctgcatcgcatttggcgaaagatgtcactggagcatacttaatagtt

SEQ ID NO: 403947 - DNA, 281 bp, Oryza sativa nipponbare
cgtccggtcgaattcatggagaaggtggccaagacggttgactctgaggagctcaccgtggaggagcgcaacctcctgtctgttgcatacaagaatgtgattggagcccgccgtgcgtcatggcgcattatctcctccattgagcagaaggaggaaagccgtggtaacgaggaccgtgtcacactcatcaaggactaccgtggcaagatcgagactgagctcaccaagatttgcgacggcattctcaagctgcttgaatcccaccttgtcccctttccact

SEQ ID NO: 403948 - DNA, 444 bp, Oryza sativa nipponbare
tcgacccacgcgctgccggggatacacaagcctcaccttcactccccgcgccgccgccgccgccgccgactcgccggacgtcaccctcgccccggagccatgggtgatcatactgagaaggctttcctgaatcagccaaaggttttcctcagctcaaagaagtctggcatgggttagaagccagtcaagggtggcaaccgcttctggaagagcattgaccttggcttcaagacccccatggaagcaattgaagggacatacattgacaagaagtgcccattcactggaactgtttctatcagaggcagaatcattgctggaacatgccacagtgccaagatgaacagaactatatttgttcgcaggaactatcctcattttgtcagaaatatcattggtatgtgatgaggcattccaacattccggctcacgtcttcccatgct

SEQ ID NO: 403949 - DNA, 331 bp, Oryza sativa nipponbare
  unsure (1)..(331): unsure at all n locations
attcccgggaaaagagtgggtaccaggcgcttccttgggttagatacattacaatggctggtgaatacgaactgagacttatatgagttatctctgatatggctgctcaaagattttgatgctaaatttcaactcccaagatacatgtttgatgctcgatatacaacatatagttggcattgggacgttgccatggaagtctttgaaaagctcaaccatgcanggtttttctgtctcgttgttcatcttgttagtgggtacttaccatggttactgggtagtacccatcaagtatagncttgaaaaaaacttcttttttgttcacttggat

SEQ ID NO: 403950 - DNA, 383 bp, Oryza sativa nipponbare
  unsure (1)..(383): unsure at all n locations
ggcaccggtccgggatcgaccgacgcgtccgcgcaaggatgccttccacctaagggtcagggtccacccgttccatgtccttcgtatcaacaagatgctctcgtgtgctggggctgataggctccaaactggaatgaggggtgcttntgagaagcctcaaggtacctgtgctcgcgtggacattggtcaggttcttctttctgttcgttgcaaggagagcaatgctaaacatgctgaagaggcactccgccgtgccaagttcaagttccctggccggcaaaagatcatccacagcaggaagtggggcttcaccaagttcacccgtgaggagtacgtcaaggtgaaggctgagggcaganatatgtctgatggtgtcaatgctc

SEQ ID NO: 403951 - DNA, 370 bp, Oryza sativa nipponbare
tgatacactactaccgggcgacatggagccgaagtctaggactgacggcatgaccagagactgccctggtgcactttatgatccatgcagatgtccttaatgctatccaacatccaccaagccacttgccaggttcactacaccagcaactagagttcccaccagctgagcggggttctagcggacgcccgggcaagtctgctcaagatctgggggagcagtggtcttattaatggatgtgcttcaattcaaatagtctcgcactagccatcattccctttgcttttgttgattgcttgggtggtccatcttcttattgttaatccgactcggtccttgaagtctaaaatatattctttaattataaatt

SEQ ID NO: 403952 - DNA, 264 bp, Oryza sativa nipponbare
gcgtccgggacatgggcgtccaaaacattcctgtggatgcaggtattaaggatttcgatgttgtcgagcaaggggatgttgtcgtattgcctgcatttggagcggccgtggaggagatgtacacgctgaatgagaagaaggtgcagatagtcgatacaacgtgcccttgggtttcaaaggtgtggaacatggttgaaaagcacaagaagggtgactacacttctattattcatggaaaatactcccatgaagaaactgttgcca

SEQ ID NO: 403953 - DNA, 379 bp, Oryza sativa nipponbare
gactacagtgacggaaaccttgttgcatgcttgcttgcacacaagatgggtgttacccattgtaccattgcccatgcgcttgagaaaaccaagtaccccaactctgacctctactggaagaagtttgaggatcactaccacttctcatgccagttcacaactgacttgattgcgatgaaccacgctgacttcatcatcaccagtaccttccaagagattgccggaaacaaggacactgttggtcagtatgagtctcacatggcattcaccatgcctggtctgtaccgtgttgtccacggtattgatgtttttgacccgaagtttaacattgtctcgcctggtgcggacatgtccatctacttcccttactctgagtctc

SEQ ID NO: 403954 - DNA, 456 bp, Oryza sativa nipponbare
  unsure (1)..(456): unsure at all n locations
ccgggacctacggcgccgaccacctccaaaaccagaccccgaaatctcgaggagcttgtcttttttcggtagcaatggcgttggagcagaccttcatcatgatcaagcccgacggcgtccagaggggcctcattggcgaggtcatcggccgcttcgagaagaagggattctacctcaaagccatgaagctcatcaacgtggagaagtcgttcgccgagaagcactacgccgatctgtcctccaagcccttcttcggagggctcgtggagtacatcgtctccggccccgtcgtcgccatggtctgggagggcaagcaggtcgtctccaccggccgcaagctcgtcggggccaccaaccccctggccgctgagccgggcaccatccgtggcgacttcgctgtcgacattggcaggaatgtcatncacggaagcgactcggtcgagaacgccaggaagg

SEQ ID NO: 403955 - DNA, 292 bp, Oryza sativa nipponbare
cgcgccgccacgcgtccgaaataatgaccaggttggccaccaaggtgcataccatctacaccaccgtagacgtatgcagctcgcgctggagcgagagggaggtccttaccggcatcgaccgctaggccttgttcaactatgccgacgacccgtgcagtgccaactacccgctcatgcagaagctacgcgccgtgctcgtcgagcacgccctcaccaggggtgacgccgagcccgaggccttcgtgttctccaagatcaccaaggtcgaggaggagctccgctctgcgcttgc

SEQ ID NO: 403956 - DNA, 186 bp, Oryza sativa nipponbare
ccaccgccgtaccggcagccagagcacaggaagagactgatcactaggaggagttcacgtacatcagcggcgaccagaagggggccgagcactggggcaagctgaagccggagtgggcgcagtgcggcgccggcgagatgcagtcgccgatcgacctcttccacgagcgggtcaagctggtgcgcg

SEQ ID NO: 403957 - DNA, 413 bp, Oryza sativa nipponbare
taaaggccacaggaatgaatcgcctccatattagtgtaccaacaattgttcatcgggatcttaaatcaccaaacttgctggttgacaacaactggaatgtgaaggtttgcgattttggactttcacgcttgaagcacagtacattcttatcatccaaatccactgctggaactccggagtggatggcacctgaggtcttgcggaatgaacaatcaaatgaaaagtgtgatgtttacagctttggtgtcatcttgtgggaattagcaacacttaggatgccatggagtggaatgaatccaatgcaagttgttggggcagtcggcttccaggacaagcggctcgatattcccaaggaaattgatcctctagttgcaaggatcatatgggaatgctggcagaagggatccaaattg

SEQ ID NO: 403958 - DNA, 469 bp, Oryza sativa nipponbare
  unsure (1)..(469): unsure at all n locations
acggtttcgtcgccaagccggagacgttggccgacgggacggtcaacctcatgatctggcactgcacaatccccggcaagcaggggactgattgngaaggcggatactttcctctcactcttcatttcagtgaggattaccctagcaaacctcccaagtgcaagttcccacagggtttcttccacccaaatgtctatccttcagggacagtctgcctttcaattcttaatgaagacagcggttggagacctgctattaccgtcaagcaaattcttgttggaatccaggacttgcttgatcagcctaatcctgctgatcctgctcagaccgatggttaccatctttttatccaggatcctacggaatacaagaggcgtgttcggctgcaggccaagcagtatccttcgattgtctgagaatattggcatagggacccatgctgcacattcgcttagttcttgctagatct

SEQ ID NO: 403959 - DNA, 534 bp, Oryza sativa nipponbare
  unsure (1)..(534): unsure at all n locations
tcccggtcgaccacgcgtccgggtctcttccttttcttcttctttcttcgggaaccctctcgcgtgcggcggcagcggcagtctcggctcggcctcctcttccgcaccgtgctncaggagcgcgagatccgagatggggaacactgcatctggngcgactgaagcttcagattcgacggaaaaaacagaacaagctcctccagctgacacaaaaccaaaaaagaagatctgctgtgcttgcccagacaccaagaagttgagagacgaatgcatcgtgcagcatggtgaggacgcctgcgggaagtggatcgaagcccatcggcaatgcctgagagccgaaggtttcaacgtctgatgccatgcccncatcataggcatagcaaagtgatattttgctcttgtcataatccgctttcgatcctgaaccaacatgatgaataaaagattctgttagatctctaggatgaactcgctgtttcactttcggaaaaggggacaagtcactgaaacatgccaattgcaagagggcatatg

SEQ ID NO: 403960 - DNA, 419 bp, Oryza sativa nipponbare
cgtacgaccatgccggccgtctgcctcctcaccggcaagttcatcatccccacgcttaacaatttggcgagcatatggttcatagcgcttttcctgtcgatcatcgcgacgggggtgctggagctgcggtggagcggggtgagcatcgaggactggtggaggaacgagcagttctgggtgatcggcggcgtgtcggcgcacctgttcgccgtgttccagggcctcctcaaggtgctcggcggcgtggacaccaacttcacggtgacgtccaaggccgccgccgacgagaccgacgcgttcggcgagctctacctgttcaagtggacgacgctgctggtgccgccgacgacgctgatcatcatcaacattggtgggatcgtcgccggcgtgtcggacgccgtgaacaacgggtacgggtc

SEQ ID NO: 403961 - DNA, 488 bp, Oryza sativa nipponbare
  unsure (1)..(488): unsure at all n locations
cgcacaccgctgttgctgaggttttctcgcgcatcgaccacaagttcgacttgatgtatgctaagcgtgcgtttgtgcactggtacgttggtgagggagtggaagaaggtgaattctcagaagcccgtgaggacttggctgcccttgagaaggactatgaggaagtcggcgccgagggtgcagacgacgagaacgacgatggagaagactattagtagctggttaataagtagttctctcacaaatgattggtttgtcagtatactccggttccgttgcattgcatattcctgttatgtgtgtttactttttgtactgtgctaaactgttgttagcccctcgttggccatgattggtcatatctttccattttgctgtgcattgcttgctactcccccccaagcttggtacatatgccattctgagcttgaattgcaaactgtatgctctctatgcatggtccaatggagctatggatgctntcttct

SEQ ID NO: 403962 - DNA, 538 bp, Oryza sativa nipponbare
  unsure (1)..(538): unsure at all n locations
tctagaccactctctcttcctcctagtgctagggacaatctgtatcatggtctgccagtaacagtgaagtcagctctcagatcgcgattgcaatcagttaatgcccaagaagagcgtactgtagctcaaattaaagctgaaatgcagaaaactcttcgctggattctaccgattgctgaaaatacaataagagcacatcaaggttttggatgggtcggcgaatgggcaaaccttggttgcgaaatgaacaagaaatcaggctcccagctcagtatcacccgtgtccagactcttcattacgccgataaggcaaagacggagcaatacatgctcgatctggtggtgctgctccaccatttagttgtccaggtgaagaacagaggctatgggagcaagtcctcaaagcacgaccagtcccgatcccgcaagggaatggatcttcaacctgaatccaagctcaacacatcntcagtgaacaacgccacatattcgagcccgttgtcggagtccgaacgcgagacgctggaccacctgagct

SEQ ID NO: 403963 - DNA, 336 bp, Oryza sativa nipponbare
attcattggtggaattggaacaggtggaacaatatctggtgctgggggtttcctgaaagagaaaaatcctggaattaaggttattggtattgagccttctgagagtaacatactctctggtggaaaacctggcccacataagattcaaggcattggggcaggatttgttccaaggaacttggatagtgaagttctcgatgaagtgattgagatatctagtgatgaggctgttgagacagcaaagcaattggctcttcaggaaggattactggttggaattttatctggggcagcagcagcagctgccattaaaagtgcaaaaagacccgcaaatgc

SEQ ID NO: 403964 - DNA, 509 bp, Oryza sativa nipponbare
gcaggcgcagcatattagattataagactgtgcttaatacgattataactaatctgctacatttatctatctgtctgtcttatccggatacggcgccgactaccctcgtttttcgagagagagagagagagaggcaggcggaaggggggatggacgactacgcgcgggagatgatggagctcaagacgctcgtcacccgcaccctcgagaagaagggcgtcctcgccaagatcagggctgagctaagagcaagtgtgttcgaggccatagaagaggaggatagggtagtggagaatgatgatggtgggaatcccgctttgcttggtagctgcaatgaccgagctaagcagctgcatgcttcaccatcaggtaggttattaacagcacttgtaagtgaatacttggagtgggcccagctaagtcacacgatgaaagtttatctgcctgaatgtaatctgccaaaggacttctggaagaatgaaataaaggatttttctaacaaaagcgga

SEQ ID NO: 403965 - DNA, 410 bp, Oryza sativa nipponbare
ccccacgcgtgcgcggacgcgtggtaaagatcagacggcctgttcagggcgcccgctgtgaccaacctgacgaggctgctggagaaggccgggtgcaagcggttcgcgtcgctcatcaccagcaccggcgtgctcaagacgttcgaggatgccatggacaaggggctcaccctgttcgcgcccaacgacgacgcgttcgacgccaagggcgcccccgacgtcaagaagatgcccagcgccgacctcgtcacgctcctcaagtaccacgcgctgccgtcgtacaaccccaagccgacgctcaagacggtgtcgcgcgccatgcgcacgctggcgtccaccgcgtcggggaagtacaacatcacggtggacacgcggggcgacgccgtgacgctcaacacggtcgtcgacaa

SEQ ID NO: 403966 - DNA, 129 bp, Oryza sativa nipponbare
ccgaggaagagggcactggaggcatatgtgtcaagaagactggcctgtcgttgattcttggagcgaggatgagccgatgaccccaggccagtgcaacatgattgtggagaggcttggcgattatccgat

SEQ ID NO: 403967 - DNA, 207 bp, Oryza sativa nipponbare
  unsure (1)..(207): unsure at all n locations
gctgacttactctgcanaggatgaatccaaacttgagaggcctgtgatgattcacagggcaatcctaggttctgttgaaaggatgtgtgctattcttttggagcattgcaaagctaaatggccctcgttgttaaatcctcgccaagccattagttgccccatatcttccaattcaatggaatacgctaaacaagtcctgtgcttaga

SEQ ID NO: 403968 - DNA, 466 bp, Oryza sativa nipponbare
tccgggattcgagcacgcgtccgcgacgcgtgcgggccgatccttccctacactctctatattgttcccccatggcgatcgccaccgagtcgcgctgcgaggaggagaaggcttcgccgcattcgcaggaggtgaagcggtgggtgttgtctgattttgacatcgggaagcccctcgggaggggcaagttcggccatgtttacttagcaagagaaaagagaagtaaccatattgtggctttgaaagtacttttcaagagccaactaaagcagtcccaggtggagcatcagctacgtcgggaagttgagattcagagtcatcttcgtcatcccaacattctacggctgtatgggcatttctatgatcagacccgtgtgtacttgatcttggagtatgccttaaaaggtgaactttataaggagttgcagaggtgcatgcatttttctgacagacgttcagcgactta

SEQ ID NO: 403969 - DNA, 430 bp, Oryza sativa nipponbare
ccggaattcgacgcacgccccacgcgttcggtcagattaccatcttgatggggacggtcgaaattatttttcatttattgcctctctcatctgatactccctcatcaatcatcatgactaagttacatgattagtgctttctgaatacataaggcatttgataagatggtagaacaaaaggggaatattctgatgaagagatatgagataggaaaattacttgggcaaggaagtttcgctaaagtttaccatggccgtaatattaagaattcacaaagtgttgcaatcaaggtgattgacaaagaaaagatattggaatgggagcttatggatcaaataagaagaaaaatttcagggatgaacctatatagacattccggcattggtcaattgtatgaggggattgcttccaaaactaaaatatatttta

SEQ ID NO: 403970 - DNA, 290 bp, Oryza sativa nipponbare
taccgtccgggatcccggtcgaccacgcgtccgcggacgcgtgggcgcccctccccgcccctcgccgcgcgcgcgaaggagagagagagagagagggagagagggagggagatcgcctcgccgccgcggcgtgggatccggaggtggtgtagcgaggatgtcgtctgattcgtcgtcgtgggcgcgcgcgctcgtgcagatctcgccctacaccttctccgccatcggcatagccgtctccatcggcgtcttcgtcctcggcgccgcctgggggatcttcatcacgggga

SEQ ID NO: 403971 - DNA, 241 bp, Oryza sativa nipponbare
  unsure (1)..(241): unsure at all n locations
ccggtcgaccacgcgtccgcgatcatgtggacatgccacatgcagatgaacagaacttatgccaagaacacgtgcttttatcaagaggacgggacgaatcatacgaaactaccgagcacatgacatacatgtgtcaagttgacaccgttcacggccngnggaaccatcatgaggtcaaggtcaaggactccaagaccctcatctttggcacgaaagaggttgcggtgttcggctgcaagac

SEQ ID NO: 403972 - DNA, 585 bp, Oryza sativa nipponbare
  unsure (1)..(585): unsure at all n locations
cggtcgaccacgcgtccgcggacgcgtgggtgggagcatgggaaagggtcaggcctgggtgaatgggcatctaattggtcgctactggtcactagtagcgccagaatctgggtgctcatcttcgtgctactacccaggagcctacaatgagaggaagtgtcaatcaaactgtggaatgcctacacaaaactggtaccacataccaagagaatggttaaaagagtcagataatttattggttctgtttgaggaaacaggaggtgatccctcgctgatatcactggaggctcattatgccaaaacagtctgttcaagaatttcagaaaattattatcctcccctttctgcctggtcgcatctttccagtggccgtgcctcagtgaatgcagcaactccagaactgcgcttgcagtgtgacgatgggcatgtgatctctgagattacatttgcaagctatggaactccttcaggtggctgcctgaacttctccaaagggaattgccatgcatcgagcactctggatttggtgacagaggcatgtgtnggcaacaccaaatgtgctatcagtgttttcaacgatgtctt

SEQ ID NO: 403973 - DNA, 543 bp, Oryza sativa nipponbare
  unsure (1)..(543): unsure at all n locations
ttcccggngttttccaggggtagctaagtgtgtggaaattggtcttccagaactcatcctacttgttgcattttctcagtatttgcctcaagtgttacattttgggaagcctatctttggccggtttggtgttcttttcaccgtttcgatagtgtggctttacgcgtacattctcacaattagcggtgcttacaagaatgctccaccaaagacacaggtgcattgccgtgttgatcgctcaggccttatttcaggagctccttggattagagttccttatccctttcagtggggagctccaacttttgatgctggtgaagcctttgcaatgatgatgacttcatttattgctcttgtggagacaactggagctttcattgctgcttcaaggtatgcaagcgcaactatgatacctccatcaatcattagtcggngcatcggttggcagggaatcagcatcttgattgattctttttttgggacggccaatggaacctcagtttcagtggagaatgtggtttactcgctttgacacatgttggc

SEQ ID NO: 403974 - DNA, 427 bp, Oryza sativa nipponbare
ccgaatcgacccacgcctccggaactgttgaagctgcaaaatggttgcacaaagtggtcgacaggcccaatgtctacataaagatccctgctaccgcagaatgtgttccttctatcaaggaagttattgctaatggcattagtgtcaacgtcacacttatcttctcgattgcaagatacgaggctgtgattgatgcttacattgatggacttgaggcctctggtttgagtgacctatcccgagtgaccagtgtagcgtccttctttgtcagccgagttgacacacttattgacaaaatgctcgagaagatcggaacacctgaggcacttgccctcagaggaaaggctgctgtagcacaggcaaagctagccaaccagctttaccagaagaaattctctggcccgaggtgggaggctttggtcaagaa

SEQ ID NO: 403975 - DNA, 353 bp, Oryza sativa nipponbare
cagcgcgtccggtcatatgaatcagatcgtttcagctcgctcaagtgcagaacaacttcaatagagtacattacaagaggccaattgaatgatgggtttcctttatttgaaacggaatcactgaaataccctggatctgttgagtctgatgatggtaatggcaaagtactgactttttcagtccacgatagcacttacaaagtttttgatctgaagaactacaactttctgtattctatatgtgataagaacatccaggaaatcaaaataagtgctggaatcatgctcgtaatttatcagaagtcagctaatgatgttccatttaagatactctcaattgaggatggaacccc

SEQ ID NO: 403976 - DNA, 345 bp, Oryza sativa nipponbare
acggattctcttctgatgagactaaagaaatggtctactatcagacagtatccccaaagagcttagtgaaatctgttcttgaggaaggtggttggtcaaacttggtgtgttcaagggaggatcatgcaaagagtgttgatgttgcagttctttttcttggctcgaagctacaatcatcagacatttctaaagaaaagcaagctgattcaactttagtagacatgctgaagaactcctttgcaagctccgagttttccatggcattcccctatgttgccatgtcagatgatgacaaattggagaagtcattgctatctggatttgctgagaattgcaacaatggtc

SEQ ID NO: 403977 - DNA, 95 bp, Oryza sativa nipponbare
cgaaatcccgatcgaccacgcgtccgcgaaatgcgatacctggtgtgaattgcagaatcccgtgaaccatcgagtctttgaacgcaagttgcgcc

SEQ ID NO: 403978 - DNA, 258 bp, Oryza sativa nipponbare
  unsure (1)..(258): unsure at all n locations
tctttgagagtggggtgatagagtcaaattgctactattggtttggctgctgatgaaaatccattcggtgttgtcctggggggagttctggcccaagcactctgcactaccgctgctgttatgggtgggaaaagctnggcctctcaaatatctgagaaaatggtcggattgtcgagtggagtgctattcctgctgtttggtatcatgtcatacttgtcaggacccagaggagaattataatgcccccagaaagtcatg

SEQ ID NO: 403979 - DNA, 111 bp, Oryza sativa nipponbare
gttcgcgctgttcagcatggccaccgccgccttcttcgccgcattcgtccacgacttcaccgtcaaggatgcaagtggcaaagatgtggacctgagcaccttcaaagggaa

SEQ ID NO: 403980 - DNA, 241 bp, Oryza sativa nipponbare
  unsure (1)..(241): unsure at all n locations
cgatccgtcgccaccgtcgtgttatgctgtgtacacacttcgcctgtttttggatcaagctgtgtgaatgacctgcctagaagcactatatttcacgtggatacgttgcatgcctgtagtgttagcctccatattctacatattaacttggtgccagagactggtatactgcaacttttttgtgtgtggcggttggtctttggctggactaatcatncggattgtgacagagtattacaca

SEQ ID NO: 403981 - DNA, 252 bp, Oryza sativa nipponbare
  unsure (1)..(252): unsure at all n locations
ccgtagttgtgaaccttggagcttgaaggtggcttcnggaaagctaattccaagaagacaccgatttgattgtgaagaacttcttgtttcttcgtgcaagattacaaagataggtgttggtggtcctttgatggattttaatggaaatatcgttggaatgaacttctatgacaagaaagaaacacctttccttccaagtttcattgtgttgaagtgtttacagcacttcaaaagaatttgggaaggttgtac

SEQ ID NO: 403982 - DNA, 166 bp, Oryza sativa nipponbare
  unsure (1)..(166): unsure at all n locations
atcgtctccgctacagcaaatggcgacggttgcggagcctntgttctgggagattgtgaagaagaacaactgcttcctcgtgaagcagtttggaaacagcaatgccaaggtgcagttcaccaaggagcccaacaacctgtacaatgttcactcctacaagcactct

SEQ ID NO: 403983 - DNA, 456 bp, Oryza sativa nipponbare
tccggtcaaccacccgtccgcggacgcttggggggatcctgatgatgatgtcatcggcgccggagatgaaggtggaggcggccggcgggttgtccgtcgggtgctacgccgaatcgtgccccaaggcggaggcgatcgtccgggacacggtgaccaaggcgttcgagaaggcgcccggcacgccggccgacctcatccgcctcttcttccacgactgcttcgtccgcggatgtgacgcatcggtgttgctggagtcgacaccagggaacaaggcggagagggacaacaaggcgaacaaccctagcttggatgggtttgacgtcgtcgatgatgccaaggacctcctcgagaaggagtgtccacacaccgtctcttgcgccgacatcctctctctcgtggctcgtgatagcgcctaccttgctggtgggctcgacttcgagatcccaacaagtcgtc

SEQ ID NO: 403984 - DNA, 432 bp, Oryza sativa nipponbare
cccacgcgtgcgtcgaaagaagcgctgcccatctgagcttgcatatattacttccctaagtcgctgcaagaagtgggatgctcagggtggaaaaagtaaagctttctttgcaaagacagtggatgacaggttcatcataaagcaaataaagaagacagagtttgagtccttcataaaatttgcccctgattacttcaagcatgtttaccattctctagacactggaagccaaacttgccttgccaaaatattgggaatttatcaggttaagcaaacaaggcatggaaaagagataaagatcgatctgttggtgatggaaaaccttctcttcgggcacaatatttcacggatttatgatcttaaaggtgctatcttttcacgacacgttgcacactccaatgaccgtaatactgtttacttggatcaaaacta

SEQ ID NO: 403985 - DNA, 394 bp, Oryza sativa nipponbare
  unsure (1)..(394): unsure at all n locations
cccacgcgngcgatagagcacanccnnncnggnnacaaaaanacngnccancacaagaggaggacggnacnccaagaagcngcagncgcgaaagaagggagccaagggaancaaganacgnanagcnggacganggncgcaaacccngccnggagagccncgaggcngcagnnaagganacgagcgagagccaaccncnnnancnngaaagacaggaaggnnacgaaggccnaaacangaaagnggaacaacaagggcccnggcnncnngnagaaagacaggcnnnaaangaagccanggaaggagagaagacnggncaccaccancnnccagaaacaagagggnnangcnnaccaaaagagcaaaccggcagcacgaaancgaggagaccaag

SEQ ID NO: 403986 - DNA, 418 bp, Oryza sativa nipponbare
cgtccggcgtacgagaagaagcggcaggaggaactcaaggagaagttcgagggtctgtgcaaggtgatcaaggaggtgctcggtgacaaggtggagaaggttgttgtctctgaccgtgtggtggactctccctgctgtctagtcactggggagtatggctggactgctaacatggagaggatcatgaaggcccatgctctgagggactccagcatggccggctacatgtcgagcaagaagaccatggagatcaacccggagaattccatcatggacgagctccgcaagcgtgccgatgctgacaagaacgacaagtctgtgaaggacctggtgatgctgctcttcgagactgccctcctgacctccggcttcagccttgaggaccccaacaccttcgggaccaggatccaccggatgc

SEQ ID NO: 403987 - DNA, 337 bp, Oryza sativa nipponbare
  unsure (1)..(337): unsure at all n locations
ggagaagttcgagggtctgtgcaaggtgattcaatntggtcctccttgacaaggtgggggaggaaatttgttacacaaggagcatatgatacaagaaacatctttcagtcacttgacctagcatggacattgcttcgcatattccctcgtgagcttctccatcgtatccctgcgaagacattggatcagtactacagcagaaatgctacccactgatctatgttcagaaaaatcaaatgttttctctcaagtgcagcttgaataaattgaaacgtttgaacttgtggcctttttgctgtagttatatatagtacggtcctattttttctttcgggtg

SEQ ID NO: 403988 - DNA, 524 bp, Oryza sativa nipponbare
cgccccacggcgtccggagaaggaaaatcttgaatagtggaaagacttgataagattagaacgaggtgcccgctctaatacaaacagatctattatgtcccatggtgcttttgcagttctttatggccagcatttgaaatactacataaaggatccagaggttacacttgggagagaaacaagtgaggaacatgtcgacatcgatttgggaaaagaaggaaaggcgaatacaatatcccgtcaacaggcaattatcaagatggataaaggtggatctttccacataacgaatataggaaaagctccaatcttcgtcaatagcaaagaagttccatgcaacgaatgcactcacttaatttctgatgcattacttcagataaggcacatgaaattcatttttcacatcaatcaggatgccgtgaggcaacatatagttcgcagtaggagaggaacctcccaaggcaagtacgccagtattaattgggatgaaaagccatgaattaaggttacgatcaagctcatgt

SEQ ID NO: 403989 - DNA, 518 bp, Oryza sativa nipponbare
ggtacggaatcgcaggttcgacctacgacgtcacgcgagaagatgcatattgctcgggattatctagagaagaacacaagagaggcttgtggcattaaacctgaacaggctgaggttacagatgctgctcttcttgcccttattgaaagttactgccgagaagcaggagtgcggaatcttcaaaagcaaattgagaaaatttaccgcaagatagctctgcaacttgttcgccaaggggtatcaaatgagccaactcaagaagctgccattgtaacagcgagcgaagaacctaatggtggcgatagtgcaaacaagttgaaagatgagactatggaggatcctgctacagagaatgctgcaatgaccaatgctgatactgcctcaaaggaagctagcgaattagatttactgaatagaacagtcgatcatgatgtgcatccagctgaaacacccaaagaagctgtttaactgattcagccctatcgacagacaaagtgtgcacaccagagggcaacaag

SEQ ID NO: 403990 - DNA, 490 bp, Oryza sativa nipponbare
  unsure (1)..(490): unsure at all n locations
tgcggtaccggtaccgatctcgcgggttcgagctcgacctcacgcgtacgcacacacacaagtatatttctgagctcttgtagtttgagtgagagagcagcagaagggagtagtgcaagatgccgatccgcaacatcgccgtggggagccaccaggaggtgtaccacccgggtgcactcaaggcggcgttggccgagttcatctccaccctcatcttcgtcttcgccggccagggctccggcatggccttcagcaagctgaccggcggcggagcgacgacccccgccgggctgatcgcggcggcggtggcccacgccttcgccctgttcgtggcggtgtccgtcggcgccaacatcttcggcggccacgtgaacccggccgtgaccttcggcgccttcgtcggcggcaacatcaccctgttccgcggcctgctctactggatcgcccagctcctgggctccaccgtggcgtgcttncttcctccggttct

SEQ ID NO: 403991 - DNA, 118 bp, Oryza sativa nipponbare
tccaccattgtcttgcataagggctggtcgtgtcacttcctcccgttaaggcttcccgcggcggcgagagcaagctaagctaggtcgggcatggggaaggacgaggggatggagagcg

SEQ ID NO: 403992 - DNA, 512 bp, Oryza sativa nipponbare
  unsure (1)..(512): unsure at all n locations
tcgcccacgcgtccgggcgtgccctacatcggtgtcgccattggtaggactgccatgagtgtatgagagagagaatttaacttgaaccataatttaatatgtgtgtgagacttctctttcccgggagcgccagaactcctctcactgctagaaacatggacgcctagagtgcatgaggatttaagttcatggagcgggtactgccaatgcggtgttatcgaaaacctttgtcgtgacgcgtcttatgtgttgggacgaggctcatgtgttgggcagtcacggagtgcgggtaaagtgtacatccactgcagtgtgagtaaaccaaatctattcgaatagccgtgctcgcggntattgagcaccgggacgtgtattacacttggctagactcaaaattcttgacttgtgtgggatggatattgcatgacgatttatatgctgtgagccacttctgagggctgaaggtgatgcctcaaaaaccagacactcatgctggtagtttcttggatact

SEQ ID NO: 403993 - DNA, 209 bp, Oryza sativa nipponbare
ttctcctaattgtcatcactagcttctagctcgcttaattaattaattagccatggcggaggagatagcaccaccaccatcctgttccaccacaagaaggacgacgagccggccaccggagtagactcctacggcgagggcgtctacacgtcggagacggtgaccaccgaggtggtcgccgccggccaggacaagtccaaggggtccag

SEQ ID NO: 403994 - DNA, 253 bp, Oryza sativa nipponbare
tggccacggcctgtctggcatgctccttggaagaattatagggtgatcagtggtcacttgggatgggtgcggtcaattgcatatgatccaagtaacgaatggttctgtacgggttctgccgacaggacgattaagatctgtgaccttgcatcatgaacaattggaacttacattgactggccatattgaacaaattcgtgggcttgctgtgagccaacggcacacatatttaatttctgctggtgatgacaaa

SEQ ID NO: 403995 - DNA, 238 bp, Oryza sativa nipponbare
accagagctagggaaggatggcaacctcaaggagttagaagtggtggttgtgaggtttgaagcggggttcgaccagggcacagcgggactggatgacatgcccggcagtgccgaacccgtgcgatgatgatgggggcacccggggacgagaaagttgtagaggagagccttgagaagctgaagaaggtgttggaggaatacaaggcacgcctgacgtagtgcaagcacctggatggag

SEQ ID NO: 403996 - DNA, 312 bp, Oryza sativa nipponbare
  unsure (1)..(312): unsure at all n locations
cagaacaagaagcncgncgccgccggcaagctgaccaagggcaagaactcctacaagnngccgccgacgcgcgcgccggccgcggccaagcccaaggcgaagcccgccgccgccgcaaagccgaagccgaagccgaaggccgcagctaagcccaaggcggctgccaagccgaaggccaaggctccagccaagtccaaggccgccgcgaagcctaaggcggctgccaagccagccgcgaagccgaaggcggcggctaagcccaagtctccggctaagccagccgccaagcccaaggctgcccccaaggctaaa

SEQ ID NO: 403997 - DNA, 165 bp, Oryza sativa nipponbare
tcgacccaaacgtttcggatgctgaaggtgtttacagtgccctggagaagctgggtatagattgggatgaggttggcaagcagctagagctggaaggtgtggactccttcaagaaggccttcgacagcctgcttgggaccttggaggagaagggcaattccctca

SEQ ID NO: 403998 - DNA, 305 bp, Oryza sativa nipponbare
  unsure (1)..(305): unsure at all n locations
ggccggaannccggncgacccacgcgaccgacgcgccgggacgcgngggcggacgcgcggcgcggcggcgccgcacaagcgcgggcggacgcgagggcacgcgcaggcgccggaggaccccanccncggggggacgggcgcgnacaacaaggancccagccccgngaagggcaaacncggcgncggcgcccaccggaccgaggaagggaagccccnggggccgaagggggncaggcgcgcngagcagangctgancaacaacccgncacgngnnaaggagnatnngccgancactggacnggccg

SEQ ID NO: 403999 - DNA, 173 bp, Oryza sativa nipponbare
gggtgagagtcagtgtcctcaatgacgctctgaaaaccatgtacaatgctgagaagcgtggtaagcgccaagttcttatccggccctcgtcaaaggtgatcatcaagttcctcatcgtcatgcagaagcatggttacattggtgaggttgagtttggtgatgaccaacggtct

SEQ ID NO: 404000 - DNA, 391 bp, Oryza sativa nipponbare
gctacttccgtctaggtctctcctgtgacaactgtcgagtgcgctgtcagcgttacatcgtccaagttatggtatcagtatacgtatgacttcaacaccgctcgagcgccaccccaaggcgtatgtctactggttcatggacatgctctagcactgataatgacagacacgccgactgaacttgaagtcgccatacattgatcatcacgttcagtactaggctgccgcttggatggcatcagagccggctatgaactatgtgacggaaataaaaggactgcaaatcgattcgattatgcagattcgtgtatatgatcagaattgagagcccctagggcacttgtaaagtgtactcttgatgtgtgatcgtcctgagtaatcaatgtttatc

SEQ ID NO: 404001 - DNA, 470 bp, Oryza sativa nipponbare
aggcttccacctgctctccctcgcggaggcggcgcggggtatatactgctccaccggccgcaaggcatctgagctcaacagcaagcaaatggcatgtggcagaaccgcacatgccaccctcaaggggccgagcgtggtgaaagagatctgcattgggctcacccttgggctggtcgctggtggtctgtggaagatgcatcactggaacgagcagaggaagactagatccttctacgacatgctcgagaagggccagatcagtgttgtcgtcgaggagtagtcttttgtgttgaaagtcttttgcctttgttttttgcaagttatttctgaaactctctggagagcatgacaaagctagtgccgtggagattgtcatgaaaaataagcatagcaatttgagaacatttgatctcgttgaatttgcttcttttcttgtattatcttaaaatctgtctttaatatatgccagt

SEQ ID NO: 404002 - DNA, 475 bp, Oryza sativa nipponbare
ctcgtaccttccccaccctattgacaatgactcatatgataggattgtgctctgtgtgaggttgctttgcaatactggtgatgatgtgaggaaggtctggttgcagtcatgccgccagagctttacaaagatgcttgctgaaaaacaattccgagagactgaggagatgaaggccaaggcgcagatctctcatgcccagcctgatgatctcattgatttctaccacctgaagagccggaggggaatgagccaacttgagttggaagatgcagtccaagatgatttgaaggctgctactggtgaatttacaaaagatgcagatgacgcaaacagactgaatcgcattcttcaactaacagggttcagtgatcctgtgtatgctgaagcatatgtaactgttcaccactatgatattgtgcttgatgttacagtcataaaccgaacaaaggaaacacttcagaacttgtgcttggag

SEQ ID NO: 404003 - DNA, 506 bp, Oryza sativa nipponbare
ccggtcgaccacgcgtccgccgacgcgtccgggatcttccatgtggccatatgggacatgtcttacctgggttggtggacatctatttgcacgcaacagctcagtgaaattagggatctcggtggatggtttccctattgatcaagagatcgatgttggtgttgattttgtcacacctgcaaagcctggtgggtacgtgtcgtactggagattggcatcacccactggccagatgtttggtcagcgagtttgggtttttattcaggtggagcacccggtcaaaaccagtagcaacaagcagagtgctgctataaacttgaacatgccctcagaaggaagcaacacagaatggaagcattctgttgatgcaaatattcagtctgcagatattgtgggtaaatactctggaagcaccataactgatcctcttgcacatgcactataccatgaagccaccaaaccgatggaacctgagcttgttcaagtgccgtaccttctgtcctaga

SEQ ID NO: 404004 - DNA, 397 bp, Oryza sativa nipponbare
ggtcgaccacgcgtccgcgcggcttaggctttctttggcgccaaatccgccgcccaatcccagttttcccaagggtagtttcttggtttagtcaactactatggggtcctgtgtgggaaaggaacgcactgattaaaaatacaagattgacttcaaaggtggcaatgtgcatgtgattagtaacaaagagaattgggaccacaaaattgcagaggcaaacaaggatgggaaaattgtgattgcaaatttcaatgctgcatggtgtggaccatgccgtgtcattgcacctgtatatgctgagatgtcacaaacatacccccaggtcatgttcttgactatagatgtcgacgagttaatggacttcaactcatcatgggacattcgagcgacaccgacg

SEQ ID NO: 404005 - DNA, 366 bp, Oryza sativa nipponbare
  unsure (1)..(366): unsure at all n locations
tcccggtcgccacgcgtccgcgccatgtactattggtgtttccactacttcaagaggatcatggagacgttctntgttcaccgcttcagccacgcgacttctcctgtgtcaaatgtcttcaggaactgtgcctactactggacctttggagcttacattgcttactactgcaaccacccgctttacacccctgtgagtgaattgcagatgaagattggggttggatttgggattctctgccaaattgcaaactnttattgccatatcctgctgaggaacttcagaagtccgagtggtaacggggctataagattcctcgtggttcctgttcacatagtgacatgcgcaaactataccactgagatc

SEQ ID NO: 404006 - DNA, 488 bp, Oryza sativa nipponbare
  unsure (1)..(488): unsure at all n locations
acgcgtccgnccagctttgcaaacatgcacccatttgcacctactgaacaagccgcaggatatcatgaaatgtttgatgacttgggcgatctgctgtgcaagatcactggctttgattctttctctttgcaaccaaatgctggtgcatcaggggagtatgccggattgatggttatccgtgcttaccacagggcaagaggagactaccaccgggacgtctgtatcattcctgtgtcagcccatggtacaaatcctgcaagtgctgctatgtgtggaatgaagatcgttgctgttggaactgattccaaaggtaacattaacatcgaggagttgaggaaagctgctgaagcaaacaaggacaacttggctgctcttatggttacctatccttcgacccatggagtctatgaagaaggcattgatgagatatgcaggataattcatgaagaccggtggcaggtatacatggatggggctaacatgaatgc

SEQ ID NO: 404007 - DNA, 412 bp, Oryza sativa nipponbare
cggggtgctgcaaagctgggaccccaggctcgtcaacccctgcaccgggttccacgtaacctgcgaccgcgacaaccgcgtcacgcgcctggatcttgggaatttgaacttatctggtcatctggtgcctgagcttggaaagttggatcatctgcaatatctggagctatacaagaataatattcaaggaacgatcccatcggaacttggtaatttgaagaatcttataagcttggacctgtaaaagaacaacatttctgggactatacctccaacatttgggaaataacgtccctgtattcttgcggtcaatggcaatcgcttgactgggccaatcccaagggaactggccggaatatctagtcttaaagttgtgatgtttcaagcaatgatctggtggaacaattctaca

SEQ ID NO: 404008 - DNA, 437 bp, Oryza sativa nipponbare
gtaccggaccggagtttcggcctcaggcgtacgcgggcgcacagctttgcgtaagcgcacactgtcgatctgcattcgtttttgagttcctcgtttgctccgcctctctttcactcatgggcaagattaagatcggaatcaatgggttcggccgcatcggcaggctggtggccagggtggcgctgcagagcgaggatgtcgagctcgttgccgtcaacgatcccttcatcaccaccgagtacatgacatacatgttcaagtatgacaccgtccacggccagtggaagcatcatgaggtcaaggtcaaggactccaagaccctcatctttggcacgaaagaggttgcggtgttcggctgcaggaaccctgaggagatcccatgggctgcggctggtgctgaaatacgttggtgagtctaactggtgttttcacccgac

SEQ ID NO: 404009 - DNA, 330 bp, Oryza sativa nipponbare
  unsure (1)..(330): unsure at all n locations
gacagttttgcctaagggacattgaagatgggaaaccaccactccttctccaaatggttactgattacggtgatctccatttcatgtcggctctgcgttctttcaaacgtcgtgttgcttactcaaacatctgtaacgatttcattgttggctggagaacatcatcaatacgccatcaacatgaacttcccaagccccaaaattntataaatcatgttaaatatccacatgttgtatatgtggaaaagccgaaggttcaggatactgatttttcagattcaatgatatatcanggcgaaaatacaagtgaaatggaagactgatgctcaa

SEQ ID NO: 404010 - DNA, 294 bp, Oryza sativa nipponbare
  unsure (1)..(294): unsure at all n locations
ctccagtctccactccactgaatcctcccacctcggctcgaaggaatggcaagcggtagtgaagctgagaagtcacctgaggttgtgctggagtggcctaagaaggacaagaagaggcttctacatgctgtttaccgtgttggagatttggatcgcaccattaaatgttacacagaatgctttggaatgaaattactgaggaaaagagatgtgcctgaagagaaatatacgaatgcatttcttgggtttggacctgaggacaccaactttgcacttgaatngacatacaattat

SEQ ID NO: 404011 - DNA, 309 bp, Oryza sativa nipponbare
acgcgtggggccgccgagaccatcgtgcgcgacaccgtcaagctctacttctcaaaggaccagaccgtcaccgcgccgctgctccggcgggacttccacgactgcttcgtcaggggatgtgacggatcggtgttgctgaacgcgacggcggcgagcgggccggcggagaaggacgcgatgccgaaccagagcctggacgggttctacgtcatcgacgccgccaaggcggcgctggagaaggagtgccccggcgtcgtctcctgcgccgacatcctggcgctggcggccagagacgctgtctccatggct

SEQ ID NO: 404012 - DNA, 381 bp, Oryza sativa nipponbare
  unsure (1)..(381): unsure at all n locations
ctcaggtctccacctctgtggttgagccatacaacagtgtcctctccacccactccctccttgagcacaccgatgtcgctgtcctgctcgacaatgaggccatctatgacatctgccgccgctccctcgacattgagcgcccaacctacaccaacctcaacaggcttgtgtcccaggtcatctcctcactgacttgcctcctgaggttcgatggtgctctgaatgtggatgtcaacgagttccaaaccaacctggtgccctacccgaggatccacttcatgctttcctnctacgccccggtgatcttcggcgagaaggcctaccacgagcagctctncgtggcggagatcaccaacagcgccttcgagccgtcctncatga

SEQ ID NO: 404013 - DNA, 147 bp, Oryza sativa nipponbare
gaccggaggtgcaccatcggtatgtgcctcaccgacacgctggacgacatggtctccagtggggcgctcagccccgagctcgccatccaagtcctcgtgcagtttgacaagtccatgactagcgctttggagcatcatgtgaagagc

SEQ ID NO: 404014 - DNA, 426 bp, Oryza sativa nipponbare
cccacgcgtccggcaatgcgctatgcattccatcccagcatcagcagtagagcctggtggcattgtgcctggccaacctaaagagctcctcccaaggttatttgaggagtccttccgcagtatggcaacttccttctccaagtactccatcacagatcattcgacagacttcagtagttctcgcttctctgagtttgggggaggggctctgcaagggcaagagcaagagcaagatggcgatgatgtgaacaaggagaggcctttggttctccggaacaaagcaccaaggtggcatgaacagctgcaatgctggtgcctcaacttccgtggccgtgtgacggtggcttcagtgaagaacttccagctgatagctgctgcacctcagccatcttctggagccgcctctgaaccttcacaggcagggca

SEQ ID NO: 404015 - DNA, 295 bp, Oryza sativa nipponbare
  unsure (1)..(295): unsure at all n locations
acacataaattcccccccaatatacccgagtgcccccactggtgaacaatctggctggtggggtgcggcttatatacaaacttctatgcttgcgggaaggtgtgccttatcctgttgaacacctcgtctggtagtggatgtgagagagggagtccttcaaactcaacaatgctacaagtnctggtctcagttcaagctttggtgttgaatgccaaaccttattttaatgagcctggatatgccatgcatgctaatacacctcatggcgagaagagtgcattaacttataatgaag

SEQ ID NO: 404016 - DNA, 463 bp, Oryza sativa nipponbare
cacgcgtccggctgccacttccctcgctctcgcatcttctcctcgcgcccaggggccaggtaagcgaagatgtacaccgcgaggaagaagatccagaaggagaagggcctcgagccctccgagttcgaggactccgtcgcgcaggctttctttgacctcgagaatggcaaccaggagctcaagagcgagctcaaggacctgtacatcaacaatgcagtccagatggatattgccgggaacaggaaggctgtggtgattcacgtgccgtaccgtctgcgcaaggcattcaagaaaatccatgtcaggcttgtcagggagctcgagaagaagttcagcggcaaggatgtggtgattgttgcaacaaggaggattgtgaggcctcccaagaaggggctcggtgttcagcgccctcgcacaagaactcttaccgtgttcatgattgatcttggaggtgagtctaccc

SEQ ID NO: 404017 - DNA, 232 bp, Oryza sativa nipponbare
ccccgctcgcgcgcagactgtacgggccgcctccgcgggttctccgtctgtgtccaagacgagcgcatggtccgctacccacctccttctgagatttctgactttcatctaacctatacggcagaggaccgccaacttcggtccgtcttgctacacttaaccgaaacataacgatcctcgctcaagctctgcatttcttaaggactccgcatgccgctgcttcggctacatg

SEQ ID NO: 404018 - DNA, 475 bp, Oryza sativa nipponbare
  unsure (1)..(475): unsure at all n locations
tccgaattcccgggctgctcatccnctccncagatctccagccccaggagctccggagggttcccaatggcggtgaaggtctatgtcgtgtactactctatgtatggacatgttgctaaactagctgaagagatcaagaagggtgcttcatctattgaaggtgttgaggctaaaatatggcaggttcctgaaactctccatgaggaagtacttggaaagatgggcgcgcctcctaagccagatgtgccaacgatcacaccacaagaacttactgaggctgatggaatcctgtttgggttccctacaaggtttggcatgatggctgcgcagatgaaagcattctttgatgcaaccggtggcctgtggagtgagcagagccttgcaggcaagcccgccggcatcttcttcagcactggtacccagggcggtggcaggagactacaccgttgcagcaataactagttgactcaccacg

SEQ ID NO: 404019 - DNA, 448 bp, Oryza sativa nipponbare
gcttccggtcgccacgcgtccggtacttcccacccaggctttgaactttgctttcaaggattacttcaagaggctgttcaacttcaagaaagacaaggatggttactggaagtggtttggtggcaaccttgcctctggtggtgctgctggtgcttcatctctgttttttgtgtactcccttgactatgctaggacaaggttggccaatgatgcgaaggctgccaagggaggaggtgaaaggcagttcaatggccttgtggatgtttaccgcaggactctcaagtcagatggcattgctgggttgtaccgtggatttaacatctcatgtgttggaatcattgtctaccgtggtctgtactttggaatgtatgattctctgaagccagttgtactcactgggtctctccaggacaatttctttgcaagctttgcccttgggtggctgatc

SEQ ID NO: 404020 - DNA, 410 bp, Oryza sativa nipponbare
ccacgcgtccgccttgctgatgggcaaaacaagcttgttatgtccttgccctcactgttgagaacttcctcgcaaggcgtcttcagactcttgtcttcaaggctggcatggccaagtccatccaccatgctcgtgtcctgatcaggcaacgccacatcagggtcggcaggcaaattgtcaacatcccgtcgttcatggtgagggttgagtctgagaagcacattgacttctcactgacaagcccattcggtggaggcccccctggtagggtgaagaggaagaaccagaagaaggcaagtggcggtggcggtgacggtgaggaggaagatgaggaatgagaacagaagtttgcaactagttgtttccgtaatgatcataaaactctgtgctgagtaactaggcccaaattc

SEQ ID NO: 404021 - DNA, 356 bp, Oryza sativa nipponbare
acagagattagactctgctgtacagtcagtttgggaatactggatctaccatagcagggcagtattccaaaaccgctctttgaaatgtgctgcgcctcggcatttctagagttttcagatttctagatcgcactgatgtcggcacaggcggagctttcccgtgaggagaatgcgtacatggccaagctcgctgagcaagccgagaggtacgaggcgatggtccaattcatggagaaggtggccaagacgggcgactctgaggagctcaccgtggaggagcgcaacctgctggctgttgcatacatcaatgtgattggagcccgccgggcgtgatgccgcattatctcctccattga

SEQ ID NO: 404022 - DNA, 263 bp, Oryza sativa nipponbare
  unsure (1)..(263): unsure at all n locations
ccggtcgaccacgcgtccggcgctggggctcgcgctgaccagggtgtacagcgacagcagcccgacggcgctggtcgtcttctgcctgctcaacgcggcgtcggcggggctgcggcactacatggcgctggtggagctcctcnccgccgatttcatggggcccaagctgcaaggcaacgtccgactccagctcgccgcgtacctcgccatcctactcggcaccggcggcatgtccgttaaggccaagtgtgcgatagcgtgac

SEQ ID NO: 404023 - DNA, 498 bp, Oryza sativa nipponbare
tcggattccaggtcgaccacgcgtccgacgaatggtcattgatagtgtaaataggtgcgatgttgacattcgcaaggaactgctaagcagtattctgctttcaggtggttcatcatcaattctgcagttgaaggagaggctagaaaaagaagtacttgaggaatcttctggtaatactcgtgtaaaggttttggcaagtggaaattcagtagagaggcgattcagtgtttggattggagggagcattctagcatcccttgggtcgttccagcaaatgtggttctccaaagcagaatacgaagaacatggagtatcctacatccaaaggaagtgcccatgaagttgtggagcatcgctacgatttgtgaccaaatttgggtgcatgtgggcaatcgtattacagccaccctgttgttgatctatatcgactattatccgacgatatttaatattatattatgacatagtagtctgcagattttgagaggtcaactttag

SEQ ID NO: 404024 - DNA, 402 bp, Oryza sativa nipponbare
  unsure (1)..(402): unsure at all n locations
gcgtgcggcagctgtctggaccgcaagcacattctgttcgaacatgtggtacatactatgaacgtgcctttcgccntcgtgaaggcgtggtgcgaccaaaaaactgtctttgtctcgcgccgctttgtgcacaaagcgcaagggttgcggatccaggaggggcgcagcatcgtcttgccatggttgggatggagcccggatgtgaacaatgccaagacagactgggctggacatgatgcagctgatgtgcactgagagacttgtatgcataagggcacgtgagaggatcagggacctggaatggtgcccggcacgactggggctcaagcgactccaactgatgaaggtgtctgaggttcaagtcgggaccgggatgcagcatggccatcagatagtacagca

SEQ ID NO: 404025 - DNA, 176 bp, Oryza sativa nipponbare
taccggacgtcacacaaccggcggctgtgtcgtgaccagacggtcatgctacctcagggcagagttctgggccgcgcatcgcggcagctcggctccctccccttcgcgcagtgccaccacgacatcaacaccgtcgactgccagccgtcggggccgcaagggcggcatggctcgtc

SEQ ID NO: 404026 - DNA, 309 bp, Oryza sativa nipponbare
gtgccgccggcggagccgtgctgcccgctgctggaggggctcgtcgacctcgaggcggcggtatgcctctgcacggccatcagaggcaacatcctcggcatcaacctcaacctccccgtcgacctcagcctcatcctcaactactgcggcaagcgcgtgcccaccggcttcaaatgctaagcatcgataggcggcggcgctactgcgcatttgttccgctgggctatttatcttgactgtttgattgctactacgtgctagcttagcttggcaacatttgcgccgcatgcatgggatcgattcgacaaa

SEQ ID NO: 404027 - DNA, 397 bp, Oryza sativa nipponbare
  unsure (1)..(397): unsure at all n locations
cgcgtccgcagagaagccaccatctgtccggtttcattcaagaatcaatatgtcgtgtgttaatcatgagactggagcggttgactcgaggaagtttggtgttctagcaaactggcagcgcgagtacaccatggagactatccttacccagctcaagaaggagatggcaaccccgcagaatcgcaagttggtgcaacctccagaagggacgttcttctagaggagtatttacctnctggctcatctccagaattcagattcaacatcatcaacttgtatttatctggctcccgcgcttaattgttttctagttcaatttgatatatgccctgctttctgtgtaccaacaaccgagttcaactttgcgcctcgtgatntctccggtggctgttgatta

SEQ ID NO: 404028 - DNA, 479 bp, Oryza sativa nipponbare
gcgaccgaggaagaagaagagaggagatcaggaggaggggaagaggaagtagggatgggtttcgtgatggagtgcgcggaggacctgatcctgcggatgatggaggacccggtgaagcgggacgcggcgcatcgggagcacgtgtaccggatgaaggagcggtgcgagcgcaccaaggcggcgtggagcctcccgcttcgcccctacggcttctggaccttcgaccgcttcaacttccagctctcctgggatccccagatcagccacgccctcggccgccgtgacccctactacgacgttcttcaccgtcactccaacccaccctccttctactcctgatcccccgattcgatccggaataaatgccgttggggaggaagtgtgggtccattaagaaacccgtttccatccaaatgacttcttttgaaattttttcctttgaactaccgtgctttgggaatatgctttctgttggttaa

SEQ ID NO: 404029 - DNA, 476 bp, Oryza sativa nipponbare
accgctcctgtctagcggaagtctactctgtcatccggcggcggcggaaggcgaaggcggcggcggcggcggcgaagatggggcactccaacgtgtggaactcccaccccaagaactacgggccgggctcccgcgtctgccgggtgtgcgggaaccctcatggactgatcaggaagtacgggctcatgtgctgcagacagtgcttccgcagcaacgccaaggacatcggcttcatcaagtaccgctaaagtcatcttggtttcctcagccctactgctgggtgaagagatggagcatttaatggaaggcttaatttcagttccagtaatttagctgttggttggtactctgcagactaaagtgggttatgtttctgatgctatttgaatgatgtggatgctaagtatgaaataatcgcgcatcaaaaaaatcctttatactatatatatgtgcgtctggagggatcgatgattttt

SEQ ID NO: 404030 - DNA, 407 bp, Oryza sativa nipponbare
  unsure (1)..(407): unsure at all n locations
cagagccagattatggaagagatgcaagttcattaaggactgcagcgaccaaagtgcctggcggttggcatttggatggccagaagcgttggataggcaacggcacttttgcagatgtgctcatcatcttagctagaaattcagatacaaatcaactaaatggatttattgtcaagaaaggagctcctggtttgaaatgtacaaaaattgaaaataaaattggactcagaatggttcagaatgccgacattgttctgaataaagtatntgtccctgacgaagatagattaactggaatcaattcatttcaagacataaacaaggtccctgctatgtcgcgcattatgggggcatggcaaccaattgcgatatccatggggggtcttcgacatgtgtcatcggtattt

SEQ ID NO: 404031 - DNA, 276 bp, Oryza sativa nipponbare
  unsure (1)..(276): unsure at all n locations
gggggctacaaaagtatattggtatatttaatttcgtggctcgtgattttggtggtattgcttgttatgaagactgtatctgtcggaaggcggagatttagtgcggattttcagctatttttccgtctgattaagtttatgatatttgtttcgttcatcgccatcttgattgtactgatagcaatacttcatatgaccttacgagatatatctgtgtgctttctggcattcttaccttccggatggngaatattgctgattgcacaagcttgcaag

SEQ ID NO: 404032 - DNA, 160 bp, Oryza sativa nipponbare
cccgtccgattccaggtcgaccacgcgtccgcgctcagctaagctctccaccattgcttgcaaagctggtcgtgtcactcctcccgttaagcttcccgcggcggcgagagcaagctaagctaggtcgggcatggggaaggacgaggtgatggaaggcggc

SEQ ID NO: 404033 - DNA, 318 bp, Oryza sativa nipponbare
  unsure (1)..(318): unsure at all n locations
ngcggcgcaggcgccgggtcccgctgcgacgccggcggcgggcgccacggggccgccgaacgtgacggcggtcctggagaagggagggcagtacacgacgttcatccggctgatgaaggagacgcagcaggacacgcagctgaacagccagctgaacaactccttcaacggcaacggctacaccgtgttcgcgcctaccgacaacgccttcaacaacctcaagccgggcaccctcaacagcctgacgcagcagcagcaggtggcgctcgtccagggccacgtccctccgcagttctactccatggactccttccagac

SEQ ID NO: 404034 - DNA, 276 bp, Oryza sativa nipponbare
  unsure (1)..(276): unsure at all n locations
caacacgcggtactacgaggtgcttgcggtgcccaaggatgcgtcccaggatgacctcaagataggcgtaccgcanggccgccatcaagaaccaccccgacaagggcggagaccccgagaagttcaaggaattggctcaggcttatgaagtcctgagtgaccctgagaagcgtgaaatctatgatcagtacggtgaagatgctctcaaggaggggatgggtccctggtggtgggatgcatgacctcatttgaccattttttcctcaattctttgga

SEQ ID NO: 404035 - DNA, 472 bp, Oryza sativa nipponbare
  unsure (1)..(472): unsure at all n locations
gacggacgcatccaagcgtgcgggtgaaaatgcaggcacacataatgtgcacaccacccctgtgtatccggacgaaacactactgaaatgtgcgttgacagggacgcgagcgggataccctgcctctccgagacatacgacgggttacgagcactcggactcgggtctggcctctccagcttgagcgccgccttcatcaatggcgtcctttccccaaagaccagacctgacaatggaacagcaccacgcttatctatctacatagagaacatctacaaggggattcatggaagcgattcaagcgcctatgattctgaaggaaggttcgatgctgaaaagtntgaggagatattcgccaagcacgccaagaccgtgcctgatgctctgacatcggacgagatagacgagctgcttcaagcgaaccgcaagcccggtgctacactggatgggcgcagatcgcagagtgagatct

SEQ ID NO: 404036 - DNA, 251 bp, Oryza sativa nipponbare
gcaagaacatacgcttcaccgtctgggatgtggggggtcaggacaagatcaggcctctgtggaggcattatttccagaacacccagggtctcatctttgttgtggacagcaatgatagggaccgtgttgtcgaagccagggatgagctccacaggatgctgaacgaggatgagctacgtgatgctgtgctgcttgtctttgctaacaagcaagatctgccaaacgctataaatgctgctgaaatcactgat

SEQ ID NO: 404037 - DNA, 399 bp, Oryza sativa nipponbare
tcgttgagaggtcaggcattagctgatgctggctccgatcatgactatgcaaaagcaatacaactcggatctgagcttagaacaccccacacgcttcttgagttattcacacagctttgcagggagtctgatctggaagacccaatagaaaaagcccttattggtctttcaaaggaagggcttcgcgtacttcttgagtatatccgggaatggaacacaaaacctaagctttgtcatgttgcacagtttgtgctttttcgggtattgaggagcttgcctcccactgatatcctggagataaagggcatcagtgagctccttgagggacttattccatattcacagaggcatttcaacagagttgatagactagtacgaagcacatttttattggattac

SEQ ID NO: 404038 - DNA, 210 bp, Oryza sativa nipponbare
ttggcttctcctccccctctttaccttttcctcctcggttcggttccgtggttcgtctagggtttagtgggttgagatggcggcgccggatgtcgagtaccgctgcttcgtcggcggcctcgcctgtgccaccgacgaccgctccctcgaggccgccttctccacctacggcgagatcctcgactccaagatcatcaacgacagggagac

SEQ ID NO: 404039 - DNA, 169 bp, Oryza sativa nipponbare
caccacccgcccgccgccgacgccctcgccgctccggttctccaagttcttccaggcgaacctgaggatcctcgtcaccggcggagctggcttcatcggctcgcacctcgtcgacaagctcatggagaacgagaagcacgaggtcattgtcgcagacaactttttcact

SEQ ID NO: 404040 - DNA, 335 bp, Oryza sativa nipponbare
  unsure (1)..(335): unsure at all n locations
tcggagcgggtgcctggccgcgggcgcggtggtgtcgctggtggacgaggtggggtcggcggcctccatcgccgacgggcgccccgtcaaggtctccaccgacatgtccgtctccttcgtctccctcgcgcaggcccgccccggcgaccgcctgcggatcacggccagggcgctcggccacaaaggggcgtactccgccacccacgttctcatcttcaacgccgccaccggcgaggtcgtcgccgagggcaggcactccctcttcggcaggatgaaggtcgtnttcaccttcaccggcaccgccaccagcaagctgtgaccatggattccaccct

SEQ ID NO: 404041 - DNA, 127 bp, Oryza sativa nipponbare
  unsure (1)..(127): unsure at all n locations
gctcactgttagtcgcctgcacccatacacatgcagagcgacacacaccgacggactngctggctcgctcggccagaagacnctggaggcggtggacatcctcaagctcatgacctncacctacatc

SEQ ID NO: 404042 - DNA, 482 bp, Oryza sativa nipponbare
gttgtatccttgcagctgcaaggactcaaggaaatgtagccttaggagaaaaggctgcagaagaattgtcaaagcttgacccaagccatggagcatccaaaatagccttgtcaaacctctatgctgatgctggtcattggagcaatgtgtcagtggtgaggaaggaactccagaatgagaatttggaaagacttacaggaagcagtggaattctacaattataggtttcactcttttggtgacaactgcaaaactgctcttatgtcggtgaactaattgcgacaagcagtttattttcgtgcttgatctgttctgttagccaacacatacaatcattattttgctcttttagactaaacaatatgtgaactaaagaatctctaacatgacatggcaactattcatattggaaagttgattggctgttagactgccaagaagatagcttggaaagtagattagcatcacttattgaggcccct

SEQ ID NO: 404043 - DNA, 112 bp, Oryza sativa nipponbare
tcgaccacgcgtccggctgcttctatgatatcgctatcaatcaatgagaacatttgggatccgtggattttctgtgaaaaaaaaaaaaaaaaaaaacaatataaaaagaaaa

SEQ ID NO: 404044 - DNA, 191 bp, Oryza sativa nipponbare
ggactgtatgcttgggggctactccccacacactcctgtttgacgcatacccccttgtgaaggcgcgttgtactaaccaaaaatcaagggcgcctttccatagagggaaaagactttgtcatcctttgaaaaaaaggagggggaacaaggccccgtgtctttaccattggttagcatattttggtttgttc

SEQ ID NO: 404045 - DNA, 251 bp, Oryza sativa nipponbare
cgggtcgaccgacgcgatccgagacgaggcgcgcctgacgaagtgcaagtacctggctggagactacatcaatgtcgtgtacctaagccatgtgactggcactgcatgcttgtggagctagctcaacacattcggtggaacgcatacaccaatgggaaggcctggttggcagacctgatagcaaggcacgaggcccaaaaaggggttgcaataatgaagctttctggttaagggaagggatttaggcacag

SEQ ID NO: 404046 - DNA, 375 bp, Oryza sativa nipponbare
ccgggttgagcccacgcgcttccgaagagacgcgaaggagagagagctcctcgcccacatactctctctagccccagagagttagagagctctctatgtgaagaggatacacagctgtgtgacaaacaccgtgcatatcacagtaagagagaagatcttcgtatctggtcacgagaaattttatgctgcagcagacaagcagtactgggggtcgttattttcgctcatcccacatgaaatagctaccactgtgaagcggcgaaagaaggacaccgacaacaagccatccatcacagtcattcatgggcctcagtatggctggcacgcagacctctcactaatgagcccgatcttattgaaggtgaagcacgctcc

SEQ ID NO: 404047 - DNA, 388 bp, Oryza sativa nipponbare
  unsure (1)..(388): unsure at all n locations
tcccggtcgaccacgcgtccggcaaattaagcctcgaccagctaatcaattaattgagcttgtgctgttagccgtgtcatctatagctcgctagcttgccatggtgtcctctgctatggcggcggtggcggtggcgtttgctgtagtggtggccgcgacgatgagcagcgcgcaacttgacccgcacttctacgacggcttgtgcccggcggcgctgcccaccatcaagcggatcgtcgaggaggccgtcgcggcggagccccgcatgggcgcctcgctcctgcgcctgcacttncacgactgcttcgtcaacggttgcgacgggtccatcctgctggacgacacgccattcttcacggnggagaagaacgcggcgcccaacatgaac

SEQ ID NO: 404048 - DNA, 292 bp, Oryza sativa nipponbare
  unsure (1)..(292): unsure at all n locations
ctgctgcacgcacgctggctgtcgactgcgctatggtcggcttcaccaccaccgncgncggatccgacgtcgtcttcgcgcggccagccaaggcaatcaatgtcagttcagtctctttcgctggtttaaggaagaacaatgtggctttcactctgcagccagtgacacanagatttgcagttctccgtgctgctaaaaaggaaacagtggagaaggttngtgatattgtaaagaagcagcttgtacttcctgaaggcactgacgttactggtgcctctaagtcaccgatctt

SEQ ID NO: 404049 - DNA, 482 bp, Oryza sativa nipponbare
  unsure (1)..(482): unsure at all n locations
ctctctcgaaactcaagtcatgccgtatacatggcgtttaagatcgctgatgagtcgtatgggctggatgctccattccaagaggcatcagtcagcctgcgaggtcggggatcaacaaaaattgttcgtgtccaaagctatgacagcgaagatgaggaggtgcctgagaattactggcctatgagtattggtccattgctgcgacgaagggccaggagaagagaccgtcgtctanntcttgatgaaggtgtaacggtccctcagaaaaggactgacgagtggatggagctggagatgggtgagttcatcaacgaggaacgtgaagatggagaggtgtgcttcagcctgatggagaccaagggaggcatatggaagagaggtcttattgtgcagggcattgagatcagacttaagaaatctggctgatgaacttctatgatcaaggcgcgtgtattaaataagactcattatgcgcccttttt

SEQ ID NO: 404050 - DNA, 275 bp, Oryza sativa nipponbare
tcgaccacgcgtccgcactacacgcatagcagaggagaggcgacaatggaggggaaggaggaggacgtgcggctgggggcgaacaggtactcggagaggcagccgatagggacggcggcgcagggcgcctgtgactacaaggactacaaggagccgccgccggcgccgctgttcgagccaggggagctcaagtcgtggtctttctaccgggccgggatcgccgagttcgttgtcaccttcctttttctctacattaacatccttaccggcatggg

SEQ ID NO: 404051 - DNA, 463 bp, Oryza sativa nipponbare
cgacgcatgcatccgggcagtaagggtgtggtcattcgttttgtcattggtcggagtgcaaatcgaggtgatagcttggaccgcaacatcgatgatgaaaatggtgggacgaaagatttcttgattcttgaaagtcatgaggaagctgcagaggagttaccaagcaaagttaagtttttcttcagtgcagcaattgaagcttgggacgcagagttctatgtgaaagtcgatgacaacattaaccttgacctggctggattaattgagatgcttgaagcccgtcgaggtagccaaggactgtacatgggttgcatgaaatcaggaggtgttgtaagtgaagagggtcaacaatggtatgaacctgtatgggtgaaagttggagattcaaaaacgtatttttgccatgcttgcggtgctttgtttattctttctaacatattggcacgctactattacataaaca

SEQ ID NO: 404052 - DNA, 324 bp, Oryza sativa nipponbare
tcgaagcggctgtatcaggcttattgatctgcggcaatcagcactatgtgacaaccatgctaagttatttgaggagcatgaggcacctggatcgagatccttttttacagagataattgcatcggtttcagatataaaatttgcaagggatggaaggcacattcttagtcgtgattatatgactctcaagttatgggatataaacatggattcaggcccagttgcaactttccaagttcatgaatatttaagacctaagctctgcgatctatatgaaaatgattcaatatttgacaaatttgaatgttgtttgagtggtgatgg

SEQ ID NO: 404053 - DNA, 220 bp, Oryza sativa nipponbare
gggctcacgtgagaagcaagatgatctacgcgagctccaaggacaggttcaagagggagctcgacggcattcaggtggagctccaggcgaccgatccaactgaggttggcctcgacgtgatcagaggccgtgcaaactgagcattgttttgatgctgctacctataaaagtatgagcttcagatgagaatttaaagagctcccctgaggcaatgggttat

SEQ ID NO: 404054 - DNA, 170 bp, Oryza sativa nipponbare
cgcgtccgccacattctactccaccactccactccccaatccaaccaccccccgaacaaccggagaagagaggctgcactccactcgcggccggcgacggctcgtgatgcatcgccgcacgcaaggggcggcgctcgctagaggtggtctagcgcgcggtgaggcggtta

SEQ ID NO: 404055 - DNA, 283 bp, Oryza sativa nipponbare
agtaccggtcgggatccaggtcgaccacgcgtccgtattgcagcaatggcggcgaaggcagcgctcgttctagcggtgagcctcctggtggtggccgtggcgagcgcctgcacctactgcccggagccgccgacgccgaagccgaagccgccggcgccgaggccgccgacgcccggcggcggcgccgggtcgtgcccgcgcgacgcgctgaagctgcacgtgtgcgccaacgtgctcggcctcgtgaaggccaagatcggggcggtggtgccgtacgagccct

SEQ ID NO: 404056 - DNA, 374 bp, Oryza sativa nipponbare
  unsure (1)..(374): unsure at all n locations
cctgtgaccctacaaactaccgaagcgaagcgaagcgaagaatcggcggcggcggcggcggcggcggtggggagaagccatggagcggctgcagcggatcttcngcgcctccggcatggggcagccgccgtcggactcgccgctgctcgactcctccgagcaggtctacatctcctccctcgccctcctcaagatgctcaagcacgggagggccggcgtgccgatggaggtgatggggctgatgcttggggagttcgtcgacgactacacggtccaggggggtcgacgtcttcgccatgccgcagagcgggaccggngtcagcgtcgaagccgtcgaccatgtcttncagaccaacatgctcgacatgctcaag

SEQ ID NO: 404057 - DNA, 284 bp, Oryza sativa nipponbare
  unsure (1)..(284): unsure at all n locations
ctacgaaactaccgaagcgaagcgaaccgaacaatcggcggcggccgctgctgctgctggcggtagaaaccatggagggggtgcagcntatcttaagcgcctccagcatgggacagccggcctcggactctccgctgctcgactcctccgagcaggtctacatcttctccctcgccctcctcaagatgctcaagcacgggagggccggcgtgccgatggaggtgatggggctgatgctgggggagttcgtcgactactacacggtcagggtggtcgacttcttc

SEQ ID NO: 404058 - DNA, 348 bp, Oryza sativa nipponbare
acgcgtgcgcacaggccacaatggattcccagtggttgatgagccacctctaacggaagcacctgaattggtcgggctcgtgacaaggtctcatgtgttggttttgctgaatggcaagatgttcatgaaagaccagctgaaaactagtggtagctttgtccttcaaagattcagtgcctttgattttgccaagccagggtcagggaaaggcttgaaaattcaagacctggacttcactgatgaggagatggaaatgtatgttgatcttcatcccgttacaaacaccttaccttataacggggttgagacaatgtcactcgcaaaagctgcaatcctatttcgtgcact

SEQ ID NO: 404059 - DNA, 370 bp, Oryza sativa nipponbare
  unsure (1)..(370): unsure at all n locations
accgtccgaatcccggtcgaccacgcgtccgcccacgcgtccggccgcagcgaacaaatcccgcgcgggttgggaagagcgagctcgtgaggagagcagagggaaagcgcgagggggaaggaggaggaaaggtgcacaaggtcanactaagtttgcgttgaagaacaaaggagaggaaaaatgtcgcctgctgaggcatcgcgtgaggagaatgtgtacatggcaaagcttgccgagcaggctgagcgttacgaggaaatggtcgaattcatggagaaggtggcaaagaccactgatgttggtgagctcaccgttgaggagcggaacctgctttctgtggcttacaagaacgtgattggtgctcggaggg

SEQ ID NO: 404060 - DNA, 300 bp, Oryza sativa nipponbare
gatcagtgtcaatgagagacatgggtacagaaatgacccctattgcgagccaggagccatcccgaacaggaacaccggtgagagcaacgagtccagattgttctcgcccaactactccacgaaaaacaatatgccccaatgcaatcggtgctgttattggccatggtgaatgtagcaacgtggaattaaatgaacaagaattgccaatgaagactttgagggagataatgctcctcggcactcaacttggtaaaaccaacattgctgcattggccagccacaaggaagaggaaaaagatg

SEQ ID NO: 404061 - DNA, 472 bp, Oryza sativa nipponbare
  unsure (1)..(472): unsure at all n locations
acgcgtgggacgcgctgaagctgatcgtgtgcgccaacgtgctcaacctgctgaagctgaagatcggcgtgccggagagcgagcagtgctgcccgttgctgggtggcctcgtctacctcgacgccgccgtctgcctctgcaccgncatcaaggccaacatcctcggcatcaatctcaacatccccgtcgatctctctctccttctcaactactgccacaagacctgcccctccgacttcacctgccctctctaaattaatcgatcctccgatcccttaattaccataccattacaccatgcatgaatatccatatatatataaaccctttcgcacgtacttatactatgttttgtcatacatatatatgtgtcgaacgatcgatctatcactgatatgatatgatngatccatcancctgatctctgtatcttgttattttataccgcaaaataaaagttcttcacttgtgt

SEQ ID NO: 404062 - DNA, 238 bp, Oryza sativa nipponbare
gttcctctgggaatcacgtgcaatttgcaagtatgtatgccgcaagaacaaaccacagctgtttaaagatggcgacctgagaggagtcaccaatggtggatgtgtggctttaaatggagtgcaaccaatacactcctgcactgaaccccattctttttcagagcctaatccgtccgatgatgtttggggcacccccccacgagaaaaatgttgaggagaacctttagaaacttaaaaa

SEQ ID NO: 404063 - DNA, 218 bp, Oryza sativa nipponbare
gaagccgatgcagccgcccaaatccatccgctccgccatctccaagaaggccaacaaggccagcgcctgatcatcgccgccgtctcgccgcccgtcgccgccgcgcgctgtatccctgtataggcctaggtgttgtcgcttacctagtagtagttcgccatcgtcgtctcgtctgcttcgatcgatcgagcgctctgtgttccgggtgtgtgttgcgt

SEQ ID NO: 404064 - DNA, 255 bp, Oryza sativa nipponbare
  unsure (1)..(255): unsure at all n locations
acagatatctaagcaggtgctccacgagaatgataacatccaaggcataggttcaagatccatcccataaatattgggcnagcacaaactcatgagatagtgacagtgaccactcaagaagctatggacatggcaagaaggttggcaagggaagaaggattgctcgttggaatatcttcaggagccaacgcagctgccatcttgaaggttgcagcaagggaggagaacaagggaaagatgatcgtgactatgttc

SEQ ID NO: 404065 - DNA, 298 bp, Oryza sativa nipponbare
  unsure (1)..(298): unsure at all n locations
cgggagctcgctcgtcgtcgtcgacctagccgaggacgaggagcccgtgggcgacgtggcatggaggcggctgcggtcgtcggcgatgtgcanggcgcgggggagcangatcatcgtgacgagcaggtcgccggagacggtccgtggcatcccggcggcgcgcgccatcgagctcaagttcctccgcgacgacgtctactggtacttcttcaaggtgctcgcgttcggcagcgcgaacccggacgaccacccgaggctggcgtacattgccatggacatcttccgggagcataagggc

SEQ ID NO: 404066 - DNA, 473 bp, Oryza sativa nipponbare
  unsure (1)..(473): unsure at all n locations
cgttttcttttcttctcttctcttctcttgttgcggcgaagggggagaggaaggtcgaggtcnaccagatgggcggcgggaggggcagaagtcgaagatggcgagggagaggaacatggagaagaacaagggcgccaaggggagccagcttgaggccaacaagaaggccatgaacatccagtgcaagatatgcatgcagactttcatctgcaccacctctgagaccaagtgcaaagagcatgctgaggcgaagcatccgaagagcgacctcaccgcgtgcttgcctcacctcaagaaataatggcggtggcatctctctgctcaatcagaagagaaaaagagaagctgccataatccactaatatcatcttgtatgcaatgactgtgtgccctatgtatgggtctaaactattgtcagctgctgctgcttctttggttggtgcctcatctatatttgtaaagctttatcaacc

SEQ ID NO: 404067 - DNA, 335 bp, Oryza sativa nipponbare
  unsure (1)..(335): unsure at all n locations
ctgccgcgtcgtccacggcgaggccgatcaggagaccgcccccgcctacgccaaccgtgaagcctacgtggagcacagtggtggtgacgccgncggcacgttcntctccatcttcccgtcctacctcgacgacggagaaggggctataaagcagaagagaagaagaccaaaaaggggagaggactttagatttcgtgaagcactgctgaaggctgatttctggcttttatttgcagtgtattttattggggttggaacttggattactgttcttaataatttatcacaagttgggattgcttcatgtgattgttgatacaacgatttgacttatt

SEQ ID NO: 404068 - DNA, 310 bp, Oryza sativa nipponbare
  unsure (1)..(310): unsure at all n locations
cctttgtccagcggctgacactgaggtcaagtcggttgagatgcaccacgaggctctccaggaggctcttgctggtgacaacgtcnggttcaacgtgaagaacgttgcggtgaaggatctgaagcgtgggtacgtggcctccaactccaaggatgaccctgccaaggaggcttgcagcttcacctcccaggtgatcatcatgaaccaccctggccagatcggcaacggctacgccccagtgctggacttgcacacctnccacattgccgtcaagtttgctgagctggtgaccaagatcgacagacgatct

SEQ ID NO: 404069 - DNA, 235 bp, Oryza sativa nipponbare
tccgctaacgacactctaccaaagcagtacacctgatggtgcgcactcttctgtggctatgagctacgtgttatgatcgtgcaaggtgcgggctgggtatgggatgttggcaagggctgtgctgctgctctcaagcaggctggtgcccgtgtcattgttactgagattgaccccatctgtgcccttcaggcccttatggagggtctccaggtccttaaccttggaagatgttgtc

SEQ ID NO: 404070 - DNA, 389 bp, Oryza sativa nipponbare
gcacttgctcatacagacactgctgttcagtgtcttacgtcgcatgggctaaccggagacggtggcgccgaaccctgaagttgtcgatggacacatatcaatcctgctggacacaagcttggataaagaattcattgcgaaagcgataactttgccgggtcaaggggagattatggatatgatgccaggtgcagatgctgatgcagttcatgctgtccggacctttattaagaaggagcttgcccttcaactcaaagatgaccttgtttcaacagtgacaaataacagaagttctgaagcttatacatttaaccatgatagcatgggccgccgtgcattgaaaacacatgccttgcttatcttgcatctctgaatgaaccggacaccac

SEQ ID NO: 404071 - DNA, 334 bp, Oryza sativa nipponbare
ctgcgacaaacaaattaaatctcaatggaagaggcattgtggatgtcacttcggatgtggttattctccttgtgacggcagctccacctccatccaagagatgttccgccgcgtcagcgagcagtttacggccatgttcaggaggaaggcgttcttgcacttgtacacgggcgagggcatggacgagatgtgagtcaccgaggctgagagcaacatgaacgacctcgtcttcgagtaccagcagtatcaggacgccaccgccgacgaggccgagtacgaggaagaagaggacgcgatacatgagtagagactgtctgtgcaatggtacctcgta

SEQ ID NO: 404072 - DNA, 554 bp, Oryza sativa nipponbare
ccacgcgttcggaaatggccgctttatcttagcaccaaaaacacaatcctgaagaaatatgatggaaggttcaaggatattttccaggaggtctatgaagctgggtggaaatccaagtttgaggctgtcggaatatggtatgagcatcgtctcatcgatgacatggttgcttatgcactcaagagtgaagggggctatgtgtgggcttgcaagaattactattgagatgtgcagagtgatttcttagctcaaggcttttgttcattgtgtttgatgacatcagtattggtgtgccctgatggaaaaacaattgaagctgaagctgcccatggcacggttacccttctattccgtgttcaccagaagggaggtgaaaccagcacaaacagcattgcttcaatctttgcttggaccagatgacttgcacacagggcatagcttgactacaatgctagacttcttgactttgcactaaatacttaagctgcttgcgttggaaccgtggtatttgggaagatgaccaaagaccttgctcctcttatttacggtttttt

SEQ ID NO: 404073 - DNA, 373 bp, Oryza sativa nipponbare
ccacgcgtccgcaagagtttagtgaatttgggactgatggtggaccagcagcaaaggccttggggccgggattcaatctatttacgcagcaagtgtccaagagcttatgaatggcagtgccacatattgatataaagactgtcattgctgctaccatgtttcttaaaggctttggtggtcttctgttcatcatcagcagctcatttggagcattcctactgctcctgtacttagcagttataacacctgttgtgtacgacttctacaactatgaaatggagtcttcacaatttgttcagcttttcttcaagttctcacagaatttggcactttttggtgccctgcctttcttcttggtaatgaataactcttt

SEQ ID NO: 404074 - DNA, 441 bp, Oryza sativa nipponbare
ccacgcgtccggcgagctggatttgatattcaatttccacaaggcctactacatacttgatgaaatggggatggctggtgagcttcaagaatctagcaagaaaaatgttgcaagactaattgctgcacaggattcattggtagaggcagctaaagaggaagctagctctataagcaacatcattgcccaggctacaaaataaaattctactccagtctgatgtttgctctcttttgttgtgttatattggtaaatgcaatgtactagtccatttggtctgttcagttttctaagatacgtctttcaaggtgccaggattaagaatgaacatgatgttactacactgtatccgctatttcgaaccgaattcggattttcttagagaaatattgtcctgatagttgatcatatttctttttattgccttttatttcttttttc

SEQ ID NO: 404075 - DNA, 289 bp, Oryza sativa nipponbare
ccacgcgtccggtgtaccggaccaagctgtctaagccctaatcgcctgcgacaccgtcacacaccacggcctgggtcattacctgcatgctcacccatccgtctacaggcacggttcaatgctctgatcacatgaagacagctgttgccgattgatactgcaaaccgtttctcgggctcttcaatgtgaacggattctctatagagctgatcatgcctgagatgcttcttctaaaggcgatcgatctcattctgctcgcggggcgctcctactttaaggacattgacat

SEQ ID NO: 404076 - DNA, 373 bp, Oryza sativa nipponbare
ccacgcgtccggccaaggtgtccgggatcaagaagaactccgtcgccgtcaccaagttcgtcgacgaggtcgggaaaatcgagtgccccggagcgaatcaactgagcgaggggatcgccaaggtcggcccggcgctgctctccggcccggtgttcgccaccttcgagaaggtctccacgttgctccccgccgacgaggaggagatcaagcccaatgaggctactgtcgccgtcgccgaagaggataagatggaggaagccgcctccgtctccgtcaccgacgctgtctgcgaggtgaagaaggaagaagccgaggagaataaagaatattaggctctcttccccgtctactagccagctgcatcctttcggtg

SEQ ID NO: 404077 - DNA, 334 bp, Oryza sativa nipponbare
ccacgcgtccggtcccagaaggcagatgtgtacagctttggtgttctcttgcttgagctgctcacagggaagggcgcccagtcaggccggtgttaacgatgagggtgttgacctgtccaggtgggtgcagtcagttgttcgctcggaatggactgcagaggtgtttgatatggagctcctgaggtatcagaatgttgaggaacagatggttcatctactacagcttgctatatactgcgttgcataagttccagatgccctaccttcaatgccacatgttgttttgcggatcgaggtgatcataaagtcattcgaaagattagattgtagagat

SEQ ID NO: 404078 - DNA, 189 bp, Oryza sativa nipponbare
ccacgcgtccgtggatgtcaagcgccagggatgctttaacataacaaccgggttcagccactcacaggctgtggctgtatgcccagggtgccaaacggtgctctgccagaccacacgagggaagggcaggctcatcgtgggctgctatttacggcggaagggcgactagtgtgtgagtttgatatttca

SEQ ID NO: 404079 - DNA, 206 bp, Oryza sativa nipponbare
cgacgcgtccgcaccctccgtctccttctccctcgtctccagatccgtgggtcgaagcagcggctgcgcctgggccacggctgacacttgctcttccatgaatcctgagttcgactactttctcaaacttttccttattggtgattctggtgttgggaaacctgtgctttgcttcttagacttgctgactattcatactccggtct

SEQ ID NO: 404080 - DNA, 418 bp, Oryza sativa nipponbare
ccacgcgtccgggcccccttttctagctagcggcacgcgagcattgaagccaatatggccgcgctgccattagccaccgccgaagtgtgcgacgcaaactcaaatccaatcatcgccggcgagctccgcgccctccctcccatcttcaaaatctacgggaggcggcaggttttcgccggcccagtcgcgacggtgaaggtgttcgaggacaacgtgctggtccgtgagctcctccaggagaagggacatggccgggtgctcgtcgtcgacggcggtggtagcgtgcgctgcgccctcttgggcggtaacctcgcgcagctggcgcagatcaatggatgggtcggcatcgtcgtcaatggctgcatcatggatgtggatgagatcaatggctgtgacgttggtgtccgtgccttcaatt

SEQ ID NO: 404081 - DNA, 221 bp, Oryza sativa nipponbare
ccacgcgtccgggagtacttcatcaagttgatcaagaagaagtacagcaaggacatcagcatggacagccgtgctcctggaaagccgaggagggaagctgagcgtgccaagagggctcctcagtaaccagcaccaggtccgtgttgagattgagtcctctctcgacgggtccgatttctcggagccgttgacccgtgccagatttgaggtgtcgaacattg

SEQ ID NO: 404082 - DNA, 301 bp, Oryza sativa nipponbare
cgacgcgtccgccgacgacttcgactggagagaccacggcgccgtcggccccgtcaagaaccagggggcgtgcgggtcgtgctggtcggtcagcgcgtctggggcgctagagggagctaactacctggcgacgggcaagatggacgcgcttttcgagcagcagattgcctatctgtaccatgagcgtgatatattagaatctgattcatgtgacgttggatgcaattgtggtctgatgactaactctttttgtttttcttcgtaattctctttgcttcttttatgtgaatagtatttctcc

SEQ ID NO: 404083 - DNA, 342 bp, Oryza sativa nipponbare
tatcaagacccataataccaatgcctaccacaagcgtttccaagtcaagttcaagagacggatgcaggtgcaagactgactacagggccaggattatgctcaccaaccaagataagaacaagtacaacacaccgaagtaccgcttcgttgtgagatttacaaacaaagatatcacatctcaaattgtctatgctaccattgctggtgatatcgtgatggctgctgcctactcccatgagctgcctcgctatggtcttgaagttggtctcaccaactatgcggcagcttattgcactggcttgcttttggctcgccgtgtgctcaagctccgtggtttggacc

SEQ ID NO: 404084 - DNA, 435 bp, Oryza sativa nipponbare
cgagctcaaaagacacacattccaaaagcatctgtggccatctcctcctagtcctaggctcgcgtcaatggcggcgtgcaccatggcactctcctcccctgccgccctcgccggcaaggcggtcgccaatgccaaggtgttcggcgagggccgcgtcacgatgcgcaagtcggcggccaagcccaagcccgccgcggcgtcggggagcccgtggtacggcgccgaccgcgtgctctacctcggcccgctctccggcgagccgccgtcctacctcaccggcgagttccccggcgactacggctgggacaccgccgggctgtcggccgacccggagacgttcgccaagaaccgggagctggaggtgatccactgccggtgggccatgctgggcgcgctcggctgcgtcttcccggagctcctcgcccgcaacggcgt

SEQ ID NO: 404085 - DNA, 444 bp, Oryza sativa nipponbare
ccacgcgtccggtacatttgcacctttcttgttgctgggggtgtatcatcctttgcgttgttgaagacaagctccaagactatcaagaagcttgctaaccctaatgcgcctctgggctacacattgtgcttcctcaacttagcttttgatggttacaccaattcgacccaagatttgataaagtctaggtatccaaagactaatccatgggatataatgcttggcatgaatctctgggggaccatatacaatgctgtgattatgtttgttgctccattactattcagtaattggccttacgccaacggttttgaggcagtgagattttgccaggagaacccagaggtggcatgggacattctcctgttctgcctgtgtggtgccgtgggtcagaatttcatcttcctaaccatcagccgatttggcttcttactaacactacca

SEQ ID NO: 404086 - DNA, 376 bp, Oryza sativa nipponbare
  unsure (1)..(376): unsure at all n locations
taaaggaaccctaaaggatggttgcaattcggaccgagcgagcanagctgggagcatcggttgaagaacgtcctgactactgcatcatcaccccaccggagaagctgaacatcacggcaatcgacacctacgatgatcacaggatggccatggccttctacctagctgactgcgccgacgtgcccgtgacgatcagggaccctggttgcacccgcaagaccttccccaactacttcgacgttctaagcactttcgtcaggaactgaactgagctnttaaaagagtgaggnctaggttctgttgtctgtctgtccatcatccatgtgtngactgttgagggaactcgtttcttcttttcttcacgagatgagttttt

SEQ ID NO: 404087 - DNA, 418 bp, Oryza sativa nipponbare
ccacgcgtccgcggacgcgtgggcggacgcgtgggctttgcgtttgcactcctctcgatctccattcgtgggggagttcctcgtttgctccgcctctctttcactcatgggcaagattaagatcggaatcaatgggttcggccgcatcggcaggctggtggccagggtggcgctgcagagcgaggatgtcgagctcgttgccgtcaacgatcccttcatcaccaccgagtacatgacatacatgttcaagtatgacaccgtccacggccagtggaagcatcatgaggtcaaggtcaaggactccaagaccctcatctttggcacgaaagaggttgcggtgttcggctgcaggaaccctgaggagatcccatgggctgcggctggtgctgaatacgttgttgagtctactggtgttttc

SEQ ID NO: 404088 - DNA, 268 bp, Oryza sativa nipponbare
cggacgcgtgggtgacaaggcaattgaaacttaccaggccggtttgaagcatgatccgaataacccttaactgctggagggtgtgaaaaggtgtatggaacatatcaacaatgccaacatgggtgatttcactcagcaagagattcactaacctcagatcaaggctgtgcaggatccacatattcataatattctgacagatcccatcatactacaagtgctgttcgatttgcaggagatccctagggctctatatgagcatcttaag

SEQ ID NO: 404089 - DNA, 387 bp, Oryza sativa nipponbare
ccacgcgtccaaaacaaggttaaggtcctgaaaaggggcacatcataaccacataatttgaataccagggtctgtttaagcatatgacaactttgcatcatttactataattacttgttagatgatcaccggaaagagctgcaaataactaactacttggagcgatatgcatctaactttggtgctaaaagagagcctcaaaatatattgggccataaactattggatcattaaccttgatgataaggcattttagatgccaaaacatgtaacactcaaagccctctgaatttacagtaaagtatgccaaccagctatagacctatcatacttctattaaaagtgtcatcgtctaaaacttgctacagaatttccaatttcccactc

SEQ ID NO: 404090 - DNA, 287 bp, Oryza sativa nipponbare
  unsure (1)..(287): unsure at all n locations
gtgctacgcgtccaagacgttctacgaccccgtcgggcggcgtcgcgtgctatgggggtggatcggcnagacgcggggcgagcgggctgacatactcaagggctgggcctcccttcagtcaattccgaggacagttatgctggacacgaagactggcagcgacctgctccagtggccggtggtggaggtggagaacctccgtatgcgcggcaagagcttcgacggcctcgacgtctctcccggctccgtcgtgcccgtggacgtccgcaaaacaacacaactggaca

SEQ ID NO: 404091 - DNA, 407 bp, Oryza sativa nipponbare
  unsure (1)..(407): unsure at all n locations
cgcgtgcgatttccgccgtcgtctcgcgtgcgcacgccgncgncgacatggagaggagacctcaaggtgctatcgacagatcaagaacaagccgtaccccaagtcaaggtactgccgtggtgtccctgacctcaagatcaggatctacgatgtcgggatgaagaagaagggtgtggatgagttctcccactgtgtgcatctcgtctcttgggagaaggagaatgtcaccagtgaggctctttaggctgcgcgtatcgcgtgcaacaagtacatgaccaagtctgcacgaaaggatgccttacacctcanggttcgggttcacccgttccatgtgctccgtatcaacaagatgctttcatgtgccggggcagataggctccagactggaatgaggggtgcttttggga

SEQ ID NO: 404092 - DNA, 412 bp, Oryza sativa nipponbare
  unsure (1)..(412): unsure at all n locations
cacgcgtacggtacagatccctccctcctccaagctttcccatggcgctgcagtacctggaggcacaggggcaggcgcgccccgacctcncctactcctacnccgacctcgccgacctctaccagcgcaagctctggcaccagctcaccctcaagctcgaccacttnctccaactccccgccgcccagactggcgacaccatcatacagctctacaacaatttcatctctgacttcgagacgaagatcaatcttctcaaacttgcccacttcgcggtcatcgcttcacgccagtaccctgacaaggatgccgcgattagtttcctcgagggggtaaccgcaaaactgcgcgagacgagggaacggcgcatcgatgaacccgttctctatgtcaagatgcagatagctgcaat

SEQ ID NO: 404093 - DNA, 398 bp, Oryza sativa nipponbare
  unsure (1)..(398): unsure at all n locations
cgacgcgtccgatcaaancactcctctcctatcctctactcaaatcggatcgcgagagccccaatcccacgaccgagcgatccattactgcggctcacnaccaccgcaaaacgatatagagacacagctccacctcgtcggcggctgaatgatcgcagcagcagcagccgccgtatatcangatgagaggcaaagatatcatctgtgttcaacgaccatgagaccgcccccttcttaggcttactcagcgccggctccggcctaatattctcatgcatagcggcagcataccggacggcaaaaagcggcgtcgatgtggcgtagatcggcgtgatgcacccacaactcgatataaactccatcgtacccctcgtcatagctggtgtgcttggtatcta

SEQ ID NO: 404094 - DNA, 427 bp, Oryza sativa nipponbare
  unsure (1)..(427): unsure at all n locations
ccacgcgtacgcttttttttttttttttaataacctgattggtctttaaacattaaangaggagaaggcggtctcattaaaagtagagtgctacaatctcaacacaaaacgggctcaagtactagttgacaccacgaacgacacatcaatggtaagggaaacttctagattgaattatcaacggtaattcaaacttccggatttttctttttatctttgtgcaccgatcgccatcacctgactcaaggaagatctagatcttgttgaacgcaacaatgtctcagctctggatgtactcattcgctggttcggtgtagaagtagtcctcaatcagactatcaaccgacacaagatcatcgacaatggtcatcatgatttgcaatttcttgataccgtaaccaaccgggacaagcttggatgcgcccca

SEQ ID NO: 404095 - DNA, 429 bp, Oryza sativa nipponbare
ccacgcgtccggtcaggtactggaaagactactctgtcaactgaccacaacaggctgctgatcggcggcgaggagcactgctggagtgacactggcgtgtccaacatcgagggtggttgctatgccaagtgcatagacttgtcacaggagaaagagcctgatatttggaatgccatcaagtttgggaccgtgttggagaatgtcgtctttgatgagcacacccgtgaagttgattacaccgacaaatctgtcaccgagaacacgcgcgctgcttaccctatcgagtacatccccaacgccaagataccgtgcgtcgggccacacccgaagaacgtcattctcctggcatgcgacgctttcggcgtcctccctcctgtcagcaagctaaaccttccacagaccatgtaccacttcatcaagggctacact

SEQ ID NO: 404096 - DNA, 412 bp, Oryza sativa nipponbare
ccacgcgtccggaagaatttgctgatggacagtcactctctgctattggaggcgtggagactggcagtggggctgctgagtttattctacttggcgcagatacagtacaggtatgtacgggcgtaatgatgcatggttatggccttgtaaagaagctttgtgcagagctgcaggattttatgagacaacacaacttttcctcaatagaagatttccggggggcctctctcccgtatttcaccacacacaccgatttggtacatcggcaaagggaggcgatcaaccagaggaaggctattaggaagggcctggaatcagacaaggactggaccggtgatggattcgtcaaggagacagaaagcatggtgtccaactgattcgactctgaactcacacccccttccaccatact

SEQ ID NO: 404097 - DNA, 415 bp, Oryza sativa nipponbare
  unsure (1)..(415): unsure at all n locations
cgacgcgtccgcgaagctgtctgattggtcctgatgttgctattggtcctggatgcgtcntggacgatgaggtgaggctttcccggtgcacggtgatccctngcntgcgtattaaaaagcatgcttgcatatcaaacagcattattggatggcactgggctgttggacaatgggcacggatagaaaatatgactatcctaggagaggacgtacatgtaggtgatgaggtctataccaacggcggtgttattctcccgcacaaagagatcaaatcaagcatcctgaaacctgagattgtcatgtgaaataatcctttttatgttatggtatactcaagttcttttaatgcagtatagatactttataattgtgatccttccaagatgttgacatagcatgtatgttactcacattc

SEQ ID NO: 404098 - DNA, 433 bp, Oryza sativa nipponbare
  unsure (1)..(433): unsure at all n locations
cgacgcgtacgcccacgcgtncggggattttagccgccgcctccgccgccgccgctcacccgcgccttcggcgagctccatcccggagacctcgccggatctccccgatggccgtgaccttcaccgacctccacaccgccgacgggctcaaagccctcgagcagcacctctcctgcaagacctacgtctccggaaacgcgatcagcaaggacgacatcaaggtgttcgccgccgtgccatcaaagcctggagctgagttcccgaacgctgctcgctggtatgataccgtcgctgcggccctcgcttcaaggttccctggcaaggcagttggagtgaatctgcctggaggaggtgcggcatcgtctgctgcagcggctgcgccagctgctaaggatgctgatgaagatgatgatgacctggatctttttggtga

SEQ ID NO: 404099 - DNA, 219 bp, Oryza sativa nipponbare
cagagaggtcgtcttcttctccttagttgatttcatcttcagttgcttgagcttaattacagactgagagaagatggcgtgcagctgtggatctagctgcagctgcggctcaaactgctcctgcggaaagaagtaccctgacctggaagagaagagcagcagcgcgcaggccaccgtcttgctgggtgtggcgccggagaagaaggcgcagcagtttga

SEQ ID NO: 404100 - DNA, 375 bp, Oryza sativa nipponbare
ccacgcgtacgcggacgcgtgggcggacgcgtgggctaaagttttcattggactgattgttggtgctatggtcccatactggttctgtgctatgaccatgaagagtgttggcagcgcagcgctcaagatggtggaggaagtccgtaggcagttcaactccatccctgggctcatggagggcacaaccaagcctgactacgcaacctgtgtgaagatctccactgatgcatccatcaaggagatgattcccccaggtgctcttgtcatgctcagccctctcattgttgggatcttctttggtgtcgagaccctctcaggactacttgctggtgctctcgtttctggtgttcagattgccatctctgcatcaaacac

SEQ ID NO: 404101 - DNA, 416 bp, Oryza sativa nipponbare
  unsure (1)..(416): unsure at all n locations
aattcccgaccgacccacgcgtacgatgactcntttcctcaaacaaaaagaatgagtaacactatcacttcttcacaccctgttgtgtgccattcgcacatatttctctccaaagcatacaaatcgcttgcattcaaatctaaatcatctcccatatcaattctaccaggaggagatcaatatcttctttcaacgatgtccacagtaacacatacatttctggaattcatacatccactgatccagcattctctcctaaagctatagactttgcaaccacagagctcacttctcttgccactcctggaaaagttgaccaaactcaacttgaccttgctaaagcgacacctaaatcagcaatcttgataaacctcgaatcaaaggcatcagcaactgaagacatgggacggcaaata

SEQ ID NO: 404102 - DNA, 439 bp, Oryza sativa nipponbare
  unsure (1)..(439): unsure at all n locations
cggccggattcccgntcgaccgagcgtcctataaattnatcctacnaagaacaatnnanagagatatcctaccaattcaatataaagaatggtttccattctatgacatggcataccaaggatttnccancnctnatccanatagagatgctaaggcaatccgaatcttccttggagatgggcatcaaattttattttctcantcatatacaaagaacatgggactgtatgggcaaagggcagggtgcttgagtattctgtttgaggatgagattcaagcattttctgttaagatccaatttcaacatattgcaaagccaatgtacatcaacccaccttttcatagttcactggttgtctccataatccttaatgatccagaattaaagagtttattgttgaaataattcaatgttataacttatctaatcattttaaa

SEQ ID NO: 404103 - DNA, 406 bp, Oryza sativa nipponbare
  unsure (1)..(406): unsure at all n locations
cgcacgcgtacgcggacgcgtgggcggacgcgtgggcaatcttggatgaggcagctacgacgcttaagagggacaaggatattgggatcgctaaaatggatgcaactgcnaacgatgtgccaagcgagttcgatgtgcaaggttaccccaccctgggggtggtcacccccagtggaaagatggttccctatgaaagcggcaggacagccgacgagatcgtcgacttcattaagaagaacaaggaaaccgctggtcaggcgaaggagaaggcagagtcggccccagccgagcctctcaaggatgagctctaaacaagtgagtaggagagggcatggatgcttgtggctgtagacatggaggagacgggacctgacggctaacatgtttgacagctccaacgccagat

SEQ ID NO: 404104 - DNA, 438 bp, Oryza sativa nipponbare
  unsure (1)..(438): unsure at all n locations
cgacgcgtccggggccgcggaggcagaggccctccccgcccccgcgtcgtcnacggcggcnganggagcatgggggcgcgcgtggccgtgctcgcattctgcgtcncctggatctggtcggcgtacatcacccagggcgtcctccaggaaaccctggggagcgggcggttctggccttatgctctgcggttcaaccacctcgcgttcctcaacttcgcgcagaacgtcgtctgcttcgtctggtccttcataatgatcaagctgtggtcgagtggtgggagctcctccgctggccgcgcgccgctgcggaagtactggggcgtcagcatcaccaacactgtcggcccggccatggggatcgaggcgctcaagttcatcagctacccagctgaggtcctggcaaaatcttctaagatgattccagtaatgctgatggga

SEQ ID NO: 404105 - DNA, 431 bp, Oryza sativa nipponbare
cgacgcgtccgaaggggacatcactaatgctcgaacagcagaagtggttattaggcattttgatggatggggaggagatttggttgtgctgcgatggtgctcctgatgttaccggccttcatgatatggacgagtttgttcagtcccagcttatactggcggcattgacaattgtgactcacgtacttaaagttggtgggaaatttgttgcgaagattttccgtggaaaagatacaagtctgttgtattgccagctgaaactattcttctcacaagttacctttgcaaagcccaaaagtagccggaactcaagcatcgaggcgtttgcagtttgtgagaattattcgcctcccgaaggatttaaggaaaaagatttatatcacctgctagagaaagtggggactccttctggggctgatgatttagactgc

SEQ ID NO: 404106 - DNA, 421 bp, Oryza sativa nipponbare
  unsure (1)..(421): unsure at all n locations
cgcgtccgatatccacaaaggaggcttcaccatccttagtgggtccagcatcttcactgcacatttcgaggtggctaaaagagacaagccaaactaacactacaatagcctcttctgagatacttgttagaaagagtttggcatggattacagggagcattcttcttgtctctactctcattggggtttgcttgcttatgaatatgccacttaccagggacaccctcctgtattcgaatgtgaagatcgattagatggaattaggagggagggagagagattagcacattgatggttgtaatttccattttcacacgctgcgtggcctttatgggatggttttgacctttttgtangccatatatgtttgacataaaaattgtgcttctgtgtgggtcagcccggccggaatgcaaaacct

SEQ ID NO: 404107 - DNA, 384 bp, Oryza sativa nipponbare
  unsure (1)..(384): unsure at all n locations
cgacgcgtccgaaacctaccaatgcagtaggggatactgctatgttgtgttgccattgtctcccttgggctgtngtgctgcaagggattggatctctctatataaatcacctgttgtaacgttatggaagcaatctccatgtgtaccaccagtgtgggattctttgatcgattataaagagtgcaataagaacatagttttagctccaaaaaaaaaaaaagacactccatctaaaaaaacaaataaacaacaaattaaatcgaaaaaaaaagcaaaaaaaaaacaaaaacaaaccataaaaaaaaagggggcggcccttttaaaggatcaaagtttacttacgcttgcttccaacgtaatagtttttttatagggccccctaaa

SEQ ID NO: 404108 - DNA, 437 bp, Oryza sativa nipponbare
ccacgcgtccggacatattcctaataaactcccctttatgtcccaccagacccgaaactaagacagccgcggggcctattgactgctctgtatcttacgattaagaagtcaagctcttatccatggctcgcaaaagccctcccttaggcatcctaggccattgaaaaacatcacgatcatactctgcgtcgctatctgaggactgacacacatcctcattactgaatgttggtcacggctctctgagctgagcacaacgatcacctacatacacaccctagtgctacaactctccctcagtgagcagcgatgtccatgattgatcctgatggcatcgccaatatatcttaagctgctactactcaggaacaaaggacttcattgaacagtcacagggcctcaacatattgcagcactatgtacagccccactagata

SEQ ID NO: 404109 - DNA, 434 bp, Oryza sativa nipponbare
cgcacgcgtccgcaacgaatccctcccccataccaaactccgccgccgccgccgccgcccgccgccggggaggccgacccgaccacgatgggcctatgggacgcgctctaccgcgtggtgatgcgccgcaacgcggtctacgtcaccttcgtcggggggggagccttcgccggcgagcgggctgtggactactgggtgcacaaggtctgggagatgaacaacatcgggaaaaggtgctaagatatatcagtgctggggcaaacgccggccgagtcgaacaatgaaagcccagcactcatcatcttgcttgctttacgtgaaagtagacactcttttaagctctaatgtcttgtcattttcttcggcacaataagcactgtaaaacccctatctacggttctgagagatagcactcgattgatttactcgaacat

SEQ ID NO: 404110 - DNA, 403 bp, Oryza sativa nipponbare
ccacgcgtccggggagccgtacatcctgcagacgaacgtcttctccggcgggaagggggaccgggagcgggggatctacctctggttcgaccccaccaaggactaccactcctactccgtcctctggaacctctacatgatcgcgttcttcgtggaggacacgccgatcatggtgttcaagaacagcaaggacctgggcgtgcggtacccgttcaaccagccgatgaagctctactccagcctgtggaacgccgacgactgggccacccgcggcgggcgggagaagaccgactggtcgcgggcgccgttcgtcgcctcctaccggggcttccacgtcgatggctgcgaggcgtcagctgaggcccagtactgcgccacccagggcgcccggtggtgggaccag

SEQ ID NO: 404111 - DNA, 418 bp, Oryza sativa nipponbare
  unsure (1)..(418): unsure at all n locations
cgacgcgtccgtaaatcacctccntaataaccgctcacttgaaggtctgcaggccaatgtccanangctggagagctgacatatccaagcttggcatcttcccaanacttnccctcaaggtcaaggctggtgactcgactcctgaggagcttgccacaggcggccaggtccagtgttactacatgcctatcacccaaaacaagaaacgctcggttgaggtcgtcaaggtcacggatgacatgaaggcattcaaggcctacgccaagctgcgcgtggagaggatgaaccagcgccacatcggtgcccggcagaagagggcggccgatgctgagaaggaagagaagaagtgaaaggattgcaacctgcaacgttaagaatagatgccctaagttttattaccattattgttatcaacttc

SEQ ID NO: 404112 - DNA, 425 bp, Oryza sativa nipponbare
ccacgcgtccggtcggactctgaggagcaccatttcgagtctaaggccgacgctggggcgtccaaggcgtgccccagcaggccggaaccatcctcaagaatgggtatattgttatcaagaaccgcccctgcaaggtggtggaggtttctacctgggggactggtaagcactgtcatgccaagtgtcactttgttgccatagatatattcaatggtaaaaagcttgaggatattgttccttcgtcccacaactgtgatgttccacatgtgaaccgcacagagtaccagctgattgacatatcagaggatggattcgtgagccttcttactgagagtggtaacactaaggatgatcttagactcccaactgatgacagtctcctgggtcagatcaagactggatttggtgaaggcaaggatcttgtt

SEQ ID NO: 404113 - DNA, 409 bp, Oryza sativa nipponbare
  unsure (1)..(409): unsure at all n locations
ccacgcgtccgcaataatgtgttctaccggttcatctttgagaccgagcgccacaacggtatcngcgagcggctcgagattctgggaagcatcattaatggctttgcgctgccaatgaaggaggaacacaagctgttcctctcccgtgcactcatgcgattgcacaagcccaagtccgttgcaatctaccaccagcagctctcctattgcattgttcagttcgtcgagaaggactacaaacttgcggataccgtaatcaggggacttctcaagtactggcctgtcataaattgccaaaaggaggtactgtttctcggggagcttgaggaagtacttgaggcgactcagcctgccgagttccagcggtgcatggtgccactatttaagcaaattgggcgctggcttaaca

SEQ ID NO: 404114 - DNA, 534 bp, Oryza sativa nipponbare
ccacgcgtccgatttactacaaattactttctcccaagtgataatttgcactcagtttttctcctaggggatgcaattattccaggtgagaagattcatctcctctatgctaactggcttgttcaaaacaaagtccccatgactctagtattcacagaatgtgacaaacgctataacaagaaacaccgcggcaaaagaccggaagaaaatgtagaaaacttacagagcttgatccgtgaatattttgaggcagcacccccttcgatcatgacgagcagtgtcaccaatcaaggccgatacgagatacttctgcacatgtctcagctcatgaactattggctcaagcattaagatgaaataaaaatactaatactagaactcaagcagcagcaacgcatgcaaaccctgttgctcattgatgcctcggcaattcagcacctttgcaatcaaggcctcaaccaactgacttgccttttgagctgttgattgtaaactattgcctctgtacatgattactcaatcaacagattggag

SEQ ID NO: 404115 - DNA, 366 bp, Oryza sativa nipponbare
  unsure (1)..(366): unsure at all n locations
cgacgcgtccgcagactcttgggctggaaaatagttaatttcttttcacaccacccanatagcctccacgtggggtccttcctatttgacgatgtanccatcccactcaactacaagcacatagagggtttttgtgtcaacacctacaccctaataagggggatggaaagccttaccttgtcaaattccactagaaacctacctgtgctgtcaaatgcctgttggatgatgaagctgtcactgtttgcgacacctgccacaaccatgccactaatgacttgactcattctattgcagcatggaattacccatagtggaaactttacatccagactattgatccttatcatgaggacaaatttgact

SEQ ID NO: 404116 - DNA, 442 bp, Oryza sativa nipponbare
cgcacgcgtccgcggcggcggcaagaagaccgcagcgcggtagatatggcgacggctggggccagcaggtgggaggacgagatcatggagtctgacattgagttggaaggtgaagctgttgagccagataatgaccctcctcagaagatgggagatggagctgttgaagtctcctatgagaagcgtgaccaggcgcagctgtgcaaaaacaaaggcgtcgatgcattttcagaaggtaaattggatgaagctattgagcatctgacagaggctattgtactgaatccgacttcagctatcgcctatgcaactagggctgttatttttgtgaagtcaaagaaaccaaatgcagctattcgtgatgcagatgcagcattaaagattaatccagattctgctaaaggatataaatcacgagggatggcaaaagctatgcttggga

SEQ ID NO: 404117 - DNA, 395 bp, Oryza sativa nipponbare
  unsure (1)..(395): unsure at all n locations
cgcacgcgtcctcgacgactctaagaagaccccancccgctatatatggcgacggctcaggccatcagctgtnaggactaaatcatggagtcttacatttatttnnaangttaaacttttgaaccagataatgaccctcctcacaagattggagagggcggtgttgaantcttttattaaaatcgtgaccaaacacatctgtgcaaaaacaaatgcgtcgatgcattttcagaaggtaaattggatgaagctattgaacatctgacagaggctattgtactgaatccgacttcagctatcgcctatgcaactaaggctgttatttttgtgaagtcaaagaaaccaaattcagctattccttattcagattcagcattaaagattaatccagattc

SEQ ID NO: 404118 - DNA, 412 bp, Oryza sativa nipponbare
ccacgcgtccgcccacgcgtccgcaccagtgacctgaacctccaagggttgaatacatcactgaattgggaggttcagatgacaccagtgacctgaaagttgcagggatatctccaccttcatctccaatacgagttggcatacctaaccggtcatgaggtggccaaattcttgaggcacttcacagtgatcctgcatcttctttgtctgtggagcaggagaaaagtacaaaaaatttgaaagcgcccaccagcacatcagcactagtcaaactaagcaagggtgccactggggggcctggcaaaaccgtccggactgaaaagaaagaaacaccacaagaacgacttaaaagaataatgagcaaacaacttaacaagcaaattcgaaaggacactgctgctgagatagcaaa

SEQ ID NO: 404119 - DNA, 447 bp, Oryza sativa nipponbare
ccacgcgtccgcccacgcgtccgggagcttttgatatgtgtagtggttgtcttcagggtcttcacatgggggaactctgagctggcacatccggatgaagatcgcccttgacacggccaggggattagagtaccttcatgagcactgcagtccacgcgagtgatccatagggatctgaaatcgtctaacatacttttggattcagacttcaatgctaagattgcagattttggtcttgctgtgtctagtgggagtgtcaacaaagggagtgtgaagctcgccgggaccttgggttatgtagctcctgagtacttgttggatgggaagttgactgaaaagagcgatgtatacgcgttcggagtagtgcttctagagctccttatggggaggaagcctgttgagaagatgtcaccatctcagtgccaatcaattgtgacatgggcaatg

SEQ ID NO: 404120 - DNA, 526 bp, Oryza sativa nipponbare
ccacgcgtccgggagggtgttgagcaagataaggtggagactacttttaagcctatgtcagtagatacggggttccatgatgtgaagggcaagaactaccgatgtgccatacctaagctgcacaaagaaattgttcctgagaaatgcaaggtttgagtgaagcctacaaagattattgtgacgctttacaaagcttccaaaggcaactggttagacttgcatttcaaggaggataagttcaagccaagcatggctaaggagaaggatccaatgtctggaattatggatttgatgaagaacatgtatgaggaaggtgacgaagacatgaagcgcacaatagccaaggcctggtctgatgcaaggtctgggaagaccgccgattcagtgaggggattaccttgagtttgcccgaagcgttggctctgctgagccagttcggtgtgattgaatgcacttgggtatcttattttgcatgtaacgaactggaaatcggtcacgccgggcctgttcatttgtgaagaaaaca

SEQ ID NO: 404121 - DNA, 532 bp, Oryza sativa nipponbare
  unsure (1)..(532): unsure at all n locations
cgcgtccgatcgagcaaaaattatcagtagaaagaagtgcaagcaggtcagaggatttgagtgatcagtggaccacatggtcagacaagccgttgtactaacaaaaataggcctttggtacaaacaaatgctagaaacaaggcgttctgagctccagaaggctgaagccaaggttgtcattttgggcgacaaggttaattcacatttaaaccttcttcagaagatatatgtaactcttgatcgctactcccctacattacagcaatatcctgggttgctagatgctttcttgaagacatgcaagcttgttgcaggtttgagaagtaatcagaacaaagatgatacgacagcataaaaagggcaactaggcatgctcaagagtagactcatgaggacctactgccaggagggtacaactgacacactgatatcctggctcatncgctcatgtgcataaccaattagccatgtgaagctccagttgtagatcaagtggaggattctcagactgaattatcgatatcataggatg

SEQ ID NO: 404122 - DNA, 413 bp, Oryza sativa nipponbare
  unsure (1)..(413): unsure at all n locations
gccgacgcgtccgctctcgcatcaccaattctaaccctaacgacaaccctactctctctctccaacaaggaaggattcgatggccgtgctggtggcgaggcangggcgggagctgcagcggtacacgagcgccgggggccgcatcgtggtgggttgcgtgccgtaccgggtgcgcagcggcggcgagatggaggtgctggtgatcacgtcgcagaaggggcacggcatgatgttccccaagggcgggtgggagctcgacgagtccatggacgaggccgcccgccgcgaggcgctcgaggaggccggcgtccgcggcgacaccgagacgtccctcggctgctggtactacaagagccgccgctacgacaccacctacgagggcttcatgttccctctccgcgtcaccgacgagc

SEQ ID NO: 404123 - DNA, 432 bp, Oryza sativa nipponbare
ccacgcgtccgaccacgcgtccgcccacgcgtcccgcattgacaatttctcatggggtgtggcaaacggtggatgctctattcgggtggggcgagacaccaaggcgaaaggaaaaggctactttgaagaccgtcgcccggcatcaaacatggacccgggcgtggtgacagcgctattggctgaaaccacaatactttgggagccaaccctctaagcggaagttcttgctgctaataagttggccctgaaggtatgaagaacttggacgatgaatcggcgcaaataaatcccagcaaaatgtgtttgctgcccaccagtcttgatcttgtatttcttctgtctggggattgggctgtacaaatctgcacattctagaaaaccacgccaccttccattcgccaggtaacattttggttgaacaccacacttgat

SEQ ID NO: 404124 - DNA, 422 bp, Oryza sativa nipponbare
  unsure (1)..(422): unsure at all n locations
ccacgcgtccgctgcttccgaattccgatcggagagcagctggactccggtgagggatcatggaggcggtgagagagcctcctcaagcccaagccgacgccgcancagcagcttcgcgagtggcagcgccgcctccgcaacgagggccgcaacatcgagcgccagatccgagatgtgcagagggaggagaagaaggtggagaagtccatcanggaggccgccaagcgcaacgacatcggatcggccaaggcgctggccaaggaggtggtgaggtccaggaaggcggtcaaccgcctctacgagaacaaggcccagctcaactccatctccatgcaccttggcgagatcgtagctactgccaggactgttggccatttatccaagagtactgaggtgatgaaacttgtcaataaccttatgaa

SEQ ID NO: 404125 - DNA, 412 bp, Oryza sativa nipponbare
ccacgcgtccgagaaaatcaccgtacgcgacgcgggcccaagaaaaccccgacagaaaccgcgcaggagggcaccaccaccggcgtgggagatggcgttccggctgagcaacagcctgctcgggatcctgaacgcggtgacgttcctcctgtcggtgcccgtgctgggcggcggcatctggctggcgacgcgcgccgacggcacggagtgcgagcgctacttctcggcgccggtgatcgcgttcggggtgttcctcctactcgtctacctcgcgggcctcgtcggcgcctgctgccgagtcaactgcctcctctggttctacctcgtcgccatgttcgtactcatcgtcagcctcttctgcttcaccgtcttcgccttcgtcgtcaccaacaagggcgccagcgaggccgtc

SEQ ID NO: 404126 - DNA, 508 bp, Oryza sativa nipponbare
  unsure (1)..(508): unsure at all n locations
cgacgcgtccgctggggtacttcaagaacgtggccaagcggcgggggctcttccactcctacngcgagctggtgaccaacggcttcacccgcgcctacntgcagcgccacgccggcggcggctacaaggacgagttcttcgccgacttcgccgcctgcgggggcaagatgggctgcgtcnaagtgctcaccggcagccagggcgagatcaggaagaagtgcaacgtggttaactaatcatctctcttaattatcggcatatatcatcagctgctcgccgagactgtgattatggatttcagcttttgattccggccgtgaccatcttataattaatttccatgtagatcattatcgtaagatttacctgtcccttctttttttttcttgatttcaatcacttcattaattaattgttttggttatatagcgagccatgcatgtatgtaacaaaattttttccaagtacgtcctcatcatgatcatatgaataaacttcattttttttc

SEQ ID NO: 404127 - DNA, 440 bp, Oryza sativa nipponbare
  unsure (1)..(440): unsure at all n locations
ccacgcgtccgagcgcacaaacaatgacccacatccacagccttttgctaggagaaagactgatctaggtgagcaatgactaaatgtacgggcaagcctccttcaagcacttaaacaggcgaaacctcatgtatacttggattatctgctggtggtggtggngctctcaaaggatcgatataagaaagcatataagaagacttatactctattaatactcatcaattatacgcgatgtcaaatccaacttataatgctgaatgtacacctgaacaaaccttctcaattcttggtgaaaagatcatctttgccagaggaagcccatttagtgatgcggatcttggtaatggaaagacttggccctcaaatcaacggaataacatgtatctctttcctggaatagggcttggaacccttctatctggagcacaggttatctc

SEQ ID NO: 404128 - DNA, 451 bp, Oryza sativa nipponbare
ccacgcgtccgcttacgtcgagaatatagaatggtttgccatgtgatgcgtggtgacttcagtagagagctgtttgagggatgcagggctatattgttggatagagatcgaaacccaaagtggatgcctccaaggttggaagaggtgcacgacgaggtggtcgaaaaatatttttccaaagtcgatgatccagagtgggaagatttggacctacctcctagacgttcccatggaaggaggcttgttcccaagctttgactgaatgaagcctctggtgaaaaactgaagcctttgttggtgcttcttaataacaaacagatcgtccccaatttgagggatatgtggagacaagcgatgaagtttataataaagctgaaacatataatactataggttaacaattttattagtagcaatttagagaagtccatctcataatcttatgccaagc

SEQ ID NO: 404129 - DNA, 405 bp, Oryza sativa nipponbare
cgacgcgtccgctaacataaactccctcagggtttcgaggtcgactacaagatcaaggacttcctctaaggaggttgtcccggaaccaggttcttctccaacatactacacctcactccacacgattccactgtcctgcttgatgaaccgtactgggatgtgccactatgctcttattgactcactgattgccaacatccagagctccaacaactacatcctagctcccaacaacaccctacccaccatcatcaccaagttcaagcgccagggccttaacatcgactacgtcctatccctctcatgtggccacaccattggcatgtctcggtacaccagcttccgtcagaggctctacaatcagagctgcaatggcatggctgactacacactgtatgtgtccta

SEQ ID NO: 404130 - DNA, 421 bp, Oryza sativa nipponbare
  unsure (1)..(421): unsure at all n locations
ccacgcgtccgcccacgcgtccgccgccgccgcatcatcgccgtcgaagcgtagagggagtaaggggaggatggggagaggaagaggggtganncccnccngagggcccanctctctgggctacctcttctgcggcggcgagacagctcccgcggggagggcgaagccctctttattgcggagaaggagactactcctgctccagtgaagaaagctgcggtggcggcggctgcgtcttcgtcggcatcggataagatgaatgagatccccgcggggatacaaagcacccaagccaacaactactttcgggcgcaaggccaaaattgcgggaactttctcacggatcggccgtcaaccaaagtgcacgctgcttccggcggcggctcgttgctcggctacctctttggcgggaagtgatgcg

SEQ ID NO: 404131 - DNA, 524 bp, Oryza sativa nipponbare
  unsure (1)..(524): unsure at all n locations
ccacgcgtccgctgatttcatcatcaccagtacattccaagaaattgctggaagcaaggacactgtggggcagtatgaatcacacattgcattcacccttcctgggctntaccgagttgtgcatggcatagatgtttttgatcccaagttcaacattgtctctcctggagctgacatgagtgtctacttcccgtacaccgaggctgacaagaggctcactgctttccaccctgaaattgaggagcttctctacagtgaagtcgagaacgatgaacacaagtttgtattgaaggacaagaacaagccaatcatcttctccatggctcgtcttgaccgagtgaagaacatgacaggtctggttgagatgtatggtaagaatgcacatctcanggatttggcaaaccttgtgattgtttgtggtgaccacggcaatcagtccaaagacagggaggagcangctgagttcaaaagatgtacggtctcattgaccagtacaagttgaaggggcatatccgctggatctc

SEQ ID NO: 404132 - DNA, 328 bp, Oryza sativa nipponbare
  unsure (1)..(328): unsure at all n locations
gcgtccggcaatccgtccaaaagagggggacactttgcctccagccatgaaccgacggcggcgcaggcgccaagggcgcgggcttcggcatcccccccgtcggcatgggcacggcggtgcaggggccgaggccggagcccatccggcgcgccgtgctcaaggccatcgaggccgggtaccgccacttcgacaccgcggngcactacgagaccgaggcgcccatcggcgaggccgtcgccgaggccgtgcggtccggcgccatctgctaccgcgctgacctgtttatcacgtacaagctctggtgcagcgactcgcaccgggacagggt

SEQ ID NO: 404133 - DNA, 393 bp, Oryza sativa nipponbare
cgacgcgtccgcccaagcctactgcaaatgcacattctcgatccaccatatccccataactctccattacagcggcattcttcttataaacgacaccataggacacacacctcttccaactttactgcatcttggaaacgcacagcctccaacaatagaggggcgctcttctcctcaagcattactattgcacgaatgggcaccctcaacattgctctgcgacttaccttgcaacttaactgcgtgactgaccaaatcatacctatctcaatgagaggacaaacatcttgtctctagcatacaccctgtatgctatcacatacactgtttcaccattaaagtatgctctctcggaatcttgaggaacctcgcaattacccattgtcaactgca

SEQ ID NO: 404134 - DNA, 347 bp, Oryza sativa nipponbare
ccggaaggagctgacggaggcgatcggaatggcgctgggggagaaggactgcctgtccttcagggaggtgatcgcgcacaaggacgacaccagcacagagctgctggaatggggatcgagggtttctgctgccaactccaggccaccaaatgctcagtagagacttttagtacttgttgcaagctgggctcaatcataataatgtaaacactttgcccttcagttatgttccttgtgtccattccctcgggtttctgttcttccagtttcggtagctctgtatctacttgtgaacatctgtttctccaatcaaatgctacgagggttatgagaggttttcagcttgc

SEQ ID NO: 404135 - DNA, 376 bp, Oryza sativa nipponbare
  unsure (1)..(376): unsure at all n locations
acccgtccgcgtaaatcagctcgagctcgccgccatgtcgtccagcgaggtcgcctgcacgctcgccggcgtgatcctccacgacgatggcatccccatcacctctgagaagatcgccaccctggtgaaggcggccaacatcaangtcgaggcctactggcccggtctcttcgccaagctcctcgagcaccgcagcgtcgatgacctcatcctctccgtcggatctggtggtggtgctgctccagttgctgctgctgctgcccctgctgctggcggtggtgctgctgctgccccagctgccgaggagaagaaagaggaggcgaangaggagagcgaccatgacatgggtttcagcttgttcgactaagcagtccac

SEQ ID NO: 404136 - DNA, 436 bp, Oryza sativa nipponbare
ccacgcgtccgcaagtgcactgcttcaagcatgccattgtcgggctgcatgcctatatggagttcacgggggactcaaccaagggaccgcacaactattcgatggctgatttcaacagattcatgcgtggagcttactcgctgggcagggacagtgtgaccgtgctcggtgagtaccccaagatcaagccaagggtgctcatcatcaagaggcaccgtacaagaatgtttctcaacctggatgagatcatttccatggcagaggagcttggctttgaggtggtgattgacgaggccaatgtgagctccgatatctcccggtttgcgcggctggttaactccgtcgacgtgatgatgggtgtccatggtgctgggctcacaaactgtgtgttcctgccacagcatgcgacgctcattcagatagtgccatggggggg

SEQ ID NO: 404137 - DNA, 459 bp, Oryza sativa nipponbare
ctactagccagtaagctagctaactaactacgaggctatggcccccaccgtgatggcctcctcggccacctccgtggctccattccaagggctcaagtccaccgccgggctccccgtcagccgccgctccaccaactcgggcttcggcaacgtcagcaatggcggaaggatcaagtgcatgcaggtgtggccaattgagggcatcaagaagttcgagaccctatcgtacctgccaccactcaccggggaggatcttttgaagcagatcgagtacctgcttcgatccaagtgggtgccttgcctcgagttcagcaaggttggattcgtctaccgtgagaaccacaggtctcccgggtactacgatggcaggtattggaccatgtggaagctgcccatgttcggctgcaccgatgccacccaggtgctcatggtgctcgaggaggccaagaaggcctaccc

SEQ ID NO: 404138 - DNA, 452 bp, Oryza sativa nipponbare
attctgcatgaacagaaagaaagcccaagcttacatgcataatctatcccaatcaagactttctgaacacagcaccaccccttcagccgacgatgtcgctgatccgtcgcaggaacgtgttcgaccccttctccctcgacctctgggaccccttcgacggcttccccttcggctccggcggcagcagcagcggcagcatcttgccgtccttcccgcgcggcgcctcctccgagaccgcggccttcgccggcgcgcggatcgactggaaggagacgcccgaggcgcacgtgttcaaggcggacgtgacgaggctgacgagtgaggcggtcatggcggagggggacgacggcaacatgctgcagatcagcggcgagcgcaacaaggagcaggacgacgggagaggtcccggagactacgggtacgacccttttggcctgagcatgacgaggttc

SEQ ID NO: 404139 - DNA, 461 bp, Oryza sativa nipponbare
cacccgagcgtctagtgaattgaagccagctagaactgagctgttcaggagcccactcgtctcatttctttatgaaagagggtggcgtcaaaatttcaatcgaagtggattccctggacttgacgaagagtttcaaatggctcaagattatttccaatcagttgctggtggtgtacttcttgatgtaagctgtggcagtggcttgttcacaagaaaatttgcaaaatctggatcgtactcagctgtgattgctttggacttctccgagaatatgctttgccagtgttatgaatttattcagcaagatgatactcttgtaaacacaaatcttgctcttgtaagggcagatatttcgagactcccttttgcttcatcttcaattgatgccattcatgctggagctgctatccactgctggccctccccttcgaatgcggtggctgaaataagtcgagtcctga

SEQ ID NO: 404140 - DNA, 295 bp, Oryza sativa nipponbare
agcaagctgcacagagctagcgttagcttggttagttgttcttagcattctagctagctcaatggcgaaagacattgaggcgtcggcgccggagggcggcgagttctcggcgaaggactacaccgacccgccgccggcgccgctgatcgacgtggaggagctgaccaagtggtcgctgtaccgcgcggtgatctgggagttcatcgcgacgctcctcttcctgtacatcacggtggccaccgtgatcgggtacaagcaccagtctgacgccaccgtcaacaccaccgacgccgtc

SEQ ID NO: 404141 - DNA, 444 bp, Oryza sativa nipponbare
gcaggcctccccggcgctgcaggcgtcggatctcaacgactacgtctccccctcgcaggactgcatcatctccctcaacaagggccatttacatcgcctacttacgatcaaacaaaaggaaattgcagtgagcacaaatcctccagaggaagcagtcaagatttcactgaaggactgtttggcttgcagtggttgcataacatcagcagaaacagttatgcttgagaagcaaagcttgggtgacttcattactcgcatcaactctgacaaagctgtcatagtatcggtctctccacagtcaagatcgtcgctagctgcattctttggtctttctcaatcacaggttttcagaaaactcactgcgctgttcaagtcgatgggcgtaaaggcagtttacgacacaagttccagtcgagatctgtccctaattgaagcatgcagtga

SEQ ID NO: 404142 - DNA, 441 bp, Oryza sativa nipponbare
attttgcatcaacagaaagttataatcaagttacatgcaaaatctatcccaatcaagactttctgaacacagcaccaccccttctgctgcatctcccacctccctctgaattgtgggcctgaggcgatggcggcgctcgccccgtccaagatgctcggcacccggctcaacttcgccggctcctcccgctacgccaccgcggcaccgaccaccggagcgcagaagatcgtctccctcttcagcaagaagcccgccccgaagcccaagcccgccgccgtcacctcctcgagccccgacatcggcgatgagctcgccaagtggtacggccctgacaggaggatcttcttgccggagggtctcctggaccgctcagaggtgccggactacctcaacgggaaggtccccggagactacggctacgacccttttgcctcagcaaga

SEQ ID NO: 404143 - DNA, 459 bp, Oryza sativa nipponbare
ctcgatcgccatggcctccgccctcgccgcctccaccgccgtctgctcctctcccctcgcatccgcctccgcctccgcttcgtccgcgcgccgcctgcgcgcggtcccgccctcccgcggcatccgctaccaggccctccgcgcggactccggtttcgccgggaaccgccggggtggcggccgtggagcgtcggtagtgtgcgcggtccagggccaggacacatccatccaagttccagaagtgacgaagtcaacatggcaatcacttgttatggagagcgagcttcctgtccttgttggatactgggctacatggtgtgggccttgcaaaatgattgatcccgttgttggcaagctctccaaggagtatgaagggaaactgaaatgctacaagctcaatactgacgagaatccagatatagcaagtcagtattgggtccggagcatcccaaccatgat

SEQ ID NO: 404144 - DNA, 454 bp, Oryza sativa nipponbare; identical to SEQ ID NO: 391202

SEQ ID NO: 404145 - DNA, 440 bp, Oryza sativa nipponbare
  unsure (1)..(440): unsure at all n locations
cccactcgtccggaacaactgacatacctgagtggtgttttgtggagatttatgggaaagaagggaaaaactgcttctcagagtatccttcatttgatgatctttgtcaatttcaccagaaatcaccaatatcacatatatcaaagtttaagaaaatctgcaggtgagcacgccaacactttttctccttggagcacaagatctcagagttcctgtttctaatggcttacagtatgcaaggaccttgaaggagatgggagttgaaaccaaaattattgtctttccagaagatatgcatggccttgacaagccacagtctgattttgaaagcttcctcaatataggtgtttggttcaagaagcacatgagcaaataaacaacatgcctctgttaccacactctcaccttgctntaataaatgcttgtaattgggtcaaagc

SEQ ID NO: 404146 - DNA, 454 bp, Oryza sativa nipponbare
gcagcagtaactgggtatttctactctattgcttgcgcatccacgacaaaaggtgttgatgatagcttacaggatatccttcgtctcttgactctttggtttaatcatggggctacctcagaggttcaaatggcactgcagaaaggcttttcacttgtcaatatagaaatgtggttggttgtccttccccagataattgcaaggatccattcaaataataaaatagtgagagaactgatacagtcattgctggttcgaattggaaaggatcatccacaggcattgatgtatcctctgttggttgcttgcaaatcaataagcatattaagacaacgagcggcgcaagaagtcgtcgataagatccgccaacatagtggaagtcttgttgatcaggcacaacttgtttcaaaggaactgatacgagttgccattctgtggcatgagatgtggcatg

SEQ ID NO: 404147 - DNA, 445 bp, Oryza sativa nipponbare
  unsure (1)..(445): unsure at all n locations
cggacgcgtgggcggacgcgtggggtcgcactcactcactcgcatcctctcctctcaaatactcctccaccttatcatcatcaccaccactaacaacaacgccactgcctgaaccaagaacactgccctcctccacacgacatggcttctcaagaagagaagacgagcgtcaagtcggaggaggcctcgtcggcggcggaggagcagccacctcaagctgcagctccgccgccgcgcaggggtgtgccgccggccaaccccttcgacttctcaaccatgatgaacttgctcaatgatccgagcataaaggagatggcggagcagatcgccaaggancccgcgttcacggagatggcggagcagctgcagaagacggtgcagtcgccgccggcgcggggggcggcgcaggaggctgcggcggcggcggcgccggcgctggacccga

SEQ ID NO: 404148 - DNA, 390 bp, Oryza sativa nipponbare
  unsure (1)..(390): unsure at all n locations
cccacgcgtccgcgcgtgactccgttcgtggtgctgtcgtgcatcgtcgccggcagcggtggcatcctcttcggctacgacctcggcatctcaggtggggtaacgtcgatggagccgttcctgaagaagttcttcccggacgtgtaccatcagatgaagggggacaagaagaaggtgagcaactactgccgctttgacagcgagctcctcaccgtcttcacctcctccctctacatcgccggcctcgtcgccactctcgtcgcctcctccgtcaccaggcgcttcggcncgcgtgcctccatactcatcggcggctccgtcttcgtcgccggctccgtcttcggcggcgccgctgtcaacatctacatgctcatcctcaacaggggtcct

SEQ ID NO: 404149 - DNA, 449 bp, Oryza sativa nipponbare
cacaatatcaatgctcgttcacttcgaactgcaaaggatatgtttccagatcattcatttgatgatcttttgaagattgtgataatgaatgaccatctagcttgtgatccagaagatggtggttgtggaaaaccaaaccatattcatcacattctttctagcccccctcatgtttttacagttgttttggggtggcagaacaacaaagaaagtgtggatgacatatctggaactttggctggtatttcaactgagatagacatcagtactttctaccgtggtctagaccaaggaagcaaacattctctggtgtcagtggtatgcctatgaggactcattttgttctttcacataatcacatttttgaatggataaaaaggcatgccatttttctagggcatttcatgtttgtataagaactttcaaaattgacagtttgctaaatgaat

SEQ ID NO: 404150 - DNA, 457 bp, Oryza sativa nipponbare
cccacgcgtccgatcgacggcgccccgagaatgggcccgacgttcggagccatgatgatctccggccagaaggcggcgcacctggcgctgaaggcgctcggccggccgaacgccatcgacggcacgatcaagaaggcggcggcggcggcggcgcacccggagctgatcctggcgtcgaaggacgacggcgagatcgtggacgcctgagcgaatagaacagggtaaaaaaaaatccgcaagacgtggtggtgacacggaggagttggggacgagaagaagatgtggactttcccctgtgttttttttttcgggatttgcattgatccccttgtttgttttagctctggatgttgattagcgtcttgttcatagcacttccactgccaccgtgtgtgtgtgctctgcttgcctgatgagggcaagaaaacttccatggatccgtctctctgggaggaat

SEQ ID NO: 404151 - DNA, 464 bp, Oryza sativa nipponbare
cccacgcgtctgccaggacgcccacgcctacttcttctgcgtcgaggaccgcgccctcctctgccgcgcctgcgacgtcgccgtccacaccgccaacgccctcgtctccgcccaccgccgcttcctcctcaccggcgtccacgtcggccttgacgccgccgccgacgacgacgacaaacaccccccacaccccttgtcgtcgtcgctgccgcgcaacacggcaccgcccccgcagccgccgccgaagcgcagcccctcgccgatctacagcgatgacgacgtcatcgactgggccaccggtggccacgacatcggcatcaccggcaacctgcccgactggtcgctcgtcgacgagcagttcaacacccctgcgctgccgccggtggtgaccaagaccccgccgaagcgggcctcccgtggccccgtcacggccggcaccgccgcggcggtgttcggcaacctcg

SEQ ID NO: 404152 - DNA, 460 bp, Oryza sativa nipponbare
cccacgcgttggcggacgcgtgggccgcatctcatccctcctctcgcttagttcagatcgaaatcgcaaatggcgaagattaagatcgggatcaatgggttcgggaggatcgggaggctcgtggccagggtggccctgcagagcgacgacgtcgagctcgtcgccgtcaacgaccccttcatcaccaccgactacatgacatacatgttcaagtatgacactgtgcacggccagtggaagcatcatgaggttaaggtgaaggactccaagacctttctcttcggtgagaaggaggtcaccgtgttcggctgcaggaaccctgaggagatcccatggggtgagactggcgctgagtttgttgtggagtccactggtgttttcactgacaaggacaaggccgctgctcatcctgagggtggtgctaagaaagtcgtcatctctgctcccagcaaggatgccc

SEQ ID NO: 404153 - DNA, 312 bp, Oryza sativa nipponbare
aagctacctatcttaattacctagctactcgatcgatcatcagtctagatatggcggctttgaacggtaaggtggtggtggcggtgatggtggtggcgatggtggtggcggcgccgggggcgtcggcggcgatcacgtgcgggcaggtggggtcggcgatcgcgccgtgcatctcgtacgtgacgtggaggggcggcctcacccagggatgctgcaacggcgtcaaggggctgaacaacgccgtccgcaccaccgccgaccgctaggccgtctgtctgtgcctcaagacccttgttgttgccatcaagtctt

SEQ ID NO: 404154 - DNA, 460 bp, Oryza sativa nipponbare
cccacgcgtccggtgactacacccgcttcgcttcctcccctctctaagccggggaagctaagccatggcgtccgtcaccgcccgcaccccggtcgcagccctccgctcgtcggcgtcgctcaagtctaccttcctagggcaatcctccacccgcctcgcccgcgcaccgactacgaggcgtaatgttcgggcggaggccaagggagagtggctccccggcctcccttctcccacctacctcaacggcagcttgccaggcgataacgggttcgacccgttgggtctggcggaggacccggagaacctgcggtggttcgtgcaggcggagctggtgaacgggcggtgggcgatgctgggggtggccgggatgctgctgcctgaggtgctgacgaagatcgggttgatcgacgcgccgcagtggtacgacgccggcaaggccacctacttcgcgtcgtcgtcg

SEQ ID NO: 404155 - DNA, 458 bp, Oryza sativa nipponbare
aaagggtctggagcagatttgggtggttttgatggagaagctgatgatgacgatggtgttgaactagagaaaagcaatgttctattaatggggcctactggctcaggtaaaactctacttgctaagacattagctcgctttgtgaatgtgccatttgtaattgctgatgcaacaacattgacacaggcagggtatgtaggagaagatgtagaatctatactatacaagttactggcggtggcagattttaacgtgcaagcagcacaacaagggatggtgtacatcgatgaagttgataagatcacaaagaaggctgagagccttaacattagtagagatgtctccggtgaaggtgtccagcaggctttgttgaaaatgctggaaggcacaattgtcaatgtccctgagaaaggagcaaggaagcatcctcgcggtgataatatacagatagatacaaa

SEQ ID NO: 404156 - DNA, 345 bp, Oryza sativa nipponbare
ggtggaggatctttaggacatccttggggtaatgcacctggtgcagcagctaatagggtggctttagaagcctgtgtacaagctcgtaacgaagggcgcgatcttgctcgtgaaggtaatgaaattatccgatcagcttgcaaatggagtcctgaactagccgcagcttgtgaaatatggaaagcgatcaaatgcgagttcgagccggtagataaactagatagctagactaagtggataaaatgagatagaaaaaaggtcttgataaaaaaaattaaaaaaaaataataagatgtgtttaataaataaaaaaaaatgataactaataaatatgataaataaaaa

SEQ ID NO: 404157 - DNA, 458 bp, Oryza sativa nipponbare
gcaaagaaatggcctgtgtcaaggagagggtagtagcaccttgctctcctttgccttcagagaaaccggaagcaatggcgtctgctactctcctcaagtcatctttccttcccaagaagtctgaatggggtgccacccgccaggctgccgcccccaagccggtgactgtctccatggttgtccgcgctggtgctctacgacgatgagcttgtcaagaccgcgaaaaccattgcatcaccaggaaggggtatccttgccatggatgagtcgaacgcgacctgcggtaagaggcttgcgtcaattggccttgagaacaccgaggccaaccgccaggcttaccggaccctccttgtcaccgcaccgggcttgggacagtacatctccggtgctatcctcttcgaggagactctgtaccagtcaactgtagatggaaagaagatgtcgacatcctcactgag

SEQ ID NO: 404158 - DNA, 457 bp, Oryza sativa nipponbare
ctagccctcgcgccgccgccgccgccgctcccccgcgcactcgccgctcgccgcccgcgagctcgcgccgcttcgcaaccatgaagttcaacatcgcgaacccgaccaccgggtgccagaagaagctcgagatcgatgacgaccagaagcttagactggattcattggattgcgtgcctctgcacagaccaactgtggaatggtgatcgttcctgtgtgaatcaggcgtgcattttttgacaagaggatctctcaggaggtcagtggcgatgctctgggcgaggaattcaagggctatgtcttcaagatcatggggggttgtgacaagcagggtttccctatgaagcagggagtgctcactgctggacgtgtccgccttcttcttcacaggggtaaaaaggctctatttctattattgactttcggatattcatgcccttgctctgaccatattatg

SEQ ID NO: 404159 - DNA, 458 bp, Oryza sativa nipponbare
ccgatgtccgaggcaatcctcctcgaattccccgtgccccgatctccccctgacgccaccctcctcctccgccccggatcgccccgcccgatctcgccgcggggtcgaatttccccttctcttgtctccgatcagggccgcctcgatcgaaggcggcgccgcgccgaccatcccaccttgtttggttgtaatttcttcttgtcgcgtgaggaggggggcgtggcggcgggggagagcgcgtgagcgggcgggagatgggggcgccgaagcagaggtggacggcggaggaggaggccgcgctcaaggccggcgtggcgaagcacgggacggggaagtggaggaccatcctccgcgacccggaattcaccgcgctcctgcggctgagatccaatgttgacctcaaggataagtggcgcaacttgagtgtcactgctggaggatatgggtcaagagagagg

SEQ ID NO: 404160 - DNA, 455 bp, Oryza sativa nipponbare
ggcatgagcgcgagggcaaagcgaaggtatagcatctagtaggcgatggcgagctccggtttctcatggacgctgcccgaccaccccaagctccccaaggggaagacggtagccctcgtcgtgcttgacggatggggcgaggccaacgccgacaagtacaactgcatccatgtcgcccagacgcccgtcatggattcgctcaagaatggtgctcccgagaggtggagattagtgaaggcttatggaacagctgttggtcttcctagcgaagatgacatgggcaacagcgaagtgggtcacaatgctcttggtgctggtcgcattttagctcagggtgctaagcttgtggaccttgctcttgcctctgggaaaatttatgatggagaggggttcaattacatcaaagaatgttttgacaagggtacccagcaccttattggtttgttgagtgatgg

SEQ ID NO: 404161 - DNA, 403 bp, Oryza sativa nipponbare
cccaagcgtccgcagaaactaccatcaataacaggactcctgcacttcatacatggccactgccagctctataaacaagaggtttagcctcgccggtgccacggcgcttgtcaccggtggcagcaaaggcatcggccgcgccatcgtggaagagctggcgagcttcggcgcgacggtgcacacctgcgctcggaaccaggcggagctgagcagatgccaggaggagtggacggccaagggcctcgccgtcaccgtctccgtctgcgacgtggcggtgcgcgccgacagggaggcgctcgccggcagggtgtccgccatgttcgacggcaggctcagcatcctggtgaacaacgctgggacggcgtacctgaagccggcggcggacctgacgccggaggagacg

SEQ ID NO: 404162 - DNA, 453 bp, Oryza sativa nipponbare
gcgctcccttgacctccgcctccctccccaatccgtcccatctcctcgcccgccgccctcgcctgccatcctgccagcagaggtggcgccgccgttctcctgctcccgctgcattcgctcaccggtgagcatcctaatccatcccatccggcctcggcctcgtcctcgaatttcgtctcctcgcccggcgtcctcctgcatccaccgcatcatcgctcgccgttggggatcccactgacttgctgattgcaactgtcagtgtggtgattggactgcatcagttgtgggaattgaactggtcaagtctcagactaagtacaatgcaaggcatttttgcatgtggttcaatttcctcggcccatggatcatgctttagaccagcttgtcttgcagtggatgatctgaggctgttttacaaaataaattcagtaacctgtggagcgtactcgtggc

SEQ ID NO: 404163 - DNA, 454 bp, Oryza sativa nipponbare
gccacgtctctcacgtctcacagctcactggatcaatggccgcggccaccatggcgctctcctccccggtgatggcccgcgcggcgccgtcgacctcctccgcgctcttcggcgaggcgcggatcaccatgcgcaagaccgccgcgaagcccaagccggcggcgtcgtcggggagcccgtggtacggcgccgaccgcgtcctctacctcggcccgctctccggcgagccgccgagctacctcaccggcgagttcccgggcgactacgggtgggacaccgcggggctctccgccgacccggagacgttcgccaagaaccgggagctggaggtgatccactcccggtgggcgatgctgggcgcgctcggctgcgtcttcccggagctcctcgcccggaacggcgtcaagttcggcgaggccgtgtggttcatggcgggctcgcagatcttcagcga

SEQ ID NO: 404164 - DNA, 460 bp, Oryza sativa nipponbare
cccacgcgttggcctcactccctcctctctcctctcctcccccccacggcggcggcggcggcggcggcggcaggatggcggattcgacggcgaggacggtgaaggacgtgaaccctcatgagttcgtcaaggcctactccgcccacctcaagcgctccggcaagatggagctccctgagtgggttgacatcgtgaagactgcgaggttcaaggagctccctccttatgatccggactggtactacacgagggctgcctcgattgcaaggaagatctacctgaggcagggtattggtgtaggtggcttccagaagatctatggtggccgccagaggaatggctcacgtcccccgcacttctgcaagagcagcggcgctatctcacgcaacatccttcagcagctgcagaagatgggcatcatcgatgtcgaccccaagggcggaagactcatcacctccca

SEQ ID NO: 404165 - DNA, 457 bp, Oryza sativa nipponbare
gaaattatcatccctgtggagctcattaagaagggtgacaaggtgggctcctccgagtctgctctgcttgccaagcttggtatccgccccttctcatatgggctggttattaccaatgtctatgacagtgggtcagtcttcagccctgaggtgcttgacctcactgaggatgacctgatggagaagtttgcttctggtgtttctatggttgcctcagtctccctggcaatctcgtacccaactattgctgctgcaccacacatgttcctcaatggttacaagaatgtgcttgctgttgctgtggagaccgaatactcgtacccacatgctgataagatcaaggagtatttgaaagaccccagcaagttcgctgttgctgccccagttgccgccgacagtggtgctgctgctccatcggctgccaaggaggaagagaagaaggaagagcccgaggagg

SEQ ID NO: 404166 - DNA, 448 bp, Oryza sativa nipponbare
tgatggtaagaacaagctggtcacagttgatgcatctgagtacattttcaagctggcccttctacgcaaacggtatgatcatgtgatgagtatgatcaagaattcccagctgtgtgggcaagctgtgatttcttatttacaacagaaaggctttccagaagttgccctccactttgtgaaagatgagaagacaagatttaaccttgctcttgagagtggtaacatccaaatcgcagttgcttctgcaaaagagattgatgacaaggatcactggtacaggttgggaattgaggccctgaggcagggaaatgttggtattgtggaatatgcataccaacgtacgaagaattttgagaggcttgctttcctatatcttattactggttacatggacaaggtggggttcatgtgcaaaattgctggacagaacaataacctgatgggtcaa

SEQ ID NO: 404167 - DNA, 401 bp, Oryza sativa nipponbare
cccatgcgtgcgcccacgcgtgcgcttttcctagttatattgcattcaccgactattgaactgataatgaatccaatggccccaacactaccaccgccggcacccatggcggcggggccgacagcaccggaggtggaggttgaacaccacttatcgagtgctggattacccaaatggactagctcccagttaaggagtcaagatatccacagtaacggccctgttattgacgagacaatctttgccgatcctgacgtaatgggcacctattgtgatctcacgtacactaacttgattagtgactgctttgtggatagacagccaaaagtatacgagacgtatgctactaggcccacctgaaaccaggactaccgaggggcctgattgcagtctagcgataa

SEQ ID NO: 404168 - DNA, 453 bp, Oryza sativa nipponbare
cccaagcgtccgccaccacccgccgctcgccgctcgcccaccatggccatggcgacggcgctccgcaagctctcctccgacgccctccgccgccagccgctctcccgcatcaccccgctctactacatggcgtccctgccggcgacggaggagagatccggagtcacctggccgaagcagctgaacgcgccgctggaggaggtggatcccgagatcgccgacatcatcgagcacgagaaggcccgccaatggaagggtctggagctcatcccgtcggagaacttcacctcggtgacagtgatgcaggcggtgggatccgtcatgaccaacaagtacagcgaggggtaccccggcgcgagatactacggtggaaacgaatacattgatatggccgagtcattgtgccagaaacgtgctttggaggccttcctgttggacccagcgaaatgggga

SEQ ID NO: 404169 - DNA, 264 bp, Oryza sativa nipponbare
gcttgtagagagacaacaatggcggctcaggctcttctctctgggaggcagctgctggggaggccattgcaatcttcagtctccaggtcttcttcctccaggaaggcacccttcatggtcagggcagaggccactccccctgccaagcaaggtgctgacaggcagctgtggttcgcatccaagcagtccctgagctacctggatggcacgcttccgggagacttcgggttcgccccgctggggctatcggacccggaggggacc

SEQ ID NO: 404170 - DNA, 458 bp, Oryza sativa nipponbare
cggacgcgtgggctcaagatgatcggagatcttgtcaagcagctccacggtgcgcagctgatgcagcagccggagacgaggaacccggtggagcagctggaggagacgctccggcgagcgtacctgctcgtccggtcatgccagggccggagctacgtgtaccgctgcttcatgggaggccggcacgccgacgagctcagggaagtgcagagtgagatcgccttctacctccagctcttccctctcgtcagctatgtcgatgctacactcaactgggtgagacatctgaataaagccgatccatcctgcaaagaggcacctttggtaagaccatattttgtgccatttgtgattctctcatgggatggatcgtgcttagcagttgttcagaaagtacaccttggtatagtgtacacatggttatatatctcttaccttaatatctactcaactatctg

SEQ ID NO: 404171 - DNA, 462 bp, Oryza sativa nipponbare
cccacgcgtttggggctccctcctcttgaaccatatgctcgcttgtttcatagatactatgcaattgctactccaagtgctacccaaaggttgctttttggtcttctcgaggcaccaccatcatgggccccagatgcacttgatgcagcagtacagcttgttgaactccttagagcagcggaagattacgattctggcatgcggcttccaaagaactggatgcatcttcatttcctgcgtgctattggaactgcaatgtcaatgagagctggtatcgctgctgatacgtctgctgctttacttttccgaatactagtcccaaccgacattactttttcctccactgagacatgccgaaggagttgaactccatcatgagccactaggtggctatgtatcatcgtacaaaaggcagctggaagttcctgcatctgaagccactattgatgccactgcgcaagg

SEQ ID NO: 404172 - DNA, 461 bp, Oryza sativa nipponbare
cccacgcgtccgcccacgcgtccgcccacgcgttcgtgcagaagtagagggtgttctaacacaaagcggaacttctcccgattacaaggttggcaacagaataacagacatcagccaaaaaatggttgaagaactaaaggagtctgtgaaagaagagcaggctgagaaaaaggaggaggcagccaaggagaagccagatgaaccacaagagatcgtactgaaagtcgacatgcactgcgaaggatgtgcaaagaaggtcgagaaatccctcttgagatttgaaggagtcgaaaacgttaaggctgacagtcgatcgaagacggttgtggtgaaaagcagggccgcagatccctcaaaggtctgcgagagggttcagaggaagacaaagagaagagttgagctgattttccctcttactccacctccagaagaggagaagaaagaggaggctccagcaccac

SEQ ID NO: 404173 - DNA, 463 bp, Oryza sativa nipponbare
cccacgcgtaggccctaaaccaagcaggcacaacatccgcgctagcccttcggccgtatctgatgcgatgagcccacgagcctagacggactccgttcgcgcctatctctccacaggagcgccgtccccgccgtcgcggtcggcggcggaggcggccgacagccggtcgccgaatcgctgtttccggcgcggcgccaatgggcacctgtactgcgagggggtgagggtggaggacgcgatgggggcggcggagcggacccccttctacctctacagcatagctcaggtggtgcggaacttgaccgcctaccgcgacgccctagaggggctccgctcaatcgttgggtacgccgtcaaggccaacaacaatctccgcgtgctgcagctcctgcgggagctcggctgcggcgccgtcctcgtaagcgggaacgagacttgccttgccctccgggcaggattcgat

SEQ ID NO: 404174 - DNA, 287 bp, Oryza sativa nipponbare
catgaaagattggttgggattgccagtgagctgttcagtacagtatgcgtcgatctatgcgactatacaccaacggtatctcgactgtaaaatttgctacagaagcagagttcagtgcctggcaaaatcattatgatgtaacaaggccgaagagcgtgcgaaaaatagagttggaacagctcacgacggccagttcctgtaccagccggcccacgccgagacgagcccactgatcctgaacgtgacagcgtggttgctgaacgggttgggctcgatggccacgacgc

SEQ ID NO: 404175 - DNA, 394 bp, Oryza sativa nipponbare
cccacgcgtatggccacgcgtccgcccacgcgttcgaacgtaaaacaaacctgtgacaaacagcagggatacacaagaggtcaagtttccacaaggttcagagatgctgaacattttcaagaacttttcatgtaaaacgtcaatattggatgactttgacttctatgaaaataggcagaaagtaatgcaggacagaagaggcaagccacttgctacaacattggatcaccccatgtttaaaagtgaaaaacctgaagaaactaagagggcaagtcaatttgtaagtacagtggatcttgatacagccaaaccagatgaagtggtgtttgacaagattgcaacagaactcgatacagccaagctaagtgaggagcagatcaacaaagttgaagtg

SEQ ID NO: 404176 - DNA, 461 bp, Oryza sativa nipponbare
cccactggtccgctcagctctcacagctcactgcatcaatggccgcggccaccatggcgctctcctccccggtgatggcccgcgcggcgccgtcgacctcctccgcgctcttcggcgaggcgcggatcaccatgcgcaagaccgccgcgaagcccaagccggcggcgtcgtcggggagcccgtggtacggcgccgaccgcgtcctctacctcggcccgctctccggcgagccgccgagctacctcaccggcgagttcccgggcgactacgggtgggacaccgcggggctctccgccgacccggagacgttcgccaagaaccgggagctggaggtgatccactcccggtgggcgatgctgggcgcgctcggctgcgtcttcccggagctcctcgcccggaacggcgtcaagttcggcgaggccgtgtggttcaaggcgggctcgcagatcttcagcgagggc

SEQ ID NO: 404177 - DNA, 459 bp, Oryza sativa nipponbare
cgtagctcaatggagagagatcatggacgaatccgagggggagaagccacagaaacgatgacctggctgtcgtcctccgccgccgcggcgcgcgccaccttcgtcatgccgtcgtcggttcgtgggggcatgagccgcggcaggaggatggcgaggctggtgacgcgcgcggcggcgtcgagcccgaagctcccgagcgggcggcggctgcgggtggcggtggtcggaggcggacccgcgggcggcgcggcggcggaggcgctggccaagggcggcgtggagacggtgctcatcgaacggaagctggacaactgcaagccctgcggcggggccatcccgctgtgcatggtgtcggagttcgacctgccgctggacctcgtcgacaggaaggtgaggaagatgaagatgatttcgccgtccaacgtcgcctgcgacatcggcggcacgctcgcgccgtac

SEQ ID NO: 404178 - DNA, 456 bp, Oryza sativa nipponbare
cggaccccctgtcgtgcgctaaactctagccagatctcgctcgctcgccgctcgccgccgccgccgcgttccaccgagcggagagtagagggaatggcgtccgagggcgtgctcctggggatgggcaaccccctcctcgacatctccgccgtcgtcgacgacgccttcctcaccaagtatgacgtcaagctgaacaatgcaattctcgctgaggaaaagcacttgcctatgtatgatgagttggccagcaagggcaatgttgaatatattgccggaagagccacccagaactctatcagggttgctcaatggatgcttcaaactcctggtgcaacaagttacatgggttgcattggaaaggataagtttggtgaggagatgaagaagaatgcccaagctgctggtgttactgctcattactacgaggatgggggtgctcccacgggcacatgtgct

SEQ ID NO: 404179 - DNA, 449 bp, Oryza sativa nipponbare
cccttgcgtccgcaaggaactcttttgatgctgtaattataactgaagagtcatggatctgctcagcgtcctcctaattatagcatctctgctcccattttcagcatctgaccgtcaaggtgatgcactatatgatatgaagctgaagctgaatgctactggtaaccagctttctgactggaaccaaaatcaagttaacccatgcacttggaattctgttatttgtgacaacaactacaatgttgtgcaagtaacattggcatctatgggattcactggagttctatcaccacgaattggagagcttcagtttttgaatgttttgtccttgcctggtaataagattactggtggcatacctgagcagatcggcaacctatctagtttgacaagtttggatttggaagacaatttgttggttggaccaataccggcttctcttggccagc

SEQ ID NO: 404180 - DNA, 423 bp, Oryza sativa nipponbare
gtcctgtcttagcagtttcactggctctgctcctggtgaggtgccaaagaaaatggaatcttctgatgtggtgctggtcactggagctaccggtggcgttggacgaagagtggttgatatcctgcggaataagggaatacccgttcgagtattggctagaaatgaagagaaggcgaggagcatgctggggcccgatgtagacttgatcataggagatgtcacaaaggaaaattcacttgatcccaagtacttcaaagggattaagaaagtggtaaatgcagtgtcagttatagtggggccaaaggaaggcgatacaccagacaggcagaagtataaacagggcataaagttttttgaacctgatatcaagggaccttcacctgaaatggtagaataccttggaatgcaaaacttgattaatgc

SEQ ID NO: 404181 - DNA, 461 bp, Oryza sativa nipponbare
  unsure (1)..(461): unsure at all n locations
cccacccgttgggtctgatcccagaagcccagtggcaggcgcttagcattttgcatacgattcgtcagatcgagatctactttangagggaagtggatgaagtgaaagagttgatcgagactgggagggagtatgtgactggcctgaggatggaactcaagaggacggagtcgagagatgatgtcgaccgcatacaagaatctggctgcttatatcactaactgtacgctccagacagcacatatgatgcttgtgcttgtaagcgctatggctgttggctacatggatacgatcttgcgatgctgcacagcactgtgcacggatgctcatcgaggacaaccctaatgaggcccacgcgaggaaggctcgacaggagcagcaacgatgctatgtcgagaatgatagctcagagctgaactattactacagaaatccatttgttgaatgtggcgccacatatg

SEQ ID NO: 404182 - DNA, 460 bp, Oryza sativa nipponbare
cccacgcgttcgcccacgcgtccgctcagctgtactcgcagatgatatactttccccttcagctggtcgggaacatatttctctggatgctcctagggggaggtacaatacaactaatttgcctgtttctggtcttggttcaagcagaggctctcagttcatggcaagctcattcaatggcaatcatgacatagtctcaaacaacaccctgcaaaatatagctggagttcaaacaggacctgcttggcttgaagctgatactgcagcaaacatgtttttggaatcaaaggatgaagctcatgattttgcaagcctacggcatgcgcttctggaacaggataggcaggttcttttaactggtgccaatcctttagcaaaggaactaaacatcaaggagctttacaatttgcaaagcagactagctcaggaaaaggctagagatgtatatcgccaaagattt

SEQ ID NO: 404183 - DNA, 458 bp, Oryza sativa nipponbare
cccacgcgttcgcccacgcgtccgacgccatgctcaagcagcagctcgccgtggccgcccagttcgaggattacaaggaggcggcgaggctgagggattcgctcaagtcattcgaggaggaggagccagttcttcgtctccgccgatcgctcaagaaggcggttgaggaggagaggttcgaggatgctgctaagtacagagatgaactgaagattttggctccacacgccctcctaaaatgttctagtgatgctactaccctggggattagagttcaagtcaggagtgtttatattgaaagccggagccagcctttgaagggccagttcttctttgcctacagaatcagaatcacaaataattctcagcgccctgttcagcttctcagaagacattggattgtcactgatgcaaatggaaggacggagaacatttggggtgtaggtgtttgtggagag

SEQ ID NO: 404184 - DNA, 377 bp, Oryza sativa nipponbare
gaagtgaacatggtacatggattaccgacaacgaaggtagacgctatcgcgtacctccgaacttccctgtccgtttccatccctcggatgccattgagtttggttcagataaaaaggccgtgttccgtgtgaaggtgctgagcacgctcccatatgaatctgcaagaggagggccgcaaatcctgcaagcagcatgaacgagagacttcagtcagccatggctgctgtcatcactcatcagctactgtacagcatccagtaaaacacagtgaattttgcactaaaatgcatgttccacttccagacaggattttgaatagctttctctgacggattgaaattgcagttctccatacagaaactgaggtgtacaatat

SEQ ID NO: 404185 - DNA, 462 bp, Oryza sativa nipponbare
gtgactacatgcgcttcgcttcctcccctctctaagccggggaagctaagccatggcgtccgtcaccgcccgcaccccggtcgcagccctccgctcgtcggcgtcgctcaagtctaccttcctagggcaatcctccacccgcctcgcccgcgcaccgactacgaggcgtaatgttcgggcggaggccaagggagagtggctccccggcctcccttctcccacctacctcaacggcagcttgccaggcgataacgggttcgacccgttgggtctggcggaggacccggagaacctgcggtggttcgtgcaggcggagctggtgaacgggcggtgggcgatgctgggggtggccgggatgctgctgcctgaggtgctgacgaagatcgggttgatcgacgcgccgcagtggtacgacgccggcaaggccacctacttcgcgtcgtcgtcgacgctgttcgtcat

SEQ ID NO: 404186 - DNA, 463 bp, Oryza sativa nipponbare
aagatcgcaagaagcaaacaagaacacaacaaatcgatcgatcagtcaacctcactcattctcatggcggcggagcagagacagcagcagcagatgatgcaggaggggttcgaggactacctgccggtgatggcggagaggctgggggaggaagggctgatgcaggagctcgcaagcgggttccgcctgctcatggacccggcctccgggctcatcaccttcgacagcctccgccgcaacgcgccgctgctcggcctcggcgggatgtccgacgacgacctccgggggatgctcgccgagggcgacttcgacggcgacggcgccctcagcgagatggagttctgcgtcctcatggtcaggctcagccccgacctcatggacgagcctcgccggtggctcgacgacgccgtcgcccaggcctcacagttcctctttcattagaaagttcgacatggataggatt

SEQ ID NO: 404187 - DNA, 456 bp, Oryza sativa nipponbare
gcggtccgctgcttaccagggcataattgcggttgttggtactgttcttattgctcttcttggaatgcaagtgatcattcacaggcgaagtctcaaaagacagcgtcttattatacagagggacgagtattttcaacaacatggaggccatcttctgtctgatatgatgaaaatcgactgcaaccttgaatttacgttgtacagacaggaagacattgaggtagcaacaaatgactttgacaagaatcaaatcattggagaaggaggacaagggacagtttacaagggatttatagaaagcattcctgttgcaataaaaagatgcaaagggatggatgaaagcaggagaatggaatttggacaggagctacttatactatgtcgcgtcaaccacgatcatgtagttaagcttcttggttgctgcctattgtttgaagtccctattctggtttatga

SEQ ID NO: 404188 - DNA, 456 bp, Oryza sativa nipponbare
cccacgcgttgggcccacatcacacgcagaaatccgcatcaacagccagccatggcgtccacgctgaccaacgtcggcctgtctaccccggcggcggcggcgtcgtccctcgttaggccggtcgccggagctggacgcgtggtgtttccccgtgttggccgcggcgggttcgcggcggtgagggcgagcgggccggcgacgccgccggacatctcggacaagatgtcggagagcatcgacaaggcgaaggaggcgtgcgcggaggacacggcgagcggcgagtgcgcggcggcgtgggacgaggtggaggagccgagcgcggcggcgagccacgcgcgcgacatgctcaaggagacctccgacccgctcgaggcctactgcaaggacaacccggagaccgacgagtgccgcacctacgacaactgattcttagcattatatgtttgctaatctctc

SEQ ID NO: 404189 - DNA, 456 bp, Oryza sativa nipponbare
gcctccttgtagcagcagctacgcctccaatggggcgaagctgcagcagccgcggctgcagttcgtcagtcagctaaccagcagaaacagcaacgggagtggcagaagaagcatttccattttgtcgctgaggtgctcttccagtggcactgacagcgcgtcttcttccgccacttcagaaagatgggttcttgagcctgcaggagacggcgattggcgtcatatcgggtaccgcgtcgcacgacccggcggcttccagatagcatccgaggctgcggtgacggtgggtcgtgttcctgaacaggctgacattcgcctgtctgtcgcaacagtttctgggacgcacgcacggctggagaagaaagaggggagcctgttggtaacagacctggagagcacgaatggcacctacatcaacgagaggcgccttagcccgggtttccccactcccatcga

SEQ ID NO: 404190 - DNA, 457 bp, Oryza sativa nipponbare
cggacgcgtgggcggacgcgtgggctcctcctcgtctaccttacctagcagcagcagctagctagcttaattagctatagcagccatggcggcgacggcactgagcagccaggtccggttgccgatgtccctgcgggtggcgacggcgccggcgccggcgcgcgtgtcggtgctgccggcgagcaacaagcggggagacaggctgcggatgcaggcgacgtacaacgtgaagctgatcacaccggacggcgaggtggagctgcaggtgccggagcgacgtgtacatcctggaccaggcggaggaggaagggatcgacctgccttactcctgccgcgcgggctcctgctcctcctgcgccggcaaggtggtctccggcgagatcgaccagtccgaccagagcttcctcgacgacgaccaggttgccggcggctgggtcctcacctgccacgcctaccc

SEQ ID NO: 404191 - DNA, 393 bp, Oryza sativa nipponbare
gattttgtcagttacccagatctcatcttacgcaggcagagatggctgtcactagaattggtcttgctggccttgcggtcatggggcagaaccttgccctcaacattgcagagaaagggttccctatctctgtctacaacaggacgacttctaaggttgatgagaccgttcagcgcgccaaggtagaaggaaaccttcctgtgtacgggttccatgaccctgcatcctttgtgaactccattcagaagccacgtgttgtcattatgcttggcagtgctggtgcaccagtggacccaaccattgcaactcttgcaggacacttggagcaatgtggctggattattgaaggaggaaaagagtggttccagaacccttaaaggaaggagaaggcca

SEQ ID NO: 404192 - DNA, 451 bp, Oryza sativa nipponbare
ccaagttggattggagacgacgtgttcacatggctttagatattgcaagggggatgaactatcttcaccatttcagcccacttattattcatcgggatttaaaatcatccaatcttttggttgataagaactggactgtcaaggttgcagattttggtctttcacgtctcaagcgtgaaacattcctgacaacaaaaactggaaaaggaacaccacaatggatggctccagaggtgttgcgcaatgagccttctgacgagaagtctgatgtttatagttatggggtcatcctgtgggagcttgttactcataagataccctgggaaaatcttaattcgatgcaggtcattggtgcagttggtttcatgaaccacaggttggagattcctagtgaaacagatcctcagtggacatcacttatcctgagttgttgggaaactgactcacaact

SEQ ID NO: 404193 - DNA, 348 bp, Oryza sativa nipponbare
  unsure (1)..(348): unsure at all n locations
ctcacacgcattgcagaggagaggcgacaatggagggaaaggggaggacgtgcggctggggggcgaacaggtactcggagaggcagccgatagggacggcggcgcagggcgccggngacgacaaggactacaaggagccgccgccggcgccgctgttcgagccaggggagctcaagtcgtggtctttctaccgggccgggatcgccgagttcgtcgccaccttcctcttnctctacatcaccatcctcaccgtcatgggggtctccaagtccttctccaagtgcgccaccgtcggcatccagggcatcgnctggtccttcggaggcatgatcttcgcgctcgtctact

SEQ ID NO: 404194 - DNA, 431 bp, Oryza sativa nipponbare
  unsure (1)..(431): unsure at all n locations
gtagctagctcttacggggcctcctccccttcggcctcgttcttttccggcggagcctgggcacggccgccggccttttccccttccgccgccgttcacacgcgcgcgcgcgcggnggnggtcaaaggccagggccccaaaggacgcttngcacaacggcttcttttcctttcccagatccgccctttggttcgcgcgcgcgccgccgggcctaaggttgacaggatttcctttcctctgtgaagatgagtcatatcgggtgaaaatattcaaataaaagattttgagatctccaggacccgcacaaaatttattcccactaggggggaggggaaattacaaagaagatgaggcgaagtacaactgctcatttttctgggggggagaagaagaagaaagatttcaacataaacaattttattcagcatgcc

SEQ ID NO: 404195 - DNA, 434 bp, Oryza sativa nipponbare
  unsure (1)..(434): unsure at all n locations
ttgatttcataccgagatttggttggtgtggcctatacagaagaggaaacaaaagcaatggctgctgagattgaagtggttgacggtcctaatgatgaaggtgaaatgttcacacgtccaggtaagctgagcgaccgtttcccacaaccctacgcaaatgagcaagcagctcgattttcaaatggcggggcataccccccggatctcagtctaatcacaaaggccaggcacaatggccagaactatgtttttgctcttctcactggttatcgtgatccacctgctggtgtttcgattcgtgaaggcttgcattacaatccctacttccctggtggtgccatagccatgcccaagatgcttattgatggagcagtcgagtatgaagatggcactccagctacagaagcncagatgggaaaagatgttgtctcgtc

SEQ ID NO: 404196 - DNA, 433 bp, Oryza sativa nipponbare
  unsure (1)..(433): unsure at all n locations
cccacgcgtccggccgctactcccccctcgccgagagagctctagggtttccgctgccgaattttttttttaattcggggggagagatttgaagaggcggcaccatgttggtctaccaggatctgcttaccggtgacgagctcctgtcggattcgttcccctacagagagatcgagaacggcatcctctgggaagtcgatggcaagtgggtcgttcaaggagctattgatgtggacattggtgccaacccatctgctgagggtggtggtgatgatngaggtgttgtgaccaagctgtgaaggtggtcgacattgtggacaccttccgtcttcaggagcaacctccttttgacaagaagcagtttgtgaccttcatgaagcgctacatcaagaacctctccgccaagctggatgcggaaaagcaagaggaattc

SEQ ID NO: 404197 - DNA, 404 bp, Oryza sativa nipponbare
cccacgcgtccgcccacgcgtccggagctgtggtacgggccggatagggtgaagtacctggggccattctcggcgcagacgccgtcgtacctgaggggcgagttcccgggcgactacgggtgggacacggcggggctctccgcggacccggaggcgttcgcgaggaacagggcgctggaggtgatccacggccggtgggcgatgctcggcgcgctgggctgcatcacgccggaggtgctcgagaagtgggtgcgcgtcgacttcaaggagcccgtgtggttcaaggccggcgcccagatcttctccgacggcggcctcgactacctcggcaaccccaacctggtgcacgcccagagcatccctcgcgtgctgggattcccaggcgtcctcatgggcctcgtcga

SEQ ID NO: 404198 - DNA, 441 bp, Oryza sativa nipponbare
  unsure (1)..(441): unsure at all n locations
cccacgcgtccgcaccactcgaatcgaatccaccacacggtaccctcctctctcctcctccgaccaccatggccatggccacgcaagcctccgccgccaagtgccacctcctcgccgcctgggcaccggcgaagccgcgctcatccaccctctccatgcccacctcgagggcacccacctccctcagagcggcggcggaggatcagcccgccgcggcggcgacggaggagaagaagccagcccccgcggggttcgtgccgccgcagctggaccccaacacgccgtccccgatcttcggcgggagcacggggggactcctccggaaggcgccaggtggagagttctacgntcatcacatggacgtcgcccaagggagcaggtgttcgagatgcccacgggcggcgccgccatcatgcgcgagggccccaacctgctgaagct

SEQ ID NO: 404199 - DNA, 440 bp, Oryza sativa nipponbare
gcgactgctggtatagagccagaggatgttgcaaagcgtttgatggactatggattccatgcacctactatgtcatggcctgttccaggcacacttatgattgaacccactgaaagtgaaagcaaggccgaactagacaggttctgtgatgctctaatctcaatcagggaagaaattgcagaaatcgaaagtggcaaagcagatgtgaacaacaatgtcctcaagagtgctcctcacccgccccaacttctgatgagcgactcatggactaagccgtactccagggagtacgctgcgttccctgcagcgtggcttcggggcgccaagttctggccaacaacatgtcgcgtggacaatgtgtaatgggatcgcaacctcatctgcactctgcaacagggatcccaagtcgcagaagaagctgcagctgctaccgcatgatc

SEQ ID NO: 404200 - DNA, 445 bp, Oryza sativa nipponbare
gggaaaaatggaagcgtggaggaataattggtgcagctgctttgactggaggagcactgttggctattactgggggtttagctgctccagcaattgctgcagggtttggtgctcttgctccaaccctgggcacacttgtccctgttataggagctagcggatttgctgctatggctaccgctgcaggatctgttgctggctctgtggcagttgctgcatcatttggagctgctggagctggcttgacggggagcaaaatggccagaagaattgggagcgtgaaagaatttgagttcaaacctattggtgaaaaccataatcagggtcggcttgcagttggcatcttaatttccggatttgcttttgatgaggatgacttttgtagaccttgggaaggatggcaggataacctaaagaggtacatccttcaatgggagtctaagca

SEQ ID NO: 404201 - DNA, 396 bp, Oryza sativa nipponbare
cacagacaaggcctgactcaaggaaagggtagaaacaccttgctgttctctgacttcagagaaaccaactcctggcgtgtgatactctactcaagtgcatccttccttgcgaagaagaatgaatggggtgccaccctccaggataggcgccacaacacggtgactgtctacatggttgtcctcactgcagccatacgaacatcagcttgtcaagagccgggacaaccatcgcatcagacaggagaggggtgtctccagccatggatgactccaacgcgagctgcggtatgaggctcgcgtcaataggtcttgagaacaccgacgccaaccggcagacttaccgcaccatctttgcgaccggaaccagcttgcgacagcacatctcctgtgctattc

SEQ ID NO: 404202 - DNA, 410 bp, Oryza sativa nipponbare
cccacgcgtccgcggacgcgtgggccactgctagcttgggaagaggaggaggagcttgagcttggagagagacaacaatggcggctcaggctcttctctctgggaggcagctgctggggaggccattgcaatcttcagtctccaggtcttcttcctccaggaaggcacccttcatggtcagggcagaggccactccccctgccaagcaaggtgctgacaggcagctgtggttcgcatccaagcagtccctgagctacctggatggcacgcttccgggagacttcgggttcgacccgctggggctatcggacccggaggggaccggtgggttcatcgagccacggtggctggcctacggcgagggttcaacggccggacggggatgatgggcgcgtcggcatggcgccccg

SEQ ID NO: 404203 - DNA, 377 bp, Oryza sativa nipponbare
ctgagtactgcgtggcgcacggaggagggaagcgctgttcggtggctggctgcaccaagagtgcccgtggccgcacggactgttgcgtgaagcacggtggtggcaagaggtgcaaggtcgacaactgcagcaagagcgcccaggggagcacggacttctgcaaagcccacggcggcggcaagcggtgcacttggggaacgggctgcgagaagttcgcccgcggcaggagcggcctgtgcgccgcgcatgggaccttggcggccaagcagcaagagcgcgacgcggcgaacaacggcgcgggcatgatcccgccaggccttttcagcggcatagtgaccgtcgctgccacgagcagcatgacgaacgagtactcgtcg

SEQ ID NO: 404204 - DNA, 447 bp, Oryza sativa nipponbare
  unsure (1)..(447): unsure at all n locations
cccacgcgtccgcacggtaccctcctctctcctcctccgaccaccatggccatggccacgcaagcctccgccgccaagtgccacctcctcgccgcctgggcaccggcgaagccgcgctcatccaccctctccatgcccacctcgagggcacccacctccctcagagcggcggcggaggatcagcccgccgcggcggcgacggaggagaagaagccagcccccgcggggttcgtgccgccgcagctggaccccaacacgccgtccccgatcttcggcgggagcacggggggactcctccggaaggcgcaggtggaggagttctacgtcatcacatggacgtcgcccaaggagcaggtgttcgagatgcccacgggcggcgccgccatcatgcgcgagggccccaacctgctgaagctggncaggaaggacagtgcctggccctgggca

SEQ ID NO: 404205 - DNA, 441 bp, Oryza sativa nipponbare
  unsure (1)..(441): unsure at all n locations
cccacgcgtccgcccacgcgtccgaaacgatatggttgagtacttcggtgagcagctttctggttttgcattcactgccaacggatgggtgcaatcttatggatcacggtgtgtcaagccaccaattatctatggtgatgtgagccgccccaaccccatgactgtgttctggtccaagttggcgcagagcatgacctctcgccccatgaagggaatgttgactggtcccgtcacaatccttaactggtcttttgtcaggaatgaccagccgaggtttgagacatgctaccagattgctcttgccatcaagaaggaggtcgaggaccttgaggctggtggtattcaggtcatccaaatcgatgaggctgctttgagagaaggtctgccactccgcanggcggagcatgctttctacttggactgggctgttcactccttcag

SEQ ID NO: 404206 - DNA, 420 bp, Oryza sativa nipponbare
cgaaacgcgaaaccctagcccgtctgatctctctctatcgccatggccggcggcaagatgaaggagcacgacggcgccagcccagccaaaatcttcatcggcgggctgcctaaggacaccaccatgggtactttcaaagaatactttgggaagtatggggagatagttgatgccgtcataatgaaggaccgctttacccagaaacccagaggatttggatttattacctttgcagatcctgctgttgttgacagagtgattgaggacaaccatgttattaatggaaaggaggttgaaattaagagaactattccaaagggtgctgcccccctaaaagatttcaagacgaagaaaatatttgttggtggattaccatctgctttgaaagaagatgaattcaaggagttcttttcgaaattt

SEQ ID NO: 404207 - DNA, 445 bp, Oryza sativa nipponbare
gccgccgccatcgatccccatccatcccgcgagcgagcagggtcgccgtcgctcgtcctgttgcttccgccgcatccatcctggtgttggctccactgccacctattgactcccccacggtgcccctgtcatgggcgacgaggccacgcaggtcagcgcctcaagcgcagtagcggtccatgctctgtgcttcgctgggatcgtggcagcccatcaattgtctggccgcggcatgctcgtctccaatcccgcctacgccctccgcctcctcgtggtcttcgaagcgcctcttgtcatcgcagtgttcagtttgctccgtcgaaatcccaagcgctgctcgtttcttaaggcagctgcgcgaggattgcttggcctccccattggtgcgttcctaaatgcatttggagcaattgttcttggtgcacccattggaatcaagtactgg

SEQ ID NO: 404208 - DNA, 413 bp, Oryza sativa nipponbare
  unsure (1)..(413): unsure at all n locations
gttccagccctacaccgaggtgttcggcctccagcgcttccgcgagtgcgagctcatccacggccgctgggccatgctcgccaccctcggcgccctctccgtcgagtggctcaccggcgtcacctggcaagacgccggcaaggtggagctggtggatgggtcgtcgtacctggggcagccgctgccgttctcgatctcgacgctgatctggatcgaggtgctcgtcatcggctacatcgagttccagcgcaacgcggagctggacccggagaagaggctgtacnccggggggtcctacttcgacccgctcgggttggcgtcggacccggagaagaaggagcgngctgcagctggcggagatcaagcacgcccgcctcgccatggtcgccttcctcggcttcccgtgcaggccg

SEQ ID NO: 404209 - DNA, 286 bp, Oryza sativa nipponbare
gttgtctcctccgctccttgcgccgccgccaagaggagtcgcggctgaacaggggaggggcggcgatcgagcagagcaggggagggaatcctggtgagcatccacatcctctttctgattcatctctatctcccatcccaccgggacgtggaatttgcttgcgttcgttaacttctcttctagatctggaagaagctcttctccttaatttgagagccttaaacctcttttaatacaagtagtaacagtttgtttgttctcccaaaagtttttttttttttttggg

SEQ ID NO: 404210 - DNA, 439 bp, Oryza sativa nipponbare
  unsure (1)..(439): unsure at all n locations
gaagaaggaacccggaaagggaggaaagcatggccggagcagcagccgcctccgccgccgccgccgccgtggcgtccgggatctcggcccggccggtggccccgaggccctctccctcgcgcgcgcgcgccccacggtccgtcgtgcgggcggccatctccgtcgagaagggggagaaggcgtacacggtggagaagtccgaggagatcttcaacgccgccaaggagttgatgcctgggggtgttaattcaccagttcgtgccttcaaatcagttggtgggcagcccattgtgtttgattctgtgaagggttctcgtatgtgggatgtggatggaaatgaatatatcgattatgttggttcctggggtcctgcgatcatcggtcatgcagatgatacggtgaatgcangcatgattgaaactctaaagaanagaactag

SEQ ID NO: 404211 - DNA, 442 bp, Oryza sativa nipponbare
gccggctgaggaaagcaaggatgaaaccgtagataaagagctgttgatgaagcttaagacatcgcagagcacagatccctttgtgagaaaatttaagactgagaaaaaggaaatgcgtactcaagttgcatttggacaggggaactcgtcgtatgcaagatcatttcccatgcaaagttcagcagatggatcagcttcaaaattaccaaaagaatatgttgaaccatgggactatacccacagtgactatcctgttactctcccactgaggagaccgtattctggagatcctgaaattcttaatgaagaggagtttggagagtcttctgccaccggagcccaagatggtgaattaaccacagcagaagaacttggactaatgcatcggtcagacaaagcacagttgcttttcttccagatgcctgcatctcttccattacca

SEQ ID NO: 404212 - DNA, 443 bp, Oryza sativa nipponbare
gaaaaaaaaagcttgtatgaaggagagggtaggagcaccttgctctcctttgcctccaaagaaaccggacgcaatggcgactagctactctcctcaagacatctttccttaccacgaagtctgaatggggtgccacccgccaggctgccgcccccaagccggagactgtatacatggttgtccgagctggggcctacgatgatgagcttgtcaagaccgcgaaaaccattgcatcaccaggaaggggtatccttgccatggatgagtcaaacgccacctgcgggaagaggctcgcgtcaattggccttgagaacaccgaggccaaccgccaggcttaccggaccctccttgtcaccgcaccgggcttgggacagtacatctccggtgctatcctctcagaggagactctgtaccagtcaactgtagatggcaagaagattgtc

SEQ ID NO: 404213 - DNA, 435 bp, Oryza sativa nipponbare
cccacgcgtccgcgcttttgcctaagcacgatgtctgctacaatggacatcgacggcgccgccgccagcgccgccgcgggcggtgggagacattcggagaaggagctcttcagcgcggcggagtccggggacgccgcggccttctcctccctctcccccgccgacctcgccgccgcgctcgccctccgcgatgaggacggccggtccctcctccacgtcgccgccgcctccggccacgcccaggtggtgagagtgcttgccgcgatgggcggcgacgcggcggccagcgttgtgaacgggaaggacgaggaggggttggcgccgatccacacggcggcgagcagcggaaaagctgagatcatctccatcctgctcgatcaaggtgctaatgttgatttgacaaccgatgctggccggactgctcttcattatgct

SEQ ID NO: 404214 - DNA, 411 bp, Oryza sativa nipponbare
caagatcaagagatcgatcatatcgtattttgtagtaatttagcagctagctagtgcagctgcaagctattagcgactgcatgctttgatcgatccatctagctaattgttgaatccatctaagcttaatggctctgcagcagagcatggcgatgccgatgatggtagtgtctgaccttggcaccgctcctcggtcatcgccgatggttcagctgcagaggatgaagaagcatctggtggtggtggcggcgttcaagagcagaaccaaggcttcccccaaggtggacaagtcgaacaagaacaagtcgatcgtggaggacggcatcttcggcacctccggcggcatcgggttcaccaaggagaacgagctgttcgttggggagggggccatgctggggttcgcgcgtccct

SEQ ID NO: 404215 - DNA, 418 bp, Oryza sativa nipponbare
  unsure (1)..(418): unsure at all n locations
ggggaggttgagctcgacgatgtctggtttgcatatccctctcggccttctcatatgattctgaagggaataacgttgaagttaacaccaggttcaaaggtagctcttgttgggccaagtggtggtgggaaaactacaatagcaaatttaattgaacggttttatgaccctctaaaaggaagaatcttgcttaatggagtgcctttgccagagatttcacatcagtttctccacaggaaggttagcattgttagtcaggagcctgtgctctttaactgctccatcgaagagaatattgcttacggattagagggcaaagccagctctgctgacgttgagaatgcagctaaaaatgcaaacgcncacaatttcatatgcagttttccagaccaatacaagactgtagttggagagcgag

SEQ ID NO: 404216 - DNA, 440 bp, Oryza sativa nipponbare
gaaatttctctccttgtagaaacaagcctagagagtactatggagcagaggaaatttttgttgtgcctaattcttggcttacttgcgacttcaggacctgccaagaccgtcaatgctgactcgccctttgatttttattatctcatcctcatgtggcctggagcatactgcactgacagcgagtatggttgttgcgtgcccaagtatggttacccgtcagaagatttcttcgtcaagagcttcatgacctttgactcgtcagagaacacagctgttgtcaggtgcaactccgacaatcctttcgacattaacaagctagactcaatcgagaacaacctgaaccactactggagcaacatcaagtgtcctcgcaccgacggcgtgaactcatggaagagcgagtggaacagctattgcgtctgctccggcctcaaggagtt

SEQ ID NO: 404217 - DNA, 444 bp, Oryza sativa nipponbare
cggacgcgtgggatcatcactcgcactgtcacgcggccacgccacgccacgcatctattccatcccattcttctctcgcgcggaggcggcggcggcggcggcggcggcgacgacgaggagggaggaagatgacggtggggatgatcaacgcgaacccggtggtgcacgagaggccggagcgcgccgcccacccgcaccccgccgacgccatcgacgccctcgacgtcttcgatacggtgcgggacatcaaggacccggagcacccctactcgctggagcagctcagcgtgctctccgaggagtccgtctccgtcgacgagaagctcggccgcatccagataaccttcactccaactgtgcagcactgtagcatggctacagtgattggtctgtgccttcggcttaaattgatgcagaactttccttcacatttcaagattgaca

SEQ ID NO: 404218 - DNA, 426 bp, Oryza sativa nipponbare
gcggccggccatcatcagtgatcctctacaatcatcgactttcagcaaattaagatggctgctgccttctcctccaccgttggagctccggcgtccactccgaccaacttcctggggaagaagctgaagaagcaggtgacatcggcggtgaactaccatggcaagagctccaacatcaacaggttcaaggtgatggccaaggagctggacgagggcaagcagaccgaccaggacaggtggaagggtctcgcctacgacatctccgatgaccagcaggacatcaccagggggaagggtttcgtcgactcccttttccaggctcccacgggtgatggcacccacgaggccgtcctcagctcctacgagtacctcagccagggtctcagaacgtacgacttcgacaacaccatgggaggcttctacatc

SEQ ID NO: 404219 - DNA, 445 bp, Oryza sativa nipponbare
ccgggcgcggcacgtcggggttcagggtgatggccgtgagcacggagaccaccggggtggtgacgcggatggagcagctgctcaacatggacaccacccccttcaccgacaagatcatcgccgagtacatctgggttggaggaactggaattgacctcagaagcaaatcaaggacaatatcaaaaccagtggaggacccctcggagctaccaaaatggaactacgatggatcaagcacagggcaagctccaggagaagatagtgaagtcatcttatacccacaggctatattcaaggacccatttcgaggtggcaacaacatattggttatgtgtgatacctacacaccagctggggaacccatccctactaacaaacgtaacagggctgcacaagtattcagtgatccaaaggttgtcagccaagtgccatggtttggaataga

SEQ ID NO: 404220 - DNA, 447 bp, Oryza sativa nipponbare
cccacgcgtccgagcttgccctttacactgctctaggaggagtgcgtccatctgcttgtttgccaatcacattggatgttggtacaaataacgaggcgctgctgaatgatgagttctacattggcttaagacaaaagagggccactgctcaggagtatgctgattttcttcatgaattcatgactgccgtgaaacaaaactatggggagaaagtactcattcagtttgaggattttgcaaaccataatgcatttgaactccttgcaaaatatggaacaactcaccttgtattcaatgatgatattcagggaacagcttccgtggtcctttctgggcttgttgcagcactaaaattagttggtggttcattgtcggagcacagttacctgttcctgggagctggagaggctgggacaggcattgcagaacttatagctctcgagatat

SEQ ID NO: 404221 - DNA, 438 bp, Oryza sativa nipponbare
cccgcagcgccccaacccaaccctccccgaggtcgcagccttatcctctcctctcccctccgcgaggtcaggaaatcatggcttcaacattcggtgccacttctacggttggcctcatggctgcgccaaccggaattgtatcagacaagaagccatcttctctatcttcggtgtcatctgtttctgttgccagccgaccacgcaatgcacgccttcagaggaagtgcaacttcagggtaaaagctgccaaggagttgtacttcaacaaggatggctcggctatcaagaagcttcagactggagtaaacaagcttgctgaccttgttggagttacactgggaccaaagggaaggaatgttgttttggagagcaagtatgggtcccctaggattgtcaatgatggtgttacagttgcaagagaggttgaactggaggatc

SEQ ID NO: 404222 - DNA, 443 bp, Oryza sativa nipponbare
gccgcattcttgttgagtttgctaaaggggttccacgtggtcctggtggttcacgtgaatatatggggagaggacctcctcctggaacaggtcggtgttttaactgtgggattgatggtcactgggcaagagactgcaaggctggtgactggaagaacaaatgttaccgctgtggggagagaggtcacatagaaagaaactgtcaaaacagcccaagaaatctcaggcgtgagagaagttattcatgctctccatcgccacgccgtggacgtggtcgcagtcggagctatagccggagccggagccggagccgcagttacagccggtctaggtccagatccctgtctggatctcccagggcacgcagagagcttgaaagatcaaggagtcttagttacagcaggagtcccaggcgatccatctccccagcagcaaatgaaaag

SEQ ID NO: 404223 - DNA, 450 bp, Oryza sativa nipponbare
tgaggactgaggtaggggaaagaagagaagagaagcaagcaacaccaacagcaacacgcaaggagtggaggactcttcaaggtctggagagtggagaggaagaggaatcctcctcagtcctcaccttcagatttcagaacacaggcaatcggccctagctgcaatccaacaagatgggcatgcctctgctgctgctgctgctgatcctcgtcgctgctggcccccaggcaggcagagctgcaaagccaatcccaaatctccagctcatgaccaaggagggcggcagttcaagaatcatccaggacgacatcataaaggcaatcaacaagcatcccaatgctggctggacggctgcacggaatccatactttgcaaactatactactgcgcaattcaaacatatccttggagtgaagccaacaccgcatagtgtgctaaatgatgtccctg

SEQ ID NO: 404224 - DNA, 306 bp, Oryza sativa nipponbare
  unsure (1)..(306): unsure at all n locations
cccacgcgtccggaagagaatgaggaggctcaagaggaagcgccgaaagatgaggcagagatccaagtagtcgttatcagtagtgtggatgtcttcttacatcatgttgaccggtgcatttggattgatggtgccttcggattcttgatgttccagttattggtgtaggaatgtgaaaccttttctggttttggttaattctagctgttgaaatgtctctggttatgttcctagactggagtattatgtaatgtgatgaccataattcgctttatgaaagtttatgagatttgaagtnccccanna

SEQ ID NO: 404225 - DNA, 441 bp, Oryza sativa nipponbare
  unsure (1)..(441): unsure at all n locations
cggacgcgtgggcgaagcccaccgaattccattcctcgcgattcctctcccctcgcctcctcgtcctccccctcctaggggatcgccggagaggaatcgcgcggaggaaaaaaaaagaaaagggcttcctcgtcgtctaagttaaaaggaagccatggagcacaaggagactggatgccagcagccagaaggcccgatcctttgcatcaataactgcggcttctttggcagtgcggctaccatgaacatgtgctcaaagtgccacaaggagatgataatgaagcaggagcaggccaagctggcagcctcctctatcgacagcattgtcaatggtggtgattccgggaaggaaccaattattgctggtcacgctgaagtagctgttgctcaagtcgaggtgaagacgctngttgcgcagcctgctgagattgctggtcctag

SEQ ID NO: 404226 - DNA, 444 bp, Oryza sativa nipponbare
cccagataaaccacttgatattacagtgatcagtagaatgaagcagttcagagcaatgaacaaacttaagaaggttgccttgaaggtcgttgcagagaacttgtcagaggaagagattgtgggtttaaaggaaatgttcaaatctttagatactgataacagtgggacgataactcttgaagaactaagagctggtctaccaaagcttggcactaaaatttcggaatcagaattaaggcagttgatggaagcggctgatgttgatggaaatgggtccattgattatgttgaatttatatcagcaacgatgcacatgaatagattagagaaggaagatcacatatataaagcatttgaatattttgacaaggaccacagcgggttcataacagtcgatgaattggaagaagctctgacaaagtacgacatgggtgatgaagcgac

SEQ ID NO: 404227 - DNA, 443 bp, Oryza sativa nipponbare
cccacgcgtccgatccactccaaatcgccacgcaggaagggaggaaaggaccaccagccaccgcgcgcgcccaaatcgtcgcagctgcttccccgaggagaagaacatgagtcgccacccgagcactaagtgggcgcagaggtccgacaaggtgttcttgacgatcgagctgcccgatgccagggatgtgaagctcaacctgaagcctgagggccagttcatcttctcggcgaagggccctgccgacgacaccccttatgagcttgatcttgagctctttgatgctgtgaatgttgaggagagcaaggcagctgttgcggcaaggtccatatgctatcttatcaagaaagcagagagcaagtggtggcctaggctgctgaagaaggaaggcaagccacctgtgttcctcaaggttgattgggataagtggcaagatgaggatg

SEQ ID NO: 404228 - DNA, 368 bp, Oryza sativa nipponbare
cggccaccatggcgctctcctccccggtgatggcccgcgcggcgccgtcgacctcctccgcgctcttcggcgaggcgcggatcaccatgcgcaagaccgccgcgaagcccaagccggcggcgtcgtcggggagcccgtggtacggcgccgaccgcgtcctctacctcggcccgctctccggcgagccgccgagctacctcaccggcgagttcccgggcgactacgggtgggacaccgcggggctctccgccgacccggagacgttcgccaagaaccgggagctggaggtgatccactcccggtgggcgatgctgggcgcgctcggctgcgtcttcccggagctcctcgcccggaaccgggtcaagttc

SEQ ID NO: 404229 - DNA, 431 bp, Oryza sativa nipponbare
cccacgcgtccgcccacgcgtccgcttttcttggcttgtgctctgttttaatttctttgcaatgatggggaggcagagctcgttggcggcgaggagggtggtggtggtggtgtgcgcggcgatggtggtggcggcggcggcggcgcagaagtacaatgcggtgtacaacttcggggactcgatcacggacaccggcaacctgtgcaccaatggcaggccgtcgcagatcaccttcacccagcctccctacggcgagacctacttcggctcccctacctgccgctgctgcgacggccgcgtcgtcgttgacttcctcgcgagtaagttcgggctgccgttcctgccgccgtcgaagtcgacgagcgccgacttcaagaagggagcgaacatggcgatcaccggagccaccggcatggacgccaactttttcc

SEQ ID NO: 404230 - DNA, 444 bp, Oryza sativa nipponbare
cccacgcgtccgcccacgcgtccgcccacgcgtccgcccacgcgtccgcccacgcgtgcgcccacgcgtccgcccacgcgtccgcccacgcgtccgcccacgcgtccggatctacttgactacataagcccggatcaggaaagaaaagagagggatacacaaagaaagggcaggcgtgcaaagaataatatcagagcccatcaaggtgaattagttgaagaaaaggagagctttgagcacgacataggatctcctcatgaagcaaacaaagaggagtttcaacaagtaaaatcgaaggcacaccctccagcaatatcagaagaaaattatgctatccatgatgagctgaagcaagttgatcctttatcacctgaagaatattctgatgaagggtggcaagcaactaatttgcgtggacgatctggaaatgtacggaagaaaagc

SEQ ID NO: 404231 - DNA, 329 bp, Oryza sativa nipponbare
ggaaactgggtgggatgtgccaattcatgttgatgcagcaagtggaggatttatagcaccttttctataccctgagcttgaatgggacttcaggctaccactggtgaagagcatcaatgtcagtgggcacaagtatggccttgtgtatccaggtgttggttgggtcatttggcgaagcaaagaggatttgcctgaagaactcattttccatataaactatctggggacagaccagccgacgttcactctgaacttcttcaaaggttccagccagataatcgcacagtactatcaactaatacgcctgggattcgagggatacaagaaca

SEQ ID NO: 404232 - DNA, 434 bp, Oryza sativa nipponbare
cccacgcgtccggtcgatctggttgtggttcccctcctctcctctctttcttcttcttctccaaatccaatttctccagagagcagaatctctctcaatccaatccatccccgaccccgatcccaaaccctagctagcacgtactccagtagactgcgatgggcgcgccgccgaccagggaatccgaagcccgcgacgaggaggcggaggtgtcccgatcgggtgagcaaggcggcggtgaggcctctacgacgcagcagcagcagcagccggtgcctctgcgccaccagctgctcggcgcctgccgcgccgacgaacgcctcaggcccctcctcactctcaacctctcatgcggcgccggcgaggaccgcttcatctcccacctctcgcagcactttgaggcgtccgaggtcggctggctctacaggtgtctc

SEQ ID NO: 404233 - DNA, 444 bp, Oryza sativa nipponbare
cccacgcgtccgcccacgcgtccgcccacgcgtccgcacccatatcgttcaagatgccgccacgaaacggcaacctcgtcctcgccgccgccgccgccgcgctgctcgtgctgctggcgtcgccgccgtcgtgctccgccgcggcgcctcgtcgtcgggaccccgtggtggttcccgtcaccagggacccggccacctcgctctacaccatccccgtcaggtactacgacaacctcgtcgtcgacctcgccggcccgctcgtctggtcgacgtgcgccgccgaccacctgccggcgtcgctgtcctgccaggacccgacgtgcgtggtcgccaacgcgtaccgtgctccgacctgcaaggtcaccggcggcggcggcgactgcagcaagaacgtgtgcacggcgtacccgtacaacccggtgaccggcagtgcgccgccgggat

SEQ ID NO: 404234 - DNA, 161 bp, Oryza sativa nipponbare
gatgcccacatcttcccatccttcaatgacactttcattcatgtgactgactcgtctggaacggaaactcttggtcacattactggaggcatgaaggtcaaagctgactccgatgagtcatcaccatatgcagctatgcttgcttctaaagatgctgcaca

SEQ ID NO: 404235 - DNA, 323 bp, Oryza sativa nipponbare
cggacgcgtgggcggacgcgtgggcggacgcgtgggttgcatctgagcgtttcaacggaggattgggaagagatctgatgattggacaacctactggaagtgaagttggtgatcatgcaacttcatacgagtcccgaggtccaagctcaaggaagcgcaaccatgaggaaggtgggagcacagttgacaagccacaggacaggctttagcatgctgatagcatagaaagaagtgtgatagatcgtgatggtgaggaagttgatgatgcttgcccaggattcggccatcccgattaaaaggtcacgtgggttggatcaattggg

SEQ ID NO: 404236 - DNA, 400 bp, Oryza sativa nipponbare
ctggccctgtagctggcgccggcgacgtgcaggccgctgagacgttccgcgtgttcgtcgggtacgactcgcgcgaggacatcgcgtaccgcgtgtgccggcgctccctgctgcagcgctcctccgtgccggtggccgtgatcccgatcgtgcagcaggagctccggtctgcggggctgtactggcgggagcgcgggcccacggagagcaccgagttctccttcacccgcttcctgacgccccacctggccggctaccgcggctgggcgctcttcgtcgactgcgacttcctcttcgtcgccgacgtcgcggagctggcgcgcatggccgacccgcgctacgcggtgctgtgcgtgcaccacgactacgcgcccaaggaggccaccaagatggacggcgc

SEQ ID NO: 404237 - DNA, 401 bp, Oryza sativa nipponbare
  unsure (1)..(401): unsure at all n locations
ctcttctcttccaaaatctcgcctcgcccagctcgctcgggcagcgcacaccacgcggcgtccctcccgctccccctcgccgctaaatagcgcgggagccgcgggctccggcgagcgcgagaggagagaggaggaggcggcggaggaggaggaggcggtggtgcgtcgcgagcgcggaagggaaggggagtagtagggggggagtggcgtcngcgtcggcggcggatggcggtggagtaccactgctgcggggcggccttcttcgagcacgtggtgatcatcgtggtgctggtgctcttcgcggggctcatgtcggggctcaccctggggctcatgtccctcagcctcgtcgacctcgaggtcctcgccaagtccggcaccgaccaggaccgcaagcacgc

SEQ ID NO: 404238 - DNA, 438 bp, Oryza sativa nipponbare
cgtacattcgtactaccacacagcttgaagaagaagagggaattcgacgagaaatagtagaagcttggcgttcgtgcgaggaattctcggtggttgatcgatccgtgtttcgcggcggatggggcaggcgttccgcaagctgttcgatgccttcttcggcaccagcgagatgagggtcgtgatgcttgggctggatgccgcgggcaaaaccaccatcctgtacaagctgcacatcggggaggtcctttcgactgttcctacgattgggttcaatgttgagaaagtacagtacaagaacgtgatgtttacagtatgggatgtcggtggccaagagaagttgaggcctctgtggaggcattacttcaataatacggatggtttgatctatgtagttgattcattggatagagagagaatcggaaaagcgaaagcggagtt

SEQ ID NO: 404239 - DNA, 391 bp, Oryza sativa nipponbare
cgtatccaaagcacagccactgctatctaagatttcaaagattggagggaagctttcatcagctcccttggttccagaagtttttctgtcacagtaccttcctgctttggagaagttaacaactttaagggtgttgcaacaggcttcccagatatttcagtctgtgaaaattgatatgctctcaagaatgatcccattctttgacttttctgttgttgagaagatctctgttgatgccgtgaaacacaattttgttgctatgaaagtcaaccatttatcaggagctgtccattttgggaaaatggacattgaatctgattgtctcagtaatcacctaagtgttttggctgattctctaaataaagcaaggagccttatccatccacctgtg

SEQ ID NO: 404240 - DNA, 439 bp, Oryza sativa nipponbare
gttgggcccagttaaacgagcaacggtgacatgggatgaaccggacctgttgcagaatgtgaaatgtgtcagcccatggcttgtggagcttgtgtcaagtattccaccaatccatttaggaccattttcgtcacctcgaaagaagttgcgggttcccccacatcctgacttcccatttgagggtcatcttctgaacccaattttccatgggaacccacttggtcctagcaacagcccactatgctgttacccggacaccgctcctgcaggcatacagggagccaggcatgctcaatttggtttaccactaacagaccaccagcttaacaagctgcaccttggtctgttacatagcggcagttttaacagacttgatgctattactccaccttcccggatatcaaagggctttgtggtcagtagtgcaccagcccatgac

SEQ ID NO: 404241 - DNA, 397 bp, Oryza sativa nipponbare
gcgtccacgcgtccggcggccggccatcatcagtgatcctctacaatcatcgactttcagcaaattaagatggctgctgccttctcctccaccgttggagctccggcgtccactccgaccaacttcctggggaagaagctgaagaagcaggtgacatcggcggtgaactaccatggcaagagctccaacatcaacaggttcaaggtgatggccaaggagctggacgagggcaagcagaccgaccaggacaggtggaagggtctcgcctacgacatctccgatgaccagcaggacatcaccagggggaagggtttcgtcgactcccttttccaggctcccacgggtgatggcacccacgaggccgtcctcagctcctacgagtacctcagccagggtc

SEQ ID NO: 404242 - DNA, 443 bp, Oryza sativa nipponbare
  unsure (1)..(443): unsure at all n locations
cccaggctgaagacggcgctggagctgctgcgaaccagcatcagcgtcgagcaaagcttgtcacaggtgagcatgccgttcttcatcctgcacggcgaggccgacaaggtgacggacccggaggtgagccgtgcgctgtacgagcgcgccgccagcgccgacaagaccatcaagctctacccggngatgtggcacggcctcaccgccggcgagccggaccacaacgtccacctcgtcttctccgacatcgtcgcctggctcgaccgccgcagccaccgccaggacagggcgagcattaccccgccggcggnctgcaccgacagcgccgccgccgctgcggcggacagcccagggtcgcctgagccgccgcggcaaggcgccgccggcggtttcctctgcggcctaaccggccgagcaaatccccagcattgtaggatgtaaaa

SEQ ID NO: 404243 - DNA, 441 bp, Oryza sativa nipponbare
gaagcatacaggcggcagcgacgagccatggccacacacgcagcgctcgcggcgtcccgcattccggccaccgcccggctgcacagcaaggcggcgtccaagcagagggtggacttcgccgacttctccggactgaggccgggatcgtgctccatcagccacgccgcgagggaggcgtccttctccgatgtccttggctcgcagctcgtcgccagggctaccggagagaacgccgtgagggcgccggctgaggcgaagctcaaggttgccatcaacggcttcggccgcattggccgcaacttcctccggtgctggcacgaacgcgagaactccccgctcgaggtcgtcgtcgtcaacgacagcggaggcgtcaggaacgcatcacaccttctcaagtacgactcgatgctcggcaccttcaaggccgacgtcaagatcgtc

SEQ ID NO: 404244 - DNA, 441 bp, Oryza sativa nipponbare
gggtagagaaacattatcattctgggtgaaggcgttctcagaagatactgcgaagaggctagagaactttggattcattcaatccagacctggaggtgaatatcatgcaaataatcctgagatgtcaaagctgctgcacaaagcagttcgtgaaaaaagtgacaatgcatacaccgtctaccaacaacatcttgcaagccgtcctgtcaatgttcttcgagatcttctagagttgaagagtgatcgtgcccctattcctatcggtaaagttgagcctgcaacctccatcgttgagcgattttgtacaggtggaatgtcccttggagctatttccagagaaacacatgaagctattgcaattgcaatgaatagaataggtgggaaatctaactccggagaaagtggtgaggacccaatccgctggagtccccttgcagatgt

SEQ ID NO: 404245 - DNA, 436 bp, Oryza sativa nipponbare
gcagcagcagcagtagctgagcttgaagcagcagagcgaggtagacatggccgccggcaccatggccctctcgtccccggcgctggccggcaaggccgtcgcgaaggtgttcggcgaggggcgcatcaccatgcgcaagtcggcggcgaagcccaagcccgccgcgtcggggagcccgtggtacggcgccgaccgcgtgctctacctcggcccgctctccggcgagccgccgagctacctgaccggcgagttccccggcgactacgggtgggacaccgtggggctctccgccgacccggagacgttcgccaagaaccgggagctggaggtgatccactccaggtgggcgatgctcggcgcgctgggctgcgtgttcccggagctcctcgcccgcaacggcgtcaagttcggcgaggcggtgtggttcaaggcgggg

SEQ ID NO: 404246 - DNA, 436 bp, Oryza sativa nipponbare
cccacgcgtccgcttttttctcatgaccacaatgcttgcagctagctctgtagtgaacagcaaccttccttgctcatcaaggatatcctcctgctcagacttcacatctggctactcctggcgtcctatagaggctgcaaaactctgccggacacgagctgtgcgctcgctgcagataacctgtactgccacaaagcctgcaaagtcaccagctgaagaagaatggaagatcaagaggcaagtgctagtagaaaagcgggtccgtagtgttgatgtgaaggaagcactgcgtcttcagaaggaaaacaattttgcaattcttgatgtcaggccagtagcggactttaaagaggctcatccacctggtgccgttaatgtgcaaatatatagattgataaaggaatggacagcatgggatattgcaagacgggcagca

SEQ ID NO: 404247 - DNA, 365 bp, Oryza sativa nipponbare
tatgtggaaatctatttatagtattaggctcgcgttaatggcggagaacaccatggtactcttcttccctgccgccctagacggcaaggaggtcgacaatgccaaggtgtttggcgagggccgcgttacgatgcgcaagtcggtggtcaagcccaagcccgccgcggcgtcggggagcccgtggtacggcgccgaccgcgtgctctacctcggcccgctctccggcgagccgccgttctacctcaccggcgagttccccggcgactacggctgggacaccgccgggctgtcggccgacccggagacgttcgccaagaaccgggagctggaagtgatccactgccggtgggccatgctgggcgcgc

SEQ ID NO: 404248 - DNA, 416 bp, Oryza sativa nipponbare
cggacgcgtgggtggatggaagacagcgatgtccacaacctgagaactgaatcactcaagcagcagtacaatctcgtcaaggaaaggacatctgtgcagcacacatattactctgggtcacatgtgatggaatacggttctttagagctgaatgcccatcatgtgttcatgtacatgggttccaatccggctaacgacaatgctacatttgtggaagataactcgttgccatcgttctcaagggctgttaatcagcgggatgctgacctggtttacttctggcagaagtaccgcaaattgcctgagagttctcctgagaaaaacgaagctcggaagcaattgcttgaaatgatggcacacagatctcatgttgacaacagtgttgagctgatcggaaaccttctctttggctctga

SEQ ID NO: 404249 - DNA, 408 bp, Oryza sativa nipponbare
  unsure (1)..(408): unsure at all n locations
gcgaaaaaaaaaatcatcagcacaagatcgaggaggctttatctgaacaagggagatggcggactacgtgtatgggccggggcggaaccacctgttcgtgcctgggccggtgaacatcccggaccaggtgatccgcgccatgagccgtcagaacgaggactaccgctcgccggcggtgcccgccctcaccaagaccctcctcgaggacgtcaagcagatcttcaagaccaccaccggcacccccttcctcttccncaccaccgggacggnggcgtgggagagcgcgctgacgaacacgctgtcgccgggggacaagatcgtgtcgttcctgatcgggcagttcagcctgctgtggatcgaccagcagcaacgcctcaactttaacgtggacgtggtggagagcgactg

SEQ ID NO: 404250 - DNA, 431 bp, Oryza sativa nipponbare
gggccaataagcctggggaaatgcccaagtggcgttggcgacataggttggctgaggatggtgcagcctgtcattcaggaacgcatcgatcggttctctcagaatgagataagggtcagcgtcatggctatcctaaagaaccggagggagaagttcactttagaactcaaggagcttcacaggaagagggagaacctcctggcacagatgggtgatccttccgccaataggcacgcgccatctgttgagcactctcttgcggaggttgctgctcatattgaggctgtaacagagaagatcataatggaggaagagaagtggaagaagtggaagacagagaacatcaggaggaagcacaactatgtgccattcttgttcaatttcctcaagattcttgaggagaggcagcagttgaagcccctgatagagaa

SEQ ID NO: 404251 - DNA, 400 bp, Oryza sativa nipponbare
gcggcggcgagcacgttcctggggacgaggctggcggacccggcgccgcagagcgggaggatcgtggcgaggttcgggttcggcggcgggaagaaggcggcggcgaagaaggcggcgaggccgtcggcgccgacgacggacaggccgctgtggttccccggcgcggtggcgccggactacctggacgggtcgctcgtcggcgactacggcttcgacccgttcggcctcgggaagccggcggagtacctgcagttcgagctggactcgctggaccagaacctggccaagaacaacgccggcgagatcatcggcacccggttcgagaccggcgaggtgaagtccaccccgttccagccctacaccgaggtgttcggcctccagcgcttccgcgagtgcgagc

SEQ ID NO: 404252 - DNA, 441 bp, Oryza sativa nipponbare
agctaatcaagtggctactagaagttaaagcccctcgaatagtgtacgtttcatgtaatccagctacctgtgcacgggatttggattacttatgtcatggtgtggaggaaaaagatttgaaaggatgctacgagctgaagactgtaatacctgtagatatgttcccccacactcctcatatcgaatgtatctgcgtgctggagctgtgttgattgtcagttctgttcatccaaaagaaaccacaaggatttcaaatgcttcatcttgccctcatttcctgacaactagacttgcaggtcggaaattggatcgcagtctgcaaagccatgttgttggtgtttttacaagatatagagtattcatttactgaaactcccacattgggttttatagttgtggaggacgcagcttagctgaatgagttcttcaattgacatatct

SEQ ID NO: 404253 - DNA, 270 bp, Oryza sativa nipponbare
attacactcgattcatgagtcgctcggcgcggatgaagacatgagagcggcagcgatggccatggagaagcacttcaagtacgtgatactaggcggacgggtcgcagcggtatatgcatgaccggaattccacaagcacggtgccaagccaggggagctcgccatcatctccaaggaggccgcggcttcttatgagcgcactgctctcaggaagggatacctgtgtactcagaatgctgtatgactcccaggatttcatgtgtgtcacgg

SEQ ID NO: 404254 - DNA, 347 bp, Oryza sativa nipponbare
ctcccagattggaagctttcatcaatatctgatcttggtattggcattgagaacaaaatagccctccgcttcaatagtgtattttggccaaatgtagaagtgctaggcagggttgccccaacatcaaatgcctgcggttactttcttaaccttcacaaagccacagggcatccggttcttgtatgcatggtagcaggaagattcgcatatgaattcgagaagctatccgatgaagaatccgtaaactttgtcatgtctcagctcaagaaaatgctaccaggagctactgaaccggtccagtatttggtttcaaggtggggaaccgacccgaattcgcttggttctta

SEQ ID NO: 404255 - DNA, 351 bp, Oryza sativa nipponbare
cccacgcgtccgggagggcggagcggggggatggagcccatgagcgtggacggcggcgggggatgcggcggcctggacacgcagatcgagcagctgatgcagtgtcgcccgctcgccgagcaggaggttaaagcactgtgcgagaaggccaaggagatattgatggaggaaagcaatgttcagcctgtcaaaagcccagtaacgatttgtggtgatattcacggacaattccatgatcttgtagaactttttcggatcggtgggaagtgcccagatactaattatttatttatgggggattatgtggatcgtggctattactctgttgagactggtactcttttggtagcg

SEQ ID NO: 404256 - DNA, 352 bp, Oryza sativa nipponbare
cccacgcgtccgggagctcattggcgccgaacatatagccaacaagtttattcaccgttccttgttgcttttgcacatgaggacgaacgcagttggaaatccaacaatattgcaaaagcaagtacggtagaaggaaactatagtcttcctgataatgttgcaatcatcaccttgcagagtcttgatgatggcaccacactccttcgattggcgcatctttttcaggctcaagaggacacacaatattcagtaatggcaaaggttgaattgagaaagctgtttggaaagaggataatcaaagatttgactgagactagcctatctgcaaaccaaaagaagtcagagatgaaga

SEQ ID NO: 404257 - DNA, 373 bp, Oryza sativa nipponbare
  unsure (1)..(373): unsure at all n locations
gagcaattcaatgaaaaacttctgatcaaacaggaaggggagaaccttcaaattcttgatgtaagaaacttccaatcaattgaagtaagcagaagtgaatttgtgactccttctgcgtttatctttctgtatgagatgcagctgttcctgaccttccgtagtagatcagtatccgtttggaatttccgtggtgaattagtcacatcttttgaggaccatatgttgtggcaccctgattgcaataccaacagtatttacatcaccagcaaccaagatcttattatttcttactgcaaggctgatcccanatgatccttcttcagaagaaaatgcttgctccataaatatcagtgagatcttaacccgaaaatgc

SEQ ID NO: 404258 - DNA, 352 bp, Oryza sativa nipponbare
cccacgcgtccgcccacgcgtccggttccgactcgccgggaacaagcaaagtgggaccgagcagctaaggcagcaactggtggcagtgatgtcatactaagggaatcaaagtcaagagggcagcaaggagaccctgaggtattggcagctaaatcaagggagcaatatctagagttgaaacaaagattgcagttgtttactttaggcattggtggcattggtttggtctccgcctatttttcctactctcctgagattgctgcaagctttggtgcagggctgattggatctgtcctgtatctccgcatgcttgggaccagtgtggattccttagctggtggaactggagaaa

SEQ ID NO: 404259 - DNA, 393 bp, Oryza sativa nipponbare
gtggcatgaaagtgatgaaaagcagagggcgaaggctaaggagaagcttgacaaatgtgtgaaagacatgttgttggaactctgttggatccttgctattccgactccaaaagcaaacatcagaaaggaagatattgtggcaaagctgttggatttcattgctgaacctcatgctatggctgattccgggcattcggatgatcaggggtcgaattctcggaaacgcaagagaggaagcacacccaagagttctagcaagaaatttgatgatgatgacgacataactccaagtaaaaagcggaataaagctctggaatatgatactgatgaagatgaggatgatgcggatcccatgaagtcagatagtgaggaagatgactatgattctgagaa

SEQ ID NO: 404260 - DNA, 422 bp, Oryza sativa nipponbare
gctgaatgtggtaccgatgctctccgttttgcactggtttcttacacttcgcagtctgacaagataaacctggatatcaaacgagttgttggatatcgacagtggtgcaataaattatggaatgccattcgttttgcaatgggcaagcttggcaatcattacactccccctgcaactatttctgtaactacaatgccacccatatgcaaatggatattgtcagtacttaataaagctattggcaaaactgtcacctcgttagaagcatacaaattttctgatgctacatctgctatatactcgtggtggcagtaccaactatgtgatgtgttcatagaagctataaagccttacttcttcaatgactctcaagagtttgaatcagcaagagctgcctctagagatgccttatgggtttgctt

SEQ ID NO: 404261 - DNA, 306 bp, Oryza sativa nipponbare
cccacgcgtccgcccacgcgtccgcttggagtttgttcaatgatacatatagcttcactcgtggcaatgagaacttgacagtagacaagaaggacatctcttggaaaagtgatagggagcacaaatttggcaaaaatgtctatccaagcaactttcagaatggtttgctcaaaggtggaggaacacttgatccggcaatcccattgagtgagcaagaggaccttatcgtttggatgcggactgcggcacttcctacattcagaaagttgtatgggagaatatatgttgacctcaagaagaatgata

SEQ ID NO: 404262 - DNA, 341 bp, Oryza sativa nipponbare
cccacgcgtccgggcaggcgaaagcaaaacaagaaatggcgaagccgatatcgatcgaggtgtggaatccgagcggaaagtatcgcgtggtgagcaccaagtccatgcccggcacccgctggatccgcctcctcgccgacaacgactgccgcctcgagatctgcacggagacgaagaccatcctctctgtcgacgacatcctcgccctcattggcgatcgctgcgatggtgtcatcggccagctgacggaggagtggggagaaggtgttgttctcggcgctgaagcgcgccggcggaacagccttcagcaacatggccgtcgggtacaacaacggcgacgt

SEQ ID NO: 404263 - DNA, 375 bp, Oryza sativa nipponbare
  unsure (1)..(375): unsure at all n locations
gaagaagcagcctgcgccgccgccgcagccaccgacgacgacgacgacggtgctgcctgagccggtgaaggcgatcgaggcagctgccaagaaggcggcggcggcgccgtccgcgcgtggcgctaacgaggaggacatcaagcctgcgctcagctccagggcgtcgtcaacatgcagctccccaaccagtggctctgggacatggtcgacgagttcgtctaccagttccagagcttctgccagtaccgcgccaagctcaagaacaagacccacgaggagatcgccctcctcaagcagtacgaccaggcatggagtgtttatggcgttcttaattccttgaaagcactggtggagaagtcaatgatngggagagat

SEQ ID NO: 404264 - DNA, 360 bp, Oryza sativa nipponbare
ctaatctcaagtctctgtctcgtcgtcctcgcatctccactcgccatgggcaagattaagatcggaatcaacggtttcggaaggatcgggaggctcgtggccagggtggccctccagagcgaggatgtcgagctcgtcgccgtcaacgaccccttcatcaccaccgactacatgacctacatgttcaagtacgataccgtgcacggccaatggaagcacagcgacatcaagatcaaggactccaagactctgctcttgggcgagaagccggtcaccgttttcggcatcaggaaccctgacgagattccgtgggctgaggctggtgctgagtatgtcgtggagtccaacggtgtcttcact

SEQ ID NO: 404265 - DNA, 320 bp, Oryza sativa nipponbare
aagatctctagctattcgcatcccatcgatgcatcgtaggcggcctgcataggaggaggagggcaaggagcacagcaagcaggtaacctgcctgtgccggaaggttgcaccgaccctgttgccaagaacttcgacccaacggcgaggagcgacgacggcagctgcctttacaccttttaagcaggccggcttgacgcttgctattaattatttctcctttttatgttttctctttgttctgtgtatcagatcgcgcccaagccatagctgggcatgacaagtttttgttaataataatataatataaagatatgggctat

SEQ ID NO: 404266 - DNA, 351 bp, Oryza sativa nipponbare
cccacgcgtccgcgccaagcttgttgcctatgcaaaaggcctccacgtttttgcgggtgcctggcacaactccttcagcctagtgttcgaggatgaaaggcttaaggggtccacgcttcaggtgatggggctaattgtcgaagaaggtgattgggctattgttgggggcacaggacagtttgctatggcaactggtgttatcttgaagaaaatgcaagaacaaaaacaatacggaaacataatagagctcactatccatgggttttgtcctctcttaaaagggtcacagtgccctgtcaccaagattgggccatggggttcatctcatgaagggacagttcaagacatcac

SEQ ID NO: 404267 - DNA, 341 bp, Oryza sativa nipponbare
tatgcttctttctactcacctctcttcgcactctccttcgccgccgctcgccgccgtgggtctccgtcgtcaccgtcatcgtcatgagggagtgcatctcgatccacatcgggcaggtcgatatccaggtcgtgaacgcgtgctaggagctctattgtcttgagcatggcatacagcctgatggacagatgcccggtgacaagaccgttgggggaggtgatgatgcttttaacacctacttcagtgagactggtgctgataagcatgtccctcgtgcagtcatcgacgatcttgagcctaccagtgattgatgaggtgaggactggtgactaccggcagct

SEQ ID NO: 404268 - DNA, 399 bp, Oryza sativa nipponbare
ggcagccagaaaaggatgcacaccgtcacaactcgcattggcctgggtccatcatcagggaagcgacgtatgccccatacctgggacaacaaaaatcgagaatttcaatcaaaatgtagcagctctatctgtgaagctcacccctggggaaatgactgaacttgagtcctatgccagcacagatgttgttcaaggtgaccgctatgctcagacggccggcacttggaaggattctgagacccctccattgtcgtcttggaaagcagagtaaacgttttcatatgttcaaatacaaaatcccggttcaaatttagctcaaatggcagagcacacaccagattttgtataagtgttcattgtatcagacgcgttgctcgctcttgttaaaccatcgcttat

SEQ ID NO: 404269 - DNA, 406 bp, Oryza sativa nipponbare
cccacgcgtccggggcagggtcgtccgtggacctgctcccctgtcgctggcattggtgcacgccgacgtcgacgacggcaaggttctcttcgtgccgtgggtggagaccgacttcaggaccggcgacaacccgtggtgggcgtaagctataacaacatgatccatatcatcatcagcagcaaagttcacttgtgtgatcagcttgtagctataagtccgctgtatctgagaaacgctgctgtaaatccatcttcactttgtttttccaaattatatgtacacacactgtcacactgtatgaaagagcataaaacccttttcactgcataagtaacccttttttgaggttatgaatctgtgagatggatactcttttatagcagatcataccttaaatggcttcctg

SEQ ID NO: 404270 - DNA, 335 bp, Oryza sativa nipponbare
cggacgcgtgggctctgaacttaacgctgcaaaaaaaatcttggagtgtataactgtgtaagctttgctcaatggcggaggagaacaagtccggctccggcgacctgatggcgagcggcaaggtggtcgcggaggcgaccatgtcggtgttccagcagaagagcgtggagggcgtcgacaagaaggaggtcgccggcgccgccgcggacctgctgcactcggcgtccacctacggcaagctcgacgacaagccggtcgggcagtacatcgacaaggcggaggggtacctcaaggacttcagctccggcagtggcggcgccggaccggcaccggcg

SEQ ID NO: 404271 - DNA, 400 bp, Oryza sativa nipponbare
ccgatttcaattccagcgcgggagccgtaatcccctccacttccgtacgattccagcgcggtggggtgggcgaggtgcgtggccatggcggacgcggcggtggagctgcctggacggctcgcgatactgccgttccgcaacaaggtgctcctcccgggggccatcgtgcggatccgctgcaccaaccccagcagtgtgaagcttgtggagcaggaactctggcaacgggaggagaagggtctgatcggggtgctccctgtgcatgactccgaagctgctggctcattgctgtctcctggtgtaggcagcgattcaggtgagggtgggagcaaggcgcctggtggttctgcaggagaatcaacgaagcaggatactaagaatgggaaggagaccattcact

SEQ ID NO: 404272 - DNA, 395 bp, Oryza sativa nipponbare
cccacgcgtccgcccacgcgtccgcccagagcaagaagctcagctcctcctcctctcgcatggcagccatggccaccaccgcgtccagcctcctcaagacctccttcgctggcgcgcgcctccccgccgccgcccgcaaccccaccgtctccgtcgcgccgcgcaccggcggcgccatctgcaactccatctcgtcgtcgtcgtccactcccccctacgacctcaacgccatcaggttcagccccatcaaggagtccatcgtgtctcgcgagatgacccggcggtacatgaccgacatgatcacctacgccgacaccgacgtcgtcgtcgtcggcgcccgctccgcggggctcttctgcgcgtacgagctctccaaggacccctccgtcagcgtc

SEQ ID NO: 404273 - DNA, 361 bp, Oryza sativa nipponbare
  unsure (1)..(361): unsure at all n locations
cggacgcgtgggcggacgcgtgggcgcgcgggaggctcttttatggtcctcaaggaccatattccttgtttgctgggagggatgcaactcgggcccttgcattgatgtcgtttgaccctattgacctcactggagatttggatggccttggtccagacgagctagaggtcttgcaagattgggaagataagtttaaagagcggtatcctacggtgggccaccttgcttcagaaaatgcagcggatggtaaccacggtggcgcagcttgatcacgaggaagggatgctntactccatcggtttgtcagtttctctggtcttttttactggattgcangtgggtagatctgatcatatgatgc

SEQ ID NO: 404274 - DNA, 428 bp, Oryza sativa nipponbare
agaagagcaactccagcaggtagaaaggccagaagcaaagatggcgatctccagccgggatgccagcacctccctgcactggccatgcaccaccaacacaagcttcaggcagaatcaggttatcttcttcaccaccagaagcaacaggaggggtagcacaaggtacggaggagcaagaaccttttaggtttcatgctcagtcgacaagccagtggtgattggccttgcagcagactcaggatgcgggaagagcacctttatgcgccggctcaccagtggtgtttggtggtgctgcaaagccacccaagggtggcaacccaaactcaaacacacttatcagtgacacgacaacggtgatatgcctcgatgactaccattccttggacaggacttgcaggaaggagaaaggggtgactggcctggaccct

SEQ ID NO: 404275 - DNA, 231 bp, Oryza sativa nipponbare
tcgcccacgcgttcgtccggagaatccgaggcctggtgtcatcatcaaccatccccagggtggcgatgtctatgctggggtcccgaaggattacactgttaaggaggctaatgtcaaaaacttgttcgctgttctgctcggtaacaaaactgtttgtaaaggtgggagtggcatagtcttgtacagtttccccaactatcatatttccattttctacagtgaccttggggg

SEQ ID NO: 404276 - DNA, 308 bp, Oryza sativa nipponbare
atgacaaagaaaggaggaatgatgagctccttgaggctatgcatcaccttgttgagatggctgaggttctttcaacaattgatgctggccaaaggacacaccgggcgtgtgcgcgagcttctctcctatcacttcagatccgtatacctgaccttctgtggattggtctttcggaaaccaatgctcggcggattttcgtagaacaatctaggttccaagaggccctcattgttgctgaagcatacaacataaatcagccgatggaatgggctccaagtttttggaaccaaatgctgaaaccagatcta

SEQ ID NO: 404277 - DNA, 377 bp, Oryza sativa nipponbare
  unsure (1)..(377): unsure at all n locations
tggacgcgggggcggcgatggagaaggtacgggcggcggggctgctccggacgcaggggctcatcggcggcaaatgggtggacgcctacgacggcaagaccatcgaggttcaaaatccagcaactggagagactcttgccaatgtgtcctgtatgggcagcaaagaaacatctgatgcaatagcttcagctcacagtacattctattcttggagcaaactcactgcaaatgagaggagcaaggctctaagaaaatggcatgatttaattatctcacacaaggaagaacttgcacttctcatgacactggagncagggaaacctatgaaagaggctcttgttgaggtcacatatggtgcaaggtttattgaatacttt

SEQ ID NO: 404278 - DNA, 423 bp, Oryza sativa nipponbare
cccacgcgtccgcccacgcgtccgcccacgcgtccgatatggtgttctacgacaccttgagcatttgttaaagaccaaaggattctgtgttgtttgtgttgctgaagctgcaggacaagtaagctaaacttcagagtgatttcttcatgactttttggctacttttgttccagatacagctggaagcacgtgagtcgagagcctatgatttagttattctacgttcattacaggagtttacaaaaatcaggtgcaacagatgcatctggaaatgtgatacttagtgacatcggtgttcatatgcaacagaagattaagatgcatttcaaggacattggtgttcctgctgatgtaaaatacattgatccgacatatatggttcgggcatgtcgtgccaatgcatctgatgcaattttgtgcact

SEQ ID NO: 404279 - DNA, 364 bp, Oryza sativa nipponbare
gttggcttctcctccccctctttaccttttcctcctcggttcggttccgtggttcgtctagggtttagtgggttgagatggcggcgccggatgtcgagtaccgctgcttcgtcggcggcctcgcctgggccaccgacgaccgctccctcgaggccgccttctccacctacggcgagatcctcgactccaagatcatcaacgacagggagacggggaggtcacgtgggtttggcttcgtcaccttctcctccgagcagtcgatgcgcgacgccatcgagggcatgaacggcaaggagctcgacggccgcaacatcaccgtcaatgaggcccagtcccgccgctccggcggcggatgcgggggcta

SEQ ID NO: 404280 - DNA, 370 bp, Oryza sativa nipponbare
cccacgcgtccgcccacgcgtccgcacggagtgatgtgatggtcccagcagcacattgtgatcgcagcccagttctactcttgatgggtggtgggatgggagctggcaagagcaccgtgcttaaggatatactcaaggaagcattctggtccggagcagctgcaaatgcagtagttgtagaggcagatgcattcaaggaaactgatgtaatctatcgagctatcagctcaagaggccaccacaatgacatgctgcagacggcagaactggtacatcagtcatcgatggacgcagcctcgtcgctcctggtgactgccctcaacgaaaggagggatgtgatcatggacggcaccatgtcgtgggagccgtt

SEQ ID NO: 404281 - DNA, 313 bp, Oryza sativa nipponbare
cccacgcgtccgacttaacgctgcaaaaaaaatcttggagtgtataactgtgtaagctttgctcaatggcggaggagaacaagtccggctccggcgacctgatggcgagcggcaaggtggtcgcggaggcgaccatgtctgtgttccagcagaagagcgtggagggcgttgacatgaaggatgtcgccggcgccgtcgtggacctgctgcactcggcgtccacctacggtaagctcgacgacaagccggtcgggcagtacatcgacaaggcggaggggtacctcatggactttagctccggtagtggcggcgc

SEQ ID NO: 404282 - DNA, 369 bp, Oryza sativa nipponbare
aaaaaccaacccaaccgccgccgcatcgccctcgttagaacgatggccgcgtcggcgctgcaccagaccaccagcttcctcggcaccgcccctcgccgggatgagctcgtccgccgcgtcggcgactccggtggccgcatcaccatgcgccgcaccgtcaagagcgcgccccagagcatctggtatggacctgaccgtcccaagtacctgggcccgttctcggagcagacgccatcgtacctgaccggagagttcccgggagactacgggtgggacacggcggggctatcggccgaccccgagacgttcgcgaggaacagggagctggaagtgatccactcgcggtgggcgatgcttggggcgcttggc

SEQ ID NO: 404283 - DNA, 428 bp, Oryza sativa nipponbare
aagcagctgagctgagctagctatagccatcacagcaagtgtcaggtggaaactagcttagatagagatggctccggccttcgtctccgacgagcgcgccgtcgcggtgtcggtggagaggctgtggaaggtctgcttggacgtgcactccctgcccaaggtctgcgccggattcatcgacgccgtcgaggtcgaggggaatggcgggccgggcaccatccacatcatgaagcttaaccctgccgcggacgcagggagcgtatacaagaccaaaatagtggtgtgcgacagcgcaactcacgtgctaaaggttgaggtgttggaggttaagagcagggtgggcaacctcaagtcgcactcgacggagacgaagctcgaggccaccggcgacgccacctgcgtggccaagctcacggtggagtacgagc

SEQ ID NO: 404284 - DNA, 329 bp, Oryza sativa nipponbare
cccacgcgttcgcccacgcgtccggcgatgcgatggagaccggaaccgttcagatcaactctgcaccggctcgaggacctgaccatttccccttccagggcttgaaggacagtgggattggatcccaggggataactaacagcataaacatgatgaccaaggtgaagagcactgtcataaacctaccatctccatcctacaccatgggctgaggtgttccatatagatgatcagatttctataaccacatgagtacaatgtagagaattcaaatgttttgtaaccacgtgagctttgttcgctatttgctccacagttcttcctgtatg

SEQ ID NO: 404285 - DNA, 406 bp, Oryza sativa nipponbare
ctcttttcccagaagaagaaaaaagaagggctgcgactcattcgaaccgcgcatctcgtctcgtcgaagcgagcgaaaccacacgcggcgcgtcgatcccaacaccaccaacgcaacccctacccatggcggcggcgggcggcggcggcgcgggggcggccggaggcgggaaggtgtcgttcaagatcatcctcacctccgaccccaagctccccttcaaagtgtttagcgtgcccgaggcggcgccgttcaccgcggtgctcaagttcgccgccgaggagttcaaggtcccgccccagaccagcgccattcatcaccaacgatggagttggcattaacccacagcaaagtgcaggcaatgtggttctaaagcatggctcagagttgcgcctcattccccggcgat

SEQ ID NO: 404286 - DNA, 339 bp, Oryza sativa nipponbare
  unsure (1)..(339): unsure at all n locations
cccacgcgtccgcaagaaccgtttctgatattttaaggaaggcggaattctttaaagaaaaaaaaaaaaaaaggttaaaataagaagaaagtccaattttggaagatatgggaaaactcttttgattaaaagtctatcagaatcaatcgctcatattcgatttctatagaagagggaaatgctttatcgaaggaaataagaaaaaagggtatgttgctactcttttgaaagaaaaaagaataagaattcccgaagtaatgtttaaacctaaggatttcacanatcaaagataaaggattcccgaacaagtaaacacgattttcaactgtctcaacaata

SEQ ID NO: 404287 - DNA, 286 bp, Oryza sativa nipponbare
cccacgcgtccgatcctaggtgcctgaaccacatgtttgccgttgagattttcatggatcggttcctgttgtcaagcgctagccgaacttttaattccgaggaagctgattggctctacacaccggtgtacactacatgcgacctgactccctccggtcttcccttgcccttcaaatccccaataatgatgcgcatcgcaattgagctgattgcaacaaattggccttactggaatagatcagagggggctgatcatttctttgtttcaccacatgacttatgcgc

SEQ ID NO: 404288 - DNA, 292 bp, Oryza sativa nipponbare
tgggatgcaaaggataaggggggagagattagattatagagatagccatggagggaggtgttcatgagttcgatggctcaaccttcagagagtgcttctccctctcatggaggaacccttatgtccttaggctcgccttctccgccggcatcggtggcctcctcttcggctacgacaccggtgtgatttcaggagctctgctttacatccgtgacgatttcccttcagttgacaagaacacatggcttcaggagatgatcgtgagcatggcggtggccggcgcgatcattgg

SEQ ID NO: 404289 - DNA, 430 bp, Oryza sativa nipponbare
cgcttcctcctctctctctcagctcaccacacctcgagtcgccgccgccgccgccgctgctgctgcttacctcctccgcgccgcgcactccttgcactagcccatggcgacggctatgatggctgcgaccgccacctcgtgctcccctcgccgcgcgccggtcgtcgcgtcgtcgtccgtgcagccgcccaggcggcagcagcagcagcaaccgcggaggggattgaagcagctgccggggctcgtggcgacggcggccgtggccgtggccgcggcgccgctaccggcgctggcggagcagatggagaaagcggcgctgttcgacttcaacctgacgctcccgctgatcgcgaccgagttcctgctgctgatggtggcgctggacaagctctacttcacgccgctgggcaagttcatggacgagcgcgac

SEQ ID NO: 404290 - DNA, 427 bp, Oryza sativa nipponbare
  unsure (1)..(427): unsure at all n locations
gtgggttggcttctcctccccctcccggttcggttcggttcgggtccggttcgatttcgtttttttttcttcttcgtggggttggtgggaaagcatggcggcgccggatgttgagtaccgctgcttcgtcggcggcctcgcctgggccaccgacgaccgctccctcgaagccgccttctccaccttcggcgagatcctcgagtccaagatcatcaacgatcgggagacggggaggtcgcgcgggttcgggttcgtgacgttctcgagcgagcaggccatgcgcgacgccatcgaggggatgaacggcaaggagctcgacggccgcaacatcaccgtcaacgaggcccagtcgcgccgctcctgaggcggaggcggaggcggctactgccagcgcggcggaggcggaggctacngtggcggcggcggc

SEQ ID NO: 404291 - DNA, 437 bp, Oryza sativa nipponbare
tccaaatgttgctgatgaatggattgcttctgcaatccagtccatgaggaaggcttctcctactagtatgaaaatatccttgagatcgataagagaagggcgaacacaaactgttggtgaatgcttacgtcgagaatatagaatggtttgccatgtgatgcgtggtgacttcagtagagacttctttgagggatgcagggctatattgttggatagagatcgaaacccaaagtggatgcctccaaggttggaagaggtgcacgacgaggtggtcgaaaaatatttttccaaagtcgatgatccagagtgggaagatttggacctacctcctagacgttcccatggaaggaggcttgttcccaagctttgactgaatgaagcctctggtgaaaaactgaagcctttgttgggcttttaataacaaacagatcgtccca

SEQ ID NO: 404292 - DNA, 244 bp, Oryza sativa nipponbare
cccacgcgtccgcccacgcgttcgctaattttgtacagtaaccagcaagaacaaagaggagtggtcggagtgggcgggggagatgagctcgtcggcggcgtcgactaggttcatcaagtgcgtcaccgtgggggacggcgcggtggggaagacgcgcatgctcatctgttactcctgcaacaagtttctcaccgattacattcttactttgttctacatcttcagcgccaatgtctccgtggac

SEQ ID NO: 404293 - DNA, 341 bp, Oryza sativa nipponbare
cccacgcgtccgcccacgcgtccgcccacgcgtccggcgacgacgacgacgacgacggaggaggaggggttcaccacgtgtggtacatacgcaccgtggggctcgacgagcgcgccatcgccgccatcaccgcgctggtgtacgacgccaagaagaccggcggcggcatcgggctcgccggcggcggcggcggcggcggcgggggaagctgcgcggtgtgcctcaccgagttccgcgacggcgagacgctgcgcctgctgccgcggtgccgccacgcgttccaccgcggctgcatcgacacctggctccgcgcccacgttaactgtccgctctggcgcgcg

SEQ ID NO: 404294 - DNA, 433 bp, Oryza sativa nipponbare
cccacgcgtccgcggtgaactgttacaacctggtggctacctgaaattgatcgagttgggtctcgaggattgtgttcaagaaatagatgctcagcgtgtccttggttacgcgttattcaaagatgggaaagacacaaaactctcctatcccttggagaagttccactcagatgttgctggtaggagctttcacaatggacggtttatacagaggatgcgccagaaagctgcatctttgcctaatgttcaattggagcaaggaactgttacatcattggttgaagaagatggtacagttaagggtgttaaatacaagaccaagtcaggtgaagaattaaaagcatatgcacctctgacaattgtatgcgatggctgtttctcaaaccttcgccgcgccctttgctctccaaaggttgatgtaccatcttggttt

SEQ ID NO: 404295 - DNA, 439 bp, Oryza sativa nipponbare
cacatcctctccttcctcttcctctgctcactcagctctcccccgcgcgcgccaccggcgtcgccatgtcgggcaacatcgccttcggccgcttcgatgactccttcagcgcggcctccctcaaggcctacgtcgccgagttcatctccaccctcgtcttcgtcttcgccggcgtcggctccgccatcgcctacaccaagttgaccggcggcgcgccgcttgacccggccgggctggtcgccgtggcggtgtgccacgggttcgggctgttcgtggcggtggccatcggcgccaacatctccggcggccacgtcaacccggccgtcaccttcggcctcgccctcggcggccagatcaccatcctcaccggcgtcttctactggatcgcccagctcctcggcgccatcgtcggcgccgtcctcgtccagttctgcaccgg

SEQ ID NO: 404296 - DNA, 430 bp, Oryza sativa nipponbare
cccacgcgtccgcgcacgcacgcaccacacacgtagcagcagagcaatggcggcggccatggcgctgcaggtggtggccggcggcggctgctgttgccagcggcccgttcttggagctggtcggcggcggttggcggcggcgcgtgcggtggcgtcggacgcggcggcggcgaaggtgagcgaggaggaggggaaggtgaggctgggtgggtcggaagtggcggtgagcaagctcggcatcggcgcctggtcgtggggggacaccacctactggaacgactccgagtgggacgacaggagactgcaggaggctaaagcagcatttgacacaagcatagataatgggatgaccttatttgatacagcagaagtttatggtacagcgctgatgggagcagtaaattctgaaagtttactcggaggtttcatc

SEQ ID NO: 404297 - DNA, 436 bp, Oryza sativa nipponbare
aatagatccagaagggaagctggtcatgggatttcgaaaggcaacaaatctttctgcagaacaggaccaacctacaaagcctgccaatggtgtactaccccctccagaagcaaataataaagttgttgtcccagattctagtcctaatgctgctgtacctcgaccaattaaagtcaacacagagagcaaaagttccagccctgtggaacaagccactgcctgtaaaattgacaaaggtgcattaccacaaaaggaagggccaggaacttcaagttcctccccactacctgtcaagagaaaggcaacttctgttggtccgaagatcaaacggttccacatggacagtgaggaatccatggaattgaagataacatgggaggaagctcaagaattacttcgtcctcctcctaaggccccttcaattgttgttgttgat

SEQ ID NO: 404298 - DNA, 447 bp, Oryza sativa nipponbare
  unsure (1)..(447): unsure at all n locations
ggcaggccgtacagtcgtcggcggcggcggcggtggcgctggtggttgagcggccgacggcggggccggtggagtcgtcgtcgaaggcgtcgaggtcgtcgtcggtcaaccgatgccacagctgccggaggcgggtgggcctgaccgggttccggtgccgctgcggcgagctctactgcggcgcgcaccggtactccgaccgccacgactgcagcttcgactacaagtcggcggcgagggacgccatcgccagggagaaccccgtcgtccgcgccgccaagatcgttaggttctaaaaggataatacaaggggaaaccaacctgaattttcctccttttttctttcttttttcttcttctttccttntaaaaattaaagttgagggtattatttttttctttttctgagagctttttaaaggtgaaaggggaaaaaaaagaaagaaa

SEQ ID NO: 404299 - DNA, 431 bp, Oryza sativa nipponbare
tcgaaaacctcggaagagcggcagagcccactccacacgcggagaggagaccacgccgccgccggaagccatggccgtcgccaccgccgccgtcttcgcggagcccaagaccaagtacgatcgccagctcaggatatggggtgatcaaggacaggctgcactggagaaggctagcatatgcttgcttacctgtggccctacaggaactgaagcgatgaataaccttgtgcttggaggagtagggagtgttactggtgttgatggttccaaagttgaacaatttgacatgggaaacaattttctgttggatgcataatgcttggggcaatcaagagccaaattctgattgttcgttcctgcaagaactggaagattgctgataatgccaagtttgtcgaggagtcttctttggctcttatagtaacaaacct

SEQ ID NO: 404300 - DNA, 293 bp, Oryza sativa nipponbare
acacgtccgtccacgcgtccgggacgagaacgttgttgaggagaaccttgagaagctgaagaaggtgttggaggtgtacgaggcgcgcctgacgaagtgcaagtacctggctggagactacatcagtgtcgcggacctaagccatgtggctggcactgaatgcttgggggctactccccacgcatccgtgttggacgcatacccgcatgtgaaggcctggtggactgacctgatggcaaggccgttttcccagaaggtggttttactgatgaagccttctgcttaaggtagtt

SEQ ID NO: 404301 - DNA, 439 bp, Oryza sativa nipponbare
aacaatttgatgctttcattcgaggtctactggcatttccaattggcattcctggcaccgcattctacaaatgtatgcaggggcgaaagaatatcatgaagatgctgaaagaattgattgatgagaggaaggaggcatcagggcgacggggaagcattgacttcattgatgtgctgctcgaggagctgaacgaggagaagcctttaatcagtgagaacgttgcgctggatttgatcttcttgctgctatttgccagcttcgagaccacggcatccgctataaccgcagtggtcagatttctaacggataatcccgaggcattgcaagaattagcagaggagcatgataacattcagaaaagaagggtcgacctgaactctgaaatcacatgggaggaatacaaatctatgaaatttacatctcatgttatacatgaagc

SEQ ID NO: 404302 - DNA, 363 bp, Oryza sativa nipponbare
gccatctctctcagctctcacagctcactgcatcaatggccgcggccaccatggcgctctcctccccggtgatggcccgcgcggcgccgtcgacctcctccgcgctcttcggcgaggcgcggatcaccatgcgcaagaccgccgcgaagcccaagccggcggcgtcgtcggggagcccgtggtacggcgccgaccgcgtcctctacctcggcccgctctccggcgagccggcgagctacctcaccggcgagttcccgggcgactacgggtgggacaccggggggctctccggcgacccggagacgttccgcaagaaccgggagctgggggggatccacttcccgtgggcgatgcttggcgcgc

SEQ ID NO: 404303 - DNA, 438 bp, Oryza sativa nipponbare
cccacgcgtccgatcgagatcaaccacaccaaattaatcaagctcagttcatcgcagatcgatcgatcgatcaacatgtcggacaagtgcggcaactgcgactgcgctgacaagagccagtgcgtgaagaaaggaaccagctatggcgtcgtcatagttgacgccgagaagagccacttcgagatggctgaggaggtcggctacgaggagaacgacggcaagtgcaagtgcaccaccggctgctcctgcgccggctgcaactgcggcaagtgatgaacaaagctatcctctgcaacctggccccacaatccagtgtgtcatccgttatgcgcccatgcgtgcatatatatgcatatgcatgcatgcatgctaaataatggttcgtgttgcgtatgtgtgccatgtgacttgctatcatgtgagtcatcacctgcacct

SEQ ID NO: 404304 - DNA, 410 bp, Oryza sativa nipponbare
gtgcggaatcgggagcggagggatcttcatctgcgggaagcagcggcggcggcggggagctcgcggaggcgctggcgcggcggcggctgtaccgggaggtgacgctggcgctgcgcacggggctgcgcgacgccaaggccgacttctccttcctccgcgcgcgggggctccgcagcctcctcggcttcctccgctccaccgcctccgccaccgacgactcgcagctgctcctcttccggcattcccagtctatccccgatctccaagttattcctgttctctttcagaactcattgcatcaaccaaaggaagatcctgttgtgaccttggatcatatatttggagtagaaccaatgaagattacaagccccccaacagaatatgaaattgctctcgctcttaaaggcttg

SEQ ID NO: 404305 - DNA, 393 bp, Oryza sativa nipponbare
cccacgcgtccgcgctcgctctctcctctctctccctcttccgccgccgcgcttggggaaggaaggagaaagcaagccatcggcccccgcctccgcctccgaagggacattgttgctagttggtgatggctgagcaggctaatcaaccgactgtccttcagaagttcggtggccagttccaccttggctccagcttttctgaaggtgtacgggctcgcaacatctgcccatctgtctcatcctatgacaggcgctttaccacaaggagctacatgacccagggccttgtcaatggtggcatcaacgtcccaatgatgtcgtcctctccaatttttgctaatgctccaactgagaaaggtggcaaaaacttcatgaatgaattcctcatggggg

SEQ ID NO: 404306 - DNA, 359 bp, Oryza sativa nipponbare
acgcccacgcgttcggagaattcttaattcatgagttgtagggagggacgtatgtcaccacaaacagaaactaaagcaagtgttggatttaaagctggtgttaaggattataaattgacttactacaccccggagtacgaaaccaaggacactgatatcttggcagcattccgagtaactcctcagccgggggttccgcccgaagaagcaggggctgcagtagctgccgaatcttctactggtacatggacaactgtttggactgatggacttaccagtcttgatcgttacaaaggccgatgctatcacatcgagcccgttggtggggaggataatcaatatatcgcttatgtagctta

SEQ ID NO: 404307 - DNA, 415 bp, Oryza sativa nipponbare
cggacgcgtgggctcgctctctcctctctctccctcttccgccgccgcgcttggggaaggaaggagaaagcaagccatcggcccccgcctccgcctccgaagggacattgttgctagttggtgatggctgagcaggctaatcaaccgactgtccttcagaagttcggtggccagttccaccttggctccagcttttctgaaggtgtacgggctcgcaacatctgcccatctgtctcatcctatgacaggcgctttaccacaaggagctacatgacccagggccttgtcaatggtggcatcaacgtcccaatgatgtcgtcctctccaatttttgctaatgctccagctgagaaaggtggcaaaaacttcatgattgatttcctcatgggtggagtgtcagccgcagtttcaaaga

SEQ ID NO: 404308 - DNA, 366 bp, Oryza sativa nipponbare
cccacgcgtgcggttactaacttctttgcgccaagtagccgtttcggaaccccagaagacttgaaatctctgattgataaagctcacgagcttggtttgcttgtacttatggatattgttcacagtcatgcatcaaacaataccctggatggtttgaatggttttgatggtactgatacacattacttgcatggtggaccacggggtcatcactggatgtgggattctcgcctgctcaactatgggagttgggaaagtttaagatatttactgtccaatgcaagggggtggcttgaaaaatacaagtttgattggtttcggattggtggggtgacctccatgatgtatactcatcatggcttacag

SEQ ID NO: 404309 - DNA, 366 bp, Oryza sativa nipponbare
ctacttggcacagcttgacatcgccagagcagcataaaagtttgctcgatcgagctagctaactaggtcgtcggatcagtgataaatcgttcgccgatggatccgtggattagcacccagccttcgctgagcctggacctccgcgtcgggctgccggcgacggcggccgtcgccatggttaagcccaaggtgctcgtcgaggaggacttctttcaccagcagcctctcaagaaagacccataggttgcggcgctggaggcggagctgaagctgatgggcgcggaaaaccggcagcttagcgagatgcttgcggcggtggctgccaagtacgaggcgcttcaaagcccagttaacgacatgggcacc

SEQ ID NO: 404310 - DNA, 385 bp, Oryza sativa nipponbare
gtgtcatgcactttgagaagactgttaagtgcccagactacggaattggcacaatccttgctccagcaaattgctccaatacctgtgtgaattactctgatgttgatgaaaatggcattgtccatatgatgttgtgccgtgttgtaatggggaacgtagaaatagttcaccatggatctaagcagcatcggcctagtaacgagtatttcgatagtggtgtagatgacattaaaaaccctcaacattacattgtgtgggatatgaatgtgaatagtcacatctattctgaatttgtagtcaccatcaaattgccttctagagtcaaagattctcctgccaccgaagaagattgtcacaatttatcagagtttcatcactgatcttg

SEQ ID NO: 404311 - DNA, 433 bp, Oryza sativa nipponbare
  unsure (1)..(433): unsure at all n locations
cccacgcgtacgtccncncttccgcctagttcgggccacccccccctcctctcccctccacgccccgctccgatccactcagtgagcgaagatggctccaacatccatgagccttgctgcaaagacgccgcttaccttctcgacacttccttcgagtggcgttgcacagaggccagtttctgtgactgccttcctcgagcacaagactaatgatgccagaaggaagttcctaaagctcgcgcttgggaacctcggggtcgggcttcccaccttgttgggtgctaagagagctcttgctgaagagcaaggtgtctcgtcgtcnanaatgtcttactcgaggttccttgagtatctagacaaggacagagtgaagaaaggtgttttggttgagaatggcacgattgccattgtagaggctattttttctgagctc

SEQ ID NO: 404312 - DNA, 417 bp, Oryza sativa nipponbare
  unsure (1)..(417): unsure at all n locations
gaacttctttaccccnnatgggcatccaagagttccagttttgatcctaagactatgaacattttattagcgtggtatgccagagaaggctttgttaccaaggctgagcaaactctgaacagatttgttgagaaaggtggaaatccaaaaccaaacacctgggaaatccttggcacagcatacctgaaggacggtcaatcatctgaagcactgtcatgtttggagaaagccactgcagttgcaagtccaagcaaatggagaccaagacccaccaatgttgagaggcttcttgcgaatgtcaaggagaaatacgatgctgaaagcgcagacgggttgatgaatgtaccttaaaagtgaccgtgcgaggagaatgaagagtacaagtcattgatcaatacctattgcttttaagacaca

SEQ ID NO: 404313 - DNA, 429 bp, Oryza sativa nipponbare
ggtggagtccttcgggagatatgttgacatggttctgtggagtcaattgatatatgtgaaattgatcagctagttattgatgtttgtaaagatttcttcccagatttatctgttggattcaaagatcctcgtgttcggcttcatgttggtgatgctgtggagttcttaaggaatgctcctgaagggacatatgatgctattattgtcgattcatcagacccgattgggcctgcccaggaacttgtggagaagccattttctgacacaatcccaagagctttgaggcctggtggtgttctttgtaatcaggctgagagcatgtggttgcatacgcatcttatccaagacatgctttcgatctgccgtgagacattcaagggttctgtccactatgcctggacgagtggcccgacatatcccagtggtgtg

SEQ ID NO: 404314 - DNA, 327 bp, Oryza sativa nipponbare
gccaggcgtccggaaggctgtttcacatagcatttgttttggccgggagagagagcatctagctagggagagaaaggaagagacgagaggagagagatggccactgcttatgctcacatggcgagccagctgatgaagagcagcttggtgtgctccaagccgagggggctgtctggtgcttagctgacaaggaggccccgcttcacagtcaaggccatccagtctgagaagccaacgtaccaggtggtgcagcccatcaatggcgaccccttcatcggcagcctggagacgccggtgacctccagcccgctgggcggctggtacctc

SEQ ID NO: 404315 - DNA, 456 bp, Oryza sativa nipponbare
caagaatcatccgggagagcgacatggccccggttgccgtgggcgacaccctccccgacggccagctggggtggttcgacggggaggacaagctgcagcaggtctccgtccacggcctcgccgccggcaagaaggtcgtcctcttcggcgtccccggtgccttcaccccgacctgcaggtctcttcctccttttttcgatttcctctcccccctctttcttggagacgttatatttccctgaaaaaaaaattccttaaaaaatgggacttctttttatcagatcgagaaattttactgcaaaactgaaatgtgtactagctgatgtccggaccaaatccaagattactgctttattatacagatactcacaatttatgggattgatttgacgagctctgaagtcactcccacttccttgggtgtcagagttagggttaaaaatcttgatgtgggtt

SEQ ID NO: 404316 - DNA, 338 bp, Oryza sativa nipponbare
  unsure (1)..(338): unsure at all n locations
gctggagaatgctaananaagagaggcggctttcattgtaacatttgcgaaacgtgaacaggaaattgcagaactgaagtctgcagttagggatttgaaaactcaattaaggccaccatcgatgcagacaaggagattattgcttgatccagcaatccacgaggaatttacacgattaaagaatcttgtggaggagaaggagaaaaagatcaaggaactacaggacaatgttgctgctgtcaattttactccatccagtaaacatgggaaaatgctaatggccaagtgtagaacattgcgagaggaaaatgaagagattgtggcgatggcttttgaac

SEQ ID NO: 404317 - DNA, 438 bp, Oryza sativa nipponbare
cccacgcgtccggccgacaacatgtctctcgtctggaacgactttggctgggatcaggagtcgaatctgatatatgttgatcagcccacgggtactgggttcagctacagctccaatccgcgcgacacccgtcacgatgaagctggtgttagcaacgacctgtatgcctttcttcaggccttcttcactgagcacccgaattttgctaaaaatgatttctatattactggggaatcgtatgctggacactatattcctgcctttgcaagtcgagtgtacaaggggaacaagaacagtgagggcattcacatcaatttgaagggttttgctattggcaatgggttaacggatccagcaatacaatacaaggcatacactgattactcattggatatgggggtaattacaaaatcacagtttaacaggattaacaaaatt

SEQ ID NO: 404318 - DNA, 303 bp, Oryza sativa nipponbare
caagaaccgtcgcctttgctgttaccacaaccttagaggatgtgctcatgctcttcaaggtgttgaatggtggctagccagcaaacgtcactgatggataccaggcatcacaggtgtcaagatcaatttcgaggatcctagggcgcaagagcccctacttaacacacctgatctataacatgtaccatacatagcacgagcttctccgagacctgcacaagttgcaatgcaaggatctgtcactgagccccagtttgatccatcttgggcattgcactatgaatctaaatgctacagtggaga

SEQ ID NO: 404319 - DNA, 244 bp, Oryza sativa nipponbare
  unsure (1)..(244): unsure at all n locations
gcccgcccacgcgtncgcngggccctgacttctgaaacataaaggaaaggccattgcgtgcactaaccaaaattgccatgttccgcgcaggctctcatgatcccaaagcaagcactttggaatctggatttctctcatcgcttgctcagggaaacaagtgtctacaaacaactgtaaactctgcatgtgcctgatgatcccaacatgtcctattagataaacgtctctggtggcacatgatgaa

SEQ ID NO: 404320 - DNA, 344 bp, Oryza sativa nipponbare
ggtcaacctattgctgcacacactttcacttttcgtgaacttgctgctgccactaagaacttcagacaagattgtctattgggggagggaggttttggccgcgtatataaaggacacttggagaatgggcaggctgttgcagtgaagcaacttgatcgcaatggacttcaaggaaatagagagtttctggttgaagtccttatgctcagtctattgcaccatgataacctggttaacctaattggatactgtgctgatggggatcaacgactccttgtatatgagtttatgccattgggatcacttgaggatcatttgcatgatattccacctgacaaggaacc

SEQ ID NO: 404321 - DNA, 349 bp, Oryza sativa nipponbare
gttcctcacttcctcctccgcccgcgtaggccctactctcctctacctcccggctcccggctaccgccgccgccgccccgaggaaatggctgccctgcaaccctcattctcttcagcaatggctatgaaaagtctgaagctacccaaaactgcagttttacctggatttggtggtattgcacgtcctcaagatgtgcaggacaggagcgctaacttcacttgttcaaggcctagagcagcttcagtgactgaccagtcaacagcagagccagcaaaacccaggcaaaacaagcacactgttgatccttctgctccagaatttctgccactcccatcatttgaagaatgc

SEQ ID NO: 404322 - DNA, 449 bp, Oryza sativa nipponbare
caaaaaaccaacccaaccgccgccgcatcgccctcgttagaacgatggccgcgtcggcgctgcaccagaccaccagcttcctcggcaccgcccctcgccgggatgagctcgtccgccgcgtcggcgactccggtggccgcatcaccatgcgccgcaccgtcaagagcgcgccccagagcatctggtatggacctgaccgtcccaagtacctgggcccgttctcggagcagacgccatcgtacctgaccggagagttcccgggagactacgggtgggacacggcggggctatcggccgacccggagacgttcgcgaggaacagggagctggaggtgatccactcgcggtgggcgatgctgggggcgctgggctgcgtcttcccggagatcctgtccaagaacggggtgaagttccgggaggcggggtggttcaaggccggcgcgcagatc

SEQ ID NO: 404323 - DNA, 241 bp, Oryza sativa nipponbare
gtcgtgagacggtgcagaccggcaagggctacttagaggatcgccggccggcgtccaacatggacccttacgtggtgacctccatgattgccgataccaccatcatctgaaagccctgaagcgggttcttgaccccacgacatcgtagggattgagctgcgcatatagccatgtcggtccgggcgctccattgatcgaacaagatcgtgagctgcttatgggctggctgaagtagcacctg

SEQ ID NO: 404324 - DNA, 303 bp, Oryza sativa nipponbare
attccattcctcgcgattcctctcccctcgcctcctcgtcctccccctcctaggggatcgccggagaggaatcgcgcggaggaaaaaaaaagaaaagggcttcctcgtcgtctaagttaaaaggaagccatggagcacaaggagactggatgccagcagccagaaggcccgatcctttgcatcaataactgcggcttctttggcagtgcggctaccatgaacatgtgctcaaagtgccacaaggagatgataatgaagcaggagcaggccaagctggcagcctcctctatcgacagcattgtc

SEQ ID NO: 404325 - DNA, 449 bp, Oryza sativa nipponbare
ggcagacaggcaggccagagcggcgtgagtgagctatacaggaaggcagttagcccgtggccagcctaagaaggtgatagcatgggacttaatgggaaatggaggaaggccatgccatacatggcgatggtcttcctacagttcggcttcgccgggctgttcctcatctccgtcgcgtcgctacggcaaggcatgagccactacgtgctcgtcgtataccggaatgccgtcgccgccgtcgtcatggcaccattcgcgctctggttcgagaggaaaacaaggcccaaaatgacgctttctgtgtttttcaagattatggctctgggactactcgagcctgtgcttgaccaaaacttcttctatatgggagccaagaacacgtcggcgagcttcttatcagcactcaccaacatattacctgcttgaacgtttggtaatgccatcatact

SEQ ID NO: 404326 - DNA, 256 bp, Oryza sativa nipponbare
accttccagatgtcgatatttctgttgtaggtgtcactaccttcagtggacctgaaggcccttttgatgttgatgtttttgactctactatagattacataaagttaatgaagacaatctttgactttgagtcaattaaaaagcttctggcatctccgaagtttacattctgttatgatgctctccatggtgttgctgggacttacgcaacacgcatctttgtggaagagcttggtgctgctgaaagctcattggt

SEQ ID NO: 404327 - DNA, 430 bp, Oryza sativa nipponbare
gcagcagcagcagcggaggaagggttcgccagagatggatttcttcagcgaatatggtgatgctaacagatacaaaatacaggaagtcattggcaaaggaagctatggtgtagtttgttcagctattgaccaacatactggcgacaaggttgcaatcaagaaaatacacaatatctttgagcacttatctgatgctgcccgaatcctccgtgagatcaaattgctccggctattacggcatcctgatatagttgagatcaagcatataatgctacctccatcaaggagggacttcaaggacatatatgttgtctttgagctgatggataccgatctccaccaagtcatcaaggcaaatgatgacttaaccaaagaacatcatcagttctttctttatcagatgcttcgtgctttgaaatatattcatact

SEQ ID NO: 404328 - DNA, 340 bp, Oryza sativa nipponbare
gccatggcgtcgaaggaggaggtggccgtggagacggtggagggcggagcggcggcggcgaaggcgccgtactgggacccgccgccggcgccgctgctggacacgagcgagctgggtaagtggtcgctgtaccgtgccctcatcgcggagttcatggcgacgctcatcttcctctacgtgagcatcgccaccgtgatcgggtacaagaaccagagggccaccgtcgacgcgtgcaccggcgtcggctacctcggcgtggcgtggtcgttcggtgccaccatattcgtcctcgtctactgcaccggcggcgtcttcggcgggcacatcaacccggcgggga

SEQ ID NO: 404329 - DNA, 394 bp, Oryza sativa nipponbare
cccacgcgtacgcccacgcgtccgcgagcttgttgatggtctgcgtggtagtgatccatctatcggctctggttcacaggtagctagccttgaaacatatggtacattgggtgccattgtgaagagtcgaactggtaataagcaagtaggcttcctgacaaacaggcatgttgcggttgacctggattaccctaaccagaagatgttccatcccttgcccccgaatcttgggcctggtgtatacctaggtgctgttgagcgagcaacatcatttatcacagatgatgtttggtatggtatctatgcgggaacaaatccagagacatttgtcaagagctgatggtgcatttataccgtttgctgatgattatgaacattactagtgttaatacct

SEQ ID NO: 404330 - DNA, 340 bp, Oryza sativa nipponbare
cccacgcgtccgcaccactccatttctgagctcttctagtttgagtgagagagcagcagaagggagtagtgcaagatgccgatccgcaacatcgccgtggggagccaccaggaggtgtaccacccgggtgcactcaaggcggcgttggccgagttcatctccaccctcatcttcgtcttcgccggccagggctccggcatggccttcagcaagctgaccggcggcggagcgacgacccccgccgggctgatcgcggcggcggtggcccacgccttcgccctgttcgtggcggtgtccgtcggcgccaacatcttcggcggccacgtgaacccggccgtga

SEQ ID NO: 404331 - DNA, 381 bp, Oryza sativa nipponbare
cccacgcgtccgcccacgcgtccgcccacgcgtccgcccacgcgtccgcggacgcgtgggcgactcccgtctcctcgcctgccgccggcgccgatctccatcctgctagcagaggtggcgccggcgttctcctgctcccgccacatcatcgctaatccatcccatccggcctcggccaccccactgcttctacgagttccatacccagaccgccgccgccgccgccgccgccattggtgaagcccgtcgccatcgccgtcgccgcttccacgcaagtccgtagcagcggattcctgcagcgccccccgaaacatcccgaatccccagccatggcggccggagcagcagcagccacccgccgcagtctctccgcgctccttc

SEQ ID NO: 404332 - DNA, 187 bp, Oryza sativa nipponbare
cccacgcgtccgcccacgcgtccgcccacgcgtccgggcctgagccgagacggctcggcgcgcagcggaaaaagcggcggcgctccgccagggtctcaccgccggcgatggcgaggcgcgacggccaccatacgcacgacgcgacggactggtgcgtcgtggcggacaggtttgaggtggatccatg

SEQ ID NO: 404333 - DNA, 243 bp, Oryza sativa nipponbare
acacattggtgagaaggccacaaacagtatccctcttctcagatgtcagggctggaaaaaggcggtggtgtacatttcataaggaacctcgctggggcactgatcctgaaaatggtaaaaatcaaagatcgctccagatatgtaacggttggtgcgataacgcctttgatctgataaatgcaactgaggatgaagcaattcttctgcgagatatatatgaccgaccacctacttttaactggg

SEQ ID NO: 404334 - DNA, 327 bp, Oryza sativa nipponbare
gcatgatttcgagtgggataatctgaaaaggttatctttcaagatggttgatgaggccaacacaaagctcatgagggactatgtcttggagaccagccacatcgaagacgataactgatgaattttgcagagtcccatcaggagatctatccattcatgacactaaatcaatgcccttccacggatacacagctacacgcgcgcatatctgacaatgttctgtcaatcttacatagtttgcatacaaggtgtatataaataacacaagctcaagccgaagctgaggaatctacaaagctctgtacttgaagtctgaagcatgatccc

SEQ ID NO: 404335 - DNA, 298 bp, Oryza sativa nipponbare
gcggccgaagcggaagcagcagcagcagcagcggcgacgaagccgtccatagattcttcttcctccccgtcactcctcaccaacaaccatcccccaccctccaagatggacgccgccgtcgaccgcctcaaggatgggttcgccaagttcaagaccgagttctatgacaagaagccggagctcttcgagccgctcaaggccggccaggcacccaagtacatggtgttctcgtgcgccgactctcgcgtgtgcccgtcggtgaccatggccctgagccccgcgagggccttaaccgtcc

SEQ ID NO: 404336 - DNA, 391 bp, Oryza sativa nipponbare
ttttccagcagttaatcgatgctgtgagctattgccatgataaaggtgtctaccacagagaccttaagcccgaaaatgttcttgtggatcgaagaggcaatatcaagatctctgactttggcctaagtgctttgcctcaacatcttgggaatgatggattgctgcacacaacatgtggcagccccaattatattgctcctgaggttttgcagaaccgaggttacgatggctcattgtcagatatctggtcttgtggagtaattctctatgtaatgctcgtcggataccttccctttgatgaccgaaatcttgttgtcctgtaccagaagattttcaagggggacactcaaatcccaaagtggctttcacctaatgcacgggatcttcttcg

SEQ ID NO: 404337 - DNA, 322 bp, Oryza sativa nipponbare
gcgagcgagcggacatggcagcatcgctccaagccgcggccaccctgatgcagccggccaagctcggcggccgggcctcctccgccgcgctgccatcgcgcccgtcttcgcacgtcgccagggcgttcggcgtcgacaccggtgccgccggcaggatcacgtgctccctgcagtccgacatccgggaggtcgccaacaagtgcgccgatgccgccaagctcgccggcttcgccctcgccacctcagctctgctcgtctcgggcgccagcgcggaaggcgtgccgaggaggcttaccttcgacgagattcagagtaagacgta

SEQ ID NO: 404338 - DNA, 370 bp, Oryza sativa nipponbare
gcgcttctgagaaaggtgggcaaggcaaggatggaatgcatcatggaaggggagcaacccaccaacgcgaacgtagcgaggcgcgccggcatcaccatcgagaagcttgcgaagctccgagcgaaaacccggaaaccccggtcgatgcaggatcatgtctggtcagatgagggtgtcaccttccaggagatcacagaagacccaaatgtggagccacctgacctgagtgtggacaggatgatgatgaggcagcaggtgagggacttcctggggatcctgagccccagggagaaagagatcatcgagcaccggttcgggatccacgatggcgagccgaagacgctacatgtcatcggggacatgtttgggc

SEQ ID NO: 404339 - DNA, 383 bp, Oryza sativa nipponbare
ctgatgggcctaaacacatcgagacaactctctgcagagccaaatttgaggagctatgttcggacctcattgataggcttaaaactcctgtcactaatgccttgagagatgccaaactgtctgttgataacctggacgaagtgattcttgttggtggatccactcgtatcccttccgtgcaagagcttgtgaagaagatcactggcaaggatcccaatgtcacagtcaaccctgatgaggttgtttctcttggggcagctgtacagggtggagttttggccggagatgtgaaagatgtcgttcttcttgatgttactccattgtctcttggtctggagacgttcggtggagtgatgaccaaaattatttccagaaacacaaca

SEQ ID NO: 404340 - DNA, 357 bp, Oryza sativa nipponbare
cacggccacaccacccaccaactgagagctgagcaggcgagcgagcggacatggcagcatcgctccaagccgcggccaccctgatgcagccggccaagctcggcggccgggcctcctccgccgcgctgccatcgcgcccgtcttcgcacgtcgccagggcgttcggcgtcgacaccggtgccgccggcaggatcacgtgctccctgcagtccgacatccgggaggtcgccaacaagtgcgccgatgccgccaagctcgccggcttcgccctcgccacctcagctctgctcgtctcgggcgccaacgcggagggcgtgccgaggaggcttaccttcgacgagattcagagtaagacgt

SEQ ID NO: 404341 - DNA, 455 bp, Oryza sativa nipponbare
agaacgcgttgatcaagagcttgatgtacttattgcaacacctggtcgtttcttgtatctgcttcaagaaggctttgtgcaattaaataacctcagatgtgttgtgctggatgaagtggatattttatatggtgaagaaagttttgaacaagtgcttcatcaattgattactgttgcaccactgaccacgcaatatctctttgtcactgccactcttcctctcgacatctacaacaaggttgttgaaacatttccggactgtgaactaatcatgggaccaggcgtccaccgaacaagctctcgtcttgaagagattctcgtggactgcagtggagatgacaatgaggaaaagaatccggagacggcgttctcaaacaagaaatcagcacttgtaaagataatcgaggaatctcctgtccgtaaaacaattattttctgcaacaagattgagacat

SEQ ID NO: 404342 - DNA, 268 bp, Oryza sativa nipponbare
  unsure (1)..(268): unsure at all n locations
cccacgcgtccgccctttctgaacacagcaccaccccttctgctgcatctcccacctccctctgaattgtgggcctgaggcgatggcggcgctcgccccgtccaagatgctcggcacccggctcaacttcgccggctcctcccgctacgccaccgcggcaccgaccaccggagcgcagaagatcgtctccctcttcagcaagaagcccgccccgaagcccaagcccgccgncgtcacctnctcgagccccgacatcggcgatgagctc

SEQ ID NO: 404343 - DNA, 377 bp, Oryza sativa nipponbare
gggtgtccttaatggagctgagaaattcgacagccaaaaaggatgcaagttctcaacttatgtgaagtactggataaggaaagcaatgttagcacttcttgctgaaaactctggagtaatccagctgcccgcaaggatggagggtataattcgtaaggtcagggaagcgagaagggcgattcgctacaacacagggaggaacccaccagatgcagaaatcgcagccctcatcggtgtatcagttgccaatgttaggttggcacggaaatgctctcgtcgagttgtgtcgctttacacaaagatcggagttggacagaatgcaaaatttgtggaagtgactccggacacatctttagaagctccagatgaagctatgt

SEQ ID NO: 404344 - DNA, 232 bp, Oryza sativa nipponbare
gcaccttgctctcctttgccttcagagaaaccggaagcaatggcgtctgctactctcctcaagtcatctttccttcccaagaagtctgaatggggtgccacccgccaggctgccgcccccaagccggtgactgtctccatggttgtccgcgctggtgcctacgacgatgagcttgtcaagaccgcgaaaaccattgcatcaccaggaaggggtatccttgccatggatgagt

SEQ ID NO: 404345 - DNA, 216 bp, Oryza sativa nipponbare
gctccttgctctcctttgccttcagagaaaccggaagcaatggcgtctgctactctcctgaagggatctttccttaccaagaagtctgaatgggctgtcattcctgcaaggtttctgccctaaaccagggactgtctccatggttgtccgcgctggtgcctacgacgatgagcttggcaagaccgcgaaaaccattgcatcaccaggaaagggtat

SEQ ID NO: 404346 - DNA, 283 bp, Oryza sativa nipponbare
tgacattgtcatcatgggctacttcaagcgttgaggaggttgcctcaactggaccagggattcgtttcttccagctttatgtaaacacactacacaatctctgctaatactattagtttcttcgtttgattgtccttatcaaggatcatgtaccttggatctctgtaggtttacaaagacaggagggtggtggagcagcttgttaggagagctgaaagggctggattcaaggcgattgcgcttacggtggatactccgcgacttggccgtagggaggctgaca

SEQ ID NO: 404347 - DNA, 360 bp, Oryza sativa nipponbare
aagtaatcctccagctaaactagaaagagatgagctactacggtcagcagccgccggtgggcgcgccgccgccgcaagggtacccggggaaggacgcgtacccgccgccggggtacccgccggccggctacccaccgccggcgcaggggtaccctccccagggataccctccgcagcaggggtacccgccgcagcagggctacccgccgacgtacgcgcagccaccgtcgacgcagcagcagcagcaccacagcagcgggccttccttcatggagggatgcttggctgcactttgctgctgctgcctgttggaggcttgcttctgatcaagtctgtccgtgtgaccaagcagtctcgatc

SEQ ID NO: 404348 - DNA, 420 bp, Oryza sativa nipponbare
atgagatcggcagtggtacggatccgtcagacggtgtagccctttcaacaagcatcttgaagtatcttgctagtaggcttaatctggccattgtgacaactcattatgctgatctaagtcgtctgaaagctgttgacgatcgatttgagaatgctgcaatggaattttgtttggaaactctgcaaccaacatatcagatcttatggggcagtactggtaattcaaatgcattgagtattgccaagtccattggttttgatcagaaagtgcttgctcgtgcacaagaatgggttgagaaacttttgcctgacaaacagaaggaacgccaaggtttactctatggttctttgctagatgaaagaaaactactggagtctcaggcaaatgaagcagcatctgttctttcagacgttgagagac

SEQ ID NO: 404349 - DNA, 419 bp, Oryza sativa nipponbare
gcgtgagagaagagagagagagagagagagagagagagaaaccacccccaacttagcgaggcgaggaggcggaggcggcggaggggagccgcaggaatggctgcgatgcatagctggcgcaaggcgtacggcgcgctcaaggactccaccaccgtgagactcgccaacctcaactactacttcaaggatctggatgtggcgatcgtgaaagcgactaaccacgtggagagccctcccacggagcgccacctgcacaagattgtagccgcgacatccatctgtcggcctccgtcagacgtcgcctatagtatccacgcgcttttccgtcggcttgcaaaaacacgcaaatcggattggagccttaaaaaacacttgtagtgatccatatacttttttttagagggtgacccccacttttt

SEQ ID NO: 404350 - DNA, 392 bp, Oryza sativa nipponbare
ccattcttgaaaaagcttatgcaaagcttcatggctcttatgaggcattggagggtgggcttgtgcaagatgctctagtggatctcacaggaggagctggtgaagagattgacatgcggagcccccaagcgcagattgatcttgctagtggaagattgtggtctcagttgttgcattttaaacaagagggctttcttcttggtgctggaagtccttctggctcggatgctcatatttcatcaagtggcattgttcagggacatgcttactcaattttgcaggtaagagaagttgatggccataagctcgtgcaaattagaaatccgtgggcaaatgaagttgaatggaatggtccgtggtcagactcatcacaagagtggactgagcgaatg

SEQ ID NO: 404351 - DNA, 371 bp, Oryza sativa nipponbare
cctccatccagcaccgaccatggccgccgtcacggctgcggccgtctccacctccgccgctgctgcagtcaccaaggcatcgccgtcccccgcccactgcttcctgccatgcccgccaagaaccagagccgcccaccagcgcggcctgctgctgcgcgcgcaggtgtccaccaccgacgacgacggcggcggacgcggacacagacgaaggcagcagcgtcggtcacggcgaacgcagacgagggcggcaagccggcaacagcgatcgtggcatatgttgtgataatatgttctgagatttatttgttttgcagctctgatgtgcggatgagtactctccgtctcttcgtcgcatatcgagaatgcctatt

SEQ ID NO: 404352 - DNA, 341 bp, Oryza sativa nipponbare
gcggccggccatcatcagtgatcctctacaatcatcgactttcagcaaattaagatggctgctgccttctcctccaccgttggagctccggcgtccactccgaccaacttcctggggaagaagctgaagaagcaggtgacatcggcggtgaactaccatggcaagagctccaacatcaacaggttcaaggtgatggccaaggagctggacgagggcaagcagaccgaccaggacaggtggaagggtctcgcctacgacatctccgatgaccagcaggacatcaccagggggaagggtttcgtcgactcccttttccaggctcccacgggtgatggcaccca

SEQ ID NO: 404353 - DNA, 352 bp, Oryza sativa nipponbare
cccacgcgtccgcaactcgaccgccgtgaccgtcctgctcgctcccgatcacaccgtccgccaccggaagagagagcccccctacgacgacgacgaccatggcgctcgcctgcacctccgccaccgcgtgcgcggccgtgctcaagacgcccttcctcggggcgaagcgcgcgctcgccaatgccgtcggcgtcgcgggcgccaagcccgcgccgggccgcgcgctcgtcaagtcggccaagaagtcgtggatcccggccttcaagagcgacgccgagttcatcaacccgcacgggctcgatggctcgctccccggggactttaggttccacccgctggggctgggcaaggg

SEQ ID NO: 404354 - DNA, 227 bp, Oryza sativa nipponbare
cggacgcgtgggtttttcgataaaagagctgcaggaggaaaatgaggatggagtttccaccctattctacctacagaaaatttacccagatgaatggaagaactttcagcaaagggttgaatgggatgaggaacttaaagagaatgaagacaagaatgaggagcttcgtctgtgggcttcatacagagggcaaacattagctcgaacagttaggggaatgatgtact

SEQ ID NO: 404355 - DNA, 429 bp, Oryza sativa nipponbare
cggacgcgtgggcggacgcgtgggcggacgcgtgggcggacgcgtgggttcattgggaacctgcagccagctcacatggacttccggttcttttctctggggaatttatggtccatagtaagcagcttggcaacaactcatcaatcccatgccattttggatctgattgaatccaaatggtctgatttagtggcagagatgccattgaagatatgctatcctgctctagagaaccaggaatggaagatcattactggaagtgacccaaagaatacgccttggtcatatcataatggaggatcctggccaacattgttatggcagctcacagtagcatctatcaagatgaacagaccagagaatgctgcaaaagctgtagaggtagctgagaggcgaattgctatcgacaaatggcctgaatactatgac

SEQ ID NO: 404356 - DNA, 404 bp, Oryza sativa nipponbare
cccacgcgtccgcccgccgccgccgccgccgcagcctcctcaaggctgctcccatcctctccttcgagttagcttcctccttattcaaccatgggtaaggagaagacgcacatcaacattgtggtcattggccacgtcgactccggcaagtcgaccaccacgggccatctgatctacaagcttggaggtatcgacaagcgtgtgattgagaggttcgagaaggaagccgctgagatgaacaagaggtccttcaagtacgcgtgggtgcttgacaagctcaaggccgagcgtgagagaggtatcaccatcgatatcgccctgtggaagttcgagaccaccaagtactactgcacggtcatcgatgcccctggtcaacgtgacttcattaagaacatgatcacggg

SEQ ID NO: 404357 - DNA, 380 bp, Oryza sativa nipponbare
cccacgcgtccgacgacatctgcttccgcaccctcaagctcaccaccccaagcttcggcgacctgaaccacctcatctacgccaccatgagcggcgtcacctgctgcctccgcttccccggccagctcaactccgacctccgcaagctcgccgtcaacctcatgcccttccctcgcctccacttcttcatggtcggcttcgccccgctcacctcccgcgggtcgcagcagtaccgcgccctcaccgtcccggagctcacccagcagatgtgggacgccaagaacatgatgtgcgccgtcgacccccggcacggccggtacctcaccgtcttcgtcatgttccgcgggaagatgtccaccaaggaggtggacgagcagatg

SEQ ID NO: 404358 - DNA, 266 bp, Oryza sativa nipponbare
cccacgcgtccgccttctccccatctcccgcttcgccgctcgcgcttctcccctcttcgcgccgccaagttggaagctgtgttaactattggaactcatctaataccacacccaagaaaggctgagactggcggagaagatgctttctttgtgaacggcgatgatggtggagtgtttgccgtcgcagatggagtttcaggatgggcagaaaaggatgtcaatccggctctgttttctcgagagctcatggcacacacttctacttt

SEQ ID NO: 404359 - DNA, 482 bp, Oryza sativa nipponbare
cgccgcccaactcgcgaaggcggaaaaggaaaaaaagagagaaaaaaaacggaagaaaaagaaataaaactttcgcacagcaaccgaatcatctgcctcctcctcaagtagtctagtcctcctctcttctccggagtctgcgtgcgatcgaagcagaggcgcggcgctcctcctcctcctacggctccgatccccatggcgttcatgcgttcccactccaatgcattctccggtatgggggttgctcctgacatcagggacacattccttgagcttcagatgaagaaagcatttcgctatgttatcttcaaaatcgaggaaaagcaaaagcaagttgttgtggagaagacccgggcaacaactgagagttatgatgatttcctggcatctcttccagaaaatgactggcaatatgccctctatgattttggctttggtactggggagaatggggccaaaaacaagatttctttattggctgg

SEQ ID NO: 404360 - DNA, 372 bp, Oryza sativa nipponbare
cggacgcgtggggttcacatcaacacattcaccaaaagatttattcgacaagattgagaatgttgtgacggagatgggattccaagtccagaggggtaatagcaagctaaaggtcatgaaaaatggcaggggttcaaagaacctcaggaatccatcatcattcttggtctgtactgaggtagtcgagctcgggccatccttatatgttgtcgaattgaagaaatcccatggagatcctatattgtatagacagctatgtgagaggctatcagatgagctaggagtgggcaagacagagcagattcagaggacggagtcgctggaggatgatctagagagcttcgacagcggatcttctttgcctggtttttg

SEQ ID NO: 404361 - DNA, 391 bp, Oryza sativa nipponbare
gtctggttcaatggttgattttgcatgtgatcaggatggttcccccatattagcagttagtagtttagcaattcactcaaagaatctctctgaaaatcctaaatgctcgcttctggttgccaaagaccctgaggacagaacagatactgtgattactgtatatggtgatgccacacctgtaatgctccagatactggcctgcctatacccttgattcttttctgtatgacactttcctatatcatattggtcatgttacgtaacaaatatagatctgttggtctttgtattatgtttgaaaggtttcagaccaagaaaaagatgcaatacgaagtgcatacttacgaaaacattctgaggcattttggggtgaatttggggactttccgtt

SEQ ID NO: 404362 - DNA, 206 bp, Oryza sativa nipponbare
aaggaagagcccgaggaggagtccgatggtgacctgggcatgagcctcttcgactaagcctcttgccatatcgctgcaaagttgaaagttttgtttcaagttctgaacatcgaagtttgtttttaatctttagcatattaattttctactagacaagaatgtatccaacaatggtatcgttaattatgcattttggttgtgcccgt

SEQ ID NO: 404363 - DNA, 365 bp, Oryza sativa nipponbare
gtttgaaggcaagaagctcgtctctgccaccaaggaaggtctgaagcttgatgagagtgaggacgagaagaagcggcaggaggaactcaaggagaagttcgagggtctgtgcaaggtgatcaaggaggtgctcggtgacaaggtggagaaggttgttgtctctgaccgtgtggtggactctccctgctgtctagtcactggggagtatggctggactgctaacatggagaggatcatgaaggcccaggctctgagggactccagcatggccggctacatgtctagcaagaagaccatggagatcaacccggagaatgccatcatggacgagctccgcaagcgtgccgatgcggacaagaatgaca

SEQ ID NO: 404364 - DNA, 166 bp, Oryza sativa nipponbare
ggcttcgtcaccttctcctccgagcagtcgatgcgcgacgccatcgagggcatgaacggcaaggagctcgacggccgcaacatcaccgtcaatgaggcccagtcccgccgctccggcggcggaggcgggggctacggcggcggcggtggcggctacagcggcggtc

SEQ ID NO: 404365 - DNA, 308 bp, Oryza sativa nipponbare
cccacgcgtccggcgagggttttccacccgcgagaagtcggcgctcccctcttcctcctcctacctcctgctgggtgagccagtcatccaagctctgtcaagatgtctgacagccatgaaactgataggaacattgggatctggaagattaagaagctaatcaaggctctggagtcagcttgaggaaatggcacaagcatgatctctcttattatgccttcacgtgaccagattgcgcgagtggctaagatgttgggtgatgaatatggtaccggctcaaacatcaagagtagagtctaatcgtcagt

SEQ ID NO: 404366 - DNA, 382 bp, Oryza sativa nipponbare
tcgatcgcctgcctcggccttcagttcttccagctagcctccggcatcgacgccgtcgtgctgtacagcccgcgggtgttcgacaacgcgggcctccactccgactccgactccatcggagcctccgtggcggtgggcgccagcaagacgctctacattctcgtggccacgttccttctcgaccgcgtctgccggaggcctgtgcttctcaccagcgccggcgggatggtgatctcgcttgtcacgctggcctcggcgctgtacatgatcgaactccgcctcgagggccaagcgacggcgctggtgggtctgagcatcgcgatggggctggtgttcgtggtcgtctttttcattgggatgggcccgatcgcgtgggtgttca

SEQ ID NO: 404367 - DNA, 403 bp, Oryza sativa nipponbare
cttgggaaaggaactagtggataacctgtctgtccttcgcttctcaaatcttgcttttgaacctgtatggtcaaggcagtatataaggaatgtgcatctgatattctcagaggatttcggcactgaaggacgaggagggtactttgataggtatggtattatccgtgacataatgcagaatcatcttcttcagatactagccctatttgcaatggaaactcctgttagcttggaggcagaggacataataaacgaatagggtaaagttctgtgttccatgaagcccctgcaactggaatatgttgtgataggacagtacaaaagtcatacaaagggtggtaccacataccctggatacactgaagatatacggtgccccaagattggtgtaccccaacatttt

SEQ ID NO: 404368 - DNA, 430 bp, Oryza sativa nipponbare
aatcccgcgcgggttgggaagagcgagctcgtgaggagagcagagggaaagcgcgagggggaaggaggaggaaaggtgcacaaggtcagactaagtttgcgttgaagaacaaaggagaggaaaaatgtcgcctgctgaggcatcgcgtgaggagaatgtgtacatggcaaagcttgccgagcaggctgagcgttacgaggaaatggtcgaattcatggagaaggtggcaaagaccactgatgttggtgagctcaccgttgaggagcggaacctgctttctgtggcttacaagaacgtgattggtgctcggagggcatcgtggaggatcatctcttctattgagcagaaggaggagagccgtgggaatgaagcatatgttgcatcaattaaggagtaccgttacacgattggaactgagcttagcaagatc

SEQ ID NO: 404369 - DNA, 454 bp, Oryza sativa nipponbare
cccacgcgtccgcccacgcgtccgcccacgcgtccggaagtggttgcgccgacgacgaggtgagcgggttgacggaggaggaggcagcgcgcgccggcttcgggtgtcgttgtccctgctcgccagttgctcctccagactgcagctagcgtgacgagaaacatcttcttgagacgatatcagaagtcgagtgcatgactgcgatttgctcggtcgtgcacatgtcgagcttgacgtgcgcttagtccgcacggagcgcgtcgcgcggcttgatcccacgtttttactttctgtactgaataaaaggaagaaaaaacagagaaaatgctggaacgtttctacgcagcgccaaaacacacctgagttcatcgtgttcttgtgttcattctctctcgcgttctctgctcgagtgactgtgggtgcaggttgtcgctgacctactgctgagcaaaaa

SEQ ID NO: 404370 - DNA, 322 bp, Oryza sativa nipponbare
atcagcacatgatcgaggaggctttatctgaacaagggagatggcggactacgtgtatgggccggggcggaaccacctgttcgtgcctgggccggtgaacatcccggaccaggtgatccgcgccatgagccgtcagaacgaggactaccgctcgccggcggtgcccgccctcaccaagacccttcttgaggacgtcaagcagatcttcaagaccaccaccggcacccccttcctctttcccaccaccgtgacgggggcttgggagagcgcgctgaccaacacgcttgtcgccgggggacaagatcgtgtcgttcctgatcgg

SEQ ID NO: 404371 - DNA, 420 bp, Oryza sativa nipponbare
gcagcagcagcagtagctgagcttgaagcagcagagcgaggtagacatggccgtcgccaccatggccctctcgtccccggcgctggccggcaaggccgccgcgaaggtgttcggcgaggggcgcatcaccatgcgcaagtcggcggcgaagcccaagcccgccgcgtcggggagcccgtggtacggcgccgaccgcgtgctctacctcggcccgctctccggcgagccgccgagctacctgaccggcgagtttcccggcgactacgggtgggacaccgcggggctctccgccgacccggagacgttcgccaagaaccgggagctggaggtgatccacttcaggtgggcgatgctcggcgcgctgggctgcgtgtttccggagcttctcgtccgcaacggcgttaaagttggcgaggcggg

SEQ ID NO: 404372 - DNA, 373 bp, Oryza sativa nipponbare
aagaaagcataagcaacaaaagggaataactcatgactcactcagctaattaaatgttcgaccatgttggacacgtgcggcaactgctactgtgctgacaagagccagtgcgtgaagaaaggtaccagctatggcgtcctcatagttgaagcctataagagccacttcgaggaggtcgccgacggctaggagaactgtggctgcaagtgcggcaccagttgcttctgcaccgactgcaagtgacggaagtgaagtcactaatcaaccgaacactcggcgccggcgagtcacctaccttaattagtccacaataaaaaccacccatatgagtgccgtttgtgtgtgagctgattattgctgaagtaaacccgtg

SEQ ID NO: 404373 - DNA, 462 bp, Oryza sativa nipponbare
ggccggtggtgttcgcgctggcggcggagggggaggccggggtgaggaacgtgctgcggaagatcctggcggggctggagaacgacgacgcgcgggtgcccaagaccaagctggtctgcacgctcggcccggcctcccgctccgtccccatgctcgagaagctgctccgcgccgggatgaacgtcgcgcgcttcaacttctcccacggcacccacgagtaccaccaggagaccctcgacaacctccgccaggccatgcacaacaccggcgtcctctgcgccgtcatgctcgataccaagggtcctgagattcgtactggatttttgaaggatggcaagccaatcaagctaacaaagggtcaagaactcactgttaccaccgattatgagatcaagggtgatgagaacatgattaccatgagttacaagaaacttgcagttgatgggagcctggaaatgtcat

SEQ ID NO: 404374 - DNA, 330 bp, Oryza sativa nipponbare
tcttcttagagggcatgaccaatgcggatgctaagaaggaatatccagagttgtacaccagatggcgggaggatccttcaaatttcaaggtcaatggcatatacccagttcggaagttatggggaacagcaagagaagcttggaaggaaatcttgcttactccaggagaaaatatgttggtcgttactcacaaatctattttgcgcgcacttatttgcaccgcgctaggtcttccttctgagaggtttcgttccattgatgtgaacaatgggggcatgtgcgtcttcactgtaaacaaagcggggagaggctattccttcaagcccttaa

SEQ ID NO: 404375 - DNA, 420 bp, Oryza sativa nipponbare
ccaacccaaccgccgccgcatcgccctcgttagaacgatggccgcgtcggcgctgcaccagaccaccagcttcctcggcaccgcccctcgccgggatgagctcgtccgccgcgtcggcgactccggtggccgcatcaccatgcgccgcaccgtcaagagcgcgccccagagcatctggtatggacctgaccgtcccaagtacctgggcccgttctcggagcagacgccatcgtacctgaccggagagttcccgggagactacgggtgggacacggcggggctatcggccgacccggagacgttcgcgaggaacagggagctggaggtgatccactcgcggtgggcgaagctgggggcgctgggctgcgtcttcccggagatcctgtccaagaacggggtgaagttcggggaggcggtgtg

SEQ ID NO: 404376 - DNA, 386 bp, Oryza sativa nipponbare
aattccaaaagtagaaagatacatacaaagtgcggctggggttacccctctttgtacattgttcaataagtagcacatttggaagcaactcagcagaaacatcatatcaccacatgcgtatacaatggcacaaagaatatgcatgtctgaagatcaaaagcctaaagagctaactttaatgttcacaccctcctgacactctttccatactccttcctgatctcccacagctgctctccaacttttttcatggtcggacggtcctcccgcgtcggagcggcacactggaatgccaagttcagcagcctttcgagcaccttatcgtccacaggatcctccaacaacgggtccaatatcttccttctgttcccttcattggatttctt

SEQ ID NO: 404377 - DNA, 433 bp, Oryza sativa nipponbare
cccacgcgtccggcagcacaaaaacatttctctcgcgagtcgcgagttgcaccgatcgaattaagggtcgaagatgtttgggttcgggcaccaccacaaccaggcaccggcggcgccgtcggacccgaaccagatcttcaagatcttctgccgcgccaacgagaactactgcctcaccgtccgcgacagcgccgtcgtcctcgcccccgtcaaccccaaggacgagcaccagcactggttcaaggacatgaggttcagcaccaaggtgaaggacggggagggcatgccggcgttcgccctcggcaacaaggccaccggactcgccgtcaagcactcccttggccagtcccaccccgtgaagcttgggccgttcaacccggagtacgaagacccgtttgtgctgtgggcggagagcaaggaccttggcaagggc

SEQ ID NO: 404378 - DNA, 392 bp, Oryza sativa nipponbare
gtcgaagaaaagcatcgttcttgatggatctcacccgactctgctgtacggctacggtggcttcggcatgaacatgacgccccatttcagcgtcacccgcatcgtcctcatgcggaatctcgggttcgtgtcgtgcatcgccaacatccgaggcggcggggagtacggcgaggactggcacaaggccgggtcgctcgcgaacaagcagaactgcttcgacgatttcatcgcggctggtgagttcctcgtctctgcaggctacacgaacccgagcaggctgtgcgtcgagggtgcgagcaacgggggccttcttgtagctggctgcatcaaccagcgtccggacacttttggttgtgctctgggtcacgtgggtgtcatggaccatgctcgat

SEQ ID NO: 404379 - DNA, 307 bp, Oryza sativa nipponbare
cagagacattaaaggagcaaacatacttgtgggccctaatggtgaagtcaaacttgcggactttggcatggctaaacatgtgacatctttcgccgaaatacgctctttcagaggaagcccatactggatggctcctgaggttgtaatgaataacaaaggatataatcttgcggttgatatatggagccttggatgtacaattattgagatggcaaccgcgaagcatccctggtatccgtatgaagatgtggcagcaatatttaaaattgcaaacagtaaagatataccagaaattccagattgtttt

SEQ ID NO: 404380 - DNA, 256 bp, Oryza sativa nipponbare
tggcgccagaggcagttcgagctcgacaaaatccggcaggagctcaacaaaaccagcaaggaaatcggcaagctcaaggctaaaaaggaggatgcatcggctctgattcagagcacggaagaaattaagaagaggttggctgccaaggagacggaggtgcaggaggccaaaggcacgctggatgccaaactcgtgacgatcggaaacattgtgcacgaatccgtccctgtcagcgatgatgaggcaaacaatttaa

SEQ ID NO: 404381 - DNA, 432 bp, Oryza sativa nipponbare
gccgctcaggcgcgctctccgctccaccgccatggcgtccatcaccctcctctccctcgctcccgcgggcacattgctccacctcccggcctccacttcgctctccacctccttcgtcgccgctccaggccccatctccggccgccggtccgtcgtcctccgcgcccgcccgcgccgctgcgtcacggtcgtgtgcagcgccgcggcggccgaggccgcggaggcggagcccgcggagaagttccggctcgacaacctgggcccgcagaaggggtcgcggcggcggccgaagcggaaggggcgcggtatcgcggcggggcagggcgcgagctgcgggttcggcatgccgggacagaagtcgcgctcggggccaggcgttcggcgcgggttcgagggagggcaaatgccgctctaccccccgattcccaagct

SEQ ID NO: 404382 - DNA, 219 bp, Oryza sativa nipponbare
gagagttttagcagtaggattggattaaattggagtagtttcatagtttgtgtgtagtgatcttaattagctttgattagacagacagtacagtagagtagaggatgttggctgtgttcagcggcgcggtggtggaggtgccagcggagcttgtggccgtcggcagtcggacgcctgtgcccaagacgcgggcgttttagctgtgcggacggtttcttg

SEQ ID NO: 404383 - DNA, 319 bp, Oryza sativa nipponbare
cggacgcgtggggcagcagcagcagtagctgagcttgaagcagcagagcgaggtagacatggccgccgccaccatggccctctcgtccccggcgctggccggcaaggccgccgcgaaggtgttcggcgaggggcgcatcaccatgcgcaagtcggcggcgaagcccaagcccgccgcgtcggggagcccgtggtacggcgccgaccgcgtgctctacctcggcccgctctccggcgagccgccgagctacctgaccggcgagttccccggcgactacgggtgggacaccgcggggctctccgccgacccggagacgttc

SEQ ID NO: 404384 - DNA, 403 bp, Oryza sativa nipponbare
aatttgtgtgtctctcgtggcaagaagtggagtactcctaggagagatcagtcgtcctggacgcagaagatggtgggcttgacgggctcggtgatctcgacggtgccctcgagcatcttggcgaccttgcccatggagggcctcatgtcggcgcggtcctgaaggcaccacatggccgtcttgaccatgcgctcgacggtggcgaggctggcggggtcgtcgtcgtaagcctcggcctggacgatgcgagggtcgatgatgtcgtcgatgcggcgctcgacgtagaccttctcgaaggcccacttgtggaagtaccagtcctcgctgccgacggagtcctggcggaagccgtagttgcggcggccggagacgatctcaagcagaaccatgcccaaactgtaga

SEQ ID NO: 404385 - DNA, 373 bp, Oryza sativa nipponbare
cccacgcgtccgggaaggaaaccaaccgagaggcgaggcgaggagaggagaggagaggagaggaggaggaggagggaggagaagatgagagagatcatcatcatccacatcggccaggccgggatccaggtcggcaacgcgtgctgggagctctactgcctcgagcacggcatagagcccgatggcaccatgcccagtgatacaacgggtggcgtcgcacacgatgcgttcaacactttctttagcgagacgggcgcttgcaagcatgtgcccagggccatttttgttgacctggaacccacttgcattgacgaggtgcgcactgggttggaccgtcagctctttcaccctgagcagctcattttttggaagg

SEQ ID NO: 404386 - DNA, 328 bp, Oryza sativa nipponbare
ccagagcaagaagctcagctcctcctcctctcgcatggcagccatggccaccaccgcgtccagcctcctcaagacctccttcgctggcgcgcgcctccccgccgccgcccgcaaccccaccgtctccgtcgcgccgcgcaccggcggcgccatctgcaactccatctcgtcgtcgtcgtccactcccccctacgacctcaacgccatcaggttcagccccatcaaggagtccatcgtgtctcgcgagatgacccggcggtacatgaccgtcatgatcacctacgccgacaccgacgtcgtcgtcgtcggcgccggctccgcggtgctc

SEQ ID NO: 404387 - DNA, 416 bp, Oryza sativa nipponbare
cccacgcgtccgcccacgcgtccggaagaagtacccagaagatgcagcgaccttgaagagcattggctcaggggagttgcctgctggctgggctgacgctcttcctaaatacactccagagagccctgcagatgccaccaggaatctgtcacagcagtgcttaaacgcacttgctaaagttgttcctggtcttcttggaggaagtgctgatcttgcatcctccaacatgacattgcttaagatgttcggtgacttccagaaagatacgcctgaggagcgcaatgtccgatttggagtcagggagcatggaatgggcgccatttgcaacggcattgctctgcacaggccaagactcattccatactgggctacttttctttgttttcactgaatacatgagaactgccatgaggatc

SEQ ID NO: 404388 - DNA, 410 bp, Oryza sativa nipponbare
gagcccatcaaggtgaattagttgaagaaaaggagagctttgagcacgacataggatctcctcatgaagcaaacaaagaggagtttcaacaagtaaaatcgaaggcacaccctccagcaatatcagaagaaaattatgctatccatgatgagctgaagcaagttgatcctttatcacctgaagaatattctgatgaaaggtggcaagcagctaatttgcgtggacgatctgcaaatgttcggaagaaaagcaatcgcaaaaagcccgctctcactaaaataatggttgatcgcttggaaaattgccgcacaaggtctgcttattaggctggtgttccacaaccccatgaaaggggttaagaagatgtttttaaacttttttagccacttttcttttgggggttttttaaa

SEQ ID NO: 404389 - DNA, 372 bp, Oryza sativa nipponbare
cccacgcgtccggtacaatgtgatggtgatcgatcttcttgggccaagccttgaggacctattcaactattgcagtaggaaattctcgttaaagactgtcctcatgcttgctgatcagatgatcaatcgagttgagtacatgcatcagaagggatttcttcaccgtgatatcaagcctgataatttccttatggggcttggtaggaaagccaatcaggtatatataatagattatgggcttgcgaagaaatatagggaccttcagactcacaagcacatcccatacagagagaacaagaacctcactggaacagctcggtatgcaagtgtcaatacccatcttggtgttgagcaaagcagaagagatgatct

SEQ ID NO: 404390 - DNA, 77 bp, Oryza sativa nipponbare
gagcccatcaaggtgaattagttgaagaaaaggagagctctgagcacgacataggatctgctgatgaagcaaacaaa

SEQ ID NO: 404391 - DNA, 96 bp, Oryza sativa nipponbare
cccacgcgtccgcccacgcgtccgcccacgcgtgcgaccacgcgtccgcccacgcgtccggtttgttaagatgacataaaacctcctgtttagttt

SEQ ID NO: 404392 - DNA, 397 bp, Oryza sativa nipponbare
actacacccgcttcgcttcctcccctctctaagccggggaagctaagccatggcgtccgtcaccgcccgcaccccggtcgcagccctccgctcgtcggcgtcgctcaagtctaccttcctagggcaatcctgcacccgcctcgcccgcgcaccgactacgaggcgtaatgttcgggcggaggccaagggagagtggctccccggcctcccttctcccacctacctcaacggcagcttgccaggcgataacgggttcgacccgttgggtctggcggaggacccggagaacctgcggtggctcgtgcaggcggagctggtgaacgggcggtgggcgatgctgggggtggccgggatgctgctgactgaggtgctgacgaagatcgagatgatcgacgcg

SEQ ID NO: 404393 - DNA, 410 bp, Oryza sativa nipponbare
cggacgcgtgggcatattcaagatcaaagctgccggcagacacactcgagaacattgtgagcaacattgcttcacagatagatggcgaggaccgcggtgggaaagctaagaagatgcttgctgagatggtgaaggttagcatggagcaaagcttgaggcatttgcagcgtcgagcttcttttgcatgatcaggtgattggcacattttgcaatggaagtagacatagtggaaataatgagtttgctggtgatgccggtccaggccttgacaggaccgagtgactggtttgagcgctcatatacttaagctgttgaagtagtagttccttttccatttcaatcttgtgtgttctgaacaagaacatttttttcttctgtttctcatgtgcccttcctgcactttgtgcatg

SEQ ID NO: 404394 - DNA, 437 bp, Oryza sativa nipponbare
gcttttattgaatttgagacaaaggaggcttgtgagcgggcattcttcaagatggacaattgtttgattgatgatcgaagaatacatgttgactttagtcaaagtgtttcaaaactgtggggtcagttcagacaaagcaaaagaaatgcaaataaagatggatgcttcaagtgtggcgcccctgatcacatagccaaagactgtgaccagggcactgagcagaaaaacaaaggcccaagttatgtcctgaaagatgaaaacactcagcgtggtggaaataaccgtcgaagctatgatcttgtctttgatgaagatggtgaaaattatactgatcagcaagatcctggaagtactggccgaagaaagattcaaagaacagatgatcgcaaatcagggctgccacctcggggtgaccatgacaggattaagccggagag

SEQ ID NO: 404395 - DNA, 436 bp, Oryza sativa nipponbare
gactcttgatctttcacaggccgagaaggacttgcagccctggattgctcgagatgatgagcaaggtcagaagatgtggagagtcaaccagcgaatagttaagctgatagcagagcttatgaggaaccacgatagcccagaagcattggtgatccttgctagtgcttcagatcttcttcttcgagcaactgatggaatgcttgttgatggtgaagcttgtactttaccacaattagagctattggaagtaaccgccagagcagtccatctcatcgtcgaatggggagattcaggtgtatccgtcgctgatggcctctccaatctgctgaagtgccgtctatcaaccaccatccgctgtctttcgcaccccagcgcgcatgtccgtgcactcagcatgtccgtccttcgcgacatcttgaacagcggacaaataaac

SEQ ID NO: 404396 - DNA, 443 bp, Oryza sativa nipponbare
ggttacccagctcacctacctagctgcatcagcaggagtgcgcttggcttcagctctagccatcgccttgctgtccatcgccctctacatcatcggcgtcgtcgcctccttcgccgtcctctgcgccaaggagttcgccgagagagcccacgaccggccgccgctcgtcggaacagttttccggcagctcaagaacttcgacagaatgttcgatgaacatgtcaactatgcaaccgcgcatcgcaccagcaggattgtgtatcccggccactgcgaggtctttacttctgatccggccgtcgttgagcatgtcctcaagaacagcttcagtaaatacagcaagggggacttcctcactacagtcatgaaggatctctttggagatggaattcttgcaacagatggggatatgtggcgtcatcagaggaagctagcgagctacg

SEQ ID NO: 404397 - DNA, 424 bp, Oryza sativa nipponbare
  unsure (1)..(424): unsure at all n locations
cggacgcgtgggcggacgcgtgggccgaacgcatggatagagatactgaaactcccctgggaacggaggagaatggagactaccccgagatgtttgctgcattaagaacttcattattaagggcattttatgtaatggacagggatcttaagtttcataaaaccattgactctgtgttcagtggtactacagcagtcacagtgatcaagcagggacatgatctcctgattggaaacttgggggattctagagctgtcttgggaactagagatgaatatgaccagttttttgctgtacaattgacagttgacctgaagcctaccattccaagtgaagctgcacgaattagggaacgaagtggcagaatattctctctgccagatgagccagatgtngctcgtgtttggcttccgaagtacaacat

SEQ ID NO: 404398 - DNA, 432 bp, Oryza sativa nipponbare
gctagctatagccatcagagcacgtgtcaggtggaaactagcttagatagagatggctccggtcttcgtctccgacgagcgcgccgtcccggtgtcggtggagaggctgtggaaggtctgcttggacgtgcactccctgcccaaggtctgcgccggattcatcgacgccgtcgaggtcgaggggaatggcgggccgggcaccatccacatcatgaagcttaaccctgccgcggacgcagggagcatatacaagaccaaaatagtggtgtgcgacagcgcaactcacgtgctaaaggttgaggtgttggaggttaagagcatggtgggcaacctcaagtcgcactcgacggagacgaatctcgaggccaccggcgacgctccctgcgtggacaagctgacggtggagtacgagctcgaagactgtgcctcgct

SEQ ID NO: 404399 - DNA, 423 bp, Oryza sativa nipponbare
aggaaaagtgccttgcaggtgttatttgacacattaagaaaccatggtcatctcttctccttgcctttgtgggagaaggtgtttgattcagtgcttttcccaatatttgattacgtacggcatgccattgatccatcaagtggttctccacaaggacagaatgtggaaagtgatccttcagaacttgatcaagatgcatggatgtacgagacatgcactttggccctgcagctagttgtggacctctttgttaagttctatgacacagtaaaccctcttcttagaaaaattctgttgctcttgacaagtttcataaagcgttcccaccagagccttgccggtataggtattgccgcatttgttcgtttgatgagcagtgccggatctgtcttcgttgatgaaaaatggttagaggtggtttta

SEQ ID NO: 404400 - DNA, 427 bp, Oryza sativa nipponbare
aggaaaagtgccttgcaggtgttatttgacacattaagaaaccatggtcatctgttgtcgttgcctttgtgggagaaggtgtttgattcagtgcttttcccaatattcgattacgtacggcatgccattgatccatcaagtggttatgcacaaggacagaatgtggaaagtgatccttcagaacttgatcaagatgcatggatgtacgagacatgcactttggccctgcagctagttgtggacctctctgttaatttctatgacacagtaaaccctctttttagaaaaattctggtgctcttgacaagtttcataaagcgttcccaccagagccttgccggtataggtattgccgcatttgttcgtttgatgagcagtgccggatctgtcttcgttgatgaaaaatggttagaggtggttttatcgt

SEQ ID NO: 404401 - DNA, 443 bp, Oryza sativa nipponbare
ctccggcaagagaagagaagagacacccaacagcccaaaacctagcgcctctgcgctcgaggcccgcccgaatccgcgaatccgccgactcccatggcgagccagggagagccctcctcctcctccgatccgaaggggaagaaggatttctcgacggcgatcctcgagaggaagaagtcgccgaaccggctggtggtcgacgaggccaccaacgatgataactccgtcatcgggatgcaccccgacaccatggagaagctccagcttttccgcggcgacactgtgctgctcaagggtaagaagagaaaagacaccatctgcattgttcttgctgatgacacctgcgaggagccgaagatcagaatgaacaaggttgtcaggaagaacctgagagtacgacttggtgatgtcgtgtctgatcatcaatgcccagatgtcaaata

SEQ ID NO: 404402 - DNA, 401 bp, Oryza sativa nipponbare
cacaggctttcttaaaggacccattcaggaagggaaacaacatccttgtcatgtgcgattgctacacgcctgccggagaaccgatccccaccaacaagaggcacagtgctgccaagatcttcatctcccctgaggttgcttctgaggagccctggtacatgattgagcaagagtacaccctcctccagagggacatcaactggccccttggctggcctgttggtggcttccctggctcttagggtccttactactgtggtatcggggctgacacgtcttttgggcactgatatagcggactcccactacaaggcttgcctgtatgccggaatcaacatctgtgcgaatcaacacgcaggtcatgccaggacagtggcagtttcaaggtggcccgactgtcg

SEQ ID NO: 404403 - DNA, 429 bp, Oryza sativa nipponbare
tcttcatttgcagccaatttgattgcttgcaaaattgtgccaaattttcagtactagatgagataggatcagagttcgaccagctgggatgcgttggcttctccttgccctgttcttggttgctctggtgagcaacggcgccgccgtccatggcgccttcaacaggttcagcttcccggaggacttcatcttcggcaccggctccgcggcttatcagtacgaaggcgctgtgaacgaaggcggcagagggccgagcatctgggacacgtacgctcacattccaggcaaagttgaagatggtagcaacggggatgtagcagtggacttttaccatcgctacaaggaggatctgaacttcgtgaccgacatgaacatggacgccttccgtttctccattgcttggagcaggatcctgccaaatggaaccat

SEQ ID NO: 404404 - DNA, 341 bp, Oryza sativa nipponbare
taatgattgcttccagagccatgcagaagatgggtcaccctgacggagagttttcaacgggctgggcacctttagcagaaggaactataatgacactgtcgtatagggctacttaaagtttcaaggacgtcgtctcaactggaccagaaatacgtttattactgctatacgtgtacaatgacatgaatgtgactgttcaacttgtcataagagccgagagagcttggtttaatgcgattcgactgactattgacactcctatactggtacccagggtatctgacatcaagaacaggtacgttctgtccacatactggatactgaagaatttaaaaagcctg

SEQ ID NO: 404405 - DNA, 427 bp, Oryza sativa nipponbare
cggacgcgtgggcggacgcgtgggcggacgcgtgggctcgaatcttgctgaaaaaggagggagcttttggggtagggatcatggctcacctgctgcagcttccagacctcgcggcggcgaggccgccggcggcgcggaggaggatcgcggcggcggcggtggtggtggcggaggccaggggcggggtgaagcagcagcagcagcaggtggcggtggggagggtgatcagggtcgccgaccccgtgcgggaggggaggctgctgctgctgccgccgccgctcttctccgtgccggtcacgccgtcggagtcgccggcggcggcgaggcggcgggaggaggacgaggaggagcggcggacgtactacctcaacatggggttcgccatccggacgctgagggaggagctccccgatgtcttttcaaggag

SEQ ID NO: 404406 - DNA, 435 bp, Oryza sativa nipponbare
cggacgcgtgggctagcccagaggagatcaagctcgcaaaaaagagtggcgtggtttttgctgtgaagttgtacccttctggagcaactaccaactcccaagatggtgtcactgatatatttgggaagtgcttgcctgtgcttgaggaaatggctaggcaggagatgcctttgcttgttcatggagaagtcacagatcagcatgttgatacctttgatcgtgagaaggttttcattgagaaaatattggcaccacttgtacaaagactgccacagctgaaaattgttatggaacatatcaccactatggatgcggttaacttcgtagaatcatgcaaagaaggtcatgttgctgcaacggtgactccccaacatcttcttctcaacaggaatgcgttattttcaggtggcttgcagccacacaactattgcttac

SEQ ID NO: 404407 - DNA, 436 bp, Oryza sativa nipponbare
cccacgcgtccgcgccgtccgccgtcgctagcagccggagaagagaagcatggatacccaggtcaaacttgccgtcgtggtgaaggtgatgggccgcaccggctccaggggtcaggtgacccaggtcagagtgaagttcctcgacgaccagaaccgtctcatcatgaggaacgtcaagggcccggtccgtgagggcgacatcctcaccctgctcgagtctgagagggaggccaggaggctgcgctgaagctgtggcggttgtgttatttcgtggttcctgccttttgaaagtaaaatgccatattgtcgccttatttcgtgtactgcttttccggtccagttcttgaacaatggtttgtctttctgagtaggccttatatgttatgagttaagagcaatggaaatgtaatgggtacttgtctggttgcagttttgg

SEQ ID NO: 404408 - DNA, 436 bp, Oryza sativa nipponbare
caggataccagactctaaatgaaagagaagaaagtttcaagatgaaggaactcacaactttgcattgcggcttctataacgaaaatggagggttcaaagtttctgatgttgataaagattatatgaggtcttgtagtgtcgttgtggccacttgtgcatttggtggaggggatgaccttcaccagccaataggaatgacagaagtatctataaagaaggtttgctatgttgcattctgggatgaagtcactcgtgcagctcaagaggaggaagggaacaagattggtgaaaacctcatgattggcctttggcggattattctcgtgagagatcttcctttctcagatcaacgattgaatgggaaaattcccaagctgataagtcatcgccttttccctatggcaagatactcaatctgggtggattcaaaatctca

SEQ ID NO: 404409 - DNA, 439 bp, Oryza sativa nipponbare
catacatctcatcatcagcaaccaattcgcaccgatcgatcgatcgagccaccaactagagcaacagtactagctaggaagcatggcccgtgcacaggtggtgctggtcgccctggaggcaactctgctcctcgccgccccgcacgccgacgtggccatcacctgcggccaggtcaactccgccgacaggccctgcctgacctacgcccgcggcggcgccggtccgtcggcggcctgctgcagcggcgtgaggagccttaaggcggcaggaagcacgaccgcagaccggcgcaccgcctgcaactgcctcaagaacgcggtccgcggcatcaaggggctcaacgccggcaacgccgtcagcatcctctacaagtgcggcgtcagcgtcccctacaccatcagcgcttacatcgactgctacagggtgagctgagccatc

SEQ ID NO: 404410 - DNA, 366 bp, Oryza sativa nipponbare
gcaaagaaaaggcctgtttcaatgatagggtactcacaccttgctctcctttggggcggagaaaccaggagcgatggagcatgctactctcctcaagtcatctatactttccaagaacactgaatgctctgccacagaacaggctgccgccgacaagccggtgactgtctccatggtcggccgcgctggcgcctactactatgagctttgcaagaccgagaaaaccatggcatcaccgggaaggggtatccctgccttgggatcaatcaacacgacctgcccttaaaggcttgctgtacatggcctatgaaacaccgaggcccacgcgcatgcttaccggaccctccttgtcactcgaccgggctt

SEQ ID NO: 404411 - DNA, 314 bp, Oryza sativa nipponbare
ccaaggcataggtccaggatttatcccagaaatattggacagatcacaaataggtgagagagtaacagtgaccactcaagaagctatctacatggcaagaatgttggcatgggaagaaggattgctcgttggaatatcttcaggagccaacgcagatgccatcttgaaggttgcagcaagggaggagaacaagggaaagatgatcgtgacgatgttcttcagtggtggggagagatacctgaattcggagctatttgctcaggtgaaggaggaatgcattaacatcaccaaggcattctgtttgacatgtgtat

SEQ ID NO: 404412 - DNA, 331 bp, Oryza sativa nipponbare
cccacgcgtccggcacaagcagctctagctagctacaggcatcagtggtcagtagaggggtcagttgcaactagctagctagttagattatatcttcagtgatggctccggcctgcgtctccgacgagcacgccgtcgcggtgtcggcggagcggctgtggaaggcgttcatggacgcgtccactttgcccaaggcctgcgccggcttggacgacgacattgcggtcgaggggaacggtggttcgggcaccatctacaccatgaagcttaaccctgccgcgggtgtgggaagctcatacatgacccggttggcggtgttcgaccaccgtaa

SEQ ID NO: 404413 - DNA, 435 bp, Oryza sativa nipponbare
caaaggcttgccgtgtgcatgatatgattcttgatctcatcgtatccaaggcagtagatgaaaatttttcgacttccattggtgatgaaacacatagattggcatctcaagctaagattcgccgactctctgttgactactctgggcaagaagtttctgtatcatggccatccctgatgttagctcatgttcgatcccttagcatatttggatactctgaacaaatgcctcctatttcagaattcaaagctttaagagtgttggatctagagagcagtgtgaaattgcaaaactctgatcttaacaacgtggtggatctatttcagttaaggtacttacggattgcagccagtagaatcacacatcttccagaacaaattggggagcttcagtttctcaaaacattggacctgcgtcgtacatggataagaaaat

SEQ ID NO: 404414 - DNA, 435 bp, Oryza sativa nipponbare
cttacacgttccaagcctctctacactcttctcttctcttatcgacgcgaccgctttcttcaccggacagccgccgatgtcaccaaccgccgtcgacgcgggagccggtgcagaggatcacattacagggctctctcggtggacgctgcgcctctgtgcgggatcctccgacgcttgaggtctggcggattcggggggacgtcggagccgttgtgagcgccctcggtggctatgaagcttatgggtgcgcactcttacagcatccgcagcttgccgatgttgctgttctggtcccgggggcagccgcagatgccgacctagagcatcttgcggtggaagtacccgacgagagctgcctatgtaacgcgcggtgtatggcttgcccgacggtccgggctcgttgaggctgtccatgtagatatcgagcttgtcggg

SEQ ID NO: 404415 - DNA, 423 bp, Oryza sativa nipponbare
cttggtcctgttctcaggtggtggctattgtctatgccattatgacaacaagaagatgagcacataacatgggaaatgagggcaatccgagtgctgccgatgtttgtcttgcctgctgtatcttctgtgatatattcaacagtcgtaaaattcacaaggatgcttgagcggaaagaccagaagacacttgaaaagctgagagctgagaggaaggccaagattgatgagctaaaagagagaactaattattacctcacccaacagcttattcagaaatatgacctatatccagctgcaaaggctgcggcagcatcggtattggcatctaagctcggagaggaaactggcttagaagtacatgttggtgaagaaccaaaactggattcagcagttgctaggagcaatgatgtggagatatcacca

SEQ ID NO: 404416 - DNA, 433 bp, Oryza sativa nipponbare
gcggagaaagggccggatgtgttctacaaaggcgcagttggtgatcagctggcgaaggatattcaggaagttggagggatcataacaatggaagatctgaagaaataccaagttaagatacgtcggccacttttagagaatgtattgggactgacagtattaagcatgcctcctccttcagctggtggtgctgggctaatgcttgttctgaatatccttactcagtatggcctccctgctggtttttctggctcacttgggatccatcgtctaattgagtccttgaagcattactttgcaataaggatgaaccttggcgaccctgagtttgtaaatgttaacgaagtcgtctctgatatgatgtcccctaaatttgctgctgacctgaagaaaaccatctatgataacatgacatttgaccctaaacactatg

SEQ ID NO: 404417 - DNA, 360 bp, Oryza sativa nipponbare
catacacgtcctcataagacctcatgtccacatgtacgatctcgtctcctactacacagcataggggttctcctctggagacatcggcgagacacatggagcgcacaccgttttacgtgcaagtttactaaacttctgcacccgtgtatactgcgacatcaacgtcagccaggactactgctcgaactagctgtacttctgctcggcccgcggcggcgaccccgcgctagcgccgctgtactccctgacctgcagcgcgttcgacagccgatactacagcagccatcaggccagcgcctagctcatgcactgcgaccaggagctattcaacaaggagttgatcgactagaacgtccacat

SEQ ID NO: 404418 - DNA, 433 bp, Oryza sativa nipponbare
cgcccacatcacacgcagaaatccgcatcaacagccagccatggcgtccacactgaccaacgtccttctgtctaccccggcggcagcagcttcttccctcgttaggccggacgacggagctggacgcgtggtgtttccccgtgttggccgaggcgggttcgcggcggtgagggcgagcgggccggcgacgctcccggacatctcggacaagatgtcggagagcatcgacaaggcgaaggaggcgtgcgcggaggacacggcgagcggcgagtgcgcggcggcgtgggacgaggtggaggagctgagcgcggcggcgagccacgcgcgcgacaagctcaaggagacctccgacccgctcgaggcctactgcaaggacaacccggagaccgacgagtgccgcacctacgacaactgattcttaccattatatgtt

SEQ ID NO: 404419 - DNA, 214 bp, Oryza sativa nipponbare
cactcacacgcattgcagaggagaggctacactggaggggaaggaggaggacctgcgggtgggggcgaacagtaactcggagaggcagccgatagggacggctaggcagggcgccggagacgacaaggactacaaggagccggctgcggggccggtgttcgagccaggggagctcaacgggccgtcttactaccgcgcacatatcggacaagat

SEQ ID NO: 404420 - DNA, 436 bp, Oryza sativa nipponbare
cccacgcgtccgctttgttgaagagcgcagaagtaaactttgcaagctcattgaggacagaatgagatggtccagtttccgtgccttctggcttgcaattgaccaaagcacaaggcatcgcatgtcgacagagaagagtgatgtcatactgaaaataatagtgaaacatttctttgtggagaaagaagtaacttcaacgttagttatggactctctgtatacggggttgaaggcgctcgagtgccagagcaagagcaagagcaagaaaggcataatagactcagtggattttgtagagctgccagtgcctatggtccatgttgatgtggacatgtgtgtttcggctggagatgtcatagctttgcttgagagggcagctttagaacccttgccttgtcagcctgtgtctccaaaggatgacaaaagttcccagagc

SEQ ID NO: 404421 - DNA, 437 bp, Oryza sativa nipponbare
cgcaaaacggccaccaccacaccacagagagcccgagagccctactccccttctctcctcttcttcctctcccgcaagcaaagcgcacgccgcctttgccttagatctcctcgactccgccgccgccgccggcgcctccccacggtccctccctcgccatggagggtaacagtaccaacctcgatgcggcgatagagtcgctcctcaacgtggagaagcagatgaggctggccggcgatgtcgccggcacgaggaaggccgccatcgacatcgtcgagctctgctacaaggccggcgcctggaagacgctcaacgatcagatcgtggtcctctccaagaggaggggccagcttaagcaggctatcactgccatggttcagaaagcaatggagtacattgacttaacgccagacatggacacacgtattgagctaatc

SEQ ID NO: 404422 - DNA, 436 bp, Oryza sativa nipponbare
gggcaattacgccacagctcactgaattcgatcgcctctctctctcgttgctgccttctggcaaaccatggccgtccaggttcaacgaacgcccctcccccggtccacgtacaccggccatcgggtctatctcctgcgggccccacctgcagtgacacggtgcaccgtggaccgcgcctttccgcgcagtcatggacctccccttcctcctctcctgtataaaacctcgcgtcctgatgcttcctcctccaactccacgagccgccatttcccaaggaggagcaaggattgttgttgtttcgctgtcagatcgattcctgacgggataatgggtgagaccatcgccaaggatgtcaccgagttgattgggaacacgccgttggtgtacctcaaccgggtgacggatgggtgcgtcgggcgcgtcgcggccaaactc

SEQ ID NO: 404423 - DNA, 434 bp, Oryza sativa nipponbare
ccgtgcacaaggctcttgggggcggtaaaactgctgatgtactattatggaaagacaagaagacatccgctgtagtgattggtggtgcaactgtcatatggatcttgtttgaagtgcttgattaccatctcttgactctgctttcccatgtgatgattggtgccttggccatcttgttcctgtggtcaaaagctaccacatttatcaagaagagtccaccagatattcctgtagtacagatacctgaagatgtcgccgtgaacgtgtcacgagcattacgcagtgacataaacagagcacttcacctgtttcgggagatcgcgttggggcatgacctaaagaagtttctgggcgtgattgttgctctctgggttctctcagaagtaggaagctgctgcgacttcctcaccttgatatatgttgccgtcctgatg

SEQ ID NO: 404424 - DNA, 320 bp, Oryza sativa nipponbare
cccacgcgtccgcccacgcgtccgcccacgcgtccgcccacgcgtccgcccacgcgtccgcgttctttgatccttcacggagtaaagattttctgttcatctcaggaaccaagatgcgggcttttgcgaaaagtggagagaaccctcctgacggtttcatgtgccctggtgggtggaaagttcttgtggactactacaatagtttgcaaaccgaagaagcggctgtggcaactgtatgagaaacctactggtttgctgagattgttcagtcgcggcaggcacaagatcttcagatctctcagagatattttttttaggct

SEQ ID NO: 404425 - DNA, 365 bp, Oryza sativa nipponbare
gtcgaccgacctgaggggccccgaggccgacatctccgcgctcgtctccggcttcgccgccaagggcctgagctcgcgcgacctcgccgcgctgtccggcgcgcacaccgtaggccgcgccagttgagtgaactttcgcacccgcgtatactgtgacaccaacgtgagcccggcgttcgggtcgcaccagcggtagtgctgcccggcgtccggcggagacgccgcgctggcgccgctggactgcctgacccccgacgcgttcgacaacggctactaccgcaacgtcgtggccggcgcctggctgctgcactgcgaccaggagctgttcaacaacgggtcggtggactcggtggtgcagttgtaca

SEQ ID NO: 404426 - DNA, 429 bp, Oryza sativa nipponbare
gtcggacatggcgtcacccatgctctccgccgtcaccgtgccactccagggaggcggctggtcggagttctccggcctgaggagctcgtcttcgctgccgctgcggcggaatgccacctccgacgacttcatgaacgcggtctccttcaggacccacgcagttggcacgagcggcggggcgcggcggacgccgacggaggcgaagctgaaggtggcgatcaacgggttcggccgcatcgggcgcaacttcctgcggtgctggcacgggcgcggcgacagctcgcccctcgacgtcattgccatcaacgacaccggaggcgtgaagcaggcgtcgcaccttctcaagtacgactccacgctcggcatcttcgacgccgacgtcaagcccgtgggcgacaacgccatctccgtcgacggcaaggtgatcaa

SEQ ID NO: 404427 - DNA, 375 bp, Oryza sativa nipponbare
gtgatcctctacaatcatcgactttcagcaaattaagatggctgctgccttctgctccagcgttggagctccggggtccactcccaccaacttcctggggaagaagctgaagaagcaggtgacatcggcggtgaactaccatggcaagagctccaacatcaacaggttcaaggtgatggccaaggagctggacgagggcaagcagaccgaccaggacaggtggaagggtctcgcctacgacatctccgatgaccagcaggacatcaccagggggaaggggttcgtcgactccctttttcaggctcccacgggtgatgggacccacgagggcgtcctcagttcctacgagtacctcagcccgggtctcagaacgta

SEQ ID NO: 404428 - DNA, 279 bp, Oryza sativa nipponbare
ccaactctttccattgatagtgaagtcggtgaccaaaacttatcatcgcttaatggtgggggtatgaatttcggggcacagtcttcccaactttttggggaagaaacataagaataatgcgacatctacttgttaactaccatggcaagagctccaacatcatcaggttcaaggtgattgtccaatgagctgaactagggcatgcagaccgtccataacagatggaaggttctcgcctactacattttcccataccaacaggacattaccagggggaag

SEQ ID NO: 404429 - DNA, 439 bp, Oryza sativa nipponbare
  unsure (1)..(439): unsure at all n locations
cccacgcgtccgcttcttctctagctattagtggtggggaataatggctcccgccaccaccgcagcaatggccctcgcgccgcctccttcccatcaccatcaccatcaccatgtcaagcagctgcagctccctccgtctgtctccgtctccgtgcccctccgctccggtttccttggccgcgcactgcctgctgctgcccacccacagccgctgctcgccgccgagagccgccgcagcagcgccgtgtccgtgcggatgtcgtgggacgggcccctctcctcggtccgcctcattatgcagggccgcaacgtcaagctgaatgagaaggtgaaggagcacatcgaggagaaggcggngagagcagtggcgaagcacagccagcttgtgaaggaggtggacgtgcgcctctccgcccgcggtggcgagctcagccgaggt

SEQ ID NO: 404430 - DNA, 358 bp, Oryza sativa nipponbare
  unsure (1)..(358): unsure at all n locations
ccagcagcagcagcagtagctgagcttgaagcagcagagcgaggtagacatggccgccgccaccatggccctctcgtccccggcgctggccggcaaggccgccgcgaaggtgttcggcgaggggcgcatcaccatgcgcaagtcggcggcgaagcccaagcccgccgcgtcggggagcccgtggtacggcgccgaccgcgtgctctacctcggcccgctctccggcgagccgccgagctacctgaccggcgagttccccggcgactacgggtgggacaccgcggngctctccgccgacccggagacgttcgccaagaaccgggagctggaggtgatccacttccagtgggcgatgctc

SEQ ID NO: 404431 - DNA, 436 bp, Oryza sativa nipponbare
aattattgtgtctggggaagtgccattgggctatctatgccattctacatatgcctcatcgtgatgacgccccatacatccatgagaagttgatcagggaaattttgtcacaatattgcgaatcatggagcaaggatgaaactcagagagtttatattgcacaacttgttattccagtagaatggatgcatgacactctggctctttacaatgaatactatggagatcagcaaagcgcactggagaattatattctgtgtggcaactggaagaaagcccatacaattttcatgacatccattgatcattctttgtttctgtcatctaagcatgaagagatctgggacattacacgctctttggaggttcacaagtctgaaattgctgactgtgaacttagtgctggaatatacatagacttcttcattctaagaaa

SEQ ID NO: 404432 - DNA, 437 bp, Oryza sativa nipponbare
cccacgcgtccgcccacgcgtccgcccacgcgtccgtccacgcgtccgcccacgcgtccgcccacgcgtccgcccacgcgtccgtaccatgtttggaagcggagcacctgactttggtgcagcaagtgatggtgatggtgatcgaaacatgattcttggaagaaggttctttgttacaccatcagactctgttgcaataattgcagcgaatgcacaggcagcaattccttatttccaatctggtccaaaaggtcttgctagatcaatgccaacgagtggtgctcttgatcgtgtagctgataaattgaatgttccgttctttgaggtaccaacaggatggaaattttttggaaacctaatggatgcaggtaaattgtctatatgaggagaggaaagttttggtacaggatctgatcacatcatggagaaggatggca

SEQ ID NO: 404433 - DNA, 439 bp, Oryza sativa nipponbare
ctcctccgaagagagagaagggaatctctcctcttctgttctcttctcgcgccgccgccgtgtgcagtgcccaagatgcggggcagcgccgacggcggcacgccggacgtcaccctggagacattcatgggcgccttcaccatcgagatgtactacaagcacgcgcccaagacctgcaggaacttactcgagctctcgcgccgcggctactacgacaacgtcatctttcatcgcattatcaaggatttcatcgtgcaaggtggggatcctactggcaccggaagaggcggcgaatccatctacggagcaaagttcgaggatgagattaggccacaactgaagcacaccggcgctggaattctgtcgatggccaacgctggtccaaatacaaatggaagccagttctatattactcttgcgcctcgtcagtcacttgatg

SEQ ID NO: 404434 - DNA, 436 bp, Oryza sativa nipponbare
cccacgcgtccgcccacgcgtccggcaagcggtgtccctcacatcttctcccacttcatcaccaacctccctgcaatccactcggttgtcgtcttcgtctgtgtgaagtaccttccagtgtacaccgtcccgatggatgagcggttccttgtgaggaggatcgggccaaagaacttccacattttccgctgtgttgcgaggtacgggtacaaagacctccacaagaaagatgaggactttgagaagatgctcttcaactgcctcttgtccttcctgcgactcgagagcatgatggagggctattccgattctgatgacttcagtgtgccggagcagaggacggagggatccatcagcaatgcatttttggctgagaaaaccaacaacaacacaatgtgctccaatggtgacctgagctactcatcacaggacttca

SEQ ID NO: 404435 - DNA, 439 bp, Oryza sativa nipponbare
cactaatcacactgaattaacaccgtacttacggttgatgagcatgatttgagcaagcagcatcgattctacggggagtcgaagccgttcggcaacgagtcgaacagctcgccggagaagctggggtacctgacgtcgacgcaagcgctcgccgacttcgccgtcctcatcaccagcctcaagcacaacctctccgccgtctcctcccccgtcgtcgtcttcggtggctcctacggcggcatgttggcttcatggttcaggctaaagtatccccatgtcaccattggcgccgtcgcgtcctctgctccgatcctgcagttcgactacataactccatggagcagcttctacgaggccgtctcgcaagattacaagtctgaaagcttcaattgcttcagtgttatcaaggcagcttgagatttgatagatgagaggggat

SEQ ID NO: 404436 - DNA, 431 bp, Oryza sativa nipponbare
agcagtagtagctgagcttgaagcatcagagcgaggtagacatggccgccgccaccatggccctctcgtccccggcgctggccggcaaggccgccgcgaaggtgttcggcgaggggcgcatcaccatgcgcaagtcggcggcgaagcccaagcccgccgcgtcggggagcccgtggtacggcgccgaccgcgtgctctacctcggcccgctctccggcgagccgccgagctacctgaccggcgagttccccggcgactacgggtgggacaccgcggggctctccgccgacccggagacgttcgccaagaaccgggagctggaggtgatccactccaggtgggcgatgctcggcgcgctgggctgcgtgttcccggagctcctcgcccgcaacggcgtcaagttctgccaggcggtgtggttcaaggcgggg

SEQ ID NO: 404437 - DNA, 404 bp, Oryza sativa nipponbare
cggacgcgtgggcggacgcgtggggatctggcaaaggacaggctggctctgcagaggttacgtgaagctgctgagaaggctaaaattgaactctcatcgactgcccagaccgagattaaccttccattcatcacagctgatgcttctggagctaaacatttgaacattacacttacaagatcaaagtttgaatctttggtgaatagccttatcgagaggaccagagagccatgcatgaattgcttgaaggatgctggtataactaccaaggaggttgatgaggtccttcttgttggtggaatgacaagagttccaaaagtgcaggaaattgtttcagagatttttggcaagtccccaagcaaagggtcaacccagatgaagctgtagccatgggtgcagccata

SEQ ID NO: 404438 - DNA, 440 bp, Oryza sativa nipponbare
cggacgcgtgggttaaaatctctcctctctctccaagtccctgcctctcactagatatcattcatacataaatgccaacctgtttgctttctcagctagaaaaacagagttcttgctttcttcagagggaaattggcttcttggaatcctaattagagcaaatacatgatatcctaggagataaacacacacacaaaaatctaattgaggaaactgattgccactagcttcaccaagaaatggagagggagcagatgaggatggccatcctgaggcaagaacaaacattcagacaacaggttcatgagctgcacagactgtaccatgttcagaaacagctgatgacgatgccggtgcggcggctgacgatccagatggcgcacaagaagggggccgggagcaccaagaacgggagggactcccccgggcagcgcctcggt

SEQ ID NO: 404439 - DNA, 234 bp, Oryza sativa nipponbare
gcgacgaccacggtgttctacatgctgtgcgggtgcatgggctacgcggcgttcggcgacgcggcgtctgactacctccttacgggcttcggcttttacgagcccttctggctgttcgacgttgccaacgtcgccatcgtcgtgcactttttcggtgcctaccaggtgttcgtccagccaatcttcgacttcgtctgagcgctgggccttttgccggtggccggacagtgtgtt

SEQ ID NO: 404440 - DNA, 399 bp, Oryza sativa nipponbare
gtggcctgatgctcctgcagacgatgcttcatcctactacaaggttcctttctcgggaatcgtttacatcgaaaaaactgattttcgtctaaaggactcgaaagattactacgggctagctcctggtaaatctgccctgctaagatatgcattccccattaaatgtaccgaggttgtttatggtgacaatccagatgacatcattgaaattcgagctgaatatgacccttcaaagactactaaacctaagggtgttctgcactgggttgctcagccagcacctggagttgaaccacttaaggtggaagtaagattatttgataaattattcctctctgagaatactgctgaactggaggattgggtgggtgatcttaacccgaactcaaaagaggtgat

SEQ ID NO: 404441 - DNA, 376 bp, Oryza sativa nipponbare
cggacgcgtgggcggacgcgtgggcggacgcgtgggcaacaacaagtcctacggcggcgccgccaagatcaacaacaacaacgtcaacgccttcgggttcaacaagatggggggttacaacaacagcagcaacggcggcggcaactacggcggcaacggcggcgacgtgaagagctacttcaacaagtcggtcgggaggccggcgagcaacaacaacaacaacaatagtaacggcggtggcgggtactacggcaagaagggcggcgacggcgccggcgggaagaagaagcacgccaagaacagcgacagcggcgcgcaggcgtcggacaagaggttcaagacgcttgccggcgtcggaggcgctccccccgggacg

SEQ ID NO: 404442 - DNA, 468 bp, Oryza sativa nipponbare
cccacgcgtccgcgctcatcgccatctctctcagctctcacagctcactgcatcaatggccgcggccaccatggcgctctcctccccggtgatggcccgcgcggcgccgtcgacctcctccgcgctcttcggcgaggcgcggatcaccatgcgcaagaccgccgcgaagcccaagccggcggcgtcgtcggggagcccgtggtacggcgccgaccgcgtcctctacctcggcccgctctccggcgagccgccgagctacctcaccggcgagttcccgggcgactacgggtgggacaccgcggggctctccgccgacccggagacgttcgccaagaaccgggagctggaggtgatccactcccggtgggcgatgctgggcgcgctcggctgcgttttcccggagctcctcgcccggaacggcgtcaagttcggcgaggccgtgtgtgtcaaggcgggctcgcagatctt

SEQ ID NO: 404443 - DNA, 347 bp, Oryza sativa nipponbare
cgagctcatcctggaagacctccgcaacaagagcgacctgctgctcaaccacaaccccgtccacaagctcgtccccgtcctcctccatggcgaccgctccttgagcgagtccctcgtcatcctcgagtacatcgacgagagcttccatggtccacccatcctcccaaccgatccgtacgatcgagccgtggcgcgtttctgggcgcagttcatcgatcagaagtttggtaggttcaatttctggatcccgttcgtgcaaatggagggcaacatgcaggattgtttcgtgagggaagcaaaggagaatctggcgcttcttgaagggcagctcaaggggaggagattct

SEQ ID NO: 404444 - DNA, 449 bp, Oryza sativa nipponbare
  unsure (1)..(449): unsure at all n locations
gagcttggtgagctgcagagatggccccctccgtgatggcgtcgtcggccaccaccgtcgctcccttccaggggctcaagtccaccgccggcatgcccgtcgcccgccgctccggcaactccagcttcggcaacgtcagcaatggcggcaggatcaggtgcatgcaggtgtggccgattgagggcatcaagaagttcgagaccctctcctacctgccaccgctcaccgtggaggacctactgaagcagatcgagtacctgctccgttccaagtgggtgccctgcctcgagttcagcaaggtcggattcgtctaccgtgagaaccacagatccgncggatactacgatggcaggtactggaccatgtggaagctgcccatgttcgggtgcactgacgccacccaggtgctcaaggagctcgaggaggccaaaaaggcgtcccctgatgca

SEQ ID NO: 404445 - DNA, 456 bp, Oryza sativa nipponbare
cccacgcgtccggtcgtggctcgtcaagctcctcctctcccgcggctgctacaccgtccatggcaccgtccgtgatccaggcgacgccaagaacgcccacctgatgtctctggacggcgccgcggagaggctgcggctgttcaaggccgacctgctcgactacggcagcgtggcggcggccatcgccggctgcgacgacgtcttccatgtggcctgccccgtgctcctctccgcccccaacccagaggttgatatacttgctcctgctgtaacgggcacgacgaatgtgctgaaggcttgttcagaagctaaagttgggaagggttgtgtgtgtcatctgtctctgctgcgatggtgaatcctaactggtctgagggcaaggccatagatgaagatggctggtctgatgtcgattactgcagagccactaaagattggtatacccttgggaaaaca

SEQ ID NO: 404446 - DNA, 355 bp, Oryza sativa nipponbare
  unsure (1)..(355): unsure at all n locations
cccacgcgtccgctcccctctgctttgctcttcttccccaccggcgagtcggcggcgaccgatccctccccgagccgccgccgccgccgcgatgtcgtcgccgggagagagcgggccttcggcttcggcaaaggacacggatgccgcgcagagggcgcaggagcaggagcccgggaagcaggggggcgcgacgagggagcggcggatggagtcgctggggtggctgacggagtcggcggtgatgccgaagaagcacaaggccatcgagggggtcggcgccgcgtccatcctcgacctcaaggcgcagctctaccgcacccaggaggaggcccgcaagcccnaccgccacgacgcc

SEQ ID NO: 404447 - DNA, 427 bp, Oryza sativa nipponbare
agcactgataagtgacagccctgttatcttgaatgtggactgtgacatgtattccaacaatagtgattcaatcagagatgcgttgtgcttcttccttgatgaagaaatgagccacaaaattggatttgtccagtatcctcagaactacaacaatatgaccaaaaataatatatatgggaactctctcaatgttatcaatcatgtggagatgcgtggtttggacagtgctggtggatgtctctatattggcacaggatgcttccatagaagagagatcctttgtggtaagaaattcagcaaagattacaaggaagactggggcagaggaataaaggaaagaggacatgagaacatagatgagattgaagagaaggcaaaatctttagcaacctgcacttatgaacttaggacacaatggggcaatgag

SEQ ID NO: 404448 - DNA, 367 bp, Oryza sativa nipponbare
aatcgcgcacgtacgcacaccgcgacccggggcgagatggcgcagtcgatgctggtgtcgggagccaatggcacggtggccgccgcgagcaccagcaggctgcagcccgtgcggccgacgccgttctcgcggctcgtgctgtcgcagccgtcgtcgtcgctggggcgcgcggtgtccgtcaagacggtggcgctgttcggcaggtccaagaccaaggccgcgcccgcaagaaaggctgagccgaagccaaagttcaagaccgaggacggcatcttcggcacgtccggtgggatcggtttcaccaaggagaacgagctgttcgtcgggcgtgtcgccatgctcgggtttgccgcgtcgatcctgggtg

SEQ ID NO: 404449 - DNA, 509 bp, Oryza sativa nipponbare
cccacgcgtccgagcttagctactcgatcatcagatcatcgatcatccgacgatcaaatcagtaatcttgaatatggcggctttgaacggtaaggtggtggtggcggtgatggtggtggcgatggtggtggcggcgccgggagcgtcggcggcgatcacgtgcggtcaggtgggatcggcgatcgcgccgtgcatctcgtacgtgacggggaggagcgggctgacgcagggatgctgcaacggcgtcaaggggctgaacaacgccgcccgcaccaccgccgaccgccaggcggcctgccgctgcctcaagagcctcgccggcagcatcaagtcgctcaacctcggcaccgtcgccggcgtccccggcaaatgcggcgtcaacgttggcttccccatcagcctctccaccgactgcaacaaggtcagttaaatcaatcctgcttggatcgatcgatcgagcttaacatgctagctccattcggagttgatcagctagtaattaagcacgt

SEQ ID NO: 404450 - DNA, 419 bp, Oryza sativa nipponbare
cccacgcgtccgcggacgcgtgggcgcgcttccgccgctgcagccgatacgggagattggatcggaagcttctagaagtttccgtgggcgatggcgatccgcgcgaggtcctcctcctacgccgccgcggcggtcgcgctggcgctcgcgctggcgtccgtcgccgctgtcgccggcgaggtcttcttccaggagaagttcgaagatggatgggaaagtcggtgggtcaagtcagaatggaagaaggatgagaacatggctggtgaatggaaccacacatctgggaagtggaatggagatcctgaggacaaaggtatccaaacctctgaggactacaggttctacgctatttcagcggagtacccagaattcagcaacaaggataaaaccctggtgctgagttctctgaaagcatgagc

SEQ ID NO: 404451 - DNA, 336 bp, Oryza sativa nipponbare
gtagtgagagaggaagacgagagagccgcctccgcggccatcgccgccgccgcagcagcggggccactaccccgactgccccctcccctcctcccatggccgcgatgccaggtgggcccgaccttgccggggccggtggcgccgtcgccgtcgccgtcgacgcgatgcaggtcgacgacccgccgcgtgcgtccgccgaggagaagcatggtcccactataatgggaggaaatgatccagtcacaggtcatataatttcaactactattggagggaagaacgatgagcccaaaaggactattagctatatggctgaacgagttgttggaactggat

SEQ ID NO: 404452 - DNA, 270 bp, Oryza sativa nipponbare
cggaggtctgggccgttggtctcagataccgcatcaagctgcagaccagagctctctgtcttagcaccaacaggttgagcacgtcgtcagtggccatccgcgcacatgcatggtcggcggtgtcatgcccgacggcgacgccggcgtcgtcgacaggcaagcagacgctgcgcaagggcacggcggtcatcacctgcgcgtcgtccgggcttggcctggcgacggcgaaggcgctggcggagacaggcaggtggcacgtcgtcatggggt

SEQ ID NO: 404453 - DNA, 443 bp, Oryza sativa nipponbare
gtccactgactcgcagttcatcccggattcttctcctctttcttcgccgccggctagccggtgttcgcgctccggcggcatcagacatgtcgaagaaaatcgtggtgaagctgaacgtgcacgacaaggcggagaagcagaaggccatgaaggccgtctcggcgctcatcggcatcgacgagctgtccatggacatggcgagccagaagatgacggtgatcgggatggtggacccggtgaacgtggtgagcaagctgcgcaagtcgtgggcggcgaccatcgagtccgtcgggccggcgaaggagccggagaagaaggaggagaagaaggacggcggcggcgacggcaagaaggacggcggcggcgacggcaagaaggaaggcgaggccggggacaagaaggacggcgatgcggccaagaatgacggcgacaaggacggcgag

SEQ ID NO: 404454 - DNA, 425 bp, Oryza sativa nipponbare
  unsure (1)..(425): unsure at all n locations
gttggcttctcctccccctctttaccttttcctcctcggttcggttccgtggttcgtctagggtttagtgggttgagatggcggcgccggatgtcgagtaccgctgcttcgtcggcggcctcgcctgggccaccgacgaccgctccctcgaggccgccttctccacctacggcgagatcctcgactccaagatcatcaacgacagggagacggggaggtcacgtgggtttggcttcgtcaccttctcctccgagcagtcgatgcgcgacgccatcgagggcatgaacggcaaggagctcgacggccgcaacatcaccgtcaatgaggcccagtcccgccgctccggcggcggaggcggnggctacggcggcggcggtggcggctacggcggcggtcgtggaggcggccgctaccgaggaggtggc

SEQ ID NO: 404455 - DNA, 340 bp, Oryza sativa nipponbare
cccacgcgtccgcccacgcgtccgctgagctgaggttgagagatggcacaggcaatggcgtccatgaccgggctgtcgcagggcgtgcggctgccggccgggcccaggcgcgccggcggcaggtccaggctcgccgtcgtcagggccgacgccgccgccgccgacgtccagaccggccgccgcgccgtgctcggcctcgtcgccaccgggatcgccggcggcgccctcgcgcaggcggcgctcgccgaggccgccaagcccatcaagctcggtcccccgccaccgccctccggtggactccctgggacgctgaactcggaccaggcgagggacacggacc

SEQ ID NO: 404456 - DNA, 454 bp, Oryza sativa nipponbare
cccacgcgtccggcaaaatgcagataagggagtcgcggccgaaggtgacgctggtggcgcgcatggcggcgtcggtggccaactacgactatatcgtcgactgggagttccagatggacggcctcgttcgcatcaaggttgggctaagtgggatcctcatggtgaagggcacccagtactcccacatgaaccaggtccatcaaaatgacaatatgtacggcacccttctgtctgagaacgttattggcgtcatccatgaccactttgtcactttccggctcgacatggacattgacggcgccgacaactccttcgtcaaggtggcgatggcacgacagaacaccggcgccggcgaatcccctcgtagagctacctgaaggctacccgacatgtcgcaaggacggagaaagatgcccaggtccgcctgaagctatatgagcccattcgagttcac

SEQ ID NO: 404457 - DNA, 379 bp, Oryza sativa nipponbare
  unsure (1)..(379): unsure at all n locations
gcgcccacgcgtccgcccacgcgtccgctcgcaagatgacccggcggtacatgaccgacatgatcacctacgccgacaccgacgtcgtcgtcgtcggcgccggctccgcggggctctcctgcgcgtacgagctctccaaggacccctccgtcagcgtcgccgtcatcgagcagtcggtgtcccccggcggcggcgcgtggctcggcgggcagctgttctccgccatggtggtgcgcaagccggcgcacctgttcctcgacgagctcggcgtcgcgtacgacgagcaggaggactacgtcgtcatcaagcacgccgcgctcttcacctncaccgtcatgagccgcctcctggcgcgccccaacgtgaagctgttcaacgc

SEQ ID NO: 404458 - DNA, 451 bp, Oryza sativa nipponbare
gggtggactgcgcgcccaatatcgtgacgttcaacaccctgattggttatttgtgccggaatgggttgtttgagcgggtgcacgaggtccttgcacagatgtcggaacacggatgcacacctgacatcagaatgtacgcgactatcatcgatgggatctgcaaggaagggcatctggaggttgcgaatgagattttgaataggatgccttcgtatggtctcaagcctaatgttgtttgctacaacaccgtgttgaaaggcctgtgcagtgctgagcggtggaaggaagctgaggaattactgtctgagatgtttcagaaggactgcccccttgatgatgtgacattcaatattcttggtgatttcttttgccaaaatgggttggtcgacagggtgattgaacttcttgagcaaatgttgagccatggatgcatgcccgatgtcatcacata

SEQ ID NO: 404459 - DNA, 483 bp, Oryza sativa nipponbare
  unsure (1)..(483): unsure at all n locations
gcaccatgaaggggatccgcggggacaacgcgccgtgcgtgctggacctggacgacgcggcgacggtggggggcggcgtgggggacacctacggcgaggactgcgccaccgaggagcagctcgtcacgccgtggaccgtctccgtcgccagtggttacaatttgctgagggatcctcgctacaacaaggggcttgccttcaacgaaagggagcgcgaaacgcactacctccgtgggcttctgccaccagcaatcgtatcccaggagctccaggaaaggaaaatcatgcataacatccgacaataccagctgcctctgcagaaatacatggctatgatggacctccaggaggggaatgagaggcttttctacaagctcctcattgacaatgttgaggagctacttcctgtcgtttacactccaacagttggtgaggcctgccaaaagtatggatccatatnntagccgcctcatggtctttata

SEQ ID NO: 404460 - DNA, 420 bp, Oryza sativa nipponbare
  unsure (1)..(420): unsure at all n locations
atacggcaccgatgcttacctgcacttgtcacggttgggagattcggaggagcccttgccttgaaggcttccctgtcctgataccatctctgtaattaattaggttgctcttgtctcttgtaattcctgggctggtttggaatattgttttcaagtgccagccacctatagctgttaaccttctacagtagttgccacggtttcatcacttcagctttgcagcagcatgagcacaagtctcctctctctctttctctctctctctactctgccttgtagcgaaatgtagaattcttctgccacgcacatggcattgttcatacttctcgtacttgttgagcttcatggcttggtgcagattgtactttgatagttatcagtagtaagctaacttcatcaagtgaatgtctnttgttctac

SEQ ID NO: 404461 - DNA, 452 bp, Oryza sativa nipponbare
  unsure (1)..(452): unsure at all n locations
atttcttgcaacacaggatggtgcggaagtctctttacaacagatggttgaagagttgatgatggatcctgtcaaggctgataaatctgcagtgccagatactggtgtcgaccctgactgggaataccagctaagctctatattcattgacactgagaaaggacaggcacgatatggaacacgaagcatgactgctcttgctgtgaagttcaacggcgaagtaactttctatgaaaggtacttggagagcaatctatggaaggagaatctcatngcaattgagttggagatgtcacagtgggaggatctgagaggaacttcaaatatttctccaaagagttgctgactgatgaaagttctttgcttggccttattgtttgacatgagtaaatcttgtaaatactgaaaacgcaacaacaggaatgtgtgcagtctgcagagtctcaaaccta

SEQ ID NO: 404462 - DNA, 463 bp, Oryza sativa nipponbare
  unsure (1)..(463): unsure at all n locations
gcgcccacgcgtccggattcagacagtcgcagtgaggatgctgaatgcgaggcaaccgaagagaccaaatcgtcgtcgcggcgatatggatcaaagaggagaactcgtgcagctgaagttcataacctgtcagagaggagaagaagggatcggatcaacgagaagatgcgcgcattgcaagaactcatacctcattgcaacaagaccgacaaggcatctatattagatgaagcaatcgagtatctgaagtcactccaaatgcaagttcagatcatgtggatgactactgngatggcaccaatgatgttccctggtgctcaccagttcatgccaccaatggccgtgggcatgaattctgcgtgcatgcctgcggcacaaggcctaagtcacatgtcaagattgcatacatgaaccatctatgccaatcacatcctctaaatcatctcagtatgacccaatgatg

SEQ ID NO: 404463 - DNA, 280 bp, Oryza sativa nipponbare
cccacgcgtccgcccacgcgtccgcccacgcgtccgcggacgcgtgggtgccggcccgcatccgcctgctgccaccggcccccttcacgtggccgtgcctcctcggtctcgtcgtctccgccttcctcctccctctccctctccctctcggcatctcccgaggcagcagcggcgcaggggcgggtcaacggctcccagcgcagaggctgctcagtggctccctggcgcagcggctgcccggcggcgccgcggctcgggattcggctccgagctcgggacc

SEQ ID NO: 404464 - DNA, 502 bp, Oryza sativa nipponbare
cggacgcgtgggcggacgcgtggggccgaattttcacaaaatttggtggctctccattgtcgctgctgtcatgtcactggcctactcaaccattggccttggcctctccattgcaaaaattgcaggtggggcccaccccgaggcaaccctcacaggggtgactgttggagtggatgtgtctgcaagtgagaaaatctggagaacttttcagtcacttggtgacattgcctttgcatactcctactccaatgtcctcatagaaattcaggacacgctgcggtcgagcccggcggagaacgaggtgatgaagaaggcgtcgttcatcggagtctcgacgacgacgacgttctacatgctgtgcggcgtgctcggctacgcggcgttcggcaaccgcgcgccggggaacttcctcaccggcttcggcttctacgagcccttctggctcgtcgacgtcggcaacgtctgcatcgtcgtccacctcgtcggcgcctaccaggtcttc

SEQ ID NO: 404465 - DNA, 468 bp, Oryza sativa nipponbare
  unsure (1)..(468): unsure at all n locations
gcaccttgctctcctttgccttcagagaaaccggaagcaatggcgtctgctactctcctcaagtcatctttccttcccaagaagtctgaatggggtgccacccgccaggctgccgcccccaagccggtgactgtctccatggctgtccgcgctggtgcctacgacgatgagcttgtcaagaccgtgaaaaccattgcatcaccaggaaggggtatccttgccatggatgagtcgaacgcgacctgcagtgagaggcttgcgtcaattggccttgagaacaccgaggccaaccgacaggcttacctgacactgccagtcaccgcaccgggcttgggacagtacatctncggtgctatcctcttcgaggagactctgtaccagtcaactgtagatggcaagaagatngtcgacatcctcactgagcnagaaaatcgtccaggtatcaaggtcgacaagggtcttgtgccc

SEQ ID NO: 404466 - DNA, 448 bp, Oryza sativa nipponbare
caatatttggccgaagcaggctacacgaccagaggtaagattggttgcactcaacctcgtcgtgtggctgcaatgtctgttgctaagagagtagcagaagaatttggttgtcgacttggagaggaagttggttatgccatccgctttgaggattgcactgggcctgacacggtaatcaaatacatgactgatggcatgcttttgcgtgagattcttgtcgatgagaacctttcccagtattctgtaattatgcttgatgaagcgcatgaaaggaccatacacacagatgttctctttggcttgctgaaacagcttattaagcgcagatctgacatgaggcttattgttacttctgctaccctggacgcagagaagttctcagggtattttttcaattgcaacatcttcacaattccttgaaagacgttcccggtagagatactctaca

SEQ ID NO: 404467 - DNA, 383 bp, Oryza sativa nipponbare
  unsure (1)..(383): unsure at all n locations
cccacgcgtccgcccacgcgtccgcggacgcgtggggtcgtcttctccccttcttctcctcctcctcctcgattcggagctccacccgcagccatggctaagaactaccccgtcgtgagcgccgagtaccaggaggccgtcgagaaggccaggcagaagctgcgcgccctcatcgccgagaagagctgcgcccctctcatgctccgcctcgcgtggcactcggcggggacgttcgacgtgtcgtcgaagaccgggggcccgttcgggacgatgaagaccccggcggagctgtcgcacgccgccaacgcggggctggacatcgcggtgcggatgctcgagcccatcaaggaggagatacccaccatctnctacgccgatttcta

SEQ ID NO: 404468 - DNA, 413 bp, Oryza sativa nipponbare
gcttgacaaacgactgggaggaacatctggctgtcaagcacttctctgtggagggtcagcttgaattcaaggccatcctgtttgtaccaaagagagcgccatttgacctctttgacaccaggaagaagcaaaacaacatcaagctgtacgtacgccgggtgtttatcatggacaactgtgaggagttgatcccagagtggctcagctttgtcaagggcattgttgattctgaagaccttcccctcaacatctcacgtgagatgctccagcagaacaagatcctgaaggtgatccgcaagaaccttgtgaagaagtgcgtggagctcttctttgagatcgctgagaacaaggaagactacaacaagttctacgaggctttctccaagaatctcaagcttggcatccatgaggat

SEQ ID NO: 404469 - DNA, 350 bp, Oryza sativa nipponbare
gaaatttctctccttgtagaaacaagcctagagagtactatggagcagaggaaatttttgttgtgcctaattcttggcttacttgcgacttcaggacctgccaagaccgtcaatgctgactcgccctttgatttttattatctcatcctcatgtggcctggagcatactgcactgacagcgagtatggttgttgcgtgcccaagtatggttacccgtcagaagatttcttcgtcaagagcttcatgacctttgactcgtcagagaacacagctgttgtcaggtgcaactccgacaatcctttcgacattaacaagctagactcaatcgagaacaacctgaaccactactg

SEQ ID NO: 404470 - DNA, 454 bp, Oryza sativa nipponbare
gtgacatcggcggtgaactaccatggcaagagctccaacatcaacaggttcaaggtgatggccaaggagctggacgagggcaagcagaccgaccaggacaggtggaagggtctcgcctacgacatctccgatgaccagcaggacatcaccagggggaagggtttcgtcgactcccttttccaggctcccacgggtgatggcacccacgaggccgtcctcagctcctacgagtacctcagccagggtctcagaacgtacgacttcgacaacaccatgggaggcttctacatcgcccctgctttcatggacaagctcgtcgtccacatctccaagaacttcatgaccctccccaacatcaaggtcccactcatcctgggtatctggggaggcaagggtcaaggaaaatccttccagtgtgagctcgtcttcgcccaagatgggatcaaccccatca

SEQ ID NO: 404471 - DNA, 461 bp, Oryza sativa nipponbare
cccacgcgtccgcccacgcgtccgcccacgcgtccgaggagcttctccagaagttgagggaaaagaatatcgattttgctgcacacagcaaccaggaggactctggttctcttctgttcaacctgatcggaaacttggctttcccacttatccttattggtggtctatttttgctgtcaagaagagcacaaggtggccttggtggacctaacggtcctggctttccccttggttttggtcaatctagggccaagtttcagatggaacccaacactggtgttacatttgatgatgttgctggtgtcgatgaagcaaagcaagacttcatggaagtggttgagttcttgaagaaaccagaaaggttcaccgctgttggtgctcgcattcctaagggtgttctgcttgttggtcctcctggaactggtaagactttgcttgccaaggctattggaagggaagct

SEQ ID NO: 404472 - DNA, 387 bp, Oryza sativa nipponbare
tgacgatctgatcgagtagagaggatcatgagtctatcatgcttcagcctgagtctcttcataagagtctgaattaggccaatgcatgctagtgttagcttgtctgtggaatgtggacgtttcctgcgtgcctgatgggttgaaaacttttgatgtgtggtgttacatgttgctgccatgaatttgttggctcttttttaacactgctgtgttacttctatggttatgcttaaactatttgtatcatcgagctggtatttatttatccggtgttgcacaaaaaaaaaaaaaaaaaaataattttaaatttatatataaaaattttttttaatttatttaaattattttttaatattttttaattttaattttttatttaatttttat

SEQ ID NO: 404473 - DNA, 179 bp, Oryza sativa nipponbare
gaagaggaggcaaatttgctaaggctatacgtggaccagcctggttatgttgatctgcactggggcatgtttgttcctgctataaaaggccaagggactgaagagcagcagaagaagtggctacctctggcctacaggttcaaataattggatgctatgctaactgactgtatggtcaa

SEQ ID NO: 404474 - DNA, 364 bp, Oryza sativa nipponbare
aacactagcagtagtgaattgtttccatgaagatgcacagcatgatgtggggaatacagaagcaattggcagaaatttggatttgcatgatcatacagctcatgccattgccaacgaggaccaaaggttttctgaggactctttggtgaagatgccaggaagtagcaatggaaacttggacaagtcgagctgttctagcacgaaaacaatcagctctgttatagatgacgttgctgactatgaaataccatgggaagatcttcatattggagagcgcattggtctaggttcatatggggaagtatatcatgcagattggaatggcactgaagttgcagtgaaaaaatttcttgaccaggattta

SEQ ID NO: 404475 - DNA, 409 bp, Oryza sativa nipponbare
gagaaggccatggcgtcgaaggaggaggtggccgtggagacggtggagggcggagcggcggcggcgaaggcgccgtactgggacccgccgccggcgccgctgctggacacgagcgagctgggtaagtggtcgctgtaccgtgccctcatcgcggagttcatggcgacgctcatcttcctctacgtgagcatcgccaccgtgatcgggtacaagaaccagagggccaccgtcgacgcgtgcaccggcgtcggctacctcggcgtggcgtggtcgttcggtgccaccatattcgtcctcgtctactgcaccggcggcgtctccggcgggcacatcaacccggcggtgacgctgggcctcttcttcgggcggaagctgtcgctcgtccgcaccgtgctgtacgtcgtggcgc

SEQ ID NO: 404476 - DNA, 399 bp, Oryza sativa nipponbare
gcgagaacttgttggagctgagacagcagcaccaagcaagaaaccggatccaatccatccatccatccatagtttccaatggctggcaagtacatcgccgctggtcttgttggttcctttgccatctcatatgtttgtgatcattttatcgctgagaagaagatatttggaggcaccacaccacataccgtgtccgacaaggaatggtggcaagcaactgacaagaagtttcaagcctggcctcgcactgctgggccaccggttgtcatgaaccccatcagtcgccagaacttcatcgtcaaggatctcgagtcctaagattgtagtgggagcatatatgctgaaggttgcgccgtgactaagatggcgatggctgtggctacaaactacctacctatg

SEQ ID NO: 404477 - DNA, 391 bp, Oryza sativa nipponbare
gtccctatggatgaggaagatgaagtcatactcgactacaccaccgaccccctcattacagatcagggattccaaaaatctatcctctcgagcattgcacgggctggtcatgccattgaggagctttatgggtccccacaggatgttgagggtgcagtgaaggaagggaagctatacgtagtacagacaagaccacagatgtaatctatatgtatattttatagccaagtcaatcaggcaatgttgtagagtaagatatacgggccgtgggacatgtataacacgttacgccctttttttttattatttgctttcatactcacaatacactaatttatagggcttattttatcgccaaatagtgtaatctgactatgatcataaataagcc

SEQ ID NO: 404478 - DNA, 344 bp, Oryza sativa nipponbare
cccacgcgtccgggcaagcggtagtgaagctgagaagtcacctgaggttgtgctggagtggcctaagaaggacaagaagaggcttctacatgctgtttaccgtgttggagatttggatcgcaccattaaatgttacacagaatgctttggaatgaaattactgaggaaaagagatgtgcctgaagagaaatatacgaatgcatttcttgggtttggacctgaggacaccaactttgcacttgaattgacatacaattatggtgttgataagtacgacattggagcaggatttgggcatttcgctattgcaactgaggacgtgtacaaattggctgagaaaatta

SEQ ID NO: 404479 - DNA, 273 bp, Oryza sativa nipponbare
ccgatgcctgctgctattcgtgcctgcagtcctacaaaggcgcacatggatggacctagtgagactgattctgatatacataccgaagataaggctgaatccatactgacggtgctcgagggacctatccacccagatcctgagctcgacgtgccaaatgaactgatcactcagggtgagcttgtggactagaaattgctacgcaaaccatcatttgcttctctgagtaaacaggcgcatgacctgaaaatattggccgatacaaactcgtat

SEQ ID NO: 404480 - DNA, 468 bp, Oryza sativa nipponbare
  unsure (1)..(468): unsure at all n locations
cccacgcgtccggttgcatcatttttcttcgatcgggctgctgaggccggttttgtaaacccgaaggcaccatttgctaaggttagaccctcagacttcgaagaagctgcacgacgtgtttgtaaactgaatgtgaaggatgcacaggccacctacccggatgtttcagaggagaacgttccatacctttgcatggatctagtctaccagtacacgttacttgtggatggatttggtgtggatccctaccaggatattacattggtaaagaaggtgccttatagcaattcatttgttgaagcagcatggccccttggtagtgccattgaggttgcatcttcatcatagcagaaatagcttggctataacttatgaaagaaaggaaggtctcagcatatagttntggcttagttcaccgacttagtaaggagtgtagatcctatgtttgaggttagattctttttttac

SEQ ID NO: 404481 - DNA, 429 bp, Oryza sativa nipponbare
  unsure (1)..(429): unsure at all n locations
gcggttntgttggcccccattcctcccccaccccggtgtcctcccctccgccgctcgcgtcgccgcctttttcccctatggcgctgccgaatcaggggaccgtggattaccccagcttcaagctggtcatcgtcggcgatggcgggactggtaaaactacatttgtgaagaggcatctcactggagagtttgaaaagaaatatgagccaaccattggtgtcgaagttcaccctctagattttaccaccaactgtggtaagatccgcttctactgctgggacactgctggacaagagaagtttggtggacttagggatggatactatatccatggtcaatgtgcgataattatgtttgatgtcacttcaaggctgacttacaagaatgttccaacatggcatanggacttgtgcagggtgtgtgaaaaca

SEQ ID NO: 404482 - DNA, 379 bp, Oryza sativa nipponbare
cccacgcgtgcgcccacgcgtgcggccacgcgtgcggcaaaccctagccgcctctcgtttcttctcgtcctctccacgcccccgagatctcaggagcacaggaggaggaagccatggcgtcggagaccgagacgttcgccttccaggccgagatcaaccagctgctgtccctcatcatcaacaccttctactccaacaaggagatcttcctccgcgagctcatctccaactcctccgatgcattggataagattaggttcgagagcctcacggacaagagcaagctcgatgcgcagccggagctgttcatccacattgtccccgacaaggctagcaacaccctgtcgatcatcgacagtggtgtcggcatgaccaagtc

SEQ ID NO: 404483 - DNA, 412 bp, Oryza sativa nipponbare
gcgctcatactctgaagttcggtgatgccacatataatctgtacagtcacagctttctacaacttggtcagaatgttgcgtacgaatcactccatgacatgctgagcacacctgggcataaatcaatggcaacacatttaatttctcaagctaagtacagagatccttgcactccaaggggattttcgcccatggagggagcagttaaacttcctgccagtgttcttgagtcgaaggttgagtacagaccttatgctcatgctgttggtaacttctccgaatgtagatctgcagcactaacactattgcagaaaggaagagaggaatgtaggtaccatgaatgccgtatgggagcagcatttgtaccagaccttgatgggaaatttttagcaacagagaatttctaccatac

SEQ ID NO: 404484 - DNA, 238 bp, Oryza sativa nipponbare
caccccaactcctcttttcccggatctgtacacccgaaggcaccatttgctgatgttggagcctcatacttcgaaggaggggcacgacttgtctcatcaactgaatgtgaaggatgcacaggccacctacccggatgtttcagaggagaacgttccatacctttgcatggatctagtctaccagtacacgttacttgtggatggatttggtgtggatccctaccaggatattacattg

SEQ ID NO: 404485 - DNA, 385 bp, Oryza sativa nipponbare
gtcgtcgctgtccgccggcaacgatgaaggcaatattgacctgattgctgaagcaaggtctaaagagatctcgaattttcttgaaatgctaaatacttcggggaatgaacgatcttcgaagattcatgaggcatcacataaagaatggaaggtgaagcaagacacggaccaattacgagttatgtatcgcgagggaccagaggggaccccatttcacaccctccttgctgaaggctttgctgatggaccaattgatgtttgtacatgtgtttcatgggaatcgtctctgtacaaaaaatggtttccacaatacaaccttccaacttttaaagttgctcagtcaggctgtttgaagaaggttcgggttggtgaagaaatttctttg

SEQ ID NO: 404486 - DNA, 424 bp, Oryza sativa nipponbare
gcggcgaactgtgagaaatactgtcaacactgggcgtactgtggtctgcacgatccatcagccaagcattgatatttttgagtcttttggtgagcttttgcttttgaaaagaggaggtcgggttatttatgctggtgaacttggtgaccactcacataaactagttgaatattttgagacaattttaggtgttccaagtattacagaaggatataatcctgcaacatggatgctagaagttagctccactctagaagaagctcgcatgaacgtagattttgctgaaatttatgccaattccctgctttataggaaaaaccaaagacttattgaggagttgagcattcccccaccaagctatcgagatctcttatttgctacaaaatattctcaaagtttctatatccaatgtgttgcgaactta

SEQ ID NO: 404487 - DNA, 359 bp, Oryza sativa nipponbare
  unsure (1)..(359): unsure at all n locations
acacgacgcaccaatggcgctcgtctccgcctcctcctccaccaccgccgtcgcggcgctccccggcgccgccagggcctcctccttgctcggcggcgccggcaggagcggcaggctgctgctgaggcaggccgagtcgtcgtccgcgcgggcgtcgttcgccgtgcgcgccgcggcgcccgacaggccaatctggttccccggcagcaccccgccgccgtggctcgacggcagcctccccggcgacttcggcttcgaccccctgggtctcggatcggacccggagagcttgcggtggaacgtgcangcggagctggtgcactgccggtgggcgatgctgggcgcggcgggcatcttca

SEQ ID NO: 404488 - DNA, 367 bp, Oryza sativa nipponbare
cccacgcgtccgtgctactgcctcctcctcgccgccgctcatccgtcgtcccgccgcctcctccccctcctcgtcgtctccgccgccgaacgcacgaacgtcgccagcctccctggcctcgatggcgcgctcccttcccgcttcgaaaccgggtacgtgaccgtcgacgaggagaacggcggcgagctgttctactacttcatcgagtcggagggcgaccccggcgccgaccccgtcctcctctggatcaacggcggcaaccgctgctccgtcctcagcgcgctcttcttcgagatcggtccggtgaagctggcgatagagccgtacgacggcggcgtgccgcggctgcggtacaacccctacacgt

SEQ ID NO: 404489 - DNA, 461 bp, Oryza sativa nipponbare
cccacgcgtccgacatcttattgtcacttccatctcattctcctaattgtcatcactagcttctagctagcttaattaattaattagccatggcggaggagaagcaccaccaccacctgttccaccacaagaaggacgacgagccggccaccggagtagactcctacggcgagggcgtctacacgtcggagacggtgaccaccgaggtggtcgccggcggccaggacgagtacgagaggtacaagaaggaggagaagcagcacaagcacaagcagcacctcggcgaggccggcgccctcgccgccggcgccttcgccctgtatgagaagcacgaggcgaagaaggacccggagaacgcgcacaggcacaagatcacggaggagatcgcggccacggcggcggtcggcgccggcggctacgccttccacgagcaccacgagaagaagaggaccacaagagcg

SEQ ID NO: 404490 - DNA, 425 bp, Oryza sativa nipponbare
gtctggttcaatggttgattttgcatgtgatcaggatggttcccccatattagcagttagtagtttagcaattcactcaaagaatctctctgaaaatcctaaatgctcgcttctggttgccaaagaccctgaggacagaacagatactgtgattactgtatatggtgatgccacacctgtaatgctccagatactggcctgcctatacccttgattcttttctgtatgacactttcctatatcatattgttcatgttacgtaacaaatatagatctgttggtctttgtattatgtttgaaaggtttcagaccaagaaaaagatgcagtacgaagtgcatacttacgaagacatcctgaggcattttgggttgattttggtgacttccgttttctgcacatcaagccaaaagccgtgcgatatgtg

SEQ ID NO: 404491 - DNA, 385 bp, Oryza sativa nipponbare
  unsure (1)..(385): unsure at all n locations
cgccgctgagctctatctatctactagttagtttagtcgtctcgagggtaaattgagctttgtgtgcggttttgaggggagtacatcggcatgaggatccagtgcgacgcgtgcgaggccgcggcggccacggtggtgtgctgcgcggacgaggcggcgctgtgcgcgcgctgcgacgtcgagatccacgccgccaacaagctcgccagcaagcaccagcgcctcccgctcgacgccgcgctccccgccgccctcccgcgctgcgacgtctgccaggagaaggcggcgttcatcttctgcgtggaggacagggcgctcttctgccgggactgcgacgagcccatccacgtnccggggacgctctccggcaaccaccagcgctacc

SEQ ID NO: 404492 - DNA, 470 bp, Oryza sativa nipponbare
gagaaaggctcgactagtgttactgtagattacgagtttgccgcaagaacaaggccatcaggcgagtttgtcagcaagtacaagggctactataccttcaccggtggaaaggcggttggataccggaatctatttgcaattccatggtcatcgttcatggctgatgacagcctcttcttcatcgagggggtactacacttgagagctgaattaaccataaaacaaccctagatagtggacggcgtttaactaacagcgtctctgttcttgctgtgtccaaattagtgtgaaaaatgttgtgtgattcggacttactgttgttttctacttgagcaacctaaatagacagtttggaaacggcaagtaaaatcccttttgtttttacatcaaaaagaggatcatgacatgtaacgcattgttatcgaacttgggaaagtgatcttctaatcaaagtatgctggatggtccac

SEQ ID NO: 404493 - DNA, 453 bp, Oryza sativa nipponbare
cccacgcgtccgcccacgcgtccggccggagaagcggaagcgagagcgcacggcggaggcgaggagggtttcatggagcccgagaaatccaaagaggcggcgagccagccgatggaagcggacgccggcggccccgtcgatccccgagaactagtgtccagcgacgatgagatagattactccgtggagcccgagttctacgatcccgacctggatgatgtcgatgagcggtgggtgagcaagcagaggaaagggaggacttctgacgccgtgctcagctgccccgcgtgcttcactaccttgtgcctggattgccagaggcatgagacgtatgtaaatcagtaccgtgcaatgttcgttcgcaactgcaaggtcaagactgatcagattctacgggaggggaaaggcaaacggaaaaaccgcaagggaaaggctgctgattcttctactaca

SEQ ID NO: 404494 - DNA, 328 bp, Oryza sativa nipponbare
aaaccatttaagctagcagagttcgtggacaacaagtggtcactgagcaactctaacttatgcatcactaatgacatgaaaccaagcaaggatggctctatcttgagctaaatgtgacaacaaaacgacaaacttaccaggaagagctgattcaacggaaggctgacataccaaggaaagttacttactgtgaagtttgtgacatcattgaacagtgatgtgcacaattactgatggaaagtgtctgtctgacggagtcttcaaatatgcaacgtactatggcatgtaagcattacactgtctgagacaaggttttatggctggcgtc

SEQ ID NO: 404495 - DNA, 364 bp, Oryza sativa nipponbare
gcgcccacgcgtccgcccacgcgtccgcctccctcttccgcctccgcctcctcctcctccgcccttacccccgcgcgcgtgcacgcgacggcgcggcgatctgatgctgccgccgctgctgctgcaggcgccgcggtgatggcggcggcgccgtccgccggcggcgttggggagggctcttcctcctccgccgccgccgccgctgctgctgctgccgcgacgatcgggccccacgtggtcgacgaagaggcaatgtggcagatgaatctaggagaagctatggaagctgggccatacccagagcgtattggagaaccagattgtagttattacatgaagactggcttgtgcaggtttgggatga

SEQ ID NO: 404496 - DNA, 365 bp, Oryza sativa nipponbare
atcccggtcgaccacgcgtccgccacgcgtccgcccactcatccgtatatccagcaaactgaatagcgtctactcctgacagcacaccaaactcatcagggggcggggcgattatgtgggaggcggggtggacaacttttattatgtacttcctcataattaacgttccgtacgctgatgcaagtatcatgggaggctccacccattacacgcagaacattcacatagttatcttcaccctgtttaacattattttcaacccaaccatacgacatttccccgggatgtacaacaagatgtacaacccctttgtccccatcatcgttaccattaaccacttcttcacgctgaacactcttctcatt

SEQ ID NO: 404497 - DNA, 343 bp, Oryza sativa nipponbare
  unsure (1)..(343): unsure at all n locations
cttcgccaagatggggatcaaccccatcatgatgagcgccggagagctggagagcggcaacgccggagagccggcgaagctgatcaggcagcggtaccgtgaggcggcagacatcatcaagaaggggaagatgtgctgcctcttcatcaacgatctggacgcgggtgcaggtcgcatgggaggcaccacccagtacacggtgaacaaccagatggtgaacgccaccctgatgaacatcgccgacaacccaaccaacgtgcagctccccgggatgtacaacanggaggacaacccccgtgtccccatcatcgtcaccggcaacgacttcttcacgctgtacgcg

SEQ ID NO: 404498 - DNA, 472 bp, Oryza sativa nipponbare
  unsure (1)..(472): unsure at all n locations
caaggttctcagcaacacaattaagcaaaagaggatggaaaaggctggcaaatgggaggttcctttgccaaaggtcagacctgtggctgaagaagaaatgttcaaagttttacgaactggcaagagaaaaaccaaacagtggaagagaatggtcactaaggccacctttgttggacctgggtttacaaggaaaccaccaaagtatgaacggtttattaggccaactggccttcgtttcacaaaggcccatgttactcaccctgagctgaaatgtactttcaaccttgacataatttctgtgaagaaaaacccaaatggtcaaatgtactctactcttggtgttttgacaaggggaactatcaatgaggggaacgttagtgaacttggtctggtaacccctgctggaaaagntgtttggggtaaatatgcacaagttacaaacaacccaaagaatgatggctgtattaatgct

SEQ ID NO: 404499 - DNA, 465 bp, Oryza sativa nipponbare
  unsure (1)..(465): unsure at all n locations
aaccaattcacaccgatcgatcgagcaacagtagtaggaaccatggcccgtgcacagttggtgttggtcgccgttgtggcagctctgctcctcgccgccccgcacgccgccgtggccatcacctgcggccaggtcaactccgncgttgggccctgcctcacctacgcccgcggcggcgccggcccgtcggcggcctgctgcagcggcgtgaggagcctcaaggccgcagccagcagcaccgctgacaggcgcaccgcgtgcaactgcctcaagaacgcggcccgcggcatcaaggggctcaacgccggcaacgccgccagcatcccctctaagtgcggcgtcagcgtgcnctacaccatcagcgcttncatcgactgctccagggtgagctgagctatcgatcgggatgatcanttatatgcataccagaagcgccacgggggggtcgatgtgtggaagccgatc

SEQ ID NO: 404500 - DNA, 399 bp, Oryza sativa nipponbare
  unsure (1)..(399): unsure at all n locations
gtgaaacagcaaanaaaatcaaacaaaaagaaaaaatattccccatctgtgaaattcgcaaaaccctagcgcggcggcgatgtcgaacacgagggtgttcttcgacatgaccgtcggcggagctccggcggngcggatcgtgatggagctgtacgcgaaggacgtgccgcggacggcggagaacttccgcgcgctctgcaccggcgagaagggcgtgggcaagagcggcaagccgctgcactacaaggggagcaccttccaccgcgtgatcccggagttatgtgcagggcgggacttacccgggaacggcacggagggagcgactaggcagagtcgcgacagtgtcagtcagacgacagccgatctgcatgcacgcggccacactacgtcagtctattg

SEQ ID NO: 404501 - DNA, 356 bp, Oryza sativa nipponbare
gagaagaaggagaggagcagccatggcgtcgtcggtggcagcggcggcgagcacgttcctggggacgaggctggcggacccggcgccgcagagcgggaggatcgtggcgaggttcgggttcggcggcgggaagaaggcggcggcgaagaaggcggcgaggccgtcggcgccgacgacggacaggccgctgtggttccccggcgcggtggcgccggactacctggacgggtcgctcgtcggcgactacggcttcgacccgttcggcctcgggaagccggcggagtacctgcagttcgagctggactcgctggaccagaacctggccaagaacaacgccggcgagatcatcggcaccc

SEQ ID NO: 404502 - DNA, 421 bp, Oryza sativa nipponbare
gttacgtgatcgtgaaatggaattgaaggcccagataacagctctcattgacaagagcaaggagatgagcaaagcagagactgaatcaggggagacagggccactggtcaatgaagcagatatccagcacattgtatcctcgtggactggtattccagtagagaaggtatcaagtgacgagtccgataagcttcttaagatggaagagactttgcatcagcgtgtcattggtcaagatgaggctgtgaaagccataagtcgctccatccgccgtgctcgtgtgggcctcaagaacccgaacaggccgattgcaagcttcattttcgcaggtccaaccggtgttggtaaatccgagctcgcaaaagcacttgcagcatattactttggatctgaggagggcatgatcaggcttgatatgagt

SEQ ID NO: 404503 - DNA, 378 bp, Oryza sativa nipponbare
cggacgcgtgggtcagcaatggcggaaggatcaagtgcatgcaggtgtggccaattgagggcatcaagaagttcgagaccctatggtacctgccaccactcaccgtggaggatcttttgaagcagatcgagtacctgcttcgatccaagtgggtgccttgcctcgagttcagcaaggttggattcgtctaccgtgagaaccacaggtctcccgggtactacgatggcaggtattggaccatgtggaagctgcccatgttcggctgcaccgatgccacccaggtgctcaaggagctcgaggaggccaagaaggcctaccccgatgcctttgtccgtatcatcggcttctacaacgtcaggcaggtgcagttgattagct

SEQ ID NO: 404504 - DNA, 562 bp, Oryza sativa nipponbare
cccacgcgtccgcggacgcgtggggaaaagtatgccttagtcttcttggtacctgggcaggtagtggttgtgagacgtggaatccatctcagtcgaccatgctacaagtgctcgtctccattcaagctctcattttgaatgagaagccctacttcaatgagccaggatatgcatcctacgccaatagtgtatctggagagcggattgctatggagtataacgacaacacatttctgcactcatgcaggacgatgctctactcacttcggcggcctccagagcacttcgcagaccttgttaccagccacttcagggagcgcgggcacaccatcctggcagcatgcaggtactacatggaaggccacaaggtcggatcggtggtccccgaagagaaggagccggagtacggcgacgcgggagcatccaccagcagcgccagcgccagcgccgtcgccgtcgctctgaagccgcggccggacaagggtggatcccgcagtagacgccccacgttcaacgacaacctcaagacgctgttcgaggagcttctggaggagttcaacgt

SEQ ID NO: 404505 - DNA, 527 bp, Oryza sativa nipponbare
cccacgcgtccgcccacgcgtccggcaatggcgacgaagaggagcgtggggacgctgggggaggcggatctgagggggaagaaggtgttcgtgcgggccgacctcaacgtgccgctcgacgacgcccagaagatcaccgacgacacccgcatccgcgcgtccgtgcccactgtcaagttcctcctcgagaagggcgccaaggtcatcctcgccagccatctgggccgtccgaagggtgtcacccccaagtacagcttgaagcctcttgttccacgcttgtctgagctacttggagtcgatgttgtgatggccaatgattgcattggtgaggaagttgagaaattggctgctgctttgccggaaggtggtgttctactcctagagaatgttagattctacaaggaggaagaaaagaatgatcctgagtttgccaagaagcttgcagctgtcgctgacctctatgtaaatgatgcttttggcactgcacacagagctcatgcttcaactgagggagtgaccaaattttg

SEQ ID NO: 404506 - DNA, 536 bp, Oryza sativa nipponbare
cccacgcgtccgcccacgcgttcgtgtgtctagtcctatggcagtgaattcggagagacctgatcgggcattgcccacagtgtcaatgagtggcctggcgcccatggatgttagcagaaccccagatgttaagccaagaattacagatgaatctgaaaaggttaaaacctggaagttggcagacattggtgactcaggacatctccgagcactgcgtatgccggatacatcagcaacttcaagcaaagttgtgcgtctgctgtatacaaataatggggttgcgcttttggctcttggctctaatgctgttcataagctgtggaaatggcaacgcactgataggaatcctaatggcaagtccactgcatctttcactcctcaaatgtggcaaccagcaaatgggattcttatggcaaatgacactagtgatggcaaccccgaagaagcaactgcctgcattgctctgtccaaaaatgattcctatgtgatgtctgcatccggtggcaaagatctttgttcaacatgatgacatttaa

SEQ ID NO: 404507 - DNA, 497 bp, Oryza sativa nipponbare
cttgttgataaccgggagagagaatttggtagtatgtacactgactgggacatcctccctcctcgcaagatcaaagaatctaatgcgaagaagccaaaagattgggatgacagggaatatattgaagatcctgatgaagttaaaccagatggctatgactctattcctaaagagattcctgatccaaaggacaaaaaggtttgcacttaagaattacgctgtaaatccagcttctaatattttcgcatttaattggcatatccgtttataatggacatagtgttatatgttcttaatattatgagaagaacccgagtgcagacaaaggtttcattttacctgttcaagcttgttttattagaaacattctatggcatgttagctttttctatctgctattagctatattgaacccatcatgacctcaatggctcttatggtgtgtctgctaagtaataaatataacactggatgacatatgttttccttactacaat

SEQ ID NO: 404508 - DNA, 544 bp, Oryza sativa nipponbare
gagcgcactgcgaagcgaacccttctccgccgcctccgctcttcgctgcacggtgctagctcgccgccgtccgtctcgcgcgcctcaagggttatcacaagatgtatacagcaaggaggaagatccagaaggacaagggtctggagccaactgagtttgaggacactgttgctcaggcattttttgaccttgagaatgggaatcaggagctgaagagtgacttgaaggacctttacatcaatggagcagttcagatggatttacctggcaacaggaaggctgttattatttatgttccatacaggctgcggaaggcatataagaagatccatgtgaggcttgttagggaacttgagaagaaattcagtgggaaggatgtggttctggttgcaactagaagaatagtgaggcccccaaagaaaggctcagctgttgttcgccctcgtacccgcacacttactgctgttcatgatggcatcttggaggatgttgtgtatccagcagagattgttgggaagcgtgtcagataccacttggatggtag

SEQ ID NO: 404509 - DNA, 516 bp, Oryza sativa nipponbare
  unsure (1)..(516): unsure at all n locations
tctctatcgactgcgcagcccagcgccgacgagcaaaaactactcctagcaatcaagcaagattgggacaacccagctccactcagttcatggagcagcaccggcaactggactggtgttatcagtagcagcacaggtcaggtcactggcctctccttgccaagtctccatatagccagaccaatcccagcctccgtttgtagcctcaagaatctgacctacatagacctctcttgcaacaatctcaccggtgatttccccacggtgctctacggttgctcagctttggagttccttgacctatccaacaatcaattatccggcagacttccggaccgcattgacaggctatcgntggggatgcaacacctcaacctgtccagcaatgctttcaccggcgatgtgccgtcggctattgcaaggttctcgaagctcaagtcattggtccttgacactaatagattcaatgggaattacccgggtgccgccattggaggccttgtggagcttgagacg

SEQ ID NO: 404510 - DNA, 510 bp, Oryza sativa nipponbare
  unsure (1)..(510): unsure at all n locations
cgcatcgcacttgtagctctcgacccccgcatctcatccctcctctcgcttagttcagatcgaaatcgcaaatggcgaagattaagatcgggatcaatgggttcgggaggatcgggaggctcgtggccagggtggccctgcagagcgacgacgtcgagctcgtcgccgtcaacgaccccttcatcaccaccgactacatgacatacatgttcaagtatgacactgtgcacggccagtggaagcatcatgaggttaaggtgaaggacttcaagacccttctcttcggtgagaaggaggtcaccgtgttcggctgcaggaaccctgaggagatcccatggggtgagactggcgctgagtttgttgtggagtccactggtgttttcactgacaaggacaaggccgctgctcacctgaagggggtgctaagaaggtcgtcatctctgctcccagcaaggatgcccccatgtttgntggtggtgtcaatgagaaggagtacaagcctgacatcga

SEQ ID NO: 404511 - DNA, 461 bp, Oryza sativa nipponbare
gagcaagaagctcagctcctcctcctctcgcatggcagccatggccaccaccgcgtccagcctcctcaagacctccttcgctggcgcgcgcctccccgccggcgaccgcaaccccaccgtctccgtcgcgccgcgcaccggcggcgccatctgcaactccatctcgtcgtcgtcgtccactcccccctacgacctcaacgccatcaggttcagccccatcaaggagtccatcgtgtctcgcgagatgacccggcggtacatgaccgacatgatcacctacgccgacaccgacgtcgtcgtcgtcggcgccggctccgcggggctctcctgcgcgtacgagctctccaaggacccctgcgtcagcgtcgccgccatcgagcagtcggtgtcccccggcggcggcgcgtggctcggctggcagctgatcttctggccattggggcgcaagccggcgcaccttt

SEQ ID NO: 404512 - DNA, 513 bp, Oryza sativa nipponbare
gcgggggagcgtaggaacactcatcatggaccttgaggagccggctgagtccaagctgatgaggatgaacattctgggagaagccaggggtgcggaacaaaggggcactcaagcagtcgagacttttaggaaccatatccaggaagggaaactaaatggctgggttctcgatgactgtggggattgctcggttagccaaggatgcctcgtggacacgaatgatgatccttttgatgttgatgcgtacatgtacagggctaaattttttgatgagttcaagggagaactggggtgggtccacattcatcaaagtgtacataacctcaacatagcaataaatatgcaggcttctatccctggtggatgcaaaaccatgtgcaatggtcttcctggcaggtttctacttaccagtgagggcaatgagtttgttgcatcaccgaagtacaaatagttggtaagaagatatttatattataataattagcttttacacctagtatgtataacttttac

SEQ ID NO: 404513 - DNA, 559 bp, Oryza sativa nipponbare
ctgggtcagtggatacaagatcagtggtgtcaaagatgactttagcattactggaggacagcgggtggtatcaagctaattatagcatgggtgagcatttagattggggtcgcaatcagggaacagagttcgttatctctccctgcaatttatggaaaggggcataccgctgcaacacaactcagttatcaggatgcacatataatagggaggcagaaggttactgccctatagtaagctatagtggggacctgcccaaatgggctcaatatttccctcaagctaataaaggtggccagtcttcgttagcagattactgtacatattatgttgcttattcagatggttcgtgcactgatgtaaatagtgcacgagcacctgacagaatgttaggtgaagtgcggggaagcaactcaaggtgtatggcctcaactctagtgcgaactgggtttgttcgcggatctatgacacaaggaaatggctgttatcagcatcgctgcacaaataactccttagaggttgccgttgatgggatcctgaagtcatgtccgcaaactgg

SEQ ID NO: 404514 - DNA, 513 bp, Oryza sativa nipponbare
cccacgcgtccgtcctctccccccccccccctgaacccggccaactccggcgagagagacatagatagcgtgtgagacagtatagagatggagagggagaggtagttttttgttgccggcttgcggatttattgtaggagatcaggtcagtttcgttttcttgccggcgcggcgggcgtttgttgggtgcggcgggcggggaggagctcgtgaatggtgaacggagaggcggaggcggagtgcacgcgggcgtcgctgctggggaggtatgagatcgggcgcacgctcggggagggcaacttcggcaaggtcaagtacgcgcgccacctcgccaccggcgcccacttcgccatcaagatcctcgaccgcaacaagatcctctccctccgcttcgacgaccagataaggagggagattgggacgctcaagctgctcaagcaccccaacgtcgtccgcctgcacgaggtggctgctagcaaaactaagaattacatggtgcttgaatatgtcaat

SEQ ID NO: 404515 - DNA, 472 bp, Oryza sativa nipponbare
  unsure (1)..(472): unsure at all n locations
cggacgcgtgggttcccacacggactctgctaccatcggagtcagatccattcctcctcccattctcgatcgcgaggaggaggagaccccgcccgccagccaccccggatccgtcgatcgccatggcggatgaagaacctgttgatccaaagaagtaccttgaggagcgctgcaagccccagtgcgtaaagccactctatgagtatgagaagtgcgtcaagagagtggagaaggatgatactgggcataaacactgcactgggcaatatttcgactattggtcatgcattgacaaatgtgtagcaccgaaactccttgagaagctcaaatgatgaccggctgctacttttggatcaatgacttgttctatntgcgtaaccttgttcgcacttgaaactgaatgagttaatngtgtctattgggactggttgggtttcatgacttgtaataaaagccaccatttcccatatca

SEQ ID NO: 404516 - DNA, 431 bp, Oryza sativa nipponbare
gggaagcgtaggaacactcatcatggaccttgaggagccggctgagtccaagctgatgaggatgaacattctgggagaagccagggatgcaaaacaaaggggcactcaagcagtcgagacttttaggaaccatatccaggaagggaaactaaatggttgggttctcgatgactgtggggattgctcggttagccaaggatgcctcgtggacacgaatgatgatccttttgatgttgatgcgtacatgtacagggctaaattttttgatgagtacaagggagaactggggtgggtccacattcgccaaagtgtacataaccccaacatagcaataaatatgcagtcttctatccctggtggatgcaaatccatggcaaaggatcttcttgacaggtatctactgacgaggggagtcaatgagtttggtgaca

SEQ ID NO: 404517 - DNA, 520 bp, Oryza sativa nipponbare
gccctgatccttactacttcaagtttgatcggcttggagtgcgcgtgccttctttccttatctcaccatggatcgagaagcgcactgtgatccatgaaccaaatgggccgcaggactcctcacaatatgagcactcatccatccctgcaacagtaaagaagctatttaatttacattctaacttcctgacaaagagggatgcatgggctgggacctttgagaactacttcaaaatccggaaaacacccagaactgattgtccagagaaactcccagaggtcacaaagtctctgcaaccgtttggccctaaggaagattcatctctgtcagagtttcaagtggagttgattcagcttgcttctcagctcaatggtgaccatgtactcaacacctacccagatattggcaggactatgactggggggaagcaaaccgctatgcagaggatgctgtgctagatttttggagctggcaggattgctctaagaagctgggcaatgaatctgccttggcaccatga

SEQ ID NO: 404518 - DNA, 508 bp, Oryza sativa nipponbare
  unsure (1)..(508): unsure at all n locations
cccacgcgtccgcccacgcgtccgcccacgcgtccggatttatagtacattgttgtggttctactggctatgttcccatgggcatttatctcctttttttacttaagctttgacttttgcattgtcgtacaaccgtcattcacctgtcattttaaccccaccaccccgcgcaccaccgccgcctccgcctcctccccctggtggcgggcggcgggggaggctcgcccccgcgtgtggggaggaggatcagggccagccgggagaaggggcggcgggtcgggattagggttttcgcgaggtacagccaggcccaggacttctccactcgcctccaagatagagctggcgaattgcctaagttggttgaggaccttctacagacatcaattagcacagggcccacaggtgcttttaggtttgcccaagggatccaagctgtcccttggngttggggtgggaggctaaatgacttcttaaagacagccaacacatcagcaggaataccagc

SEQ ID NO: 404519 - DNA, 548 bp, Oryza sativa nipponbare
  unsure (1)..(548): unsure at all n locations
gcgaaacactactctttttttctttttttgcggggaagctagcaaacagtactactaaccttctgcttatatatcaccaacaaatactatgtcggtcacgcctaccaacgacgtcttgatgactggccctgtagctggcgccggcgacgtgcaggccgctgagacgttccgcgtgttcgtcgggtacgactcgcgcgaggacatcgcgtaccgcgtgtgccggcgctccctgctgcagcgctcctccgtgccggtggccgtgatcccgatcgtgcagcaggagctccggtctgcggggctgtactggcgggagcgcgggcccacggagagcaccgagttctccttcacccgcttcctgacgccccacctggccggctaccgcggctgggcgctcttcgtcgactgcgacttcctcttcgtcngccgcgttcgcggagctggcgcgcatggccgacccgcgctttcggggtgttggcgtgcaccacgactacgcgcccaaggaggccaccaagatggacgggcgccggcaaaacgtgtcccgcgcaaga

SEQ ID NO: 404520 - DNA, 380 bp, Oryza sativa nipponbare
gcgcaaagaaaaggcctgtgtcaaggagagggtagtatcaccttgctctcctttgccttcagagaaaccggaagcaatggcgtgtggtactctcctcaagtcatgttgccttcccaagaagtcttaatggggtgccacccgccaggctgccgcccccaagccggtgactgtctccatggttgtccgcgctggtgcctacgacgatgagcttgtcaagaccgcgaaaaccattgcatcaccaggaaggggtatccttgccatggatgagtcgaacgcgacctgcggtaagaggcttgcgtcaattggccttgagaacaccgaggccaaccgccaggcttaccggaccctccttgtcaccgcaccgggcttgggacagtaca

SEQ ID NO: 404521 - DNA, 471 bp, Oryza sativa nipponbare
cccacgcgtccgcaaatcccccccaaggcggacgcgcccgcaaagggtcgagcgcgctcatggctcgcgtgtacgtggggaacctggatccgcgcgtgacggcgcgggagatcgaggacgagttccgcgtgtttggggttctgaggagtgtatgggttgctagaaaaccaccaggttttgcctttattgactttgatgaccgcagggatgcagaagatgcaattcgtgatttagatggcaagaatggatggagggttgagctgtcaaccaaagctggtagtggtcgtggccgagatcgttccggtggttctgacatgaagtgctatgaatgtggcgaacctggtcattttgcacgtgaatgccgcttacggattggttctggaggccttggcagtggaagacgccgcatccgcagccgtagccggagtccaaggttaccgcggtcgtagtcgcagtcgcagcccatgatac

SEQ ID NO: 404522 - DNA, 495 bp, Oryza sativa nipponbare
gaagaaatttctctccttgtagaaacaagcctagagagtactatggagcagaggaaatttttgttgtgcctaattcttggcttacttgcgacttcaggacctgccaagaccgtcaatgctgactcgccctttgatttttattatctcatcctcatgtggcctggagcatactgcactgacagcgagtatggttgttgcgtgcccaagtatggttacccgtcagaagatttcttcgtcaagagcttcatgacctttgactcgtcagagaacacagctgttgtcaggtgcaactccgacaatcctttcgacattaacaagctagactcaatcgagaacaacctgaaccactactggagcaacatcaagtgtcctcgcaccgacggcgtgaactcatggaagagcgagtggaacagctatggcgtctgctccggcctcaagggagtggactacttcaaggccggtcttcagctcataaagaacgcagatgttctctct

SEQ ID NO: 404523 - DNA, 403 bp, Oryza sativa nipponbare
  unsure (1)..(403): unsure at all n locations
tgagcttcagggtcttgggatccacatcatcctcttgaccggtcgaagtgaattccaacgtaacgccacacaagtgaatctttgagtggcaggctaccattcatgggaaaaactcatcctgaggcaatcccctgatattggcaagacagccgtgcagtacaagtcagaaagacgagcagcactggaagctgagggattcaagatacttggaaattctggggatcagtggagtgatttattgggattgccaatggctacgagatccttcaaacttccaaacccaatgtatttcatcagttgaatttattagtgaaaagtggagaaaatctgtcatgtcgcttggaacctcctttactctntcttttaagttcgtaatgaattcaagaatcattctttggacata

SEQ ID NO: 404524 - DNA, 395 bp, Oryza sativa nipponbare
cggacgcgtggggctagctagctgggctaggatcgccatggatcggggtgaccaccaccacctccagcagcagcaccagttctggatgccaccgcctgcgccggtggtgccgccgcagctgtgcatgccggcgatgatggcggacgagcagtacatggacctgggcggtggcggggcggcggcggcgccggggaggggcggggccggggagaggaagcggcggttcacggaggagcagatacggtcgctggagtccatgttccacgcgcaccacgccaagctggagccccgcgagaaggcggagctggcgcgcgagctgggcctgcagccgcggcaggtggccatctggttccaaaacaagcgcgcgcggtggcgcttcaagcagctcgagcacg

SEQ ID NO: 404525 - DNA, 518 bp, Oryza sativa nipponbare
gcggccggccatcatcagtgatcctctacaatcatcgactttcagcaaattaagatggctgctgccttctcctccaccggtggagctccggcgtccactccgaccaacttcctggggaagaagctgaagaagcaggtgacatcggcggtgaactaccatggcaagagctccaacatcaacaggttcaaggtgatggccaaggagctggacgagggcaagcagaccgaccaggacaggtggaagggtctcgcctacgacatctccgatgaccagcaggacatcaccagggggaagggtttcgtcgactcccttttccaggctcccacgggtgatggcacccacgaggccgtcctcagcttctacgagtacctcagccagggtctcagaacgtacgacttctacaacaccatgggaggcttctacatcgcccctgctttcatggacaagctcgtcgtccacatcttcaagaactttatgacccttcccaacaataaggtcccactcattctgggtatttt

SEQ ID NO: 404526 - DNA, 231 bp, Oryza sativa nipponbare
cccacgcgtccgcccacgcgtccgcggacgcgtgggcttcccttctcccctctcgcccgccgccgcctcgccgcgacgcgcatgggcgccgccccacgaccgcagcagagaagcccaccaccacgcgcggagcggccgaggaggcctcaccactattggtgcgggatggcggaggtcgccgccggcaccgggcagctcattggcgtcgccggggccacgctactcgcggcg

SEQ ID NO: 404527 - DNA, 476 bp, Oryza sativa nipponbare
cccacgcgtccgccgtcttctccgccaccgaccccaagcgcaccgcccgcgactccttcatccccgtactcgtgccggtgccggtcgggttcgcggtgttcgtcgtgcacctggcgacgattccgatcaccggcacgggcatcaacccggcgaggagcctcggcgccgccgtgctgtacaaccagcacgcagcttggaaagaccactggatcttctgggtggggccggtgatcggggcgttcttggcggcggcgtaccacaagctggtgctgcgcggcgaggccgccaaggcgctcagctcgttcaagagcaccagcgtgacggcgtgaggaagacgacgatgttcatttgatacgagagatcgatcagctgcttgattaaattgtcttgatttcgttgtcaatttacaatctaccactatggacgatcatgcctattatatgatcgatgcatgcctctggttgtaggtttatttg

SEQ ID NO: 404528 - DNA, 513 bp, Oryza sativa nipponbare
gagcgagcgagcgaccgtcgctcgtcctgctgcttccgccacatcggtgacgcacatcctctttcccatctctctctctctctgtgtctgggtccacccacgcactcttttctcgaatttgcgttaaccctagcttctgttctagaaatttgccttaaccttaatactaataacagtttgatggttcccaaaaaggtttcggggttcaactgaaccccccgtcccatgttagatccgccactgcttgggtatgcatatatgcttattgttgtatatatagttgaaacttgaattaccattatggtgatattcaaatccaactgaaatagattaatttgagcgaattcatttttgctaccgatatgattcgtattcaacatacatactattcgtactcgagtcccactaaacttatggaaatggtaatggtttgaccattatatggattgaatctgacttggtcacacccctagttgggacttcattttgaaggattgtgtatttgtctgagag

SEQ ID NO: 404529 - DNA, 479 bp, Oryza sativa nipponbare
  unsure (1)..(479): unsure at all n locations
atggcagcagggatgagtcaattatacgaattggagcaatccttggtcttggtattgcttatgctggctcccanaaagaggagggtagagagaatctcacagcttttctgactgactcccaagtacctctggaggtcttggtcttctctgccatctccttaggtttggtgttcgttggttcctgtaatgaagaggttgcacagacaatcatatgcgtcttaatggagcgtagtgaaccagagcttgcagagccaattatgcgcttgcttcctgttgcccttggccttctatatcttggaaagcaggaaagtgtggaggcgactgcagaggtttctaaaacctttgatgagaagataaggaattattgtgacgtgacattgatgtcactggcatatgctgggacagggaacgtgcttaaggttcaaaaactccctggaatttgctccgagcatcttgagaaaggtgaaacccaccaaagg

SEQ ID NO: 404530 - DNA, 217 bp, Oryza sativa nipponbare
  unsure (1)..(217): unsure at all n locations
ttccgggtcgaccacgcgtgcggctttctttgaaacaagtgttcctggagtctatgctgtccgtgatgtggccaccttccccatgaagatgtacaatgagttganaggagtggttcatattgaccatgctaggaattctgcaaancantctttaaaggttaggccattccacttttgttattctgaaatacaatacttgttactactaacaccacat

SEQ ID NO: 404531 - DNA, 400 bp, Oryza sativa nipponbare
gcggccacgcgtccgcccacgcgtccgcccacgcgtccgaaagctttttcgttgaattagaaacaaaacgcacaaagagtaacttatgtcaaagtgcaacttatgcacattaacttgtcatgaaggttacttgagccagtaatagtaatctagtcactgtattgtgcaagtgcaactccagaaccacagcaaaatatgacccatcttctgaggattgaggtatgatgacaaaagcggattgcggcacagccattggcaccaatggataaaaaaaactcatttgtgttttcttggttagctaagctattaaggggatatacaacatcacacctcttcaacatgtctttgtcaggtcattcattaccaaaatgtgaagaaaacatcttttggtggcatgtga

SEQ ID NO: 404532 - DNA, 294 bp, Oryza sativa nipponbare
gtaggagagaaggccatggcgtcgaaggaggaggtggccgtggagacggtggagggcggagcggcggcggcgaaggcgccgtactgggacccgccgccggcgccgctgctggacacgagcgagctgggtaagtggtcgctgtaccgtgccctcatcgcggagttcatggcgacgctcatcttcctctacgtgagcatcggcaccgtgatcgggtacaagaaccagagggccaccgtcgacgcgtgcaccggcgtctgctacctcggcgtggcgtgggcgttcggtgccaccata

SEQ ID NO: 404533 - DNA, 119 bp, Oryza sativa nipponbare
cacatcctatcgtcacttccatcttattcttctaactttcatcacttgcgactagctagctttattaattaattagccactcctctattataaccaccaccactcacctttttcaccac

SEQ ID NO: 404534 - DNA, 517 bp, Oryza sativa nipponbare
  unsure (1)..(517): unsure at all n locations
cccacgcgtccgcatgtctgttgttgaggaaagctttgaatatcttgatgcaccagttgagagaattgctggagctgatgtacccatgcggtatgctgccaatcttgagaggatggctgtcccacaggttgacgatattgtccgtgcagcgaagcgtgcgtgctacagagcggtgcccatggcagcaactgcctgataggagagacctcttttacatcatctttcttttcccgtccggccaacatatgattcataatggtgtccaacaattgcccaaactcaaagcgagctaattttgcaagatatttccatgacccccacctattcttttagctgcagttgcatcactgcgttcgttggtggtgacccaaatttccctctttttttttggtgtgtatgcgagaattatgcaacttatggtgattggttcacagtacacactggcgctagttacataaatgaaagaaaaatctgagctcttgatggacaaatnataaatatatttgatattatgata

SEQ ID NO: 404535 - DNA, 436 bp, Oryza sativa nipponbare
cccacgcgtccgcacgtattacgtgcgaaaaaaaaaatcatcagcacaagatcgaggaggctttatctgaacaagggagatggcggactagcgtgtatgggccggggcggaaccacctgttcgtgcctgggccggtgaacatcccggaccaggtgatccgcgccatgagccgtcagaacgaggactaccgctcgccggcggtgcccgccctcaccaagaccctcctcgaggacgtcaagcagatcttcaagaccaccaccggcacccccttcctcttccccaccaccgggacgggggcgtgggagagcgcgctgacgaacacgctgtcgccgggggacaagatcgtgtcgttcctgatcgggcagttcaacctgctgtggatcgaccagcagcaacgcctcaacttcaacgtggacgtggtggagagcgactgggg

SEQ ID NO: 404536 - DNA, 437 bp, Oryza sativa nipponbare
cccacctggagcattcactctctacgatacagttgagagagccaccagttgtcttgaaaccttcagaaagccagtctgagcaggaggcgcttgaaatagcaataactaagttgctactgaagtcatattacaatatagtgcggaaaaatgttgaggacttcgttccaaaggcaatcatgcattttctggttaaccacacaaaacgggagctgcataattaccttataactaagctttatagagacgacctctttgcggacatgctcagagaacccgatgaaataaccataaagaggaggcaaatacgtgacaccctcaaggtccttcagcaagcatacaagactttggatgagataccacttgaagcggacacagttgagagaggctattccctggatgccgatgcaacaggtctaccaagggctcatgggctttct

SEQ ID NO: 404537 - DNA, 427 bp, Oryza sativa nipponbare
ggcgggactacccgctgagtttaagcaagcaaagccacatcttattgtcacttccatctcattctcctaattgtcatcactagggggtagctagcttaattaattaattagccatggcggaggagaagcaccaccaccacctgttccaccacaagaaggacgacgagccggccaccggagtagactcctacggcgagggcgtctacacgtcggagacggtgaccaccgaggtggtcgccggcggccaggacgagtacgagaggtacaagaaggaggagaagcagcacaagcacaagcagcacctcgtcgaggccggcgccctcgccgccggggccttcgccctgtatgagaagcacgaggcgaagaaggacccggagaacgcgcacaggcacaagatcacggaggagatcgcggccacggcggcggt

SEQ ID NO: 404538 - DNA, 497 bp, Oryza sativa nipponbare
cccacgcgtacgcggacgcgtgggtttttctcatgaccacaatgcttgcagctagctctgtagtgaacagcaaccttccttgctcatcaaggatatcctcctgctcagacttcacatctggctactcctggcgtcctatagaggctgcaaaactctgccggacacgagctgtgcgctcgctgcagataacctgtactgccacaaagcctgcaaagtcaccagctgaagaagaatggaagatcaagaggcaagtgctagtagaaaagcgggtccgtagtgttgatgtgaaagaagcactgcgtcttcagaaggaaaacaattttgcaattcttgatgtcaggccagtagcggactttaaagaagctcatccacctggtgccggtaatgtgcaaatatatagattgataaaagaatggacagcatgggatattgcaagaccggcagcatttgcattctttggcatattttctggaaacagaagaaattctgagttcata

SEQ ID NO: 404539 - DNA, 352 bp, Oryza sativa nipponbare
gcgcccacgcgtccgcccacgcgtccgcccacgcgtccgcttcctcctccccaaaccctagccgccgccgccggcgtactcgagagagacatcagcatccatggcgggcaagggcgagggtccggccatcggcatcgaccttggcacgacctactcgtgcgtgggcgtttggcagcacgaccgcgtggagatcatcgccaacgaccagggcaaccgcaccaccccctcctacgtcggcttcaccgactccgagaggctcatcggagatgctgccaagaaccaggtcgccatgaaccccatcaacaccgtctttgatgccaagcgtcttattggcaagaggtttaacgatgct

SEQ ID NO: 404540 - DNA, 458 bp, Oryza sativa nipponbare
cttggtcctgttctcaggtggtggctattgtctatgccattatgacaacaagaaatgagcacataacatgggaaatgagggcaatccgagtgctgccgatgtttgtcttgcctgctgtatcttctgtgatatattcaacagttgtaaaattcacaaggatgcttgagcggtaagaccagaagacacttgaaaagctgagagctgagaggaaggccaagattgatgagctaaaagagagaactaattattacctcacccaacagcttattcagaaatatgacctagatccagctgcaaaggctgcggcagcatcagtattggcatctaagctcggagaggaaactggcttaaaagtacatgttggtgaagaaccaaaactggattcagcagttgctaggagcaatgatattgagatatcaccatcagaagggcttagaaacaggaagcaatccaatgca

SEQ ID NO: 404541 - DNA, 446 bp, Oryza sativa nipponbare
attggcttgccctcatcctcatggctgcggcggcggcggctgcttctgctccccgccttctcctgccgccggccgtcttcacctgcccagggcagcacgagcacgtccgccgcaactggcaccggccccgccgccaggtcatctctgcccgcgccggcgcctccgtcgtcgcccggggccttgatgcagacgacttccgccatccgctggacaagcagaacacactgctgctgagagcagttccagggcttaatgatatgggcaaggctttgctaggaccagtttctgagcaagttatggtacttcagaacattggatcggctgtgctagtctctgaaaaccagctttcagatcttcatcagatcttgaccgaggcagcaaaactattgaacacagacgcttctgacttgtacattctgcagaaccctgttcctaatgcttacacc

SEQ ID NO: 404542 - DNA, 437 bp, Oryza sativa nipponbare
gcgccctggtcaaaatttcgtttcatcttcagtagcaccagtacccccatccctcggcatggcgcctttgagtaataatcagggtgcgcctgggttcactcaaccagttgctcaactgagtctctcagatccactgcaaggctctccagctagggaagagggtgaagttcctgaatcacagttagatcctgacacacggagaagacttcttatattacatcatggtcaagacaccagagatcctacacctgctcttacagcagtacctcctgatcaagtcccaactccttcagttcaacctcatggaaattggcttcctgtaaaggatggcatgaatccaaataatctaaacaggggttctgcagggttccctttggaatctgaaactatgcactatgagtaatagcaactacctcacccattctctcatggagggg

SEQ ID NO: 404543 - DNA, 200 bp, Oryza sativa nipponbare
cggacgcgtgggcggacgcgtgggcggacgcgtgggcggtcatcgacctcgcgcgcgccgacgccgaccgtgacagggtggtcggccaggtgaggtctacggcggagtcggtgggcttcttccaggtggtcaaccacggcgtgccggcgcgcctcacggacgggatgctcgctgcggtacatcggtttaactttctggct

SEQ ID NO: 404544 - DNA, 302 bp, Oryza sativa nipponbare
tgcatgaagatgaagcgcaccatggctgctacttccatcctgttcttcttcctcgccggcctcgccgccgcccacggcagcacagggggcgacaccacgaccaccaccagcaacaccatacgcctcccgatcgacggagcagtggcggcgcgaaagaggacgaggccgtggaagtgctgcgacaacatcgtgaggctgccggagaggatcaacccgccgttctggcagtgctacgacgagctggagcccgggcagggcttacgtcagtgcgtggcgtgcaccaatccgccggggagcccatg

SEQ ID NO: 404545 - DNA, 370 bp, Oryza sativa nipponbare
gaatcgcaaaggccacgttattctggagtaataaacattgagagcaactacgaaagagcaaactaaggggatcatgagacgttgccctacacgaccaaacaaacaagcagaagtgaagaggtagcacgaaccaaacacaaagcccatatatgcaaccagcataacaaaattacatctgcactggacggcttatattcttcacaagcataaaagtagactcaagttcatatcatcagcatcgttacaacttacaagtaggtagattggaaaacaaaatgcatcttattatcccaactagcattaacagagggggtgggtactaatgaacacagttccacgtttaattttaagcatatacttagttttccgg

SEQ ID NO: 404546 - DNA, 477 bp, Oryza sativa nipponbare
ggagacgctgagtaccaccaggaaaccctcgaaaacctcaagctcgccatcaagtccaccaagaagctctgtgctgtcatgctcgacactgtcggcccggagttgcaggtggtgaacaagagtgaggctgcaatctcccttgaagcgaatggcactgttgttctcacccctgaccaggggcaggaggcctcctccgaattgctgcccatcaacttctccgggcttgctaaggctctgaaaccaggtgctacaatttttgtggggcaatacttgttcactggcagtgagactacttcagtttggttagaggtttctgaagttaaaggagatgatgtggtttgtgtgataaaaaattcggctactctggctggttcactgttcaccctgcattgttctcagattcatatcgacttacctacactgtctgatgaggacaaggaggttatcagaagatggggagcttcaaacaagattgac

SEQ ID NO: 404547 - DNA, 438 bp, Oryza sativa nipponbare
cccacgcgtccgggcgattgatgaaggcctattgctgaaacttcctttcaccactatctttgagtaccttcagttactgcaaatggtaggtacggcgatgaattgcttgggacgccaaggaatgttttaccttgctgcggcagtttctgacttttatgttccatgggaaagcatggctaaacataaaatcgagtcagcaagtggtcctttgaacatgcaactcaatcaagttccgaagatgcttttcattctgagaaaacaatgggctccttcagcattttgtgtatccttcaagcttgagacggacccagatattcttctgcagaaggcagaggcagctctgagaaagtatggtatgaatgtcgtggtcgccaacgagctagcgaactacaaagatgtagttgtgatggtcacaagcaatgggaggacaaccgtgcg

SEQ ID NO: 404548 - DNA, 315 bp, Oryza sativa nipponbare
cccacgcgtccggctgatcagtgactcgaggccggggcacatggcgtcggcgatcgtcgacgtcgccggaggcggccggcagcaagccctcgacggctcgaacccggcggtggcacggctgcgtcagctcatcggcggcggccaagaatcgtcggatgggtggagcaggtgctgggaggaaggcgtgacgccgtgggatctcggccagcggacgccggccgttgtcgagctggtgcactccgggaccctccccgccggcgacgccaccaccggtctagttcccggctgcggcgccggatacgatgtggttgcact

SEQ ID NO: 404549 - DNA, 482 bp, Oryza sativa nipponbare
  unsure (1)..(482): unsure at all n locations
gcgaggttacctggttagctagtaacaactcaaacattgtaagcgcatagaggagtctggtgctctactcaactctgaaacaatcagctgcaccagtgtactaattaaatatattactgtacttaagacatggctatcgcgtcgtcgtcgttttcacttgctgctatcctcctcatcatcatcatgtactgctgccccacgggtttggtggaggcagctcgcaaggggccggctgctgccggcggcggcgacgacagcgcgatgagggagaggtactagaagtgggcggcggaccatgggcgcacgtacaaggacttcctggagaaggcgcggcgattcgaggtattcaagaccaacgccctgttcatcgatttctttaatgctgcangaggcaagaagagcccccggctgacgaccaacaagttcgccgacctgacaaacgaagagttcgcggagtactacggtagggccgttagcacgcc

SEQ ID NO: 404550 - DNA, 426 bp, Oryza sativa nipponbare
  unsure (1)..(426): unsure at all n locations
gcgcccacgcgtccgcccacgcgtccgggcagggaaagccggcggcctcaagggcgtcgccctcatcggcggcgccggcggcaacagcgcggtcgccggcgccctccacttcttccaggacccctccaccgggtataccgaggtgagggggagggtcaccggcctcgctccgggcctccatggcttccacatccactcctttggcgacaccaccaacggctgcaactctaccgggccccattttaatcctcacaataagtcccatggggcaccatctgatgatgaaagacatgtgggcgacctgggaaacatagtagccaacaaagatggtgttgcagatatcttcataaaggacctacagatttcactaagcgggcctcattccatattgggaaagggcagntgttgttcatgctgattctgatg

SEQ ID NO: 404551 - DNA, 274 bp, Oryza sativa nipponbare
acgcccacgcgttcgcaaggatatagagaatgcagatgaagcgaaactgatagaaatcaagaatggtaggttggctatgcttactatgcttgggtggattgcgcatgcatttgtgacgcatgttgctccaatcgacaatctttttacacatctctcacacccgtacaacaaaaatatcatccacaccctatcctcttcttgaaaatatcctgcaccatcaaactttttgttcctttcttcatcttaattaatctatcaatcaacacattcacac

SEQ ID NO: 404552 - DNA, 452 bp, Oryza sativa nipponbare
cccacgcgtccgcccacgcgtccgcccacgcgtccgatatactcttctcctcgatctcttctcttgtccatctccaataattctgcatgtacgccgccatgtacccggagaccttcggcttctctgcttacccccagcagcagcagccgccgcccgacgccgcctcctgcatctacaccaccgccttgccgctcatcgccgacccgcctgacatcctcggaaacatggcacaaccatcctttctatcagagtatgaccttggaggggaaggggacctgttcaaagctcctgaacccatcattgaagaaccagtgcttagccttgatccagttgcagcagccatttcgatgatgtctggcagtgagaacgtaatggatgaaactatagaggttgcagatatcagcgacattcataatgacctctttttaagcgaaatattatacgagtgcgag

SEQ ID NO: 404553 - DNA, 408 bp, Oryza sativa nipponbare
cggacgcgtgggctggtggtgtggctgtgtccctgtctaccctctccttcctcctctcctttcccctcctctcttcccccctctcacaagagagagagcgccagactctgcccaggtgaggattcagccatgaagggggccaaatccaagggcgccgccaagcccgacgccaagttggctgtgaagagtaagggcgcggagaagcccgccgccaagggcaggaaggggaaggccggcaaggaccccaacaagcccaagagggctccctccgctttcttcgtttttatggaggagttccgtaaggagttcaaggagaagaaccccaagaataaatctgtcgctgctgtaggaaaagcagccggtgataggtggaaatccctgaccgaagcggacaaggcttcctatgta

SEQ ID NO: 404554 - DNA, 423 bp, Oryza sativa nipponbare
gcgctttgaccgacccatcgatcgatcacgatatttagtagtagtagtagtattacaaatccagcaagcgatcccaatatcccattggcaaaaccccaatccatcctcggagcacgccaccttcacgaggaagagagaatcgaggaagcagagcgctcggaccagaggaggaggaggaggtgccagccatggtggaccggatcggcgccgcgtggtggtgcgcgtgcgccgtggggatgctggtggtggaggcgtgcctcgccggggagaccagcgagtaccggcgccagctcggctccgccgtcgacatgccgctcgacgccgacgtctttcgcgccccgcccggccgcaatgcgccccaacaggttcatatcacacaaggaaatcatgatggcactgtcatgattatctcatgggtgacaa

SEQ ID NO: 404555 - DNA, 425 bp, Oryza sativa nipponbare
aaaagaaaaaaaatcctattcaaatcgaaacccctctctttgatctcgtcgccgaggaattaggaggagagagagcaatggccgccgaggagggagtcgtgatcgcctgccacaacaaggacgagttcgacgcccagatgaccaaggccaaggaggccggcaaagtggtcataattgacttcactgcttcctggtgtggcccttgccgcttcatcgccccagtgttcgctgaatacgccaaaaagttccctggtgctgtcttcctgaaggttgatgttgatgagctgaaggaagttgctgaaaagtacaatgtcgaggcaatgccgaccttcctattcatcaaggatggtgctgaggctgacaaggtcgttggcgccaggaaggatgacctccagaacaccatcgtgaagcacgtcggtgccact

SEQ ID NO: 404556 - DNA, 408 bp, Oryza sativa nipponbare
gagacggagagcctgctggagacccgggacgtgaactggacgtcgatcaggccggtgtacatctacggcccgctcaactacaaccccgtggaggagtggttcttccaccggctcaaggctggccgccccatccctgtccccggtgccggcaaccaaatcacccagctcggccatgtcaaggacttggcgacggcgttcgtgctggcgctcggcaacccgaaggcgagcaagcaggtgttcaacatctccggcgccaagtacgtcaccttcgacggtctagcacgggcgtgcgccaaggctggaggattccccgagccggagatcgtccactacaaccccaaggacttcgatttcgggaagaagaaggccttccccttcagagaccagcatttctttgcgtcaatcgag

SEQ ID NO: 404557 - DNA, 286 bp, Oryza sativa nipponbare
ggcggagctgagcgtggattactacaagaagagttgtcccggagtggagaacgtggtgaggtaccatgtcgccaaggccctcaaggcgaatcgcaaggaaggcgccgccctcgtccgcctaatcttccacgactgcttcgtcagggggtgcgacccgtcggtgctgctggacccgacggcggagaacccgcacacggagaaaacggcgccgatcaacatcggcctcgccgggttcgacctcatcgccgagatcaaggcggcggtggaggagcggtccccggccgtg

SEQ ID NO: 404558 - DNA, 281 bp, Oryza sativa nipponbare
cccacgcgtccgcccacgcgtccgcccacgcgtccgcccacgcgtccgaaattgtttaacaatttgtggtgttgtaacaaatatatgttctgtatatttcctcattggctcaatatgttatcttgtcattatggatctggacaagccaatatgctccatttcttactaacacaattttacatttaccagattttgagtgttggagtttgataagtaagcattttgtagaggaatgtcgggactttgtgagaataagaagttcattatagattaactattta

SEQ ID NO: 404559 - DNA, 356 bp, Oryza sativa nipponbare
cccacgcgtccgcccacgcgtccgcccacgcgtccgagaatctatactatacaagttactggcggtggcagattttaacgtgcaagcagcacaacaagggatggtgtacatcgatgaagttgataagatcacaaagaaggctgagagccttaacattagtagagatgtctccggtgaaggtgtccagcaggctttgttgaaaatgctggaaggcacaattgtcaatgtccctgagaaaggagcaaggaagcatcctcgcggtgataatatacagatagatacaaaggacattctttttatttgtggtgggcttttattgacttggagaaaactatatcagagaggcggcaagattc

SEQ ID NO: 404560 - DNA, 443 bp, Oryza sativa nipponbare
gaccgacgcgtgcgcaagtactctctttctcactcgattgattcaagcagcaaataattagcctagcttactctttccatagctagctagcttgttgcgagcaagatcaggttgccggtgcagtaacagagagcaaccatgggtgtattggacagcctctctgatatgtgcagcctgacagagaccaaggaagccctcaagctaaggaagaagcggccactgcagacggtgaacatcaaggtgaagatggactgcgaggggtgcgagaggagggtgaagaacgcggtgaagtcgatgcgaggggtgacgagcgtggcggtgaacccgaagcagagccggtgcacggtgaccgtgtacgtggaggcgagcaaggtgctggagcgcgtgaagagcaccgggaagggcggcggaatgtggccctacgtcccgtacaccatgaccac

SEQ ID NO: 404561 - DNA, 508 bp, Oryza sativa nipponbare
gcgcccacgcgtccgcccacgcgtccgatgaccctccccaacatcaaggtcccactcatcctgggtatctggggaggcaagggtcagggaaaatccttccagtgtgagctcgtcttcgccaagatggggatcaaccccatcatgatgagcgccggagagctggagagcggcaacgccggagagccggcgaagctgatcaggcagcggtaccgtgaggcggcagacatcatcaagaaggggaagatgtgctgcctcttcatcaacgatctggacgcgggtgcaggtcgcatgggaggcaccacccagtacacggtgaacaaccagatggtgaacgccaccctgatgaacatcgccgacaacccaaccaacgtgcagctccccgggatgtacaacagggaggacgaaccccgtgtccccatcatcgtcaccggcaacgacttctccacgctgtacgcgccgctcatcgtgacccgcgtatgtgagaattctactgggctcccacccgcga

SEQ ID NO: 404562 - DNA, 134 bp, Oryza sativa nipponbare
cccacgcgtccgcgctctccctcccatggcgctctccctcaccaccgccttctcccacctctccctcccctccacctccaagttccagccgctccccctcctccacctgcgcttcccctcctcctcctcctccc

SEQ ID NO: 404563 - DNA, 410 bp, Oryza sativa nipponbare
gcgctcaacttggcaccatcagtgctggcttgttttgtatatttgtcactatgtcttcaatcattgtttcttaaattctacttttggtgcaatgaaggcaactgtgaaacgtgtctacgacatatggttcacattatgtgcacatgacactgctacacagaattgataaatcttattcttttgtcgtcacaatatgcaggatagatttttagcgtttcctgctgaacagcatcctattgtgttgcaaattggtggaagtaatctggataacttagcgaaggcaactgaactggcaaatgcttattcgtacgatgagatcaacctaaactgtggctgccccagtggcaaagttgctggtcatggttgcttcggtgctcgcttaatggttgatccagaggggatgctatgtc

SEQ ID NO: 404564 - DNA, 397 bp, Oryza sativa nipponbare
ttcaaaataggtgggcggtgctctcgcctcccctccccgccggcttccgcctccagatccgcgccgcccgccgccgccgcgctcgctcgagcgggagctatagctgccgccttcgattcgacgctgcatgtactggcgagaggcgtagcgcgtggcgtgctctccccgacgcgcgcctcgcctcctccccgttcattacaagatggcgatgatggtggaccctcctaatggcatgggaaaccaagggaagcattactacacaatgtggcaaacgctatttgagattgacaccaagtatgtgccaatcaagcccatcggaagaggggcttatggaatagtttgctcctctataaaccgtgcaaccaacgaaaaagttgcaataaaagagatcaacaat

SEQ ID NO: 404565 - DNA, 501 bp, Oryza sativa nipponbare
  unsure (1)..(501): unsure at all n locations
ctcgtttagggtttccctccgccgccgccgcctcccgcatccacgcgcctcctcctcctccgccgccgccgccgccaccgcagcatcagccatggccgaagtggagctcccgcagcaggaggtcaagctcttcagccgctggtccttcgaggacgtccaggtgaacgacatctcgctggcggactacctggcggtgaacccgacgaagcacgcgacgtacctgccgcacacggcggggaggtactcggcgaagaggttccggaaggcgcagtgccccatcgtggagcgcctgaccaactcgctcatgatgcacggccgcaacaacgggaagaagatcatggccgtgcgcatcgtcaagcacgccatggagatcatncacctnctcaccgacgccaaccccattcaggtcatcgtcgacgccatcatcaacagtggccctcgtgaggatgcgacccgtattgggtctgcgggtgctgtgaggaggcangctgtggatatctc

SEQ ID NO: 404566 - DNA, 396 bp, Oryza sativa nipponbare
gcaagaagctcagctcctcctcctctcgcatggcagccatggccaccaccgcgtccagcctcctcaagacctccttcgctggcgcgcgcctccgcgccgccgcccgcaaccccacgcgtctccgtcgcgccgcgcaccggcggcgccatctgcaactccatctcgtcgtcgtcgtccactcccccctacgacctcaacgccatcaggttcagccccatcaaggagtccatcgtgtctcgcgagatgacccggcggtacatgaccgacatgatcacctacgccgacaccgacgtcgtcgtcgtcggcgccggctccgcggggctctcctgcgcgtacgagctctccaaggaccccttcgtcagcggcgccgtcatcgagcagtcggtgtcccccggc

SEQ ID NO: 404567 - DNA, 473 bp, Oryza sativa nipponbare
gcgcccacgcgtccgccccggcctcctcaccgcagccgcaaaagccaagccgccatggcaaccgccgccgcgtcggatctggagagcaaggccaaggcggccttcgtcgacgacgacttcgagctcgccgccgagctctacacgcaggcaatcgaggccagccccgccaccgccgagctctacgccgaccgcgcccaggcccatatcaagctaggcaactacactgaggctgtagctgatgctaacaaggccattgaacttgacccatcaatgcacaaggcttatcttcgtaaaggcgctgcatgtatacgactggaggagtatcaaactgcaaaagcagctcttggaatgggttactcgttcgcatctggtgactcaaggtttactcgcctaaatgaggagggtgtgaggcgcatgctgaggagcttaatgaagccctgtaagaaggctgaagaggagcagtgcccctctgt

SEQ ID NO: 404568 - DNA, 469 bp, Oryza sativa nipponbare
  unsure (1)..(469): unsure at all n locations
ggtaggccagctnctgccggcttgccctgctggtggtggtggtgctggcggcggcggcgagcgcggacaggccggcgaggggcgggctgtcggtgacggccgggcggaggagtcctccgccgtgttcccgctctacggcgacgtgtacccccacggattgtactatgtggcgatgagcatcggcaacccgccgaggccctacttcctggacgtcgacaccggcagcgacctcacctggctgcagtgcgacgccccctgcgtcagctgctccaaggttccgcacccgctgtaccgaccaacaaagaacaagctggttccatgtgtggatcagatgtgcgccgctctgcacggtggtctgaccgggaggcacaaatgtgattcaccaaagcagcagtgtgactatgaaaataagtatgctgaccagggatcatcacttggtgtgcttgtcactgacagcttcgcactccga

SEQ ID NO: 404569 - DNA, 265 bp, Oryza sativa nipponbare
gctccgtattctaccctcctcgttgctggtccaagcgaagcagcggtaatggcgtgcgggcgcaggcgtcgacgacggagacgaccgcagcgccggctgcggaggtgactactaaggtggagaaggtgtcgaagaagcaggtggatggcgtggtgacgaacaagtacaggcccaaggagccgtacacggggcggtgcctcctgaacacgaggatcaccggcgacgacgcccccggtgagacgtggcacatggtgttcagcaccga

SEQ ID NO: 404570 - DNA, 370 bp, Oryza sativa nipponbare
gcgcccacgcgtccgcacggccacaccacccaccaactgagagctgagcaggcgagcgagcggacatggcagcatcgctccaagccgcgggcaccctgatgcagccggccaagctcggcggccgggcctcctccgccgcgctgccatcgcgcccgtcttcgcacgtcgccagggcgttcggcgtcgacaccggtgccgccggcaggatcacgtgctccctgcagtccgacatccgggaggtcgccaacaagtgcgccgatgccgccaagctcgccggcttcgccctcgccacctcagctctgctcgtctcgggcgccaacgcggagggcgtgccgagggaggcttaccttgacgagattcagagtaagac

SEQ ID NO: 404571 - DNA, 449 bp, Oryza sativa nipponbare
  unsure (1)..(449): unsure at all n locations
cccacgcgtccgcccacgcgtccgcccacccccaccacctcctcttcttcttccctcgagctcagcgcagaacgcacgcacgcggacagagagggaatccccccgttgcttgcgtccgctcgcggctcggagacgagccgcgagcgttccaataccaaaccagagcatcccccggccttgttggatctttccggcgccgcccgcagcgagcgattcgccttcgggcaggcgcaagattcaatgaagaacaaccttgtgaaaaacaacatgctgaaagagttctacatcccaacttatatattcgtgccagagtctccagtagagaaggtttctcaaatacctagttgtccagtgattgtttntatcaacaccaaaagtggtggccagctgggacatgatttaattgtcacgtaccgtaagctgctcaacaattctcaagtggttgatct

SEQ ID NO: 404572 - DNA, 232 bp, Oryza sativa nipponbare
cccacgcgtccgcgccgctgagctctatctatctactagttagtttagtcgtctcgagggtaaattgagctttgtgtgcggttttgaggggagtacatcggcatgaggatccagtgcgacgcgtgcgaggccgcggcggccacggtggtgtgctgcgcggacgaggcgcggctgtgcgcgcgctgcgacgtcgagatccacgccgccaacaagctcgccagcaagcaccagc

SEQ ID NO: 404573 - DNA, 430 bp, Oryza sativa nipponbare
gcgcccacgcgtccgcccacgcgtccgatcagcctcgacgacgtcatcgagatcgccaggatcatgaggaacaggtccatggccaaggagatggccgggaccgtcaaggagatccttgggacctgcgtcagcgttgggtgcaccgtcgacggcaaggaccccaaggatctgcagcaggagatctccgatggcgaggtcgagatcccttcggcttaaaaggcttgatatttgaggacattaccatctcgtgctactgaagtgatcatttgttccaaaatgctgcttatgtaccttacgagacgatgtgattcgacctatttttgtcatgctttagtagtgatcttgttgagacctcaatgttactattgcaacttggtaccatttggtcctctggaatggagtttcaagtacttgcataatttaatcaaaa

SEQ ID NO: 404574 - DNA, 366 bp, Oryza sativa nipponbare
gcgattggtggtttatctttgaacatggatgtttcaaccactatgattgtgactcctggaccggtttttgatttcctccttacaaatcggaatgtcagagacattagagatatcgactggcccagggccaagaaaatgttgaaaaacctgagagttaaagctattcacaataacatggagttcaagatcattggtctgagtgatgagccatgctctagacaaacattccccatgaaagtacgaaatggaagcagtgaaggtgaaaccgttgaaattactgtccaggaatatttaagtccaagcaggtggtttaacaatgccttatttgccatgtcttgatgtgggaaaccaaaacgcccaaattat

SEQ ID NO: 404575 - DNA, 466 bp, Oryza sativa nipponbare
  unsure (1)..(466): unsure at all n locations
aagcacaatcacaatatatttccttaacatttggttgcttgaatttacaaagtgtatctccatcgactggggcagtgagagggaagactgaaaccgttctgcagaatctcaccaagaatagctaaaactactggtgtgtgaagtgtgaactaatggcagggagaaaaattgaaccgtgtttgccaagtgctatatagcctagcaaagcttcagaagtgttcaactgcagctggagaaaagatgcaatatctcctaccaccatgaccagttcagtgctcatttcttgttgaatccaaacaaggatttgatggcgttgatagcattctcattgatgaacgattcgtcgtacttgttcagcaggacgttgaattcctcagttttcctcaagttttctagatccgggtcggtgcgaattctccttgagtcttcataacctgctttcagggcatcnttcagtgcagaaata

SEQ ID NO: 404576 - DNA, 544 bp, Oryza sativa nipponbare
  unsure (1)..(544): unsure at all n locations
gcgcccgcctccaccaccacccgccgctcgccgctcgcccaccatggccatggcgacggcgctccgcaagctctcctccgacgggctccgccgccagccgctctcccgcatcaccccgctctactacatggcgtccctgccggcgacggaggagagatccggagtcacctggccgaagcagctgaacgcgccgctggaggaggtggatcccgagatcgccgacatcatcgagcacgagaaggcccgccaatggaagggtctggagctcatcccgtcggagaacttcacctcggtgtcagtgatgcaggcggtgggatccgtcatgaccaacaagtacagcgaggggtaccccggcgcgagatactacggtggaaacgaatacattgatatggccgagtcattgtgccagaaacgtgctttggaggccttccgcttggacccagcgaaatcgggagtgaatgtcaacctctatcanggtcaccttgcaacttccatgtntacacttgcctattgaaaccacatgagagaatcatggctttggatc

SEQ ID NO: 404577 - DNA, 448 bp, Oryza sativa nipponbare
atggcggctcaggctcttctctctgggaggcagctgctggggaggccattgcaatcttgagtctggaggtcttcttcctccaggaaggcacccttcatggtcagggcagaggccactccccctgccaagcaaggtgctgacaggcagctgtggttcgcatccaagcagtccctgagctacctggatggcacgcttccgggagacttcgggttcgacccgctggggctatcggacccggaggggaccggtgggttcatcgagccacggtggctggcctacggcgagggtgttcaacggccggaccggcgatgaatgggcgtcgtcggcatggtcgccccggagctcctcggcaagctgggcctcgtccccgccgagacggcgatcccgtggtccagaaccggcggatcccccccgcgggcacctacacctactgggccgacccttacac

SEQ ID NO: 404578 - DNA, 422 bp, Oryza sativa nipponbare
  unsure (1)..(422): unsure at all n locations
gcgcattcttgaaaagcttatgcaaagcttcatggctcttatgaggcattggagggtgggcttgtgcaagatgctctagtggatctcacaggaggagctggtgaagagattgacatgcggagcccccaagcgcagattgatcttgctagtggaagattgtggtctcagttgttgcattttaaacaagagggctttctttttggtgctggaagtccttctggctcggatgctcatatttcatcaagtggcattgttcaaggacatgcttactcaaatttgcaggtaaagagaagttgatggccataagctcgtgcaaattagaaaatccgtggggcaaatgaagntgaaatggaatggtccgtggtcagactcatcaacagagtggactgagcgaatgaagcacaaactttaacatgttccac

SEQ ID NO: 404579 - DNA, 347 bp, Oryza sativa nipponbare
  unsure (1)..(347): unsure at all n locations
gtgctatatagtctattctaacttagaagtgttcaactgcagctggagaaaagatgcaatatcttctaccaccatgaccagttcagtgctcatttcttgttgaatccaaacaaggatttgatggcgttgatagcattctcattgatgaacgattcgtcttacttgttcagcangacgttgaattcctcagtttttctcaagttttctagatccgggtcggtgcgaattcttttgagtcttcataacctgctgtcaaggcattttccaatgcagatataccaacttgtatccggtcatgcttcgagtaactactagcaacattgtatctagctttgaagacttattga

SEQ ID NO: 404580 - DNA, 382 bp, Oryza sativa nipponbare
  unsure (1)..(382): unsure at all n locations
gcgcccacgcgtccggttctagatcgcgagcggccgcccgcgatctagaactcagtaagctagctaactaactacgtggctatggccccgaccgtgatggcctcctcggccacctccgtggctccattccaagggctcaagtccaccgccgggctccccgtcagccgccgctccaccaactcgggcttcggcaacgtcagcaatggcggaaggatcaagtgcatgcaggtgtggccaattgagggcatcaagaagttcgagaccctatcgtacctgccaccactcaccgtggaggatcttttgaagcagatcgagtccctgcttcgatccaagtgggtgcctngcctcgagttcagcaaggttggattcgtctaccgtgaga

SEQ ID NO: 404581 - DNA, 392 bp, Oryza sativa nipponbare
gcgcccacgcgtccgcggacgcgtgggggcggagcggcggcggcgaatgcgccgtactgggacccgccgccggcgccgctgctggacactgtcgagctgggtaagtggtgcgctgtaccgtgccctcatcgcggagttcatggcgacgctcatcttcctctacgtgagcatcgccaccgtgatcgggtacaagaaccagagggccaccgtcgacgcgtgcaccggcgtcggctacctcggcgtggcgtggtcgttcggtgccaccatattcgtcctcgtctactggcaccggggcgtctccggcgggcacatcaacaacgcggtgacgctgggcctcttcttcgggcggaagctgtcgctcgtccgcaccgtgctgtacgtcttggcgcagt

SEQ ID NO: 404582 - DNA, 454 bp, Oryza sativa nipponbare
  unsure (1)..(454): unsure at all n locations
cccacgcgtccgatcaattcaatttatgatctatgaaacattggcaaagcgtctccggtcaaagagatctggaaaggaactgccaaagaaagaaccttactgctatggaggtattcttattaggtgcaatagcaaagctcggagctactgttgtgacatacccattgctagtggttaagtctaggttgcaagcaaaacaagaaattggcaggaatgtgatgtccagatacacaggtacgattgacgcgatcataaagatgatccggtatgaaggattgcacgggttttacaaaggaatgggtacgaagattgtacagagcgtctttgccgcctcagttctttntatggtaaaagaagagttggntaaaattcgtaggtatgttaatntgctaggagtagggctgtgctcggtcctagctctaagaaacgattagcaggttatatatatcgaaac

SEQ ID NO: 404583 - DNA, 312 bp, Oryza sativa nipponbare
  unsure (1)..(312): unsure at all n locations
ggcgtcgccgtcgccgtcgtccccgccgcatcgccgccgccgcgctcagatccagacccctgagacatggtctctcgccgagcgatgcgagcgccggagatgctccggtggctcgccgcggnagcngctctcttggctctgctcgccgccgcgccagccagcaggttctacctgcccggcgtcgcccccaccgacttcgggaagggtgattcacttcccgtgaaggtgaataagctgacatcagtaaaaactcaactaccctatgcatattactcccttcctttctgcaagccagaaactatcgttgacagt

SEQ ID NO: 404584 - DNA, 557 bp, Oryza sativa nipponbare
  unsure (1)..(557): unsure at all n locations
tccgaatcccggtcgaccacgcgtggcgtccgcacgactccnctctccttcctctctctctcgctcgcgcgcgcctgcgtcgccaatggcggaccagctcaccgacgaccagagcgccgagttcaaggaggcctgcaggctcttcgacaaggacggcgacggttgtattactactaaggagttgggaactgtcatgcgttcgctggggcagaacccaactgaggcagaactacaagacatgatcaatgaggtggatgctgacggcaatggaacaatcgatttccctgaatttctcaacctgatggcccgcaagatgaaagatactgattctgaggaagagctcaaggaggcgttccgtgtgttcgacaaggaccaaaatggttttatctctgctgctgaattgcgtcacgtcatgactaaccttggtgagaagctgacagatgaagaggttgaagagatgatccgtgaggccgatgttgatggtgatgggcagatcaactacgatgaattcgttaaagtcatgatggccaagtaggtgaagcattattggatcaaca

SEQ ID NO: 404585 - DNA, 310 bp, Oryza sativa nipponbare
  unsure (1)..(310): unsure at all n locations
gcgcccacgcgtccgcccacgcgtccgcccacgcgtccgcagcactctaaattagtagaggatacattgagtgttgttacccagaaactgagggagacaatggaagagaatactattgtacgaaataaagccaaagaaaagcacttggagtatgagaaagagatgaagtaccaggaggaatttttccatgatcaaatcgaaaaaattcacaaggccacagaggagaaagaaatcaagtttgagaagttgctgcaagaggagcgagcaaaggctagacannagtgatgttgactctgaagtactgaagatc

SEQ ID NO: 404586 - DNA, 458 bp, Oryza sativa nipponbare
  unsure (1)..(458): unsure at all n locations
cgtccgatcccggtcacccaccgtgcgcggcgcgtgggctgcattgcggaccggtatagcgagtttttttaagtggatcaacaaatactttttgaatagaaagtcaatggtctaaccaattattttacaggagtatctagttggcgaaggcgatttcagaatcaaaaaaagtaaagtcaaaatcatttagcttattctctcaantcaatcgaccgctgttagtatatctaatatggaatggcgatccgaacacatatggatagaacttctaaaaggttctcgaaaaagaggtaattttttctgggcctggattctttttctagggtcactaggattcttagcgggtggggcttccaggtatcttggtaagaatattatatctggacttccatctcaacaaattctttttttttcacaggggggcgtgatgtctttctaccgaatcgcaggcctattca

SEQ ID NO: 404587 - DNA, 484 bp, Oryza sativa nipponbare
gcgataccacttccagcccccgatgaactggatcaacgatccgaacgggccactgtattacaagggatggtaccacctattctgccaggagaaccccaagggagctgtgtggggcaatatcgtgtgggctcactcggtatcacaggacctcatcaactggatagcccttgagccggcaatcaagcccgacatcccctccgaccagtacggttgttggtctggctctgccaccatccttcccgatggcacgccggcgatcctctacactgggatcgaccgccccaacatcaactaccaggtgcagaatatcgcatttcccaagaatgcgtcagacccgctccttcgtgagtgggtcaagccggcctacaacccggtggccacgccggagcctggtatgaacgcaacccaatttcgcgatccgacaacggcctggtacgccgacggtcattggcggatgctcgtggtggcctgaaagggctctgct

SEQ ID NO: 404588 - DNA, 465 bp, Oryza sativa nipponbare
ggggagatttctctccttgtagaaacaagcctagagagtactatggagcagaggaaatttttgttgtgcctaattcttggcttagtggcgagtcaagacctgggggaccgtcaatgctgactcgccctttgatttttattatctcatcctcatgtggcctggagcatactgcactgacagcgagtatggttgttgcgtgcccaagtatggttacccgtcagaagatttcttcgtcaagagcttcatgacctttgactcgtcagagaacacagctgttgtcaggtgcaactccgacaatcctttcgacattaacaagctagactcaatcgagaacaacctgaaccactactggagcaacatcaagtgtcctcgcaccgacggcgtgaactcatggaagagcgagttgaacagctatggcttctgctacggtcttaaggagtatgtctacttcaaggcctgtctcca

SEQ ID NO: 404589 - DNA, 437 bp, Oryza sativa nipponbare
  unsure (1)..(437): unsure at all n locations
gcgcccacgcgtccgcccacgcgtccggcgagctcgcgaacgcgccactgcttagcttactcccgcctcactatctgtcttggcgcgtcgtgtacacgatcgagcaccagacaatggcggtggcgcancagcagcagcagcagcagaggcaggccaccggtgagtcgctgatgcagaagtgcaagccgtacgtggcgatggtctcgctgcagttcgggtacgccggcatgaacgtgatcaccaaggtgtccctcaaccacggcatgagccactacgtgctcgtcgtgtaccgacacgccttcgccaccctctccatcgcgcccttcgcgctcgtnctcgaacgcaaggtccgccctcgcatggtcctttgggtcttcctccagatcttcgtcctcgcccttctcggggcccggatcgatcagaatttctactacgcc

SEQ ID NO: 404590 - DNA, 530 bp, Oryza sativa nipponbare
  unsure (1)..(530): unsure at all n locations
gtcgtctttcacagcaaggaccaaggccgcatcctaatgagtgttcagggagtgatcttgacggggacatatattttggttcttgggacccatctctcattccgcctcgtatggtgacacctatggactatactccagcaccaacagaaacattagaccatgatgttacaattgaggaagtagaagagtacttcacaaattacatagtcaatgagagtttaggaatgattgccaatgcacatgtagtatttgcggataaggaagacctcaaggcagagagttcaccatgcattgagctggccaagctcttctccattgctgttgactttcccaaaactggagtgccagccctgattcctcctgaactacatgtgaaggagtatcctgatntcatggagaagctngacaaagtcacctatgaatcaaaaggagtaatcgggaagctctacagggaaataaagaagcacacncctcacataaagcacttcacangggaggtggcaaggccgtcttatgacaccgatatgatg

SEQ ID NO: 404591 - DNA, 393 bp, Oryza sativa nipponbare
  unsure (1)..(393): unsure at all n locations
tcccggtcgaccacgcgtccgcccacgcgtccgcggacgcgtgggttcgtcttcttgctggtgtgttcgaggaggaggaggaggaggagaagctagcggcggcggcggcaatggcgacgagcgggctgaggagctgcacgcggtgggcgtnccnagcctgctggcgccgtcgtcgaacaggagccgcctgccggtctgcgcctacgccaccacctccgggcgcgtcaccatgtccgccgagtggatgccgggccagccacgccccgcccacctcgacggctcctctcccggtgacttcgggttctacccgctgggcctcgccaccgtgccggagaacttcgagcggctcaaggagtcggaggtgtaccactgccggttggccatgctcgcttt

SEQ ID NO: 404592 - DNA, 409 bp, Oryza sativa nipponbare
gcgcccacgcgtccgcccacgcgtccgcccacgcgtccggtcctcgtgctcccgatgccatgccagggccacgtcatcccgttcatggagctctcgcaccgcctcgccgacgagggcttgaggcaccttctcaacacggaggtggaccaccctggggggcgcctgcgcggcgcccggactcgggtggatcactacgctcctatgctcctaacagcgtggttacattagtcttttttatgggtttacgtatttaattttattttatcatattttttagatttgggggggggtgtttaatattaggttttattttttggttgtatatttggttaaatttttttgttgtagttttgagtttaaatttttggagtgaaatatttgttttaaaattttttgtgtttaatttttt

SEQ ID NO: 404593 - DNA, 489 bp, Oryza sativa nipponbare
gcgccgacgcgtccgacagacatggccgccgtgaacacagtgtcgtcgctgccctgtagcaaagctggcgccgccgtagccgggggaggtgcgaggccgtcgacctgctccgtattctaccctcctcgttgctggtccaagcgaagcagcggtaatggcgtgcgggcgcaggcgtcgacgacggagacgaccgcagcgccggctgcggaggtgactactaaggtggagaaggtgtcgaagaagcaggtggatggcgtggtgacgaacaagtacaggcccaaggagccgtacacggggcggtgcctcctgaacacgaggatcaccggcgacgacgcccccggtgagacgtggcacatggtgttcagcaccgacggcgagatcccctaccgcgaggggcagtccaatggcgtcatccccgacggcatcgacaagaacggcaagccccacaagctccgtctctactccatcggcagcagcgccatcggggac

SEQ ID NO: 404594 - DNA, 337 bp, Oryza sativa nipponbare
  unsure (1)..(337): unsure at all n locations
gcggcggtaagcaattttactcggagcaccaaaaattgcaattttgggcaagacacgtgattcttgggagcgactttatcaaacgtgggggcaatgctttctattaggactaggtaccaaccgttgcaactgtctgcgtatttcttgcttcgaagattgaagacacaccttgcccattacaacgtgtcatcattgtggcatatgaaaccatgtaccggaaagactgtaacgctgctcacagaatctaccagaaggaagttcttgagaagcagaaagagctcattttggtaggggagacgctgntgctttcaacaattaggtttgatttcaacataca

SEQ ID NO: 404595 - DNA, 409 bp, Oryza sativa nipponbare
cgtgagctcatcaccggcaacctcgtcgtcgacgacgctgacatcggctactgatcaccacatggatgcttggctactcaagccccaggtgaggtgatttggcagtggaggaagagggctcgtgcatggtgatttgtgtggtttgggtgtagaagctgataggatcatggaggaatggaagatctgttgtacttaagaaaaactaagtcttgtataccgtacctctctcttgtgtgtatttaccatcttaagattcttgagaacaattccttcgtgcaattctcgtgctgttgtcgctgcagctgcaaagagattttcaatcgtaaaaaaaagaagatagcaatggttttgcagtcttgcctttaagctactttatacataacatgttgtgttcttgggagccagtcct

SEQ ID NO: 404596 - DNA, 354 bp, Oryza sativa nipponbare
  unsure (1)..(354): unsure at all n locations
acaagcccaagtcgcgtcgcaccgaagcagagtagagaaggagaggagcggagcgccatcagccgtccgatcgagtgatccgatggcgtgtcgctgtctccacctctgctgctgctgccgctgccgccgcggcgcgggcgctcgcggcgagggtgacgacgacgaggggttacgccgcgtcggcggcgtcgtcggcgatgaggcgggcggcggcggcggtggaagggaagggcgctgcggggatgacgcangcgaaagacgggcgtcgtcntcngcngcaagggaggtgtcgtgggtgcccgaccccgtgacgggccactatccggccttcaacttcgccggttgcgccaacgc

SEQ ID NO: 404597 - DNA, 404 bp, Oryza sativa nipponbare
  unsure (1)..(404): unsure at all n locations
gcggagctggcaggcattgctcggatgacggataacctggatccttctacaacacacgttatggctcttgtaataatgcaaagcataatgaggaacacgacttgcatatctacttctgacaagattgaagctctttttgatttaattaaaggtcttataaaagatatggatggggctcaaaatgatgagcttgatgatgaggattttaaggaggaacagaattctgtggcgcgtcttattcacatgttgcacaatgatgaccatgaagagatngtgaagatattatgcaccgttcagaagcatatacttcagggaggtcccaagcggctacctttcactgtgccatccttagtattctctgctctcaagttggtccgaagattacaaggtcaagatggtgatgt

SEQ ID NO: 404598 - DNA, 467 bp, Oryza sativa nipponbare
  unsure (1)..(467): unsure at all n locations
tgttcgggcgcgcgccgaagaagagcgacaacaccaagtactacgagatcctgggggtccccagagaccgccgtcccangacgacctcaagaaggcgtaccgcaaggccgccatcaagaaccaccccgacaagggcggcgaccccgagaagttcaaggagcttgcacaagcttatgaggtattgagtgacccggagaaacgtgaaatctatgaccaatatggtgaagatgccctcaaggaaggaatgggtggaggcggatcccatgttgatccatttgacatcttttcatcattctttggaccttcttttggtggtggcagcagcaggggcagaaggcaaaggaggggagaggatggatccatccgcttaaggtttctctagaagatctttacaatggtacttcaaagaagctctctctttcccgcaatgtcctctgcgccaagtgcaagggcaagggtcccagtct

SEQ ID NO: 404599 - DNA, 461 bp, Oryza sativa nipponbare
  unsure (1)..(461): unsure at all n locations
gcgcgactctctccctcccacgccgccgcccccgcaaaccctagcgaacgcagcggagagaggagagagcgccatggccgtggaggtggcgacgcagaagatcaggtggggagagctcgaggaggaccacnagggggacctcgacttcctgctcccgccgcgcgtggtctccgggcccgacgagaatgggttcaagaaggtggtcgagtatcgcttcgacgacaaggggaacaaggtgaaggtcaccaggaccttccgcgtccgcaagatcgcccgcgcccgcctctccaagagcgccatcgagcgccgctcgtggcccaagttcggcgacgccgtgcaggaagacgtcngcgcgcggctcaccatgggtccaaccgagaatcgtnctgagcgcccacgcgcnccnggagcaagctgagaaccagtgctttgggatcactggcagcagagggtgagtctat

SEQ ID NO: 404600 - DNA, 315 bp, Oryza sativa nipponbare
gcggccagggagaccgactacgccctcctcctcgacaaccgcctcggcaagcgccgcttccatggcggctacgtccacaacgggctcctgcgcgccgccgcctgggttctcgacgccgagtgcgacctcctccgggacctcctcgccgaccaccccgactacaccctcaccttcactggccactccctcggcgccggcatcgccgccatgctcaccgtcgtcgtcctcctcaacctcgacaagctcggcaccaatctccacaggagccgcatcaggtgctacgccatggcgcctgccagatgatgtcgctaatct

SEQ ID NO: 404601 - DNA, 322 bp, Oryza sativa nipponbare
gcggcttgatgagagtgaggacgagaagaagcggcaggaggaactcaaggagaagttcgagggtctgtgcaaggtgatcaaggaggtgcgcggtgacaaggtggagaaggttgttgtctctgaccgtgtggtggactctccctgctgtctagtcactggggagtatggctggactgctaacatggagaggatcatgaaggcccaggctctgagggactccagcatggccggctacatgtctagcaagaagaccatggagatcaacccggagaatgccatcatggacgagctccgcaagcgtgccgatgctgacaagaatgac

SEQ ID NO: 404602 - DNA, 418 bp, Oryza sativa nipponbare
gagatcctcaactcgcctgatcgtgcttgcaacctcgcaaagcaggcttttgatgaggccatctcggagctggacaccctgagcgaggagtcctacaaggacagcactttgatcatgcaactcctccgtgataacctgaccctgtggacttcagacatctcggaggacaccgcggaagagatcagggaagctccgaagcgcgactccagcgaggggcagtaaagccggctttatgtgccctagaagcttgtagctagtgctttgctactgtgtaatgacacctatgtggctgtgattgttgtcgggaaatctggggctcccccgtatgtgaggttgctagcgatggttttgcagtctcgcctttaagctactcgtagcaaaacaaggtgggggtctgggagccaggcctggtttgggg

SEQ ID NO: 404603 - DNA, 272 bp, Oryza sativa nipponbare
gatgagtaccttctcactcgcagctacatctctgggtaccaagcctccaacgatgacttggctgtgtactctgcattttcaactgcgccctcttcaagctataccaatgttgctaggtggtttactcacattgatgcactcctacgtctgagtggaggtactgctgatggtcaaggcgcaaaggtcgagtatacagttgacccttacacttcaaccactgatgtacctgatgcaaatgctgctgaagctgtacatgaccattatgactacac

SEQ ID NO: 404604 - DNA, 409 bp, Oryza sativa nipponbare
tgtcactttaattagagctcatcaccacgcctctcgcctcacatcataccaagtgtcctccttcctcctcatcctccccaaccactgcatccgggtcggcgtcctcctcctcctcctcctcctcgcagaatgcaacgggcaattcaagctatcgggtcacatggcagtctcctcaagtctgctgttctgcgacacatcagtgctccaaaaccatctattttacctgctgtatattcacgctccatgtcagtttcatctgctcaaatagaggagagtggatttgagactgccactgtggcagatattttgaagtctaaggggaagagtgctgatggatcttggctctggtgcactactgatgactctgtctatgatgctgtcaaatctatgacgcaacacaatgttggag

SEQ ID NO: 404605 - DNA, 329 bp, Oryza sativa nipponbare
  unsure (1)..(329): unsure at all n locations
gcgtgggcgcatctctctagctctacagctactgcataatggccgcggcaccatggcgctctcctccccggtgatggcccgcgcggcgccgtcgacctcctccgcgctcttcggcgaggcgcggatcaccatgcgcaagaccgccgcgaagcccaagccggcggcgtcgtcggtgagcccgtggtacggcgccgaccgcgtcctctacctcggcccgctctccggcgagccgccgagctacctcaccggcgagttcccgggcgactacgggtgggacaccgcggngctctccgccgacccggagacgttcgccaagaaccgggagctgg

SEQ ID NO: 404606 - DNA, 215 bp, Oryza sativa nipponbare
  unsure (1)..(215): unsure at all n locations
ggcgtccacgcgtacgntttcagtctttnnttttgagggggagatagcggatattttcaccaacgttagctcacaggcacgcctcacaaagcgcgatgagtaccttctcactcgcagctacatctctgggtaccaagcctccaacgatgacttggctgtgtactctgcattttaactgcgccctcttaagctataccaatgttgctgggggtact

SEQ ID NO: 404607 - DNA, 503 bp, Oryza sativa nipponbare
gcgcccacgcgtccggcagggggcacgcggaccacggcggtggcgggcgcggcggcgctcggggcggtcagcgtcgcgggcgccgcggcggtgaactccgccgtgcccggggtcgccgcggcggggctgcacaactacgtcgccggctccgacgaccccaccaagctggagagcagcgaggtggaggccatcgcgagcaaatacggcgttagcacagaggatgcaaccttcaaggccgagctctgtgatttgtatggcaggtttgttttctcattaattcatccaggatatgaagaccttgaaggtactgaagttgagactattataaagtttaaaaaggcccttgggttgaatgatatagatgctgcaaatgtgcacatggagattgctaaacgcattgatcgcaatgctggtgtaagacaacagcaggcatttgaaaagcttatatttgtaacaaatcttgtgtttcgggatgcatatgaatacctactttcatggaaacg

SEQ ID NO: 404608 - DNA, 430 bp, Oryza sativa nipponbare
tcaagaagtactcgagcaaagaaggagagagcttggtgagctgcagagatggccccctccgtgatggcgtcgtcggccaccaccgtcgctcccttccaggggctcaagtccaccgccggcatgcccgtcgcccgccgctccggcaactccagcttcggcaacgtcagcaatggcggcaggatcaggtgcatgcaggtgtggccgattgagggcatcaagaagttcgagaccctctcctacctgccaccgctcaccgtggaggacctcctgaagcagatcgagtacctgctccgttccaagtgggtgccctgcctcgagttcagcaaggtcggattcgtctaccgtgagaaccacagatcccccggatactacgatggcaggtactggaccatgtggaagcttgccatgttcgggtgcactgacgccaccc

SEQ ID NO: 404609 - DNA, 397 bp, Oryza sativa nipponbare
cccacgcgtccgcccacgcgtccgcccacgcgtccgctagcagaaacaaacccctctcactcccagatacctgctgctgccactagcccactaccatggatccttgcaagttccggccgtcgagctcgttcgacacgaagacgacgacgacgaacgcgggagctccggtgtggaacgacaacgaggcgctgacagtggggcccagggggccgatcctcctcgaggactaccacctgatcgagaaggtggcgcacttcgcccgggagcgcatcccggagcgcgtggtccacgcccgcggcgcctccgccaagggcttcttcgagtgcacccacgacgtcaccgacatcacctgcgccgacttcctccggtccccgggcgcccagacccccgtcatcgt

SEQ ID NO: 404610 - DNA, 232 bp, Oryza sativa nipponbare
  unsure (1)..(232): unsure at all n locations
ggcggcgttcatcttctgcgtggaggacagggcgctcttctgccgggactgcgacgagcccatccacgtcccggngacgctctccggcaaccaccagcgctacctcaccaccgcattcgcgtgggttcagctcgctgagcgcaacgccgacacctccgcgcaggcaaggactcagcgcgcaagcggatgtgtgtgtgtcagcgcggcggggcagaggcctacgctgcgcgcg

SEQ ID NO: 404611 - DNA, 409 bp, Oryza sativa nipponbare
aaacgaactaatatatagataatcgaatttgaaaagacctgtcttttctgtatactttcccggtcctattgctaccgcgggtctaatgcaatcgaccggttcatatagatatcccttcaccacaccataggtcatcgaagggatctcggacgactaaccaaagcacgaaggccagttagaaaatggattcctatttgaaaagtgcctaaccgaatggttaagctaacattaacccgtcatttttggatccaattcggaattttctttgggaagtttcgggaagaaattggaatggattattttagttccttccagaggaaaaggtcttttatggatgcaacccctgtacctagaggatagggatagaggaagagggaaaattcgaattgaattaattaaggattaagcc

SEQ ID NO: 404612 - DNA, 477 bp, Oryza sativa nipponbare
  unsure (1)..(477): unsure at all n locations
cccacgcgtccgcgggagactacgggtgggacacggcggtgctatcggccgacccggagacgttcgcgaggaacagggagctggaggtgatccactcgcggtgggcgatgctggnggcgctgggctgcgtcttcccggagatcctgtccaagaacggngtgaagttcggngaggcggtgtggttcaaggccggcgcgcagatcttctccgagggggggctcgactacctggggaaccccaacctggtgcacgcgcagagcatcctcgccatctgggcggtccaggtggtgctcatgggattcgtcgagggctaccgcgtcggcggcggcccgctcggcgagggcctcgacaaggtgtacccaggcggcgccttcgacccgctcgggctcgccgacgaccctgacaccttcgccgagctcaaggtgaaggagctcaagaacggncgcctcgccatgttctncatgttcggctttttcg

SEQ ID NO: 404613 - DNA, 504 bp, Oryza sativa nipponbare
  unsure (1)..(504): unsure at all n locations
cggacgcgtgggcggacgcgtgggtttctagatcgcgggcggccgctcgcgatctagaacggggaaatagctttcctgagagaagttgaattgataagcattgctgtgcacaagaacatattaagattgataggattctgcacgactacaaaagagcgactcttggtctacccttacatggagaatcttagtgttgcttcccgtttgagaggtaacagtaacataagaatatcactttagcatgttcctagaatatgcattcatgattcatcttcatttacaatgtcaattgaggtatattagttaaaacagtgccaggaaatagaaggaaatgtggtttctatgtcttgataaaaaggaagtataggcaattgaatcgttgaattatctacttctttaggcaggttactaccaaanaaataggtccttttatgatgatacaaaccctaaaaatatctaatgcaatagtactggtgatgacacctatgcatgcagatatcaaac

SEQ ID NO: 404614 - DNA, 415 bp, Oryza sativa nipponbare
  unsure (1)..(415): unsure at all n locations
cccacgcgtacgcggacgcgtgggctgaccttggtgtacttaagaaggaaaagatcactattgatccagatgatcctgcaggagcttctcgttatgcccaagtcatggagactgtaagacaaaaggcagatcttgtatccgactctgagaggattaaatataccatcgacacctttacaaagggcatgcctgatgcacggacttactcgaatactcttcaggagatcaagataaagagtggccttatcgatgatatgggtgctgaggctatgatgatggacgccctcgagaaagttgagaaggagattaagaagccacttctgaggagtgacaagaagaatatgggtctactcttcgcagagtntgagaaagataaacaaaagcttggaatcccgcagggaggatctttccaaga

SEQ ID NO: 404615 - DNA, 175 bp, Oryza sativa nipponbare
ttcctcggcattccgcgccggagctgaggaggtccacatagccatctagggaggtggggcattcaaccgagcgccaaatcgtgcggccagcccggttccttactttttccggcgaccctccgcccggcctgatcccgtggtggatcaactacaactaatctttaggaaagcctct

SEQ ID NO: 404616 - DNA, 85 bp, Oryza sativa nipponbare
  unsure (1)..(85): unsure at all n locations
cccacgcgtncgcccacgcgttcggcgccggacgccgtcgtcgttaattaatcagccatggatccctacaagcacccgcncgtcg

SEQ ID NO: 404617 - DNA, 407 bp, Oryza sativa nipponbare
  unsure (1)..(407): unsure at all n locations
cccacgcgtccgaagagggttcctcctaagggcaagaactagtagagtttttgaggatgcatacaaatctcagtttggcatcataattctagatgacatcgaaaggttactggaatatgttgccattggaccacgcttttcaaacataatctcacaaactctactagtccttctcaagagggttcctcctaagggcaagaacttgcttgttattggaacaacaagtgaagtaggctttctagaatccattggtatgtgcgacgtgttctccgtgacataccatgtccncaaactgaaaaaggaggatgctacaaaggtgttgcggcatctcaatgtngtcgatgaagcggacattgatgcggctgcagaaagcactgacgatatgccaatcaagaagctgtacacac

SEQ ID NO: 404618 - DNA, 190 bp, Oryza sativa nipponbare
  unsure (1)..(190): unsure at all n locations
caacaccatcatccagacgctgtcaggctgagcgtgtgatcgatttcatcagggccagngcatctcaaggagctngatgagttcaggctggtgaaaccgatgattgggcgatggaagatgttctcttcttgtttcttcttttttttttttgggagtatgcatgtataagatgttaaagaaatggggggga

SEQ ID NO: 404619 - DNA, 159 bp, Oryza sativa nipponbare
cggacgcgtgggcggacgcgtgggcggacgcgtgggcggacgcgtgggtccccctctccctcgcccagtcgccctcctctccatccatgcgctgcaaaacccgctcgtgggcggctcgccttgccgttgcgtctcgtataaacccctaagtctctctct

SEQ ID NO: 404620 - DNA, 383 bp, Oryza sativa nipponbare
  unsure (1)..(383): unsure at all n locations
cggacgcgtggggccggtggcgctgctccttctctcgcgcacgcggtcacagagaaactctcccgcagcaactatcctctctgaaaggcgcaagttcttgctgcgctcaggggagctcanatggctggatacatcgacggcacaaaggaggagccgccggccaccatcatcaccaagaaggacgacaaggatgtgcgggtcaccaatcccgcgcataccgagtgggtggcgcaagagcagcaggttctcagctacctgttgctctccctctcacgtgatgtcctcatccaggtggtctcaattcccactgctgttggggtttgggatgccataaaggggatgtttgcatctcactcccgtgcgcgtgtgatgaacacacgcat

SEQ ID NO: 404621 - DNA, 477 bp, Oryza sativa nipponbare
cggacgcgtgggtttaggtttaactctgaatactcctggtgaccttgcaattagccttggtactagtgatactgtttttgggataactgctgaagctaaaccaagtcttgaaggccatgttttccctaaccctgttgaacctgatggttatatggtgatgctgtgctacaaaaatggttcattgacccgagaagatgtgcggaacagttgcgcggagaaatcctgggatgttttcaacagttatctagagaaaactccacctctaaatggcggaaaattaggattctactacaaagaccatgaaattctgccgccacttccagttggcttccatcgatacattgttgaaaacctcaatgatgtcacatccaacaatctggtggaacgtgaggtggaaagaattgatccaccatctgaggttcgcgccataatcgaaggccagctgctgtcaatgcgaggccatgccgagagattcgg

SEQ ID NO: 404622 - DNA, 297 bp, Oryza sativa nipponbare
caatggcggctcaggctcttctctctgggaggcagctgctggggaggccattgcaatcttcagtctccaggtcttcttcctccaggaaggcacccttcatggtcagggcagaggccactccccctgccaagcaaggtgctgacaggcagctgtggttcgcatccaagcagtccctgagctacctggatggcacgcttccgggagacttcgggttcgacccgctggggctatcggaccccgaggggaaccggtgggttcatcgagccacggtggctggcctacggcgaggtgttcaac

SEQ ID NO: 404623 - DNA, 267 bp, Oryza sativa nipponbare
cccacgcgtccggaaatatccaaaaacgaatcatgttgggtttggtcttgttcttggatcagatggcaagcgtttccgaactcgtagtaccgaagttgttcgattgatagagctacttgatgaggctaaatctcggagtaaatcagaacttctccagcgactaacagaaaatggtaaaattgttgattggactgaggaggaactggaaaagacttcagaagcagtaggatatggcgctgtcaagtatgcagatctgaagaacaatcg

SEQ ID NO: 404624 - DNA, 248 bp, Oryza sativa nipponbare
  unsure (1)..(248): unsure at all n locations
cccacgcgtgcggtacgcactattagaagcactctggtattctcacatggcgactgctaccgaagaggatgcctctgccgctgctgacgacaaccaggcgcagccgctgtcgcacccagcgatggtcgacgaggcgaacgacgctntggacgcaccacaaccggacgaggcaccgtaggctgcggaggaccacgagaagaacgccgacggtcagaacgagtacgagaaggccaagaaggagaagaaac

SEQ ID NO: 404625 - DNA, 386 bp, Oryza sativa nipponbare
  unsure (1)..(386): unsure at all n locations
cccacgcgtccgacaggaaggagcagctntgtgatatcagccaagcattggccgtgcttgcatctgcttcttctgttgccaaggaacgtcaagagtttctgaatcttgtcaataaagagatagaactatataacaccatgctggaaaaggagggtacaaaaggtgaagaagaagctaggagagcatacaaggctgcaagagaggaatcagaccatgctgcagagatagctgcaggagaaaaggtctcttcagcattaatagagagggttgatgcaatgcttcagaaattagagaaagagattgatgatgttgatgcacgaataggcaaccgctggcagctgcttgatagtgaccgtgatggcaaaagtacccctgacgaggtagca

SEQ ID NO: 404626 - DNA, 370 bp, Oryza sativa nipponbare
cgaaaaatttctccccaatctcgcgaggctctcgtcgtcgaatcgaatcctctcgcgtcctcaagatgcagatctttgtgaagacattgaccggcaagactatcaccctcgaggtggagtcctctgacaccatcgataatgtcaaggctaagatccaagataaggagggcatccccccggaccagcagcgtctcatcttcgctggcaagcagctggaggatggcaggacccttgctgactacaacatccagaaggagtcgacccttcaccttgtcctccgcctccgtggtggcatgcagatctttgtcaagactctgaccggcaagactatcacccctgaggtggagtcttctgacaccatcgacaacgt

SEQ ID NO: 404627 - DNA, 198 bp, Oryza sativa nipponbare
gcggaacgaggactaccggtcggccgggtgcccggccttaacaagaaccttcttgagggacctaaacaaatcttcaagaacaacaacgggaccccctttctttttcccaacaacgggaccggggccttggaaaacccccctaccaacacccttgcccccggggaccagaaccggtcggtcctggtccggccagtcaac

SEQ ID NO: 404628 - DNA, 484 bp, Oryza sativa nipponbare
cccacgcgtccgcggacgcgtggggccgccaagccccgcgtcgtgtcttccaggcgcatcgtgcggttccgcgtggcgtcgtcagccgcggcgccgcccgcggcgaagcccgggacgcccaataagcgcgggaagacggagatccaggagacgctgctgacgccgcggttctacaccacggacttcgacgagatggagcggctgttcaacgccgagatcaacaagcagctcaaccaggaggagttcgacgcgctgctgcaggagttcaagacggactataaccagacccacttcgtccgcaacccggagttcaaggccgccgtcgacaagatggaggggcctctcaggcagatcttcgtcgagttcctcgagcgctcctgcaacgcggagttctccgggttccttctctacaaggagctcggccgcaggctcaagataacaaacccagtggtggctgagatcttttcgctcatgtccaaggatg

SEQ ID NO: 404629 - DNA, 475 bp, Oryza sativa nipponbare
  unsure (1)..(475): unsure at all n locations
cagcacttgaatcagaatatgtcaccaaagttattcatgactgcaaaagggacagtgaggctctgtatttccagtttggcataaaattgcataatgtgatggatacacagatcgcttattctctgttagaggagcaggaagggaaaaagagaggatacgatgagtacatatcttttgtcagcctccttgctgatccccgatattgtggaatggcatatcctgaaaaggaagaagtccgtacccttctaaggcaggaccctaacttttggacgcataggcctttatctgaaatgatgattcgagcagccacagatgatgtccgcttccttctcagtatacatgagaaaatgatggagaagttaagcaaagtatctttatggcgtctgtcagttcgcagtgagctatactgcangtgcttttgcataaatgacaacaagtatgcggattggccacctcttcaactgtncctgatgaa

SEQ ID NO: 404630 - DNA, 498 bp, Oryza sativa nipponbare
  unsure (1)..(498): unsure at all n locations
gcgagtccaaggcaaggcaaggcaggcgaaagcaaaacaagaaatggcgaagccgatatcgatcgaggtgtggaatccgagcggaaagtatcgcgtggtgagcaccaagtccatgcccggcacccgctggatccgcctcctcgccgacaacgactgccgcctcgagatctgcacggagacgaagaccatcctctctgtcgacgacatcctcgccctcattggcgatcgctgcgatggtgtcatcggccagctgacggaggagtggggagagggtgtgttctcggcgctgaagcgcgccggcggaacagccttcagcaacatggccgtcgggtacaacaacgtcgacgtggaggccgccaataggaacggcatcgcgtcggcaacacgcnctgcgttctgacggagacgacggcggagctggccgcgtctctgtcgctggcggcggcgcggaggatcgtggaggcaagacagttcatgagggctggcctctacgacgga

SEQ ID NO: 404631 - DNA, 460 bp, Oryza sativa nipponbare
  unsure (1)..(460): unsure at all n locations
cccacgcgtccggtgaatgcttacgtcgagaatatagaatggtttgccatgtgatgcgtggtgacttcagtagagacttctttgagggatgcagggctatattgttggatagagatcgaaacccaaagtggatgcctccaaggttggaagaggtgcacgacgaggtggtcgaaaaatatttttccaaagtcgatgatccagagtgggaagattcggacctacctcctagacgttcccatggaaggaggcttgttcccaagctttgactgaatgaagcctctggtgaaaaactgaagcctttgttggtgcttcttaataacaaacagatcgtccncaatttgagggatatgtggagacaagcgatgaagtttataataaagctgaaacatataatactataggttaacaattgtattagtagcaatttagagaagtccatctcatagtctcatgcgatgct

SEQ ID NO: 404632 - DNA, 415 bp, Oryza sativa nipponbare
  unsure (1)..(415): unsure at all n locations
gcgcccacgcgtccgcccacgcgtccgcccacgcgtccgatccatgagcctccatactttaaggacatgaccatgtccccacctggcccggatggggtgaagaatgcctactgcttactgaactttggggacagcattacgacagaccatatttcaccagcaggtagcattcacaaagacagccctgctgccaagtacttgcttgagcgtggtgtggaccgtaaggacttcaattcatatggtagccgtcgtggtaatgatgaagtaatggcaagaggaacatttgcgaacatcaggattgtgaacaagtttttgaatgnagaagttggacccaagaccgttcatgtccctacaggggagaagctctatgtatttgatgctgccttgaaatacaagtctgagggtcatgacacta

SEQ ID NO: 404633 - DNA, 573 bp, Oryza sativa nipponbare
gcgcggacgcgtggggtacctgcataccccaatatttgtttctcaattgatgacttcgatgatacctttgatgcagttgttttatcagaccctgaacattgctactgtgttattctcaatgcacatgatggggcagcatttcctgaaaacactgaatcgaaaaatcctagctcaaatgtgctatctggggtaaacactgggagcaaacaagaaaaaccaccaaagagaactctcttttcaggctacgtcagctaccaaaacgttcgagaagcttatgatgatcaaaatttgagagcttattctcactcgggcatgaccgcactaaacttgataaactttatatgaggggccctgaaggacgtggagaagttgaagtagctgtttctggaatagcagatcagagccatgagagatcaaagaaagatccaggaaatagctttcgggcccttgtccatagtgcagcatctactgcatcaaaactagcaaagcatgcctacgaggctgcatctaccaacaaacgctttgatgatgagcttctgcctctaaaatgttgcttgatgtcagtatctcttc

SEQ ID NO: 404634 - DNA, 260 bp, Oryza sativa nipponbare
cccacgcgtgcgcccacgcgtccgcggacgcgtgggcatatcttctaaatgaagcagccatattagccggccgacgtggtcggacagcaattgcctcaaaggagattgatgatgtaattgacagaataatggctggtatggaaggaactgtgatgacagatgggaagagcaaaagtcttgttgcttaccatgaagttgggcatgcaatttgtggaactttgacgcctgggcacgaccctgtccaaaaagttactttgatc

SEQ ID NO: 404635 - DNA, 102 bp, Oryza sativa nipponbare
gcccatgttattgtcacttccatctcattcttctaattggcatcactagcttctagcttgcttaattaattaaatagccattgcggaggaggagcaccaaca

SEQ ID NO: 404636 - DNA, 519 bp, Oryza sativa nipponbare
  unsure (1)..(519): unsure at all n locations
cccacgcgtccgcccacgcgtccgcccacgcgtncgcccaaactccgtctcctcgcgcgagttcgcccgccgcctgcgccgatctccatccggcgaggcgccgccgtccgcccggctgcttccgccgattgcatgattccaccacaatcagaaattgtaggtgagaacaacgcatccaagagtgctgctaaagagcagattctntctagtacaaatgagaaaatgactactagtgttcccccagggtgctagctcctcaaaatcaccaaagggtgcacaggagaaggctagttttttgggtaagggggagaacaacctttctaccaacccaatgtgtacgcacctcagccacaaacaatctattctggaggatacctgaaccatntgggcccaatgggaagaataccccccattatgtcaatatggaaggacnntcatctgtatcaccctggaatntacaacgacaaccagtcaatcatggtatctcctggatatgcaaacaacccttcaaatgatgta

SEQ ID NO: 404637 - DNA, 340 bp, Oryza sativa nipponbare
gacgccatagatatcacgagggaggctgtaaaggatggagctgatgccgtgattgctgttggtggtgatggaacacttcatgaggtcgtcaatggcttcttctgtaagggaagtcctgtccatgctcttgatcaaggacctgatcattccacagcgctcggtctcattccacttggaactggttcagactttgcaaggacatttggctggtatatttctacagcataatctacatatggtgtttagataacctctactttcactgatgtttctttcttttgggcaaccaggacaaatgatcctcatgaggcgattgatccgaatgtgagaggagtcaaat

SEQ ID NO: 404638 - DNA, 363 bp, Oryza sativa nipponbare
  unsure (1)..(363): unsure at all n locations
gttcctgcgtacttcaatgacgcgcagaggcaggcaaccaaggatgccggtgtcattgctggcctgaatgttgctaggatcatcaatgagccaactgctgctgctattgcgtacggtttggacaagaagggtggtgagaagaacatccttgtctntgaccttggtggtgggacattcgatgtcagtatcttgaccattgacaacggtgtgtttgaggtgtcggccaccaatggtgacactcatcttggaggtgaggactctgaccagagaatcatggagtacttcatcaagttgatcaagaagaagtacagcacggacatcagcaaggacaaccgtgctcttggaaagctgatgaaggaaagc

SEQ ID NO: 404639 - DNA, 548 bp, Oryza sativa nipponbare
  unsure (1)..(548): unsure at all n locations
attacaacttgcttggaaaaggaggttttggaaaagtttacaagggagttttggagggtggcatagaagttgctgtcaagaggcttagcaagggttcagggcaaggtgttgaggagttcagaaatgaagtggttctgattgctaaattacaacacagaaacttggttaggcttcttggttgctgcattcatgaagacgaaaagttactcatctacgaatacttaccaaacagaagcttggatgccttcctttttgatgctaacagaaaaaatacgcttgactggccgacaaggttcaagataattaaaggagtagcaagaggtcttctttatcttcaccaggattcaagattaacaataatccatagagatctaaagacaagcaacattttgttggacacagaaatgagtcctaaaatatcagattttcgcatggcaaggatctttggtggaaatgagcaacaagctaataccaaccnggttgtcggcacatatggttacatgtctcctgaatatgctttttgatggctattttccgcaagtctgaca

SEQ ID NO: 404640 - DNA, 268 bp, Oryza sativa nipponbare
  unsure (1)..(268): unsure at all n locations
ccctgaacagcgtgactgcttatggttttgaccttatccgtggttccaagactcttgaccttgtcaagagtgctggtttcccctctggcaagtacctctntgctggtgttgtggatggacgcaacatctgggctgatgatctcgccgcatctctcaccaccctcgagtctcttgaggctattgttgaaaaggacaagcttgtggtctcgacttcctgctcactcatgcacaccgntgtggatcttgtaaatgagaccaagctcgatag

SEQ ID NO: 404641 - DNA, 384 bp, Oryza sativa nipponbare
ggccgaggcaaccgtcgccactccgacgatcccgtcccatccgccgccgccgccggagatttcctcgagataagccatgggtcaagcactcggtttggtacaagtagatcaatcgacagtagccatcaaggagtcctttgggaagtttgatgaggttcttgagcctggatgccactttttaccctggtgcatagggaagcagatcgctggatatctttccttgcgtgtgcagcagctggatgtccgttgtgaaacaaagactaaggacaatgtttttgtcaatgttgtggcatctgtgcaataccgtgctcttgctgagaaggcatcagacgccttttacaggcttagcaacaccagggagcaaatccagtcgtatgtttttga

SEQ ID NO: 404642 - DNA, 407 bp, Oryza sativa nipponbare
  unsure (1)..(407): unsure at all n locations
cggacgcgtgggcagtgatcctctacaatcatcgactttcagcaaattaagatggctgctgccttctcctccaccgttggagctccggcgtgcactccgaccaacttcctggggaagaagctgaagaagcaggtgacatcggcggtgaactaccatggcaagagctccaacatcaacaggttcaaggtgatggccaaggagctggacgagggcaagcagaccgaccaggacaggtggaagggtctcgcctacgacatctncgatgaccagcaggacatcaccagggggaagggtttcgtcgactcccttttccaggctcccacgggtgatggcacccacgaggccgtcctcagctcctacgagtacctcagccagggtctcaaaacgtacgacttcgacaacaccat

SEQ ID NO: 404643 - DNA, 441 bp, Oryza sativa nipponbare
cccacgcgtccgcccacgcgtccgcccacgcgtccggaagcaacatgattggagagattgagaatagatcaacattcctcttagctgtcaaagcggatgtggagacacaaggagactttgtcgagtctctagcaaatgaggtccgagcagcaagttttgtaaatatcgacgatgttgttgcatttgtaaattggcttgatgaggaactatccttcttggtcgatgagcgggcagtactaaagcactttgattggccagagagcaaaactgatgcactaagagaggcagcctttgagtatcaagacctgctaaaattagaacataaggtttcgtcgtttactgatgatccaaagcttgcatgtgaagaagctctcaagaagatgtattccttgcttgaaaaagtggggcaaagtgtttatgcgctacttcgtactagagaca

SEQ ID NO: 404644 - DNA, 417 bp, Oryza sativa nipponbare
ggccgggagagagagcatctagctagggagagaaaggaagagacgagaggagagagatggccactgcttatgctcccatggcgagccagctgatgaagagcagcttggtgtgctccaagccgagggggctgtctggtgcttcgctgacaaggaggccccgcttcacagtcaaggccatccagtctgagaagccaacgtaccaggtggtgcagcccatcaatggcgaccccttcatcggcagcctggagacgccggtgacctccagcccgctggtcgcctggtacctctccaacctcccggcgtaccgcaccgccgtcagcccgctgctccgcggcaatcaggtcggcctcgcccacggctaccttctcgtcgggcccttcgcgctcaccggcccgcttcgcaacaccccggtgcacg

SEQ ID NO: 404645 - DNA, 217 bp, Oryza sativa nipponbare
gctgcgagcagatccagggctggatgatatgggcagggcttcgctaggaccagtacctgagcaagtgatggtacttgagaacattggaggggatgtgctactctatgaaaaccagctttcagatcttcatcagatcttggccgaggcactacaactattgaacacagacgcttctgactagcacattcggcagaaccctgatcctaatgcttacacc

SEQ ID NO: 404646 - DNA, 421 bp, Oryza sativa nipponbare
cggacgcgtgggcggacgcgtgggcggacgcgtgggaacgtggttgggacactgaacatgcttggattggccaagaggattggggcaaaatttctcctcaccagcaccagtgaggtatatggagatcccctccagcaccctcaggtggagacttactggggcaatgtcaaccccattggtgttagaagctgctatgatgagggcaagcgcacagctgaaacgttgaccatggattaccaccgtggtgccaaccttgaggtgaggattgctcggatttttaacacatatggtcctcgcatgtgcattgatgatggccgtgttgtcagcaactttgttgctcaggcactgaggaaggaacctttgactgtctatggtgatggcaagcagactaggagctttcaatatgtctctgaattggtgg

SEQ ID NO: 404647 - DNA, 424 bp, Oryza sativa nipponbare
gccaagaagaacatgtatgccttcagcacaaccacctacactggtttccagtgcactgtcgacgaggaaacatcagagaagttcaagggtttacccggcgttctgtgggtgcttcctgattcctacatcgatgtcaagaacaaagactacgggggtgataaatacataaacggagagataattccatgcacttacccaacctaccaaccaaaagagcggaggacatccaaatatgaaagcagacggtatgaaaggcgaagagatggacccccagcaagcaggagaccaaggccgcagactgctcagcctgagtcagcctcttcttcatgaggcactcatccacgtaatggaaagaaagaacttgcttactagctaattctaccacttggcgtcgcatacgggaaagctctgacagacaaatcta

SEQ ID NO: 404648 - DNA, 393 bp, Oryza sativa nipponbare
atctttgctactggcaagacaaatatgaacctagattggagaacccgcttcgacatatgcgtaggcatcgcaagaggcctagcatatctccatgaggagtccagcacaaggatagttcacagggacatcaaaaccagcaatgtcttgcttgatggtgatctcaatccaaaaatctctgactttgggctagctaggcattatgaggacaacatgactcaccttagcacaggagtagctggcacgcttggttatctagcacccgagtatgccatgatgggccacttgacagagaaggctgatgtcttcgcttatggtgttgtggcaatggagattattgcaagaaggccaaactttgatgagagcctcgaggatgataagaagtatctgcttgga

SEQ ID NO: 404649 - DNA, 286 bp, Oryza sativa nipponbare
gttgggtacccccgcatgggccccaagagggagctcaagtttgccctggagtctttctgggatgggaagagcagcgctgaggatttggagaaggttgcgaccgacctcagggccagcatctggaagcaaatggctgacgctgggatcaagtacatccccagcaacaccttctcgtactatgatcaggttcttgacacggctgccatgcttggtgctgtcccagagcgctactcatggactggtggagagattgggttcagcacctacttctcgatggctaggggca

SEQ ID NO: 404650 - DNA, 421 bp, Oryza sativa nipponbare
  unsure (1)..(421): unsure at all n locations
gcaaggcggngtacgccggtgatgacacccccaaggccgtcttcccctcggttgttggttcaattgagcaaacgggagaaactgatgaagcaaaggcagacaaggaggctgaagctgcatcagattctaagaatggagccaaacctatggatgtggacaaagccaagacaaagcgcaaattgtatgttggtcaagaattggagttcaggagggatcatatggaggtgatttcaccaatgaaagatggaacagttactgattgggatattgttgacaatatatggaatcatgctttcaggcagcggctattgatcaatcctgaggagcatcctatgttgatagctgaaccatctacaaacacaggacagcaaagagagaaagcagcagaacttatgtttgagaagtacaaagtgccggcact

SEQ ID NO: 404651 - DNA, 516 bp, Oryza sativa nipponbare
gccaatgcttcaagagcttgggaagcagaatccgcaaatcttgcggttgattcaggaaaatcaggctgaatttctccgtctggtgaatgaatctcctgatagcggcgctgctgggggaaacatactaggtcaactagcagccgctatgccacaggcacttacagttactccagaggaacgggaggccattcagcggctggaggcaatggggttcaaccgtgagctcgttttggaggtcttcttcgcatgcaacaaggatgaagagctggctgccaactatcttttggatcatggccatgagtttgaggatcaacaataggtgttgttagtttggtctcatcgtggctgggagaccccaaaaaaaaaatgaaatcgaggcagaagcagtgcaattcagtatcggtattatttctgactgctgagagataccttgccgtgtgtgcaatgccgctgactatgttttaatttcccgtgtcttgggaatgcttttaaagtacatattaaattcatattcac

SEQ ID NO: 404652 - DNA, 270 bp, Oryza sativa nipponbare
  unsure (1)..(270): unsure at all n locations
cccacgcgtccgcccacgcgtccggaagatcgtccgcgacacctgccgcggcatcggcttcgtgtccgacgacgtcggcctcgacgccgaccgctgcaaggtgctcgtcaacatcgagcagcagtcgcccgacatcgcgcagggggtgcacggccacttcaccaagcgccccgaggagatcggcgccggcgaccagggccacatgttcggctacgccaccgacgagacccccgagctgatgcccctcagccacgtnctcgccaccaagct

SEQ ID NO: 404653 - DNA, 340 bp, Oryza sativa nipponbare
  unsure (1)..(340): unsure at all n locations
cggacgcgtgggcggacgcgtgggcggacgcgtgggcggacgcgtgggcgggcacagggtggaggacctgtgggaggtggcggagccgcagctgtcaccgtccgagaagctcaactcctgcttcgaggacatcaccgtcgcctccttccaccgcccgcttggctcgcaaggctggctggcatacatggtgatatatacgcctctcccagggaccatatatgtgcttctctgcataactgggctctgccaatagctgacccactattcaagacanngttgcagttgcagaggatgcatatgctttggttttgcaatggcgatgcatgcacaaatgggcatg

SEQ ID NO: 404654 - DNA, 300 bp, Oryza sativa nipponbare
cgactacgcgcgggagatgatggagctcaagacgctcgtcacccgcaccctcgagaagaagggcgtcctcgccaagatcagggctgagctaagagcaagtgtgttcgaggccatagaagacgacgatagggtagtggagaatgatgatggtgggaatcccgctttgcttggtagctgcaatgaccgagctaagcagctgcatgcttcaccatcaggtatgttattaacagcactcgtaagtgaatacttggagtgggcccagctaagtcacacgatgaaagtttatctgcctgaatgtaa

SEQ ID NO: 404655 - DNA, 278 bp, Oryza sativa nipponbare
cccacgcgtccgcctcaaatggagggctcagtatggagaagcgtttctgttttggtatggagcaaagccacgcatctgcattttcgactatgagttggctaggcagattctctcgagcaagtctggacattttctgaagaatgatgcgcccccaactctggtggccctaatgggcaagggattagtactcttggaaggcactgattgggtgcgccatcgcagggtaatcaaccctgcttttaacatggacaagctcaagatgatgataagcacaatga

SEQ ID NO: 404656 - DNA, 356 bp, Oryza sativa nipponbare
ctcgctttgacgaagccctcctcctcccatttctcctccccgagctagggtttcgccgccgccgccgccgactagccggagttgccatggggacgccggagacgtcgagggagccgtgcccggaccggatcctggacgacgtgggcggggcgttcgggatgggcgcggtggggggctccctcttccacttcctcaagggcacctacaactcccccaacggcgagcgcctcgtcggcggcgcgcaggcggtgcggatgaacgcgccccgcgtcggcggcagcttcgcggtgtggggcggcctcttctccgccttcgactgcaccatggtcttcatgcgccagaaggaggacccctgg

SEQ ID NO: 404657 - DNA, 353 bp, Oryza sativa nipponbare
caaagaaacagaagcaaacaccaaccgggttgttggaacatagtaagcgcgcttagtgagccttcttctctccgtatttaatctatgaaaatcattctaggttcagatatagatgttcattaatttaattgaatattttagtggatacatggctccggagtatgctatggaaggcattttctcggttaagtctgatgtgtttagctttggagtcttgcttctagagattgtaagtggaattcgaaacgctggatttcaccaacgtgggaactcccttaacctcctttgttatgcatgggaactatggaaagaaggaaggtggtccgagctcgctgatccatccatatataacg

SEQ ID NO: 404658 - DNA, 402 bp, Oryza sativa nipponbare
  unsure (1)..(402): unsure at all n locations
cggacgcgtgggcgccgctgagctctatctatctactagttagtttagtcgtctcgagggtaaattgagctttgtgtgcggttttgaggggagtacatcggcatgaggatccagtgcgacgcgtgcgaggccgcggcggccacggtggtgtgctgcgcggacgaggcggcgctgtgcgcgcgctgcgacgtcgagatccacgccgccaacaagctcgccagcaagcaccagcgcctnccgctcgacgccgcgctccccgcctgcctcccgcgctgcgacgtctgccaggagaaggcggcgttcatcttctgcgtggaggacagggcgctcttctgccgggactgcgacgagcccatccacgttccggggacgctcttcggcaaccaccagcgctaccttacc

SEQ ID NO: 404659 - DNA, 434 bp, Oryza sativa nipponbare
gcaagaattaaaggccaatcctcatagaaatgcaaagggtacagttattgaagcatgccttgacaaagctaaaggatctcttgccaccctagttgtacagaatggaaccctaaacaagggtgatattgttgtgtgtggtgaggcttttggaaagatccgtgcaatgtatgatgatggtggaaagcttatcgataaggctgggccatccaatgccgtgcaggttattggcttgaataatgtaccccttgctggtgatgaatttgagtctgtggacaaccttgatgttgcacgtgaaagggcaaacgcacgtgctgaagcactgagaattgaaaggatatcttcgaaagctggggaagggaaagtcactctgtcatccattgctgcatctgtttcatctggaaaacaagtaggaattgatacacacgagcttaata

SEQ ID NO: 404660 - DNA, 427 bp, Oryza sativa nipponbare
cccacgcgtccgccagggtgcacagttagatgatgcagttaaggcatacatggagatgcggaagtccaggtttaatccagatgaacgctcccttgagggggtactcaatgcctactgcatagcaggtgttatagatgagagcaaagagcagtttgaagaacttcagtccatggtgactgttcctagcattattgcttattgcatgatgttgtcactctatgccaggaatgacaggtggacagatgcttatgatctgttggaagaaatgaaaacaaaccgtgctagtagtacacatcaagtgattgcttccatgatcaaaggggagtatgacgatgactccaattggcaaatggtcgaatatgttcttgacaacagtaacttggaaggctgtgactacagtttacgattctttaatgcactccttgat

SEQ ID NO: 404661 - DNA, 406 bp, Oryza sativa nipponbare
ggttcggttaattcttgttgcagcgccagctgtttgccttattagtgccattgcagcatcagctacaataaaaaatctgactaccttgattcggacaaaaagcaaaagtccacaaactgtctctggaaaatcatctggctcaaaggcagctgcaaagggtgcagttgatcaatccttgcctttccagcagaatgtggccattgctttacttctgggtgctttctacttgcttagtagatatgctgtacactgcacttgggtgacatctgaagcttactcttctccttccattggtctggccgcaaggggtcataatggaggcagggtcatatttgatgattatcgtgaagcgtattattggcttcgtcagaacacttcttctgatgcaaagattatgtcatggggg

SEQ ID NO: 404662 - DNA, 355 bp, Oryza sativa nipponbare
gtctccactcacacgcattgcagaggagaggcgacaatggaggggaaggaggaggacgtgcggctgggggcgaacaggtactcggagaggcagccgatagggacggcggcgcagggcgccggggacgacaaggactacaaggagccgccgccggcgccgctgttcgagccaggggagctcaagtcgtggtctttctaccgggccgggatcgccgagttcgtcgccaccttcctcttcctctacatcaccatcctcaccgtcatgggggtctccaagtcctcctccaagtgcgccaccgtcggcatccagggcatcgcctggtccttcggaggcatgatcttcgcgctcgtctact

SEQ ID NO: 404663 - DNA, 450 bp, Oryza sativa nipponbare
cccacgcgtccgggaggagagaggcttttgcccgaatggtactcagagaaaggcattgagttgatcctgagcactgaaattgtcaaagctgatcttgcctccaagactttgactagtgcagttggagcaacctttacatatgagattttgatcattgcaactggctcctcagtcatcaagctatcagattttggtactcaaggagctgattccaacaacattttatatctaagggaagtagatgatgctgacaagctggttgcagctatccaagcaaagaagggtggaaaggcagttattgtaggaggaggttacattggtctagaacttagtgctgcattgaagatcaatgattttgatgtcacgatggtgtttcctgaaccttggtgcatgcctcgtctcttcactgctgatatcgcggctttctatgagagttactacactaacaaa

SEQ ID NO: 404664 - DNA, 340 bp, Oryza sativa nipponbare
cccacgcgtccgcccacgcgtccggcgggactacccgctgagtttaagcatataaataagcgaaggagcgaaagtttgaggagaggtaccaaattgcttttgcacttgagcaaaagcggattgatttggagagagacaagttcgagttcaagagaatgacaaaagaagataagcttttgaggactgatactagtgcaatgagcatcgaggagcaggagtactataaaaatgtgaagaatcaaattctaagtcgtcgttcagctcaagcataaattagtcttattactcatcaattagcattcaaaatttgttagatctttagctatagagtctacttaat

SEQ ID NO: 404665 - DNA, 418 bp, Oryza sativa nipponbare
cccacgcgtccgcaccccaccagcagcagcagcagtagctgagcttgaagcagcagagcgaggtagacatggccgccgccaccatggccctctcgtccccggcgctggccggcaaggccgccgcgaaggtgttcggcgaggggcgcatcaccatgcgcaagtcggcggcgaagcccaagcccgccgcgtcggggagcccgtggtacggcgccgaccgcgtgctctacctcggcccgctctccggcgagccgccgagctacctgaccggcgagttccccggcgactacgggtgggacaccgcggggctctccgccgacccggagacgttcgccaagaaccgggagctggagggatccactccaggtgggcgatgctcggcgcgctgggcttggtgttcccggagctcctcgcccgcaac

SEQ ID NO: 404666 - DNA, 384 bp, Oryza sativa nipponbare
cccacgcgtccgcccacgcgtccgcccacgcgtccgaaataatatgtgttctctccattaatctaaaatataagcatttctgactatatatacatgatggatggagtttcaacgtcgtctagacaggtacggtccagttttcaggacgaacatggtcgggcaagacctgatcgtgtgtctcgatccggaggtgaacagcttcgtgttccagcaagaggaaaggctcttccagtgctggtaccctgattcgttcatgcggatcatcggcgccgacaacatcatcacgacgctcgggtcgtcgcacaagtacatcaagaatctgatccttcggttgttcggccctgaaaaccttaggcgtgcgatgcttcaagacgtgcacagaac

SEQ ID NO: 404667 - DNA, 366 bp, Oryza sativa nipponbare
  unsure (1)..(366): unsure at all n locations
cggacgcgtgggcggacgcgtgggcggacgcgtggggccaggcaaagcaccgacgcacgcgccccttctcttccctctccgtggcggcatggcggcgtgccccctcctcccgctgctccagctctagccctccctccacaacatcctggacatggatcctctacctttggctcgccggagcaatggggccaccagactgccagcgatgagtccgggggcatccagatccagcgccacctcacccatggcagctgctccggtgcgacgatggccaggggccgcgctgccctnctcatncctncactggttagtggagaagttgggtgaagaaggacccgggcaagacttacatgctagcttgctctc

SEQ ID NO: 404668 - DNA, 417 bp, Oryza sativa nipponbare
cggacgcgtgggccggttgcgttgcgccatggcgctgcagcttcaggccgccactccgcatccccctcttcctctccgctcctcacgccgccgcttcgctgctccgccgtcgcctctcgttctccgcgccgtagcttcctcccgcgatggcccctccacgcgcctctcctctcctgcgcccgcgccgcctcgccgccggcggcgtgcgagcgtgagggcccgcgccggcgcgggcagaggcggccggggggagtccccgtacgacgtgctcggcgtgcctccgtcggcgccgcccgaagagatcaagcgcgcgtaccggcggcttgctctcaagttccacctcgacgtcaacaaggagcccaacgcgcaagagaaatttctgcggatcaagcatgcgtacaacacgctcatgaattc

SEQ ID NO: 404669 - DNA, 362 bp, Oryza sativa nipponbare
ctctagcacctcaccaagcagaaagctagagagctagcaatggcgcccaccgtgatggcctcgtcggccacctccgttgctcccttccaggggctcaaatccaccgccgggctccccgtcagccgccgctccaacagcgccggcctcggcagcgtcagcaacggtggaaggatcagctgtatgcaggtgtggccgattgaaggcatcaagaagtttgagaccctgtcgtacctgccaccgctcacggtcgaggacctcttgaagcagatcgagtacctgctccggtccaaatgggtgccttgccctcgagttagtaaggtcgggttcgtctaccgtgagaaccacaagtcttctgggtacta

SEQ ID NO: 404670 - DNA, 391 bp, Oryza sativa nipponbare
  unsure (1)..(391): unsure at all n locations
cagaagagcatgatcgcaaggccagggctggaatagattatgattcttcccatgggaaggcacgtcccaatgacaccattctgaagcttcagaggacggcaccatattacaagaggaatcgagctcatgtctgcagtttctatgtgcgtggtgaatgtacaagaggtgctgaatgcccttatcgacatgagatgcctgaaactggagagttatctcagcagaacattaaagatcgttactatggagttaatgatccagttgctttgaaactnttgggtaaggccggtgagatgccatccctgacacctccagacgatgagagtataaggacactttaccatggtggccttaataatcgaatcaccgagcaagatttgtaggatcaatttta

SEQ ID NO: 404671 - DNA, 298 bp, Oryza sativa nipponbare
  unsure (1)..(298): unsure at all n locations
cccacgcgtccggctggtcatcgtcggcgatggcgggactggtaaaactacatttgtgaagaggcatctcactggagagtttgaaaagaaatatgagccaaccattggtgtcgaagttcaccctctagattttaccaccaactgtggtaagatccgcttctactgctgggacactgctggacaagagaagtttggtggacttagggatggatactatatccatggtcaatgtgcgataattatgtttgatgtcacttcaaggctgacttacaagaatgttccaacatggcatanggac

SEQ ID NO: 404672 - DNA, 291 bp, Oryza sativa nipponbare
cccacgcgtccgaaactctctctctctctctctctctctctgaatctctggatctctgaaaactctgaacattccaagaactcataagttacctgtgatctgtgaagcttgagctgaagctgtgacagtgtctcactgatcgttgatcactcagcttggctgctactgtgcattcactgcgtggttagctagctaactgagcagaagagctttagcaatggcgacgccggggcagcagctgccgccggggttcaggttccacccgacggacgaagagctggtggtgcagta

SEQ ID NO: 404673 - DNA, 415 bp, Oryza sativa nipponbare
ttatgctagaacggccaaagggagaccgtgatgggtatgacttggttttcgttgatgcaatgcataaggctaactatgcgagcagaatttgtcactcctgcaaccctaactgtgaagcaaaagtaacggctgtggatggtcattatcagattggaatttacactgttcgaccaattgcagaaggcgaggaaatcacttttgattacaactctgttactgagagtaaagaagagcacgaagcgtcagtttgtctctgtggaagtcaaatatgcaggggcagctatttaaatttttctggggaaggagcttttgaaaaggtcttgatggaattccatggtgtgctcgatcgacatagtcttctgttacaggcttgtgaagcaaactctgtttctcaacaagacttaattgacttggg

SEQ ID NO: 404674 - DNA, 363 bp, Oryza sativa nipponbare
  unsure (1)..(363): unsure at all n locations
cgctcatcgccatctctctcagctctcacagctcactgcatcaatggccgcggccaccatggcgctctcctccccggtgatggcccgcgcggcgccgtcgacctcctccgcgctcttcggcgaggcgcggatcaccatgcgcaagaccgccgcgaagcccaagccggcggcgtcgtcggggagcccgtggtacggcgccgaccgcgtcctctacctcggcccgctctccggcgagccgccgagctacctcaccggcgagttcccgggcgactacgggtgggacaccgcggngctctccgccgacccggagacgttcgccaagaaccgggagctggaggtgatccactcccggtgggcgatgct

SEQ ID NO: 404675 - DNA, 415 bp, Oryza sativa nipponbare
cccacgcgtccgcccacgcgtccgaaaaaatcctattcaaatcgaaacccctctctttgatctcgtcgccgaggaattaggaggagagagagcaatggccgccgaggagggagtcgtgatcgcctgccacaacaaggacgagttcgacgcccagatgaccaaggccaaggaggccggcaaagtggtcataattgacttcactgcttcctggtgtggcccttgccgcttcatcgccccagtgttcgctgaatactccaaaaagttccctggtgctgtcttcctgaaggttgatgttgatgagctgaaggaagttgctgaaaagtacaatgtcgaggcaatgccgaccttcctattcataaggatggtgctgaggcttacaaggtcgttggcgccaggaaggatgaccttcagaaca

SEQ ID NO: 404676 - DNA, 378 bp, Oryza sativa nipponbare
tcctcctctcgcatggcagccatggccaccaccgcgtccagcctcctcaagacctccttcgctggcgcgcgcctccccgccgccgcccgcaaccccaccgtctccgtcgcgccgcgcaccggcggcgccatctgcaactccatctcgtcgtcgtcgtccactcccctctacgacctcaacgccatcaggttcagccccatcaaggagtccatcgtgtctcgcgagatgacccggcggtacatgaccgacatgatcacctacgccgacaccgacgtcgtcgacgtcggcgccggctccgcggggctctcctgcgcgtacgagctctccaaggacccctccgtcagcgtcgccgacatcgagcagtcggtgtcccccggc

SEQ ID NO: 404677 - DNA, 447 bp, Oryza sativa nipponbare
  unsure (1)..(447): unsure at all n locations
tgtgaatgtcgctgtccaattccgtatgaacaagaaatgggatctgatcattccagtctgcgagtggatcctgtacaggagctcattccgtcctgacatcatctgctacaacctgctcatagaatcctatggcaagaagcgtcagctgaacaaggcagagtcaatctacatggctcttctggaagctcagtgtgtgccaactgaagacacctatgctcttctcctgcgcgcttactgcaacgctggatcgctgcaccgagcagaaggcgtgatctcggagatgcgcgagcacgggattcctccaaatgctactgtatataatgcttacttggatggattactgaaggcaagatgtaccgaaaaggcggtcgaggtgtaccaaaggatgaagagagaacggtgcanagctaacacggagacattcaccctgatgatcaatgtgtacgg

SEQ ID NO: 404678 - DNA, 330 bp, Oryza sativa nipponbare
  unsure (1)..(330): unsure at all n locations
tttttntttttttttttttttttgcaagcaaactttcgtcatgtcatagtacatcatagttcatgcccaacaccatgctgataagtattgggcccaaattgtcttacaattacatacgcccacagtaagatgtacttagcacacttagtacaaccgagatggcagtgttctttgcatacatacaaaattacatcacttgcatagcattactgttacataacaacatctcatccaagatcaggaacgatgaagaagtcctcgtcgtcatcgggtatctccacccgtggcttcttgctttggcgtgcaccgctcgccttgtagagccccatg

SEQ ID NO: 404679 - DNA, 419 bp, Oryza sativa nipponbare
gaaagcataagcaacacaagggattaactcatcactcacttagctaattaaatcttcgaccatgtcggacaagtgcggcaactgcgactgtgctgacaagagccagtgcgtgaagaaaggtaccagctatggcgtcgtcatagttgaagccgagaagagccacttcgaggaggtcgccgccggcgaggagaacggcggctgcaagtgcggcaccagctgctcctgcaccgactgcaagtgcggcaagtgaagtcacgaagcaaccgaacactcgccgccggcgagtcacctaccttaattagtccacaataaaaaccacccatatgagtgtggttggtgtgtgtgctgattattgctgaattaaactcgtgtgttatcgattaattaagcagctggtcgcttcggcgactatgcgtgta

SEQ ID NO: 404680 - DNA, 386 bp, Oryza sativa nipponbare
  unsure (1)..(386): unsure at all n locations
cccacgcgtccggngagatcgaaaccctagctagggtttgcgcgcggcggcggcggggatgtcgacgccggcgaggaagcggctgatgcgggacttcaagcggctgcagcaggacccccccgcggggatcagcggcgcgccgcacgacaacaacatcatgctctggaacgccgtcatcttcgggccggatgatacgccgtgggacggaggcacgttcaagcttaccttgcagtttacagaagattatcccaacaagccgccgactgttcggtttgtttctaggatgttccacccaaatatttatgcagatggaagcatctgcttggatattctacagaaccagtggagccctatatatgatggtgctgcccatatgacttcaaatc

SEQ ID NO: 404681 - DNA, 438 bp, Oryza sativa nipponbare
cccacgcgtccggaaatacagaacagctcgatacagaccagaattgtctgaaggttcttcagaaaagaaggcagcctcaaaagaggacataccatcaatagatctgaaaggagggaactttgatctcactgaggcattgcgtctccagttagaactccaaaagaggcttcatgaacagcttgagatccaaagaagtttgcagctgagaattgaggagcaagggaagtgccttcagatgatgctcgagcagcagtgcatacctgggacagacaaggcggtggatgcttcaacctcagcagaaggaacaaagccatcttctgatcttccagaatcttctgccgtgaaggatgttccagagaacagtcagaacggaatagccaaacaaacagaatcaggtgacagataatgtagatgtgatgagggtctctccaagatgtg

SEQ ID NO: 404682 - DNA, 309 bp, Oryza sativa nipponbare
gaatgttcgatgcttcggccaatctctcaacatgcataccagatgcttataatcgagcttctgaagctgatgatctccacctggccgatcttcacttgattcaggtagatgaagccaagtgcaaccggagtttagatgctcctctctgggtcgcgctagctgttgtgcagtcttataattcaaggcgaaaggttccacagaagtgaacatatcatacctgatttggagctgaagttatcaagagtggcctgttcagctgctcagacattccgcgagcatccacatgccccgaatcggtctccaaagggg

SEQ ID NO: 404683 - DNA, 452 bp, Oryza sativa nipponbare
cccacgcgtccgcccacgcgtccgggctactagcaagaatgtgggaggaaatggggctagtgagagtgtatacaaagccacaaggacagcaacctgatttcacagatccagttgttctttctactgatagaggtggctgcacagttgaagacttctgcaaccatatccataggagtttggtcaaggatgtgaagtatgtacttgtatggggaacaagtgcgaggcattacccgcaacattgtgggcttggccatgttcttcaagacgaggatgtcgtccagatagtaaagaagaaggagaaggaggacggcggtcgaggccgcttcaagtcgcacacaaacgcgcccgctcgcatatccgacagggagaagaaagctcctctgaagacctgaatgtggacatgaaacacgaattttgtcggctgtgccaacatcaaaatagagctacttttt

SEQ ID NO: 404684 - DNA, 337 bp, Oryza sativa nipponbare
gcctaaccttgctctcgcgctgttccacaggctggctaacagcttccaggagttgccgtcgagggaggaacccaatgaggtgactattgttgcggcgctttccgcgtgtgcgcagattggcttgttaaaagatgggatgtatgtgcacgagtttgctaaaagatttggactggatcgcaatgttcgggtctgcaattcactaattgacatgtactccaagtgtggctcgctgtcaagggccctggatgtgttccattccatcaagccggaagaccagacgcttgtgtcctacaatgctgcaattcaggcacattccatgcatgggcatgggggtgat

SEQ ID NO: 404685 - DNA, 346 bp, Oryza sativa nipponbare
gcaggcggtggcggtgaaggggagcgtggcggtgccgccgtgcgggagccgccgccggcggaggggcgccgtggcgtcggtgcgcatggcggcggcggcggcgacgtcggcgttgcggatcggcaggaggagccccttcctcggccggaggctggcggttgggccgaggagatccaggcccgtgccccggaatctcgtcgcgccggtgcagatgaatctcgcgtttgcgaaagccacgaagtggtgggagaagggattgcagcccaacatgcgggaggtcgagtccgcgcaagacctcgtcgactccttgaccaacgccggcgacaatctcgtcatcgtcgacttc

SEQ ID NO: 404686 - DNA, 441 bp, Oryza sativa nipponbare
cccacgcgtccgcgtactacggaaacttgtacactatcaagctcagcaactgcctgcccctctctttccctcgccattaagttttctcgtccggcggcgtcacccctgcgaattaactaactagctaggccggccatggagacggtggccgcggccagctacacccgcggggcggcgacgcgctcgccagcgtgctgcgccgccatgtccttctcgcagtcctacaggcccaaggccgctagaccgccgagcacgttctacggcgagtcgctgcgggttaacacggcgaggtcgctgccgtctgggaggcagtccaaggcggcgagccgggcggcgctcagcacccggtgcgagatcggggacagcctggaggagttcctgaccaaggcgacgccggataagaacctcatcaggctgctcatctgcatgggggaggcgatg

SEQ ID NO: 404687 - DNA, 424 bp, Oryza sativa nipponbare
  unsure (1)..(424): unsure at all n locations
gtagtatnnntagtaagagggannggagagggttaaggggatttactctctggtgtgaggatatctngtcattattcgagggagcctctagaatgcttgtctgctagtaaagaatctgtctaactaaggggctgttctaananntatggggtctaaaaagctctaaaannaaataagnntgattctgtttttaagctctcttaataaaaaaggagaaactggattcttggaactctctttcaacgccctcatgtcacgtcgagggtacttgctagaaaaaagaacttgctaaaatccgatccaattnnttcgtaatcgatagttaaacatggggttaaccgtattatgaaagacggaaaaaaatcattggcttatcaaattctctatcngagcgtngaaaagatcaacaaaagacagaaacaaa

SEQ ID NO: 404688 - DNA, 208 bp, Oryza sativa nipponbare
cccacgcgtccgcccacgcgtccgagaacatagcagaggctagctatgtatgtgattatatacttggtggccaacttgatggttctagctccacaaaagaggagttccttgagaaattcaaaaatgctgtttctccaggatttgatcctgatgttgacttagtgaaagttggcattgccaatcaaacaacaatgcttaaaggagaaac

SEQ ID NO: 404689 - DNA, 484 bp, Oryza sativa nipponbare
cgcacgcgtacgcatcaaagtcacccacctggacacctccgacatgtgcggccctcacaccaacgagctcctcctcggcaaggctctgcagggcggcgtgagggagaaggtggaggtggccacgaagttcgccgtctcgttcgccgacgggaaggtggagatccgcggcgacccggcgtacgtgcgggcggcgtgcgagggcagcctccggcggctcggcgtcgattgcgtagacctttactaccagcaccgtgtcgacaagaaggtgcccatcgaggtcacgattggtgaactcaagaaactagttgaagaaggaaagataaaatatattggtctatcggaagcatctgcatcaacaatcagaagggctcatgctgtacaccctatcactgcagttcagctcgagtggtcattatggtctagagacgtggaagaagatataattccaaaatagtttatccattgaaaaaaatcacatgcccca

SEQ ID NO: 404690 - DNA, 401 bp, Oryza sativa nipponbare
cttgatcagcaacccagtgaactcaaccgtccccattgcagcagaggttttcaagaaagctggaacttatgatcccaaacgtctccttggagttacaacactggatgtagcaagggcaaacacctttgtggctgaagtacttggaattgacccaaaagatgtcaatgttccagttgttggtgggcatgctggagtgactatattacccctcctctcccaggtccaccccccatgctcatttaccccagatgaaatcagctatttgactaaacgcatacagaatggtggcacagaagttgttgaggcaaaggcaggagcaggctctgcaactttgtcaatggcttttgctgcagcaaaatttggtgatgcatgcttgcgagcaatgcgtggtgatgctggcg

SEQ ID NO: 404691 - DNA, 494 bp, Oryza sativa nipponbare
  unsure (1)..(494): unsure at all n locations
gtccatgaagatgaagcgcaccatggctgctacttccatcctgttcttcttcctcgccggcctcgccgccgcccacggcagcacagcggacgacaccacgaccaccaccaccaacaccatacgcctcccgatcgacggagcagtggcggcgcgaaggaggacgaggccgtggaagtgctgcgacaacatcgtgaggctgccggagaggatcaacccgccgttctggcagtgcgacgacgagctggagcccgggcagtgcttccgccagtgcgaggcgtgccgggatcctgccgggcggccgttccccggccggccgctcatctgcgacgacgtcttctggggcgacgacccgggcacctcgtgcgcgccgtcgtcggagtggccgtggggcccgtgctgcgacatcgccgtctgcaccaagtcgctccctcccaatctgcactgcttcgacgaggtggagcgtgcgccgncgcgtgcgggcagtgcgagatggt

SEQ ID NO: 404692 - DNA, 517 bp, Oryza sativa nipponbare
cgaaaaaaaaaatcatcagcacaagatcgaggaggctttatctgaacaagggagatggcggactacgtgtatgggccggggcggaaccacctgttcgtgcctgggccggtgaacatcccggaccaggtgatccgcgccatgagccgtcagaacgaggactaccgctcgccggcggtgcccgccctcaccaagaccctcctcgaggacgtcaagcagatcttcaagaccaccaccggcacccccttcctcttccccaccacctacgggggcgtgggagagcgcgctgacgaacacgctgtcgccgggggacaagatcgtgtcgttcctgatcgggcagttcagcctgctgtggatcgaccagcagcaacgcctcaacttcaacgtggacgtggtggagagcgactggggctacggcgccgacctcgctcgcctcgactacaagctccgccaggacccctcccactccatcaaggccatctgcatcgccacaacgagactcgcacttgagtcaccaacg

SEQ ID NO: 404693 - DNA, 361 bp, Oryza sativa nipponbare
cccacgcgtccggaggaacaagatcttctgatgaagaattatttcaaatttacactcattcagaaagaatcttttatttcgaggattaacgcaagatttattgtgctactttggggtgagaaatcgtgcctaaacagtgaagttgtgaatggaataccactttatgacttcaaggatatcactcaactcggacgagaaagccgtaatacattgcgtcactctcatgaacaaggtcagcaggtcgtctttgaaactattactccagatgatgttgctacactaatatataccagtggaacgagtggaacaccaaaaggagtgatgcttacccaccgaaacctcttgcatcagatttaaaaat

SEQ ID NO: 404694 - DNA, 409 bp, Oryza sativa nipponbare
ccgagacttggctcgatttcccactgttcatcagtgagcgctatgcagatgactttgaactttcggatgctcagtatgtgcatgcattatccatggagcaccttgtgccaagcctgtcagatataaaagctgccatttgctctactgatatgagtgaagcatgtttctggaagatatattttgtgcttctgcactcgaaactcaacaagcaagacgctgaacttctttcaacaccacagatcctacaagcaagggaggaattgctgcaaagtttacagactaagaataagcgaggatctgaggttccggaggaagaggaatcatcaaaaactgtgattatgtcctctgcccctgctgaagagaaagtgatacaaccttcaagcattgaaaacaaagctggaaaaccaga

SEQ ID NO: 404695 - DNA, 398 bp, Oryza sativa nipponbare
cgcgtccgaccacgcgtccgtccacgcgtccgttaagctagtacagcaaccagcaagaacaaagaagagtggccggagtgggcgggggagatgagctcggcggcggcggcgacgaggttcatcaagtgcgtcaccgtgggggacggcgcggtggggaagacgtgcatgctcatctgctacacctgcaacaagttccccaccgattacatccccaccgtgttcgacaacttcagcgccaatgtctccgtggacgggagcgtcgtcaacctcggcctctgggacactgcaggtcaggaggattacagcaggttgaggcctctgagctacaggggagccgatgtgttcatcctgtccttctccctgataagcaaggcgagctatgagaatgttcagaagaa

SEQ ID NO: 404696 - DNA, 435 bp, Oryza sativa nipponbare
ggcgggcaccatgaccaaaccacgcctaaacctagctagctaataagctccaaggctccaagcaaagtaattaagatgaccatgaaagtggagagcaccatgatggctgctgccatgctgctcttcctcctcgtcctcgccggcatcgtcaccgccaccaccaccaccaccgacagcaacattcgcctccccagcaacggcgccgccggcgaaaccgatggaaacaaacaggcgaaatccagaccgtgggagtgctgcgacaacatcgagatgtccgtgctcaagatctacccgccgcggtggcgttgcaacgacgaggtgaagcagtgcgccgccgcctgcgagaactgcctgcagctggtgcccggggccggcggcgaagatgtcgtcttcgtctgcgacgactggtacccgaccaccaaccctggccccgtc

SEQ ID NO: 404697 - DNA, 317 bp, Oryza sativa nipponbare
ctcaccactgctagcttgggaagaggaggaggagcttgagcttggagagagacaacaatggcggctcaggctcttctctctgggaggcagctgctggggaggccattgcaatcttcagtctccaggtcttcttcctccaggaaggcacccttcatggtcagggcagaggccactccccctgccaagcaaggtgctgacaggcagctgtggttcgcatccaagcagtccctgagctacctggatggcacgcttccgggagacttcgggttcgacccgctggggctatcggacccggaggggaccggtgggttcatcga

SEQ ID NO: 404698 - DNA, 507 bp, Oryza sativa nipponbare
gcgcgccggacgccgtcgtcgttaattaatcagccatggatccctacaagcaccgcccgtcgagctcgttcaacggcccgctgtggagcaccaactccggcgcccccgtatggaacaacaacaactcgctcaccgtcggctcccgaggcccgatccttctggaggactaccacctggttgagaagctggccaacttcgacagggagcgtatcccggagcgcgtggtgcacgcccgcggcgccagcgccaagggcttcttcgaggtcacccacgacatcacccacctcacctgcgccgacttcctccgcgccccgggcgtccagaccccggtcatcgtccgcttctccaccgtcatccacgagcgcggcagcccggagaccctccgcgacccgcgtggcttcgccatcaagttctacacccgggaggggcaactggacctcgtcggcaacaacttccccgtcttcttcatccgcgacggcatgaagttccggacatggtcactcgctc

SEQ ID NO: 404699 - DNA, 306 bp, Oryza sativa nipponbare
  unsure (1)..(306): unsure at all n locations
cccacgcgtccgtccactcacacgcattgcagaggagaggcgacaatggaggggaaggaggaggacgtgcggctgggggcgaacaggtactcggagaggcagccgatagggacggcggcncanggcgccggggacgacaaggactacaaggagccgccgccggcgccgctgttcgagccaggggagctcaagtcgtggtctttctaccgggccgggatcgccgagttcgtcgccaccttcctcttcctctacatcaccatcctcaccgtcatgggggtctccaagtcctcctccaagtgcgccacc

SEQ ID NO: 404700 - DNA, 356 bp, Oryza sativa nipponbare
  unsure (1)..(356): unsure at all n locations
cccacgcgtccgggcaaatatgatggggtggttggtgtcctgggtgctcttgaggcaattagaatgctgaaaaggtctggtttccagccaaaaagatctttggaggttattatgtttacatcggaggagcctacaagatttggaattagctgcttgggaagccgcctaatggcagggagtgaagaactggctcgatccctcaaagaaacagttgacaatcagaatgtgtcattttttgatgctgcagactctgctggctacaagatgcatcctgaggagctacataatgtgtttttgaagaaagacgactatttngcttttgtagaattgcacattgaacagggccccattttgga

SEQ ID NO: 404701 - DNA, 416 bp, Oryza sativa nipponbare
  unsure (1)..(416): unsure at all n locations
atttcctgattatcatgttggagcattcaatgcggcaaaaagatgggtggaaggatgtggaagcaacaattcattgtgcanagtggctttcaatggttggaggatctagcacaggagaccaaagaatcagacgggaagaatcattgccaattttaaaaaggagattgctagggcgtctgcttgatttttctgccagagaacttcaagtccagactgaagtaattgctgcagctgcagctggtgttgcaactgagggtttatcttctgaagaagcaaaaacccaagcggaaaatgctgctcatctttcaatagcactagcggaaaatgcaataggtattctgatgcttggagaagatcatttgaggtgacaagggcaacatttttgcacattcagatcacttgatagtgctgtccct

SEQ ID NO: 404702 - DNA, 326 bp, Oryza sativa nipponbare
gcgcccacgcgtccggatctccatctggcgagaagagcaggggaggggatcctggtgaggactacaaaggagggattcaagtttgagtctggattaacttggcagcatgtcgtcaaacaagatagagcttgaccacaaggacatggtccatgattctgccatcgactactacgggaagagccttgccacagcctcctcagactccaccgtgcagatcagcagcattggaggtgcatccgcgccatcccagctgcttgcaaccctcagcggacactatggacctgtgtggcgtgttgcatgggcccatcccaagtttggttcgattc

SEQ ID NO: 404703 - DNA, 411 bp, Oryza sativa nipponbare
atcggcgaatccgtcgcgtcagttgccaagtctgctcaagctagcagcgcggctattgtttttgcttcagtgggtgggagccagggagattttaagctgactgctgcggcagcaattgcttcaggaactgtgcttgggctgcacgaggacagcagatacaagtcggagtcgaagaaggtgcatcttaaacaagtagatcttatcggatttggttctggtccagaggttgaccagaaacttaagtatgccaatgatctctcctcgggtgtgatattcgggaaagaacttgtgaactcacctgcaaatgttcttactcctgctgtgcttgccgaggaggcatcaaacattgcttctacatacagtgatgtattcactgcgacaatattagatgtggagaaatgtaaagagtta

SEQ ID NO: 404704 - DNA, 471 bp, Oryza sativa nipponbare
  unsure (1)..(471): unsure at all n locations
gcgactgaagaccatcaacagaaggaaaccaactcatggaaacaaccaagttcagcagcctcagttgccagctgctcctgtgagctgcttgcgtagaagtggggaagtttgggatggaagaagagattgagatgctcaaaagggataaaaatgttttaatgcaggaacttgtcaggctgagacaacaacagcagacaacagatcatcagctgcagactttgggcaagcgtcttcaaggaatggagcaacggcaacaacaaatgatgtctttcctggctaaggcaatgcatagtcctggcttcctagcacaatttgtacagcaaaacgaaaacagcagaagaagaatagttgctagtaacaaaaagaggaggctaccaaaggcagatgggttcgtggactctgaaagtgcttcattggatggacanatagtaaaatataaacctatgatcaatgaagcagtcaaagcgatgc

SEQ ID NO: 404705 - DNA, 427 bp, Oryza sativa nipponbare
gcggccgacaaacctcacctatttggacatctcaaataacatactatcagggcttgtcgcatcaaacttcggagcgccaagacgtagatactatgaatctatcctcaaacagcatccaaggccagattccaagttcgatttgcaggttgaaatatttgagcaccttggatttatccaacaatcttttgaacgggaaacttcctcgatgcattgggatgagaaatcttcagaagcttctactaagtaataataacttatctggcacattcccatctttactgcaaggctgcacactgctacgttatatagacctatcatggaataggttttatggaagattaccgagttggattggagacttccaagaattagtttctttacaactgaggaacaataccttttcttggggatggtctttcactggaca

SEQ ID NO: 404706 - DNA, 314 bp, Oryza sativa nipponbare
gcgcccacgcgtccgctcaagcctcctcctcctctatccctccacccgcacctccctctcctccgccgccaccgccacccctcgtccaggcccatctccgtgtggcggcgcgccccgtccgacctcctcgccagcgtcgagtccgtcgcctccgccgcctccgtcctcgccgccatcgtcctcgtccacgagtcgggccacttcctcgccgccacctcccgcggcatccacgtctcccagttctccgtcggcttcggccccgccctcgcgcgctttcgcctcggccccgtcgagtacgcgctccgcgccatccc

SEQ ID NO: 404707 - DNA, 362 bp, Oryza sativa nipponbare
cccacgcgtccgcccacgcgtccggccggccatcatcagtgatcctctacaatcatcgactttcagcaaattaagatgggtgctgccttctccttcaccggtggagctccggcgtccacttcgaccaactttctggggaagaagcttaagaagcaagtgacatcggcggtgaactaccatggcaagagctccaacatcaacaggttcaaggtgatggccaaggagctggacgagggcaagcagaccgaccaggacaggtggaagggtctcgcctacgacatctccgatgaccagcaggacatcaccagggggaagggtttcgtcgactcccttttccaggctcccacgggtgatggcaccca

SEQ ID NO: 404708 - DNA, 414 bp, Oryza sativa nipponbare
  unsure (1)..(414): unsure at all n locations
cccacgcgtccgcgcatgctggattacaatgtgctcggaggaaagtgcaaccgcgggatctctgtcattgatagtttcaagatgttgaagggcgactgatgttctgaataaggaggagacatttcttgcctgcacccttggttggtgcattgaatggcttcaagcttattttcttgtgcttgatgatattatggacaactctcaaacacgacgtggccagccttgctggtttagggtgcctcaggttgggctcattgctgtaaatgatggtattatccttcgcaaccatatttcacgaattcttcaacgccattttaaaggaaagctgtattatgttgatctcaatgatttggtcaaatgaggtgagtttaagactgcttcangtcaattggtggatcttattactacttatga

SEQ ID NO: 404709 - DNA, 396 bp, Oryza sativa nipponbare
  unsure (1)..(396): unsure at all n locations
gcgattgcacggatattttctctccccctgctcccgtcgccatcgcaaaggagaaaaaaaaaagaggaggaaggaaggaaggatgagcgccacggcggtgtcgtcgctgaacccggacgcgccgctcttcatcccggcggcgttccggcaggtggaggacttctcgccgcagtggtgggacctcgtcaagaccaccgcctggttccgcgaccactggttccacgagcaccagcagctcgacgagatggccgactccctcgccctccacgacgccgncgncgacgacgacgacctcgccggccttctccccgacgacgccttcgacgacgacgacgacgacgacctttcttcgaccagacccataaccttctcgtcgttcccccgagccgcccgccg

SEQ ID NO: 404710 - DNA, 320 bp, Oryza sativa nipponbare
ctcggatgggcatggatgaaaagatgctgcctattttggtcgtgataatttaccaaggatcattgtggaagatgctcattttcctggggagcttgacaaagtagtgagaggatcctttattcatacaaataatcaatctgcaaagacaacactgtcttctggcacaacagcacttacagcaatgattttcggaaggactcttctgattgcaaatgctggagattgtagggcggctctttcacagcgccgcactggaattgaaatgtcactggaccacaggccttggaagctgagcgaaaaactgcatgtagaatcacttg

SEQ ID NO: 404711 - DNA, 467 bp, Oryza sativa nipponbare
  unsure (1)..(467): unsure at all n locations
gcggcacgcgtccggctgatctggatcgaggtgctcgtcatcggctacatcgagttccagcgcaacgcggagctggacccggagaagaggctgtacccggnggggtgcgacttcgacccgctcgggttggcgtcggacccggagaagaaggagcggctgcagctggcggagatcaagcacgcccgcctcgccatggtcgccttcctcggcttcgccgtgcaggccgccgccaccggcaaggggcccctcaacaactgggccacccacctcagcgacccgctccacaccaccatcttcgacaccttctcctcatcctcttaatttaagctctttcgcgcgcaattcaaacgggatcgatgcgttggtgtgcgttcgcgcgcgctgtttagttntgtgatgactagcgagctgggagggtatggagagagggagggtcatccttttgttgattactacttaaattagga

SEQ ID NO: 404712 - DNA, 413 bp, Oryza sativa nipponbare
gcgcggacgcgtgggcgctgcccaccccaatccggcagcacagcagcagcagaagcagctcggatccctcctgcaatggcgaccgcgtgcgcgccgctctcgctgcagccggcctacctctcggggaggtccgcgcgcgcgcgccgcccgccgcccgccgtccgctgcagcgccgtcggagaggttatggcggagacggcggcggtcgggacggcggaggagccgctgctggtgagcgcgatcaaggggaggaaggtcgagagaccgccggtctggctcatgaggcaggccgggaggtacatgaagagctatcaattgctctgcgagcgacatccttcattccgtgaaagatcagaaaatgttgaccttgttgttgagatctctctacaaccatgggaggttttcaagcccga

SEQ ID NO: 404713 - DNA, 443 bp, Oryza sativa nipponbare
gcgcccacgcgtccgctcgctttctccctcgccaactcgcctaccctccccacccccgcgtcggcggcggcggcagcggcagcggcagcgacggagcctcgccggcggcaagcgtactcacccgacaaaacaatgaggaggtatagtccaccttatcgcagtccaccaaggaggggatatggtggcagaggaagaagtccccctaggaggggatatggaggacggaaggaacagggttctggcagtctcctggtccgcaacatccctttaagctgcagagcggaggatcttagagttccttttgaaaggtttggacctgttcgagatgtttacctgccaaaggattattataccggggaaccgcgagggtttgcattcgtggagttgttgacccttatgatgcttctgaggcccaatatcatatgaatcggtcaggtggtttt

SEQ ID NO: 404714 - DNA, 174 bp, Oryza sativa nipponbare
gcgcccacgcgtccgcccacgcgtccgcccacgcgtccgcggacgcgtgggctctctctctgctcgactccctctcgccgccgccgccggcgccgccgccgccaccgacggcaagcgcggcgacccgaccgcccgagacctagcctcgcaccgagagacttgggggggggtggg

SEQ ID NO: 404715 - DNA, 311 bp, Oryza sativa nipponbare
  unsure (1)..(311): unsure at all n locations
gcgcggacgcgtgggccgcagccgccgccgccgccgccgcgttccaccacctaccacccccaccggagaagaagaagaaaaaggagagggagatggtgtcgggttcggggctgtgcacgcggcgggtggtggtggacgcgcggcaccacatgctggggcggctggcgtcgctggtggcgaaggagctcctgaacgggcagcgggtggtggtggtgctgttcgaggagatgtgcatctncggcgggctcgtccggcagaagatgaagtacctccggttcctccgcaagcggatgaacaccaagccctcccat

SEQ ID NO: 404716 - DNA, 443 bp, Oryza sativa nipponbare
  unsure (1)..(443): unsure at all n locations
cggacgcgtggggtttcttggttccccttcctctctcatcagcacacactgtcaccacaacagccaccaactcctctgagacttcttgatccggcggcggcggcaagatgttcggcggcggcggcggcggcgggaggaagccgctggactacgaggagctgaacgagaacgtgaagaaggtgcagtacgcggtgcggggggagctgtacctgcgcgcctccgagctccagaaggagggcaagaagatcatcttcaccaacgtcggcaacccacacgcgctcggccagaagccgctcaccttcccccgccaggttgtgncgctgtgccaggcccccttcctgctcgatgatcccaacgtcggccttatcttccccgccgacgccatcgcgcgggccaagcactacctcgccatggcacccggtggactaggtgcttacagtgat

SEQ ID NO: 404717 - DNA, 390 bp, Oryza sativa nipponbare
tctcaaggtattctgtcaaggttgatggtgtgagatgcttcacatttgatgaaatggctgcagcgacaaatgattttactgattcagctcaaggtggtcaagggggttatggaaaagtttataaaggaaatctaactgatggaacagctgttgcaatcaaacgggcacacgaaggttctcttcaaggttcaaaggagttctgcacagaaatagaattgctatcaagactacatcatcgtaatttagtttctctggttggctattgtgatgaagaagatgaacagatgctggtgtatgagttcatgccgaatggtactctgcgtgatcacctttctgccaagtcaagaagacctctgaactttagccagaggatacatattggcctgggtg

SEQ ID NO: 404718 - DNA, 408 bp, Oryza sativa nipponbare
gcgcccacgcgtccgcccacgcgtccgcacttatcatcaatcggcgcctccctctctctcgctcaccgcctccttctcctcgcgatctaggcaaacggggggctcgctaagatcggcatgtcggactctgaggagcaccatttcgagtcgaaggccgacgctggggcgtccaagacctatccccagcaggccggaaccatccgcaagaatgggtatattgttatcaagaaccgcccctgcaaggtgggtgaggtttctacctcgaagactggtaagcacggtcatgccaagtgtcactttgttgccatagatatattcaatggtaaaaagcttgaggatattgttccttcgtcccacaactgtgatgttccacatgtgaaccgcacagagtaccagctgattgacata

SEQ ID NO: 404719 - DNA, 422 bp, Oryza sativa nipponbare
  unsure (1)..(422): unsure at all n locations
caaccacttattaacaggattaaagagattggaggaagttatgagaagaccccaactcaggtggttctgaactggctgatctgccagaggcaacgtggtgccgatccccggagcgaagaacgcanagcaggccagggagttcgctggtgcgctcgggtggagcctgacggatcaggaggtggaagaactgcgttccatggcacgagagatcaagccggtcatcggattcccagtagagaagttgtaatttctagtgagtttttcttctactttgggtctccgagaacatcatttacataaatacacaatgatctagacatacatagataggaaccatgtgtagtctttggaactggaaattaagatgtcttagaaaataaccaaaatttacagtctgagtagcgtacatgcatgtatgctca

SEQ ID NO: 404720 - DNA, 439 bp, Oryza sativa nipponbare
  unsure (1)..(439): unsure at all n locations
aaaaaggtgttgggcgtcaaaatggaatgaaagagcatattttagcactcgtaaggtgaagcttgatcatgactacctttccatggctggacttgtacaagaaattgtcaatgcagactatgcctttgtcattcatactactaacccatcatcgggagattcgtctgagatatatgctgaagtggtgaaagggcttggagaaacacttgtaggagcctatcctggtcgcgccatgagctttgtatgtaagaaaaacgaccttgactctcccaaggtactgggtttcccaagcaagccaattggtctcttcataaagagatcaatcatctttcgttcagattccaacggtgaggatttaagagggtatgctggagcaagactgtatgatagtgccctaatgatggaggagnatgagtatactcgctacaccaccgacccc

SEQ ID NO: 404721 - DNA, 326 bp, Oryza sativa nipponbare
  unsure (1)..(326): unsure at all n locations
cccacgcgtccgcccacgcgtccgctcaggacctaatgcgaatcctctaaacctattcccccagggcattccaagtgctgggtcagagcctggtgctgctgctggtgccggtgccggtgctggtgcccttgatgcattgcgacaacttccacagttccaagcgctgcttgcattggtccaggctaatccccaaatcttgcagccaatgcttcaagagcttgggaagcagaatccgcaaatcttgcggttgattcaggaaaatcaggctgaatttctccgtctggtgaatgaatctnctgatagcggcgctgcttggggaaacatac

SEQ ID NO: 404722 - DNA, 342 bp, Oryza sativa nipponbare
gtcacccgcatcgtcctcatgcggaatctcgggttcgtgtcgtgcatcgccaacatccgaggcggcggggagtacggcgaggactggcacaaggccgggtcgctcgcgaacaagcagaactgcttcgacgatttcatcgcggctggtgagttcctcgtctctgcaggctacacgaacccgagcaggctgtgcgtcgagggtgcgagcaacgggggccttcttgtagctgcctgcatcaaccagcgtccggacctttttggttgtgctctggctcacgtgggtgtcatggacatgcttcgattccacaagttcaccataggccgtgcatggacctgtgatttc

SEQ ID NO: 404723 - DNA, 398 bp, Oryza sativa nipponbare
  unsure (1)..(398): unsure at all n locations
ggagagaaggccatggcgtcgaaggaggaggtggccgtggagacggtggagggcggagcggcggcggcgaaggcgccgtactgggacgcgccgccggcgccgctgctggacacgagcgagctgggtaagtggtcgctgtaccgtgccctcatcgcggagttcatggcgacgctcatcttcctctacgtgagcatcgccaccgtgatcgggtacaagaaccagagggccaccgtcgacgcgtgcaccggcgtcggctacctcggcgtggcgtggtcgttcggtgccaccatattcgtcctcgtctactgcanccggggcgtctccggcgggcacatcaacacccgcggtgacgctgggcctcttcttcgggcggaagctgtncgtcgtccgcaccgtgc

SEQ ID NO: 404724 - DNA, 479 bp, Oryza sativa nipponbare
gcggaggctcacatggatccgtacactagcagggctccggcgagtggtggtgtcgccgccggcgacgacgacgaggaggcggggtgccggcaggcgtttgagctaatgtgcatcttcaccgtccccatgacactgaaggcggcgatcgagctcggcctcctcgacgcactagccgccgccggcgacggccgcgcactgaccgcggacgagctggccgccgcgcggctcccggacgcggcgccggacaaggccgaggcggcgtcctcggtggaccggatgctgcggctcctcgcgtcgttcgacgtcgtcaagtgctcgacggaggccgggcccggcggcgaacctccccggagacgatactcgccggcgcccgtctgcaggttgttcaccgccggcggcaacaaccaccgtggatctctggccccctcggtcttgttcggcgtcgacgaggactacctgtgcacctggcgtcagttggc

SEQ ID NO: 404725 - DNA, 350 bp, Oryza sativa nipponbare
gcgggaggaacttggacagccattagagagattgttcagcagaatctcatcacggacaatagcagctgcaagcttaggccaagtttaccgtgctacacttagagaaactggcgaggatgttgctattaaggttcagaggccaggaattgagcccatcatatatcgagatcttttcctgttccgaactctcgcatcctttttgaatggaattagccttcaaaaactaggctgcaatgcagagcttattgtggatgaattcggtgaaaaacttttggaagaacttgattacacccttgaagctacaaacatcgaggacttcttggaaaatttcaaggatgatccaactgtca

SEQ ID NO: 404726 - DNA, 403 bp, Oryza sativa nipponbare
aagaaacctaagcccatcggaaatctctcctcctcccagcaaagaggaggtggtggagatctcccaatccgcgggaatcactcgctggtcaccgggattcggcctccgctcgagctctgaatctcgggagctcctgatctggaggatgccaaatctcaaacagcaactttgccgccagacagcgcttacggtggactgatgacctccatgatcgttttgtggatgctgtaacacagcttggtggacccgacagggcaactccgaagggaattcttagaataatgggtgttcaagggttgaccatctatcatgtcaaaagccatctgcaaaaatatcggcttgctaaatacattccagatcccacagctgatggtgccaagtctgacaaggaaagatctcggag

SEQ ID NO: 404727 - DNA, 459 bp, Oryza sativa nipponbare
  unsure (1)..(459): unsure at all n locations
tcttgctccccaaaccaagccaaccccctcgacggccggaacacatcggggggacgcagccatggtgctcgaggcgacgatgatctggatagacaactcggagtggatgcggaacggcgactactcgccgtcgcgattccaggctcaggccgacgccgtcaacctcatctgtggcgccaagacccagtccaacccggagaacacggtgggcgtcatgacgatggccggaaagggcgtgcgcgtgctcgtcactcccaccagcgacctcggcaagatcctcgcttgtatgcacggactngaagttggtgctgaagcaaatttggctgcagcaattcaggttgctcagctggctctgaagcatcgccagaataagaggcagcaacagcggattatagcttttattggaagccctgtgaaatacgaccaagaaagtttggaaacaatcgggaaaaagctgaa

SEQ ID NO: 404728 - DNA, 343 bp, Oryza sativa nipponbare
  unsure (1)..(343): unsure at all n locations
gcggccggccatcatcagtgatcctctacaatcatcgactttcagcaaattaagatggctgctgccttctcctccaccgttggagctccggcgtgcactccgaccaacttcctggggaagaagctgaagaagcaggtgacatcggcggtgaactaccatggcaagagctccaacatcaacaggttcaaggtgatggccaaggagctggacgagggcaagcagaccgaccaggacaggtggaagggtctcgcctacgacatctccgatgaccagcaggacatcaccagngggaaggggttcgtcgactcccttttccaggctcccacgggtgatggcacccacg

SEQ ID NO: 404729 - DNA, 445 bp, Oryza sativa nipponbare
gccatggagctctccctcctcaacccggcggcaatgcgcggcctctccgccgccaagccccgcgtcgtgtcttccaggcgcatcgtgcggttgcgcgtggcgtcgtcagccgcggcgccgcccgcggcgaagcccgggacgcccaagaagcgcgggaagacggagatccaggagacgctgctgacgccgcggttctacaccacggacttcgacgagatggagcggctgttcaacgccgagatcaacaagcagctcaaccaggaggagttcgacgcgctgctgcaggagttcaagacggactataaccagacccacttcgtccgcaacccggagttcaaggccgccgccgacaagatggaggggcctctcaggcagatcttcgtcgagttcctcgagcgctcctgccaccgcggagttctccgggttcctcctctacaaggagctc

SEQ ID NO: 404730 - DNA, 385 bp, Oryza sativa nipponbare
cccacgcgtccgcggacgcgtgggccgcctgacatcctcggaaacatggcacaaccatcctttctatcagagtatgaccggggaggggaaggggacctgttcaaagctcctgaacccatcattgaagaaccagtgcttagccttgatccagttgcagcagccatttcgatgatgtctggcagtgagaacgtaatggatgaaactatagaggttgcagatatcagcgacattcagaatgactctcttttaagcgaagtattatacgagtgcgagaaggaactcatggagaagtccgcaatcgaagagactatttctgaactgctggacgtcaagattcctatgctgcaagtggaagagttccctagggaaacccaagtacaactac

SEQ ID NO: 404731 - DNA, 320 bp, Oryza sativa nipponbare
cggacgcgtgggcggacgcgtgggcgctcgctcatcgccatctctctcagctctcacagctcactgcatcaatggccgcggccaccatggcgctctcctccccggtgatggcccgcgcggcgccgtcgacctcctccgcgctcttcggcgaggcgcggatcaccatgcgcaagaccgccgcgaagcccaagccggcggcgtcgtcggggagcccgtggtacggcgccgaccgcgtcctctacctcggcccgctctccggcgagccgccgagctaccttcaccgcgagttcccgggcgactacgggtgggacaaccggggg

SEQ ID NO: 404732 - DNA, 382 bp, Oryza sativa nipponbare
cctaaccccgccgccgccgccgctcttcgccacaagatcgtttcgtcgcagtcggtgttccggtcttttgagcgcggagatggcggaggagacggcagttgagactccagctgccccggttcttggggagcccatggatctgatgactgctctgcagcttgtgatgaagaagtcaagtgctcatgatgggcttgtgaagggtctccgtgaggctgccaaggccatcgagaagcatgctgctcagctttgtgtgcttgctgaggactgcgaccaacctgattatgtcaagttggttaaggctctgtgtgctgagcacaacgttcaccttgttaccgtgcctagtgctaagactcttggcgagtgggcgggctttgcagatgac

SEQ ID NO: 404733 - DNA, 374 bp, Oryza sativa nipponbare
cccacgcgtccgcccacgcgtccgcccacgcgtccgcttaatgcaggtaattctagtgttgagggtctgaggagctgaaactagcacgggtacgctggcagcatgcggtggctggctctctcggtagacatcttccgcaaagggatctccttgaacctgtactgccgggttattctgtaaattgcctccattattgctctactccaatcctgatcttctagtctctgaagtttgggattgaagatctggttgctggcattgctgtttgggtttctgtggttgcctggcaattctttcaaggagaacgggcaggagtactaatggtgtggcaaccggtggctcaaacgagatttcgcgtgtttaaacatgagaat

SEQ ID NO: 404734 - DNA, 438 bp, Oryza sativa nipponbare
cccacgcgtccgtgtgctgcactatcttctcctgagctttttgttaagaccattcaggagagatttggactgtcaaattatacgtctttggatcttgcggaacagaatgagtatgaatcagttcttatgcaagaaatgctaacttttctcatacaattagtcaaagaacgtagattttgtgggctttccacatcagacaatttgaaaagagaattgatttataagttagctgttgtggattccacacacagccagattgtgaagtctcttccccgtgccctttcgtcaagtgaccagcttcagaatgttctggattcacttgcagtttattctaatccatctggcatgaagcagggtaagtatgtacttcgcaaaacattctggaaggagctggacttgtatcatccccgctggaattccagggaactacaaattgcc

SEQ ID NO: 404735 - DNA, 362 bp, Oryza sativa nipponbare
  unsure (1)..(362): unsure at all n locations
gcgcccacgcgtccgcccacgcgtccggagagaacaagagtggaacatttcaagaaaagagcttatggaacttgtanaagtgggcatccgttctgaagaggagattgaacagataatatcaagtgatttcaatcctactagatgtgcatttgagagtaaaggtgaaatttgggtggagaacatccttaatcttggaatttcgaggagccatatttgaggggaaaagtttgtcaagcatttctgttcatgatgactttgctgtattaaacttgagtgatggtggttctctgccttgtcgacttgttattgatgctatgggtaatttttccccaattgtgcgacagatccggtcaggcagaaaa

SEQ ID NO: 404736 - DNA, 413 bp, Oryza sativa nipponbare
  unsure (1)..(413): unsure at all n locations
cgcctccttcgcttcgcttccattggtggtggtctccattgctcccttcctccctgcctttttcttccataagtagtagtagtagcgggagtggcgcgccgccgcagccatagatctgcggcgccgcgtatctcgcggctggtttggctggtgcggttagcggctagggttttggttgtttcgtctgatcgatcctccccgattttgcggcggcggtggtgaattggtgtgtgatctgatatgngctggcggcggcggtggcggggaagggggggaagggaggggaggcgggaccggggaagagggagaggatagcaatacggaggatcgacaacctggcggcgaggcaggtgaccttctttaagcggaggatggggctgttcaagaaggccgaggagctctccatcctctgc

SEQ ID NO: 404737 - DNA, 400 bp, Oryza sativa nipponbare
  unsure (1)..(400): unsure at all n locations
cggtcgaccacgcgtgcggccaagacaacatgaggatcgccttcctcagccaggagttcgaggtgtgcgcgtcgcgcactgtcagggaggagttcctcgccgcgttcgaggaggagatggaggtgaggtcccgcctggagaaggtgcangccgcgctggagggcgccaccgaggacatggacctcatggggcgcctcctcgacgagctcgacctgctgcagcggcggtcgcaggacgtcgacctcgggatggtcgaggtcaagatccagaagctcatgcccgagctcgggttcgctcccgaggacgccgaccgcctcgtcggcttcttcagtggtgggtggcagatgaagtgtcccttggcaagattcttcttcaggatcccgatttgctgctgctcgat

SEQ ID NO: 404738 - DNA, 329 bp, Oryza sativa nipponbare
cccacgcgtacgaccactcgtccggttctggaagtttgatgctgtgcttgagccatgatgtcactgtctgccttgatttgcggggaagcgtatagctggccatctgacactcaggttgcaacaactgaatgtgcgctgtgaaaccaatacaaacgacaatgtgtatgtcaatgttgtcgcatctatccagctcagagctctggctggcaaggcaaatgatgctttctacaagctgagcatcacacgatctcagatccaagcttatgtcttcgatgtgatcagcgcaaagttttccgaagttaaacctgaacgacgcatttgaccggaat

SEQ ID NO: 404739 - DNA, 412 bp, Oryza sativa nipponbare
catcaagctgcaatcatgcctgatgttcctcctccagaagagctcctgaatctggaagagatacgggaaagaagacttactgatcctggcttccgaatgcaatataggaactcagctgccaagaaaaagttcgtaccttggcccatagaaatgaggttttgtgaagattcagcatctcaacataaaccaagcttaaattattggtttagagccagaggaaaactttctgatgatccagcactgcataggtgtgttgtagcatatgcttcggatctactatattctggtgtcagcctaaatcctcatagggaggagggtctgaagacatactcactcagtcttgatcactcgatttggttccacaagcctgtgaaagctgatgattggcttttataatggatcgacagcccat

SEQ ID NO: 404740 - DNA, 303 bp, Oryza sativa nipponbare
accacgcgtccgcatatttgcaaagaaatggctaccattctgcaaaagatataacattgagccaaggtcaccagctgcggacttctgagagtcaaaagtgcatcacaatctgtgcatcccaaaagaatgggcactgatcaagaacctgtatgaagaaatgagagagagaattgatacagctaccatgtcaggaaaaattcctgaagaaatgaagctaaagcataaaggatttgatgaatggaactcagattttactttgaaaaatcaccagccaattgttcagattctgatagatgggaaaaa

SEQ ID NO: 404741 - DNA, 424 bp, Oryza sativa nipponbare
  unsure (1)..(424): unsure at all n locations
ccggacgaccgacgcgtccgcgcagatcggccacgacccgagggcacgctgcccgtcgaggacgtgctaggcgcgaacgggagcccagcctcctcaagacctccttcgctggcgcgcgcctncccgccgccgcccgcaaccccaccgtgtncgtcgcgccgcgcaccggcggcgccatctgcaactccatctcgtcgtcgtcgtccactcccccctacgacctcaacgccatcaggttcagccccatcaaggagtccatcgtgtctcgcgagatgacccggcggtacatgaccgacatgatcacctacgccgacaccgacgtcgtcgtcgtcggcgccggctccgcggggctctcctgcgcgtacgagctctccaaggccccctccgtcagcgtcgccgtaatcgagcagtcggtgtcccccgg

SEQ ID NO: 404742 - DNA, 125 bp, Oryza sativa nipponbare
  unsure (1)..(125): unsure at all n locations
tacaagaccagtgcgtgagaaaggaccagctatggcgtcgtcatagttgacgccgagaagagccacttcgagatggctgaggaggtcggctacgaggagaacgacggcangtgcaagtgcaccac

SEQ ID NO: 404743 - DNA, 336 bp, Oryza sativa nipponbare
ccggaatgaccgacgcgaccgacgcgtcgtccgacgcgtccgcatattagcagaagaaacggctgctcgccttctcgtggtccgtgatccgggacacggtcacgccgatggacctgtgcggctacgggatcgccttcttgggggtggcatactacaaccacgtcaagctgcaggcgctcaaggcgaaggaggcgcagaagaagatcagccaggctgatgaggaggctggctcgctgttgcaagagcgcgatgggcacagtgatcgcaagagcgataaccaggcatagagccaccaccagatctgatcctggcacacacaaaatgggtatctggtgc

SEQ ID NO: 404744 - DNA, 368 bp, Oryza sativa nipponbare
cccacgcgtccgcccacgcgtccgggccaacgaaaaaacggaccactactgctccttcgcgcaccgcatcatattgcatccatgtccgtcggatcgccatccttcgttggaagttgtttgctgttgaaaagataccaatcaaaaggtccacatcttttccctctggaataggtgacgacttcaacattgcaagatcgaagctgttctccaggtcttctgatgtgggcaggccacttgcaattgcacttactagcttgaaatcaccagatactcctacttcagtaacgaaccatgcttccaagccctacaaacagaagcatctatatggtaaggagtcaaataattgagttgagtaaatgtcggactta

SEQ ID NO: 404745 - DNA, 275 bp, Oryza sativa nipponbare
  unsure (1)..(275): unsure at all n locations
cccacgcgtccgtcttcttcttcctcctccatcccctttgccctcctgctgcgccgccccaactccggcgccgcaacaaagccatggccaagaagctcggcaagtcgccggtggcgaaggaggaggacaaggaggggctcttcgcgtcatgctccttcaccgaccctggncttcaccccaccctctgcgctcacctncaagataagatgggcttccaagcgccaacaagaatccaagctcatgcaattccaatcgccatgtctggacaacacatg

SEQ ID NO: 404746 - DNA, 347 bp, Oryza sativa nipponbare
ggagggcattcccccggaccagcagcgcctcatctttgctggcaagcagctggaggatggcaggacccttgctgactacaacatccagaaggagtccaccctccaccttgtgctccgccttcgtggtggtatgcagatctttgtcaagaccctcacaggcaagaccatcaccctggaggttgagagctcggacaccatcgacaacgtcaaggccaagatccaggacaaggagggcattcccccagaccagcagcgtctcatcttcgccggcaagcagctcgaggatgggcgcaccctcgccgactacaacattcagaaggagtctaccctccacctggtgcttcgtc

SEQ ID NO: 404747 - DNA, 350 bp, Oryza sativa nipponbare
  unsure (1)..(350): unsure at all n locations
gaaagctggggtgtttgttgcccaagcagcaggaaatggaggaccatttccgaaaacactggtatcattcagcccatggataaccactgttgctgctggagttgatgaccgcagatacaaaaatcatttggtgctaggaaatgggaaacttcttcctggacttggtgtatcacctgcaacccatgagaataaatcattcagcctgatttctgcggctgatgctctgctgggttcatctgccaccaagtacagtgcattagattgccaaaggccagaactctngaataagaggaaaattcagggcaaaattcttttggtgtggatattctttcaactatatttctgggaca

SEQ ID NO: 404748 - DNA, 401 bp, Oryza sativa nipponbare
tgctgaaattgctagcaaattcttttagacctgtcaatgctagatggacaactgaacgttgtgctgtttgtcgatgggttgaggattgggactacaataaaattattatttgcaacagatgccaaatagctgtccaccaagagtgctatggagcacgtgatgtacaagattttacaaattgggtctgtcgagcatgtgaattgccgaaacaaaaaagagaatgttgtctttgtcctgtcaaaggcggtgctctcaagccaacagatattgaccaactatgggttcatgttacatgtgcctggtttcaacctaaagtctcttttcctgttgatgagacaatggagccagccatgggcatattgagcatcccttcagagtactttaagaaagcatgtgttata

SEQ ID NO: 404749 - DNA, 408 bp, Oryza sativa nipponbare
gcgtgagccatagagctatgcagggtactcttactgatattgaagaagaaacacaaatctatgtttgtgacattaatccaaatatgctgaatgttggaaagaaacgtgcttcagaaagaggatacaaagaaggccattgccttagctggatacaaggagatgctgaagctctgagttttgaggatggatctatggatggctatactattgcgtttgggatcagaaatgtgacacacattgaaaaagctctatcagaagcttatagagtcctaaagcgagggggaaggttcctatgcttggaattgagtcatggtgatgttccgctttttaaagagatttatgatgtttattcattttctgtgattccggctgtgggagaactagtgggccgggatcgccagtcatacc

SEQ ID NO: 404750 - DNA, 269 bp, Oryza sativa nipponbare
ccaaaacctcgtacattttgagctagccacaagcaacaaatgcgcaagacaagtgaagcggttcgcaccaagtgaaaccgcgcctcactgccaccttcgtttgcgcaccatggagcttgccctggttggcaacccttcgaatggcgtggcgaaaccgtcgtgcaactgcgtctgctcgctgtccgtactcagctgcaacgccgtcatgaacccgacggtgaacaagttgcgcgggaccaaaggaaggtctgaagcttgatgagagcgag

SEQ ID NO: 404751 - DNA, 331 bp, Oryza sativa nipponbare
ccgtccggattccggtcgaccacgcgtccgcccacgcgtccgcccacgcgtccgggcctggtcgcaattgtatccgggctatttgcaaacctgcttgccgacaacttgggctttggtcccgtggcaccatttgatgctgctgcatgcttcctggcaataggcatggctatcataatgtcttcatggagtgaaaactatggagacccatctgaaagcaagggattgatgtcccagttcaaggttgcagccaaaagcaattgcttcagatgaaaaaaattgcattactgggagccatacagtcattggttgaggggctcaatgtatacctttc

SEQ ID NO: 404752 - DNA, 320 bp, Oryza sativa nipponbare
cacacactcccacccaggtaaggagagggaggaggaagggaacctcgaaggcggcggcggcggcggcggagatggtttccgtcaagctgcagaagcggctcgccgccagcgtgctcaagtgcggcaagggcatggtctggctcgaccccaatgaggtcaacgtgatctccatggccaactcccgtcagaacatccgtaagttgttcaaggatggattcatcattaagaagccccagaagattcactccaggtcccgagctcggtgagtccatgaggctaagcagaagggtcgttactctggctctgtgtagcgtagggtt

SEQ ID NO: 404753 - DNA, 476 bp, Oryza sativa nipponbare
  unsure (1)..(476): unsure at all n locations
ctcgatcaaactagtagccagtactcctcgatctccttgggttaatcacctccttcgcttcagactttctcttcagctcccatcccatcatcgtcttgatcgcgatggcaacggtgacccgtgctcacctggagcagaggctcgccctggccaagcgctgctcgcgtgaggcgaacattgcaggggttaaggcggctgccgttgcgaccatcgcctccgccgttccaaccctggcgagcgtgaggatgctgccatgggcgaaggcgaacatcaacccgacggggcaggcgctgatcatctgcacggcggccgggatggcatacttcgtggccgccgacaagaagatcctctcgctggcgaggaggcactccttcgagaacgcaccggagcacctcaagaacacctncttccagggcgccggccgtcctcacccttgcttctcaggccatgaatntctcctaatcaacttgctatag

SEQ ID NO: 404754 - DNA, 327 bp, Oryza sativa nipponbare
cgaagaagaaaaaaaaaaggaggaaaagaaaagaggaggaaagcgaagaggttggagagagacgctcgtctccacgtcgccgccatggccgcccgcgccgccgccgccgcgttcctgctgctgctcatcgtcggcgcggccaccgcggcgccggacatgtcgatcatctcctacaacgcggagcacggtgcgcggtggctggaggaggggcccacggaggccgaggcgcgcgccgcgtacgacctctggctcgccgagaacggcggcggctcgcccaacgcgctcggcggcgagcacgaacgccggtttctcgtgttctgggacaac

SEQ ID NO: 404755 - DNA, 412 bp, Oryza sativa nipponbare
ggaaatcagagaggctagctaagagaatgaaactcatgacatcagtgctcctcacacaaaggaaaaagattggagttggtgagcattttcaggcagaggtacctgactggactgaaccaccttcagatgaacttgctcgttacaaaaatgacccaaacatctcaaagatgctaggaaccagaatttggccacctgaaggtcaagttctacaaactgataaaaaaatagctggccagggaaggatggaatcatgtaactgttcatacccgggatccttcttctgcagacagcattacacagatgcagccagagatcagctaaggtgtgaactcggtagatgcttcacagaatggcgatttgattcaattgggtgaggagtgttctaaaatgttgactcgtgaggagcatctaa

SEQ ID NO: 404756 - DNA, 322 bp, Oryza sativa nipponbare
cccacgcgtccgggcgaggtcaagatcgccgacttcggcgcgggcaaggtcctgcggcggcggctcgacccctgcgcgtcctacgtcgggacggcggcctacatgtccccggagaggttcgacccggaggcctactccggcgactacgacccgtacgccgccgacgtgtggagcctcggggtagcgatccttgagctgtacctcggccacttcccgcttctccccgtggggcagcgccccgactgggcggcgctcatgtgcgccatatgcttcggcgaggcgccggagatgccggccggcgcgtcgggagagttccgggact

SEQ ID NO: 404757 - DNA, 437 bp, Oryza sativa nipponbare
gttggcttctcctccccctcccggttcggttcggttcgggtccggttcgatttcgtttttttttcttcttcgtggggttggtgggaaagcatggcggcgccggatgttgagtaccgctgcttcgtcggcggcctcgcctgggccaccgacgaccgctccctcgaagccgccttctccaccttcggcgagatcctcgagtccaagatcatcaacgatcgggagacggggaggtcgcgcgggttcgggttcgtgacgttctcgagcgagcaggccatgcgcgacgccatcgaggggatgaacggcaaggagctcgacggccgcaacatcaccgtcaacgaggcccagtcgcgccgctccggaggcggatgcggaggcggctacggccagcgcggcggaggcggatgctactgtggcggcggcggctacggtggtggcgg

SEQ ID NO: 404758 - DNA, 380 bp, Oryza sativa nipponbare
gaccggctgcccggagacgatccgcgacccgcgcgggttcgccgtcaagttctacacccgcgagggcaactgggaccttctcgggaacaacttccccgtcttcttcattcgcgacggcatcaagttccccgacgtcatccacagccttaagcccaacccgcgctcccatgtgcaggagtactggagggtcttcgacttcttgtcccaccaccccgagagcctccacaccttcttcttcctcttcgacgacgtcggctgggcaggaggttaatccgggcgttgtggtggcggcggtggtggaggtggaatgggcggagtgcgcgtgctgcgggctgagggaggagtgcacgccgacgtacgcggtgggcgtgcgggcgcgg

SEQ ID NO: 404759 - DNA, 364 bp, Oryza sativa nipponbare
tcgcccacgcgttcgtccacgcgtccgcccacgcgtccgagtttcttctcatttggatggagggggttcagttggcgaggaaggtgtggaagatgcctttgaactacttcatgagatcaatgaacgcatccgaactggcctatgggttggtgattgttttatctacaacaattcttcgtcacggcttaattactgtgtaggaggagaggtcacaaccttatttcacttggatcggcaaatgtatttactgggatatcttgctaaccaaagccgtgtctatcttattgacaagcaatttaatgttgtggggtatactttactccttaccatgattgagtataaaacacttgtaatgcgtggagac

SEQ ID NO: 404760 - DNA, 422 bp, Oryza sativa nipponbare
atcgcgagggccgccctttttttttttttgtccttatctgttacttgtcattttcagggagatagacaaagaagagttcaagaaagtaatggcactgatgcgatcctataacagacaaggagccaaccatagagatggcttacgtactggactaaaagttggtcagcctgtggaaaatggtggagtggttgaatacttctttggtaatgatgggaacgaacctctacactatgacaagtttacaaattttttgaaaggattgcatgacgagatcattcgtctggaattcagtcactatgacgtcaagtcatctaatactatcccagcaaaggatttcgcattatccatggttgcttctgctgacatgaatcacatcaacaagctacttgatagagttgataatttaggcaatgatcctgatc

SEQ ID NO: 404761 - DNA, 387 bp, Oryza sativa nipponbare
cccacgcgtccgccaagtactccaaggcccgttatgatgaaatcgtgaaggaagtctcatcctacctgaagaaggtcggctacaaccctgacaagattccctttgttcccatctctgggtttgagggtgacaacatgattgagaggtccaccaaccttgactggtacaagggccccaccttgcttgaggctcttgaccagatcaacgagcccaagaggccatcagacaagcccctacgtcttccccttcaggacgtgtacaagatcggcggtattggtaccgtgcctgtgggtcgtgttgagactggtgtcctcaagcctggtattgtggtgacctttggtcccagcggtctgaccactgaggtcaaagcggttgagatgcaccacg

SEQ ID NO: 404762 - DNA, 483 bp, Oryza sativa nipponbare
ctcgaattgtactcgattcaccacacagaggaatcaaatcgaagcagccatggctctcgtggagggaaacaacggcgtgtcggggggagcggtcagcttcagcgaggagcaggaggcgcttgtgctcaagtcgtgggccatcatgaagaaggattccgccaacattggactccgcttcttcttgaagatcttcgaggtcgcgccgtcggcgagccagatgttctcgttcctgcgcaactccgacgtgccgctcgagaagaaccccaagctcaagacccacgccatgtccgtcttcgtcatgacatgtgaggccgccgcgcagctgcggaaagccgggaaggtcaccgtgagagacaccaccctgaagaggctcggcgccacgcacttcaagtacggcgtcggagacgcccactttgaagtgacgaggttcgcgctgcttgagacgatcaaagaggcggttccggtggacatgtggagccccgc

SEQ ID NO: 404763 - DNA, 185 bp, Oryza sativa nipponbare
cgcacgctttcttgcataagaactcccccccctcctcgctccccgccgccttctccgtcttcttggagaggagaaatccgggggctcataggatttttggtagtcttgtttcgtgatattcgtgaagaggggtggagctaatgggggattcgtaagatcagaattggatcacgcgggtgctgctc

SEQ ID NO: 404764 - DNA, 442 bp, Oryza sativa nipponbare
cccacgcgtccgcccacgcgtccggtagctcgttatgagacagcaaatttgactgcggcagctgttcctgcacttctattacctccaccgaccacaccattggacgaacatttggttgcggggctccctcctcttgaaccatatgctcgcttgtttcatagatactatgcaattgctactccaagtgctacccaaaggttgctttttggtcttctcgaggcaccaccatcatgggccccagatgcacttgatgcagcagtatagcttgttgaactccttagagcagcggaagattacgattctggcatgcggcttccaaagaactggatgcatcttcatttcctgcgtgctattggaactgcaatgtcaatgagagctggtatcgctgctgatacgtctgctgctttacttttccgaatactctcccaaccgacattacttt

SEQ ID NO: 404765 - DNA, 398 bp, Oryza sativa nipponbare
tgacaacaagctggtcgctgctgatgcaaagttgaactttgatgacaatgctgcctttaggcagaaagagatatttgccatgcgtgacacaacacaggaagatcccagagaggtggctgctgccaaagctgacttgaactacattgggcttgatggagaaattggctgcatggtgaacggtgcaggattggcaatggctacaatggacatcattaagttgcatgggggtacgcctgccaattttcttgatgttggtggaagtgcatcagagggacaggttgtggaagcatttaagattttgacttccgatgatagagtgaaggctattctagtgaacatttttggtggtatcatgaaatgtgatgtgatagcaagtggaatagtgaatgcagcaaaac

SEQ ID NO: 404766 - DNA, 354 bp, Oryza sativa nipponbare
ctcctgcggctcttcttcagtatcgaatcctctcttctcctcgtgcccaccaccaccaccgtagcaatggcgggcaacgggccgatcaacaaggaggacccgctcaactggggcgcggcggcggccgagatggccggcagccacctcgacgaggtgaagcgcatggtggcgcagttccgcgagccgctggtcaagatccagggcgccaccctccgcgtcggccaggtggccgccgtcgcccaggccaaggacgccgccggcgtcgccgtcgagctcgacgaggaggcccgcccccgcgtcaaggccagcagcgagtggatcctcaactgcatcgcccacggcggcgacatctac

SEQ ID NO: 404767 - DNA, 320 bp, Oryza sativa nipponbare
accgaattccattcctcgcgattcctctcccctcgcctcctcgtcctccccctcctaggggatcgccggagaggaatcgcgcggaggaaaaaaaaagaaaagggcttcctcgtcgtctaagttaaaaggaagccatggagcacaaggagactggatgccagcagccagaaggcccgatcctttgcatcaataactgcggcttctttggcagtgcggctaccatgaacatgtgctcaaagtgccacaaggagatgattatgaagcaggagcaggccaagctggcagcctcctctatcgacagcattgtcaatggtggtgat

SEQ ID NO: 404768 - DNA, 395 bp, Oryza sativa nipponbare
agctcgtgaacgagttctacaacaacgggctgacctccaacctggccggcagccgcaacccgagcttggactacgggttcaagggcaccgagatcgccatggcctcctactgctctgagctccagtacctcgccaaccccatcaccaaccatgtccagagcgcggagcagcacaaccaggacgtgaactcgctgggtctcgtctcggccaggaagaccctggaggcggtggacatcctcaagctcatgacctccacctacatcgtcgccctgtgccaggccgtcgaccttcgccacctcgaggagaacatcaagagctccgtcaagaactgcgtcacccaggtggccaagaaggtgctcaccatgaaccccaccggcgacctctccagcgcgcgc

SEQ ID NO: 404769 - DNA, 443 bp, Oryza sativa nipponbare
ctcttctcctcgtgcccaccaccaccaccgtagcaatggcgggcaacgggccgatcaacaaggaggacccgctcaactggggcgcggcggcggccgagatggccggcagccacctcgacgaggtgaagcgcatggtggcgcagttccgcgagccgctggtcaagatccagggcgccaccctccgcgtcggccaggtggccgccgtcgcccaggccaaggacgccgccggcgtcgccgtcgagctcgacgaggaggcccgcccccgcgtcaaggccagcagcgagtggatcctcaactgcatcgcccacggcggcgacatctacggcgtcaccaccggcttcggcggcacctgccaccgccgcaccaaggacgtgcccgtcctccaagtcgagctcctcaggcatctcaacgccggaatcttcggcactggcttcgatggcaca

SEQ ID NO: 404770 - DNA, 431 bp, Oryza sativa nipponbare
cataaatgtgcctattggagcttcatgggtggaagttacaatgcgcacatcagcctttgatactcctaggaggttctttttggacactgttcagatctgtccactgaagcgacctattaaatgggaggctgttgtcactttctcttcaccttctctcaagaatttcagttttcctgtagaaggtggcttaactttggagttgtccatagcccagttctggtctagcggaattgctagccatgaacctacctgtgttgattttgagattgtgtttcatggaatatcccgtgatcagaaaataattggccctgatggtagtgaggcacctgtgcgtgttgttgctagatctctattagcatcagaaaggcttgttcctgttgccactctgaacaaggtcaagaccccttatcgaccagtggagtctaatcttt

SEQ ID NO: 404771 - DNA, 451 bp, Oryza sativa nipponbare
cccacgcgtccgcccacgcgtccgcccacgcgtccgggcacttgtaaattcacttcatagacttgtgggctcactgtcttcatccattgagggtgcaaattctgcagctgtggccattacaactacagaccttgttagcaagagcatcgctgtacagacagagattggaggagtgcctatcaaaataggaggaatggccaaaggttctgggatgattcatccaaatatggcaacaatgcttggtgttttaacaactgacgctcaagtcagcagtgatgtttggagagaaatggtccgaacatcagtgagtagaagcttcaatcaaataacagtggatggtgatacgagtaccaatgactgtgttattgctctggctagtgggttatctggtttatccagtatccttactcatgatagcactgaagcttaacagttccaagcatgcttagat

SEQ ID NO: 404772 - DNA, 422 bp, Oryza sativa nipponbare
ggcggacgcgagcgtcgtcctcttcgtttcgcttctcctcctcctcctccgcctccgctctcgcgagatctcctgatcgactcgctccgccatggctggagaagctgatggaaaagccccactgggatcaagatacccccctgctgctctcaacgagcgcatcctttcttccatgtctcaaaaacatgttgctgctcatccatggcacgatctggagataggtccaggagctccagcagttttcaactgtgtggttgaaattcctagaggcagcaaggttaagtatgagttggataaggcaactggtctaattaaagttgatcgtgttctttactcatctgttgtttacccacacaactatggtttcattccacgcacactttgtgaggacggtgaccccaatgacgtcctcgtcctgatgc

SEQ ID NO: 404773 - DNA, 520 bp, Oryza sativa nipponbare
gccgtattctctcggagcaaagcgaacgcgaaaccccacccgcggcggcgagaaatccggcgacgatgagccgcggcacgggcgccggctacgaccgccacatcaccatcttctccccggagggccgcctctaccaagtcgagtacgcgttcaaggcggtgaagtcggcgggggtgacgtcgatcggcgtccgcggcaaggactccgtctgcgtcgtcacacagaagaaagtgccggacaagttgctggaccatacgagcgtcacgcacttgttcccgatcaccaagtacatcggtctgctcgccactggcctcacagctgatgcaaggtccttagtctaccaagcaaggaatgaggcagctgaattccgtttcaaatggggctacgagatgcccgtagacgtattagcaaaatggatagcagacaaagcacaagtctacacgcagcatgcctacatgaggccccttggagtagtgctatggtcttgggctatgacgaagagaaaaacgctcaactattc

SEQ ID NO: 404774 - DNA, 478 bp, Oryza sativa nipponbare
cgcacgctttcttgcataagaactcccccccctcctcgctccccgccgccgccgtcgttttcttggagaggagaaatccgtaggctcagaggatttttggtagtctcgtttcgtgatattcgtgaagagggggggagctaaggggggattcgtaagatcagaattggatcacgcgggggcgcgctcgggatcgggggttccaaacacagcttcttcgttgaatttaagtggatgtactaatggagtcaaagggtggcaaaaagaagtctagcagtagtcgttccttgatgtatgaagctccccttggctacagcattgaagacgttcgacctgccgtaagcgttaaaaaagttccagtctgcttcttactccaactgcgcgaagaatccatcctgatagccctttcggcttctccatcctagatgcttaagatcttttgcaattccattttgtcacttttcttctgacctatttctct

SEQ ID NO: 404775 - DNA, 471 bp, Oryza sativa nipponbare
gacatctctgcagctgaggaacctgctgtgggctacttccaagcatgacgtgtatctgatgcagaactactctgtcatgcactggtcttccctgctccagagaggaaaggaagtgctcaatgtcgcgggccaactcgctccctctcagaatgtccggggagctatgccgttgtcgcgggtgcagatcagtaccatggcggtgaaaggcaacctcatggtggccggtggtttccagggtgaactcatctgcaagtatgttgataaacctggagtggcgttttgtacgaatctgaccgggaacaacaattccatcacgaatgccgtggacatctaccaggcaccaaatggcggtactcgaattacgaccgcgaacaacgactgcgtagtcagaactttcgacaccgagagattcagcctcattagccactttgcctttccatggtcggtcaataatacgtcggtgagccctga

SEQ ID NO: 404776 - DNA, 238 bp, Oryza sativa nipponbare
gaacaagcaaggcaccaaatccccccaccatggatcaccgcctcctcctcctcggcctcctcctcctctccccggcggtggccgccgcctcagtccccggcgaggaggagccgctgatccggcaggtggtcggcggcggcgacgacaacgagctggagctgaacgcggagcgccacttcgccagcttcgtccagaggttcgggaagtcctaccgtgacgccgacgagcacgcgtaccg

SEQ ID NO: 404777 - DNA, 423 bp, Oryza sativa nipponbare
  unsure (1)..(423): unsure at all n locations
gacagcgtaggggagaggatgtggttcaccctctgaaggtttctctggaggaattgtacaatggcacatcaaagaagctctgcctttctcgcaatgtgctctgctccaagtgcaatggcaagggctcgaaatctggtgcttccatgaagtgctctggttgtcaaggttctggtatgaaggtccaaattcgccagttggggccaggaatgattcagcaaatgcaacatccctgcaatgagtgcaagggaactggtgagaccatcagcgacaaggatagatgcccaggctgcaagggtgagaaggtggcgcangagaagaaggttcttgagggtgtggtcgagaagggcatgcagaatggacagaagatcaccttccctggtgaggctgatgaaacgcccgatactgtcactggagacattatct

SEQ ID NO: 404778 - DNA, 336 bp, Oryza sativa nipponbare
cggacgcgtgggcgtcgacgtcgtatccctctcaggtggccacaccattgtcatgtctcggtgcaccagcttccgtcagaggctctacaatcagagcggcaatggcatggctgactacacactggatgtgtcctacgcggcacatctgatgcagtgatgcccccgttctgttggttacaacaacctctttccgctagactttgtcagtcctgcaaagttcgacatcttctacttcaagaacatcctgtctggcaagggccttcttagctctgatcaggacctgcttaccaagagcgctttaacagtgtcgctcttttatgcttatgctgatgatgt

SEQ ID NO: 404779 - DNA, 476 bp, Oryza sativa nipponbare
cccacgcgtccgcttggatctcgccgcatcatctgccgccgacgacgacgaagaggaagacgaccgccatggggacggcgagcggtgaccagccggcaggggcgtcgtcggacaagctgcggcacgtggagtccatgtcggagctgccctccggcgccggcaggatctccgggatcaacgccgtcgtcctcggcgagttactcgccgccgaggagcacgacctcgtctacccctccgccgagttctccgccgacgccctcgtcccctcccccaagaagtaccaaaagatgtatgagaggtcaatcaacgacccggccgggttctggtcggagatcgccgacgccttctactggaaggagaagtggaaccccagtgaggtctgctccgagaaccttgacgtcaccaaggtgcctgtccagatcagttggttcaaaggtggcaaaacatacatatgttacaatgctgttgatcgcaac

SEQ ID NO: 404780 - DNA, 456 bp, Oryza sativa nipponbare
  unsure (1)..(456): unsure at all n locations
cccacgcgtccgcttaagcctcctcactcgccatgagattattgattttgattcagatggccagatcaggtgttacccacatgtcattggtggtctcaagagccaccgagaccttgaaatcgacccaagttattatcaccagaactatacaatggtagacttccagccgtttgtccagaaagcctatggactgcctgcagctgatgtggacatacgctataagggtgactaagattaccctgtcacgaagcccgcgataatgctgattgacaggggcaaatcctgcagatttgtcaacgtgtcacatgctagacaagggctggattggtttggctttgaagcggtcaaagccgatccaaatatcgatcttaaccttgctgaatctgttcgcctagttgactcctgcgatgcaatcattgncgtacatggtgcgctcttgactaacatggtgtacct

SEQ ID NO: 404781 - DNA, 418 bp, Oryza sativa nipponbare
gctgcctaaggacaccaccatgggtactttcaaagaatactttgggaagtatggggagatagttgatgccgtcataatgaaggaccgctttacccagaaacccagaggatttggatttattacctttgcagatcctgctgttgttgacagagtgattgaggacaaccatgttattaatggaaaggaggttgaaattaagagaactattccaaagggtgctgcccccctaaaagatttcaagacgaagaaaatatttgttggtggattaccatctgctttgaaagaagatgaattcaaggagttcttttcgaaatttggaaaggtggtggaacatgaaatcattcgtgaccattcaactaaccggtcacgaggatttggatttgtagtctttgatgcagaaaaaactgtagatgaatta

SEQ ID NO: 404782 - DNA, 238 bp, Oryza sativa nipponbare
  unsure (1)..(238): unsure at all n locations
atttggttgtcattttcaactataatccaccacaactcgtgcaacatcagctcactcgtgttcccaaccgcgacaaagcttcacagatggaggctcagaaccaagaggtcgctgccctggtcgagaagatcgccggcctccacgccgccatctncaagctgccgtcgctgagcccatccgccgaggtggacgcgctcttcaccgacctcgtcacggcgtgcgtcccggcgaggccccg

SEQ ID NO: 404783 - DNA, 281 bp, Oryza sativa nipponbare
  unsure (1)..(281): unsure at all n locations
cggacgcgtgggctcaccctcccggcgagcagcgagcgggaggccttcgtcaccgtcgtcgtcgtcgtcgtcgtngtcgcccgatggggaagccggggaagctagcgctgccctcgcacgagtcaaccatcggcaaattcctgacgcagagcgggacgttcaaggacggcgatctgctcgtcaacaaggacggcctccgcatcgtctcgcaaagcgaggaaggggaggcccctcctatagaacctttagatcataatcaggtgagtctagatgatctagac

SEQ ID NO: 404784 - DNA, 510 bp, Oryza sativa nipponbare
cccacgcgtccgcgccgccgcaaccaccgccgcctcgccgcagcatcacccgcagccgccgccgccgccgccatggactccgtggcgtcgtgggggctgaccccgctcgccgcggccgacccgctcgtccacgacctcctcgagcgggagaagcggcggcagcggagcggcatcgagctcatcgcctcggagaacttcacctccttcgccgtcatggaggccctcggctccgcgctcaccaacaagtactccgaggggatgcccggggcgcgctactacggcgggaacgacgtcatcgacgagatcgagaacctgtgccgcgaccgcgccctcgccgcgttccgcctcgacgccgcgtcgtggggcgtcaacgtgcagccctactccggctcgccggccaacttcgccgtctacacggcgctcctcaacccgcacgaccgcatcatggggctcgacctccccttcggtggccacctcacccatggctactacaccgcgggcgggaagaag

SEQ ID NO: 404785 - DNA, 503 bp, Oryza sativa nipponbare
ccggcactctacccagtgagatatcatttaacatctcgaggattgagatggagaacaatcgcttctccggtgccctcccgtcgaccgccgtcggtctgaagagtttcacggcggagaacaaccagttctccggtgaactgccagctgacatgtctaggcttgccaacctcaccgagttgaacctcgccggcaaccagttatccggctcgattccgccgtctatcaaatcattgacaagtctgacctccctcaaccttagcagaaaccagatttccggtgagatccctgccgcagtcgggtggatgggcctctacattcttgacctctccgacaacgggctcaccggcgacatacctcaagatttcagcaatctccatctcaactttctcaacctttcttctaaccagctttccggcgaggttccggagacgctgcaaaacggcgcctacgatcgtagctttctcggcaaccatggcctttgtgccacggtgaacacgaacatt

SEQ ID NO: 404786 - DNA, 326 bp, Oryza sativa nipponbare
cccacgcgtccgcccacgcgtccggtttgatccatcacactcacacaacacaaccctccccaaaacctcccgaagagagcaagatgttcggcttcgggcaccacggccaccatggccaagaccagccgccccagcaccacggcggcggcggcggcggcgcgcaccagcccaccttcaagatcttctgccgcgccgacgaggggtactgcgtcgccgtgcgcgaggtgaacgtcgttctctgcccgaccaacccgcgcgacgagcaccagcactggtacaaggacatgcgcttcagcgccaagatcaaggacgaggagggcaacccc

SEQ ID NO: 404787 - DNA, 398 bp, Oryza sativa nipponbare
  unsure (1)..(398): unsure at all n locations
caaacgtggaacccagacgccattgtatttaactcctggcaacaatacggaactcctagttactggatgcagactcttttccgtgaatctagcggtgctatgtttcatccaattacaatcacttccagctactctggttctctggcagcatctgcaattacttggcaggattctgaaaatagcttcttaagagtaaagattataaactntgggtctgatccagtgagcctcacgatctctgcaactgggcttcaggcccgtgttaacgcactgggatcaactgccactgttatcacatccagcaatgtgatggatgagaactctnttagtaaccccgaataaggttgttcctgtcaaaagccagctttccaatgcagcaaagcagatgcaagtcacgc

SEQ ID NO: 404788 - DNA, 405 bp, Oryza sativa nipponbare
gcgggtgccatctcgagcaccgccaccttccctctcgaggtagctcgcaagcaaatgcaggtcggagcggtaggcggcaggcaggtctacaagaatgtcttccatgctctgtattgcataatggagaatgaagggattggcggcctttacaaggggcttgggccgagctgcatcaagctgatgcctgcggctggaatctcattcatgtgctatgaagcttgcaagaagatactggttgaagatgatcaggatagtgagtgaagcatgtgctcttgaaggaagatgagtcccctagttctttttctttcgttgagaaatgcaagttggatgattaacaatcaaaagtttaggactaagatatttgagaaatctggtagaacaaagtttggctttggcttcatgtca

SEQ ID NO: 404789 - DNA, 431 bp, Oryza sativa nipponbare
  unsure (1)..(431): unsure at all n locations
cccacgcgtccgtcctcttccactctctcctctccccttcgtggcggcggcggcggcggcggcggcgtgacgaggaggagcaatggcgatggcctcctccgcctacgccccagcgggcggcgttggcacccactccgcgccgggcaggatcaggccgccgcgcggcctcggcttctccaccaccaccaccaagtcgaggcccctcgtgctcaccaggcgtgggggaggcggcggcaacatctccgtggctcggctgaggtgcgcggcgtcgtcgtcgtcggcggcggcgaggccgatgtcgcagccgcggttcatccagcacaagaaggaggcgttctggttctaccgcttnctctccatcgtctacgaccacgtcatcaacccgggccactggacggaggacatgcgggacgacgccctcgagcccggcg

SEQ ID NO: 404790 - DNA, 348 bp, Oryza sativa nipponbare
cccacgcgtccggttccggcaggtggatttctgcgtgtgaattaagagcttgctaaagttattcatgttggtgtgatgggcctgtgagtgtgggtgcttgggaggagatttcttgggttttttccccgagcaaaatcaatctgctcgtgcccttgagatttcagttccgcccataagaactccaacgcacatttagcattcggagagtaattttgttaggttaaaagtatggtaagttataggtggtatgttatgtttttctttttcttttctcaatgttatctggtacctaagtctgtcaagaaaatcatagtggacaagtcaagtatttggggctggcgtctttgt

SEQ ID NO: 404791 - DNA, 259 bp, Oryza sativa nipponbare
ccacgcgtccgctcacgccgaacccactcccagccgccgccgccgccacctgcaaccgagggctcgccatgccgccgaagctcgacccgacgcaggtggtggatgtgttcgtccgcgtgaccggaggcgaggtgggcgcggcgtcgtcccttgcccccaagatcggccctctcggtctctcccccaagaagatcggtgaggacatcgccaaggagacggcaaggactggagggcctcgcgtaccgtaagctaccgtcag

SEQ ID NO: 404792 - DNA, 416 bp, Oryza sativa nipponbare
  unsure (1)..(416): unsure at all n locations
cacgcgtccgcccacgcgtccgctcctcctcctcctccgccgccgcctccctcctcccccacctccactctccactccaatggcgactcacacgcagatcagcaagaagcgcaagttcgtggcggatggggtgttcttcgcggagctgaacgagatgctgacgcgcgagctcgcggaggacggctactccggcgtcgaggtccgcgtcacccccatgcgcaccgagatcatcatccgcgccacccgcacccagaacgtnctcggcgagaaggggaggaggatccgcgagctgacgtccgtggtgcagaagcggttcaacttcccggagaatggcgtcgagctctacgccgagaaggtgaacaaccgcggcctctgcgccatcgcccaggccgagtcgctccgctacaagctcctcg

SEQ ID NO: 404793 - DNA, 408 bp, Oryza sativa nipponbare
gtcgaccacgcgtccgggatgttcttgttatggtggatcatgaagattaccctgctctattagagtatctgcaaggaaaacaagatgaccagcaattccgcaagatgctagcatggaaagctttccaacatgtcgcttcttatgattcagctgtctcagaatggttgtggaagcaatcgaacaaaggagatgtattccccccgaacttcaccgtgcccctgtccctgaaatctacacttcgttatggtgaaaatcctcatcaaaaagctgccttctatggggacaagagtctttctgtagttaatgctggtggtattgcaacagcaattcagcaccatgggaaggaaatgtcttacaacaactacttagatgcggatgctgcatggaactgtgtatcaaagtttgaga

SEQ ID NO: 404794 - DNA, 520 bp, Oryza sativa nipponbare
  unsure (1)..(520): unsure at all n locations
cccacgcgtccgcaaactggtccacaggggaagattgtgagcaaggtctacttatgtgagaaactgtcacttgttaatgagatgtacttcgccatcacccttgacaggaatactgctggtccgctcattatagcgtgcagcaagggaggaaccagtattgaagatcttgcagagaagtaccctgatatgatcatcaaggttcctattgatgtattcaagggaatcacagatgatgatgcagctaaagttgttgatggtctggcaccaaagacagctgacagacagtcttccatagaacagattaagaagctctatgaactgttctgcaagtctgattgcacactgctcgagattaatcctcttgctgagacagctgacaacaagctggtcgctgctgatgcaaagttgaaccttgatgacaatgctgcctttaggcagaaagagatatttgccatgcgtgacacaacacagggagatcccaagagaggggctgcttncaaagctgacttgaactacattg

SEQ ID NO: 404795 - DNA, 400 bp, Oryza sativa nipponbare
ctcatcccagccgccgccgccgcagcctcctcctctcgccatctcccgtcctctccttcaagtcagctacctgcttaatcaaccatgggtaaggagaagacgcacatcaacattgtggtcattggccacgtcgactctggcaagtcgaccaccacgggccatctgatctacaagcttggaggtatcgacaagcgtgtgattgagaggttcgagaaggaagccgctgagatgaacaagaagtccttcaagtacgcgtgggtgctcgacaagctcaaggccgagcgtgagagaggtatcaccatcgatattgccctgtggaagttcgagaccaccaagtactactgcacggtcatcgatgcccctggtcaccgtgacttcaataagaacatgatcacgggta

SEQ ID NO: 404796 - DNA, 179 bp, Oryza sativa nipponbare
gcgtccagtccgcctatgcttgaagactatcttatgttgtgtcttttaggttcacttaaagtactctcaagttttgagttttgatatggtgttatcgagaatctgtgtctgtgggatgagaacctcaaacctccttggatggtcctattagaatgaaaccgttctacattcttatatct

SEQ ID NO: 404797 - DNA, 273 bp, Oryza sativa nipponbare
aaagagcagcgtcgcctctcctcctcctccctaacccctacgcttccagaaccttctcgaagctcccgctccccccccccttccgctgcaatggcgaaggaaccgatgcgcgtgctcgtcaccggcgccgcaggacaaattggatatgctcttgtccccatgattgctaggggtgtgatgttgggtgctgaccagcctgttattctacacatgcttgacattccaccagctactgaatctcttaatggccttaagatggagctgggtgatgct

SEQ ID NO: 404798 - DNA, 505 bp, Oryza sativa nipponbare
  unsure (1)..(505): unsure at all n locations
cagccacaacatatgggtgctcctggccctccttccatgcctatgaactacttcccgcctttcagcataccagtgatgaacccaactgcaccggcacctgtagtcgaacaagggagacatccttcgatgccacagccttatgggaactttgagcagcagtcgtggatctcatgtaacatgtcacatccaagtggcatttggagatttcatgcctcaagagatagcgaggcacaggccagcagcgctagcagtccttttgacaggttccaatgcagtggaagtggtcctgtatccgccttccccacagtatcagctcagaacaaccagcctcagccctcatatagcagccgggacaaccagaccaatgttatcaaggttgttccacataattcacgaactgcttcagagtcagcagcacggattttccggtcaatacaaatggaacggcaacgagatgattgatagccatgagaactggcaattttatgctgatgcanttgatgac

SEQ ID NO: 404799 - DNA, 488 bp, Oryza sativa nipponbare
tcgaccacgcgtccgcccacgcgtccgcccacgcgtccgtgcagttccttaaagagcagaaggagaacagtgtaatggctggtgtcgtaaaggagatagagagtatgctagctcggggaaatctggatttgccaattacactctgttttgcagtaactagaggagatgattttttgttgcatcaacttcttaagcgtggtatggatccaaatgagtcagataatgacgggcataccgcactgcatatagctgcttccaaaggaaacgagcaatgcgtcaggcttctattagaatatggagctgatccaaatgccagagactcagaaggaaaagttccactgtgggaagcgctgtgtgagaagcacgccgccgtcgtgcaactattagtcgaaggcggcgcggttctgtcgtcgggtgacacgggcttatactcttgcatcgtcgtgtaggagagcgacaccgagctgctcaacgacatcattcactac

SEQ ID NO: 404800 - DNA, 452 bp, Oryza sativa nipponbare
  unsure (1)..(452): unsure at all n locations
cggacgcgtgggagcatgttgaatatgaccagagacctgatatctttaggggtactgttcgttatgctagtgtgcatgcccacttgggaagaactggatgcaggagagatgaccttgaatcccttgcatacacacttattttccttctccgtggccgcctgccttggcaaggattccagggagagaataaaggttttcttgtttgcaagaaaaagatggcaacctctccagaatctttatgtggcattggtccaccaccatttcgtcaatttgttgagtatgttgtgaacttgaagttcgacgaagagccaaactatgcaaagtgcattgctcnttttgatggcattgttggtccaaatccagatggaagaccattaaacaccgatggtgcccagaagcttgtatatcaagttggtcagaaagagaggccgnctcacagcgggctgagatga

SEQ ID NO: 404801 - DNA, 397 bp, Oryza sativa nipponbare
cccacgcgtccgagcccaccgaattccattcctcgcgattcctctcccctcgcctcctcgtcctccccctcctaggggatcgccggagaggaatcgcgcggaggaaaaaaaaagaaaagggcttcctcgtcgtctaagttaaaaggaagccatggagcacaaggagactggatgccagcagccagaaggcccgatcctttgcatcaataactgcggcttctttggcagtgcggctaccatgaacatgtgctcaaagtgccacaaggagatgataatgaagcaggagcaggccaagctggcagcctcctctatcgacagcattgtcaatggtggtgattccgggaaggaaccaattattgctggtcacgctgaaagtagctgtgctcaagtcgaggtg

SEQ ID NO: 404802 - DNA, 512 bp, Oryza sativa nipponbare
ccgcagcaatggcgccgacgtcgaagctgtcgcagggcatcaagcgcgcgtcgcggtcgcacacctaccaccgccgcgggctctgggccatcaaggccaagaacggcggcaccttccccaaggccggcaagcccgccggcgccgccgagcccaagttctaccccgccgacgacgtcaagccccgcgcccccagcacccgcaaggccaaccctaccaagctcaggtcgaccatcacgccggggacggtgctgatcctgctcgccgggaggtacatggggaagcgcgtcgtgttcctcaagcagctcaagtccggcctgctcctcatcaccggaccttttaagatcaatggagtgcccatccgccgtgtgaaccaggcctacgtcattgccacatgcacgaagggtgacatctctggtgttaaggtgggatagtttgatgacaagtactgtgcccgggacaggaaggcaaaggcccaagagcccgagggtgatacttttgagacagagaaggag

SEQ ID NO: 404803 - DNA, 439 bp, Oryza sativa nipponbare
cgcgtccgccacgcgtccggctggattcaagaacaaagtcagataggaaatgcatatggaactgcggtggttatagttatgctagtcacaacatttctgatggtaccaataatgttgctggtgtggaagagtcactggattctagttgtcacctttattgtgctttcgttgatggtggaaatcccctacttctcggcctgcttattgaagattgatcaaggtggttgggtcccacttgtcattgccacagccttcttcatcatcatgtatgtgtggcatttttgcacagtgaagcggtatgaatttgagatgcacagcaaggtctcaatggcctggatccttggcctcggtccgagcctcggtctggtcagggttccaggtataggctttgtgtacacttaacttgcaagcggtgttccgctcatttttttctccttta

SEQ ID NO: 404804 - DNA, 581 bp, Oryza sativa nipponbare
cccacgcgtccgcccacgcgtccggttttgtcctatgcagcctgatggacagatgcccggtgacaagaccgttgggggaggtgatgatgcttttaacaccttcttcagtgagactggtgctgggaagcatgtcccccgtgctgtcttcgtcgatcttgagcctaccgtgattgatgaggtgaggactggtgactaccgccagctcttccaccctgagcagctcatcagtggcaaggaggatgcagccaacaactttgcccgtggtcactacaccattggcaaggagattgttgatctgtgccttgaccgcatcaggaagcttgccgacaactgcactggtctccagggcttccttgtgttcaacgctgttggaggaggaacgggctccggtctcggttcccttctccttgagcgtctctctgtggactatggcaagaagtccaagctcgggttcaccgtgtacccgtcccctcaggtctccacctctgtggttgagccatacaacagtgtcctctccacccactccctccttgagcacaccgatgtcgctgtcctgttcgacaatgaggccatctatgaca

SEQ ID NO: 404805 - DNA, 467 bp, Oryza sativa nipponbare
cccacgcgtccgcaacttttatgcctccgccgccggcggcaacgtttcttgctttccatcctcaagataacaacattatagcaattggaatggatgactcaaccatccaaatctacaatgttcgaattgatgaggtcaaaagcaaacttcgagggcactctaagaaaattactggacttgctttttcaaatgtattaaatgtgttagtctcttctggagctgatgcgcagatatgtgtgtggagcacagatgggtgggataaattaaagagcagaatgttacagataccatcaagtcgtccatcatctataatcttagacacacgtgttcagttccatcaggatcaattgcactttcttgttgtgcatgagacccagattgccatatatgaaactacaaaattagaacccgtgaagcaggggcctgttcgtgagaactccttttcaataacgcatgccatgttcttc

SEQ ID NO: 404806 - DNA, 449 bp, Oryza sativa nipponbare
cggtcgaccacgcgtccgcccacgcgtccgcccacgcgtccgcccacgcgtccggctgagcctctagaagctcacctgacccttacaccagtaaaaaaggatgaacctcccattgaggaaaagaacattaactcatcagatggtggtgcattggaaaaaaaggatgcttcaagatcacacaggaaaaatggttttgcaagaccactcttgaaatgtgcagaagatgttatactaaatggtgatgtcgcaagtacttctgggaaagccattgcaagtttacaggtggaagcttctgatttggcaaacttcctcaccatggaccgaaatgggggttacagaggttctcaaactctcctaagatctgtactgtcagagaagcaggagctatgcttctctgttggctcattgctctggcagaagctcattgcatctcccgaaatgcagatgtc

SEQ ID NO: 404807 - DNA, 321 bp, Oryza sativa nipponbare
gtcggtcgcttcgcttctactggaggagagcagaggtggtggttggtgagagaggatgcgcggcggcggcggcggcggcggcggcggcggcgaggaggccggccagaagctgaagagcatggacgtcgacaagctggagaacggcggcgacaagcccgccctcaagtaccacggctggagggccatgcccttcatcatagggaacgagacgttcgagaagctggggacgctggggacgtcggctaacctgctggtgtacctgacgcaagtgttccacttgcagagcttggacgccgatatgctgtctaatggtcttatcgg

SEQ ID NO: 404808 - DNA, 409 bp, Oryza sativa nipponbare
cccacgcgtccgatgggagctccgggtgcttggatgggaggtgagctacggagcacagttcactcctgatgccgagggtggatacacagtcatcgtgcagaaaacgaggaaggtgcctgcaaatgaggaaccaatcatgaaaggcagcttcaaggttggcgagccaggaaagattgtgctaacgatcaacaaccctgcatcaaagaagaagaagctcctctacagatccaaggtcaagagcaccagtgagtccgtttgaggttgcagctgcctgatcaccagattcaccacaatggcagctgaactcattccctgatggaagagaaaccttttggttttggttctttaatttattggttttgctgctttggttcacattttgtatttgtttaattaaaaaccaaagtga

SEQ ID NO: 404809 - DNA, 328 bp, Oryza sativa nipponbare
cgccgccatcgtcttgcgccctcgtcggccgccgcccacgcgaggaaacgagcatggacacccaggtgaagctggctgttgtggtgaaggtgatggggcgtaccggctccaggggtcaggtgacccaggtgagagtcaagttcttggatgaccagaaccgtctcatcatgaggaacgtcaagggcccggttcgagagggcgacatcctcaccttgctcgagtccgagagggaggccaggaggcttcgctgaaccttcttgcacgaattcagacatgtctgtcgtactggggttgtctgattgtctttgagctctagacctgatgacaa

SEQ ID NO: 404810 - DNA, 458 bp, Oryza sativa nipponbare
gccatacaacagtgtcctctccacccactccctccttgagcacaccgatgtcgctgtcctgctcgacaatgaggccatctatgacatctgccgccgctccctcgacattgagcgcccaacctacaccaacctcaacaggcttgtgtcccaggtcatctcctcactgactgcctccctgaggttcgatggtgctctgaatgtggatgtcaacgagttccaaaccaacctggtgccctacccgaggatccacttcatgctttcctcctacgccccggtgatctcggccgagaaggcctaccacgagcagctctccgtggcggagatcaccaacagcgccttcgagccgttcttcatgatggccaagtgcgacccgcgccacggcaagtacatggcgtgctgcctgatgtaccgcggctacttggtccccaaggacgtgaacgccgtggaggccaccatca

SEQ ID NO: 404811 - DNA, 463 bp, Oryza sativa nipponbare
actgaagttaaccaccatgtggctggcaactctaagactagtgataatgattttggtttggccagtaatcaaaaggttggtgagagcagtcatgttggatcagcaagtgaaaagattgttgctgagaaagggaagtctagcagtgaacctttagattttgacagcctgtatcccctaacacgacttcccaaggaaggagatctgattgtttatcggttggttgaactgtcttcctcttggtgtccagagctttcttcataccgtgttggcaaagttcttatatatgatcccatatctttgaggatcattctcttacctgttcctgagtatccgttcactgctggagaaaagaatggtgaagacgagtcagagatgctggtggacatgtcaccttacaaggaagatggttccttggagatcgagtactcttcgcttcttgatattagactgctcaaggacactg

SEQ ID NO: 404812 - DNA, 540 bp, Oryza sativa nipponbare
agaatacaaaagggcacatttctgggcttaccggtggtgaatggaatcccaagtcaaaagaaaccatactgacgtcatcagaagatggatctattcgtctgtgggatgtatcagactttaaaagtcaaaagcaggtcataaaacctaagcttgcaagaccaatgcgaattccagttacctcatgtgcctgggatcatgaaggcaagcgaattgttggtgggataggcgatggttcaattcagctctggactgtcaagactggatggggaagcaggccagatatacatgttgagaaaacacatacggaggatattacaggggtcaagttctccacagatggacaaatactcctgtcaagatgtatggatagtactctgaagatatgggatttgaggaaaatgaaaactcctttgaaagtttttgaagtattaccaaatcactatgctgagacaaatgtggctatcagcctcgatgagcaacttattttcacaggaacttctattgagaaagtctgtgttaatggaggcttctttgttcttt

SEQ ID NO: 404813 - DNA, 344 bp, Oryza sativa nipponbare
  unsure (1)..(344): unsure at all n locations
cgcctcccaagacgagtcgcggctgaacagaagagggggagtaggcggcgatctccatctggcgactcgcgagcagagcaggggaggggatcctgatctggaagaagctctcctcttaatttcagcgccttaaccttaatacaagtaccagtttgagtttgtttgttcccaagttggatccggccctgggtaatttctttcttgctgaaggtggagagactgagctgagctatggacaacttgtggcatctcggngatgagttccgtgggcagtcgaaggtagtggaggaccgtcagtggtctttcatgacattcgaagttggctgaaatcaacaggtccaagg

SEQ ID NO: 404814 - DNA, 379 bp, Oryza sativa nipponbare
  unsure (1)..(379): unsure at all n locations
ccacgcgtccgcccacgcgtccgcccacgcgtccgataagcggtcagcctgaggtgcctgaaatttagctcttataattaatgtgacggttctgtaaatgtctttattattcgtttgctggggcctctctagttcattggtcagctgtatccccatttctattccttccagtaccatgtccagatactatgtctcggtatagccaagtgcccaagtgcaactggtcaaacttgtatttggaaactggtgaactcgaaaatgtagaatgtttcatcnaataaaaaaaataaaaaaaatattattattaaattataaataattaaaataatatttatattataatataatttattattaataaaaaaatttaatttttatt

SEQ ID NO: 404815 - DNA, 365 bp, Oryza sativa nipponbare
cccacgcgtccgcccacgcgtccggccaaccttttatggatgtttgcttaatagtttgccactctcatttgacgcttctgttctagcccttaaatttggtgatactggctccatctgtgaaggaattctgataagcatcatgctggacatccaacccctgcctatcgtccaaccttttggtcaccaacaattgtgcaaaatgtatagaaacaattactttgaggaggagggtatcgacctgcaaactggcaagaaggaagctgcacttgttggaaatctttgtgcatttcaattctggcagcgtatgtttaaggacaagtatcgtctggattgtctgataaatgtggtgaacactcatgaaccga

SEQ ID NO: 404816 - DNA, 476 bp, Oryza sativa nipponbare
gcgtccgctagatgaacctttgaagggctgcagttcccagtggtgcatcaactggtgtctatgaagctctcgaattgagggacggtggatctgattacttgggaaagggtgtttccaaggctgtcgacaatgtgaactcggttattgccccagctctgattggcaaggaccctacgtcacaggctgagcttgataacttcatggttcagcagcttgatggaaccaaaaatgagtgggggtggtgcaagcagaagcttggtgctaatgcaatcctggctgtgtcactggccatttgcaaagctggagctatcatcaagaagattcctctgtaccagcacattgccaaccttgctggaaacaagcaactggttttgcccgtacctgcattcaacgtcattaacggtggatcacatgctggaaacaagcttgccatgcaggagttcatgatccttcctactggggccgcttcattcaag

SEQ ID NO: 404817 - DNA, 462 bp, Oryza sativa nipponbare
aacccatctcctctcccctctccctcccaattcgatgcagccgcggtagcaattcgcatcgccccgccctcctcgccgcgcggattcgctcgccgcccccgccaccgcacccccatggacgcctccgccggatccggcaatgcctccggtggcgccggcgccggcgcgtccgcgtgctgctactactccctgctcggcatccggaagaacgcgtccgccaccgacgtgcgcgccgcctaccggaggctcgccatgaagtggcacccggaccggtgcgtgagcgaccccggcgaggccaatcggcggttccagcggatccaagaggcgtactccgttctgtccgacaaggggaagcgagccatgtacgacgccgggctggtcgaacccctcgacgacgaccaaccaggattcttcgatttcatgcaagagaagctggtgatgatggataaccgggaaaacgag

SEQ ID NO: 404818 - DNA, 477 bp, Oryza sativa nipponbare
caccaatcatcagcaaatcagcagcttccatctcctccccaaagccatcgtcttcgtctccaccctccccgggccatccccctccgtgccgccatcgccgcgcgctcgaagctcgcctcgcctcgctacaggcgcggtacaggcgcgcccagcttccggcgaggcgccggggcggctcggataatcccctcagttgaaccagcaagtgacagacctaatggacatggaaggtgtgaagttcctgtttttgttggcctgcaactgctggggctttgagcaattggagtgataatgttgggtcctcaaattatttggaaagggctatagtacttgatgaaatgatgaagtcaacggtattttctgcgggtgctggttctattggttatacattacttggatgggattttacaaccgtttcggaggctaatatccacatgaagaaagaatttggcttgaacaacggaccttctattgatg

SEQ ID NO: 404819 - DNA, 376 bp, Oryza sativa nipponbare
  unsure (1)..(376): unsure at all n locations
gttcctaacaggcatctgtcatcgaagctcttccatgacaaggagagcatgtacccactgctcaacttccttcgtgcacacaactacaagggcatgaccatgatgttgaatgacagaatccgcagtctcagtgctctccaaggtgctctgaggaaggctgaggagcatctttctggtctttcagcagacaccccttactcagaattccaccacaggttccaggaacttggtctggagaagggttggggtgactgtgccaagcgttcccaggagaccattcacctccttttggaccttctngaggcccctgatccgtccaccctcgagaagttccttggaacaatcccaatggtgttcaatgttggcaatatgtccc

SEQ ID NO: 404820 - DNA, 100 bp, Oryza sativa nipponbare
ggttggcttctcctccccctctttaccttttcctcctcggttcggttccgtggttcgactaggtttagtgggttgagatggcgggccgatgtcagtaccg

SEQ ID NO: 404821 - DNA, 369 bp, Oryza sativa nipponbare
cccacgcgtccgctctcctcatcccagagcaagaagctcagctcctcctcctctcgcatggcagccatggccaccaccgcgtccagcctcctcaagacctccttcgctggcgcgcgcctccccgccgccgcccgcaaccccaccgtctccgtcgcgccgcgcaccggcggcgccatctgcaactccatctcgtcgtcgtcgtccactcccccctacgacctcaacgccatcaggttcagccccatcaaggagtccatcgtgtctcgcgagatgacccggcggtacatgaccgacatgatcacctacgccgacaccgacgtcgtcgtcgtcggcgccggctccgcggggctctcctgcgcgtacgagctc

SEQ ID NO: 404822 - DNA, 449 bp, Oryza sativa nipponbare
cccacgcgtccgctcgcgaaaaccctaaccctcctcctcctccgccgccgccgctctcccaagatccctcccgtcgtcgtcgctgtcggcccctcgggtctttctagcgcaggagacatggcggaagagactccagttgaggccccacctgccccggttcttggagagccgatggacctgatgactgctctgcagcttgtgatgaagaagtcaagcgctcatgatgggctcgtgaaggggctccgtgaggcggccaaggccattgagaagcatgccgctcagctttgcgtgcttgctgaggactgtgaccagcctgattatgtcaagttggtcaaggcactctgcgctgagcacaatgttcacctcgttaccgtgcctagtgctaaaactcttggcgagtgggcagggctttgcaagattgattctgagggcaaggcgaggaaggtcgt

SEQ ID NO: 404823 - DNA, 304 bp, Oryza sativa nipponbare
ggacaggtccttgtatgtgctccaagtaatgtagccgttgatcagttggcagagaagataagctctactggtctcaaggttgtcaggctatgtgcaaaatctagggaagctgtttcatctcctgttgagcatttgacacttcattatcaggttcggcaccttgatacatctgaaaagagtgaattgcataagctacagcaactcaaagatgaacaaggtgaattgtcaagcagtgatgagaaaaagtacaaggcattaaaacgagctactgagagagagatattacaaagtgctgatgtgattt

SEQ ID NO: 404824 - DNA, 362 bp, Oryza sativa nipponbare
ccacgcgtccgacacgcgtccgggcctggtcgcaattgtatccgggctatttgcaaacctgcttgccgacaacttgggctttggacccgtggcaccatttgatgctgctgcatgcttcctggcaataggcatggctatcataatgtcttcatggagtgaaaactatggagacccatctgaaagcaaggatttgatgtcccatttcaaggttgcagccaaagcaattgcttcagatgaaaaaattgcattactgggagccatacagccattgtttgagggctcaatgtatactttcgtcttcctctggactccggcgttgagcccaaatgaaaaagatatttctcatggcttcatatttgcca

SEQ ID NO: 404825 - DNA, 313 bp, Oryza sativa nipponbare
  unsure (1)..(313): unsure at all n locations
cccacgcgtccgcccacgcgtccgcccacgcgtccgataattgggggtggagcagaatccgccattgctgccgctcgctctgcttcttcttcttcttcctcctccaactcctcctccgttgggacggcgacgagttgagtttgattctttgattgatttctcttctgattttcctcggtaggtgaggtcttcgaaatggtcgccatgatgtgttggtgctcatcttcctccttgattctaacgcctgcgtttcttggcgtgaagcgaanggggaggatgtggcgctctgccttctgcgattgaagctcgattc

SEQ ID NO: 404826 - DNA, 435 bp, Oryza sativa nipponbare
cccgtgcggccgcgcctgatcctcttctgcggtgccaccgagctcgaggagaactgctacacgccgccatcctcggtcgggagcgccggaatccgtcttgctggtgctactgccgatgtgcactgctacgatgtttcataaaataagcggagcaggcttactacagttggagaacctccttaaccaagagcggcacatgtagcgactgctgatggcaccatggtggtcattcagggtgggataggtcctgctggtttatctgcagaagaccttcatgttctggatcttacacaacaacgaccgcgatggcacaaagtggtggttcaagggcctggccctggtccttgatatggacatgtgatggctttggttgggcagcgtttcttgtgacaatcggtggaaatgatgggaagaggcccctggctgatgtgtggg

SEQ ID NO: 404827 - DNA, 504 bp, Oryza sativa nipponbare
gtacttatgtactttttaagggggagtcttccttggcagggtctgaaagcaggaacaaagaaacaaaagtatgagaaaatcagtgagaaaaaagttgcaacatcaattgaggctctatgccgaggctatcctactgagtttgcatcatatttccactattgccgctcactgcggtttgatgacaagcctgattattcctaccttaagcgacttttccgtgacctttttatccgggaaggttttcagtttgactatgtgtttgactggacaatactgaagtaccagcaatctcaaattgctagtgctccaccccgtgcagtgggccatggtgcaggaccttctgggttagcaccaccagcattgcaaaacgacaggcagtcaggtgttgatgaaggaaggactagtggttggtcatcaatggatcggcgccgtgccccaccccctattgcaagtgttgggactttggctaaacaaaaggcacctgtgggaaatgatgcttctttt

SEQ ID NO: 404828 - DNA, 411 bp, Oryza sativa nipponbare
cacgcgtccgcacaggccatggggttggatcttatttgactgttcatgaaggtcctcatcaaattagcttcagaccttctgctagaaatgtaccactacaagcatcgatgactgtaacagatgaacctggttactatcaagatggaagctttggtataaggttggagaatgttctgatagttcaagatgccaatactaaatttaattttggagataagggttatttggcatttgaacatataacatgggctccgtaccagacaaagctgattgacgccactttgctggcccctgccgagattgaatgggtaaacacgtatcactcagattgccgaaggattttgcagccttacctgaatgagcaggagaaggaatggctgaagaaagctactgagcctattactgtgagct

SEQ ID NO: 404829 - DNA, 246 bp, Oryza sativa nipponbare
  unsure (1)..(246): unsure at all n locations
acgcgtccgcggacgcgtgggcggacgcgtgggttctcctccggctcttcttcagtatcgaatcctctcttctcctcgtgcccaccaccaccaccgtagcaatggcgggcaacgggccgatcaacaaggaggacccgctcaactggggcgcggcggcggccgagatggccggcagccacctcgacgaggtgaagcgcatggtgcngcagttccgcgagccgctggtcaagatccagggcgccaccc

SEQ ID NO: 404830 - DNA, 246 bp, Oryza sativa nipponbare
  unsure (1)..(246): unsure at all n locations
cccacgcgtgcggggacgcgtgggcgacttctgtggaaagctcaatggcattcagctgtgctatgctggtggatttgggtaccatgcgtatgggaaggccgggtggtcgaggagagcgagggtggtgtccgtgcagcttgagaagtcggacggcggcgagtggcgaggtgtgaagtccatcaagacatggaagaggctngatgatccacatcttaccacaattgactcagaagtcctctggaacag

SEQ ID NO: 404831 - DNA, 248 bp, Oryza sativa nipponbare
ctcacgcgtgcgaccacgcgtacgctggcatatgagaaatgctaaattgctgcacgatttttctactcggatgctgaacaaagagaaaagatggatgctgcagaaaggcgccaagttgatgagcgtgtgaagaggattattgaatagaataataatgtttgtgctggcaatgataaagattttgtggcgatcatatctagaggtatagaccgtgcatgcctcgatcttctagctagagcagggattat

SEQ ID NO: 404832 - DNA, 451 bp, Oryza sativa nipponbare
aaccagtctcccccaaatctcctttgcgtcctctcgattcctcagcgaccatgtcggcctactgcggcaagtacaaggacgagctcatcaagaatgctgcctacattggcactcctggcaagggtatccttgctgcagatgagtccactggcaccattggcaagcgctttgccagcatcaatgtcgagaacgttgaggagaaccgccgctctctccgcgagctgctcttcaccacccctggtgccctccagcacctaagtggtgtgatcctcttcgaggagaccctgtaccagaagaccaaggacggcaagcccttcgtcgatgtcctcaaggaagggggtgtcctccctggcatcaaggttgacaagggtaccgttgaggttgccggcaccaacaaagagaccaccacccagggccacgatgatcttggcaagcgttgcgccaagtacta

SEQ ID NO: 404833 - DNA, 236 bp, Oryza sativa nipponbare
  unsure (1)..(236): unsure at all n locations
acgcccacgcgtccgcccacgcgtncgcggacgcgtgggcaccaggatccaacattttagcagccgtgaaagacggatacaaacttgagtcaggaacatcaatggcaacgccacatgttgcaggcattgttgcgcttgtgaaagctctccatccagactggtctccagctgcaataaaatcggcagttgttactactgcgtctgtaactgatgaacgaggcatgccaatactggca

SEQ ID NO: 404834 - DNA, 520 bp, Oryza sativa nipponbare
cggacgcgtgggtgactttggcttccccactctctcttcttcttgggaggctgggagctaccagcacaacacaccaaggaagctgaggtgcgttgatttcttgatatcatggccaagaggcacctcttgttggtgacaacttgtttgtgggctctgtcatgtgccttgctgcttcatgcttcctctgatgggttcctgagagtcaacctcaacaagaagagattggacaaggaagatctcactgccgccaagttggcgcagcagggcaaccgtcttctgaagaccggcagttcagacagtgatcctgtccctctggtggactacctcaacacccagtactatggggtgattggcctcggctcaccgccgcagaacttcacggtgatatttgacactggaagctccaacctgtgggttccttcagcaaaatgctatttttcgatagcatgctacctccacagcagatacaactcgaaaaagtcgagctcttaccaagcagatggagaaacttgcaaaatta

SEQ ID NO: 404835 - DNA, 444 bp, Oryza sativa nipponbare
cccacgcgtccgcccacgcgtccgctcaggttctccctcctctctccgcccccccgcaacttcctgaaattgcatctaggtccccctgacgcagcgattgttccctcccttggagaggtggccgtagctctccggcggaaggcggcggagatggcttccacggccgcggcggcgtcgtcgcaggggtgcatctcgtgggcgctgcggcagcgtgggcttggtggtggtggtgcgcggactgtcccggtgcttccccgccggagattctgcgtctccgcggcggcgggtgcggggttcgacaacgagaatcgcgagtatgtgatcgtgggtggaggcaacgcggccggttacgcggcgaggacgttcgtcgagcacggcatggctgatggccgcctttgcatcgtctccaaggaggcgtatccgccatatgagcgaccagcactg

SEQ ID NO: 404836 - DNA, 248 bp, Oryza sativa nipponbare
cccccacgacgccggtgacgccgtcgtttttttttcggcggcgaacggtaccaccacgccgcggggcaacaacgtgtggaggagcgtgttccacccggggagcaacctcgccaccaagagcctcggcgccaacctcttcgaccgcccgcagcccaactcccccaccgtctacgactggctgtacagcgacgagaccaggagcagccatcgctgaactaaataatcccattgatcagagggctgtcgat

SEQ ID NO: 404837 - DNA, 455 bp, Oryza sativa nipponbare
aagtttagctgcagctacttccttgtactcgcgtgtgtcggctagaccacccggatacttgtattcagaaccccattttggttggtgttaagtttcatcatttgacaagtgccgtgagctgtttccttgtcaacttgttcttgcttgttcttcgattgcttgcaggttcaaggttgttcttggcacggcaagaacagcaacaacgtggagtcggtgtaccggttgctaaggcgcagcacccctgtggtagttgtagtcggaccgccaacgtcgtatccttccccaaatcgaagtttatcctcctctcatcgaaagatcgggaacccccgttgctgcatcaagtggtatcagagctcaagttgctcggtgagagattttatcacttctttgtttttacctacagcccaaaagaaaaaccactaaaataggtcagacccgaaatcaccaaaacatgt

SEQ ID NO: 404838 - DNA, 471 bp, Oryza sativa nipponbare
ggagggcattcccccggaccagcagcgtctcatctttgccggcaagcagcttgaggacggcaggacccttgctgactacaacatgcagaaggagtcaacgcttcaccttgtcctccgtctcaggggaggcatgcaaatcttcgtgaagactctgaccggcaagaccatcaccctcgaggtggagtcttctgataccatcgacaatgtcaaggccaagatccaggacaaggagggcattcccccggaccagcagcgcctcatctttgctggcaagcagctggaggatggcaggacccttgctgactacaacatccagaaggagtccaccctccaccttgtgctccgccttcgtggtggtatgcagatctttgtcaagaccctcacaggcaagaccatcaccctggaggttgagagctcggacaccatcgacaacgtcaaggccaagatccaagacaaggagggcatcccccc

SEQ ID NO: 404839 - DNA, 216 bp, Oryza sativa nipponbare
  unsure (1)..(216): unsure at all n locations
cggacgcgtgggcggacgcgtgggcggacgcgtgggcggacgcgtgggtttttttttatctgtcaggttgatgtcaacggtaacaatgctgcacccctgtacaagtatctgaagtctaacaaaggtgggcttttcggtgatagcatcaagtggaacttctccaaattcttggttgacaaggaggggtcggtggggattcnntntgcgcncaccacc

SEQ ID NO: 404840 - DNA, 407 bp, Oryza sativa nipponbare
gttgactgtgacacttcatataacgagggatgcaatggaggtctgatggactatgcatttgatttcatcatcaacaatggtgggatcgacaccgaggatgactacccttacaaaggcaaggacgaacggtgtgacgtaaacaggaaaaacgcaaaggttgtcacaattgacagctacgaagatgtaacaccaaacagtgagacgagtctgcagaaggcggtagcaaaccagcccgtcagtgttgcaattgaagccggtggcagagcattccagctctactcatcgggtatcttcacgggtaaatgtggaacagcactagaccacggcgtcgctgctggtgggtacggcacagagaatggcaaggactactggatcgtgaggaactcgtggggcaagagctggggtga

SEQ ID NO: 404841 - DNA, 444 bp, Oryza sativa nipponbare
  unsure (1)..(444): unsure at all n locations
cccacgcgtccgcgccgcgccttctcctcctccttcctctcctccccattccgccgcccgccactccaccccgcccgctccttcgttccggcccgcgccgccatggcatnctccgccgcgccgttccacatggtccagatccagcgcgacgacacgacttttgatgcctatgttgttggaaaagagaatgctcctggaattgttgttttgcaagagtggtggggggttgactatgagatcaagaatcatgctgtccacatttcccaaattggtgaaggatacagagctctcattccagatttgtatcgtggtaaggttgctcttgatgtagcggaagctcagcatctgatggaaggtctagactggccgggtgcggtcaaggatattcaggctttagttaaatggctcaaagcaaaatggatcacccaagggttgtggtactgg

SEQ ID NO: 404842 - DNA, 406 bp, Oryza sativa nipponbare
cccagagtggctcagctttgtcaagggcattgttgattctgaagaccttcccctcaacatctcacgtgagatgctccagcagaacaagatcctgaaggtgatccgcaagaaccttgtgaagaagtgcgtggagctcttctttgagatcgctgagaacaaggaagactacaacaagttctacgaggccttctccaagaatctcaagcttggcatccatgaggactccaccaacaggaccaagattgctgagctcctgaggtatcactccaccaagagtggtgatgagttgaccagcctcaaggactacgtaacccggatgaaggagggccagagtgagatctattacatcactggtgagagcaagaaagctgttgagaactcccccttccttgagaagctgaagaag

SEQ ID NO: 404843 - DNA, 487 bp, Oryza sativa nipponbare
cggacgcgtgggcgcgaatccacgccgccgccgcctcttgacctagcgccgccgccgctgccgctgccccttctcgccgccggcttcttgttcttcttccttgtgtagcgcgtgcgcctctcctctcctctcgtcggcgagtgatatggcgggacgtgggaaaggcaatcggcccgggggccgcaaagaaggcgacgtcgaggagctccaaggccgggctgcagttccccgttggcaggatcgcgaggttcctcaaggccgggaagtacgccgagcgcgtcggcgccggggcccccgtatacctgggcgccgtcctcgagtacctcgccgctgaggtgctcgagctcgccgggaacgcggcgagggacaacaagaagacccgtatcgtgccgcgccacatcacagtttgggtgcgcaacgacggagagttgaccaagctgctcggcggcgccaccatcgccagggggcgggtgatgcccaacatcca

SEQ ID NO: 404844 - DNA, 507 bp, Oryza sativa nipponbare
  unsure (1)..(507): unsure at all n locations
cggacgcgtgggcaagtatatcctctcttcttcttcttcctcctcacaactcacaatatttcagagtagtatacctttcttgctagctagctagcttgttcatcgatcttgttttgaggtgttgagatagctaggatggtggttaagaaggcggcgacgatggcggaggcggaagcggaggaggagatgatgatgaggatgatgtgtggttcaggaggcaacgagatgatgaagacgaagatgaagaagaagaatagagaaggggaagaagaagaagaagtaagtggaggaggtaggatgaggaaggggccatggacggagcaggaggacgtncaactggtatggttcgtgcgcttgttcggggaacgtcggtgggatttcttagcataggtctcaggtttgcgcggtggcgggtgacctagctacatgcactggattgcctcctttcttcttataaataatcccttcccatcaaacatccattccatcatcgactgcctctttttc

SEQ ID NO: 404845 - DNA, 473 bp, Oryza sativa nipponbare
gaaaaatttctccccaatctcgcgaggctctcgtcgtcgaatcgaatcctctcgcgtcctcaagatgcagatctttgtgaagacattgaccggcaagactatcaccctcgaggtggagtcctctgacaccatcgataatgtcaaggctaagatccaagataaggagggcatccccccggaccagcagcgtctcatcttcgctggcaagcagctggaggatggcaggacccttgctgactacaacatccagaaggagtcgacccttcaccttgtcctccgcctccgtggtggcatgcagatctttgtcaagactctgaccggcaagactatcacccttgaggtggagtcttctgacaccatcgacaacgtcaaggccaagatccaagacaaagagggcattcccccagaccagcagcgtctcatcttcgccggcaagcagctggaggatggcaggacccttgctgactacaaca

SEQ ID NO: 404846 - DNA, 381 bp, Oryza sativa nipponbare
cgcccatttctcctctccacctgcgatccatccgcgcccgcgaggaggagggagccggacgccgccgcggggagagcaggggagagaaggagaggaggagatcgccgtcgccgtcgccgtcgccgtcgccgatctcgagcgggagcggagatggggctcacgttcacgaagctgttcagccgcctcttcgccaagaaggagatgaggatcctcatggtcggtctcgatgcggccggtaaaaccaccatcctctacaagctcaagctcggcgagatcgtcaccactatccccaccatcggttttaatgtcgaaactgttgagtacaagaacattagcttcaccgtttgggatgttggtggtcaggacaagatcaggcccctg

SEQ ID NO: 404847 - DNA, 349 bp, Oryza sativa nipponbare
cggacgcgtgggcggacgcgtgggcggacgcgtggggttgaattgagctcgaattgtactcgattcaccacacagaggaatcaaagcgaagcagccatggctctcgtggagggaaacaacggcgtgtcggggggagcggtcagcttcagcgaggagcaggaggcgcttgtgctcaagtcgtgggccatcatgaagaaggattccgccaacattggactccgcttcttcttgaagatcttcgaggtcgcgccgtcggcgagccagatgttctcgttcctgcgcaactccgacgtgccgctcgagaagaaccccaagctcaagacccacgccatgtccggcttcgtcatga

SEQ ID NO: 404848 - DNA, 292 bp, Oryza sativa nipponbare
cgtggcttctcctccccctctttaccttttcctcctcggttcggttccgtggttcgtctagggtttagtgggttgagatggcggcgccggatgtcgagtaccgctgcttcgtcggcaaactattctgtgacaccgactaccgcatacttgaaggcaagttctttatctactgcgatctacacagactaaggaaagcatgcatcaagaaaacattgctgatccattgtcttcaggaacttatgtaattacatcatgagagtgaggaagatgttactgatactgagcaggctta

SEQ ID NO: 404849 - DNA, 442 bp, Oryza sativa nipponbare
cccacgcgtccgcccacgcgtccgggatgatactgtggctgaggacctgctcgaccgtgtgcttacgctgactggtatacagtggcgccgctcgcgacattgaagttgagcatgatcttattccagcccacgtgcaagcgcacgttctagcaggcgcagacgctcggcatcccgctctccaccctcgacgaccacccccgcatcgacctcgccatcgacggcgccgacgaggtcgatccagaccttaaccttgtgaaagggagaggtggtgcccttctccgggagaagatggttgaggcagcatcagacaagttcatcgttgttgttgacgagacaaagctagttaccggcttaaggaaggagtggtctagccatgccttgtggaggttaggcagttcttctggaagtacaaccaagtgagattgcaggatctgtttaacga

SEQ ID NO: 404850 - DNA, 376 bp, Oryza sativa nipponbare
ttcttgaaccagatcctttttatttcgatcactacaggtgcaaaatgcatgatctcttgaggtatcttgctcaacatttatcaagagaagagtgctattttgatcaactacctttagagcctactacttggtctaaactgagacgtatttcgattgtcaacaaaacagatatgttatcaagtgtggttgaaaaaggtcactgcagagtaaggactttgatgttttgcatgtcaccaaacatagatagtgatgtcttcatgaggtttccacatcttcgagttttggacttgactggctcaattgtacaaagaattccagatagcatcaacagcttgatccatctacgtttgcttgatcttgatgctaccgatatatc

SEQ ID NO: 404851 - DNA, 456 bp, Oryza sativa nipponbare
cccacgcgtccgtgaagatcttcaggatgctgatgagacaggaaatctggaggagtgggttttgctaacaaggattgctaaacctgatcagttgggtatacgcatccctgaaagaccaatggtgcggccatatcatgtacatagcaaggatccatgctctttcgatgctggttccattggtgatgcatgggggaatagtgggtggtgggaggggattgtattgcagcagggaaatgacagaccccttcaagtttattttcctggagaaaagcaaattgctgatttttgtgaagatgatttgaggcattcacgtgagtgggctggtggcaaatggaattccttgggggaaagaaaagatatcacacacctgttgccccccaacttagttcatgaagaaggggagttgcttaacaaacctgtttcacaagaaggcaatcccttcttaaaattagaatc

SEQ ID NO: 404852 - DNA, 384 bp, Oryza sativa nipponbare
  unsure (1)..(384): unsure at all n locations
cccacgcgtccgtccacatttctcctcggaaagtcaaaggcaagaaacaccatggatgccactgccatcggcaacggcgccctgcactccaatggcgccggcgccgacaccaaagggaagccgatcaaatgcaaagcggcggtggcgcacggccccggcgaggcgctggtgatgggaggaggtgaggggcnncccccngcgaggatggaggtgcgcctcaaggtgctcttcacctctatctgccataccgacctcagcgcctggaaaggagagaacgagcttcagcgaaagtttcctcgcatattgggtcatgaaggcaacagggtggtggaaagcgtgggaaaagggtgttagagacttgccccttgagatcatgttgtcccc

SEQ ID NO: 404853 - DNA, 318 bp, Oryza sativa nipponbare
ccgcacgcgtccgtaaagatcattctagtgttgctgatcatatgctctatgacatttaacaagtgaaaagatcttcttccacagaggcgcgatgatactaattcacactactaagtataacatgtcaagaacaaaaagatgatgacgagagcactatgaatgacgctgaggctgcagtatccattgctcatgccaagctgcttgttgagagtgctgttcgagcatctgatattgtaataattacaccttatgctgcacatgtaaccagtctaaagatgattagaaacaaagatacttatctgaacgacttgtatatat

SEQ ID NO: 404854 - DNA, 393 bp, Oryza sativa nipponbare
cccacgcgtccgcgttacttatgcttcctaggtttcttgaattggggactactttggagcctgggaagccagtaaaatctgacaaagctgctatcctaagtgatgccactcgcatggtaattcaacttcgtgctgaagcgaagcagctaaaggatactaacgagagtcttgaagataagattaaagaactgaaggcagagaaggacgagcttcgtgatgagaagcagaagctgaaagtagagaaggagacattagagcagcaggtgaagattctgactgcaactccagcctacatgcctcaccccacattgatgccagcaccgtacccacaagcaccacttgcccccttccaccatgcccaggggcaagccgcggggcaagaagctgatgatg

SEQ ID NO: 404855 - DNA, 417 bp, Oryza sativa nipponbare
agatagacaaaggttatatctctccacatttcatcacaaatcaagacaaagcaattgttgaatttgaaaatgctagggtacttttaactgatcagcgggtggatgatgtccaagagatacttcctttgctagagaagaccacacagttgagtgtccctttgttgattattgcggaggatgtttcacatacggtgtattcaactcttgttcttaacaaactgaatggactgctaaatgttgctgttgttaaatgtcctggtttgggagatgaaaagaaggctattctccaagatattgctattatgacaggtgcagatttctttgctagtgaccttggctggtgtcttcaaggtgctacttctgatcagctaggtatggctcagaagatcactataacaagtgatactactactatca

SEQ ID NO: 404856 - DNA, 441 bp, Oryza sativa nipponbare
cccacgcgtccgcaaagctcattctagtgttgctgatcatatgctctatgacattgaagaagtgaaaagatcttcttccacagagccgactatcatactaattgacactactgggtgtgacatggaagaagtaaaagatgaggaggagagcactatgaatgagggtgaggctgcagtatccattgctcatgccaagctgcttgttgagagtggtgtccgtgcatctgatattggaataattacaccttatgctgcacaggtaacctgtctgaagatgatgagaaacaaagatactaaactgaaggacttggagatatcgacagttgatgggttccagggtagggagaaagaagccatcatcatttcaatggtcagatccaactcaaagaaaagaggcggattcttaaaggatcatagacgaattgaaggtgctgaacacga

SEQ ID NO: 404857 - DNA, 478 bp, Oryza sativa nipponbare
cattgaagaggttcaagcggcctacgaacaccataagcatgataccctggattctccaaaagcaagcaaattcactggtgtggagatgacagaggaacaagctgtagctgagcaacagaggatgtttgctgaggcccgagcaaggatgaacaatggtgccgccaaaccgaaggagccagaacctgaagcgcagcaacaaacacaacagccaccacagcctcagctgcaccctcaaccacagcaacccctgcagcctcaacttcagctccatcctcaaccacaacaacagccctcacagctacatcctcaacagctgctgcatcctcaatcgcagcaaactccgcagcctcaacctcaggtccaccctcaaccacagcagcctgcacagctgcaaccgcaacctcagcttctccagcaaccgcagcttgcccaacagctgcagccgcaatctcagctcccccacaaccgaagcagcccc

SEQ ID NO: 404858 - DNA, 442 bp, Oryza sativa nipponbare
cccacgcgtccgcccacgcgtccgggatttccccattgtatcaattgaggaccctttcgatcaagatgactggagctcatgggcatcattgcagtcttcagttaatatccaaattgtgggggatgatttactcgtcacgaacccaaaacgtattgcagaggctattggcaagaaggcttgcaatgctcttttgctgaaggttaatcaaattggcactgtcactgaatcaattcaagctgctcttgattcaaaagctgctggttggggcgtgatggtcagccacaggagtggggaaacggaagataatttcatcgcagatctggctgttggtttagcaagtggtcagatcaaaactggtgctccatgccgtagcgagagactggcaaagtacaatcagcttctgcggatcgaaatggagctaggcaatgtgcgctatgcttgg

SEQ ID NO: 404859 - DNA, 254 bp, Oryza sativa nipponbare
cccacgcgtccgagcaacacaagccaaccacaaagaattctcatttccggtaacttttctcaagcctttttggcgctctgagaatcatcacacggaagtcaagcctttgttgttgtcgtgattagtttagtttagtcaccgagatgagctcccgaatggccggagcgacgctgctgcgccacctgggcccccgcctgttcgccgccgagcctgtgtactccgggctcgccgcgagcgccaggggcgtcatgccc

SEQ ID NO: 404860 - DNA, 449 bp, Oryza sativa nipponbare
cttaattgtaaaaacctctgatggaacttctctggagtcacaactagttgaagttgatatcgtgacagcacgtttaaggaagttatacataaaggcttatcttggaatcacgtccgataaacccccaaagtattggctagtttttcaagcttctgtaccaccactcggctggaacacctacttcatatcaaaatctactggaacaggatctaatggaatggggtatgtctcaaccatggtttctccaagtaatgacacaatagaaattggaccagggcctctgaagatgtcctattcatcaaaatctggacaactcaagagaatgttcaattctatctctgcagtggatttgccaattcaacaaagctttctttggtatgcttcaagcaccgggagattctgaagattcacaggcatccggagcatatattttcagaccaaataggact

SEQ ID NO: 404861 - DNA, 420 bp, Oryza sativa nipponbare
gttccttggaactattccaatgatgttcaatgttgttatcctgtctccgcatggatactttgcccaatccaatgtgttgggataccctgatactggtggtcaggttgtgtacattttggaccaagtccgcgctttggagaatgagatgcttttgaggatcaagcagcaaggccttgatatcacacctaagatcctcattgtatgttcaagatgtaaccaggctgttgcctgatgctgttggtactacatgcggccagcgtgtggagaaggttattggaactgagcacactgacattcttcgtgttccattcaggagtgagaatggtatcctccgcaagtggatctcccgttttgatgtctggccattcctggaaacatacactgtgagatgttgcaaacgaaattatgagggaaatgcaa

SEQ ID NO: 404862 - DNA, 473 bp, Oryza sativa nipponbare
cccacgcgtccgcccacgcgtccggtctcagttttgatcaaaaaaagacatgagtgtttcacagctttgaacgccacactagtgagtagtgccaggacaggacactgtgattaactaagcagactctggtgtttacaaggttacagtgaactatggcagcagatcaaaatcaatcctcagtggcgtaatattgcggggcaagttcagccagccacacgggatcgatccgggtcaggtccttgacgtaattctgactcgttcgaaccaactcgttgaagatggcacaatctggcttcttttggaagagcaccgatgacggatggatctgcacgctctggctggttgcaagagccctgtatgatccatctggctgtcgcattgcggcattcaagaagaaagcagctgtgaggcatcttcggaacagaaccatgtcattcccacacgatgatacgttaagccccatttgttggaca

SEQ ID NO: 404863 - DNA, 405 bp, Oryza sativa nipponbare
cccacgcgtccgcccacgcgtccgccggatcgcgtctctcccatcctctcgcgcatcctcctccgactacctcggttgggttttgggggcggctggagatgtcggactccgaggagcaccacttcgagtcgaaggccgacgccggcgcgtccaagacctacccgcagcaggctggtactattcgcaagaacggtcatattgtcatcaagaaccgcccatgcaaggttgttgaggtctccacctccaagactgggaagcatggacatgcaaaatgccactttgtggccattgacatcttcaatgggaagaagcttgaagatattgtgccctcctcccacaactgtgacgtcccccacgtgaaccgtactgattatcagctgattgacatttctgaagatggatttg

SEQ ID NO: 404864 - DNA, 536 bp, Oryza sativa nipponbare
  unsure (1)..(536): unsure at all n locations
cctagacgtcgaaccaccgtcgactagccgcagcatcacccgcagccgccgccgccgccgccatggactccgtcgcgtcgtgggggctgaccccgctcgccgcggccgacccgctcgtccacgacctcctcgagcgggagaagcggcggcagcggagcggcatcgagctcatcgcctcggagaacttcacctccttcgccgtcatggaggccctcggctccgcgctcaccaacaagtactccgaggggatgcccggggcgcgctactacggcgggaacgacgtcatcgacgagatcgagaacctgagccgcgaccgcgccctcgacgcgtatccgcctcgacgccgtgtcgtggggcgtcaacgtgcagccctactccggctcgccggccaacttcgccgactacacggcgctccataacccgcacgaccgcatcatggggctcgacctaccctccggtggccacctaacccatggctactacaccgngggcgggaagaagatctcacgacgtaatctacttcgagagcctcccta

SEQ ID NO: 404865 - DNA, 440 bp, Oryza sativa nipponbare
gttgggggaggtgatgatgcttttaacaccttcttcagtgagactggtgctgggaagcatgtcccccgtgctgtcttcgtcgatgttgagcctaccgtgattgatgaggtgaggactggtgactaccgccagctcttccaccctgagcagctcatcagtggcaaggaggatgcagccaacaactttgcccgtggtcactacaccattggcaaggagattgttgatctgtgccttgaccgcatcaggaagcttgccgacaactgcactggtctccagggcttccttgtgttcaacgctgttggaggaggaacgggctccggtctcggttcccttctccttgagcgtctctctgtggactatggcaagaagtccaagctcgggttcaccgtgtacccgtcccctcaggtctccacctctgtggttgagccatacaacagtgt

SEQ ID NO: 404866 - DNA, 452 bp, Oryza sativa nipponbare
  unsure (1)..(452): unsure at all n locations
cccacgcgtccgctcgcgaaaaccctaaccctcctcctcctccgccgccgccgctctcccaagatccctcccgtcgtcgtcgctgtcggcccctcgggtctttctagcgcaggagacatggcggaagagactccagttgaggccccacctgccccggttcttggagagccgatggacctgatgactgctctgcagcttgtgatgaagaagtcaagcgctcatgatgggctcgtgaaggggctccgtgaggcggccaaggccattgagaagcatgccgctcagctntgcgtgcttgctgaggactgtgaccagcctgattatgtcaagttggtcaaggcactctgcgctgagcacaatgttcacctcgttaccgtgcctagtgctaaaactcttggcgagtgggcagggctttgcaagaatgattctgagggcaaggcgagggaaggtcgtag

SEQ ID NO: 404867 - DNA, 411 bp, Oryza sativa nipponbare
cggacgcgtgggcgagcggcggcggcggcggcgggggaggtggcgacgagccttcgcggacgctcaagaggccccggctcgtgtggacgccgcagctgcacaagcggttcgtcgacacagtaccccacctcatcatcaagaacgccgtcctcaagacgataatgcagctgatgagcgtctattgccttacgcgcgataactctgcgtcatgcatgccctagtctccgctctcaccaacaagtactccgaggggatgcccggggcgcgctactactgcgggaacgacctcatccacgagatcgagaacctgagccgcgaccgcaccctcgacgcgtatccgcctcgacgccgtgtcctgtggcgtcaacgtgcagccctacttctgctcgccgtgcaacttcgccgtctaca

SEQ ID NO: 404868 - DNA, 257 bp, Oryza sativa nipponbare
tcggagacgacgagggagacgccggagccgccgtgcttggccatggcggcgtagaacgcgtcgacggtggtgtcgaacaggttctggtacccgtaggcgccgtcctggacgacggtgccggcggcggtgaagagcgcgtaggagacgtcgacgctgccctggctgtaggtgtaggagaagtaggggagatgttggcgagcagcggcgcgccggtgcgggcgaggaagctcaggacgggcgccatgaacgcctgcgac

SEQ ID NO: 404869 - DNA, 414 bp, Oryza sativa nipponbare
cggacgcgtgggcggacgcgtgggtgcgtgtgcaatttctgacccttttgtggtggtgtatatcaacagagaaatctctagctgtttcagcggcgaagcgaatccatggccgagcacctcgcttccatctttggcacggagaaggaccgcgtgaactgccccttctacttcaagatcggcgcgtgccgccatggcgaccgatgctcccgcctgcacaacaagccgtcggtctcgccgacgctgctgctctccaacatgtacctgcgtccggacatgatcacccctggaattgatgctcagggcaaccccatcgaccctgagaagatccaggccgacttcgaggatttctacgaggacatctttgaggaactcagcaagtacgggcgagatcgagagccttcacgtgtgtgacaa

SEQ ID NO: 404870 - DNA, 266 bp, Oryza sativa nipponbare
cccacgcgtccgcccacgcgtccggttggcttctcctccccctctttaccttttcctcctcggttcggttccgtggttcgtctagggtttagtgggttgagatggcggcgccggatgtcgagtaccgctgcttcgtcggcggcctcgcctgggccaccgacgaccgctccctcgaggccgtcttctccacctacggcgagatcctcgactccaagatcatcaccgacagggagacggggaggtcacgtgggtttggcttcgtcacc

SEQ ID NO: 404871 - DNA, 318 bp, Oryza sativa nipponbare
cccacgcgtccgggaacggcgagccccttcccatcaactaagccaagatcccatcgccattgccattgccatacacccatcatcgaggaggagaggagactaaaaataaaagaaaacgaaccgcttcgtgtatcttcagacaaaaaagaccctgtattttcttcgttcgttgccgtttggtttatagtgatctcgtgttctttgtgttagctgctctgctcagcttgccagccatggcggcaaagcaagcggcttttctaagatattgtcgctaaactgtattttggggtgaaagtattgctactcgattccatcctt

SEQ ID NO: 404872 - DNA, 420 bp, Oryza sativa nipponbare
cccacgcgtccgcgaaccccaaaatcgcagagaaaaaaaaatctcccctcgaagcgaagcgtcgaatcgccttctcaagatgcagatctttgtgaagaccctcaccggcaagaccatcaccctcgaggttgagtcctcggacaccattgacaatgtcaaggccaagatccaggacaaggagggcatccccccggaccagcagcgtctcatctttgctggcaagcagcttgaggatggccgcaccctggccgactacaacatccagaaggagtccaccctccaccttgtgctcaggctcaggggaggcatgcagatcttcgtcaagaccttgactggcaagaccatcacccttgaggtcgagtcgtctgacaccattgacaatgtcaaggccaagatccaggacaaggagggcatcccccc

SEQ ID NO: 404873 - DNA, 377 bp, Oryza sativa nipponbare
gattatccaggccatgctccttccatcatcagtcgtgccactcttccgtgttgcctcatcaagattgataatgggtgcccacagagtgtctttgcatctggagatattaacatttcttgcatttctcctcatgctgttttcgaatatcatctttatggcagaaatgctgtttggtgacagtggttggctgaacactctgaaagggaatactggaagccctgtggtgtttccatctacggttctcatcacggtggcttgtgtctctgttgcattttcactctacatggctgttacaccactgaaatcaggaagccatgaagctgaattgcagcaggaatggtctgtgccttctcagaaagagctcttgaatactactc

SEQ ID NO: 404874 - DNA, 471 bp, Oryza sativa nipponbare
gccgccgccgaccactctcctccgcgtccgcctcgtcgccggctagggttccacgggttcttgcccgccccgcccgccgcccgcctcgcgggctgcgcaggcaaaatgtctcggtatgttgaccctaatgaccgttacgaaccacgtggtcgtaacagcaggttgtatgtgggccatatttctctacgtacaagggcagaggatcttgagaacctgttcagcagatatgggagggtgcgatttgtggatctgaagaatgaatatggctttgttgagtttagtgatccccgggatgcaaatgatgcgaggcttgatcttgatggccgaaagtatgatgggagtgacatcattgttcagtttgcaagaggggtcgaacgtggtctttgaggttctcgtggatataaagccagacccgcacatggttctgaccactgcttcaactgtgggatggagggcactggcaccgtaact

SEQ ID NO: 404875 - DNA, 471 bp, Oryza sativa nipponbare
cgggttcaagggcaccgagatcgccatggcctcctactgctctgagctccagtacctcgccaaccccatcaccaaccatgtccagagcgcggagcagcacaaccaggacgtgaactcgctgggtctcgtctcggccaggaagaccctggaggcggtggacatcctcaagctcatgacctccacctacatcgtcgccctgtgccaggccgtcgaccttcgccacctcgaggagaacatcaagagctccgtcaagaactgcgtcacccaggtggccaagaaggtgctcaccatgaaccccaccggcgacctctccagcgcgcgcttcagcgagaagaacctcctcaccgccatcgaccgcgaggccgtgttcagctatgccgacgacccgtgcagcgccaactacccgctcatgcagaagctccccgccgtgctcgtcgagcacgccctcaccagcggcgacgccgagcccga

SEQ ID NO: 404876 - DNA, 427 bp, Oryza sativa nipponbare
catctatctcctctccctctccgcccatttctcctctccacctgcgatccatccgcgcccgcgaggaggagggagccggacgccgccgcggggagagcaggggagagaaggagaggaggagtatcgccgtcgccgtcgccgtcgccgtcgccgatctcgagcgggagcggagatggggctcacgttcacgaagctgttcagccgcctcttcgccaagaaggagatgaggatcctcatggtcggtctcgatgcggccggtaaaaccaccatcctctacaagctcaagctcggcgagatcgtcaccactatccccaccatcggttttaatgtcgaaactgttgagtacaagaacattagcttcaccgtttgggatgttggtggtcaggacatgatcaggcccctgtggatgcactattttcatatcacc

SEQ ID NO: 404877 - DNA, 445 bp, Oryza sativa nipponbare
cccacgcgtccgcccacgcgtccgcccacgcgtccggaggaattgtttcttaagctagaacgttcaattaggacttcaggatgcttgccaggaagttcgcatacggaacctccatccacactcctgtggactctgtttttgatctctcagcactatgacagaagaggccagtatgatattgctctagataaaattgatgaggctatttcacacacgccaactgtaattgatttatactcaataaaggggaagatattgcagcatgctggcaatttctcagcggctgcagcattggcggatgaagctaggtcaatggatctcgctgatcgttatttaaacagcgagtgtgttatgcagatgctccaagctgaccaggttggtctagctgaaaagaaagcttgtttgtttactaaagacggcgatcagcacaataaatctcatgaca

SEQ ID NO: 404878 - DNA, 488 bp, Oryza sativa nipponbare
  unsure (1)..(488): unsure at all n locations
gacagcttcgcctcgtctctcccccccgagtccccaacccctcctcctcctcctcttccccttccccgcgccgcggcgagatcgctccccccgggggcagcagctagatcccgatggcttcgcgccgccgcaccctcctcaaggtcatcatcctcggcgacagcggggttgggaagacgtccctgatgaaccagtatccttcgattcggataggggatggcggatgatatagcccgcgtcgtttcacgaacacgggcgggtttttttttcttcttcgatttatnttgggggtntgttttcttgagctgtgatttaattcagatatgtgaacaagaagttcagcaaccagtacaaggctacgattggcgcggatttcctcaccaaggaggttaattcgaggataggctcttactttgcaaatatgggtactggtggcaggaagggttagagtttgggttgattctaccgggagcaaatgctggtctagt

SEQ ID NO: 404879 - DNA, 546 bp, Oryza sativa nipponbare
ggcacactcaatgtgtgtctgcaccatgcttcgcaaccaagcacggttcctgcgggaatggatcatctatcactcacgtattggtgtgcagcggtggttcatctatgacaacaacagcgacgatggcattgaggaggtcctcaacaccatggattcatccaggtacaatgtgacacgctatttatggccatggatgaaatctcaggaggctggatttgcacattgtgcactcagggctcgagagagctgtgagtgggtggggttcattgacatagatgagttcctgcacttccctggcaaccaaacactacaagatgtcctccgaaattactctgtcaagccacggatcggtgagctcaggactgcatgccatagttttggtccatcaggccggactaagatcccaaagaaaggtgttacaacaggctacacctgccggctggctgcacctgagcgccataagtcaattgtcaggccagacgcattgaacccatccctcataaatgggtgcaccacttccatctgaagggagggatgaaatatgtg

SEQ ID NO: 404880 - DNA, 424 bp, Oryza sativa nipponbare
tacattactaagcaccctcactcagacatacaatccatggctacagatcttctggggtactggaaaaaggttgttatcgaagaaggaaagaaaaatggtaccacagaaaatgttggatcaaccaactcagccgccagagctgaaaaggctcagcccatgaaggttgataagagttctgcatcaggaagtgtgaagcctgagaaaagagaagtcaatgttaggggccagaagcctgagagcatcaaggttgagaagatcaccaataatgattccaaaaaccaacaagtcaaggtagagagggctccaaaggaagccactagaactcctgatacaaagaagccatcttctgttccaaatggccccccaaagctgacatctcttgtcaaatgcaatgatcccactagagataaaatccgggaactac

SEQ ID NO: 404881 - DNA, 292 bp, Oryza sativa nipponbare
tcgagcacgcgtacgctggactcgaagcttcagagcctgaaggttgagcaggacgattagtcatgtttaggttaaacttgaactatcttttttctttcttgaattagcttcaaaacgttttgctgccaggttgtactttcactttgatgtttgaacagacacactgcaggcagatggttcatagcctggaggtttatctatgcctgtgtaactgccattagaatgtgtttcatgtattagcaacaacctggttagtcaagaccaaaggtcagctgtagctggatcctgcatc

SEQ ID NO: 404882 - DNA, 460 bp, Oryza sativa nipponbare
cccacgcgtccggaattaacaagcaggtatatataagctactagctaattaagaagggcattagaatggcttcgtcttccttcctgctcctcgccactcttcttgccatggcctcatggcaaggcatggcttcggatcccagccctctgcaggacttctgcgttgccgacatgcactcacctgtgcttgtcaatggatttgcttgcctgaacccaaaggacgtgaacgcggatcacttcttcaaggcagcaatgttggacactcctcggaagacgaacaaagttgggtctaacgtcacactgatcaacgtcatgcagatccctggcctcaacacactcggcatctcaattgcacgtattgactatgcaccgttaggtcaaaaccctccccacactcatcctcgtgccaccgaaatcctcacggtgcttgaaagaacactctatgtcggcttcgtcacgtc

SEQ ID NO: 404883 - DNA, 341 bp, Oryza sativa nipponbare
tccacgcgtccgcccacgcgtccggaagaactagcacaaatggttgtccttcctagtaccgaggttgatgttagacgtttggttaggaaaacacacaaaggagaatttcaagttgaagtagaagaaacagatggtatctcagtggaggttgagcttggaggtaatcttcttactcaagttccatcaaaagcccctgaagatcagaccaaatcagacgataaagaaagtacagatgataaaacaggcatacaagacaatgacaaggcacctgatgggacttcacaagatgaagataatggggcaggcaagaacgatccacaagatgatttagaatatgttga

SEQ ID NO: 404884 - DNA, 353 bp, Oryza sativa nipponbare
gatcgattgcttctccctcctctcgctactagactagagagtaggtagagctagctttctagctcgtggatcgttaagtttgtagtcctgcccgggcgccggcggtgaggtcgcgatggccggcggcgcggtggtgagcacgggggcaggcaaggactaccctggcaagctcaccctcttcgtcttcttcacatgcgtcgtcgccgccaccggtggtctcatcttcggatatgacatcggtatatcaggtggtgtgacgtccatggacccgttccttgagaagttcttcccggaggtgtatcggaagaagcagatggcggacaagaacaaccagtactgcaagtacgacaacc

SEQ ID NO: 404885 - DNA, 276 bp, Oryza sativa nipponbare
  unsure (1)..(276): unsure at all n locations
ccgcgccctgatgtccgcgtccgtgtgcgccgncaccgcccgccccaccgccgccgtcgcccacccgtgcccgcgctccaccagctccgacgcctgcaccttctccgtgctgatggcgtagatgctgttgccgaagtactccctgggcagcgccggctggaggcgcccgcggttgttgatggccgcgcggcacatggtctgttgctccgccggcagccgcctggcgcgggtgatgcacctccacagcagcgagctcagcgcctggaacccgtcagc

SEQ ID NO: 404886 - DNA, 389 bp, Oryza sativa nipponbare
gaaaactaatgttccagttgctgagttggtttatggtgccttggggactacagagttgcagaaggctgtggaaaaagagtatgaaatggctcttcaggacagggtgatggaagagacaaaagataagaagaatgccgtggagtcttatgtttatgacatgcgaaacaagctgtatgacaagtacaatgattttgtgactgctgaagacaaggaagcattcattgctaagcttcaagaggttgaggattggttgtacgaagatggtgaggatgagaccaaaggagtgtatgttgctaagcttgaagaacttaaaaaggtggggggtcccattgaggcaaggtacaaggaatggatggacagaggcccttccatcgaccaacttgcttact

SEQ ID NO: 404887 - DNA, 462 bp, Oryza sativa nipponbare
  unsure (1)..(462): unsure at all n locations
cccacgcgtccgcggacgcgtgggtcccgcgcgagccctcgtcgacgccgccggtatattgctgaaggaagaagagcaccaacctatttatcatgtcaggaggatcttcaccaaggtcaagacgaagcagctttaattctttatcaagagatctcgaactcccttcagagcaaggttgtctctctgttattgtcctcggngcttctggagacctagccaagaagaaaactttcccggcactcttccatctttttgcacagggatntatacaatcaggtgaagtgcatatatttgggtatgcgagatcaaacctttctgatgatgggttaagggaacgcattcgtggatacctcaaaggagcctcagaagaacatctctcagactttttgcaacatataaaatatgtcagtggttcctatgacagcggagaaagatttgagaaattgaacaaggaaatttcag

SEQ ID NO: 404888 - DNA, 423 bp, Oryza sativa nipponbare
  unsure (1)..(423): unsure at all n locations
cccacgcgtncgcttagtccgaaatggatttgtagaccatattaatacaacaaaagactctactgactacctatggtacacaacaagtgttgacgtagatggaagtcatctggcaggtggcaaccatgttcttcatattgaatacaaaggccatgctgttcaggctttcctgaacaatgagcttataggtagtgcatatggtaatggctcaaaatcaaatttcagcgtggaaatgcccgtcaatttgagggctgggaagaacaaactttccctattgagtatgactgttggtttgcaaaatggaggacccatgtacgaatgggcaggagccggcattacaagtgtgaagatctcaggaatggaaaacaaaataattgacttgtcttccaataaatgggaatacaagattggattggaagggga

SEQ ID NO: 404889 - DNA, 493 bp, Oryza sativa nipponbare
  unsure (1)..(493): unsure at all n locations
cccacgcgtccggcaagtatcatatgatttagcatatatacacacacatcctcgcctctgttgcaaacaccccatgtgaatgaacaaatacacacaaaaatggggagttttagattacttcgatttcaattttggatgagatatgaggagtcgcatccacaggttagggattcaacgaaacctagaaatcgcaaaaatggagaaaggaaaatcaaaattaggaaatcgatgtatatgtgtaacatcccggcctagggcttaataggattaatagaatactcatatcaacaagttgcaacttcttttccggaagccaatctccaaagaactccagggttaaacgtgcttggtctggagcaatttgngatgggtgaccgaccgggaaattcttcccgggtcccgggtgcatacgagtgaggacaaagtgtgcaaaaaagacatgtgttggtctgtgagggcagtctatgatctatgaaagctaccagatgtaagt

SEQ ID NO: 404890 - DNA, 437 bp, Oryza sativa nipponbare
cccacgcgtccgcgacctctgcccgttcctccgcctcgccggcgccgccgccaaccagtcgatactggaggccatggagtccgagaagatcgtgcacgtcatcgacctcggcggcgccgacgccacgcaatggctggagctcctccacctcctcgccgcgcgccccgagggcccgccgcacctgcgcctcacgtcggtgcacgagcacaaggaactcctcacccagacagccatggcgctcacgaaagaagcagagcgcctcgacgtgccgttccagttcaacccggtggtgtcccgcctcgacgccctcgacgtggagtccctccgcgtgaagaccggcgaggccctcgccatctgctccagcctccagctgcactgccttctggcgttcgacgacgacgccggcgtcgtggcgggcggcgacaaggagaggcgga

SEQ ID NO: 404891 - DNA, 508 bp, Oryza sativa nipponbare
  unsure (1)..(508): unsure at all n locations
atctcgcaaggtcagggagccagcaaattcacccgcgattccgcgcgccgccgccgtcgccgccgccgacgtcgccgcctgtgtgggggaggagatggccggcctcgggaaggccttctacgcggtagggttctggatccgggagaccggccaggccctcgaccgcctcggctgccgtctccagnggaactactacttccacgagcagctctcaaggcatcgcacacttatgaacatctttgacaaaacccctcatgttcacagagatgcatttgttgccccaagtgcatctctcatgggtgatattcaagttggacaaggagcttcaatttggtatggatgcgtcttaagaggggatgcaaacaaacgtcaaattggatctgggaccaatatacaagacaattctcttgttcatgtggcaaaatctaatcttagtggaaaagtctttccaaccatcattggggataacgtcacagtatgtcatagtgctgtattacaaagatgtact

SEQ ID NO: 404892 - DNA, 512 bp, Oryza sativa nipponbare
gaaacatatggtacattgggtgccattgtgaagagtcgaactggtaataagcaagtaggcttcctgacaaacaggcatgttgcggttgacctggattaccctaaccagaagatgttccatcccttgcccccgaatcttgggcctggtgtatacctaggtgctgttgagcgagcaacatcatttatcacagatgatgtttggtatggtatctatgcgggaacaaatccagagacatttgtcagagctgatggtgcatttataccgtttgctgatgattatgacataactagtgttaatacctcagtcaaaggagttggagtcataagtgatgtaaaggcaatcgatctacaatccccaattagcagtctcatcggaagacaggttgtcaaagttggaagaagctttggtttgacgacagggaccgttgtggcatacgctcttgaatacaatgatgagaaaggcatatgcttctttacagactttcttgtggtggggagaaccacaaacatttg

SEQ ID NO: 404893 - DNA, 409 bp, Oryza sativa nipponbare
cggacgcgtgggcggacgcgtgggtttggttggggtggcaagaaaggcaccaagaatgacgagaaaccatccaaggcgaatcaagggagtaaggatgaatcaggtgacctaggaaagggaaaggagaagaacagcagcaagaagaagaagggtgcatcatcaggggattctactaaacatgaaagtgaatacaagaaggggttaagaccagtgttgtggctgacaccagatttccctttgaagacggatgaactgatccctctgcttgatgtcttagcaaacaaagtgaaagctgtcagaagcttatggaacttttgactactaaacttgcctcaggcacatattcggtgaagattgcgatacctattgtttcaacaatacgagtcattgtgacatttacaaagtttga

SEQ ID NO: 404894 - DNA, 395 bp, Oryza sativa nipponbare
  unsure (1)..(395): unsure at all n locations
cgccgcagtggctcggcccgcagatcgaggtcatccgcgccgccaccaagtccatcgagcgcgaggtcaactccgtgaacgacaacccggtgatcgacgtccaccgcggcaaggcgctccacggcggcaacttccagggcacccccatcggtgtgtccatggacaacgcccgtctcgccatcgccaacatcggcaagctcatgttcgcgcagttctccgagctcgtgaacgagttctacaacaacgggctgacctccaacctggccggcagccgcaacccgagcttggactacgggttcaagggcaccgagatcgccatggcctcctactgctctgagctccagtaccttgtcaaccccattaccaaccatgtncagagcgcggagcagcacaac

SEQ ID NO: 404895 - DNA, 463 bp, Oryza sativa nipponbare
cccacgcgtccgatgaaccccaccggcgacctctccagcgcgcgcttcagcgagaagaacctcctcaccgccatcgaccgcgaggccgtgttcagctatgccgacgacccgtgcagcgccaactacccgctcatgcagaagctccgcgccgtgctcgtcgagcacgccctcaccagcggcgacgccgagcccgaggcctccgtgttctccaagatcaccaagttcgaggaggagctccgctctgcgctgccccgggagatcgaggccgcccgcgtcgccgtcgccaacggcaccgctcccgtcgccaaccggatcgtcgagagccggtcgttcccgctctaccggttcgtccgcgaggagctcggctgcgtattcctcaccggcgagaagctcaagtcccccggcgaggagtgcaacaaggtggtccttggcatcagtcaaggcaaggctattgaccccatgc

SEQ ID NO: 404896 - DNA, 233 bp, Oryza sativa nipponbare
cccacgcgtccgcccacgcgtccgcccacgcgttcgaccacacatagtgtgggtgcctgtgaaggaaaaaactcctttgtggaggctagtaccagattgttccttttcgtgggcactataagtgcttatattttgtttggttttacaacatttactgtgctgtccatatgtacccgtttgttctgagatggtctagtaaattgatatgctttgtcaacaaaaaatattaagaa

SEQ ID NO: 404897 - DNA, 278 bp, Oryza sativa nipponbare
cccacgcgtccgctaccttctcctccggctcttcttcagtatcgaatcctctcttctcctcgtgcccaccaccaccaccgtagcaatggcgggcaacgggccgatcaacaaggaggacccgctcaactggggcgcggcggcggccgagatggccggcagccacctcgacgaggtgaagcgcatggtggcgcagttccgcgagccgctggtcaagatccagggcgccaccctccgcgtcggccaggtggccgccgtctgccaagccaaggacgccgtcg

SEQ ID NO: 404898 - DNA, 270 bp, Oryza sativa nipponbare
  unsure (1)..(270): unsure at all n locations
gacagcttcgcctcgtctctcccccccgagtccccaacccctcctcctcctcctcttccccttccccgcgccgcggcgagatcgctccccccgggggcagcagctagatcccgatggcttcgcgccgccgcaccctcctcaaggtcatcatcctcggcgacagcggngttgggaagacgtccctgatgaaccagtatccttcgattcggataggggatggcggatgatatagcccgcgtcgtttcactaacactggcgggtttttttttc

SEQ ID NO: 404899 - DNA, 107 bp, Oryza sativa nipponbare
ccccaaacttgctccaattttggtgatgtgtagttctgagcttgcgtgttctctgaacctgttggatctttaatacagagagtatggcttttgttattatggctgtg

SEQ ID NO: 404900 - DNA, 374 bp, Oryza sativa nipponbare
atattaaatgggcccatttggaaaaaattgcttttgcgtcgcaggcggctccgctgtatctcgccgagacagcgccggcgaggtggcgcggggcgttcaccgccgcgtaccatatcttcctcgtcatcggcacggtggccgcgacggccgccaactacttcacggaccgaatcccgggctgggggtggcgcgtctcgctgggcctcgcggcggtgccggccacggtcatcgtggtgggcgcgctcttcgtcccggacacgcccgctagcctcgtcctgcgcgggcacacggagaaggcccgcgcgtcgctccagcgcgtccgcggcgcggacgccgacgtcgacgccgagttcaaggacatcatccgcgccgtc

SEQ ID NO: 404901 - DNA, 345 bp, Oryza sativa nipponbare
cgctcccctgctcggcgctcatcaacggtgaggcgggcggcgggcaggcggcggcggagagcgcgctgtgctgcgaccggagccactaccggagcgacgtgtgctacctccgcggcgacgtgcgcacggacccgtccacctcgtcggtgctcctgtacaacgccccccgcggcagcgcgccggagaaggtgcggccgtacacccgcaagttcgagggcagcattatgagcaccatcgacgaggtcaccatcgtgccggcggtcgacgccggcagcggcagcaacggcaccaccgccggcgacaccggtaaggacagcctgcgggggcggttcgacgttcggtacc

SEQ ID NO: 404902 - DNA, 425 bp, Oryza sativa nipponbare
  unsure (1)..(425): unsure at all n locations
cccacgcgtccgcggacgcgtgggtccaagccaagaagagggagagcaccaaggacacgcgactagcagaagccgagcgaccgcctcctcgatccatatcttccggtcgagttcttggtcgatctcttccctcctccacctcctcctcacaggttcttggtgtagcttgccactttcaccagcaaagtttcatgtctgatctcgacattcagatcccaactgccttcgatccctttgctgaggccaatgctggagactctggtgcggctgcaggatcaaaggactacgttcatgtacgcatccagcagcgtaatggccgtaagagcctgaccactgtccagggattgaagaaggaattcagctacaacaagatcctcaaagatctcaagaaagagtnttgctgcaatggtacttgttgccaggac

SEQ ID NO: 404903 - DNA, 319 bp, Oryza sativa nipponbare
cccacgcgtccgcccacgcgtccgcccacgcgtccgaagatttgcttactgaagatgctgcagatccatctagctgtttgtggagtgaagcaaatcagaatgccagtgatgcttggaccatgttcgattagcaaactccatctagctgcttgtacatgtgttttttttaggttgctgggctcaaacatatgtgaactttgatggagaagtggccaaaatgctttggtggctgctgggtatagtcatgtgcttttgaacaggttttaattatgctgtatgagatattgctcaacatacattatgttgtatgagatgtgaa

SEQ ID NO: 404904 - DNA, 332 bp, Oryza sativa nipponbare
ggtgccctacccgaggatccacttcatgctttcctcctacgccccggtgatctcggccgagaaggcctaccacgagcagctctccgtggcggagatcaccaacagcgccttcgagccgtcctccatgatggccaagtgcgacccgcgccacggcaagtacatggcgtgctgcctgatgtaccgcggcgacgtggtccccaaggacgtgaacgccgcggtggccaccatcaagacgaagcgcaccatccagttcgtggactggtgccccaccgggttcaagggcggcatcaactaccaaccgcccagcggttttccagggggagacctggcca

SEQ ID NO: 404905 - DNA, 352 bp, Oryza sativa nipponbare
gcgcccacgcgtccggaagacccttactggcaagacgatcaccttggaggttgagtcctctgacacgatcgacaatgtgaaggccaagatccaggacaaggagggtattccaccagaccagcagcggctcatcttcgctggcaagcagcttgaggacggccgcacccttgctgactataacatccagaaggagttcaccttgcacttggtcctgcgccttcgtggaggtatgcagatcttcgtgaagacccttaccgggaagaccatcaccctggaggttgagtcgtcttgacacgatcgacaatgtgaaggccaagatccaagtcaaggagggtttttcaccagatccaca

SEQ ID NO: 404906 - DNA, 403 bp, Oryza sativa nipponbare
cggatgtatgatgccggaatgggtgctctcatctttgtgcccattgtgttcttttcatggttccccttcgtatccaccttccagtcacgtttcctgtttaatcaagctttcagccgtggtctggagatctccctcatcttggcaggaaacaaggcaaatcaggaggcatgaaaagcctaaccacctaaccgcctggatatttttgttgtatattcttggaattgattagtggtacttgatttgaacaacacctttgtacataactgcctgccattttaggagcaaattatgtatccaaactaacagtgccatgccagtttagatgtgagtattcatctcttgtttgtagccgtaacgacctgtaatttgaacattccggtaatttggatgcgacaattcagat

SEQ ID NO: 404907 - DNA, 429 bp, Oryza sativa nipponbare
  unsure (1)..(429): unsure at all n locations
tccaagccaagaagagggagagcaccaaggacacgcgactagcagaagccgagcgaccgcctcctcgatccatatcttccggtcgagttcttggtcgatctcttccctcctccacctcctcctcacaggttcttggtgtagcttgccactttcaccagcaaagtttcatgtctgatctcgacattcagatcccaactgccttcgatccctttgctgaggccaatgctggagactctggtgcggctgcaggatcaaaggactacgttcatgtacgcatccagcagcgtaatggccgtaagagcctgaccactgtccagggattgaagaaggaattcagctacaacaagatccttaaagatctcaagaaagagtnttgctgcaatggtactgttgtccaagacccaaagcttggccaggtcattcaacttc

SEQ ID NO: 404908 - DNA, 570 bp, Oryza sativa nipponbare
cgcgaatccccaacccaaccgaatccacccaagaagaagaagaagaagaagaagggttattgcatcgatcgcagcgagggggaaaggggtaatcgcggagcagatcgaaacccgaatccaatcgatcgagccgccatgagcttcatcttcggcaagcggaagaccccagccgagttgctgcgggagaacaagcggatgctggataaatccatcagggagatcgagagggagaggcagggcctgcaggctcaggagaagaagctcatcgccgagatcaagaaggtggccaagcaaggacagatgggagccgtaaaaattatggcaaaggaccttatccgcacaagacatcagatcacaaaattctatgccctcaagtcccagctacagggtgtatctcttcgaattcagacattgaaatcgacacaagctatgggtgaggccatggagggtgtcacaaaagccatgagacagatgaacaggcagatgaatctaccagcttttgcagaagataatgtcggagtttgagatacaaaaccagaagatggagatagcagtagcacaatgaatgat

SEQ ID NO: 404909 - DNA, 364 bp, Oryza sativa nipponbare
ggaaactcttaaaagtgtcaccgactacattaccgacattgtctgcaagcgtgcagaacttggttacaactatggtgtgatccttaggccagagggtctgattgatttcatcccataggatcaaaaactcattgcagaattgaatgaaattttggcgcatgatgttgttgatgtggcaagggcttggaatatcaagcttcaaccagaatccaggcaactgattgacttcctgcccaaaaccttccaggagctacttttgcttgtaagagatcctcattggatagttcatggttctaaaattgatacagataaattgcttattttcctttgtcgttactgaattggataattatatagcttgttt

SEQ ID NO: 404910 - DNA, 232 bp, Oryza sativa nipponbare
agcgcaccaccaccaccaccaccaccaccaccaccaccgtcttcagccatggcctcctccgcctccctgcagcgcttcctccccccgtaccgggacgcggcagcatcccgctgccgccctcccggcgtccgcgcccgccccgtgcagtcgtcgacggtgtccgcaccgtcctcctcgactccggcggcggacgaggccgtgtcggcggagcggctggagccgcgggtggagc

SEQ ID NO: 404911 - DNA, 394 bp, Oryza sativa nipponbare
tcttaacccatctggtcgcttcgtcattggcggacctcatggtgatgctggtctcactggccggaagatcatcattgacacttatggtggctggggagctcacggaggtggtgccttctctggcaaggacccaaccaaggttgaccgcagtggagcatacgtcgcaaggcaagctgccaagagcattgctgctagtggccttgctcgccgctgcattgtccaagtatcatacgccatcggtgttccagagccactgtccgtattcgttgacacatacggcactggcaggatccctgacagggagatcctcaagattgtgaaagagaactttgacttcaagcctggcatgatcatcatcaaccttgacctcaagaaaggcggcaacggaccgctc

SEQ ID NO: 404912 - DNA, 53 bp, Oryza sativa nipponbare
agctaagctcttcaccattgcttgcaaagctggtcgtgtcacttctcccggta

SEQ ID NO: 404913 - DNA, 396 bp, Oryza sativa nipponbare
cccacgcgtccgcccacgcgtccgtccacgcgtacggtcggatctaattaatttacctccttcaccttctcctcctacccccgatcggatcgggccggctcctcctactccgacgccgtcaccgccgccgcatataggagaagatggccgtacttgatacctgtctctttacctcggagtctgtgaacgagggccaccctgacaagctctgcgaccaagtctcagatgctgtgcttgatgcctgcctcgccgaggaccctgacagcaaggtcgctagtgagacctgcaccaagacaaacatggtcatggtctttggtgagatcaccaccaaggctttcgttgactatgataagattgtcagggagacatgccgtaacatcggatctgtgtcagctg

SEQ ID NO: 404914 - DNA, 323 bp, Oryza sativa nipponbare
gatcgagggcgctagcctgaggatcgcgcaggtcgccgcggtggccgcggccggcgaggccagggtggagctcgacgagtcggcccgcgagcgcgtcaaggccagcagcgactgggtgatgaacagcatgatgaacggcacggacagctacggtgtcaccaccggtttcggcgccacgtcccacaggaggaccaaggagggtggtgctctgcaaagagagctcatcagattccttaatgcctgtgcgtttcgcaactggcaccgactgacatgttttgtcttctgaggaatcctatcgttaatgttagttttttaaatttatt

SEQ ID NO: 404915 - DNA, 275 bp, Oryza sativa nipponbare
cccacgcgtccgcccacgcgtccgcccacgcgttcgctcgcctccgcttctccactctccggtagatcccacccttcaccgccgccgccgtcgtcgtgctccggtgagccgccggtgagccggagactacagcgacgtcgcgcagagccgttgggcgggtaggcggttgggggctttgcccgagatggcgacgatggggagcctgatcgggctggtgaaccggatccagcgggcgtgcaccgttcttggggaccaacggggcggtggcgaggggg

SEQ ID NO: 404916 - DNA, 171 bp, Oryza sativa nipponbare
cggacgcgtgggccggacgagtgggacggcggcgcgatcagcacggggctgttcgacgccgtgtgggtgcagttctacaacaacccggagtgccagttcagcgcggggcggggcgcgttcatggacgcgtggaggaagtgggagtcggtgccggctgttccactcttcctg

SEQ ID NO: 404917 - DNA, 432 bp, Oryza sativa nipponbare
gatgggtgaaagggtgaagctcatcggtgctttcgccagtgcatacggccaccgcgcagaggtggcgcttcgcctgaaaggcgtgcgatacgagctcatcctggaagacctccgcaacaagagcgacctgctgctcaaccacaaccccgtccacaagctcgtccccgtcctcctccatggcgaccgctccttgagcgagtccctcgtcatcctcgagtacatcgacgagagcttccatggtccacccatcctcccaaccgatccgtacgatcgagccgtggcgcgtttctgggcgcagttcatcgatcagaagtttggtaggttcaatttctggatcccgttcgtgcaaatggagggcaacatgcaggattgtttcgtgagggaagcaaaggagaatctggcgcttcttgaagggcagttcaaggggaggag

SEQ ID NO: 404918 - DNA, 345 bp, Oryza sativa nipponbare
atttcaggaagatgttgagatcgacaaaaatcttttgatatggaaatggatagctgaaggttttgttcaggagaaacaagcagtacggatagggttatttgagcttgcggagggttgtttcaacgagctgataaacagaaacatgatccagccagaggtgtcacaatatgaatggtatggaccgaagtttctaagtgaccaattgtatgaggaaggctatgtatatagttgtcgtgttcatgatatgattcttgatatgatccgttcattgtcaaaggaagaaaattttgtgtcttgttttggacagtcattagctggtggaacttcctatgagacatgcttcgt

SEQ ID NO: 404919 - DNA, 421 bp, Oryza sativa nipponbare
cccacgcgtccgaccggcctcacccacattatcatcgagggaacctttgtctttgctcctaatttcttctccaaccaaaacccttcttacttcgatgaagtttggaaagagtacagcaaaggtgactccagatatgtcgccagagaccctgctactgttacagttgaaggaattacagctgtcttggaaggccctgcttcactccttgctgtctatgccatcgcatcgggcaagtcctacagccatatcctccagttcactgtctgtcttggtcagctctatggatgcctggtgtactttattacagcctacttggatggcttcaacttctggactagcccgttctacttctgggcttatttcattggggcaaacagcttcggggttgttataccaactatgatcgccataaggagctgga

SEQ ID NO: 404920 - DNA, 385 bp, Oryza sativa nipponbare
gctgcacagagctagcgttagcttggttagttgttcttagcattctagctagctcaatggcgaaagacattgaggcgtcggcgccggagggcggcgagttctcggcgaaggactacaccgacccgccgccggcgccgctgatcgacgtggaggagctgaccaagtggtcgctgtaccgcgcggtgatcgcggagttcatcgcgacgctcctcttcctgtacatcacggtggccaccgtgatcgggtacaagcaccagtcggacgccaccgtcaacaccaccgcgccgtctgcagcggcgtcggcatcctcggcatcggctgggccttcggcggcatgatctttattctcgtctactgcaccgccggcattttagtggggcacatt

SEQ ID NO: 404921 - DNA, 319 bp, Oryza sativa nipponbare
cgcatcaccaattctaaccctaacgacaaccctactctctctctccaacaatcaaagattcgatggccgtgctggtggcgaggcaggggcgggagctgcagcggtacacgagcgccgggggccgcatcgtggtgggttgcatcccgtaccgggtgcgcagcggcggcgagatggaggtgctggtgatcacgtcgcagaaggggcacggcatgatgttccccaagggcgggtgggagctcgacgagttcatggacgaggccgcccgccgcgaggcgcttgatgaggcccggctttcgcggatacaccgagacgtcccttg

SEQ ID NO: 404922 - DNA, 309 bp, Oryza sativa nipponbare
cccacgcgttcgcccacgcgtccgctttttttttttttttaaaatagcagcaatgcatttatcatattatatatgtagctacaaactacatatagcaagctataagtatgtacagcaatgatggcaggtaatattgccatatcaattttcctgctatggtatgtacaccagagaacgagaacaatttagatgatttgggatggtggagcatctgaaataatgcacagttcttcagacttcacctacggttcaagcactactgcccccaatggatgattaaactacaggggcaagagaaaaagataactt

SEQ ID NO: 404923 - DNA, 313 bp, Oryza sativa nipponbare
cttttaggccgtgctggtcgttttctggaggcaattcagattatagagaggatgccatttatggctgatgattctgtgtggggtgcacttcttggggcttgcaagatccatggcaatatagagctttctgcccagatcagggagaaactaatagttcttggtggtcagcaacctggacggtatgtgactgttaggaacatgtatttagaagaagggaactggtatgctgccactagaatgggagaggtgatgcaggacgctggtattaagaaaaaagtgtgtgtcaacagtgttcaacttaattgagttaatt

SEQ ID NO: 404924 - DNA, 267 bp, Oryza sativa nipponbare
  unsure (1)..(267): unsure at all n locations
cccacgcgtccgcccacgcgttcggagaaggngggcgccgagtcgtcgatcgcctgcgctcgctgcggcaagccggcgtcgcttcaatgccccaagtgcgcgcagctgaagcttctgcgggagggcgctgctttctgcacacaggatngcttcaaggaagcatggagctctcataagtctgtccacataaagctagatgcattgacactacaacagactccagagggttggcaatattgtttgaaaaagggcggacacacacatcgc

SEQ ID NO: 404925 - DNA, 222 bp, Oryza sativa nipponbare
gcgaaaaaatctcccctcgaagcgaagcgtcgaatcgacttctcaagatgcagatctttgtgaagaccctcaccggccagaccatctccctcgaggttgagtcctcggacaccattgacagatgtccaggcctagatccaggacacggagggcattcacccggaccagcagtgcatcatctttgctggcaagcagcttgaggatggccgcaccctggccgac

SEQ ID NO: 404926 - DNA, 209 bp, Oryza sativa nipponbare
cccacgcgttcgcttaattctaaacaaagcacatactcaagaagagttcattaggggctctatgacaaggaatccatactccagtgctgagattggcccactgatgagagatgtgaaaaataaaatatgccatcaacttgatttgattggtcttttagaagacgactatggtatggagttactggtcgctgggaatatagattcacttg

SEQ ID NO: 404927 - DNA, 466 bp, Oryza sativa nipponbare
cccacgcgtccgcccacgcgtccgagaagaagtacccagaagatgcagcgaccttgaagagcattgtctcaggggagttgcctgctggctgggctgacgctcttcctaaatacactccagagagccctgcagatgccaccaggaatctgtcacagcagtgcttaaacgcacttgctaaagttgttcctggtcttcttggaggaagtgctgatcttgcatcctccaacatgacattgcttaaaatgttcggggacttccagaaagatacccccgatgagcgcaatgttcgaattggagtcagggagcatggaatgggcgccatttgcaacggcattgctctgcacagcccatgactcatttcatactgtgctacttacttgttttcactgattacatgagagctgcatgaggatctcagcctgtgtgaagccggagtatctatgttatgcccatgatctattggttt

SEQ ID NO: 404928 - DNA, 234 bp, Oryza sativa nipponbare
ctcgtggccaccgggagcttcaatcctcccacctacatgcacctgcgcatgtttgaactggcaaaggatgaattgcagcagcgagggtattctgtcttgggtggttacatgtctccggtgaacgatgcttacaagaagaaggtaatgtgtggcatcaccactgttctccttgtggtgtagaggccggattcttaatccattatctaaaaaatatcaccactgttctcttgattg

SEQ ID NO: 404929 - DNA, 365 bp, Oryza sativa nipponbare
atcctgaaagccgtcagttgcgtgctgctcttgctgaagattctggtcttgaatctgagtacatacttgctggatgtggtgcagatgaattaattgatttaataatgagatgtgtactcgaaccaggtgacaaaattgttgattgccctccaacttttacgatgtatgagtttgatgcgtcagtcaatggtgcacttgtgatcaaggtaccgagacttcctgatttttctctagacgttgcacagattgtcaaagtggttgaacaggaaaagccaaaatccatatttctgacaatttcgaacaacccagatggcaggataatcaatgatgaggatctttttaagatccttgatctttcaatactt

SEQ ID NO: 404930 - DNA, 222 bp, Oryza sativa nipponbare
ctttcacttcttccgattgttggtggtgtagcattggcatctcttactgaggcttccttcaactgggctgggttttggagtgcaatggcttcaaatgtcaccttccagtcaaggaatgtgctgagcaagaaactcatggtttaaaaggaggaatctcttgacaacattaatcttttctcaatcataactgtgatggcattttttcttttggcccctgttgcc

SEQ ID NO: 404931 - DNA, 511 bp, Oryza sativa nipponbare
  unsure (1)..(511): unsure at all n locations
ggaggtgtccacctcgagatgactgggcagaacgtaaccgagtgcatcggcggatcccgaaccgtcaccttcgatgacctgggtgaccgctaccacacccactgcgacccgaggctgaacgcgtcccagtcgctggagctctccttcatcatcgccgagaggctgaggaggaagaggatccggtcgtcgaagctgaacaacatgttgccgttgccacccttcggtgtctgaatctgaaatgggtaagggaaaccaggggaagacggaggaatgacgaacggngtagataagatagctgcagcaagaactcgacgacgcctattccatttgttggtgggatgctcttggtgaaatcctatattttgcgagcttntttttctgttgtaacttttcagttggtatatatatgctctgnnnnnnnatnccangctgaaaggctttgacaatttggtttttctatggttctatcatggattagagaataaaatgcaagatagaagaaggcttttgg

SEQ ID NO: 404932 - DNA, 476 bp, Oryza sativa nipponbare
  unsure (1)..(476): unsure at all n locations
cacttatcatcaatcggcgcctgcgtgtctgtggctcaccgcctccttctcctcgcgatctatccaaacaaggggctcgctaagatcggcatgtcggactctgaggagcaccatttcgagtcgaaggccgacgctggggcgtccaagacctatccccagcaggccggaaccatccgcaggagatgggtatattgttatcaagaaccgcccctgcaaggtggntggaggtttctacctcgaagactggtaagcacggtcatgccaagtgtcactttgttgccatagatatattcaatggtaaaaagcttgaggatattgttccttcgtcccacaactgtgatgttccacatgtgaaccgcacagagtaccagctgattgacatatcagaggatggattcgtgagccttcttactgagagtggtaacactaaggatgatcttagactcccaactgatgacagtctcctgggtcagatc

SEQ ID NO: 404933 - DNA, 469 bp, Oryza sativa nipponbare
ctttattatagtgcaaatctggccaaatctcctttatataacaaacaaatgccatacaacagagtcatttatagggcatttggctgtgattctcctaatgactcgccagtaatgttcaatacttgcgaaaggaaacaaagccaccagaagaaaatagtggttgctggccggtggtgtgggaaagtatggatgtcaaaacaggtccatccatacttggctcacagagttgaaagccaggaagcggaagaagcagatagaatctgttcttatcattttgatgagaagcacaaagctgagccagttgggaattctagtagagtggaagcctccaaaagaaagagtagcagtttgacagacgtaacagaatcaagcaatagaaggggggaaatacctggtgaggaaacaaacaccaagaggcccaaacattctcaagagaacaatctcagagctttggaaaccgctgctgaag

SEQ ID NO: 404934 - DNA, 181 bp, Oryza sativa nipponbare
tgccgtttggtttatagtgatctcgtgttctttgtgttagctgctctgctcagcttgccagccatggcggcaaagcaagcggcttttctaagatattgtcgctaaactgtattttggggtgaaagtattgctactcgattccatccttaaaaagttgtggtaatagaaatgttttgatcct

SEQ ID NO: 404935 - DNA, 422 bp, Oryza sativa nipponbare
  unsure (1)..(422): unsure at all n locations
cggacgcgtgggcggacgcgtgggcggacgcgtgggcgcgcgcgcaggttcagatagtttcaggcttgggaggaaggaaggagaggcagagagagaatttttgtctgagagaattcagatttcagagagataattttcgtctgaagaattgtgtatcgatcgatgtctggtggtgtgatcagcatggtggtcgcgccatggattctcgcttgcgggttcttgctctgctcatcctccttcctcggagctgaaggcgccattggtgtgaactacggcatgctggggaacaacctgccgtcgccggcgcaggtgatctccatgtacaaggccaagaacatcaactacgtccgcctcttccacccggacaccgncgtcctcgccgcgctccgcaactccggcatcgggcgtcctcctcggcacgt

SEQ ID NO: 404936 - DNA, 488 bp, Oryza sativa nipponbare
  unsure (1)..(488): unsure at all n locations
cccacgcgtccgcccacgcgtccgcccacgcgtccgcccacgcgtccgcggacgcgtggggaaaaaaaaatctcccctcgaagcgaagcgtcgaatcgccttctcaagatgcagatctttgtgaagaccctcaccggcaagaccatcaccctcgaggttgagtcctcggacaccattgacaatgtcaaggccaagatccaggacaaggagggcatccccccggaccagcagcgtctcatctttgctggcaagcagcttgaggatggccgcaccctggccgactacaacatccagaaggagtccaccctccaccttgtgctcaggctcaggggaggcatgcagatcttcgtcaagaccttgactggcaagaccatcacccttgaggtcgagtcgtctgacaccattgacaatgtcaaggccaagatccaggacaaggagggcatccncccggaccagcagcgtctcatcttcgctggcaagcagctgga

SEQ ID NO: 404937 - DNA, 387 bp, Oryza sativa nipponbare
  unsure (1)..(387): unsure at all n locations
gtcttctccccttcttctcctcctcctgctcgattcggagctccacccgcagccatggctaagaactaccccgtcgtgagcgccgagtaccaggaggccgtcgagaaggccaggcagaagctgcgcgccctcatcgccgagaagagctgcgcccctctcatgctccgcctcgcgtggcactcggcggggacgttcgacgtgtcgtcgaagaccgggggcccgttcgggacgatgaagaccccggcggagctgtcgcacgccgccaacgcggggctggacatcgcggtgcggatgctcgagcccatcaaggaggagatacccaccatctnctacgccgatttctaccagcttgccggagttgtggccgtcgaggtgtccggtggacct

SEQ ID NO: 404938 - DNA, 522 bp, Oryza sativa nipponbare
caccggcgatattccggcgggattgggctccatgccggtgctcaccctgctcgacctttcgtcgaacaagctctccggcggtattccgacgtcgctgggatcgctgaagattaaccagcttaacctgtcgtcaaatcagctcaccggcgagatcccggccgcgctcgccatctccgcctacgaccagagcttcctcggcaaccccggtctctgcgtatcggcggcgccggcgggtaacttcgcgggcctgcgctcgtgcgccgcgaaggcatccgacggcgtatcgccgggtctccggtcgggtctcctcgccgccggcgcggccctcgtcgtcttgatcggggcgctcgccttcttcgtcgtccgcgacatcaagaggcggaagcggctcgcgcggacagagccggcatggaagatgaccccattccagcccctcgacttcagcgaggcctcccttgtgcgcgggctcgccgacgagaacctcatcggcaagggcggcgcggggcgcgtgtaccgcgtcgc

SEQ ID NO: 404939 - DNA, 513 bp, Oryza sativa nipponbare
cccacgcgtccgatcatacccacatgttgagtaccagcctgccccagccatgctgtcctccgtaccccagtctgttactgctaataagacaacaccacctccaactgctgtggacattttcaagcttacccgctcagaccttggtcgactgcgttcgcagctcccatcaggagaaggtgcaccacgtttcagcacatatgcagttcttgctgcacatgtctggcgatgcgtatctcttgcacgtggcctgccttctgaacagcccactaagctgtattgtgccactgatgggcgacaacggttgcagcctccacttccagaaggttactttgggaatgtcattttcaccgccactccacttgctgaggcaggcaaggtgaccagtgggctggcagatggagcagcagtcatccaagaggcgctagataggatgaacgatagctactgccgctcagcattggactacctggagctgcagcctgatttatcagcattggtccgtggagcacacac

SEQ ID NO: 404940 - DNA, 444 bp, Oryza sativa nipponbare
  unsure (1)..(444): unsure at all n locations
gattatgcaatgcaatgcagaactggtgtgccattcgacatgcgtggttaccagggtgtttacaatttagagagacggatctatgagggagcagtcaggggtctttcacctgttcaaggtccactgcctgtcaatttcccactccctgaccccaccaatcccctctctctcaacgggggggctcttcaacttcactcctcaaggtccgccgcactagacaaatctcccagngtcactgccgccatagccggagctcgagctgccgccactcagtattcacgcaacaatactgntattactagtactccaaccgaagaaactcgacaaagattttctagggaaaaccatgcagataacacttcagggccataaattgtcattacagatcaccccgtttgcaaaaccagaatctaccaatttttgccctgaccaatccacctattt

SEQ ID NO: 404941 - DNA, 449 bp, Oryza sativa nipponbare
  unsure (1)..(449): unsure at all n locations
gccgaggtggacgcgctcttcagcgagctcgtgacggcgtgcgtcccggcgagccccgtcgacgtggccaagctcggcccggaggcgcaggcgatgcgggaggagctcatccgcctctgctccgccgccgagggccacctcgaggcgcactacgccgacatgctcgccgccttcgacagcccgctcgaccacctcgcccgcttcccgtactacggcaactacgtcaacctgagcaagctggagtacgacctcctcgtccgctacgtccccggcattgcccccacccgcgtcgccttcgtcgggtcgggcccgctgccgttcagctccctcgtgctcgccgcgcaccacctgccggacgcggtgttcgacaactacgaccggtgcggcgcggccaacgagcgggcgaggaggctgttccgcggcgccgacgaggggctnggcgcgcgcat

SEQ ID NO: 404942 - DNA, 529 bp, Oryza sativa nipponbare
  unsure (1)..(529): unsure at all n locations
cccacgcgtccggattattatgcaagcaggacaagcagcagtaatggctcagtatatttttcattacaaaattccacaaattcagatatggatctatctattttctatgcaaaggagggaacttggtgctttggtgtgaaacatccaagtgataaatcaaattctcagacgtacatgtccatatctcttcagggatgccataagaactgcaatcagaaaggagcgtgtcattcctcaattgatgaaagtgggctaacgttctacagcttctgcacgtgcgatcgtgatcatggtgggtttgattgcaatgatgaattagtttcacctaatgggcacatctggcagtctgtctttctaattgcatcaaatggtgcagcaattttacctgccttttgggctctccggcaaaaggcatttgcagaatggattctttacacttctagtggaatttctagtgctntataccattcatgtgatgtgggtacctggtgcatactatctttccgtgtattacagnttttggatttct

SEQ ID NO: 404943 - DNA, 484 bp, Oryza sativa nipponbare
  unsure (1)..(484): unsure at all n locations
cccacgcgtccgaaaggatccagggagtgcctgatagccgcactcgataagatggcagatgcagcaggcttaccaccttacggtgccgttaatcaggtggatgccgtggtgaatgaggcgctcaagacagttaatgctgatgaaagaacagcggtagacgaggccgggttcaagaaactactgacagatatccttagggcagtgatgatgcagctgaacagacagccgattttcgtctcgaacagcaccgtagttcacgagccattgttcagttcatccgcaattntatcctcgcctccagtgaaatcatcgccgagtgaataaattaaaccatatatgaatgttaatgtgcttgacagtggtctatctgtaagcagtgcctgtgatgttgtttttttgtctgatcaagcactgcggnggcatgtatagactggctacaacctgacgagatgtaaagacacttncgtcagtcttgctagcctga

SEQ ID NO: 404944 - DNA, 474 bp, Oryza sativa nipponbare
  unsure (1)..(474): unsure at all n locations
tgttgcatcatttttcttcgatcgggctgctgaggccggttttgtaaacccgaaggcaccatttgctaaggttaaaccctcagacttcgaagaagctgcacgacgtgtttgtaaactgaatgtgaaggatgcacaggccacctacccggatgtttcagaggagaacgttccatacctttgcatggatctagtctaccagtacacgttacttgtggatggatttggtgtggatccctaccaggatattacattggtaaagaaggtgccttatagcaattcatttgttgaagcagcatggccccttggtagtgccattgaggttgcatcttcatcatagcagaaatagcttggctataacttatgaaagaaaggaaggtctcagcatatagntttggcttagttcaccgacttagtagggagtgtagatcctatggttgagggtagattctttttttacttgattcaccatttggt

SEQ ID NO: 404945 - DNA, 489 bp, Oryza sativa nipponbare
  unsure (1)..(489): unsure at all n locations
atcgcagcgagaagccaagaagcactcaaccacgcgctgttcgtcatggcgagggtacagctctgggtggccgccgcgtgcgccgtcgtgctcgcgctcgccgcgccctcgctcgccggcgaccccgacatgctccaggacgtctgcgtcgccgacttggcgtccccggtgaagctgaacgggttcccgtgcaaggcgaacgtgacggcggacgacttcttcttcgcggggctgaagaaccccggcaacaccaacaacccggcggggtcgaacgtgacggcggcgaacgtgcagtcgttcccgggggtgaacacgctgggcgtgtctatggcgaggatcgactacgcgccggggggacagaacccgncgcacacgcacccgcgcgccaccgagatcatcttcgtcctcgagggcgtcctcgaggtgggcttcatcaccactgccaacaagctcttcaccaagactgtcaccgccggcgaggtcttcgtc

SEQ ID NO: 404946 - DNA, 474 bp, Oryza sativa nipponbare
cactccgctagctccggccaccaactttgacccgtcctcctcctccgcatcccccatcccctcctccccggcggcggcggcggcgcggaggcggcggcacgggagcggctagtggtttcgtcggcggaggcggaggcggggccaagatgttcgggcgcgcgccgaagaagagcgacaacaccaagtactacgagatcctgggggtccccaagaccgcctcccaggacgacctcaagaaggcgtaccgcaaggccgccatcaagaaccaccccgacaagggcggcgaccccgagaagttcaaggagcttgcacaagcttatgaggtattgagtgacccggagaaacgtgaaatctatgaccaatatggtgaagatgccctcaaggaaggaatgggtggaggcggatcccatgttgatccatttgacatcttttcatcattctttggacctttctttggtggtggtggcagcagca

SEQ ID NO: 404947 - DNA, 504 bp, Oryza sativa nipponbare
cccacgcgtccgtgaggaagtagctcgttatgagacagcaaatttgactgcggcagctgttcctgcacttctattacctccaccgaccacaccattggacgaacatttggttgcggggctccctcctcttgaaccatatgctcgcttgtttcatagatactatgcaattgctactccaagtgctacccaaaggttgctttttggtcttctcgaggcaccaccatcatgggccccagatgcacttgatgcagcagtacagcttgttgaactccttagagcagcggaagattacgattctggcatgcggcttccaaagaactggatgcatcttcatttcctgcgtgctattggaactgcaatgtcaatgagagctggtatcgctgctgatacgtctgctgctttacttttccgaatactctcccaaccgacattactttttcctccactgagacatgccgaaggagttgaactccatcatgagccactaggtggctatgtatcatc

SEQ ID NO: 404948 - DNA, 470 bp, Oryza sativa nipponbare
atcgatcgttcgttcgttcgatcgttcgaggacgagagatttgctaacatggcgttggcagggacctccaaagtagtgctgggatgtgtcgcgtttgggatattctgggtgctggccgtcttccccaccgtcccgttcatgcccgtcggccgtacggccggctccctccttggcgccatgctcatggtcctcttccgtgtcatctcgccggaggacgcctatgccgccatcgacctcccaatcatcggcctcctctttggcaccatggtcgtcagcatcttcctcgagagggctgacatgttcaagtacctcggcaacctgctctcctggaagagcaggggcagcaaggacctgctcttccgcgtctgcatcgtgtccgccattgccagcgcgctcttcaccaatgacacctgctgcgtcgtgctcaccgagttcatcctcaaggttgccaggcagaacaaccctgccgc

SEQ ID NO: 404949 - DNA, 503 bp, Oryza sativa nipponbare
cggagcagccgcctcccttccaagaacacacaacgcaagaggagcagagcagttcagatcagagcagggaaggagcaagcacaatggggagggctccgtgctgcgagaagatggggctcaagaagggtccatggacgccggaggaggacaaggtcctcgtcgcccacatccagcgccacggccacggcaactggcgcgccctgcccaagcaagccgggctgctgcgttgcggcaagagctgccggctccggtggatcaactacctgcggccggacatcaagcggggcaacttctccaaggaggaggaggacaccatcatccatctccacgagctgcttggcaacaggtggtccgcaattgccgccaggttgcccgggaggacggacaacgagatcaagaacgtgtggcacacccacctcaagaagcgcctcgatgcgccggctcagggcggtcatgtcgcggcgagcggcggcaagaagcacaagaagccgaagagcgcgaag

SEQ ID NO: 404950 - DNA, 469 bp, Oryza sativa nipponbare
cccacgcgtccgcccacgcgtacgatcggagcagcgaagcggaggcagccgcagccatggcgttggccgctcgcctcgtctcccgctcccggcagctatactctgctcaagctgccttggcaaatggaggtgccactcaagtccgcttgtatgccaaggaggcagatcgtactcccgtcaatggtgatgacctattgaagggcatattttttgaggtaaagaagaaatttgagactgcccttggtgtacttaagaaggaaaagatcactattgatccagatgatcctgcagcagtttctcgttatgcccaagtcatgaagactgtaagacaaaaggcagatcttctatccgactctgagaggattaaatataccatcgacacctttacaaagggcatccctgatgcacggacttacttgaatactcttcaggagatcaggataaagagtggccttatagatgatatggg

SEQ ID NO: 404951 - DNA, 433 bp, Oryza sativa nipponbare
  unsure (1)..(433): unsure at all n locations
gtttgccgccgctgacctcgtatagtgatgtatttggagagtgggcgcctgggatggcgcctatatgtgggctctgtggcatggagtgcagagacgggaatgcccaaatattgaaggatggttttaaagtatgctcaaaatgttatgccaataatgataataagggtgaagcaaatatacatccaggtgacaaaaaggagcggatcgacaatcattcttctagtgcatggacagatgcagaaactctccttctcttggaaggtgtactaaaacatggagatgactgggatctcatcgcccagcatgtccgcacaaagaataaatcagaatgcattgcaaggctaattcagttgccttttggtgaacatatgctgngcacantaaatggtaaattggataacagactccataaaatncaaacaaccgatggaaa

SEQ ID NO: 404952 - DNA, 271 bp, Oryza sativa nipponbare
  unsure (1)..(271): unsure at all n locations
tgcttgtaccgggcggggatggaggcggcgacgatggcgtggacggcggcgggggtggggatggcgctggtgtactggttcgtgtgggtgatgggagcggcggaggtgaaggggaagcgggcggtggatctcaagatgggatccatcacgaacgacaaggtgaatgacaagtacacgggggggtggtncgtcttccggcgccccaaggagacggcgaccaccgagggctggggcgagaaggtgccggncttngncgacaccttttacaacc

SEQ ID NO: 404953 - DNA, 400 bp, Oryza sativa nipponbare
cggacgcgtgggcggacgcgtgggctgatggggaagtacgggatcaacgtgcccaggggcgcggcggcgggatcggtggaggaggtcaaaaacaccttgaagaacgtcttccctagtgagaaagagatagttgttaagagtcaaatcctggctggtggccgtggattgggaacattcaaaagtggactgcagggtggtgttcatattgttaaggcagaggaagctgaaagcctcgcagcaaaaatgcttggccagattctggtaacaaaacaaactggtccacaggggaagattgtgagcaaggtctacttatgtgagaaactgtcacttgttaatgagatgtacttcgccatcacccttgacaggaatactgctggtccgctcattatagcgtgcagca

SEQ ID NO: 404954 - DNA, 500 bp, Oryza sativa nipponbare
cccacgcgtccgcccacgcgtccgcccacgcgtccgcccacgcgtccgcggacgcgtggggaagcattccgtctatttgcatcctttattgattctgagttaaaaaccgaagctttgctgacacttcacgagctggttcaacacctgagttgtcgacaatcccatttgatggcctctattatcactcctttattggagtctgaagatgccgagggtctcaagctttgcctgaagattgtctgcaatctttcatctgattcggatgtaaaaccatacctaatttcactgggaattgtctcaagattgtcacccattctttctgaaggaacctttgctgagtgttgcttggagattttgcggaacctgtgtgatgtggaagaagccacagtgcttattacaaaaactgatcgatgccttggttccggtgcagaatattctgacactggaagccctaaagaacgagagcatgcagtggttattcttttagcaatatgttccta

SEQ ID NO: 404955 - DNA, 441 bp, Oryza sativa nipponbare
cggacgcgtggggcgtgatgctctttcgaacagctcttgccctaatggagttgtatggtcctgcgcttgtgacaacaaaggatgctggggatgctgtgacccttttacagtctttggctggttctacttttgacagcagccaacttgttttaactgcatgcatgggttatcaagctgtagacgaagcaaggctgcaagaactgcgaaataaacaccggccatctgttatatcttcaatggaacagagagcaaaaggtcttcgtgtttggagggacaccaatggccttgcgtcaaagctctataatttcaagcgtgaccctgaaccattggtgtctttatcaacagaacaattaagtgacttgacagaaactagttctggaagtacagatgacatgtatagtggcctgactgtcaacactgagattgattctttgcctgatc

SEQ ID NO: 404956 - DNA, 506 bp, Oryza sativa nipponbare
cccacgcgtccgcccacccagtgatggaggtcgtggcaaaggagcacaaggtcacaatcatggaccacgagaagggcaaggtgacggagcaggtcgtggatgatcctatgcagatccccaggagcatgatggaaggatggcacccgcagcagatcgatcagctccccgattccttcaccggtggatgggtcgggttcttttcctatgatacagtccgttatgttgaaaagaagaagctgcccttctccggtgctccccaggacgataggaaccttcctgatgttcaccttgggctttatgatgatgttctcgtcttcgacaatgtcgagaagaaagtatatgtcatccattgggtaaatcttgatcggcatgcaaccaccgaggatgcattccaagatggcaagtcccggctgaacctgttgctatctaaagtgcacaattcaaatgtacccaagctttctccaggatttgtaaagttacccactcggcagtttggtacacctttg

SEQ ID NO: 404957 - DNA, 447 bp, Oryza sativa nipponbare
cccacgcgtccgcccacgcgtccgcggacgcgtgggttttttttttctaaaagaagcatcagccgttaaaaactccacaaacaatccccaaacatggccagaggctttgcttatgttcagcgtctgacttgtgaaaacgcccaggattcccaaactacagcggcaaatccatctaattaaacatcaagactcgtctcaacaacaacctgccacaattcacaaacagcaggctgctgcacaagacggtgtacacggttcattttatttgggtgttcgtttccaccatcagattgatataatacacgcgaacaagcagaaacattcggcaacaatttctccaggaaaatcgcggcctatttcgtcatcatcccgagcgagcgttatttggaagagggagtctttttcagacaggcacagcctcaatggcaggagcgagtgaccaacgtc

SEQ ID NO: 404958 - DNA, 395 bp, Oryza sativa nipponbare
cccacgcgtccggtcacttctatgacttcacttcgttagtgcgagagttagaggttgctggtgaaatctatgaaaggaagacttatccatttgaattctctactgttgagatgccttatgagtcgtataacggaacaaatgtcagattgaggtacatcctgaaagttacaattggcagaccatatgctactagtgttgtggaatgtcgagatttctgtgtaaggaattacactcctcttccttcaattaacaatagcatcaagatggaagttggaattgaagattgtttgcatattgaatttgagtacagcaaaagcaagtaccatctcaaggatgtgatcgtgggaaaaatctattttcttctagtcagaataaagataaagaacatggagctt

SEQ ID NO: 404959 - DNA, 291 bp, Oryza sativa nipponbare
cactccccttcccttccttctccgggctcctccctctctcgtcgtcgtcgtcgtcgccgtcgccggctcgccgcgttctcctccgccgccgctgctgagccgggatggccgcgcgtagcccctacttcgtccccgagagcgaggggatccgggccggggagtcgccggccgcggcgctccgcaggatcctcgcgtcgccgggggcgcaccaggccccctgctgcttcgacgcgctcggcgcccgcctcatccagcgcgcggggttcccgaactgcttcatgggcggtttct

SEQ ID NO: 404960 - DNA, 417 bp, Oryza sativa nipponbare
gcagatgatctgctgctgcaacaagatggatgccaccactcccaagtactccaaggcccgttatgatgaaatcgtgaaggaagtctcatcctacctgaagaaggtcggctacaaccctgacaagattccctttgttcccatctctgggtttgagggtgacaacatgattgagaggtccaccaaccttgactggtacaagggccccaccttgcttgaggctcttgaccagatcaacgagcccaagaggccatcagacaagcccctacgtcttccccttcaggacgtgtacaagatcggcggtattggtaccgtgcctgtgggtcgtgttgagactggtgtcctcaagcctggtatggtggtgacctttggtcccagcggtctgaccactgaggtcaagtcggttgagatgcaccacga

SEQ ID NO: 404961 - DNA, 496 bp, Oryza sativa nipponbare
ctcatctctttcctgcagccaagtcagtttgcattcgcacaaagccagttgcaagcatgcagcaagaacaggcagacggccgggagatcgtcatcgccggcgccggcctcgccgggctcgcagtggccctcggactgcacaggaaaggactgaggagcgtggtgctggagtcgtcgccgacgctgcggacgtccgggttggcgttcatcacatggacgaacgccttccgcgcgcttgatgcccttggggtaggcgacaagatgaggagccagcaccagcagatccagaggttgaatgtcatgtcttcagctactggagaaatagtgcaagaaattgatctgagggcgcaaggcaaacggggaacccatgaggcacgctgcgtgagccgcaccgggctgctactggcgttggaggaagagctcccaagaggcaccatccgctactccttcaagatcgtctcgatcgaggaagacggcaacgccaagatccttcatct

SEQ ID NO: 404962 - DNA, 492 bp, Oryza sativa nipponbare
cccacgcgtccgcccaatctcgcgaggctctcgtcgtcgaatcgaatcctctcgcgtcctcaagatgcagatctttgtgaagacattgaccggcaagactatcaccctcgaggtggagtcctctgacaccatcgataatgtcaaggctaagatccaagataaggagggcatccccccggaccagcagcgtctcatcttcgctggcaagcagctggaggatggcaggacccttgctgactacaacatccagaaggagtcgacccttcaccttgtcctccgcctccgtggtggcatgcagatctttgtcaagactctgaccggcaagactatcacccttgaggtggagtcttctgacaccatcgacaacgtcaaggccaagatccaggacaaagagggcatccccccagaccagcagcgtctcatcttcgccggcaagcagctggaggatggcaggacccttgctgactacaacatccagaaggagtccaccct

SEQ ID NO: 404963 - DNA, 493 bp, Oryza sativa nipponbare
cccacgcgtccgcgcatcgacgcctcgtccctcctaggcctagctagtctactccgaccaagttgtcgccgagaagcgaggagcgccggcgatggaggtgaagtgccgtcggctggaggggaaggtagccgtcgtgacggcctccacgcagggcatcggtctcgccatcgccgagcgcctcggcctcgagggcgccgccgtcgtcatctcctcccgcaagaagaagaacgtcgacgaggcggtcgtgggcctcagggcgaaggggatcaccgtcgtcggggtggtctgccatgtctccatcccggagcagcgcaagaacctcatcgacacggcggtcaagaattttgggcatatcgacatagttggcttcaatgctgctgccaatccttccgtagataacatattagaaatgaaagagcctttccttgacaaactatgggatttttatggtaaggcatctatttttctttttcaggatgctgctgcatatttg

SEQ ID NO: 404964 - DNA, 469 bp, Oryza sativa nipponbare
cccacgcgtccggcagaaacaaacctctctcactcccagatacctgctgctgccactagcgccactaccatggatccttgcaagttccggccgtcgagctcgttcgacacgaatacgacgactaccaacgcgggagctccggtgtggaacgacaacgaggcgctgacagtggggcccagggggccgatcctactggaggactaccacctgatcgagatggtggcgcacttcggccgggagcgcattccggagcgcgtggaccacgctcgcggcgcctgcgacaagggcttctttgagtgcacccacgacgtcaccgacatcacctgcgccgacttcctccggtccccgggcgcccagaccatcgtgatgcgccgcttctacaccgttatacacgagcgcggtagtccggagacgatccgcgacccgcgcggggtccggcgtcaagttctacacccgcgagggcaactgg

SEQ ID NO: 404965 - DNA, 434 bp, Oryza sativa nipponbare
  unsure (1)..(434): unsure at all n locations
ccgacacgtctctcatcttcacgcaacgaacagcagcagcagctcaagctaagctaagctaaagtactacgtgttctttcgtcttcgtcggcgccggagtttgattcgtcggagctagctagcaagaggaagaagaaaatgttggccatattccagaagcaggtggcgcacgcgccggcggagctgaacagcccgcggagcagcgcggcgaagcccaagaaccccgacgagatcctcagggacttccacgccctccaccccatcgaggccttctccacctccttcggcggcggcgccgccctcgcctgcgtcgccggccacgcccgcaatggcctctctggctacgagaggatgttctgtgggctggatgacatctactgcgtgttcatggngaggctggacaacctgagcagcctgatccggcaagacgggct

SEQ ID NO: 404966 - DNA, 529 bp, Oryza sativa nipponbare
cccacgcttccggcaaggaggaagagcagctagaggcgaggcaagaaaagaagtgaaatctctccgttagacaggaagaggaaaagcaagggggaattggggatggcgtcaaagaggatacagaaggagctcaaggatctgcagaaggatccccctacatcatgcagtgcaggtcctgttggtgaagacatgttccactggcaggcaacgataatgggtccatctgatagcccatatgctggtggagttttcctagttaccatccacttccctcctgattatcccttcaaaccacccaaggtggcgtttcgcaccaaggttttccatccaaacatcaacagcaacgggagcatttgccttgacatccttaaggaccaatggagcccagcactaaccatttccaaggtgttgctgtcaatctgttccctgctgactgatccgaaccctgatgatcctctggtccctgagatcgcccacatgtacaagacagataggcacaagtacgagaacacagcaaggacctggactc

SEQ ID NO: 404967 - DNA, 486 bp, Oryza sativa nipponbare
ccaccctcgagaagttccttggaacagatcccagtggtgttcaatgttgtcattatgtccccacacggttacttcgcgcaagccaatgtcttgggttaccctgacactggagggcaggttgtctacattttggaccaagtccgtgctatggagaatgagatgcttctgaggatcaagcagcaaggtctcaatattacaccacgcatccttattgtcaccaggttgctccctgatgcaactggcaccacctgcggtcagcgtcttgagaaggtccttggcaccgagcacacccacatcctacgtgtgcctttcagaactgaaaatggaattgttcgcaagtggatctcacgttttgaagtctggccgtacctggaaacattcactgatgatgtcgcgcacgaaattgctggagagctccaggccaatcctgacttgatcatcggaaactacagtgacggaaaccttgttgcatgcttgcttgcacac

SEQ ID NO: 404968 - DNA, 473 bp, Oryza sativa nipponbare
cggacgcgtgggcggacgcgtgggagaatatgttgcaataaaaagtttatcttacaaaatttcatccatcattagatagcttcctaatgccggagagaactactccctcatcacgcgccaggtaaatccacgggtgatccttgtacaatgcttacatgatttactcaatggaatggaatcgaatcgaatctatatatacatattcaagcagtgccaagcactgctgaatgaaaaagacctaggtacctgacttattactaccaggccttagctgagctagaaagctgggaaagaatgggcgatacatcttacactgttacatctcgctcagcagattgctgatcttgcgaagctccgtcagagcagccattgcagtgacctgtcctttgcctccaagaatgttgtttgagaagttctccacagggccaggctgaccacggtcttgctgaaatgccgactcaatcacctggata

SEQ ID NO: 404969 - DNA, 607 bp, Oryza sativa nipponbare
cttcttcttcctctccctcttccctaccaagcgagaccactcggcccccacaaaatctccgcttcttctccgagaccgagatggcactcgactctgttccatcctaccccagcgatcttggatccagcagggccaggacgccgcagcagcaaagggtcagccccaggaaggaggagcggacatggacgaccgacacctacgcgccgtacgacgacggccaccagtggaggaagtacggcgagaagaaactctccaattccaacttcccaaggttctattacagatgcacctacaagaatgacatgaagtgccctgctacgaagcaagtccagcagaaggacactaatgatccaccattgttctcagtcacttacttcaaccaccacacctgcaacagcagctcaaagatcgtaggcagcactcctgattctactgtgcagtcgaggaaagccatttcgatctgcttcaattcacatggccaaaccggtgaacagcccacattcttgtcatcatcagcttccttgttgtcaccgagcatgcagtcgtacagttccaaccagcaacctgacagaacacctacagtcgccaggttcagtgggcagacaca

SEQ ID NO: 404970 - DNA, 492 bp, Oryza sativa nipponbare
  unsure (1)..(492): unsure at all n locations
gcgagctagccagccagtgttagagcttgagctgcttgttcttcttctacctcctgcactcgcgtgctgcacaagtagctcagctagatagagcgtcagaaatggccagcaacaactcgagaacaaactccagggcgaactactccaacgagatccacgatctctccacggtgcagaacggcaccatgcctaccatgtactacggcgagaaggccatcgccgacttcttccctcctcacctcctcaagaaggtcgtgtcggaggtggtggccacgttcctgctggtgttcatgacgtgtggggcggcagggatcagcggcagcgacctgtctcgcatatcgcagctgggacagtcgatcgccggtggcctcatcgtgacggtgatgatctacgccgtcggccacatctncggcgcccacatgaaccccgccgtgacgctcgcgttcgccgggttcaggcatttcccctggattcagggtccgttctacttgg

SEQ ID NO: 404971 - DNA, 382 bp, Oryza sativa nipponbare
cggacgcgtgggttgttctggtacacaaccccagggcagtcaatcagaaatattcttttagtcagagtaatgtactgccacaccttcgtctctccaggaattggagccactttgcaaacactcttggagcgtaacgtgttgataactgatgactgccctggggttgtgtaccagaacagtgagtgagaaactgatattgttcttaagggcgtggtgcgtgtgacaaatttggcggatgcttctgagcacattggtgaagttctgagacgtgtaaaaaaggagcatcttacaagagcttacaaaattgaagactgggttgatgataatgatcatctagaccaactgagcaagaccactggaaagctatttagggcctagggag

SEQ ID NO: 404972 - DNA, 461 bp, Oryza sativa nipponbare
  unsure (1)..(461): unsure at all n locations
cgtcggcctgagtcgccgggctcntggtcgggagccgatcccctccgcagggaggcttctctgcagctaatacaggaaaattactttagtttctactcagcattcttgtgtgataatggcgttagcagcaatctacagccttttcatcattaacaaatctggcggccttatatactgcgggactatggctcagcagggaggacggacaccaatgacagtctacgcttggcaagtctttggcattccatgcatgctatctcccagcagctgtcccctacacctggctgtgaaggcattgaccttctacaagcccacaactttgatctccattgcttccagtccctcacagggacaaagttttttgctgtatgcgaaactggtgctcaaaatatcgagactctactgaaagtcatatacgagctctacacggattttgttctgaaaaatccattctacgagat

SEQ ID NO: 404973 - DNA, 496 bp, Oryza sativa nipponbare
  unsure (1)..(496): unsure at all n locations
cggacgcgtgggttttgcctcccgaggcaagcgcagacacaagcctcgccgtattctctcggagcaaagcgaacgcgaaaccccacccgcggcggcgagaaatccggcgacgatgagccgcggcacgggcgccggctacgaccgccacatcaccatcttctccccggagggccgcctctaccaagtcgagtacgcgttcaaggcggtgaagtcggcgggggtgacgtcgatcggcgtccgcggcaaggactccgtctgcgtcgtcacacagaagaaagtgccggacaagttgctggaccatacgagcgtcacgcacttgttcccgatcaccaagtacatcggtctgctcgccactggcctcacagctgatgcaaggtccttagtctaccaagcaaggaatgaggcagctgaattccgtttcaaatggngctacgagatgcccgtagacgtattagcaaaatggatagcagacaaagcacaagtctacacgcagcat

SEQ ID NO: 404974 - DNA, 482 bp, Oryza sativa nipponbare
gccgcctctcgccgctcgccgccgccgccgccgccgccatgggtgcgtacaagtacgtgtcggagctatggaggaggaagcagtcggacgtgatgaggttcgtgcagcgcgtgcggtgctgggagtacaggcagcagccggccatcgtccgcctcacccgccccacccgccccgacaaggcccgccgcctcggctacaaggccaagcagggttatgtggtttaccgtgtccgtgtgaggcgtggtggcaggaagaggccagtgcccaagggtattgtctacggcaagcccaagcaccagggtatcacccagctcaagttccagaggaacaagaggtcagttgctgaggagagagctgggcgcaagttgggcggactcagggtgctcaactcctactgggtgaacgaggactccacctacaagtactttgagatcatccttggggatgttgctcacagtgctatccgcaatgacccaaggatc

SEQ ID NO: 404975 - DNA, 552 bp, Oryza sativa nipponbare
  unsure (1)..(552): unsure at all n locations
gccatacaacagtgtcctctccacccactccctccttgagcacaccgatgtcgctgtcctgctcgacaatgaggccatctatgacatctgccgccgctccctcgacattgagcgcccaacctacaccaacctcaacaggcttgtgtcccaggtcatctcctcactgactgcctccctgaggttcgatggtgctctgaatgtggatgtcaacgagttccaaaccaacctggtgccctacccgaggatccacttcatgctttcctcctacgccccggtgatctcggccgagaaggcctaccacgagcagctctccgtggcggagatcaccaacagcgccttcgagccgtcctccatgatggccaagtgcgacccgcgccacggcaagtacatggcgtgctgcctgatgtaccgcggcgacgtggtccccaaggacgtgaacgccgcggtggccaccatcaagacgaagcgcaccatccagntcgtggactggtgccccacggggttcaagtgccggatcaactaccagccggccagcgtcgtcccggggggaga

SEQ ID NO: 404976 - DNA, 468 bp, Oryza sativa nipponbare
  unsure (1)..(468): unsure at all n locations
gcgagctagccagccagtgttagagcttgagctgcttgttcttcttctacctcctgcactcgcgtgctgcacaagtagctcagctagatagagcgtcagaaatggccagcaacaactcgagaacaaactccagggcgaactactccaacgagatccacgatctctccacggtgcagaacggcaccatgcctaccatgtactacggcgagaaggccatcgccgacttcttccctcctcacctcctcaagaaggtcgtgtcggaggtggtggccacgttcctgctggtgttcatgacgtgtggggcggcagggatcagcggcagcgacctgtctcgcatatcgcagctgggacagtcgatcgccggtggcctcatcgtgacggtgatgatctacgccgtcggncacatctccggcgcccacatgaaccccgccgtgacgctcgcgttcgccgggttcaggcatttcccct

SEQ ID NO: 404977 - DNA, 308 bp, Oryza sativa nipponbare
  unsure (1)..(308): unsure at all n locations
cccacgcgtccgcagagctcacaagcgcaagtcgcgtcgcaccgaagcagagtagagaaggagaggagcggagcgccatcagccgtccgatcgagtgatccgatggctctcgctctctccacctctgctgctgctgccgctgccgccgcggcgcgggcgctcgcggcgagggtgacgacgacgaggggttacgccgcgtcggcggcgtcgtcggcgatgaggcgggcggcggcggcggtggaagggaagggcgctgcggggatgacgcaggcgaaggacgggtcgtcgnnctcggcggngagggaggt

SEQ ID NO: 404978 - DNA, 517 bp, Oryza sativa nipponbare
cctcctcctcctctcttccatcggcgctgcgcgcgttcctccccctctcccacgatggcgtctcacattgttgggtacccccgcatgggccccaagagggagctcaagtttgccctggagtctttctgggatgggaagagcagcgctgaggatttggagaaggttgcgaccgacctcagggccagcatctggaagcaaatggctgacgctgggatcaagtacatccccagcaacaccttctcgtactatgatcaggttcttgacacggctgccatgcttggtgctgtcccagagcgctactcatggactggtggagagattgggttcagcacctacttctcgatggctaggggcaatgccactgtccctgccatggagatgaccaagtggtttgacaccaactaccactttatcgtccctgaacttggtcccaacaccaagttctcctactcttcccacaaggctgtgaatgaatacaaggaggctaaggcgctcggcgttgacaccgtgccagtac

SEQ ID NO: 404979 - DNA, 410 bp, Oryza sativa nipponbare
  unsure (1)..(410): unsure at all n locations
gcaatataatagccgcgcttagcgtagctagacgaacgtactagcagaagaagaagaagaaaatgccggtgagccggatcgcggtgggcgcccccggcgagctgtcccacccggacacggccaaggccgccgtcgccgagttcatctctatgctcatcttcgtcttcgccggatcgggatccggcatggccttcagcaagctgacggacggcggcggcacgacgccgtcggggctgatcgccgcctccctggcgcacgcgctggccctgttcgtggcggtggcggtgggagccaacatctccggcgggcacgtgaacccggcggngacattcggcgcgttcgtgggggggaacatcagcctggtgaaggcggnggngtactgtgtggcgcanctgctggggtcggtggtg

SEQ ID NO: 404980 - DNA, 626 bp, Oryza sativa nipponbare
  unsure (1)..(626): unsure at all n locations
atggcacaaaagatgaggtgtcagttcacagtgttaggttgccaaagaacagcactgtcggtgatgtgctaaatgatataaaatcaaaggttgagctgtctcatcctaatgctgagcttagactacttgaggttttctatcacaagatatacaagatttttgcaccgaatgaaaagatagaaaacatcaatgatcagtactggaccctgcgtgcagaggaggttccggaggaagagaaaaatcttggtccttttgatcgcttgattcatgtataccattttaccaaagacactcaaaatcagacgcaagttcagaactttggagaacctttctttatggttattcgtgaggatgaaaccctttcttctattaaagaacggatacagaaaaaactaaaagttccagatgaggatttctcaaagtggaaatttgcctacatatcacttggtcgcccagattattttgaggattcagacactgtagcttcaagatttcagcgaaacatgtatggagcttgggagcatatcttggactggagcatccagacacggctcctagaaagacacacancgctaatcagaaccgccattcatttgagagacctgtaaagatctataactagactt

SEQ ID NO: 404981 - DNA, 423 bp, Oryza sativa nipponbare
cccacgcgtccgcccacgcgtccgcaacccaacccgagccccccaagcgcagccatggtgttcgacgcgggcaccggcagcagcggcggcggctcgccggcggcgccctccccgccgccgccgtggcagaaccctctccgcgtgatcctgacggcggcgttcgcgcggcaggtgacggtggggcggtggttcacggtgttcgcgagcctgctgatcctgacggcgtcgggcgcgacgtacatcttcggcatctactcgccggcgctcaaggcgtcgctcggctacgaccagcacacgctcaacaccgtctccttcttcaaggacctcggcgccaacctcggcgtgctctccggcctcatcaacgaggtcacgccgccgtgggtggtgctcgccatcggcgccgcctgaacctctccggctacc

SEQ ID NO: 404982 - DNA, 469 bp, Oryza sativa nipponbare
cccacgcgtccgatgaaccccacctgcgagcggtgcagcgcgcgcttcagcgagaagaacctcctcaccgccatcgaccgcgaggccgtgttcagctatgccgacgacccgtgcagcgccaactacccgctcatgcagaagctccgcgccgtgctcgtcgagcacgccctcaccagcggcgaggccgagcccgaggcctccgtgttctccaagatcaccaaggtcgaggaggagctccgctctgcgctgccccgggagatcgaggccgcccgcgtcgccgtcgccaacggcaccgctcccgtcgccaaccggatcggcgagagccggtcgttcccgctctaccgcttcgtccgcgaggagctcggctgcgtattcctcaccggcgagaagctcaagtcccccggcgaggagtgcaacaaggtgttcctcggcatcagccagggcaagctcatcgaccccatgctcgact

SEQ ID NO: 404983 - DNA, 529 bp, Oryza sativa nipponbare
cggaatctcgagagcacagcgccgccccgacgacgagatccctcaccggcgccgccgccgccgcggccaggaggccgaggggccatgacgaccatccgccggttctgctgcgacgacctcctccgcttctcctccgtcaacctcgaccacctcaccgagaccttcaacatgtccttctacatgacgtacatggctcgctggcccgactacttccacgccgccgtcagccccggggaccgcgtcatgggatacatcatgggtaaggttgaaggacaaggtgaatcttggcatggacatgttacagcagtgtctgttgccacagaatttcggaggcagaagctagccaaaaaacttatgaaccttttggaggaaatcagtgacaagatggataaggcctactttgtggatctcttcgtaagagcatctaacatgccagcaataaggatgtatgaaaagcttggctatgtggtttatcgaagggtgctccgctattactcaggggaagaagaggccttgatatgagggaagc

SEQ ID NO: 404984 - DNA, 517 bp, Oryza sativa nipponbare
  unsure (1)..(517): unsure at all n locations
ggtgttttcatgaggaatccaacagtcgctgaattggtggaaactgtggaattcttcttggctgaggccatccagtcttatcgtgctgagagtgaaactgagctcaacctggcagctggtgactatatagttgtccggaaggtgtcaaacaatggatgggcagaaggtgaatgcagagggaaagctggctggttcccttacgactacatcgagaaaagggaccgtgtgcttgcaagtaaagtcgcccaggtcttctaggcgttcaatgagccatacatacataaccctggtgttgtacactgtattatgatcgttcgtgatcttcaaagaccctctgatcagagaaatcacaaatattcttttgttctattattgtcattatcactaccccttttgtcaaaaccagtgcagccttttgtatgacatcttgttgcatggctagctttctgaatatttcaaaatatacagcggggaggacactgttcatatacattcattctnctaaaaaatacaccct

SEQ ID NO: 404985 - DNA, 357 bp, Oryza sativa nipponbare
  unsure (1)..(357): unsure at all n locations
ccccgcgtccgccccgcgtccgggggggcgccgccggacgcggtgaatcggcacaagcagacgccgctgatgctcgcggccatgcacggcaagatcgactgcgtgctcaagctcctccaggccgacgcaaatatcttgatgttcgactcggtgcacgcgaggacctgcctccaccacgcggcgtactacggccacgtcgactgcctgcaggccatcctcgccgccgcgcagaccacgccggtggccgactcatggggtttcgcccggttcgtcaacgtcagggacgaccacggcgccactccgctgcatctngcggccaggcaggggcggccggggtgcgtgcaggtgttgctggag

SEQ ID NO: 404986 - DNA, 484 bp, Oryza sativa nipponbare
  unsure (1)..(484): unsure at all n locations
ccccgcgtccgcccacgcgtccgcgcacgctgccgcccacgcgtccgcggacgcgtgggctcgcctcacactcactcgctcagcactacttgcaccccctagctgagatcagtagtaaacggtcagtcaattgttgcaaagcgatcagctactggcgatggctcagggaaggggcagtgctgcaggacgacgcaacgccgccgtgctggcgatggtcctcctctgcgtgctcctccacggcgagctcgccgagtcggccgtgtacaccgtcggcgaccgcggcggctggggcttcaactccggcggctggctcaggggcaagcgcttccgcgccggcgacgtgctcgtgttcaagtacagcccgtcggcgcacaacgtggtggcggtgaacgcggcggngtacaagtcgtgcagcgcgccgaggggtgccaaggtgtacaagtcgggcagcgaccgggttaccctggcgcgcggnaccaactac

SEQ ID NO: 404987 - DNA, 436 bp, Oryza sativa nipponbare
cccacgcgtccgctgaccggcaagagcatcagggtggaggtggagtcttctgataccatcgacaatgtcaaggccaagatccaggacaaggagggcattcccccggaccagcagcgcctcatctttgctggcaagcagctggaggatggcaggacccttgctgactacaacatccagagggagtgcaccctccaccttgtgctccgccttcgtggtggtatgcagatctttgtcaagaccctcacaggcaagaccatcaccctggaggttgagagctcggacaccatcgacaacgtcaaggccaagatccaggacaaggagggcatccccccagaccagcagcgtctcatcttcgccggcaagcagctcgaggatggccgcaccctcgccgactacaacatccagaaggagtctaccctccacctggtgcttcgtc

SEQ ID NO: 404988 - DNA, 221 bp, Oryza sativa nipponbare
  unsure (1)..(221): unsure at all n locations
cggactcgtgggctttgaggtggntggacttgtcctccccctctttaccttttcctcctcggttcggttccgtggttcgtctagggtttagtgggttgagatggcggcgccggatgtcgagtaccgctgcttcgtcggcggcctcgcctgggccaccgacgaccgctccctcgaggggggggctccacctacnncnanatcctcnactccaanatcatcaa

SEQ ID NO: 404989 - DNA, 526 bp, Oryza sativa nipponbare
cccacgcgtccgatcagacaagtgagggtagggtgctgtaaacacagttagttcgtaattatcgcatagggccatggggaagtacagtgtgggtctcgtggttttagggtttctggcccttgcgttttcgaccactgtgctggctgaaacacatgttgttggtgactccaacggttgggacttctctgtgtcgtttgatagctgggctgatggaaaggtcttcgctgctggtgacactcttgttttcaactacaaaccgggcgcacacaacgtgctggccgtggacgcggcgacgtacaggagctgcaaggtgggcagctcggcggactcggtggcggcggcgacggggaccgcgtcgttcctcctcaagaagggcgtcaactactacatctgcggcgtccccggccactgcgccgccgggatgaaactccgggtcttcgccaactgatgaaactccggcgacagatcaatcccttaattaattaaaactatgtgggtgtctctgcagcctgaagcagcatatagc

SEQ ID NO: 404990 - DNA, 582 bp, Oryza sativa nipponbare
gtgaaacatgtcatctacgtaaacgaggaaggcgtctctagtgaagtatccttagctcaaaaatgcaccagctggagggttgagtcatttgaggaggtagagaggttaggattggaaacacctgtagaagcaaagctgcctcttccgtcagatactgcggtgataatgtatacaagtggcagcactggaatgcccaagggagtcatgatgagccatcgcaatgtcctggctgttgtatcagctgttatgaccattgtgcctgcacttggcaagaaggatgtctacttggcatacctcccattagcacacattcttgaattagcagctgagacagttatgtctgctgttggggcttctatagggtatggatcaccactgaccctgactgatacatcaaataaaataaagaaggggactcagggcgatgcttcagctctgaagccaacacttatgactgcagtacctgctatacttgatcgtgttcgtgatggtgttagaaaaaatgttgatgcaaagggtggtgcagcaaagaaactatttgatattgcctatagcccgcgggtagctgctatcaatggaagt

SEQ ID NO: 404991 - DNA, 299 bp, Oryza sativa nipponbare
cccacgctgtctcgggaaatcgatcgagtgatcacacgagataattaatatcagtctcggttcagtgcgcgtgatccagcagcagcaatggcaggcaaggcctcgatcgcgctattactctccgacaactctggtggtcttctcgctgggcatcgcctgctgcggtcactgaccgacgcctacgccgtcgaccctgtcgacgcccacccagactcccgacgcattcggcaagtgcccacgcgacacgctgaagctgagcgtgtgcgccaacgggctgggcctcatcaaggccaaagggg

SEQ ID NO: 404992 - DNA, 507 bp, Oryza sativa nipponbare
gggtgtgtccctgtctcccctctccttcctcctctcctttcccctcctctcttcccccctctcacaagagagagagcgccagactctccccaggtgaggattcagccatgaagggggccaaatccaagggcgccgccaagcccgacgccaagttggctgtgaagagtaagggcgcggagaagcccgccgccaagggcaggaaggggaaggccggcaaggaccccaacaagcccaagagggctccctccgctttcttcgtttttatggaggagttccgtaaggagttcaaggagaagaaccccaagaataaatctgtcgctgctgtaggaaaagcagccggtgataggtggaaatccctgaccgaagcggacaaggctccctatgtagccaaggccaacaagctcaaggccgagtacaacaaggccattgctgcctacaacaagggcgagagcactgccaagaaggcacccgccaaggagggagaggaggacgacgagggaggatctg

SEQ ID NO: 404993 - DNA, 469 bp, Oryza sativa nipponbare
caacgagtcaaatttgaaggcttcactgagcctttgacaatggcgccgcagctgccgctcgaggtggcctctgctcccaagctcgacgacgacggccacccacaacgcaccgggaatctatggacgtgcgtagcgcacattatcaccgcggtgatcgggtgcggcgtgctggcgctgtcgtggagcgtcgcgcagctcggctgggtggccggccccatcgccatggtgtgcttcgccttcgtcacctacatctcggccttcctgctgtcgcactgctacaggtctcctggctcggagaagatgcagaggaactactcctacatggacgccgtcagagttcacttagggaggaagcacacttggttatgtgggttgctgcagtacctgaacttgtacgggataggaattgcttacacaatcactacggcaacttggatgagggcaattaagagggcgaactgctaccaca

SEQ ID NO: 404994 - DNA, 566 bp, Oryza sativa nipponbare
  unsure (1)..(566): unsure at all n locations
cccacgcgtccgcccacgcgtccgggaaatgggagagaagaggaggcgtggacaccttaaccctgctggttttgcaggagggttgcatgatcatgaggagaagaagaacgaggagcataagctagacatgagtggcatgtccatggatgccctcccacacctcaccatgtctcttggtcaagtcaccatcttggatctctctaacaacaatcttgagagcatcccggagtcaataatcgctcggctgctgaacgtggtggtgctggacgtgcggtccaaccagctgaaatcgctgcccaactccatcggctgcctctccaagctcaaggtcctcaacgtctccggcaacctgctcgagtccctccccaacaccatcgaggagtgccgtgcgctggaggagctgcacgccaacttcaacgagctgacgaagctgccggacacgctggggttcgagctgcacagcctncggaagctgtcggtgaactccaacaagctggcgcagctcccctcctcgacgtcgcacatgacggcgctcagggcgctggacccccggcttaactggcttc

SEQ ID NO: 404995 - DNA, 445 bp, Oryza sativa nipponbare
  unsure (1)..(445): unsure at all n locations
gttctgcaggcgttggacaagatcaggttcgagagcttgacggacaagagcaagctggatgctcagccagagctgttcatccatattgttcctgacaaggcctccaacacactgtcgatcattgacagtggtattggtatgaccaagtcagatcttgtgaacaacctgggtaccattgccaggtcagggactaaggagtttatggaggcactggctgctggtgctgatgtgtccatgattggtcagttcggtgttggattctactctgcctaccttgttgccgagagagtagttgtgaccaccaagcacaacgatgacgagcagtatgtgtgggagtctcaggctggtgggtccttcactgtcacacgtgacacatctggngagcagcttgngaggggtactaagatcaccctctacctcaaggatgatcaggtactaacagaat

SEQ ID NO: 404996 - DNA, 361 bp, Oryza sativa nipponbare
  unsure (1)..(361): unsure at all n locations
cccacgcgtccgcccacgcgtccgcccacgcgtccgcccacgcgtccgcggacgcgtgggcgacgacgacgacgatgagttcgagctttccgacgatggcgacgagagtttggccgtgtcatgtgtgtcgtcccccaagtcgaaggcagtaccttcgttttctttttcgtcggatgtctcctcgagctccaggccgcggcggcgcgtggcggcggcggcggccggtcgtcggaaggcgagcaagaagagcaagtacaggggcgtccggcgccggccgtcggggaggttcgcggcggagatcagggaccccaagaaggggcggcgcgngnggctcggcacgtacggcagcgccgaggaggcc

SEQ ID NO: 404997 - DNA, 279 bp, Oryza sativa nipponbare
  unsure (1)..(279): unsure at all n locations
cccacgcgtccgcccacgcgtccgcggacgcgtgggtataccgtgagttgaaaattaattaagatcacttaaggtcttaaagctagcagccatggcggcatcgtccaagttggctttactggtgttcactctcctgctcgccgccgctgctttcatccacgtcgcctccgccgaagaaacacatgacgatcacgacggcggcgatcacgacccgtcgccatcgccgccggaccacgaggacccgtcgccgncgncgncggaccacgaggaccaaccggc

SEQ ID NO: 404998 - DNA, 502 bp, Oryza sativa nipponbare
acgagacagaaaatggcaccttccaaggtcagcctcgccgccgtgctcgccgtggccatctcgctggccatggcggccaccaccaccacctcggcgcagaacacgccgcaggactacgtcaacctgcacaacagcgcgcggcgcgcggacggcgtcggcccggtgagctgggaccccaaggtcgccagcttcgcgcagagctacgcggccaagcgcgccggcgactgccggctgcagcactccggcgggccgtacggcgagaacatcttctggggctcggcggggcgcgcctggagcgccgccgacgcggtggcgtcgtgggtgggcgagaagaagaactaccactacgacaccaacacgtgcgacccgggcaaggtgtgcggccactacacccaggtggtgtggcgcaggtcggtgcgcatcggctgcgcccgcgtcgggtgcgcggcgaaccgcggcgtgttcatcacctgcaactacgaccccccgggcaacttcaacg

SEQ ID NO: 404999 - DNA, 469 bp, Oryza sativa nipponbare
  unsure (1)..(469): unsure at all n locations
ctctcattgcatacaagttcctgaagagtttacaagagacccagaagatcaagatgtcgtgcggtggaagttgcaactgcggttcttgcggctgcggcggtggctgtggaaagatgtaccctgacctggctgagaagatcaacaccaccatcactactgcaaccactgtcctcggtgttgcacctgagaaggggcattttgaggtgatggttggcaaggcaggtgagtctggtgaggctgcccatggctgcagctgtggctccagctgcaagtgcaacccctgcaactgctaaggccaagatgatctatgactgaattgccaatgcaccagcctgtctacatgatgaataaataaagagtccatccagtgtgatggctcatgcctgtgtgtgtgtgtgtttgtctcaaccatgtgcgaatcaggtgtcanaagtccgtggctggaaatcaatgtggtttctggctttat

SEQ ID NO: 405000 - DNA, 508 bp, Oryza sativa nipponbare
cccacgcgtccgcccacgcgtccggtgaataccccattgtctcgattgaggatccgtttgaccaggatgactgggaacactatgctaagatgaccgctgaaattggagagcaagtgcagattgtcggtgatgacctccttgtcaccaacccaacaagggtggcaaaggcaatccaggagaagtcatgcaatgctcttctgctgaaggttaaccaaattggatctgtcactgagagtattgaggccgtgaagatgtcaaagcgtgctggctggggtgtgatgaccagccacaggagtggtgagactgaggataccttcattgctgatttggctgttggtttggccacgggtcagatcaagactggagcaccctgccgatcagagcgccttgccaaatacaaccagcttcttaggattgaggaggagcttggtgcggctgctgtctacgctggtgccaaagtccgcgcacccgtggaggcctactaaacttgatggtgaagacaggatgc

SEQ ID NO: 405001 - DNA, 516 bp, Oryza sativa nipponbare
cccacgcgtccgttaactctgtctgtaggctgtggagatcggaagagaactggcaaggaagcacttcatccaccatgtcttcagagagaacgacttcgaggatggcagccagaacctgtaccggttcttggagcacgaccctgccatcccaaagtactacaacttcatcaggggagccaccaacgacggcgagccgaagctggccgccgccatcgggcagaggatgaccaagatcatggttgccatcctggaggcctacgcctccgacgatcgccgccacctcgactacagccgcatcgccgccagcgaggagttcagaagatacgcgaacatggtgcaggaactccagagggtggacatgtcggcgctcccggccgaggagaggctgccgttcttcctgaacctgcacaacgcgatggccatccacgccgtcgtcagggtcggccagccgggggccatcgaccggcgggcctcctccaacttccagtacctcgtcggcgggcacccgtactcgct

SEQ ID NO: 405002 - DNA, 480 bp, Oryza sativa nipponbare
  unsure (1)..(480): unsure at all n locations
cttggctatattggacagtacagtggaattatccaatacatgcttctgggtaatgttggggaaacagatgatggtctgatccggtttgcattggggtgtgagaacctgcggaagcttgagctaaggagttgttgcttcagtgagcaagctttagcccgcgctatacggagtatgccttccctgagatacgtgtgggtacagggctacaaggcttctaagactggtcacgatctcatgctcatggccaggcccttctggaacatagagtttacacctcccagttctgagaatgcaaatcgaatgagagaagatggtgaaccttgtgtagatagtcaagctcagatacttgcatactactcccttgccgggaagaggtcggactgcccacgatctgtggttcctttgtatcctgcgtgactgtaaataccgatatggtatctctctgcttcgttcttgcctcttggctttnttgggtgatat

SEQ ID NO: 405003 - DNA, 496 bp, Oryza sativa nipponbare
gtccccccaatcgacggaaccctaattctctcccgcacgcgcgtcggcgatccgaggggaagtagggtttggaggaggaggaggggagaccaccggaggtaggcgaatcccccaaggccgggcaagatggtgctcgcgcagctcggcgggagcatctcccgcgcgctggcgcagatgagcaacgccaccgtgatcgacgagaaggtgctcagcgactgcctcaacgagatctcgcgcgcgctcctgcagtccgacgtccagttcaagatggtccgcgatatgcagtccaacatcaagcgcatcgtcaacctcgagacgctcgccgccgggaccaacaagcggcgcatcatccagcaggccgtcttcacggagctctgcaacatgttggatcccgggaagccttccttcactcccaagaaggggaaaccttgcgtggtcatgttcggtggtttgcaaggttctggtaaactactacttgtaccaatatgcatattat

SEQ ID NO: 405004 - DNA, 415 bp, Oryza sativa nipponbare
gctcgatcgctagccctactcgctagctagatcggcggccatggtgaacggctacttgttccgggagtacatcggcgcgcagttcaccggcgtgcgcttctccgacgtgcccgtcaacccgggcctcagcttccacttcatcctcgccttcgccatcgactacttcatggcgacgcagtcctccaagccggcgccagccaacggcgtgttcgccccgtactgggacacggccaacctgtccccggccgccgtcgccgcggccaaggcggcgcaccccaacctcagcgtcatcctcgccctcggcggcgacaccgtccagaacaccggcgtcaacgccacgttcgcgccgacgtcgtccggcgacgcgtgggtgcgcaccgccgccgactccgtctccggcctcatcgacgcctac

SEQ ID NO: 405005 - DNA, 515 bp, Oryza sativa nipponbare
gcgacttccttccttccttccggttgcttccgccgatcgacttctcgccccccaaatcgattcgccccccgcctcgatctatcgattccgcggcagcgccccttcgatcggttggagatggccaggacttccttcaagctcgagcacccactggaaaggaggcaagcagaatctgccaggatccgtgagaagtactcagacagaattccggtgatcgttgagaaggctgacaagaccgatgttccagaaattgacaaaaagaagtaccttgtccctgctgatcttactgttggccagtttgtctatgtggttcggaagaggattaagcttagcccagaaaaggccatctttgtctttgtgaagaacacattgccgccaactgcttctttgatgtctgcaatctacgaagagaacaaggatgaggacggcttcctctacatgacttacagtggcgagaacacattcggctctgcgtaattcatcaactgttgctgctgctgtaaataaacatggat

SEQ ID NO: 405006 - DNA, 393 bp, Oryza sativa nipponbare
gagctagcaaatatcaaaaagcagctccagcttcttctgatcgatcgatcgagctgagctataggcagtagctgctaattaagctaattaattgctaagcagtagtagagctagctaattaattaagatggccggcaagaaggtgcaggtttgtgcgctgttccttgccctcaatgtgctcttcaccatgcagatgggtgcagtagtgcaggcatgcgagccctactgccccacaccgacgccgccggtgacgccgcctccgtcgccgccgtcgggtggagggaataagtgcccgatcgacgcgctgaagctgagcgtgtgcgccaacgtgctcaacctgctgaagctgaagatcggcgtgccggagagcgagcagtgctgcccgttgctggg

SEQ ID NO: 405007 - DNA, 363 bp, Oryza sativa nipponbare
ctcaaggacagcggcaggtacaccgtgtgcgagatctccgagcacctgaggaggttcggctggatcgtgccggcgtacaccatgccggccaacgccgagcacgtcgccgtcctccgcgtggtcatcagggaggacttcagccggagcctcgccgagcgggtcgtctcggacatcggcggggtcctgcacgagctggacgcccattcggcccaggtgctgaagatctccagcgccatcgcgaagcatcaatcgggcgacgatggcgtggtcaccaagaagagcgtgctggagaccgagagggagatcttcgcgtactggagggaccaggtgaagaagaagcagaccggaatctggtaggggggc

SEQ ID NO: 405008 - DNA, 464 bp, Oryza sativa nipponbare
cggacgcgtgggcagccgccgccgccgcagcctcctcctctcgtcttctccttcgagttgttagctccctccttattcaaccatgggtaaggagaagacgcacatcaacattgtggtcattggccacgtcgactccggcaagtcgaccaccacgggccatctgatctacaagcttggaggtatcgacaagcgtgtgatcgagaggttcgagaaggaagccgctgagatgaacaagaggtccttcaagtacgcgtgggtgctcgacaagctcaaggccgagcgtgagagaggtatcaccattgatatcgccctgtggaagttcgagaccaccaagtactactgcacggtcatcgatgcccctggtcaccgtgacttcatcaagaacatgatcacgggtacctcccaggctgactgtgccgtgctcatcattgactccaccactggtggttttgaggctggtatct

SEQ ID NO: 405009 - DNA, 568 bp, Oryza sativa nipponbare
  unsure (1)..(568): unsure at all n locations
ccagggccacgatgatcttggcaagcgttgcgccaagtactacgaggccggtgcccgcttcgccaagtggcgtgctgtcctcaagattggccccaacgagccatcgcagctttccattgacctgaatgctcagggtcttgctcgctatgccatcatctgccaggagaacgggctggtgccgattgtcgagcctgagatccttgtcgatggctctcatgacattgagcgctgtgcctatgtcaccgagaaggtcctcgctgcctgctacaaggccctcaacgaacaccatgtcctcctggagggttccctcctgaagcccaacatggtcaccccaggatctgaatccaagaaggtttcccctcagctcatcgccgagtacaccgtccgcgccctccagaggactgtccctgctgccgtgcctgccattgtcttcctctctggtggacagagcgaggaggaggcgaccgtgaacctcaacgccatgaacaagctcagcaccaagaagccgtgggctctgtccttctncttcggccgtgctctccagcagagcacgctcaaggcctggggc

SEQ ID NO: 405010 - DNA, 506 bp, Oryza sativa nipponbare
  unsure (1)..(506): unsure at all n locations
cccacgcgtccgcccacgcgtccgcccacgcgtccgcggacgcgtgggtccgcgattcccttcccatttcgccgccgatgaagggcggcgggggcgcggcggcggcttcggcggcgccgggggactacgtctacttcaagtccgtcgtcccgctccacaagatctcgattggaccgaaattatggaggtactatgattttggaccaaagactgttccacctcttgtctgcatcccaggaattgcaggaacggctgatgtgtactacaaacagatcatgtctctctctatgaagggttatcgagtgatgtcaattgatgttcctcaagtttggaatcaccaggaatggattcattcatttgaaaaatttttggactccatgaatatccatcatgttcatatttatggtacatctcttgggggatttcttgcacanatatttgctcaacaccgtccaaggggaggaaagtccttggtcctatcaaatacctttcttgagacacataag

SEQ ID NO: 405011 - DNA, 305 bp, Oryza sativa nipponbare
  unsure (1)..(305): unsure at all n locations
cccacgcgtccgcggacgcgtgggtgcagaggaagcagagctccaatctgttcatgccaatggctgctggcacctgggtgaagctagagcagaagggagatgggccgggagcaagaagctcccacgccatcaccctcgtcggcggcacggcgtacgcgttcggcggcgagttcacgccgcgcgtgccggtggacaacgccatgtacgccttcgacctcaagtcgcagtgctggtcggcgctggacgcctccggcgacgtgccgncggcgngcgtnggcgtnaccatggcggtgcggcggcgcccc

SEQ ID NO: 405012 - DNA, 409 bp, Oryza sativa nipponbare
  unsure (1)..(409): unsure at all n locations
cccacgcgtgcgctccgctcgccgcgcctgcagatccccctctcgcctcctctcctctcctccccaaaccctagcgagcgaccaactcctgggtggggggatttttctccatggcgctgcagttcgtcgagtcgcagcgcgaggcgcggccggagctcgccgacccgtacgccgacctcgccgacctctaccagcggaagctctggcaccagctcaccctcaagctcgaccacttcctccagctccctgccgcgcagacgggtgacaccctcatacagctctacaacaatttcatcactgatttcgagacgaagatcaatcttctcaaacttgcgcatttcgcgggcatcggttcgcgccagtacccngacaagggtgctgctataagtttcctcgaggggggaatcac

SEQ ID NO: 405013 - DNA, 329 bp, Oryza sativa nipponbare
ctaccttatactgcgggtcttcttgggtgtcagatcctctattatcctagggcccaccaccagcaccgtagcaatggcgggcaacgggccgatcaacaaggaggacccgctcaactggggcgcggcggcggccgagatggccggcagccacctcgacgaggtgaagcgcatggtggcgcgaggccgcgagccgctggtcaagatccagggcgccaccctccgcgtcggccaggtggccggcgtcgcccaggccaaggacgccgcctgcgtatccgtcaagctcgactaggaggcccgagctcgcgtcaaggccagcagagagtggatcc

SEQ ID NO: 405014 - DNA, 448 bp, Oryza sativa nipponbare
  unsure (1)..(448): unsure at all n locations
cgcccctttgcctaagccattgctaatcgtcaacattggaggacccacaaggaattgtaagtatggtgtcgaccttgccaggcagctcatagcttctacgtataatgttctagacagctgtgggagtgtgagagtttcattttccaggagaacaccgcgaaaggtctctgatattatatcgaaagagttcgctggtcatcctaagatctatatttgggatggggaagaacctaacccgcacatggggcatcttgcatgggctgatgcttttgttgtaacagctgattctataagtatgttaagtgaggcttgtagcacagggaagcctgtttacgtcattgggactgagtattgtaaatggaagttntctgcttttcacaagactctacgggagcgaggagttgtccgtcctttcactggattggaagatattttaaatagctggagc

SEQ ID NO: 405015 - DNA, 363 bp, Oryza sativa nipponbare
ccatgacatggtcttcgcaaaggcctcgccggcgtcgctcgccgtcaaggcggcgtcgtggtcggagcccgtgcagcgattcctcaagctctgcgccgacgccggcaacctcgaggcctgctacattctcggcatgattcggttctactgtcttggcaaccggagcggcggcgccgccgccggcgccatcggctgcccgctcctctccgacttcgggtggagcctcccggaggcggagccccacccggccaacctcttcatggccgactggtgggcgtcccgcggcgtgcaggcgacggccaagaaacccggcctcgaggctcccgctgccgccaccggcgacagcgacggcggcggggagct

SEQ ID NO: 405016 - DNA, 545 bp, Oryza sativa nipponbare
  unsure (1)..(545): unsure at all n locations
cccacgcgtccgcccacgcgtccggttccaggtgccgtacaagatcctctgcaaggtcgtcaacgtcgagctcaaggccgagacggaaaccgacgaggtgttcgcgcagattaccctgcagcctgacccggatcaagagaatctgccaacattacctgacccgcccctgccggagcagccgaggcctgtggtgcactccttctgcaagatcctgaccccatccgacaccaacccaagagctcatcacaaaggaccttcatggatctgagtggaggtttaagcacatctacaggggccaaccccgtaggcatcttctgactactggatggagcacgtttgtgacatcgaagaagctgatttctggcgacgcgtttgtctacttgaggagtgagacaggagagcagcgtgtcggagtgaggcgtcttgtgcagaaacagagcacaatgccggcatctgttatatcaagccaaagcatgcatctttggtgtgcttgcaagtgcatctcatgctatcaagactaattcaattntcctagtgtactacag

SEQ ID NO: 405017 - DNA, 431 bp, Oryza sativa nipponbare
agttgttgtaaagttgcaagagagagatcagttgttgagtgcgtggaagcagagatcaggaagatgctggagaagctgtgggacgacgtggtggccgggcctcgaccggagaccggcctggagaagctccgcaaggccgctacaacccgcccccttgtcatcaacaaagatggcgacggcgaggcgagcggggcggcgtacaagcggacgcagtcgatgccgacgaccccgacgacgccggtgaccgccgtcgtcttcgtctccgacgacgacggcgacgacgacgccgcggggcagcaacgtgtggaggagcgtgttccacccggggagcaacctcgccaccaagagcctcggcgccaacctcttcgaccgcccgcagcccaactcccccaccggctacgactggctgtacagcgacgagaccaggagca

SEQ ID NO: 405018 - DNA, 353 bp, Oryza sativa nipponbare
  unsure (1)..(353): unsure at all n locations
cgaagctgccggacatcgagatcgacaacagcatgacgctgcaggagtactgcttcgcgaggatggcggaggtcggggcgcggccgtgcctgatcgacgggcagaccggggagtcgtacacgtacgcggaggtggagtccgcgtcgcggcgcgccgcggcggggctccggcggatgggggtgggcaagggcgacgtggtgatgagcctnctccgcanctgccccgagttcgccttctccttcctcggcgcggccaggctgggcgccgccaccacgacggcgaacccgttctacacgccgcacgaggtccaccgncaggcggaggccgcgggcgccagggggatcgncaccgag

SEQ ID NO: 405019 - DNA, 471 bp, Oryza sativa nipponbare
gtcttatctgccttcctccctcctgtcgccttgcgcctcgcgtgcgctccaccaccgaaaaaaaggacaggttccacataaagaccaacgagtaaaagcttgatctgtccggtgccaaccaatcaacaaacaagtttcatgtctgatctcgacgttcagcttccatctgccttcgatccgtttgctgaggcaaatgctgaggactccggcgctggccctggagcaaaggattatgtgcatgtgcgcatccagcagcgcaacggcagaaagagtctaactactgttcagggcttaaagaaggagtacagttacaacaagatcctcaaggatctgaaaaaggagttctgctgcaatggtactgtagtccaagatccagagcttggccaggtcattcagcttcaaggtgatcagcgtaagaatgttgccacgttcctagttcaggctgggattgctaagaaggacaacatcaag

SEQ ID NO: 405020 - DNA, 346 bp, Oryza sativa nipponbare
  unsure (1)..(346): unsure at all n locations
cggacgcgtgggcggacaacgtatggcctgagggcctacccatatccaaaacttacctgtcgctgatctgaattcgacagtgcgagtaaatggatttgtttgcaagaacccaatgaacgcgagtgccgacgacttcttcaaggcagccatgctcgataagcctatagacacaaacagtgggggggggtccaatgtcactttggtcaatgtcttgcagcttcctggtctcaatacccttggcatctcgatagcacgtcttgactttgcacccttgggtttgaacccaccacacacgcaccctngngcaaccgagatctttacggtgcttgaaggaacactctacgtt

SEQ ID NO: 405021 - DNA, 476 bp, Oryza sativa nipponbare
ggcgtacacatacccaagatgccaccccattgacccttggccaagagttcagcggttacgccacacaagtgaaatatggaattgatagaattgtttgtaccttaccacggatgtatcagcttgctcaaggtggaactgcagttggaacgggcttgaacactaagaaaggatttgatgtcaaaattgctgctgcagtagctgaggaaacggaactacctttcgtgacagctgagaacaagttcgaagctttggcagcgcatgatgcttttgttgagagcagtggtgctgtaaacacaatttctgcatctcttatgaagatagcaaatgacatacgcttgttaggaagcggcccccgatgtggacttggtgaacttatcctacctgaaaatgagcctgggagcagcattatgcctggaaaagttaaccctacccagtgtgaggccttgaccatggtttgtgctcaggttatgggtaat

SEQ ID NO: 405022 - DNA, 243 bp, Oryza sativa nipponbare
  unsure (1)..(243): unsure at all n locations
gagcggagcgccatcagccgtccgatcgagtgatccgatggctctcgctctctccacctctgctgctgctgccgctgccgccgcggcgcgggcgctcgcggcgagggtgacgacgacgaggggttacgccgcgtcggcggcgtcgtcggcgatgaggcgggcggcggcggcggtggaagggaagggcgctgcggggatgacgcaggcgaagggacgggtcgcgncgncggcggctagggaggt

SEQ ID NO: 405023 - DNA, 546 bp, Oryza sativa nipponbare; identical to SEQ ID NO: 391470
  unsure (1)..(546): unsure at all n locations

SEQ ID NO: 405024 - DNA, 478 bp, Oryza sativa nipponbare
  unsure (1)..(478): unsure at all n locations
gggggagctcctctccaggatcctgctgctgctgttcgggtacgcgatgccggcgttcgagtgcttcaagacggtggaggcgcgccccaacgacgcccacatgctccgcttctggtgccagtactggattattgtggccatggtaatagcctttgagagcctcatctcatggatgccaatgtatggagaaattaagctagctttctttgtttacctgtggtatcccaaaacaaagggaagtgatgttgtatatgataccttccttcggcccattgtaatgcaatatgaaccaaacatagaacagaggttactgcatctgagggcgaaatctgggcagctacttagcttctacatgaagaactttgccgacaaggggacagctttcttcatggatgtcctgcgctatgttgtctctgataaacctgagggatccaatcaagagcagcgcancaagaagtccggcggctggagccccttc

SEQ ID NO: 405025 - DNA, 569 bp, Oryza sativa nipponbare
  unsure (1)..(569): unsure at all n locations
atcccatcccatcgcaccgcgcaaaaccctaacccaaaggcaagggagaagaggagcggacgccatggatgcttctcgcgttggcgagctccgcactttcgtggaggcctgcaagaaggacccctccctcctcgccgaccccaacctcgccttcttccgcgactacctcgagagcctgggcgcccacctccccgccgccgccttcaccaaggccacccccaagcccaagccgtcctccatggatgacatcgacgatgaatacgacgacgacgacgacgacgatctcaacatgagggatgccactccggagccggacgagcttgaccaggacatcgtcgagtccgatcttgaacttgaaggagacattgtcgaatctgaccatcaggaccctccgcaaaagatgggagatccttctattgatgtcaccgaggaaaatcgtgatgcctcacaggaggccaaaagcaaggccatggaagcaatgtcagaagggaaactggaagaagctattgaccatcttacannaggcatactgctcaatccactctcagctatcatgtatgggactagag

SEQ ID NO: 405026 - DNA, 470 bp, Oryza sativa nipponbare
  unsure (1)..(470): unsure at all n locations
cgcacctcccgatccctccctccgctcgctcgcccatcgcgccaggtgggctctttggacacccggtgatggatcacgcggagctgaccaccgagcaggttctcaagagggatattccatgggaatcatacatggcaaataagctgatttccgggacatgccttcagcttttgcgacgttatgaccacaaaccagaaagccaacgaggtcctttgcttgatgaggatgggccatcctatgttcgagtgttcctgaatatcttgcggaacatctccaaggaagatactgttgaatatgtgcttgccctgattgatgagatgcttgcagtaaatcctaaacgagcagcactgttctatgataactctctctctggtgaagacatctacgaccctntcctaagattgctcttgaaaggtaactgggttgtgcaagaaaaaagttgtaagatattgacccaaataataagtgca

SEQ ID NO: 405027 - DNA, 497 bp, Oryza sativa nipponbare
  unsure (1)..(497): unsure at all n locations
cagctttagaattaagatggtcttatactttgcctgatctgtccaagtcgatacttgggtgtttgtctcctccaagatatctgcaggagctaaaactgtatggttactcaggatttgaacttccagattgggtggggcagctcaagcatgtacgggttgtagagataagttggtgcaaaaacttgaacgttctccctccacttggacagcttgagcatctgcaaaaactcaagttggatggtttgccgtcaataaaggatataaactctgatatttgtggaacctcaaacgtggtcttttggtccttggaggagctaagctttgaatatatggagaattgggagagctggacatatgcagggagtagtgacttcattcggaacctaaaaaagctgaagatactttcatgtgaaaaattgagaaaggtgccttttgagtcngttggtttagccccgaaagagataataattaagtggtgtgatccatatgaggatacg

SEQ ID NO: 405028 - DNA, 525 bp, Oryza sativa nipponbare
cccactcgtacgatggaaagccatggggtcagggcgtagccctctccaagacttttgtgtcgctgatctgaattcgccagtgcgagtaaatggatttgtttgcaagaacccaatgaacgcgagtgccgacgacttcttcaaggcagccatgctcgataagcctagagacacaaacaatagggtgtgggtccaatgtcactttggtcaatgtcttgcagcttcctggtctcaatacccttggcatctcgatagcacgtcttgactttgcacccttgggtttgaacccaccacacacgcaccctcgtgcaaccgagatcttcacggtgcttgaaggaacactctacgttggctttgttacgtccaacccagataacaggctattgtccaaggtgctcaacaagggtgatgtgtttgtgttccctgaggggctcatccacttccagttcaatcctaacccacacaagccggcagttgccattgctgcactgagtagccaaaatcccggggttattactattgccaatg

SEQ ID NO: 405029 - DNA, 364 bp, Oryza sativa nipponbare
  unsure (1)..(364): unsure at all n locations
cggacgcgtgggcgacccgctctgcgtcccaggcaaggtgctgcctccgatctactgcgtcgggcctttggtcggcggcggcgcggaggaggcggccgagaggcacgagtgcctcgtctggctcgacgctcagccggagcacagcgtcgtgttcctctgcttcgggagcaagggcgtgttctccgcggagcagctcaaggagatcgccgtcggcttggagaactccaggcaacggttcatgtgggtcgtgcgcacgccgccgacaaccaccgaaggcttgaagaagtacttngagcaacgcgcggcgccggacctcgacgcgctcttcccggatgggttcgnggagcgnaccaaggaccggggc

SEQ ID NO: 405030 - DNA, 318 bp, Oryza sativa nipponbare
  unsure (1)..(318): unsure at all n locations
cccacgcgtccgctaccttctcctccggctcttcttcagtatcgaatcctctcttctcctcgtgcccaccaccaccaccgtagcaatggcgggcaacgggccgatcaacaaggaggacccgctcaactggggcgcggcggcggccgagatggccggcagccacctcgacgaggtgaagcgcatggtgggcgcagttccgcgagccgctggtcaagatccagggcgccaccctccgcgtcggccaggtggccgccgtcgcccaggccaaggacgccgccggcgtcgncgncgagctcgacgaggaggcccgcccccgcg

SEQ ID NO: 405031 - DNA, 455 bp, Oryza sativa nipponbare
gtgaaggacaggattgaatcacagaatgaagtaagggctaaagagaaggaagaaaaagatcttgttgctcagcagaacatgtatgcccaattgcttcctcttgccttgcctgctcctcctggtatgggcggtcctccaccgccaatggggatgccgggcatgcctccgatgggcggaatggggatgcctccgatgggtcctggacctatgccagcatatgggatgcctccaatgggaagctactgagttatcatccacttgtgaagagttcatttagataagaatttcaatttacacagaagaggaggcatctttcaagttgtagatgtgctattattggttgtttaaactgattcttttggtaccaggacaattttggcgagtgaaatctctagccaggtcgagttaattgctggttgctatatatattatgttacgatgggataggatgggga

SEQ ID NO: 405032 - DNA, 464 bp, Oryza sativa nipponbare
  unsure (1)..(464): unsure at all n locations
cccacgcgtccgcccacgcgtccgcaaattccccaactccgggcctccggcaagccaagaaacccccaacccaactccggcgatggcgtcgcagctggtggaggagcaccggtcgggcgcggaggtccacacggggcacgagctctgcgagcggaaggcccgggagctgctggtggagctcggcctccccgacgggctcctcccgctgccgtccctggaggaggtcgggtacaaccgcgccgccgggttcgtgtggctccggcagacccaggcgggcggcgccacccacacgttcgacaccatcgggaagcaggtgtggtacgcgggcgaggtgacggcgttcgtggagcaggggcggatgcacggcgtcgccggngtgaagagcaaggagctcctcatctgggtctccatctacgagatcgtgctcagcccctccggcaccaagctcgtcttccgcaccccgg

SEQ ID NO: 405033 - DNA, 581 bp, Oryza sativa nipponbare
  unsure (1)..(581): unsure at all n locations
gttgcatgaaaggaacaaagaaagtccgaaggcaatgaaacatctaaataaacttttccctaacaaaatttcgatccaacttccacaggatgaaacattactcacagattggaagcaacaactggatcgtgacgttgaaacccttaaagctaaatccaatgttggtagcattcgcacgtttctgagccgcaatggaattgaatgcagtgaccttgaagaattattcatcaaagatcaatcactgaccaacgaaaatgtggacaagatagttggctatgctgttagttatcaccttaagcacaataaagtcgagatctccaaggatggtaaacttgtattggcgagcgaaagccttaagcatgggctcaacatgctgcagaatatgcaaagtgataacaagagctcaaaaaaatcactgaaggatgttgtcacagagaacgaatttgagaaaaggcttctggcagatgttataccacctaatgacattggagtcacctttgatgatattggagccttggaanatgtaaaagacacattgaaggagctggtgatgcttcctctgcanaggcctgaattgttct

SEQ ID NO: 405034 - DNA, 458 bp, Oryza sativa nipponbare
  unsure (1)..(458): unsure at all n locations
gtgttagtcccccctacgccttcggcggcggggncgncgncgnaatgaactccggagacgccgaggcagcagcggcctccaagaaggcccggtgcaagaaggagaagaaaaagaagcgaaaggacgactgcggagccgcagaggcttcagcggctgacgaagaaatcgtccacgacaagaagaggaagaagcagctgcaacagaagaagaacggagatgacgtggcggttccgaatcggaagaccacggtgagcatcgccgtcgccggatccatcatcgacaacgcccagtccctcgagctcgccaccctcctggcaggacaaatcgcccgcgcggcgaccgtcttccgcatcgacgaggttgtggtcttcgacagcaattcctcagtggagaacagcggcgatgacgtaaagagtggcgcgcgcttccttgttcgcatcctacagtatctggagact

SEQ ID NO: 405035 - DNA, 430 bp, Oryza sativa nipponbare
  unsure (1)..(430): unsure at all n locations
gagagcactctccaagctcatcaatgtgaatagcgcagatctagttttatttgttggggaagcattggttggtaatgatgctgttgatcaactcactaaatttaaccaggtactgatagtctttcaaggactggtgaatgctactccctccgtttcatattataaaacgctttgaactgtgtcttagtttaatttttgaattttgaccaagtttataaatttttttgtcaaaatatatttaatgttacatttaatgaaactaatttggtattataagagatactacatttccctacaaacttggtcaacatgtgctttcactggaatgcactgaacggttttgtttgttgaacagaaattagcagacctttccgctgtccctactaccagattgatagatggcatcctgctcaccaagntngacaccatc

SEQ ID NO: 405036 - DNA, 542 bp, Oryza sativa nipponbare
  unsure (1)..(542): unsure at all n locations
gatctacttaccatcgtcagtctgtgggttgtgtggagaatggagctacgctccacaagaaaggtaaagaaatgggagatgtaattcttgctagtggttcgaaccttcctgctggtgggacaaatgacggtgagtactggattgatattcctgatggtgataggaatgaatatgtcaaaggtggtaatctgaagagtgctgagctctatgtgcatattaagccggctcatggaggaactttcactgacattgcgatgtgggtgttctgcccatttaatgggccagcaacaataaaggtcggatttgctagctttgctctacagaaagtcggcaggcatactggtgactgggagcatttcaccctccgtataagtaacttctcaggagagctctcatctatctacttctcacagcacagtggaggcgactgggtggatgcatgtgatctggagttcatctcaggaaacanagccatcgtttactcagcgaaggatggccacgcaagctatgcgcaccctggatgttatctggtgggatctgag

SEQ ID NO: 405037 - DNA, 366 bp, Oryza sativa nipponbare
  unsure (1)..(366): unsure at all n locations
cccacgcgtccgcaaccggtgccaaggtgaccaaggggagggtactcagagaaggtctccacaaccatgggcttggtaggaatcatcttgaccataccagcatcaccgttcttcaagaacttgggctccttctccaactccaaggttgaccctgccaaggattctgccagcttcacctggcaggtgatcatcatgaaccaccctgggcagatcggtaacggctatgctgcagtgctggactgccacacctgcgacattgctgtcaagnttgctgagctggtgaccaagattgacagacnatttgnnaaggaagtnnagaaggaagccaagtttttgaagaacggnnatgntggntttgtnaagatg

SEQ ID NO: 405038 - DNA, 341 bp, Oryza sativa nipponbare
  unsure (1)..(341): unsure at all n locations
gtttgtggtttgttccgggaggaagacagaggaccggaagggttggctgcgatggccggagggaaggcggtgtactcgttccaggaggtgagcaagcacaacgaccggaaggattgctggctcatcatcgccggcaaggtgtacgacgtgtcgccgttcatggaggagcaccccggcggcgacgaggtcctgctggcgtgcaccggcaaggacgcgaccgcggatttcaacgacatcgggcacacggcgacggcgaaggagctgatgccgcagtactgcatcggcgaggtcgacgcctccacggtcccggccaagccggcctaccgtgtngtctccgagga

SEQ ID NO: 405039 - DNA, 308 bp, Oryza sativa nipponbare
  unsure (1)..(308): unsure at all n locations
ggcgccgccaagcccgacgccaagtgtgctgtgaagagtaagggcgcggagaagcccgccgccaagggcaggaaggggaaggccggcaaggaccccaacaagcccaagagggctccctccgctttcttcgtttttatggaggagttccgtaaggagttcaaggagaagaaccccaaggggggggggtgncgctgctgtaggaaaagcagccggtgataggtggaaatccctgaccgaagcggacaaggctccctatgtagccaaggccaacaagctcatggccgagtacaacaaggccattgctgtct

SEQ ID NO: 405040 - DNA, 401 bp, Oryza sativa nipponbare
  unsure (1)..(401): unsure at all n locations
cggactcgtgggcggtactgggtgctgangggaggtaccggacggggctgaacccgcaggagaaggtgaagctggggaaggagcccatgtcattgttcatggagggcggcatcaaggagctcgccaagatgcccatggaggagatcgaggccgacaagctctccaaggaggacatcggcgtgcggctcaagtggctcggcctcttccaccggcgcaagcatcagtatgggcggttcatgatgcggctgaagctgccaaacggtgtgacgacgagcgagcagacgaggtacctggcgagcgtgatcgaggcgtacggcaaggagggctgcgccgacgtgacaacccgccagaactggcagatccgcggcgtcacgctccccgacgtgcccgccatcctcgac

SEQ ID NO: 405041 - DNA, 450 bp, Oryza sativa nipponbare
  unsure (1)..(450): unsure at all n locations
cccactgcgtccggcggcggcggcgggggaggggggcggcggcggaggtggggcggtgtacgacccgagctacgtgccggactcggtgaagacgttcgtggcgcacatgtacaggcacgtcagggacaagaacgtgtacgagatccaccagatgtacgagggcgggttccagcggctctgggagcggctcttccgcgacgcgccgtggccggcggcggaggccgtctcgccctactgcgacggcgaccacgtcttcctcctcctctaccgggagctctggtaccggcacgcctacgcgcgggccttctngtcgtcgtcgtcgtccgcgccgctcaccggcggccagcgcgccgagtcgtgggctaactactgcgacctcttcagcgtcgtcctccacggcgtcgtcaacatgcagcttcccaaccaggggctctgggacatggtcgacga

SEQ ID NO: 405042 - DNA, 441 bp, Oryza sativa nipponbare
  unsure (1)..(441): unsure at all n locations
gtttcttatgttttgcttataagcagcacaaaagggtatagcagaagcaaaatttggacacaatgattagggatcacttattcattatagttcttccatgctgctctaccacagcaaaacgtttcagacaccatcaaaccagacttaaggatacacattacaggtaaatagtacacaatgaaacgggacacgaccaaggaccagaccagacaaccatagctccattggggaagacaaataggcagacttgtgaaccctagaacagcagcagctccatggctgaggacttactggccaccacggaggcggagcaccaggtggagtgtggactccttctggatgttgtaatccgcaggggtgcggccatncttaagctggttaccagcaaagatcagacccctgtggtccggggggatgcccctcttgggcttgatcttcgcc

SEQ ID NO: 405043 - DNA, 518 bp, Oryza sativa nipponbare
ctcccgtggactcctctctcctggggttccgtggggtcccccgcgcgcggtggtggttcgccggagcgcagcagcagcagcagcaaaaggccgcgagggccgccgtcgggatccccgccgccgccaagatgaacgacgccgatgtcgccaagcagatccagcagatggtgcggttcatgcggcaggaggccgaggagaaggccagcgagatctccgtctccgccgaggaggagttcaatattgagaagcttcaacttgttgaagctgagaaaaagaagatcaggcaagaatatgaacggaaagagaagcaagtcgaagttagaaagaaaattgagtactctatgcagctgaatgcttctcgcatcaaagtgcttcaagctcaggatgatttggttaattccatgaaagaggatgctacaaagcaactcctgcgtgtcagccacaaccaccatgaatacaagaaccttttgaaagaactcgtcgttcagggtttgcttcggttgaaagagccagcggta

SEQ ID NO: 405044 - DNA, 607 bp, Oryza sativa nipponbare
taagaagcacttagcaccatttttacgatctggggcagtgatcaccactggtggcttccctctccctgagaaaaccgaccctcttggtaccatttctgctgccccatggggatcagcgttgattctgccaatttcctacacatacatagccatgatgggttctaagggtctcactgaggcgtcaaagattgcaatcttgaatgcaaactacatggcaaagcgtctggagaaacactacccagttcttttccgtggagtcaatggaactgttgcccatgaattcatcattgatttaagaggatttaagacgactgctggtatagagccagaggatgttgcaaagcgtttgatggactatggattccatgcacctactatgtcatggcctgttccaggcacacttatgattgaacccactgaaagtgaaagcaaggccgaactagacaggttctgtgatgctctaatctcaatcagggaagaaattgcagaaatcgaaagtggcaaagcagatgtgaacaacaatgtcctcaagagtgctcctcacccgccccaacttctgatgagcgactcatggactaagccgtactccagggagtacgctgcgttc

SEQ ID NO: 405045 - DNA, 402 bp, Oryza sativa nipponbare
  unsure (1)..(402): unsure at all n locations
cccacgcgtccgcccacgcgtgcgcgancttcgcctccggctcttcttcagtatcgaatcctctcttctcctcgtgcccaccaccaccaccgtagcaatggcgggcaacgggccgatcaacaaggaggacccgctcaactggggcgcggcggcggccgagatggccggcagccacctggaggaggtgaagcgcatggtggcgcagttccgcgagccgctggtcaagatccagggcgccaccctccgcgtcggccaggtggccgccgtcgcccaggccaaggacgccgccggcgtcgccgtcgagctcgacgaggaggcccgcccccgcgtcaaggccagcagcgagtggatcctcgggggggtcgcccacggcggcgacattattgtttcaccaccggcttc

SEQ ID NO: 405046 - DNA, 381 bp, Oryza sativa nipponbare
  unsure (1)..(381): unsure at all n locations
cccctttcggctgcgagatcgatcgcgcagggatctcgaagctaatcctagaaagaaagagagaaaaaaaaggtttcgcgaagaaacgagaggaggagagggaaggtaaaggaatgggctttgtgaggaagtgggcgatggggaggtgtcggagatgaaggatgctatctgctgcgagggagtacttgagatcttgctggggcccggcgtcgtcgccggccgggcgcccccgcaaaggatcggatgcggcggggcggcaggatgggctgctgnggtacaaggacgccggccagctcgtcgccggccagttctcgatggccgtggtccaggccaacaacctgctcgaggaccacagccggggggaatccgggccactgagca

SEQ ID NO: 405047 - DNA, 479 bp, Oryza sativa nipponbare
cccacgcgtccgacacccggtgatcgacgtccaccgcggcaaggcgctccacggcggcaacttccagggcacccccatcggtgtgtccatggacaacgcccgtctcgccatcgccaacatcggcaagctcatgttcgcgcagttctccgagctcgtgaacgagttctacaacaacgggctgacctccaacctggccggcagccgcaacccgagcttggactacgggttcaagggcaccgagatcgccatggcctcctactgctctgagctccagtacctcgccaaccccatcaccaaccatgtccagagcgcggagcagcacaaccaggacgtgaactcgctgggtctcgtctcggccaggaagaccctggaggcggtggacatcctcaagctcatgacctccacctacatcgtcgccctgtgccaggccgtcgaccttcgccacctcgaggagaacatcaagagctccgtcaagaact

SEQ ID NO: 405048 - DNA, 203 bp, Oryza sativa nipponbare
  unsure (1)..(203): unsure at all n locations
ggattaaattggagtagtttcatagtgtgtgtgtagtgatcttaattagctttgattagacagacagtacagtagagtagaggatgttggctgtgttcagcggcgcggtggtggaggtgccggcggagctggtggccgccggcagccggacgccgncgcccanngacgcgggcggggggggggncggccgctncctcnccgcc

SEQ ID NO: 405049 - DNA, 640 bp, Oryza sativa nipponbare
gccgccgcagcctcctcctctcgccatctcccgtgctctccttcaagtcagctacctgcttaatcaaccatgggtaaggagaagacgcacatcaacattgtggtcattggccacgtcgactctggcaagtcgaccaccacgggccatctgatctacaagcttggaggtatcgacaagcgtgtgattgagaggttcgagaaggaagccgctgagatgaacaagaggtccttcaagtacgcgtgggtgctcgacaagctcaaggccgagcgtgagagaggtatcaccatcgatattgccctgtggaagttcgagaccaccaagtactactgcacggtcatcgatgcccctggtcaccgtgacttcatcaagaacatgatcacgggtacctcccaggctgactgtgccgtgctcatcattgactccaccactggtggttttgaggctggtatctccaaggatggccagacccgtgagcacgctcttcttgctttcactcttggtgtgaagcagatgatctgctgctgcaacaagatggatgccaccactcccaaggactccaaggcccggtacgatgaaatcgtgaaggaagtctcatcctacctgaagaaggtccgctacaaccctgacaagattccctttc

SEQ ID NO: 405050 - DNA, 465 bp, Oryza sativa nipponbare
  unsure (1)..(465): unsure at all n locations
cggcaggaaggtggacgccgccgaggcgttcaagctcgccggcatcgagggtggcttcttcacgctgaaccccaaggaaggtctcgccatcgtcaatggcacgtccgtggggtcggcgctcgcggccaccgtgatgttcgacgccaacatcctcgccgtcctgtccgaggtgctctcggcggtgttctgcgaggtgatgaacggcaagccggagtacaccgaccacctgacccacaagctgaagcaccaccctgggtcgatcgaggccgccgccatcatggagcacatcctcgccgggagctcgttcatgagccacgccaagaaggtgaacgagatggacccgctgctgaagccgaagcaggacaggtacgcgctccgcacgtcgccgcagtggctcggcccgcagatcgaggtcatccgcgccggcaccaagtccatcgagcgcgaggtcaactccgngaacga

SEQ ID NO: 405051 - DNA, 454 bp, Oryza sativa nipponbare
  unsure (1)..(454): unsure at all n locations
tcttgttttcaactacaaaccgggcgcacacaacgtgctggccgtggacgcggcgacgtacaggagctgcaaggtgggcagctcggcggactcggtggcggcggcgacggggaccgcgtcgttcctcctcaagaagggcgtcaactactacatctgcggcgtccccggccactgcgccgccgggatgaaactccgggtcgtcgccaactgatgaaactccggcgacagatcaatcccttaattaattaaaactatngtgggtgtctctgcagcctgaagcagcatatagcttgctcggtttagggattggtcgcgtatatatagttgtaattgtagccctatgtactggagtggctgacactgggtctgtcatgctcctgcatctgcatgcgtgcatggctgcatgctatatatcagctntgtgcgttctaaataatggcccgaatgtgcacct

SEQ ID NO: 405052 - DNA, 479 bp, Oryza sativa nipponbare
cccatgcgtccgcccatgcgtccggtcgccttccagtttcccctctctctctctctccgccgccgccgacgccgacgatggcctccagccgctgggtccgaccggaggtgtacccgctgttcgcggcgatgggcgtggccgtcggcatctgcggcttccagctcttccgcaacatcaccggcaaccccgaagtcagggttaacaaggtagggagggcagctggagtgctcgagaaccatgaggagggaaggcgctacgcagagcatgggctaagaaactatgtgcgcgacaagacccctgagatcatgccagctatcaacaagttcttcactgagccaacaaaatgatgaaggaatttagttggttgttgattgctctgctattagttactattgcggattgatttaatggattttacccatttcaagcattacatatgttgtctcatccataaatcggaggacatcaaatgcctcttg

SEQ ID NO: 405053 - DNA, 407 bp, Oryza sativa nipponbare
cccacgcgtccgcggacgcgtgggccggatcagcccaaaggagaaaaccatgttcttcgtaaatccgtccagcgccggcgcgttcgacggcaacggggagaagaagatccgaccgtacgctcgcaaggacgacttcctcctcccgggcgtggtggaggtcatcatcaagtcggtctcggcggcggccatcgcgccggcctgcacgcggacccacaacgtcccggcggtggtcttctccgtggccggatacaccgacaacttcttccacgacaacacggacgtgatgatccctctgttcctaacgacgtcgcacctcgccggggaggtgcagttcctcatcaccaacttcaagccgtggggggggacaaggtcacgcccgttttttatgagctttccaactacggggt

SEQ ID NO: 405054 - DNA, 462 bp, Oryza sativa nipponbare
  unsure (1)..(462): unsure at all n locations
cccacgcgtccgcaaaggcattttgagtggagcatcgtttaacgaagcggggaggatgcaggaaaggaagattcattgtgggcttcttctaggggcagatggtgccagaagcacagtgcgtgaattggctggcatacatatgaaaggtcagagagacctgcagaaactggtcagtgtgcattttcggagcaaagatctcggcaagtatctatctcgtgagaggccagggatgctattctttattttcaatcctggtgcaatcggtgtgctggttgcacatgacctggaacatggagaatttgtattgcagattccattttatcctccccagcagatgtttgaagatttcagcacanagatatgcgaagaaattatagtcaaattggttggatgggagccatcagatggtcaggttttagacataaaaccatgggtaatgcatgctgaagttgcagagaaata

SEQ ID NO: 405055 - DNA, 223 bp, Oryza sativa nipponbare
cccacgcgtccgcggacgcgtgggctttggcaacatgggtgacacttcaggcactggtgttctctttactaggaaccctagtactggagagagaaaactttatggtgaattccttgtcaatgctcagggtgaggatgtggttgctggaatcagaactccacaagatcttgataccatgaaggattgcatgccagagccttatgcagaactagttgagaattgc

SEQ ID NO: 405056 - DNA, 625 bp, Oryza sativa nipponbare
cagggagtgcagcctgatgctgatacaggaacaagtgtggcaggcagaaatcagaggggtcactcactggttgctgggagttcatcaagcaagtcagttgcacgagttcacagcctagataaccttatctctatcatccagttaagagagccacccatcactttgaagccatcagaaaaccagcctgcacaggatgcaacagaggtagccattgtgaaactattgatcaaatcgtactatgacattgtcagaaagagtattgaagatgctgttccaaaggctataatgcattttctggtgaaccacacaaagcgtgagctgcataatgttttaatccggaaactgtacagagaaaacctgctggatgaaatgctgagggaaactgatgaagtaattatcagaaggcagcgtatacaagaaacactccaagttcttgaacaggctcataggacgctcgaggaattttcccttgaagctgaaaaggttgagaagggatacagccctgctgaatatgctactggcctgccaaaatccatggtctcagcaatggcgaccccagcatcatttacgcatcctcgcctaaccacaatcgaaagaaagcatctcacgaagatcaacatgggtc

SEQ ID NO: 405057 - DNA, 543 bp, Oryza sativa nipponbare
  unsure (1)..(543): unsure at all n locations
gtcttcgtctggtcttcccccacccgcatcccccggcctcctcaccgcagccgcaaaagccaagccgccatggcaaccgccgccgcgtcggatctggagagcaaggccaaggcggccttcgtcgacgacgacttcgagctcgccgccgagctctacacgcaggcaatcgaggccagccccgccaccgccgagctctacgccgaccgcgcccaggcccatatcaagctaggcaactacactgaggctgtagctgatgctaacaaggccattgaacttgacccatcaatgcacaaggcttatcttcgtaaaggcgctgcatgtatacgactggaggagtatcaaactgcaaaagcagctcttgaattgggttactcgttcgcatctggtgactcaaggtttactcgcctaatgaaggagtgtgatgagcgcattgctgaggagcttagtgaagtccctgttaagaaggctgaagatggagcagctgccccctctggtgcttctttttgtgagggaaaggatgatgctgcanacatggataataca

SEQ ID NO: 405058 - DNA, 445 bp, Oryza sativa nipponbare
cccacgcgtccggcgagggtgggcggcggcggcggaagggacccgagcaataacccggcggtggggaggctgcgggagctcgtgcagcgcggggacgcggcagatggctgggagaagtcgtgggaggccgccgtaaccccgtgggatttggggaagccaacacctatcatcgaacatctggttaaatcaggaactctcccgaaggggagagctctggttccaggatgcggcacgggatatgatgtggttgctctggcaagccctgagcgatttgttgttggcttggatatttctagtacagctgtggagaaggctaagcaggttcttttgtgcacttgatccaagcttgaggttggcttgggcagaaacagttagtgggcttctaaaacctcatggagagctaatcacccttatatatttgatcagtgaccaagaaggaggacca

SEQ ID NO: 405059 - DNA, 527 bp, Oryza sativa nipponbare
  unsure (1)..(527): unsure at all n locations
aaccattgcaactgcactacactgcagcacacacaccccgcacccaccaagctaagtaattaatcatcaatggcttccgccgtggtgaagatggccgtcgtctgcctgctcctcctgtccgccggtcatctgatggcctccgccgccgccgcgcgcccggacaccgtcgacgacgcggcggcgctgctgcgcctcaaggtgctcggcggcgtggacaccaacttcacggtgacgtccaaggccgccgccgacgagaccgacgcgttcggcgagctctacctgttcaagtggacgacgctgctggtgccgccgacgacgctgatcatcatcaacatggntggggatcgtcgccggcgtgtcggacgccgtgaacaacgggtacgggtcgtggggcccgctgttcgggaagctcttcttctccttctgggtcatcctccacctctaccccttcctcaaggggctcatggggaggcagaaccggacgcccaccattgtcgngctctggtccatccttctcgcctccatct

SEQ ID NO: 405060 - DNA, 488 bp, Oryza sativa nipponbare
cgcgtcggcatcctcctccgcctccggcgccgccgcctcgccgcccaaggtaaggtaagccatggtgaagcacaacaacgtcatcccgaatgggcacttcaagaagcactggcagaactatgtcaagacatggttcaaccagcccgcccgcaagcagaggcgccgcatcgctaggcaaaagaaagctgtgaagatcttcccccgccctacttctggaccacttcgccccattgttcagtgccaaacacttaagtacaacatgaagtctagggctggaaggggcttcacccttgaagagctgaaggcagctgggatccccaagaagtttgccccaaccattggcatctcagtggatcaccgccgtaagaaccgctcacttgaaggtctgcaggccaatgtccagaggctgaagacctacaaggccaagcttgtcatcttcccaagacgtgcccgcaaggtcaaggctggtgactcgactcctgaggagc

SEQ ID NO: 405061 - DNA, 549 bp, Oryza sativa nipponbare
cccacgcgtccgcacacaccccaccggcagtcggcgccgccaccccgcaccaggtaagggaggaggagtaagaagatgtcgcacaggaagttcgagcacccgaggcacggatccctcggcttcctcccgaggaagcgctcctcccgccaccgcggcaaggtgaagtcattccccaaggatgacgtcaacaaaccatgccacctcacctcctttgtcggttacaaggctggaatgacccacattgtgcgtgaggtcgagaagcctggttccaaactccacaagaaggagacctgtgaggctgttaccattattgagacacctcctattgtcgttgttggacttgtggcctatgtgaagactccacgtggcttacgcagtctcaactctgtctgggctcagcatcttagtgaagaagtaaggagaaggttctacaagaactggtgcaagagcaagaagaaggctttcaccaagtatgctctcaagtatgatagcgatgccggcaagaaggaaatccaaatgcagcttgagaagatgaagaagtatgcttct

SEQ ID NO: 405062 - DNA, 483 bp, Oryza sativa nipponbare
ccgtgaacgacaacccggtgatcgacgtccagcgcggcaaggcgctccacggcggcaacttccagggcacccccatcggtgtgtccatggacaacgcccgtctcgccatcgccaacatcggcaagctcatgttcgcgcagttctccgagctcgtgaacgagttctacaacaacgggctgacctccaacctggccggcagccgcaacccgagcttggactacgggttcaagggcaccgagatcgccatggcctcctactgctctgagctccagtacctcgccaaccccatcaccaaccatgtccagagcgcggagcagcacaaccaggacgtgaactcgctgggtctcgtctcggccaggaagaccctggaggcggtggacatcctcaagctcatgacctccacctacatcgtcgccctgtgccaggccgtcgaccttcgccacctcgaggagaacatcaagagctccgtcaagaactgcgtca

SEQ ID NO: 405063 - DNA, 443 bp, Oryza sativa nipponbare
  unsure (1)..(443): unsure at all n locations
ccgctagctccggccaccaactttgacccgtgctcctcctccgcatcccccatcccctcctccccggcggcggcggcggcgcggaggcggcggcacgggagcggctagtggtttcgtcggcggaggcggaggcggggccaagatgttcgggcgcgcgccgaagaagagcgacaacaccaagtactacgagatcctgggggtccccaagaccgcctcccaggacgacctcaagaaggcgtaccgcaaggccgccatcaagaaccaccccgacaagggcggcgaccccgagaagttcaaggagcttgcacaagcttatgaggtattgagtgacccggagaaacgtgaaatctatgaccaatatggtgaagatgccctcaaggaaggaatgggtggaggcggatcccatgttgatccatntgacatcttttcatcattctttggac

SEQ ID NO: 405064 - DNA, 543 bp, Oryza sativa nipponbare
cccacgcgtccgcccacccagtgatggaggtcgtggcaaaggagcacaaggtcacaatcatggaccacgagaagggcaaggtgacggagcaggtcgtggatgatcctatgcagatccccaggagcatgatggaaggatggcacccgcagcagatcgatcagctccccgattccttcaccggtggatgggtcgggttcttttcctatgatacagtccgttatgttgaaaagaagaagctgcccttctccggtgctccccaggacgataggaaccttcctgatgttcaccttgggctttatgatgatgttctcgtcttcgacaatgtcgagaagaaagtatatgtcatccattgggtaaatcttgatcggcatgcaaccaccgaggatgcattccaagatggcaagtcccggctgaacctgttgctatctaaagtgcacaattcaaatgtacccaagctttctccaggatttgtaaagttacacactcggcagtttggtacacctttgaacaaatcaaccatgacaagtgatgagtacaagaatg

SEQ ID NO: 405065 - DNA, 506 bp, Oryza sativa nipponbare
gagaagctccatacaagtaagcagcagctagttgccgacaaggccagagaaggaagaagaagctctcatcatcatcaccatgtcgtgctgcggtggcaactgcggatgcggctccagctgccagtgcggcaacggctgcggcggatgcaagtactctgaggtggaacccacgaccacgaccaccttccttgccgatgcaaccaacaaggggtctggtgctgcttccggaggatcagagatgggggcggagaacggcagctgcggctgcaacacctgcaagtgcggcaccagctgcggctgctcctgctgcaactgcaactagaagaaacttatctccatccaattcatcacctgatcaacgagctaccagtaccactacatatgccatgtactagctacctagcttgcatgcaagtccttaatttgctgctagctagctagctacctaccttagcgtctcatgtatgtcatgttgcccgctggcccctaaataaaattccttactt

SEQ ID NO: 405066 - DNA, 494 bp, Oryza sativa nipponbare
  unsure (1)..(494): unsure at all n locations
cccacgcgtccgcccacgcgtccgcccacgcgtccggttgagttgaattgagctcgaattgtactcgattcaccacacagaggaatcaaatcgaagcagccatggctctcgtggagggaaacaacggcgtgtcggggggagcggtcagcttcagcgaggagcaggaggcgcttgtgctcaagtcgtgggccatcatgaagaaggattccgccaacattggactccgcttcttcttgaagatcttcgaggtcgcgccgtcggcgagccagatgttctcgttcctgcgcaactccgacgtgccgctcgagaagaaccccaagctcaagacccacgccatgtccgtcttcgtcatgacatgtgaggccgccgcgcagctgcggaaagccgggaaggtcaccgtgagagacaccaccctgaagaggctcggcgccacgcacttcaagtacggcgtcggagacgcccactttgaggtgacgaggntcgcgctgcttgag

SEQ ID NO: 405067 - DNA, 445 bp, Oryza sativa nipponbare
cccacgcgtccgcaacgaactgcgagtgattcaagaaaaaagaaaacctgagctttcgatctcttcggagtggtttcttgttctttgaaaaagagggggattaatggcgacagccgggaaggtgatcaagtgcaaagcggcggtggcatgggaggccgggaagccgctgtcgatcgaggagggggaggttgcgccgccgcaggccatggaggtccgcgtcaagatcctctacaccgccctctgccacaccgacgtctacttctgggaggccaaggggcaaacacctgttttccctaggatcttgggccatgaagctggaggcattgtggagagtgtgggagaagggtgtgaccgaactcgcgccgggcgaccatgtcctcccggtgttcaccggcgagtgcaaggagtgtgatcactgcaaatcgggggagagcaacatgtgtga

SEQ ID NO: 405068 - DNA, 378 bp, Oryza sativa nipponbare
  unsure (1)..(378): unsure at all n locations
cccacgcgtccgcccacgcgtccgcccacgcgtccggaggcatgaggccattaacaacactcatatccatgtccgaaaatgttggacgaccaatgtctgatctgataaattcatcagaagtggccggcttggaaggagctcacttgcaataatattcaagatagatcggcgtcggcgtccttccaccgttccggcgaaaaataataataaatatattaagggtacctaacaaaaatgtgatgtttcttctttcgtttttacaaaaggccgattcaatcgtgcgtgattatagtattgacaaaaaatggtgtaagctctagaggcaatttgaatttcacaaaggttgtattctgtcattgtcaaannannaaaaanaaa

SEQ ID NO: 405069 - DNA, 447 bp, Oryza sativa nipponbare
  unsure (1)..(447): unsure at all n locations
cccacgcgtccgccttccaattcatctcgtcctctctctcgtaactcgtaaagagatctcgtctcgcctcgggaatccaaccattgccggcgaagtagagatcgggagggcggcgccatgaacaggggcggcggcgtcggcgtcggcgatgagagcggaagcgactacgagagcggcggcggcatgcggaagccgctgctgatgcacacggggagctggtacaggatggggtcgcggcaggggagcctcaccggcgcggggacctcgtccatggccatcctacgcgagtcccacgtctccgccttcctctgcacgctcatcgtcgcgctcggccccatccagttcggattcacggngggcttctcctccccgacgcaggacgccatcatccgagacctcgacctcaccctctccgagttcttcggtggtcggatcgctggccaacgt

SEQ ID NO: 405070 - DNA, 594 bp, Oryza sativa nipponbare
  unsure (1)..(594): unsure at all n locations
ggataatcactgcggcatcgtaggccttttttgagctataaatagagctcctgatcccctcctccactccacaccaaaacctctccaatccccaaatcctcctcatctcctcttccagaacctttctttttcgatttcgtgttcgagttctttgtgattgcagcgatggcgtccgtggatctgaccccgaggcaggcgaggaaggcgtacggcggcgatggtgggacctactacgagtggagccccgcagacctgcccatgctggaactcgccaacatcggcggcgccaagctgtcgctcaacgccggtggcctcgccctgcccagcttttccgactccggaaaggttgcgtatgttcttcaaggcaagggcacttgtggcattgtcctgccggaggcgagcaaggagaaggtgatcgccgtgaaggagggagactccctggcactcccctttggcgtggtgacatggtggcataacctnccggagtccccaatcgagctcgtcatcctcttcctcggcgacacatcgaaggcgcacaaggccggccaattcacaaacatgcagctcaccggtgccaccggcatcttcaccggc

SEQ ID NO: 405071 - DNA, 332 bp, Oryza sativa nipponbare
catcataccctagccttgtcgcctcgtcggcggatggcgccgccggcgccggcgacggcgcggcgcccgatggcggccgtccgctgctccgcggcgaagaggagctacaacgtcacgctcctccccggtgacggcatcggcccggaggtggtcgccgtcgccaaggacgtcctctccctcgccggcgctctcgaaggcgtcgagttccgcttccaggagaagctgatgggcggcgcggcggtggatgcgtacggcgtgccgctcccggaggagacgctcgcggcggcgcaggcgtcggacgccggcctcctcggcgccataggagggtataa

SEQ ID NO: 405072 - DNA, 430 bp, Oryza sativa nipponbare
  unsure (1)..(430): unsure at all n locations
ctgtgttgcagtttggtgatgatgagttcgggcacatgctggtggacatcctgaagaagaacggggtgaacgcggaggggtgcctgttcgacgagcacgcgcgcacggcgctggcgttcgtgaccttgaaaagcaacggcgagcgcgagttcatgttctaccggaacccgagcgccgacatgctcctgacggaggcggagctcaacctggacctgatccggcgcgccaagatcttccactacggctccatctccctcatcaccgagccgtgccgctccgcccacgtcgccgccatgcgcgccgccaagtcggccggcatcctctgctcctacgaccccaacgtccgcctcccgctctggccgtccgaggacgccgnccgcgccggcattctcttcatctggaaggaggccgacttcatcaaggtgagcga

SEQ ID NO: 405073 - DNA, 486 bp, Oryza sativa nipponbare
cccacgcgtccgcccacgcgtccggggaggtggtcgacgcccgccaccagcgcctcaagcgcgccatggacctctccatgaagcaccagtacctctccgaaaacgaccaggcgcaacagacaccattcagaggctatttgagtgacatgatggatctggtgaagaaggagagattagagcgtgaagaactgggagcccttccccttcaccagaggacccttccctgaagtcttatcttgataggccctgctgttttttcccaccacaatgcatcaaataaaatgcagtggatgactcatgatactgtctctcattttgaagttccattttcatatatattcgtgtgtgatgcattggtcgtcactgattacttcgcatccttttcaaatatgttaatttaacagcaacaatttttcttttacatcattgtcgtaaattcttcatgtattgtgcttcacatgagaagaatgtctgttgtttgctcag

SEQ ID NO: 405074 - DNA, 460 bp, Oryza sativa nipponbare
  unsure (1)..(460): unsure at all n locations
cggacgcgtgggcggacgcgtgggcggacgcgtgggccgcttcgtcccccacccacccaccactccactccccgcagttggtggcccgcggcggcgcaagccctagcgtccacgcgaagcaaaccccccaaaaccctagctccgccgccgtcggcggcgcccgagctgcaacccccgccacgacgccatccgggtggctagcctaagcccctaaccaaaccctagcgaccggcgccgcagtcggngggagagatgccgcgggagatcatcacgatacaggtggggcaatgcgggaaccagatcgggatggagttctggaagcagctctgcctcgagcacggcatcggcaaggacggcctcctcgaggacttcgccacccagggaggagatagaagggattgtttctctaccaggctgatgaccagcattacataccgagggctcttcttgtggatctaga

SEQ ID NO: 405075 - DNA, 300 bp, Oryza sativa nipponbare
  unsure (1)..(300): unsure at all n locations
cccacgcgtccgcccacgcgtccggcggacggcgcggcgctcgtcgtgcggagcgcgcacggggcgcgcgggttcctgtacccgatcgtcgatcccgaggacgtcaggcgtggcgggttcgacgttctggcggtgtgccacccggaggacgaggtgatcaactctgtcatcgtcgcccgcagggtcggtgccgccgccgccgccgccgcggcgcgcagagacgagctcgcggactcgcgcggcgtggttctgccggtggtcgnnccgncgtccacgtgctggagggtggaggcgagcgcg

SEQ ID NO: 405076 - DNA, 138 bp, Oryza sativa nipponbare
cccatgcgtccgcccatgcgtccgaaagatagtaaatttcttgtacttttcaacaaggcgattgagacgatgtgtgttatgttttgatgttacatgaatgcttgaagaagcagaagtaataacgatgtgattgtgact

SEQ ID NO: 405077 - DNA, 472 bp, Oryza sativa nipponbare
  unsure (1)..(472): unsure at all n locations
ctcagtcagtcgtcgtcgtcagacatctgagctttgtagaatacttggattgtcccagaacatgccaggtgtcattggagttctggttgaaaatgggagaactattgatgcaattaatttggcttatgcatttgagctgactaatcagtttgaaccggtggaattactgaaagcctatctacaggaggtcaagagtgtgccacatttcaagactggaaagatatctctgcaagtacagaatgaaatgaatgaacgagagctgtctgccttgaaagctgctattaagtgtatcgaggagcacaaacttgatgagaaatatccgattgacctgcttcagaaaagagttatccagctagagaaagctaaggcagacaagnaggagggctgttgaagctgcaaagccacagtctaagaggcctcgtgccaatggatccgtatatgcgccacatactagctntcctgacaaaagctt

SEQ ID NO: 405078 - DNA, 536 bp, Oryza sativa nipponbare
  unsure (1)..(536): unsure at all n locations
agaaggtgtgcctcgatcttaagattaagagtcagaatgacaaggagaagcttgctgaagcaaaaaggatgacatatctgaaaggttttactgatgggacaatgattgtaggggagttcaatggcagaaaagttcaagaagcgaagccactgataaagaacaagcttttggaagaaggcacagcagtgttgtatagcgagcctgagaagaaagttatgtcgagatctggtgatgagtgtgttgttgctctcacagatcaatggtacattacttatggtgagactgaatggaagcagaaggcagttcaatgcttggagaagatgaatacattctcagctgaaactcgtaatggttttgaacacacgttaggctggctgaaccagtgggcctgctctcgttcttttggcctaggtactcgcattccatgggatgagcagntccttgtagaatctctttctgattccaccctctacatggcatattacacaatcgctcaactnttgcaaaatggcaacatgtatggcaaggaaatatct

SEQ ID NO: 405079 - DNA, 452 bp, Oryza sativa nipponbare
cccacgcgtccggggcaagggcctcgcccgccgctgggcggtggagctccacgacgcctcctcctcctcctcctcccactcctccatccccgacccgcccggcttcaccagatccgcccccgacgcggacgacgccgccggcgcgcggcagcggaaggattccgagaccgcgtggaaggcgcagaaagcgtgggaggtggcgcaggcgccgttcaagaacctgatgatgatgggtttcatgatgtggatggccgggagcaccgtccacctgtttagcataggtatcacgttctccgctctgtggcagcccatcagcgccctccgctctgttggcaaagtttttgaaccattcaaggacccaagggtggatactctagcacctaagttggtctttattgctctcaacttggcagctatgggtttaggtgtatggaagctcaatacgttgggtc

SEQ ID NO: 405080 - DNA, 433 bp, Oryza sativa nipponbare
gccgttttccactgacagctcaagtgctcgtgcaacattagctgatcagctcgtgttcccaaccgcgacaaagcttcacagatggaggctcagaaccaagaggtcactgccctggtcgagaagatcgccggcctccacgccgccatctccaagctgccgtcgctgagcccatccgccgaggtggacgcgctcttcaccgacctcgtcacggcgtgcgtcccggcgagccccgtcgacgtggccaagctcggcccggaggcgcaggcgatgcgggaggagctcatccgcctctgctccgccgccgagggccacctcgaggcgcactacgccgacatgctcgccgccttcgacaacccgctcgaccacctcgcccgcttcccgtactacggcaactacgtcaacctgagcaagctggagtacgacctcctcgtcc

SEQ ID NO: 405081 - DNA, 421 bp, Oryza sativa nipponbare
atttgaagcctcaaggattcgagcgaaatgacttcttccatgagcaaatccgacaagaagaaggtgctagattttgcggcatggagtttcaacatcaccacatccgttggaatcatcatggtcaacaaggctctgatggctacacatggattcagtttcgccacaacattaactggtcttcattttgtgacaaccaccttgatgactatcgtgtttcggtggttaggcctcagccagccctcccacttaccaataccagatctgattaagtttgtgatcttttcgaacttgtcaattgttggaatgaatgtgagcttgatgtggaactctgtgggattttatcagatagcaaagctgggcatgatacctgcatcatgtctcctggagggtgtcttcgatcgtgtacattactcccgggaca

SEQ ID NO: 405082 - DNA, 512 bp, Oryza sativa nipponbare
ctccatctcctccgctctctcgcgcgcggggcagtcgcccgaagccctagaccccccggcggcgaagatggcggcggaaggcggtgccgccgctcgggcgctgtcccagcgggagcaggacatccagatgatgctcgccgcggacgtccacctcggcaccaagaactgcgacttccagggggagcgctacgtctacaagcgccgcactgacggtatctacattattaaccttggcaagacctgggagaagctccagttggctgcgagggtcattgttgcaattgaaaaccctcaggacatcattgtgcagtctgcgaggccctatggccagagggctgttctcaagtttgctcagtacactggtgctcacgccattgctggtaggcacactcctggtacatttaccaaccagctgcagacctcattcagtgagccacgccttcttatcctgactgaccccaggactgatcatcagccaattaaggagtctgcacttggaaacattcctacca

SEQ ID NO: 405083 - DNA, 509 bp, Oryza sativa nipponbare
ctttcacaggccgagaaggacttgcagccctggattgctcgagatgatgagcaaggtcagaagatgtggagagtcaaccagcgaatagttaagctgatagcagagcttatgaggaaccacgatagcccagaagcattggtgatccttgctagtgcttcagatcttcttcttcgagcaactgatggaatgcttgttgatggtgaagcttgtactttaccacaattagagctattggaagtaaccgccagagcagtccatctcatcgtcgaatggggagattcaggtgtatccgtcgctgatggcctctccaatctgctgaagtgccgtctatcaaccaccatccgctgtctttcgcaccccagcgcgcatgtccgtgcactcagcatgtccgtccttcgcgacatcttgaacagcggacaaataaactccagtaagctcatccaaggggaacaccggaatggcatccagagcccaacctaccagtgctttgcagcaagcatcatcaactg

SEQ ID NO: 405084 - DNA, 534 bp, Oryza sativa nipponbare
gacgccccctccttcccattccccatcccacaccggcggcggcggcgcgagcagcggaggagatcggcagcgacgatgtcggcgacgacggcggcggttcccttctggcgcgcggcggggatgacctacatcggctactccaacgtctgcgccgccctggtgcgccggtgcctcaaggagccccacaagtccgaggccgcctcccgcgagaaggtccacttcgccatctccaagtgggccgacggcaagcaggagaagccgactgtccgcacagatgatgaataaacatttggtgccatggtgacatagttcttcctacagatgtttcaaaaatgttcttgcctttcttgcgagccgttgtacctgaaacttgctgttatctggctggattttgtggtcaacgctgaagaataaattctttctgtgacagtggatctggttgtcatacaatgttattatcgttgctaattgcccttgctgtactcgatcaatgatgcgaactcttggtactcaaggggggcggatctactttat

SEQ ID NO: 405085 - DNA, 434 bp, Oryza sativa nipponbare
  unsure (1)..(434): unsure at all n locations
gttctagatcgcgagcggccgtcgcgcccacgcgtccgcggacgcgtgggcgccggcttcttaccggtcctgcattcatttagagtttgatatttcagggactggtcttacatatgagactggagatcatgttggtgtatatgcagaaaactgcacagagactgtagaggaggtagaaaatctgttaggttattcaccagataccttattctcaattcatgctgaccaagaggatggcactccactttttgggggttctttgccacctcctttcccgtccccctgtactgtggggactgcacttgccagatatgctgaccttctgagttttcctaagaagagtgctttaattgctttggcttnccatgcatctgatcccaaagatgctgagaggctaagacatctagcatctcctgctggaaagaggagtattt

SEQ ID NO: 405086 - DNA, 532 bp, Oryza sativa nipponbare
  unsure (1)..(532): unsure at all n locations
cccacgcgtccgcccacgcgtccgcccacgcgtccgtggtggtgcagccatggttgctccactgaagtttgcagttgtcacagagaaaacagtcttcgcaacccctgaggctagtgttggattacacacagactgcagcttttcttatatccattctagactccctggatatttaggggagtacctggctttgaccggtgcaaggttgaatgcaaaggaaatgattgctgccggtcttgctactcattttgttccttctgaaaaattggaagaacttgaaaaatgcctgctgaatttaaacacaggagatgagtctgctgttcgagctgctattgaagagttctcaactgatgttcaacctgatgaagatagtattttaaacaagctcccaactatcaacaaatgtttctctgctgagactatcgaggacatcataaaagcttttgaatcagaagggagcattgatggaaaccaatggatcgctacagtactgaagggcatgcgaagatcatctnctacttcactgaagatg

SEQ ID NO: 405087 - DNA, 375 bp, Oryza sativa nipponbare
  unsure (1)..(375): unsure at all n locations
cccacgcgtccgcccacgcgtccgcccacgcgtccgctcatttgaattggcgccggcaggagaggacggaagccgttggacattggaaagctaaggtttatgatatgttaaacgttctggtgactgtgaagtcaaggcgtgtgccgggggcgatgacagatgaggagctgtttgcgatggagggggaggagaagaatgggaggggcactgaacttgacgcggagctggatgaagtgttgacagccgaagagaggaaacagcttgattctgcgttgagaatgggngaaccagggaagaagaatntgaggagaggtgcgaggaaggtgatggcggggctgatcatttggatgcaaatggcgtggcaaaagataagaa

SEQ ID NO: 405088 - DNA, 421 bp, Oryza sativa nipponbare
cccacgcgtccgcccacgcgtccgcccacgcgtccgcccacgcgtccggcaccgccggcatctccggcggccacatcaacccggccgtcaccttcggcctcttcctcgccaggaagctgtccctcaccagggccctcttctacatggtgatgcagtgcctcggcgccatctgtggcgccggcgtcgtcaagggcttccagaagggcctgtacgagaccacggcggcggcgccaacgtcgtcgcgcccggctacaccaagggcgacggcctcggcgccgagatcgtcggcaccttcatcctcgtctacaccgtcttctccgccaccgacgccaagaggaacgccagggactcccacgttccgatccttgccccactgccaatcgggtttggcgggttcttggttcacctggccaccatcccc

SEQ ID NO: 405089 - DNA, 493 bp, Oryza sativa nipponbare
aaaagaagaaggagaagaggaaaaattcagacagagatcgacatggagacgaaggtgaccgtgggcgtcgtcctcctgctgctgtgcctgtgcggcggcgccgcgtgcgccgccggccgcagcggcggcgagttctccattgtcgggtactcggaggaggacctggcgtcgcacgaccggctgatcgagctgttcgagaagtgggtggcaaagtaccggaaggcgtacgcgagcttcgaggagaaggtgaggaggttcgaggtgttcaaggacaacctcaaccacatcgacgacatcaacaagaaggtcaccagctactggctggggctcaacgagttcgccgacctcacccacgacgagttcaaggcgacctacctcggcctcacgccgccgccgacgaggtcgaacagcaagcactactcgtcggaggagttcaggtacgggaagatgagcaacggcgaggtgccgaaggagatggactggaggaagaaga

SEQ ID NO: 405090 - DNA, 454 bp, Oryza sativa nipponbare
aaccaaagcatgtatgaacctcctgtgggcaggccaaactctggcccaccaccgtcctatggtgctggcgggtacgggccacagggaggaagtggtttctctgaatcatatggttacagcggatccccttcacaccgtggcaatgcagggatgaagtcgtcaccctcaccttttgctccctcagggccatcatctgggggaagtggcaactatggcaggctccccacagcccaaatactaccacaagcagtgcctatcaattccagcccaagtggttcctctggcaacagggtgccggttgatgatgtagttgagaaggttgcaacaatgggattctcaagagagcaagtgagggcaactgtgcggaggctgaccgagaatgggcagaatgtggatctgaacgtggtgctcgacaagctgatgaacgacagcgatgtacagcagccccagaaag

SEQ ID NO: 405091 - DNA, 415 bp, Oryza sativa nipponbare
aacggtggaacgcgtacttacccaacaagttaggtgcatgccatggcaccattcatggcgtgcgcctcgccaccggtactcacgctggccctgctcgcgtcgtgcggtgcccttctcgccacctccatgctcccggcgcgtgcgacggcgggcagttgcttggacgtcggcgacatggtgatgatggacaggttccgcgcttggcagggagctcacaaccggtcgtacccgagcgcagaagaggcgctgcagcggttcgatgtgtaccgccgcaacgcggagttcatcgacgccgtcaacctgcgcggcgacctcacttaccagctcgccgagaacgagttcgcagacctcaccgagggaggagttcctggccacgtacaccgggtactacgccggcgatggccccgtggacgac

SEQ ID NO: 405092 - DNA, 429 bp, Oryza sativa nipponbare
cccacgcgtccgcccacgcgtccgcccacgcgtgcgaaatgactcaatgtttggatgacattgccatcatgacaggaggtacactagtgcgtgaagacatgggatatacactagaaaaggcagggaaagaggttctaggttctgcttctaaggttgtagtcgggaaagactcaacactaattgttaccgatggaagcacccaacatgtgatcgagaaaagggttgctcagataaagggccaaattgagaactcaagtgagaggtaccagaagaagatattgggtgagagaatagcaaggttatgtggtggaattgcaatcaattcaggtcggtgctcaaacaatcattgagatgaaagacaagaagctcagaattgaagatgcccttaatgcaacaaaggcagctattgaggaaggagttgtgataggt

SEQ ID NO: 405093 - DNA, 438 bp, Oryza sativa nipponbare
  unsure (1)..(438): unsure at all n locations
ggggatttatggtgaaatcgacggagcaggcatatatanttgggaacaaaagaattttgtcaagagcttcatgcgaaacagttccggacatgaaagatatgaaaggagttaccattggatatgtggcatgtaacaatgaattgattggagtattcactctatcggatgcctgccgaactggatcagctgaggccatcaaggaactgagatcactgggcattaagtcagtgatgcttacaggtgatagtagcgctgctgccacatatgcacagaatcagctgggaaatatccttgctgaggttcatgctgaacttcttccagaggacaaagntgagaattgttggtgaactcaaggaaaaagatggccctacgctgatggttgggtgatggcatgaatgatgccccggcattggctaaagctgatgntgggagtctcta

SEQ ID NO: 405094 - DNA, 547 bp, Oryza sativa nipponbare
gaaagaaatctcccgtctcctcgtcgttcctggcgagcagagcaggagaggggaggagatcctgatctggaagaagaaggagctcttctccgaatttcagaaccctaaacctcaatacaagcaacagtttgtttttccccccaaagtacccccaccaatgtcccaagctggatcggaatccgccgctgccaaggagccgtcgttcaaggagggcgagagagtgctcgcctaccacggcccgctcctctacgaggccaaggttcaaaagtccgaaaacaaggaggatgagtggcggtatcatgtccattatcttggttggaataagagctgggatgaatgggtcacaaatgatcgcttactgaaattgaccgacgaaaatatccgcaaacaacaagagcttgaaaagagccaagtagttgacaaaagcgtaaaatctggacggtcagcgcagcataagccaaaaggctctaatgatgcaaaaactgataaagaagacaccaagattattatcaaggggaagaaacgcaaaagtcagcctggtgggact

SEQ ID NO: 405095 - DNA, 510 bp, Oryza sativa nipponbare
caagcagctcaaccaggaggagttcgacgcgctgctgcaggagttcaagacggactataaccagacccacttcgtccgcaacccggagttcaaggccgccgccgacaagatggaggggcctctcaggcagatcttcgtcgagttcctcgagcgctcctgcaccgcggagttctccgggttcctcctctacaaggagctcggccgcaggctcaagaaaacaaacccagtggtggctgagatcttctcgctcatgtccagggatgaggcccggcacgctgggttcttgaacaaggggctgtctgatttcaacttggcactggacctcgggttcttgaccaaggctaggaagtacaccttcttcaagcccaagttcatcttctacgcgacctacctgtcggagaagattgggtactggaggtacatcaccatcttcaggcacctcaaggcgaacccggagtaccaggtgtaccccatcttcaagtactttgagaactggtgccaggatgagaa

SEQ ID NO: 405096 - DNA, 544 bp, Oryza sativa nipponbare
cccacgcgtccggcaattgcaaaaagagcttgctaggttggagagtgaattgcgatgtccagcttcctattctagtcttgaatcattggtgaaggaaaaggataaccaaatccggaagatggagaaagaaattaaggaattgaagttacagcgtgatttagctcagtccaggcttcaggatttgcttcaggttgttggagataaccatgtccatgtttcaaagcagtcctcggtttctgggaggaactttaccttcgatgttccacagacgtgtgaagatgagcaatcaacaactgagtcatcagaagttgttgacagtgtccaaaattttaggtttcaaggccggcgagtggcacagagggaacataagcctcagcaggctgaaaataatgtgcagtttactaccccatctaggtactcagtcagcagtcctccgttcagtgggatgctcccaactaacagaagtgatcatctctcacagatctctaatgaagattcagatgatatctgcaaagaagtacggtgtatagaaaccaatgaaaca

SEQ ID NO: 405097 - DNA, 425 bp, Oryza sativa nipponbare
  unsure (1)..(425): unsure at all n locations
ctaggactttcgtccttgtgcacacgcgaccaggcttactggctcaccatcctgccgatggtgttcgacattttcgttgagcctcactgcccgcagcgtgtgatgagacagttcggacttaggcaggtgtttccgggcaacgtgcagccgaccgtcctccctgccgaccactcgttgactcgacggggacagctagcaggcgcactttgggctccacgtgtacagcagtacgttgacgactgggtgttagctacagaggaggtgatcaacgagctcttctcacacacggaggagaactaccgtgactaccttcgttggtaccttcctcgcactcgtgcgcgtgtgaccttcactccagacgccccagagccgcacgtggcccgctgtcacggacgcgtatcccacgcaccgngaccgagactact

SEQ ID NO: 405098 - DNA, 595 bp, Oryza sativa nipponbare
atcgctgccctctgctgcgcgctgctaccaagcgcacagctagctgctctcggacgaggcaacgacgactccttcccttcccttaaccattaagctactctaaaatcccaagcttcggatcgaatcgagctacgaatcgcgtcccagggcaaagaaaggagaggagctttctcgatcgcaatcatggagctggtgatgggggcaatggaaaacctgatccccaagttgggtgagctgctcaaggaagagtacgtcatgcagtcgggcgtgagagagaagatccagtctgtctcacgggagctcgagagcatccacgctgctctccgcaagatcggcaaggtgccatgggagcatcttgacgatgagttgaggctttgggcgcacgaccttagggaggcgtcgtatgacatggaggacatcatcgactccttccttgtgcgcgtcgacggccatgaggcaagtgaagttcactgggtcaaatggttcttggagaagatgaccaaccagttcaacaagatcaaggctagccatgaaatcggtgtcgcaatgaaagaaatcgatgagaagctccaggaggtggctaccaggcatgcga

SEQ ID NO: 405099 - DNA, 499 bp, Oryza sativa nipponbare
  unsure (1)..(499): unsure at all n locations
ggtttgcctcccgcgcgagccctcgtcgacgccgccggtatattgctgaaggaagaagagcaccaacctatttatcatgtcaggaggatcttcaccaaggtcaagacgaagcagctttaattctttatcaagagatctcgaactcccttcagagcaaggttgtctctctgttattgtcctcggggcttctggagacctagccaagaagaaaactttcccggcactcttccatctttttgcacagggatttatacaatcaggtgaagtgcatatatttgggtatgcgagatcaaacctttctgatgatgggttaagggaacgcattcgtggatacctcaaaggagcctcagaagaacatctctcagactttttgcaacatataaaatatgtcagtggttcctatgacagcggagaaggatttgagaaattgaacaaggaaatttcagagtatgagaagtcaaacaaatcanaaagccctcgcaggctcttctatttggca

SEQ ID NO: 405100 - DNA, 408 bp, Oryza sativa nipponbare
cccattcgtccgtattatactagcgggcttgggggattcaatcgagcagtagctaattgcatagtgatcgatcgatctgtatagatggtggtggccggcaagaagcagggacggcattctttttctgcatcatcatcgtcgtcttcgtcttcttcttgttcattagtgcagctgggggggggtcagcgcccacagggtgaggaccctctcatcggcatcaaagcagcagcagcaggaggaggaggaataatgagaaagggcccgtggactgagcaggaggacgtgcagttggtttggttcgtgcggctgctgggcgaacggcggtgggatttcttagcaaaggtgtcaggtttgcgcggcggcgggtgatgagcatatgctttcttgcatctaatctatcgattaatt

SEQ ID NO: 405101 - DNA, 515 bp, Oryza sativa nipponbare
cccacgtcgtccggaatttgcatccagctgtgatgtgcgcttcgtaaaactataaaaaggggtattcaggttcatgaagatttctcaggaggtgtcatgagccctgcagagttattagtatgccacttcaaaggcattaaggctttggaagaagaatatggttccacagaaattgttaagcagggagctgatgtagtccggacagctgtcaccaaagcatttgatttactacgtggagcatataatggaaaaattgttgggttagtaatatccacaaaggaggcttcaccatccttagtgggtccagcatcttcactgcacatttcgagatggctaaaagagacaagccaaactaacactacaatagcctcttctgagatacttgttagaaagagtttggcatggattacagggatcattcttcttgtctctactctcattggggtttgcttgcttatgaatatgccacttaccagggacaccctcctgtattcgaatgtgaagatcgattagat

SEQ ID NO: 405102 - DNA, 413 bp, Oryza sativa nipponbare
  unsure (1)..(413): unsure at all n locations
agaaagaagaagaggcaaattaatagtaatggaggggaaggaggaggatgtgaggctgggggcgaacaggtacacggagaggcagccgatcgggacggcggcgcagggggcggaggagaaggactaccgggagccgccggcggcgccggtgttcgaggtggaggagctgacgtcgtggtggttctaccgggcggggatcgcggagttcgtggcgacgttcctgttcctgtacatcagcatcctgacggtgatgggggtgaacaagtcggcgtccaagtgcgccaccgtggggatccagggcatcgcgtggtcgttcggcggcatgatcttcgcgctcgtctactgcaccgccggcatctcccgcgggcacatcaaccccgcgttgacgntcggcctgttcctggcgccgaagc

SEQ ID NO: 405103 - DNA, 535 bp, Oryza sativa nipponbare
  unsure (1)..(535): unsure at all n locations
cggacgcgtgggcgcgctcgctgtctcgcgtcagcggcggagctctctagaaggagcagaggagtcccccccaagcgatcgattcgatcccctccgccgccgatcgcctcgccgaagtctccgagaaacacttgagggatggctgaagaggatatccagcctattgtctgtgacaatggcactggaatggtcaaggccggttttgctggtgatgatgcacccagggctgtctttcctagcattgtaggcaggccacgccacactggtgtcatggttggtatgggccagaaggatgcctatgtgggtgatgaagctcagtcgaaaagaggtatactgacattgaaatacccaatcgagcatggtattgtcaacaactgggatgacatggagaagatatggcaccacaccttctacaatgagctccgngtggctcctgaagagcatcctgtattgctgaccgaggctcctatgaaccccaaggcaaacagagagaagatgacccanatcatgttcgagacnttcaactggccagcga

SEQ ID NO: 405104 - DNA, 557 bp, Oryza sativa nipponbare
cccacgcgtccgggctacattgccagctttgatggaatggtggaacatgtcattgaacaatactcacggataaaaggcaggaaggaggtccgtgggctcccacattttctattgggacaatcaatgggaggtgcagtggctttgaaagtacacctgaaacaaccaaaagaatgggatggagtgcttcttgttgcacctatgtgcaagatttcagaagatgttacaccaccagcgccagtgttgaaggcattgagcatattgtcatgccttcttccagaagcaaagttatttccacaaaaagatattggagatttggcatttagagatccaagtaaaagaaaagtagctgagtacaatgccatttcatatacccaacaaatgaggttgaggacagcagttgaacttttgaaggctacaaaggacatagaatcccagttggagaagatttgttccccattgctgattctccacggagcagcagacttggttaccgacccccatgtcagcgaattcctgtacgagaaagctagcacaaaagacaagactctcaagctcta

SEQ ID NO: 405105 - DNA, 517 bp, Oryza sativa nipponbare
ggagaggtgaaagacattgagattgtgtacaggcctcttacagagatgtatgaagccgctgccgaagctgatgtcgtgttcacaagcacggcatccgaaaccccattgttcacaaaggagcacgcagaggcgcttcccgctatttctgatgctatgggtggtgttcgactctttgtcgacatatccgtccccagaaatgtcagcgcctgtgtgtctgaagttggccatgcgcgagtatacaacgtcgatgacttgaaagaggttgtggaagccaacaaggaggaccggcttaggaaagcaatggaggcccaaacaatcatcacccaagaattgaaacggttcgaggcatggagggactcgctggagactgttccgactatcaagaagctgaggtcctacgccgacaggatcagggcttcggagcttgagaagtgcctccagaagatcggcgaagacgccctcaccaagaagatgagaagatccatcgaggagctcagcaccggcatcgtgaacaagc

SEQ ID NO: 405106 - DNA, 595 bp, Oryza sativa nipponbare
cgatcgccctcctccccgaaacttctggaaccgagagcagcagacgttagctcttctcctccgatggcggacaaggagcccgtcgtggaccgccccgaggacgaggaggaggcctccgccgccgccgccgccgcgggcggcgaggaggaggacacgggcgcccaggtcgcccccatcgtgcggctcgaggaggtcgccgtcaccaccggcgaggaggacgaggacgtgctcctcgacatgaaggcgaagctttaccggtttgacaaggaggggaaccagtggaaggagcgggggacgggcaccgtcaagctcctcaagcacaaggagaacggcaaggtccgcctcgtcatgcgccaggccaagacgctcaagatctgcgcgaaccacctagttgcttcgaccacgaagatgcaggagcatgcgggcagtgacaagtcgtgcgtctggcacgcggcggacttcgccgacggcgagcttaaggaggagatgttcgcaatccggtttggctctgtcgaaaattgcaagaaatttaaggatttggttgaagagatttcggaatcacttgcaaagacagaaggcaaagaaaccgaggaag

SEQ ID NO: 405107 - DNA, 524 bp, Oryza sativa nipponbare
  unsure (1)..(524): unsure at all n locations
gaagaatctggacacataatccaagagtattttgtctcagatgatgtcccagaactcattataagccttcaagagctttctgccccagagtacaatcctatcttcctcaagaagcttatcaccctcgctatggacagaaagaatagggagaaggagatggcttctgccctgctttcttcactcagcttggaacttttctccactgatgacatcatgaagggattcatattgctcctgcagtcagcagaagacactgccctcgacattgtggatgctcccagtgaacttgccctcttccttgccagggcagttattgatgaagttctgattccactgaatttggatgagatcggtaacaggcttcgccctaacagcagtggtagtcaaactgtccagatggctcgtgcccttcttgctgctcgccactctggtgagaggatactgcgttgctggggtggcggcactggctgngctgtagaagatgcgaaggacaagatcgcaaagctccttgaagaatacaatac

SEQ ID NO: 405108 - DNA, 558 bp, Oryza sativa nipponbare
cccacgcgtccgcttcatgataggcattggaaatagagaaagccgtgcaaggcaagctctatcgacgatgggggcttctgtattcagcggaatcaccttgaccaaacttgttggagttattgtcctacgttttgcaaaatctgaagtttttgtggtatactatttccaaatgtacttagcacttgtcatcataggctttctgcatggccttatcttcttaccggttgttctgagtttgtgtggccccccttcaaaggtgatgaaacctctcgaacagagtcaaccttcagcttcgtccgattaaagttgacaacgggagaattcacccaattgaacatcagtacaccagatagggatacatggaaatcagccattctgaaactcgcagagcatccctgtggtcatccatctctcctggtgcgaagtagcagtgcagtgtacagtatttctagaggtgcaagccattttattctatacttagattcataggaaaaagggttgtgcattagttaaagctcagtttacaaaactagattagatagcgtctccacacggaaa

SEQ ID NO: 405109 - DNA, 327 bp, Oryza sativa nipponbare
cccacgcgtccgcccacgcgtccgcccacgcgtccgcggacgcgtgggccagcgcaaaaaaaaagaacagaaaaaaagagaggaagaaaacgagaaaaatctcaccttcctcttcctccgttatctagctcgatccccgcaagaaattcgccccggaatctctcgatccgctcgatccagtggcgcgatctgtcgatcgttccttgcgaaccctcggttcccggggtcccgatccggtcttcgccgcgtcggcgtcccccgcggagtcgggagtcgagtccgagggggaggagatgaactgggcccgcgggaaccaccaccaatagc

SEQ ID NO: 405110 - DNA, 560 bp, Oryza sativa nipponbare
  unsure (1)..(560): unsure at all n locations
acctcctcttcctccgccgccgccgccaccgccaccgccaccgccacgtccagcctccggtcgcctgttcggatcgaagcgatgtcgtcggacgatgaggtcagagaggagaaggagctcgacctctcctcctccgacgtcgtcaccaagtacaaggacgccgtctatatcatcaacaatgctcttaagttggtagtgtctttgtgcaagccgaaagccaagattgttgacatctgtgagaagggcgattcttacataagagagcaaactggcaacatctacaagaatgtgaagaggaagattgaaagaggtgttgcttttccaacatgtgtatctgtgaacaacacagtctgccatttctctccgctagccactgatgaggcagtcctggaggaaaatgatatggtcaaaattgatatgggatgtcatattgatggttntattgccgtggtggctcatacacatgttatccatgatggagcagtcactgggaaagcagcagatgttcttgctgctgccacacagcggcagaagttgctctgaggcttgttagacctggg

SEQ ID NO: 405111 - DNA, 456 bp, Oryza sativa nipponbare
  unsure (1)..(456): unsure at all n locations
caggagcagaacccgccgtccgactactgccagccctcgccggagtggccgtgcgcccccggccgcaagtactacggccgcggccccatccaactctccttcaacttcaactacgggccggcggggagggcgatcggggtggacctgctgagcaacccggacctggtggcgacggacgcgacggtgtcgttcaagacggcgctgtggttctggatgacgccgcaggggaacaagccgtcgagccatcgacgtgatcacgggcggtgggcgccctcgccggccgacgccgcggcggngcgggcgccggggtacggcgtgatcaccaacatcgtcaacggcgggctggagtgcgggcacggncccgacgaccgngtggcgaaccggatcgggttctaccagcgctactggggcgcgttcggcatcggcaccggcgggaacctcgactggtacaaccag

SEQ ID NO: 405112 - DNA, 539 bp, Oryza sativa nipponbare
gtcttcgtctggtcttcccccaccgcgatcccgcgggctactcaccgcagccgcaaaagccaagccgccatggcaaccgccgccgcgtcggatctggagagcaaggccaaggcggccttcgtcgacgacgacttcgagctcgccgccgagctctacacgcaggcaatcgaggccaggcggggcaccgccgagctctacgccgaccgcgcccaggcccatatcaagctaggcaactacactgaggctgtagctgatgctaacaaggccattgaacttgacccatcaatgcacaaggcttatcttcgtaaaggcgctgcatgtatacgactggaggagtatcaaactgcaaaagcagctgttgaattgggttactcgttcgcatctggtgactcaaggtttactcgcctaatgaaggagtgtgatgagcgcattgctgaggagcttagtgaagtcccttgtaagaaggctgaagatggagcacctgccccctcttttgctttttttgttgaggacaaggatgaagctgcaaacatggataa

SEQ ID NO: 405113 - DNA, 466 bp, Oryza sativa nipponbare
ggaaaaaaacctccactacgcaaatcgtggtcgtgttcctccgccgaattccccaccccaccggcggcgcgaccgggcggagatgtaccacccgacgagaggcggcgtccgcggcggacgggatcaattcaaatgggatgatgttaaggttgacaagcaccgagagaattacctcggtcatagcattaaggctcctgttggaagatggcagaaagggaaggacctgttctggtatacaaaagataagaaatctgactcagaagatgctctcaaggaagaaatcaggagagtgaaggaagaggaggagcagtccatgcgggaggcacttggcttagttcctaagcgtagtagtcgacctaagggcaaccgattagataagcatgagtacgcagagcttattaagcgaggatcaactgcagaagacttgggtgctggacatgctgaagcagcacaagtgcagggtcta

SEQ ID NO: 405114 - DNA, 507 bp, Oryza sativa nipponbare
cccacgcgtccgaaaggagatgagtaaaaacgactttgagcgtgtgctgatgaggctaaggaaattgcgggtggtgtacttggacttgcaagatatgaggacggtcccagcatgtattggtgaactaaaacatcttcgttatcttgttttcctccccggcgaaaatggggaaccttgtcaatttgcggtatatgcacacgtggaaaggcttggacattcccaacatagggagactgaaatcgctccgaaatctgtttcgcttcactgtgaggaaagagaagggatatgagatacaccagctggaatacctgaacaaccttcgtggcaggatgttcattgactgtcttgataatataagaagcaaagaggaggctgttcgagccaggctagctgacaagaggcatataactgatctgacgcttaagttggggtggtgacgaacgctccgcatcaagaactgcacctgtaacggagatgagcagcgggccagagcttcaaatgcaagct

SEQ ID NO: 405115 - DNA, 262 bp, Oryza sativa nipponbare
  unsure (1)..(262): unsure at all n locations
cggacgcgtggggcggcggcgcgggccatctcggcgctggagacggtagaggcaggcgcgttcagggatcgctcctccgaggggaagacgacaaacgcagcggcggcgccgttcttcggcggcgacagcatcgggttcgtcgacgtggtgctcggcagctacctggggtggttcagggtgagcgagaagatgatcggcgtcaggatcatggacgcggcnaggaccccncngctggcancgtgggcggagcgggtccaggcgg

SEQ ID NO: 405116 - DNA, 373 bp, Oryza sativa nipponbare
cccatgcgtccgcccacgcgtgccgcacccgagccatggccctggccgaagccgagaacccgccgcgccgccgccgacctgcgccggaccccgtcgcggtgctccgaggccaccgcgccgccgtcaacgacgtctgcttccacccctccctgccgctcatcttctccggcgcggctgagggggaactcagggtttgggacacagcgagccaccgcactgtctcctcggtttgggctcatggtggatcggctggtgtatattcagtggctgctagcaccagacttggaaacaaaatcattagtcaagggagggatggatcatgcaaatgctgggaaatcgaggaagctgggcttggaggggagggccctatata

SEQ ID NO: 405117 - DNA, 518 bp, Oryza sativa nipponbare
  unsure (1)..(518): unsure at all n locations
cccacgcgtccgcccacgcgtccgaggagatcgccgtcgccgtcgccgtcgccgtcgccgatctcgagcgggagcggagatggggctcacgttcacgaagctgttcagccgcctcttcgccaagaaggagatgaggatcctcatggtcggtctcgatgcggccggtaaaaccaccatcctctacaagctcaagctcggcgagatcgtcaccactatccccaccatcggttttaatgtcgaaactgttgagtacaagaacattagcttcaccgtttgggatgttggtggtcaggacaagatcaggcccctgtggaggcactatttccagaacacccagggcctcatttttgttgtggacagcaatgacagagagcgtgttgttgaggccagggatgagctccaccgtatgctgaatgaggatgagctacgtgatgctgtgctgctggtgtttgcanacaaacaagatcttcctaatgccatgaacgctgctgagatcaccgaccagcttggtctgcact

SEQ ID NO: 405118 - DNA, 474 bp, Oryza sativa nipponbare
  unsure (1)..(474): unsure at all n locations
cggacgcgtgggttctgtatttgggaatattctttcgtgtaaagtcgcgacggaaatgtctggagagtcgaagggatatggttttgttcagtttgagctggaagaagctgcccagaatgctatcagtaagctcaatgggatgcttttgaatgacaaaaaggtgtatgtagggccttttgttcgtaaacaggagagggaaaatgtatcaggcaatcccaaatttaacaatgtgtatgtaaagaacctatcggaatcaacaactgaagataatttaaaggaaatttttggtaaatttggacccataactagtgtcgttgtaatgcgtgaaggtgatgggaaatctagatgctntggatttgttaactttgaaaatccagatgatgctgctcgagctgttgaagatttgaatggcaagaagtttgatgacaaggaatggtatgtttgtagagcacagaagaagtcagagagggagat

SEQ ID NO: 405119 - DNA, 514 bp, Oryza sativa nipponbare
cccacgcgtccggcaaactgaagtactttgctccaatagcaatggtagcacagccaaaaacagacattttggtcctgcaattaatcagaaactgaaggcacatttcaaggaagatccataccctagtcgtgcaacaaaagaaaatctggcacaagagttaggcctcacatttaatcaggttttaaaacagtgatctttgttcttcctcccatgagcacttcgcagggctgtcactgtatctctcctccttaatagagtttctgttgacaggtcactaaatggttttccagtactcgtcattacgcaagagtggcagccacaaaaaaggagaacaacattgaaaatcatacggctgagaataataacaataccaacactgttgatagcatacaactgagaggatccaatgatattgttagtgtagatagaaatgatatggtctccgaggaaaggacaggacaaagtaatctcaatgaaggtactccattaagatcagataccagctgtgggcaga

SEQ ID NO: 405120 - DNA, 479 bp, Oryza sativa nipponbare
cccacgcgtccgccttcatctgcaaccatcttcaggaagagcattgctttgacaccagaaatgctgtgtgcccgttgtgcgccgacaatatagggagagacatgggtgcccatttcagagttcaacactcacatcttctcaagagaaggaaaccttctaggcccagcagctcatggcctacaccctccaacaattcagacccctactttgaggggcctccacagtatatgatgaacaacaggacataccaagatcctgcacctgatccactgctctcccaatttatctgcagcatggctcaaactgacactaactcggataacacaaacactgaaattgcagtttcagcagtctcacatgatcagaggttgagtcagcgtgtgactctgactgatgatgcatccaagctggaactcaaggaaaggttgcaaagaatcgagtttgtcaaggagataatcatgtcgacaattctttatttt

SEQ ID NO: 405121 - DNA, 428 bp, Oryza sativa nipponbare
cccacgcgtccgctcagttctacgcgttccgggggattacgctactgttaacccaggagttcaactttgctgacactattcacatatgggacacactattaagtgatcctgatggtcctcaggagaccttgctcagaatctgctgtgcaatgctgattcttgtccgaaaacgcctattggctggtgatttcacttccaatctcaagctcctgcagaactaccccccaacaaacatcagccacctcctttacgtcgcaaacaagctgcactgaactcaactgaacctcgtctggaagacctgaaacacactacccctgctacaatgtattcggtaaaaactgtgactgcattgcagaaccacgtaccattacgaatgctaatcacagccagtccattaataaaataatttggatccctacctgcttggg

SEQ ID NO: 405122 - DNA, 238 bp, Oryza sativa nipponbare
cgctgagtttaagcatataaataagcggaggagaagaaacttacgaggattcccctagtaacggagagcggcgggcggcggcggaggaggccgggcgaggacggaggcgacgacgacgacgaggagtatgtggtggaggaggatgaggaggaagagtgcgtcgtggatctgtctgcgtggagcgccgtctattgaggagagggcatagacgaggaatactaagagggtgatgaggact

SEQ ID NO: 405123 - DNA, 493 bp, Oryza sativa nipponbare
  unsure (1)..(493): unsure at all n locations
cggacgcgtgggctttatcaatggaaaacacttgaaaataatgaaccttggagatggtcaaggcgcaactggtggggttacagctgttctacgagacactgatgatgatgctgttgatccacatctagaacgaattaaaaatcaggctggggatgaggaaagtgatgaagaggatgaagattttgttgcggataaggatgatagtggatcacctactgatgattctggtggggaggattcagatgctagtgaaagtgggggtgaaaaagagaaattatccaaaaaggaagctagtagttcaaagccacctgtgaagaggaagcctaagggaagggatgaagaaggttcagacaaaagaaagccgaagaagaaaaaggatcctaatgcccncaaaagagcaatgacaccattcatgtacttctcaatggctgagcgaggaaatatgaagattaacaatcctgatttgcctacaaccgagattgcaaagaagctc

SEQ ID NO: 405124 - DNA, 521 bp, Oryza sativa nipponbare
  unsure (1)..(521): unsure at all n locations
cgcgttcaccgttaatggtgttaccggcgagctctaccaatgcgcaaatgacacgttcacggtggacgtgcagcccaacacgacggtgctactccgggtcatcaacgctggactcaacacgcacctcttcttcaaggtggccggccacgcgttcaccgtcgtggccgtcgacgcgtgctacaccgccaactacaccacggacacgctcgtgctcgcgccggggcacaccgtggacgcgctcatggtcaccaacgcgtcggccggcagctactacatggcggtgcaggcgtacgacagcctgtctccgaccaccatggccgtaaccgacgacaccaccgccacggccatcgtgcactacaacaccacgtcgaccaagaaaaacgcgacgcccgtcatgcccaccatgccccagagctccgactccgcgacggccaacgccttctacttcgggctgaggggcccgncgtctcccagcgcgccggccgtgccgacaaggtggacgtgaacatgaccatcgagct

SEQ ID NO: 405125 - DNA, 486 bp, Oryza sativa nipponbare
  unsure (1)..(486): unsure at all n locations
cccacgcgtccgcccacgcgtccgcccacgcgtccgcccacgcgtccggccgccaaccctagatccgcctgcagctcctccgctcctccacccaccaccgccgtatcttccctcatctggccatccactccggtgatgtcgagcgcgtggtgtcgcaagaacgttgcctcgtttggtgagaggggatagtgcagcgagccgcctccaatcccttctgtcccactgctactcgctgtcgcagagaggagatttgtccgaccgggtttcatgttaagctgtggctttatttcccaccatcctcagtcccatcctatttctctttcttgttcgagcaatcgaatctgatttaaggatctgattttctcttgctaattttcaggagtcaaccgtctatttgctgtcccgtgcaccaacacgaacattgacccgatttcattctgacacagtagtatgtttagtaggagganatgaattaaaggacaattc

SEQ ID NO: 405126 - DNA, 475 bp, Oryza sativa nipponbare
attcatcgggatgtgaagtcatcaaacatcctgctgacagagagctaccgggccaaggtgtctgactttggatttgcaagaagtggccccagtgacacagaaaagacacacatctcaacaaaagtaaaaggaaccgctggctaccttgatcctgagtatctgagaacataccagttgactcctaagagcgacgtcttctcctttggcatactgcttgtggaaattctctctgctcgccgaccggtagaactgaagcgggctgctgaagagagaataactatcagatggacattcaagaaattcaatgaagggaacaggagggagatattggatccgttgttggaggatcctgtggacgatgaggtgctcgaaaggctgctgaacttggcattccagtgtgccgctccgacgcgggaggaccgtccgaccatgaaagaagttggagagcaactgtgggagatcaggaaggagtatg

SEQ ID NO: 405127 - DNA, 358 bp, Oryza sativa nipponbare
atccaccctcgccgccgccgccgccgcatgtagccacccgcgccgccgccgccgccgtcgccggagaaggagaggagcagccatgggtcgcgtgcggaccaagacggtgaagaagacctcgaggcaggtgatcgagaagtactactcgcggatgacgctcgacttccacaccaacaagaaggtgctcgaggaggtgtccatcctgccgtcgaagcggctgcgcaacaaggtggccgggttcaccacccacctgatgcgccgcatccagcgcgggcccgtgcggggcatctcgctgaagctgcaggaggaaggagcgcgagcgccgcatggacttcgtccgggagaagtcggcgctcga

SEQ ID NO: 405128 - DNA, 530 bp, Oryza sativa nipponbare
  unsure (1)..(530): unsure at all n locations
gggagagcaccaaggacacgcgactagcagaagccgagcgaccgcctcctcgatccatatcttccggtcgagttcttggtcgatctcttccctcctccacctcctcctcacaggttcttggtgtagcttgccactttcaccagcaaagtttcatgtctgatctcgacattcagatcccaactgccttcgatccctttgctgaggccaatgctggagactctggtgcggctgcaggatcaaaggactacgttcatgtacgcatccagcagcgtaatggccgtaagagcctgaccactgtccagggattgaagaaggaattcagctacaacaagatcctcaaagatctcaagaaagagttttgctgcaatggtactgttgtccaggacccagagcttggccaggtcattcaacttcaggggtgatcagaggaaaaacgtatcaaattttcttgttcaggccggcattgtgaagaaggaacacatcaagattcatggtnttctgagcaactgccaaaaccattgcaaagacta

SEQ ID NO: 405129 - DNA, 403 bp, Oryza sativa nipponbare
  unsure (1)..(403): unsure at all n locations
cccacgcgtccgccggagtcggagtcggagtcggagggggaggagatgaacggcgccggcgggaaccaccagcagcagcagcagcagcagcagcggctcaggcagcagcagcagcagcaggccctcctgatgcagcaggcgctgcagcagcagcagcagtaccagtccggcgtcctcgccgccgccgccgcggcggccatgacccagatggagcctatttcaaatggcaatcttccaccagggtttgatccatccacatgtcgcagtgtgtatgttgggaatgtgcaccctaatgttactgagagccttctaatcgaagttttccagagttctggccttgtggaaagatgcaagctcatnccggaggagaagtcttcctttggttttgttgactattatgatc

SEQ ID NO: 405130 - DNA, 440 bp, Oryza sativa nipponbare
  unsure (1)..(440): unsure at all n locations
cggacgcgtggggtcgccagaaggaacatgatgacaatgtgcaaaaagttgtgaagcggctcaagcagaggaacccaaagaaggatggccttgtttgcacagctaggaagccctggattgctgttggcatgcgcaatgtagactacaagcgtgctaggcattttgaggttgacctttccgccttcaggaacattcttgagattgacagagagagaatggttgccaaggttgagcctcttgtcaacatgggccagataaccagagctacatgcccaatgaaccttgcccttgcagttgttgctgagcttgatgaccttactgttgggggactgatcaatgggtatggtattgaagggagctctcacctctatggncttttctctgacactgttgtcgccgnggaagttgntcttgcagacggtcgagttgttagagccact

SEQ ID NO: 405131 - DNA, 485 bp, Oryza sativa nipponbare
atttcaactccctcctcctccactttcccccccgcatcgagcagcgaagcggcgatggcggaggagcagccgcgcgcggcggcggagggcggcggcgagacgctgatggagaagatcgccgacaagctccacatcggtggggacgggtcgtcgtccgactccgacgctgacgagcgcaagcagccgaagccctcggcgccgccggccccggccgaggtcgcaacggagtcgtttgttgattcggctgctgctgccgcggccgaggccaaggccaaggtgttccgcctcttcgggcgcgaggagcccatccacaaggtcctcggtggaggcaaacccgctgatgtgttcctatggaggaacaggaacatctctgccggtgtactaggcggtgccactgcgatctggatcctttttgaattgcttggctaccaccttctgactttcggttgcatgggctcatattctctttgggtcttctctttctc

SEQ ID NO: 405132 - DNA, 429 bp, Oryza sativa nipponbare
cccacgcgtccgcccacgcgtccgcccacgcgtccggtcagttggaatgagacaactaggtctgcaacaattgtaacttgttctgaagctgtgtgcgatgatggtgcattgatcgaccccaaacccaaggtgcttgtgcacttgccaaacaataccattctagatggacagttgctgtttttcaatgaccactaccgcattatgttgttggaggtcgtgtcagacactccattgcagcctgccaattttggttctaccccaaaatttggacaagatgtgtttgctttgtcaagggattatgaatcatcaatgcacgctaggcgtggcacagtcttgtggcaggaaccaccaaacgttttggagtacatgtactactgtctgtctctcagttgtcaactagccccgtgtggcagtggaggatcggtgatt

SEQ ID NO: 405133 - DNA, 448 bp, Oryza sativa nipponbare
  unsure (1)..(448): unsure at all n locations
cccacgcgtccgcaagcaacgaactgcgagtgattcaagaaaaaagaaaacctgagctttcgatctcttcggagtggtttcttgttctttgaaaaagagggggattaatggcgacagccgggaaggtgatcaagtgcaaagcggcggtggcatgggaggccgggaagccgctgtcgatcgaggaggtggaggttgcgccgccgcaggccatggaggtccgcgtcaagatcctctacaccgccctctgccacaccgacgtctacttctgggaggccaaggggcaaacacctgttttccctaggatcttgggccatgaagctggaggcattgtggagagtgtgggagagggtgtgacccgacttttgcccggcgaccatgtnctcccggtgttcaccggcgagtgcaaggagtgtgatcacttgaaaatcgagggagagcacatgtgtga

SEQ ID NO: 405134 - DNA, 476 bp, Oryza sativa nipponbare
  unsure (1)..(476): unsure at all n locations
ccttctgctggttacctggactctacatatgggtatgacagcacaggagcacactttgcatggtatgatggttctgcttatacaaatggacagcagagaacaactacaaccaatcacatgtcgtcttcaacattcagtaatggctcttctgcaaggactcaaaacaagggctccacacctcagcagatgggcatgaataacagaagacctacaactacaacaggatcagctgctcctacatatccgaataggatgtacccgagcacccggtcttacagccagtatggaaactcatacaaaactggtctttcgtacagcacaaatgngttatggaagtaatggctatggtagtaatggttatgattccaggctatatggtcgggtggggtcttagtatggataacaggtacaagccaagaggccgtggtaacgggtactatggtttttggcaatgagagtcaggatggaacaattga

SEQ ID NO: 405135 - DNA, 429 bp, Oryza sativa nipponbare
cccacgcgtccgcctcctcctcctcgcttcgatggccgctgctcgcttcctccccctctcccacgaaagatggcgtctcacattgttgggtacccccgcatgggccccaagagggagctcaagtttgccctggagtctttctgggatgggaagagcagcgctgaggatttggagaagggggcgaccgacctcagggccagcatctggaagcaaatggctgacgctgggatcaagtacatccccagcaacaccttctcgtactatgatcaggttcttgacacggctgccatgcttggtgctgtcccagagcgctactcatggactggtggagagattgggttcagcacctacttctcgatggctaggggcaatgccactgtccctgccatggagatgaccaagtgggttgacaccaactaccactttatc

SEQ ID NO: 405136 - DNA, 401 bp, Oryza sativa nipponbare
  unsure (1)..(401): unsure at all n locations
agcgtccggtgcggcgcgcttgcggcggcatggtgcaccgggcgctcgcggtggcgggggcggcgggagccgcaggggcatctggggcggtggaggcggcggctgggtttggcgggatggcactgcgtggtggctggccgagggtgctgcagattctgcagctgcttagagagcaggggattattctcgctgtgttgcttggcctctcggcgtttttctccatggctgagacttccatcaccacgctatggccttggaaggttcgtgagttggctgaaaaggaacctgaaaatggtgttttcagaatgctccgaagtgatgttactcgcttnctgacaaccatactcattggcacaactgtggtcaacattggcgcaacagcaattgttattgaggccgca

SEQ ID NO: 405137 - DNA, 491 bp, Oryza sativa nipponbare
cccactgcgtccgggatctgttaagtggcctgagatgccccgccctaagatgaaggtgtgcatgcttggtgatgcccagcatgttgaagaggcagagaaaatgggcctagactatatggatgtggaagctctcaagaagatgaacaaaaacaagaagctggttaagaagcttgcaaagaatatgacgctttccttgcatctgaggccatcattaagcagattcctcgacttcttggacctggtcttaacaaggcaggcaaattcccaacgttggtgactcaccaggaatcacttgagtccaaggttaacgagactaaggctacagtgaagttccaactgaaaaaggttctttgcatgggtgttgctgtaggcaactgtgctatggaggagaagcaaattttccaaaatgtgcaaatgagcgtgaacttccttgtctctcttttgaagaagaattggcagaacgtgagatgcttgtacctgaagagcactat

SEQ ID NO: 405138 - DNA, 493 bp, Oryza sativa nipponbare
ccacaatccttctcgattcttctgctctccaccgagaggagcaaggcgaactgcaggcggagaggctgggccacacgataccctcctctcccttcccttcccttgccgcttccaactccaagtctcgctgtgatcaggagctagggtttgtgcgatcttcgggaggaggggaagatgatcgaggtggtgctgaacgaccggctggggaagaaggtgcgggtgaagtgcaacgaggacgacaccatcggcgacctcaagaagctggtggcggcgcagaccgggacgaggcccgagaagatccgcatccagaagtggtacaacatctacaaggaccacatcaccctcaaggactacgagatccacgacgggatgggcctcgagctctactacaactagacgccgcgcctctggctggtatgaatttagtcatggatggcgaacagattatgcccatttgagcggccagcggccatagctcatatataaaactcta

SEQ ID NO: 405139 - DNA, 463 bp, Oryza sativa nipponbare
  unsure (1)..(463): unsure at all n locations
cccacgcgtccgcccacgcgtccggaggtttttgacccaaaaaaatccctatctcccaagaaaaccttgaaggtgaaagtatacatnngggggatggttggcggatggacttcacgcagacccactttgatcaatattctcctccagacttttatgcacgggtggggatagcgggagtaccagcggactcggtgatgaagagaacgagggcgatagaggataactgggtgccggtgtgggaggaggatttcaccttcaaactgaccgtgccggagatcgcgttgctgcggntggaggtgcacgagtacgacatgtcggagaaggacgacttcggcggccagacggtgctgccggtgtcggatctcatcccggggatccgagcggtggcactccacgaccgcaaagggatcaagttgaacaacgtcaagcttctcatgcgcttcgagttttgatgacccaacac

SEQ ID NO: 405140 - DNA, 485 bp, Oryza sativa nipponbare
cacaagcttcttccctccttccttcgtcttcccccttctccacttcccccattccattccattccattcctttcctttctctctcctccccctcgcgccattaaggctccagagctttctccctcttcacttgggggggactggaagaagaggaggagctcggctcgaggccccaagaatcgagttcgtcggaggcggcggatgccggagaggtccgagctggggcggcagctcccgctgagagggcccctcaaggcactggaggccgacatccaccatgccaacaccatggctaatgctatccagaggaactatggtggagcatgtgtgcagatgaggttgtcgtgcagctcactggcgccattctttctttacctcatccagtggctggattgtggctgctgttatgctctttccagttatctaggcctttttcacattctcatttgcaagggttatgcagatggagatagctcagtatcaac

SEQ ID NO: 405141 - DNA, 520 bp, Oryza sativa nipponbare
caacggttgggacttctctgtgtcgtttgatagctgggctgatggaaaggtcttcgctgctggtgacactcttgttttcaactacaaaccgggcgcacacaacgtgctggccgtggacgcggcgacgtacaggagctgcaaggtgggcagctcggcggactcggtggcggcggcgacggggaccgcgtcgttcctcctcaagaagggcgtcaactactacatctgcggcgtccccggccactgcgccgccgggatgaaactccgggtcgtcgccaactgatgaaactccggcgacagatcaatcccttaattaattaaaactatgtgggtgtctctgcagcctgaagcagcatatagcttgctcggtttagggattggtcgcgtatatatagttgtaattgtagccctatgtactggagtggctgacactgggtctgtcatgctcctgcatctgcatgcgtgcatggctgcatgctatatatcagctttgtgcgttctaaataatggcccgaatgtgcac

SEQ ID NO: 405142 - DNA, 455 bp, Oryza sativa nipponbare
  unsure (1)..(455): unsure at all n locations
agatcggatcgcgagagccccaatcccaccaccgatcgatccattcctgctgctcgcggccaccggagaaggagagagagagagagctcgacctcgtcggcgggtgaaggatcgcagcagcagcagcggcggtagagcaggaggagaggcgaagatgtcgtcggtgttcagcggcgatgagaccgcccccttcttcggcttcctcggcgccgcctccgccctcgtcttctcatgcatgggggcggcgtacgggacggcgaagagcggcgtcggggtggcgtcgatgggggtgatgcgcccggagctcgtgatgaagtccatcgtgcccgtggtcatggctggtgtgctgggtatctacggcctcatcatcgcagncatcatcagcacgggggatcaaccccaaggccaagccctacttccttttcgacggctacgcgcacctcttatctggcctc

SEQ ID NO: 405143 - DNA, 494 bp, Oryza sativa nipponbare
cccacgcgtccgggaaaggacttctgctacaactgttgagtcattcaaagaagcactctctgaagtccgattctgctctagaatggaagagcttttactgaagaaaaaaacatctactgccggagactcccttgagattcgttcccaaaaggttgacaaattaaaggtcttagcaacttccctctctaattcatcttccaaggctgagaagcgtattttggatcacaggcgccagaaagaagaggctcttaacttccgtgctaaaaaggagaatgaagtgagtgcagttgaaaaggagttgacggctgagatttctgaattggagaagcaacgtgacgaacttgaggctcggttgaagaaggtcaacatttcactgaatgctgccattggacgtctcaagcaaacaagggaagagagggatcaatttgatgaagcaaacaatcaaatgatattttagttaaaagcgaaggataatgaactttcaaaatctatta

SEQ ID NO: 405144 - DNA, 490 bp, Oryza sativa nipponbare
  unsure (1)..(490): unsure at all n locations
ctcgcctcgcgctcctcgtcccttgtgtcgtgcgatctctcatctcatctcttggtagttgccagttgggacttgggagagagaggagcaggaggcaggagcaagaggagggcaagatcgatcaagatcaacatgtccaacaacaaggtgctgaccctggaggaggtctccaagcacaacaccaaggacgattgctggctcatcatcggcggcaaggtgtacaatgtgaccaagtttttggaggatcaccctggaggtgatgatgtcttgttgtcttcgactgccaaggatgctaccgacgacttcgaagatgtggggcacagcaccactgctcgggcgatgatggatgagtattatgtcggcgacattgacgcaaccacgatacccaccaaggtgaagtacacgcccccgaagcaaccacactacaaccaggataagacaccagagttcatcatcaagatcctncagtttttggttcccttggcgatat

SEQ ID NO: 405145 - DNA, 418 bp, Oryza sativa nipponbare
gaaggagcaggtcttctccacctactgggcgagcagcctggtgtgctcatccaggtttatgagggtgagaggaccaggacacgtgacaacaacctgctggggaagtttgagctctctggaatccctcctgctcccaggggtgttccacagatcactgtttgcttcgacattgatgcggggggtatcctgaacgtgtctgctgaggacaagaccaccgggcagaagaacaagatcaccattaccaacgacaagggcaggcttagcaaggaggagattgagaagatggtccaggaggccgagaagtacaagtcagaggatgaggagcacaagaagaaggtggagtccaagaacgcgctggagaactacgcctacaacatgcgcatcaccatcaaggatgagaagatcgcctcgaagctcc

SEQ ID NO: 405146 - DNA, 472 bp, Oryza sativa nipponbare
cccacgcgtccgggaggccaagcctgcaccggcaagcggcggcggcggcggcgacgaggcgagagggttcccttccgcggagccggcggagatggaggccacggcgaagtacaaccggggcaacccggcggtgaagcggatccttcaggaggtcaaggagatgcagtccaacccgtccccggacttcatggccatgcccctcgaggaggacatcttcgagtggcaatttgcgatcctggggccacgagacagtgagtttgagggaggaatctaccatggaaggatccagctgccatcggactatccgtttaagccaccatcattcatgctgctcacgccaagtggaagatttgagattcaaaagaagatttgtttgagcatatccaattaccaccctgagcactggcaaccatcatggagtgtgcgcacagctcttgtagctttgattgcattcatgccaacaccaggtggt

SEQ ID NO: 405147 - DNA, 433 bp, Oryza sativa nipponbare
cccacgcgtccgcccacgcgtccgaatcaaacaattcctagttccactttgccagtcctaccaaagcacattttagccatggctagtccatttttcaaagttattccagtacggcctgtgctccgcgatcagtgtgagattaccatgagattgtacttgcaccaagttgttacagggccaaaccacaaccaagaaacaatggtgccctcatcacatcccgcttcgtttggtatgattgttatcaacgattggcctatctatgatggacctgacttcaacacaagtactattgttgcacatgcaagaggaatgcatgtccaggttgatcaagttaacaacacctggtacacatctatgaacatagagtttgtggatgccaggtttaatggatcaaagcttcaggtgatggggactactccagaaactggtgagt

SEQ ID NO: 405148 - DNA, 458 bp, Oryza sativa nipponbare
atcatatcagacaagtaaatctagcttgctgtaaacacagttagttcgtaattatcgcatagggccatggggaagtacagtgtgggtctcgtggttttagggttgctggcccttgcgttttcgaccactgtgctggctgaaacacatgttgttggtgactccaacggttgggacttctctgtgtcgtttgatagctgggctgatggaaaggtcttcgctgctggtgacactcttgttttcaactacaaaccgggcgcacacaacgtgctggccgtggacgcggcgacgtacaggagctgcaaggtgggcagctcggcggactcggtggcggcggcgacggggaccgggtcgttcctcctcaagaagggcgtcaactactacatctgcggcgtccccggccactgcgccgccgggatgaaactccgggtcgtcgccaactgatgaaactccggcgacag

SEQ ID NO: 405149 - DNA, 287 bp, Oryza sativa nipponbare
ttctactccaccactccactccccaggccaaccggcccccgaacaaccggagaagagaggctgcactccactcgccgccggcgaccgatgctccgcgccgccctcctccgctcaggctccggcctccgccggcctcccatggccgcgccgctctccaccgccgccgccgcctcgtggctctgcgacagcgcctcgtctccgcctagggtgcgcctcctcatcggcggggagttcgtcgagtcgcgggccgacgagcacgtcgacgtcaccaatccggcgacgcagga

SEQ ID NO: 405150 - DNA, 379 bp, Oryza sativa nipponbare
  unsure (1)..(379): unsure at all n locations
ctcctcttcctcctccacctacctctgctccttgccagccagatccgcctcctcctcctcccctgctccctcccagatctcacactccatctcgcgagcgcgccgacgcgggacagctcgccaccccgcccagatccaccgtctcgccggagccggagagaccgagcggcgggcggcggggaggaggatggccgtggggaaggagggcggcggcggcgctggcggcgaggggggcatgtcggattcggtgatccggaaggtgctggtgtcgtacatgtacgtggcggtgtggatcttnctctccttcacggncatcgtctacaaccagtacatcctcnaccccaagatgtacaactggggcttccccatcttgctcacc

SEQ ID NO: 405151 - DNA, 447 bp, Oryza sativa nipponbare
  unsure (1)..(447): unsure at all n locations
cccacgcgtccgaacactttggtgctaggttgctcaccatagactcttccatgctatttggtgggaagactaccaaggaatcagattcatacaaaaagggtgatagagtgcggtacattggttcgttacagtcaacaggtattatccttgatggagaaagtcctccagattttggttcacaaggtgaaatatgtcttcctttcgaagagaatagatcatcaaaggttggagtaagatttgatgaacaaattccgggaggtattgatctaggaggcaattgtgaagttgatcatggtttattttgttcagttgattctttatgcctcgatgctccaggatgggaaattagatcgaaacacccatttgatgtcattattcantttatctctgaagaaatcgagcatggtcctttagtcttatttttgaaggacacagaaagaatttgtg

SEQ ID NO: 405152 - DNA, 484 bp, Oryza sativa nipponbare
atgacaaaattgatgtatacgcttttggtgtggggcttcttgaactcatttcaggcaagaaaccgctttgcactggttgtccgaaaggtcaggagagcctagtgatgtgggcaaactccatcatacagggaggaaaactcacacaacttgtggatcctaacttgcctacagaggaccatgcgcaacaaagtggagaggatgacccttgctgcttccctctgcatcagaccaacacctcaacgccgtcctcacattgcagttgttctgaagttacttaacggcgacaatggtattctgaagtgggctagatcagaagtaggattgtcatacgagagcgatggtgatgaacctgtggttacactgccagagaataaccgcaacatccagtcctacatcaatcttgcattcgatgtcgatgacgattctgcctctgtcagcagcaacgatttcatcgctgcgaacacttccctggaagagtatttac

SEQ ID NO: 405153 - DNA, 442 bp, Oryza sativa nipponbare
cccacgcgtccgcccacgcgtccgcccacgcgtgcgcgcagcttcagcgcaccggcggcacccttggcggtgacctcgaccgctccaccggctgtatccacctcagcgacctcagtcaggtgaggaaaacgcttaagaactttttcctaggaaggaatgatctatacctactacaagttgacacttccaagctttcagatggcttagtttatgaggcagctgatgattcaaactattttcctcatttctatggccctggtcggagttttgcacctcttcaactagacgctgttatcaaggaggcagagaaaatagttctggtaaacaatgatttcacctgcagtctacttgatggagcagaccccttatcgtgatgtgtaagggtgacctttcccttgatctttataatgttttgaaaaattcgctacaggacgctcaaaag

SEQ ID NO: 405154 - DNA, 476 bp, Oryza sativa nipponbare
gttctggagatatacgatcataacttcatgacagagcttgagaaaagtgattgtgaggcagcagagggctgctactccgtttgcatattcgtggtcaggttgatctggccaaagatagattggcagcattgctagatgcacttacgaatgagaaaatatggcatgtggaatggctccttgatctacttgtattatgggcactgtcaagtatgggtgagattacaagagcagacaacttgttggaatcacttaggtcaagagttagttcgatggacacaaaaaaacagcaagtgatgcaaaaggcaatccagctagcagaggctgtgtatgaatatggaaaaggagagcacaagaaagtctttgacatcttgggtccagatttcgatgcactcagttgtaaaatgattggggcatcagatgagcaggtggatgtcttaatgaaagttggtacactgtgctaataaataccggagaga

SEQ ID NO: 405155 - DNA, 449 bp, Oryza sativa nipponbare
ccactcacacgcattgcagaggagaggcgacaatggaggggaaggaggaggacgtgcggctgggggcgaacaggtactcggagaggcagccgatagggacggcggcgcagggcgccggggacgacaaggactacaaggagccgccgccggcgccgctgttcgagccaggggagctcaagtcgtggtctttctaccgggccgggatcgccgagttcgtcgccaccttcctcttcctctacatcaccatcctcaccgtcatgggggtctccaagtcctcctccaagtgcgccaccgtcggcatccagggcatcgcctggtccttcggaggcatgatcttcgcgctcgtctactgcaccgccggcatctccggaggacacatcaacccagcagttacttttgggctgttcttggccaggaagctgtccctgaccccggcccatctctacata

SEQ ID NO: 405156 - DNA, 380 bp, Oryza sativa nipponbare
  unsure (1)..(380): unsure at all n locations
cccactcgtccgccgcctcctctgcggcgggcgacgccgccgccgccgccatggactccggcggcgcctccgacccctcgcgccaggtgcgggtgcgcttcctgacgaagctccccgcgccgctgcgcgcgccgcccacctccatcgccgtccccgccgacctcacccgcatgggccggggggagatcgtcaacagcctcctcctcgccgnctccccggatcaccaggcgcagcccttcgacttcctcgtcgacggcgagctcgtgcggctcccgctccaggagttcctcctcgccaagggcatcttagtggagagggtgcttgagcctgaatatgtaaaagctgnggcaccgaggaagcaggaggatccatgcccgcat

SEQ ID NO: 405157 - DNA, 395 bp, Oryza sativa nipponbare
cgatcgggaggcgaagaagggtatgagtgacatggctgctgaatgtgggagtggcaactgtgatgcttgggcagcgagagatccttccggaatcctctccccgtacaaattcaaccgcagggaagtacagagtgaagatgtttctttgaggatcacacactgtggagtatgttatgctgatgtcatttggacacggaatatgttcaacgattcgatataccctttggttcctgggcacgagatagctggagttgtaactgaggttggtgcagacgtcaaggggttcaaagtgggcgaccatgtaggtgttggcgtatatgtgaattcatgtcaggactgcgagaactgcaatagctctctggagaaccactgctcgaaatgtgtcgtcacttaca

SEQ ID NO: 405158 - DNA, 410 bp, Oryza sativa nipponbare
  unsure (1)..(410): unsure at all n locations
cggacgcgtgggcggacgcgtgggcggacgcgtgggcgagctagcaaatatcaaaaagcagctccagcttcttctgatcgatcgatcgagctgagctataggcagtagctgctaattaagctaattaattgctaagcagtagtagagctagctaattaattaagatggccggcaagaaggtgcaggtttgtgcgctgttccttgccctcaatgtgctcttcaccatgcagatgggtgcagtagtgcaggcatgcgagccctactgccccacaccgacgccgtcggtgacgccgncttcgtctgcggcgtcgggtggaggggataagtgcccgagcgacgcgctgaagctgagcggtggcgccaacgggctcaacctgctgaagctgaagatcggcgtgccggaaagcgag

SEQ ID NO: 405159 - DNA, 88 bp, Oryza sativa nipponbare
ggcgccgccaccccgcaccaggtaagggaggaggagtaagaagatgtcgcacaggaagttcgagcacccgaggcacggatccctcggc

SEQ ID NO: 405160 - DNA, 450 bp, Oryza sativa nipponbare
  unsure (1)..(450): unsure at all n locations
ctcgcgaggctctcgtcgtcgaatcgaatcctctcgcgtcctcaagatgcagatctttgtgaagacattgaccggcaagactatcaccctcgaggtggagtcctctgacaccatcgataatgtcaaggctaagatccaagataaggagggcatccccccggaccagcagcgtctcatcttcgctggcaagcagctggaggatggcaggacccttgctgactacaacatccagaaggaggcgacccttcaccttgttctccgcctccggggtggcatgcagatcttttgcaagactctgaccggcaagactatcatccctgagggggagtcttctgacaccctcnacaacgtcaaggccaagatccaggacaaagagggcattcccccagaccagcagcgtctcatcttcgcccgcaagcagctggaggatggcaggacccttgctgacta

SEQ ID NO: 405161 - DNA, 127 bp, Oryza sativa nipponbare
  unsure (1)..(127): unsure at all n locations
acggagagggtggaggaaacgagttcctgagccctccaacctnngagtccagctagcagggctgccgaggatgtggcagctaccgtcgccgaccccagcgagctagagggcgacgggctgctacatc

SEQ ID NO: 405162 - DNA, 306 bp, Oryza sativa nipponbare
cggacgcgtgggcagccgccgccgccgcagcctcctcctctcgtcttctccttcgagttgttagctccctccttattcaaccatgggtaaggagaagacgcacatcaacattgtggtcattggccacgtcgactccggcaagtcgaccaccacgggccatctgatctacaagcttggaggtatcgacaagcgtgtgatcgagaggttcgagaaggaagccgctgagatgaacaagaggtccttcaagtacgcgtgggtgctcgacaagctcaaggccgagcgtgagagaggtatcaccattgatat

SEQ ID NO: 405163 - DNA, 383 bp, Oryza sativa nipponbare
gccacccaaaagaccgttgatggaccgtccagcaaggactggaggggtggcagggcggccagttttaacatcattcccagcagcactggtgctgccaaagctgttggcaaggttcttcctgatttgaatggcaagcttacgggaatgtccttccgtgttcccactgtcgatgtctcagttgttgatctcacaggtagaatcgagaaggctgcctcatatgatgctatcaagagtgctatcaagtctgcatcagagggaaagctcaagggaatcataggatatgtggaggaagacctggtttctactgactttgttggtgacagcaggtccagcgtcttcgacgcccaagcctggaattgctcttaacgataactttgtcaagc

SEQ ID NO: 405164 - DNA, 154 bp, Oryza sativa nipponbare
cccacgcgtccgcccacgcgtccgcccacgcgtccggccacgcgttcgtccacgcgtgcgctggatctcgtatattctctctcggaggactcgatcgtgatggccgttgaagtcgcgaacgctgtagtggtgccagaactcctgctgcataagc

SEQ ID NO: 405165 - DNA, 438 bp, Oryza sativa nipponbare
cccacgcgtccgaagccaagaagagggagagcaccaaggacacgcgactagcagaagccgagcgaccgcctcctcgatccatatcttccggtcgagttcttggtcgatctcttccctcctccacctcctcctcacaggttcttggtgtagcttgccactttcaccagcaaagtttcatgtctgatctcgacattcagatcccaactgccttcgatccctttgctgaggccaatgctggaaactctggtgcggctgcaggatcaaaggactacgttcatgtacgcatccagcagcgtaatggccgtaagagcctgaccactgtccagggattgaagaaagaattcagctacaacaagatcctcaaagatctcaagaaagagttttgctgcaatggtactgttgtccaggacccagagcttggccaggtcattcaacttc

SEQ ID NO: 405166 - DNA, 100 bp, Oryza sativa nipponbare
cccacgcgtccgcccacgcgtccgcccacgcgtacggcaaggtagccggcggcatccgcgtctccttccagggattcttggggggctccgctgctggtgg

SEQ ID NO: 405167 - DNA, 540 bp, Oryza sativa nipponbare
acgcgtacgcaacgacaagagcagctaccgcgagctctctgagatcgctgagcaagccaagagacgagctgagatcgcgaggctgagagagctgaacactctcaagggccacgtcgaatcggtggtgaagctgaaggggctggacatcgacacgatccagcagaactacacagtgtgaggaaccccctcggcattcaacgagagatcgtcatcagcgctggagcgagaattgcaaacggcgctctggttaaaggaaattttcgatgaatgattggaagaacaaaaaacaaaaaaacatggctgatctgaacagccctagttgtaaagtgctaccaaatatatgggccggtttccctcttctagagaggtttacgttctagtggagtaccgtacgtacgtgttggagtacgacgacgtgttgggatcgtttttggtctttttttactctttgtcaactaactagcggtctttttgcggaatgcatgatggagaaataatggatgaaaaattttctgccacgttaaaaaaaaaaaataaaaa

SEQ ID NO: 405168 - DNA, 198 bp, Oryza sativa nipponbare
cccacgcgtacgcccacgcgtacgagatcaccctctacctcaaggatgatcagctggaataccttgaggaacgtcgcctcaaggatctggtgaagaagcattctgagttcatcagctaccctatcttcttatggactgagaagacaaccgagaaggagatttctgatgatgaagacgaggaagagaagatggatgctg

SEQ ID NO: 405169 - DNA, 522 bp, Oryza sativa nipponbare
  unsure (1)..(522): unsure at all n locations
ccaccctccaccttgtcctccgcctccgtggtggcatgcagatctttgtcaagacactgaccggcaagaccatcaccctcgaggtggaatcttctgacaccatcgacaacgtcaaggccaagatccaggacaaggagggcattcccccggaccagcagcgtctcatctttgccggcaagcagcttgaggacggcaggacccttgctgactacaacatccagaaggagtcaacgcttcaccttgtcctccgtctcaggggaggcatgcaaatcttcgtgaagactctgaccggcaagaccatcaccctcgaggtggagtcttctgataccatcgacaatgtcaaggccaacatccatgacaaggatggcattcccccggaccagcagcgcctcatctttgctggcaagcagctggaggatggcaggaccctngctgactacaacatccagaaggagtccaccctccaccttgtgctccgnctttcgtggtggtatgcagatctttgtcaagacccttacaggc

SEQ ID NO: 405170 - DNA, 451 bp, Oryza sativa nipponbare
aagatgtgaagcctataccagaatccaccaagatagaggtggagcctttgccttcccctgtggccgttagtctaaaaccacctcctaagattgagcgcaaccagtcatttgatgacgatgatgatgacttttcaaacaagcctgttgcaaagaaaagtaattcagcatcagtaaaagcaacagtttattcagttgcagacctacagatggcaacagatagtttcaacatggacaatcttgttggagagggtacttttggacgtgtttacagggcacaattcagtgatggaaaggtactagctgtcaagaaactaaacagtactgtgttgccaagccaatctttagacgatgtctttgacttggtgtcaaacatttcaaagttgcaccatcccaatctcaatgagcttgtgggctattgcatggagcatggacagcacttgctagtttatga

SEQ ID NO: 405171 - DNA, 507 bp, Oryza sativa nipponbare
cccacgcgtccgctcacagagaggtgagcatgttcttgctgcagctggggagatacatttggagaggtgtaaaaaggatttggaggaaagatttgcaaaggtcaaattggtggtctcagaccccctggtgtcctttaaagagacaattgaaggcgaaggccttgccttgatagagagcctgaaggctccacgggaattcgttgagagaactactccaaatgggagatgcactgtgagagttcaggttttgagacttcccaatgcgctcattaaggttcttgaagaaagtgaacaattgcttgtgcaaataattgaggggaaaacagcaataaggaacggcgttgtggatccacatctttctcaggatgatggtgattctgctgcaacacttaggcaacgcctgatcaatgctatagacagtgagttggaagcattttctgagcaagtggataaagaaaaacttgagaggtatagaaatacatggcttggatccctccaaagaatctg

SEQ ID NO: 405172 - DNA, 497 bp, Oryza sativa nipponbare
ctgtgctggctgaaacacatgttgttggtgactccaacggttgggacttctctgtgtcgtttgatagctgggctgatggaaaggtcttcgctgctggtgacactcttgttttcaactacaaaccgggcgcacacaacgtgctggccgtggacgcggcgacgtacaggagctgcaaggtgggcagctcggcggactcggtggcggcggcgacggtgaccgcgtcgttcctcctcaagaagggcgtcaactactacatctgcggcgtccctcgccacttgggctcgctggatgaaactcctgtcgtctgcaactgatgaaactccagcgacagatcaatccctttattaattaaaactatttggtgtctctgcagcctgaagcaacatatagcttgctcggtttagggattggtcgcgtatatatagttgtaattgtagccctatgtactggagtggctgacactgggtctgcatgctcctgcatctgcatgcgtgcat

SEQ ID NO: 405173 - DNA, 424 bp, Oryza sativa nipponbare
  unsure (1)..(424): unsure at all n locations
cggacgcgtgggggagaagatatggcaccacaccttctacaatgagctccgtgtggctcctgaagagcatcctgtattgctgaccgaggctcctatgaaccccaaggcaaacagagagaagatgacccagatcatgttcgagaccttcaactgcccagcgatgtacgttgccatccaggccgttctttcgtggnacgccagtggtcgaacaactggtattgtacttgactctggtgatggtgtnagtcacactgttccaatatacgaaggatttacactcccgcatgctattcttcgacttgatcttgctgggcgtgaccttaccgacaaccttatgaagattctgacagagagtggttacttcttcaccacaactgctgagcgggaaattgtcagagacattaaggagaagctcgcctatgtt

SEQ ID NO: 405174 - DNA, 256 bp, Oryza sativa nipponbare
  unsure (1)..(256): unsure at all n locations
cggacgcgtgggcggacgcgtgggcggacgcgtgggcggacgcgtgggcggacgcgtgggcggacgcgtgggcgaaaaatttgtgccgaatctcgcgaggctctcgtcgtcgaatcgaatcctctcgcgtcctcaagatgcagatctttgtgaagacattgaccggcaagactatcaccctcgaggtggagtgctntgacaccatggataatgtcaaggctgagatccaagataaggagggcattcccccggacca

SEQ ID NO: 405175 - DNA, 420 bp, Oryza sativa nipponbare
  unsure (1)..(420): unsure at all n locations
gtttggtggtgcggttgatttgagcaataaattctctaggggggagggaggtatcggtcatggctgccgctgctgcaaggaggggctcatcgctgctctctcgctgcctgctgtccaggcccgccgccgccgcctcgcctgctgtcccctctgcgctccgcatggcagatgggacacaaggattgttgccgggaatccttcagaggttcagcactgcagcagtagcanaggagcccatatcccccagtccaagtgaactacactcagctcctcattgatggaagattggttgattcatcatctggcgaaactgtccgaactctggaccctgggtgccgggagcttgntggccatgtggctgaaggctatgcggaggatattaacggtgcggttcatgcggcccgcaaggctttcgatgaa

SEQ ID NO: 405176 - DNA, 420 bp, Oryza sativa nipponbare
  unsure (1)..(420): unsure at all n locations
cccacgcgtccgcccacgcgtccgcccacgcgtccgcccacgcgtncgaggaaactaagggagaaaaggcgtgaaaagagggcaatggatttggtaaggaaagatgatgaagcacgtgttaagctggagaatgctgctattgaacgatcaaaggctgtagattctgctgtccttgggaaatacagcatttggagaaaagagaatgagaatgagaactcagattcaacagttagattgatgagagaccagattatcatggcacgtgtttattctgtgcttgctaaatcaaagaacaagaatgatctttatcaagagctggaaaccatgatcaagggaaggcangatgcctgttggagaggcttctgctgattctgaccctcatcatagtgcacctgagaaagtcagagtaatgggtcaact

SEQ ID NO: 405177 - DNA, 233 bp, Oryza sativa nipponbare
  unsure (1)..(233): unsure at all n locations
cccacgcgtccgcccacgcgtccgcggacgcgtgggcggtcgcgtcacccggcgcgtggctcgccccggcggatccggcccgaaccggtgcgacgtgaacacgacgatctgggttggccacctccagtattggatggacgagaactacctccacagctgtttcgtacccatcggcgaggtagtgacgattaaagntatccgtaatagacaaatcttatatttttanggatatg

SEQ ID NO: 405178 - DNA, 271 bp, Oryza sativa nipponbare
ctcatctcccttctccagatcaaaagacccttgctttccctcaggatcggccatggcgaccgccgttgcgtcccaggttgctgtctctgctccggctggctcggatcgcggcttgaggagttctgggatccagggtagcaacaatattagctttagcaacaaatcatgggttggcaccacattggcgtgggagagcaaggccacgcgaccgaggcatgcgaacaaggtgctctgcatgtcaattcagcaagcgagcgaaagcaagggtgct

SEQ ID NO: 405179 - DNA, 448 bp, Oryza sativa nipponbare
  unsure (1)..(448): unsure at all n locations
cccacgcgtccgcccacgcgtccggagctcgccaagatgcccatggaggagatcgaggccgacaagctctccaaggaggacatcgacgtgcggctcaagtggctcggcctcttccaccgccgcaagcatcagtatgggcggttcatgatgcggctgaagctgccaaacggtgtgacgacgagcgagcagacgaggtacctggcgagcgtgatcgaggcgtacggcaaggagggctgcgccgacgtgacaacccgccagaactggcagatccgcggcgtcacgctccncgacgtgccggccatcctcgacgggctcaacgccgtcggccttaccagcctccagagcggcatggacaacgtccggaaccccgtcggcaacccgctcgccggcatcgaccccgacgagatcgtcgacacgcgatcctacaccaacctnctnttcttctaca

SEQ ID NO: 405180 - DNA, 239 bp, Oryza sativa nipponbare
gtgtgggcaactcgcagatcgccttctcgtcgcgctcgcgccgcaggggtcgcctgagaacacatagacaatggtgaaggctgtggctgtgcttgctagcagtgagggtgtcaagggcaccatctttttctcccaagagggagatggtccgacctctgtgactggaagtgtctgtgggctcaagccaaggcttcatggattccatgtgcgacgcgctgggtgacaccactaatggctgc

SEQ ID NO: 405181 - DNA, 434 bp, Oryza sativa nipponbare
  unsure (1)..(434): unsure at all n locations
cggacgcgtgggccagttccatctaatcagcttctcgtcgagatgggccgcaagttcttcgttggtggcaactggaaatgcaacgggaccactgatcaggtggacaaaattgtgaaaattctgaatgagggacagattgcttctacagatgttgttgaggtggttgtcagcccaccttatgtgttccttcccgtggtcaagagtcagctgcgcccggagatccaagttgctgctcagaattgttgggtgaagaagggcggggctttcaccggtgaggtcagagctgagatgctttgtaaccttaggattcccttggttattcttggacactttgaaaggaggagtntgttgggtgaatcaaatgagtttgctggagacaaagtgtgatatgcgctctctcatggcttgaaggtcattgcatgtgttggtgagac

SEQ ID NO: 405182 - DNA, 218 bp, Oryza sativa nipponbare
aaaagacccttgctttccctcaggatcggccatggcgaccgccgttgcgtcacaggttgctgtctctgctccggctggctcggatcgcggcttgaggagttctgggatccagggtagcaacaatattagctttagcaacaaatcatgggttggcaccacattggcgtgggagagcaaggccacgcgaccgaggcatgcgaacaaggtgctctgcatgt

SEQ ID NO: 405183 - DNA, 263 bp, Oryza sativa nipponbare
atcgcagagaaaaaaaaatctcccctcgaagcgaagcgtcgaatcgccttctcaagatgcagatctttgtgaagaccctcaccggcatgaccatcaccctcgaggttgagtcctcggacaccattgacaatgtcaatgccaagatccatgacaaggagggcattcccccggaccagcagcgtctcatctttggtggcaagcagcttgaggatggccgcaccctggcccactaccacatgcagaatgaggtcaccctccaactt

SEQ ID NO: 405184 - DNA, 393 bp, Oryza sativa nipponbare
  unsure (1)..(393): unsure at all n locations
tcttcggcttccaatgcaaggaaggatgaatacaactggagatatgatgctgatgatatctctgaagaagtgttgcgagcatcaagtgctctagaaaacgtccagctagaccggaaagctcgcaatctgacgacttcttggaggcatccaggcgacggtgctgagtaaaatcggaaggtgggatgggtccaattcaccattgcgctgcttggacccccttgggccatttgtatcgttttggttgctgcggtgggattgtgcgcttgcgtagaagaatgctcagtgttgatcatgcctactgtactcctagctcatttgtttatgcaccatatatgggatttgatntctgctggacaaaagaaaaaaannnatgtaaaaattctttattatatn

SEQ ID NO: 405185 - DNA, 197 bp, Oryza sativa nipponbare
cttctactctccctcctctagtcctcttcttcttctactttgtacgcgccactcactctccgagcttgacggcggcggcggcggcggaggtcgtcgagtggtggtcggggagatgggtcaagatgaggtggaggtaggtgcggagaagaaggatcaagaactaccggaggtggaggtggtctaggaggatgaggagg

SEQ ID NO: 405186 - DNA, 459 bp, Oryza sativa nipponbare
  unsure (1)..(459): unsure at all n locations
cccacgcgtacgattgatgttggtacaaacaatgagcaattgttgaatgatgaattctacattgggctccggcaaaggcgtgctactggcaaggagtaccatgagctcatggaagaatttatgagtgccgttaagcaaatctatggtgagaaagttctgatacagtttgaggacttcgccaatcacaacgcatttgatttgcttgcaaaatacagcaagagtcatcttgttttcaatgatgatatccagggaacagcatctgtggtccttgcaggtcttttatcatcactaaaggtggttggtgggaccctggctgaacacacttatttgttcctttgtgctggtnaggctggaactggtgttgcagaactcattgctcttgaagatttaaaacagacaaaggctccaattgaggagtgccgcaagaagagttggctgctggattcaaaggggttgatc

SEQ ID NO: 405187 - DNA, 449 bp, Oryza sativa nipponbare
  unsure (1)..(449): unsure at all n locations
cggacgcgtgggtgctcccctcctcgtctggtttgcacacaaggcattcccaggtcagaaatggatcctactggtcaacatgcctgtgctgatcgccggaatcagccagatgcctcctgccacttcagtcaactacacggcatggatatttgtagcattnttgtcaggttatgtggtctataagtaccgtcgngactggtgggagagacacaattatctactttcaggtgcccttgatgctgggttggcattcatggctagcttgctatatttatgcctaggactagagaaaatcagtgtgaactgagggggtaatgatttagatggtggncgtntagcgtctggccccattggggaagggttaactgtacaggggtgtccagtggcaagtgcatagccaagtttcttctcattcacagtaccgccggcaatgggatctcaatcatctt

SEQ ID NO: 405188 - DNA, 427 bp, Oryza sativa nipponbare
cccaatcttaaattcatcaaagggactgttgaagttaagctgacatcagttgcatcaacgaagttgatctgtgaatctgcactgctgttggatggtgcagcagcccaaacttggggcaaattgcttgacagtattgttgcattgctgtccagaacggatcaagatggggcacaacaagatcagaatgatggtgctgatgcagatagtcagaggacatcaggttattctgtctcatttgtacgtcttcaatatgctggaaagagtgaagatgatctgttgaaagaggtaaatgatccaaagcagtttctggtcacctccttggctactctttctgcgcaatctccagggagatttggtcctatcattgagcagaacgtggatcctgcaaacaaaggcgctcttattcaactttgtgcagcttacaata

SEQ ID NO: 405189 - DNA, 236 bp, Oryza sativa nipponbare
accgagcggttcttcctgtggatcgaggggttccggccatcggaggttctcaagaatgtgagaccgcagctggagcctctgacggacaagcacgtcgtggaagtgggcggcctgcagcaaacctcgatgcatgtcgaggacgccctctcgcaggcatggcaagctgagcaacatcgcgactcctgcagcggcgaccgttcgattccccgaggcctacatggtgcacattggcaacg

SEQ ID NO: 405190 - DNA, 415 bp, Oryza sativa nipponbare
atgatataatacagatcccaactgttcttcgagaatatagcatgacatcggtcacagaaggcattgatgcaattgcaactactagagtggttgtcactggagatgttagcgactctaaacatgctttgactggtcactccttcagccgggcattcagtgggagtggtgccgcactggatattgttgtttccagtgtgcgagcttacctgagtgccctgaacaagatgtccagttttggtggggctatcaaggctagtagtgaagtatctgaaagccaaagagttcaaaccacagaatgagtctggacttccttttgggttttcatattccgtgggtctatgttgcacattcccagcaaggagtatgtgcttggtgaaacattggttttccgtccagaaaaaacatgggctccgtt

SEQ ID NO: 405191 - DNA, 292 bp, Oryza sativa nipponbare
gtgaccaacggaaaggaggttctttcggtgaattctgcactacttgcagagtggggaaccgagctctcactgttgtttgatccaaagtgtcccagattggtgtcccttgtggacaaggtgaaggagattgttgagaccaatgaagtgaggagattgcctaaaattcccaagggaacacgtgactttgggaaagagcaaatggccataatggagcatgcctttgtaataataacaggtgtattcaagatgcacggagcctgttcacttgattcacctgtttgtgagcttagag

SEQ ID NO: 405192 - DNA, 340 bp, Oryza sativa nipponbare
  unsure (1)..(340): unsure at all n locations
gcgtggacgcgtgggcggacgcgtgggcggacgcgtgggcgcgaactcgtgcgagaaggcgtgcctgggcaactgctcgtgcggggcgtacagctacagcaccggcagctgcctcacctgggggcaggagctggtggacatcttccagttccaaaccggcaccgagggagcgaaatacgacctctacgtcaagggcccatcttctctattagataaaagctcggggcgatggaaaaccgntgtcgtcgtcgtagttgtggtcgtggtggttgtattgctggcatcaagccttctcatgtggaagtgcaggagacgaatttaagagaaacttggcattggt

SEQ ID NO: 405193 - DNA, 424 bp, Oryza sativa nipponbare
tccggccgcgtccgagttccggcacgcgcacgcgtccgaaacatacccaatctcacgcgtcactacccttccagccgcctcttgcaacgtaacgcgaaaccctagcccgtctgatctctctctatcgccatggccggcggcaagatgaaggagcacgacggcgccagcccagccaaaatcttcatcggcgggctgcctaaggacaccaccatgggtactttcaaagaatactttgggaagtatggggagatagttgatgccgtcataatgaaggaccgctttacccagaaacccagaggatttggatttattacctttgcagatcctggtgttgttgacagagtgattgaagacaaccatgttattaatggaaaggaggttgaaattaagagaactattccaaagggtgctgccccctaaaaga

SEQ ID NO: 405194 - DNA, 159 bp, Oryza sativa nipponbare
tcttacgcgtcagtataccttgcagccgccactagcaacagtaacacggaaccctagccggtccgagctgtctgtatcgcccgacacgaagacgacgacgacgaacgcgggagctcccgtgtggaacgacaacgaggcgctgacagtgggggccagggg

SEQ ID NO: 405195 - DNA, 304 bp, Oryza sativa nipponbare
gtaccgtccccgatcccgttcgaccccgcgtccgcggacgcgtgggcggacgcgtgggtccgtatcctcctccagatagcggcggctgcctcgccttctccgacgagctccaccgccgagtcgccgtcccttgccaggacaggatggtggtggccacggaggaaatggcggtctactgcttcgacgccctcgtctcccactacagcggcgaccagccgccgcccaccgacttccaggagggcattcacccattgtttgtcacctggaagaaggctaccaatggttcagaaccacgccttcgagg

SEQ ID NO: 405196 - DNA, 401 bp, Oryza sativa nipponbare
cggacgcgtgggcggacgcgtgggttggaaaaaaagctagataaacttatccttgctctatttgcaaccctgttcacaatgtgtgttattggtgctattgggagtggtgtgtttattaatgagaaatatttctatcttggctggcgtggaaaagtggaggaccagtttaatcctaagaccaaattggtggtcaccattttaaccatgtttactctaataactctatattcaacaatcatccctatttttctttacgtgtccattgagatgatcaaattcattcagtgcacacagttcattaacaatgatctgcatttttaccatgctgagagcaccaccccacttttggcccgaacttttaatttgaacgaggaacttgggcaggtttgattttttttttt

SEQ ID NO: 405197 - DNA, 460 bp, Oryza sativa nipponbare
cccacgcgtccgcccacgcgtccgatctcctctccctctccgcccatttctcctctccacctgcgatccatccgcgcccgcgaggaggagggagccggacgccgccgcggggagagcaggggagagaaggagaggaggagatcgccgtcgccgtcgccgtcgccgtcgccgatctcgagcgggagcggagatggggctcacgttcacgaagctgttcagccgcctcttcgccaagaaggagatgaggatcctcatggtcggtctcgatgcggccggtaaaaccaccatcctctacaagctcaagctcggcgagatcgtcaccactatccccaccatcggttttaatgtcgaaactgttgagtacaagaacattagcttcaccgtttgggatgttggtggtcaagacaagatcaagcccctgtggaggcactattttcagaacacccaaggccttattttt

SEQ ID NO: 405198 - DNA, 457 bp, Oryza sativa nipponbare
  unsure (1)..(457): unsure at all n locations
aaagaagggaaatctcccgtctctttgtctcctgccaagacgagtcgcggctgaacaggggaggggccgcgatctccatctggcgggcagagcaggggacgggaggggatcctgatataataccaagataatacacctgcttgtcaaatgatgatgggtttgctagcgtttgagagcaaccaagggctctggaatagtggatattattcccagctgtttgngattggaggagttatggtcactgtcgccattctttggttatcgacaggctactttggaggaatgggtgctccttttgccccatatttttggccatatctaggacaacttccaaagaagaaggaacggaaaaggcctgtgagagtgtacatggatggatgctttgacctcatgcactatggccatgcaaatgcattacggcaggccaagttgttgggagatcaacttgtagtgggag

SEQ ID NO: 405199 - DNA, 503 bp, Oryza sativa nipponbare
cccacgcgtccgcccacgcgtccgccgaaaaatttctccccaatctcgcgaggctctcgtcgtcgaatcgaatcctctcgcgtcctcaagatgcagatctttgtgaagacattgaccggcaagactatcaccctcgaggtggagtcctctgacaccatcgataatgtcaaggctaagatccaagataaggagggcatccccccggaccagcagcgtctcatcttcgctggcaagcagctggaggatggcaggacccttgctgactacaacatccagaaggagtcgacccttcaccttgtcctccgcctccgtggtggcatgcagatctttgtcaagactctgaccggcaagactatcacccttgaggtggagtcttctgacaccatcgacaacgtcaaggccaagatccaggacaaagagggcatccccccagaccagcagcgtctcatcttcgccggcaagcaacttgaggatggcaggacccttgctgactacaacatcca

SEQ ID NO: 405200 - DNA, 522 bp, Oryza sativa nipponbare
  unsure (1)..(522): unsure at all n locations
cccacgcgtccgcgttacttatgcttcctaggtttcttgaattggggactactttggagcctgggaagccagtaaaatctgacaaagctgctatcctaagtgatgccactcgcatggtaattcaacttcgtgctgaagcgaagcagctaaaggatactaacgagagtcttgaagataagattaaagaactgaaggcagagaaggacgagcttcgtgatgagaagcagaagctgaaagtagagaaggagacattagagcagcaggtgaagattctgactgcaactccagcctacatgcctcaccccacattgatgccagcaccgtacccacaagcaccacttgcccccttccaccatgcccaggggcaagccgcggggcagaagctgatgatgccttttgttggatacccggngtacccgatgtgcagttcatgccgccttccgaagtcgacacctncaaggacagcgaagcgtgcccgcctgtcgcgtaatgcttcatcgggtggcgtatgtgaatnaatcg

SEQ ID NO: 405201 - DNA, 376 bp, Oryza sativa nipponbare
cacgacacgaccgtataggagtagtcgtgtagcagctagctagctagcaatggcggcttcttcttcttcttcttcctctctggcggtggtggtggtggcggcggcgatggcgctggtcgccggcggcggcgcggcggaggcgcaactgtgcgaggagtactacgactgcacgtgccccgacgcgtacgacatcatgcggcggctgctgatcgatgcgcaccggagcgacgcccggatcttcacgagcctgatccggctacatttccacgactgcttcgtgcaggggtgcgacgcagtaatgctgccggacagcggaccccggatgccgacggagaagacgtcaacgcccaacaacaacttcacgaggggattcccc

SEQ ID NO: 405202 - DNA, 318 bp, Oryza sativa nipponbare
cccacgcgtccgaccacgcgtccgcaatcgccgccgccgtctcctcgtgtaaccctagcttagtggattagtttaagtgtttgccggagattatggggtcggtggcggcggaggaggtggtggtgttccggtcgaagctgccggacatcgagatcgacaacagcatgacgctgcaggagtactgcttcgcgaggatggcggaggtcggggcgcggccgtgcctgatcgacgggcagaccggggagtcgtacacgtacgcggaggtggagtccgcgtcgcggcgcgccgcggcggggctccggcggatgggggtgggca

SEQ ID NO: 405203 - DNA, 329 bp, Oryza sativa nipponbare
  unsure (1)..(329): unsure at all n locations
cccacgcgtccgcccacgcgtccgcccacgcgtncgcccacgcgtncgctcctcttatttaccgggctgtcccaagctggtttgtgaaggttgaaaagattagggaccagttgctggaatgtaacaagcagacctattgggttccagattatgttaaggaaaagcggttccataattggctagaaggtgctagggattgggctgttagcagaagtagattctgggggactccactaccgctgtggatcagcaaagataatgatgaaattgttgtgctaaaaaaaaaaaaaataaataaatttgaattatataaaaataatttaattttt

SEQ ID NO: 405204 - DNA, 319 bp, Oryza sativa nipponbare
agcagagattcttttccctggagtggcctgcttccttgttgcagtcattcttggctctgctgtacatgcctccaatgcagctgataatgaagaaaaactaaatggctccacaaatatctataaacttggggaaaatggaagtgtggaaccaaacaaagaagtcatagaaaaagatgctcccaaggacttggagaatggagcttctgcaaccaaatatgttgccaaagctgaagcaagaactgcggaatacttgattgagctcgaaaaacggcgttcgatcaaggtgttcggatcaagcaccttcatagggcttgggata

SEQ ID NO: 405205 - DNA, 369 bp, Oryza sativa nipponbare
gcgtccgcgcacgcgtgcgcccacgcgtccgcccacgcgtccgtcagaagcttacaaaccctaggcgagcgagagaggcgagacgccatggacgcggacgcggtggcgaaggcgttcgcggagcactactaccggacgttcgacacgaaccggccggcgctggtgtcgctgtaccaggacgggtccatgctcaccttctagggccagcagtttctcggcgccgccgccatcgccggcaagctcggatccgttcccttcgcgcaggggcaccacgacattaacaccgtcgactggcagccgtcggggcccgaaggcggcatgctcgtcttcgtctacggatccctccgcaccggccccgacgagcacccc

SEQ ID NO: 405206 - DNA, 317 bp, Oryza sativa nipponbare
gaacatatggtcatcgagtgtcctatctgagagtcaactggtatgagatatgtctctactcgacccctacgtcggtggggatggagcgcgctgggcctcacgcgaaaagagtcccacgatgtgcttcccgatactgggcctggtgtgtaaccaagtgctgctgagccagctaaataagttatcacagatgatgcttggggtggtatttatgcgggaacaaatccagagacatttgtcagagctgatggtgcatttataccggctgctgatgattatcacataactagtgctaagaccccactcaaacgaggtggagt

SEQ ID NO: 405207 - DNA, 442 bp, Oryza sativa nipponbare
gcctatcaacagctaagccaaacagggtcaggagccggagccgtccgggagagggaacactcgagcgatccgtccgtccgcccgcccgtcgtcgtcgcgcgccatggctgaggaggaggccaagaaggtggaggtggaggtcaccgaggcgccacccgccgctgccgctgccgcggagacggagccggctgccaaggacgtcgccgaggagaaggccgtcatccccgcccccgcgccgccggccgaggaggagaagcctcccgtcgacgactccaaggcgctggccatcgtcgagaaggttgcagatgaacctcctgccgagaaacctgctcaagggggctctaatgacagagatgttgctcttgcaagggtggaaactgagaagaggaactcattgatcaaagcatgggaggaaaatgagaagacaaaagctgagaacaag

SEQ ID NO: 405208 - DNA, 288 bp, Oryza sativa nipponbare
gaaacatatggtacattgggtgccattgtgaagagtcgaactggtaataagcaagtaggcttcctgacaaacaggcatgttgcgggtgacctggattaccctaaccagaagatgttccatcccttgcccccgaatcttgggcctggtgtatacctaggtgctgttgagcgagccacatcatttatcacagatgatgtttggtatggtatctattccggaacaaattcagagacatttgtcagagctgatggtgcatttataccggttgctgatgattatgacataact

SEQ ID NO: 405209 - DNA, 380 bp, Oryza sativa nipponbare
cccacgcgtccgctgaggagatcactaaggaggagtatgctgctttctacaagtccctgacaaacgactgggaggagcatcttgctgtcaagcacttctctgtggagggtcagctggaattcaaagctgttctctttgttcccaagagggcaccattcgacctctttgatacgaggaagaagctcaacaacatcaagctctacgtccgccgagtcttcatcatggacaactgtgaggagctgatccctgagtggctgagctttgtcaagggcattgttgactccgaggatcttcccctcaacatctcccgtgagatgctgcagcagaacaagattctcaaggtcatcaggaagaaccttgtcaagaagtgcgttgagctc

SEQ ID NO: 405210 - DNA, 404 bp, Oryza sativa nipponbare
tgcccgccgccgccgacgtcccctcgggcggatctgctggtgttgttgattagcttctggaaggttctcaaagatgttgtcctgcctgtcggcatgggtggtgaagctgcgacgcaacccgctggcccgtctccacatgaacgtcgtcgcctcccacctgcacaaatacgggctccggtacgatgatctgttcgatgcctaccagtaccatggcctcgacatcaaggaggccctggcgcggctgccgcgggaggtggtggactcccacaaccagcggcgcaagcgcaccatggacctctccactaagcaccagtagctccccggcgatgagcaggcgatgcagacaacattaagaggctatttatctgatgcctacctatccagccaccgtggttggcgagaac

SEQ ID NO: 405211 - DNA, 234 bp, Oryza sativa nipponbare
gcgcccacgcgtccgcccacgcgtccgcccacgcgtccgcggcgctcctcctcctcctccggctccgatccccatggcgttcatgcgtggccactccaatgcatcctccggtatgggggttgctcctgacatcagggacacattccttgagcttcagatgaagaaagcatttcgctatgttatcttcaaaatcgaggaaaagcaaaagcaagttgttgtggagaaagaccgggc

SEQ ID NO: 405212 - DNA, 425 bp, Oryza sativa nipponbare
gctgatgtacttgccgcgatccagcgacctcgcgcttcgtctcccatggcaacgacgcagttgctgtccaccgtcgagcaccgggagacgctcccggagggctatgctcggcctgagtccgaccggccgcggctcgccgaagttgccacggacagcaacatcccgctcatcgacctcgcctcgccggacaagccgcgggtcatcgccgagattgctcaggcctgtcgcacctacggcttcttccaggtcaccaaccacgggatagcagaggagctactggagaaggtgatggccgtggcgttggagttcttcaggctgccgccggaggagaaggagaagctgtattccgatgagccatccaagaaaatcagactctctacgagctttaacgtccgcaaggagacagtacacaactggagagatta

SEQ ID NO: 405213 - DNA, 346 bp, Oryza sativa nipponbare
cggacgcgtgggcggacgcgtgggctgttcctgcctacttcaatgactcccagaggcaggccaccaaggatgctggagtgattgctggtctgaatgtcatgcgtatcatcaacgagccgactgctgcagctattgcctatggtcttgataagaaggccaccagcgttggtgagaagaatgtcctcatctttgaccttggaggtggtacctttgatgtctccctccttaccattgaggagggtatctttgaggtcaaggccacagctggtgacacccatcttggtggtgaagattttgacaatcgtatggtcaaccactttgtgcaagaattcaagagggagaacca

SEQ ID NO: 405214 - DNA, 408 bp, Oryza sativa nipponbare
  unsure (1)..(408): unsure at all n locations
tcccgatcgaccacgcgtccagcgtgcgagcactgatcgtgctgcattccatagccactacctccgctaatgacacatcgacgcatcgcccataccatagaatggaaggaatactatgggcaagctacaaaatggccggtgctctaacancattcaaatccagtggggaacgaaaactatcttcacctttatgaacttggtcgcttggtcgtaaccgagcacaacaagaaaggcaattctttgttggagttcgagaagcttgtgagtttgaagcaacaagttgtttcttgcacttttttctattttacaatttacgtgaatgaaggggatgccaagaagctttattaagcttaggttttgggagaaaccattgatggacttcaagtgtcttcaggagttcaagcctgt

SEQ ID NO: 405215 - DNA, 401 bp, Oryza sativa nipponbare
cccacgcgtccgcccacgcgtccgcccacgcgtccgcccacgcgtccgcaagcattccacaagcttgccgttttccactgacagctcaagtgcgtggtgcaacattagctgatcagctcgtgttcccaaccgcgacaaagcttcacagatggaggctcagaaccaagaggtcactgccctggtcgagaagatcgccggcctccacgccgccatctccaagctgccgtcgctgagcccatccgccgaggtggacgcgctcttcaccgacctcgtcacggcgtgcgtcccggcgagccccgtcgacgtggccaagctcggcccggaggcgcaggcgatgcgggaggagctcatccgcctctgcttcgcccgcgagggccaccttgaggcgcactacgccgaca

SEQ ID NO: 405216 - DNA, 525 bp, Oryza sativa nipponbare
gcgagctgatccaggcctcatttatgacatcgatccaagcgattataacaagttttttgggtgcatcatcaagacatctgtcagctgtaatgcaacaacgctacctgggtatcacctgaatctaccatcaatcgctcttcctgatctcaggaatccaaccacagtatctagaacagtgacaaatgtaggcgaggttaatgcagtttaccacgctgaaatccagagcccgcctggagttaaaatggttgttgagccatctgttcttgtctttgatgctgcaaacaaagttcataccttcaaggttagtttttcacctctatggaaattgcaaggggactatacatttggcagccttacttggcacaatgaaaagaagtcggtgagaattccaatagcagtccggattaccattcaagatttctatgcagatgttgcataacctgggttcagggtgaaacatgcaggaaataacacagtgctcatagaaacaatagagtcttcaggagaacccattttcacagtact

SEQ ID NO: 405217 - DNA, 251 bp, Oryza sativa nipponbare
gcgaaaacacagtctttagtgaagcaattgctttacaaccccaaattaagatcagcgtgcccgttaccatttgatgaagcaaaactctggcaaggtgaaaatggccctgagctaaagcaggagattcagaagcaatttagaaatatcagtgcaattatggattgtgttggatgtgagaagtgtcgattatggggaaagctccacgttctgggtctcggcactgcatagaagatgctggtctctgtggaggg

SEQ ID NO: 405218 - DNA, 490 bp, Oryza sativa nipponbare
gcgcgccctgctcgtgctgcattcgctagccacgccgtccgctcaggccgaggcgcatcgcgcagggggagaaggggaggagaagatgtcgagcgacggagggccggtgcttggcggcgtcgagccggtggggaacgagaacgacctccacctcgtcgacctcgcccgcttcgcctgcaccgaggcacacagggaggccaattctctgctggagttcgagaagcttgtgagtgtgaagcagcaagttgtcgctggcactttgtactatttcacaattgaggtgaaagaaggggatgccaagaagctttatgaagcttaggtttgggagaaaccatggatggacttcaaggagctccatgaggtccaggctggctatgccagtgccaatgcctaaggcccatctcgtattctatgggtgttaagatatcaagaagatggggaataatatggggtggatatagctattggacatgttaattatccacatgat

SEQ ID NO: 405219 - DNA, 474 bp, Oryza sativa nipponbare
ccgtaaactcctctgtcagaagaggaaagctgatcttggatcgttaacatcagatgattgtttgcgtgcgataagtaagctgaaggtccttggtagtggttttgaagtaatttctgttgggaagaaaaagcttgtgcgttctgttcctacagaactgaataaagatcacaatgggatacttgagctagctcaggctgaaggttttgtcaccgtagagcaagtcgagagaaagttctcgtggtcaactggccgtgccattgacgtccttgaaactttgctcaaggaagggcttgcgatgatcgacgatgggcacagggatggcaagcgcagatactggttcccgtgcgtcactctcagctctgactctactggtgcggatgccaagtcatgacctgtgccgtgcctgttccaacttcgtgttgtcacctgtatccttttccatttggtcatttctggaggcacttgagcacatat

SEQ ID NO: 405220 - DNA, 293 bp, Oryza sativa nipponbare
ggcgtcggctcagccatggtgaagtactcgagggaggcgaacaaccccaccaagtcctgcaaggccatgggccgggacttgcgtgtgcacttgaagaacacccgtgagacagcttttgctatcaagaagttgcctctgtgcaaggccaagaggtaccttgaggatgtgattgcccacaagcaagctatccccttccgtaggtactgcggtggtgttggccgcactgctcaagctaagtcacgccattcaaacggtcagggacgctagcccgccaagtatgctagattcattct

SEQ ID NO: 405221 - DNA, 439 bp, Oryza sativa nipponbare
  unsure (1)..(439): unsure at all n locations
cccacgcgtccgttaactctgtctgtaggctgtggagatcggaagagaactggcaaggaagcacttcatccaccatgtcttcagagagaacgacttcgaggatggcagccagaacctgtaccggttcttggagcacgaccctgccatcccaaagtactacaacttcatcaggggagccaccaacgacggcgagccgaagctggccgccgccatcgggcagaggatgaccaagatcatggttgccatcctggaggcctacgcctccgacgatcgccgccacctcgactacagccgcatcgccgccagcgaggagttcagaagatacgcgaacatggtgcaagaactccagagggtggacatgtcggcgcttccggccgaggagaggctgccgntctttctgaacctgcacaacgcgatggccattccacgccgcgtcagg

SEQ ID NO: 405222 - DNA, 358 bp, Oryza sativa nipponbare
ccaaaactaagtaatttgcagcgacgaatgacacagcagctcaggtgttgcagtacctcagacccaattcaaatctggaggagctcatcatgaaaggttataatggatcatcattcccatcatgggtagggtctctacctttggacaggttagcttcaatagaactcaaagactgacaaaattgcgaagaactaccacctcctggaagattcccatccctgaaacatgatgtgatacagtcactaccaagtgtcaaactagttgggcctgaatttcttggcaatgttggcgatattaattacttttttttttgacaagaaacagcaagataggctcctactgtgttatatactccctc

SEQ ID NO: 405223 - DNA, 326 bp, Oryza sativa nipponbare
cccacgcgtccggacataaataagttatcatggagttgggcattttttttttctgcattgttgtagccttggtttaaaatttggcaaggcaatttaaggattatattgtagaacagcagggaggtggtgtcttgtaacttttgttgttacattgtaaccccccgaatcaggccacatgggccggaggagtttgtgggggagcaccggagcactcttgtgcttttgggaccatgaactatgctagtttatgggtctatgtatatgatatgtttgtgattcgattatactttcttttgtcgccttatcaagtaccaatcattattaag

SEQ ID NO: 405224 - DNA, 441 bp, Oryza sativa nipponbare
gcgcccacgcgtccgctgacgcgtgggcaagtcttatctgcctttctccctcctctcgccttccgcctcgcgtgcgctccagggagcgaaaaaaaggacagggtggacataaagaccaacgagtaaaagcttgatctgtccggtgccaaccaatcaacaaacaagtttcatgtctgatctcgacgttcagcttccatctgccttcgatccgtttgctgaggcaaatgctgaggacttctgcgctggccctggagcaaaggattatgtgcatgtgcgcatccagcagcgcaacggcagaaagagtctaactactgtttagggcttaaagaaggagtacagttacaacaagatcctcaaggatctgaaaaaggagttctgctgcattggtactgtattccaagatccatagcttggccaggtttatcagcttcaaggtgatca

SEQ ID NO: 405225 - DNA, 291 bp, Oryza sativa nipponbare
  unsure (1)..(291): unsure at all n locations
tcagatgttaacaaattgtcaaaaggtgggatacccttggctaatggagatgtgcagttgccaaagccacctccatgggcatatcctttgtggagtcggcatgaaacacaaaattatgaaacagacagaatgctgaagtctacctctcaggttattgaccaagctatggctcaattgtgggaggccaaagtaaaatttgtaaacgttagtttctcggttgagaaanctggtcgttcaaggagtgttgcaatttctgattcgggacataggtcacgacaatctacagcagat

SEQ ID NO: 405226 - DNA, 353 bp, Oryza sativa nipponbare
cccacgcgtccgggacccgctgctgaagccgaagcaggacaggtacgcgctccgcacgtcgccgcagtggctcggcccgcagatcgaggtcatccgcgccgccaccaagtccatcgagcgcgaggtcaactccgtgaacgacaacccggtgatcgacgtccaccgcggcaaggcgctccacggcggcaacttccagggcacccccatcggtgggtccatggacaacgcccgtctcgccatcgccaacatcggcaagctcatgttcgcgcagttctccgagctcgtgaacgagttctacaacaacgggctgaccttcaacctggccggcagccgcaacccgagcttggactacg

SEQ ID NO: 405227 - DNA, 330 bp, Oryza sativa nipponbare
cggacgcgtgggcggacgcgtgggcttgggcgatctgctgtgcaagatcactggctttgattctttctctttgcaaccaaatgctggtgcatcaggggagtatgccggattgatggttatccgtgcttaccacagggcaagaggagactaccaccgggacgtctgtatcattcctgtgtcagcccatggtacaaatcctgcaagtgctgctatgtgtggaatgaagatcgttgctggtggaactgattccaaaggttacattaacatcgaggagttgaggaaagctgctgaagcaaacaaggacaacttggctgctcttatggttaccta

SEQ ID NO: 405228 - DNA, 216 bp, Oryza sativa nipponbare
ccgccgcctcgccaacctccccacgccggccaccgccgcacgggctccggcgacgaacgagggcgctgctctcgagcgcgatggggggccggaagcgcgcgctgctggtgggcatcaactacccgggcaccaaggcggagctcaaggggtgccacaacgacgtggcccgcatgcgccgggccctcgtcgaccggttcgggttcgacgagggcgaca

SEQ ID NO: 405229 - DNA, 345 bp, Oryza sativa nipponbare
gatttttgcagttctgggtttcctttctccatcaaatcggggaggattgatgaccgcgatgcttcttgtctgggtcttgatggggttgcttgctggttatgcttcttcacgcctctacaagatgttcaagggttcagagtggaagagaataactatgcgcacagccttcttatttccagggattgcttttgttatcttcttcatattgaatgctcttatttggggggagaaggcatctggtggccgccctttcaacactatggtccgcttggtccttctttggtttggtatcttaagggcttttgtgtttcgtgggagccatttttgaattaaaaaaactggcct

SEQ ID NO: 405230 - DNA, 148 bp, Oryza sativa nipponbare
aaagcgacacgagcgcgagagcgaggaggagagcccgagatctcggcggcggcggcggcggcgatggcgctctccgaccgctcccgcgagtcgctcctgccgagcttcctctactcgacggcgggggcgcggccgtacaccgcgggcg

SEQ ID NO: 405231 - DNA, 320 bp, Oryza sativa nipponbare
aaggatgacatctccaccgccaacctcaaatacctactcgtaccgtactaccttggggaaatgactgaaagggtagcgcaggaagatcggatcccagtccttaaggcgtcgcaggatcatttgaaggaattcatttctatctgtgaagcactggagcttatatcagaggatgagcttgaaatatctaggcagaagcaacctgataccatggcaaatcgaagagcacagaaggttgcacggttcaagcgccaaaaggctgcagaaacaaagctcctagaaatcaaggagaggaaagaaaggcgtatgcggtcattgagagc

SEQ ID NO: 405232 - DNA, 299 bp, Oryza sativa nipponbare
cagggtcgccgtcgttcgccgtcgttctgctgcttccgccgcatccatcccggtgagcagtcacatcctccgccaccgccgcctgcgccgatccccatccatccctccagcgagcagggcgggcgccgtcgttcctcctgctgcttccgcccgcatccatcctggtcactgtgaaaatggaaagaaatgctagaggcgcggggcattctgaggcactgaagaactacaatctaggaagaactttaggtattggttcatttggaaaagtgaagattgcagagcattagcttacagggcac

SEQ ID NO: 405233 - DNA, 335 bp, Oryza sativa nipponbare
cccacgcgttcgcccacgcgttcgcccacgcgtccggacaccactccatttctgagctcttctagtttgagtgagagagcagcagaagggagtagtgcaagatgccgatccgcaacatcgccgtggggagccaccaggaggtgtaccacccgggtgcactcaaggcggcgttggccgagttcatctccaccctcatgttcgtcttcgccggccagggctccggcatggccttcagcaagctgaccggcggcggagcgacgacccccgccgggctgatcgcggcggcggtggcccacgccttcgccctgttcgtgcggtgttcgtcggcgccaaca

SEQ ID NO: 405234 - DNA, 381 bp, Oryza sativa nipponbare
caagagctaaaatttcagtcagtgatgatgaggaagcaaagccgctctccttgttcatcttcttcttctgctgctgttgtgtccctctgcaaggtgctcctgttggtcctggctctcatctgcaccctggaaactgtctcagtagaaggagggagagtggcagcagcagcattagttggtgggggcgtaccactgaatccacggtacccggcgattcctgaagaaccttacataggccggagaggcgatccgtacacaggtcggggaggcgaaccttacacacgcccgggacggggatgcaccgttgcatactgatgctattgggggtcctcaactgccaaccatgacgatcgacatactactctgttactgctactgcat

SEQ ID NO: 405235 - DNA, 387 bp, Oryza sativa nipponbare
  unsure (1)..(387): unsure at all n locations
aatccctgaagtgtaaagaacctactagcttcgagctcatgtcttatatgcatctcctctatgagatatgcccgtttttcaagtttggttacatgtctgccaatggagcaattgcagaggctgttaagggcgagaactttgttcacatcatcgacttccaaattgctcaaggtagccagtgggcaactatgatacaggcccttgctgcaaggcctgngggaccaccatacctgaggattactggtatagatgactcgaattctgcccatgcccgaggtggtggactggatatagtcggacggcggtattcaatatngcccagtcatgtggtctgccctttgagttcaatgctgtcccagcagctagtcatgaggttatgcttgaaca

SEQ ID NO: 405236 - DNA, 499 bp, Oryza sativa nipponbare
cccacgcgtccgcaactatacaagttcaagagtttacaagagacccagacgatcaagatgtcgtgcggtggaagttgcaactgcggttcctgcggatgcggcggtggctgcggaaagatgtaccctgacctggctgagaagatcaccaccaccaccactactgcaaccacactgcctaggtgttgcacctgagaaggggcactctgagggggttggcaaggcagctgaatctggcgaggctgcccatggctgcagctgtggctccagctgcaggtgcaacccctgcaactgctaaggccaaggcgatctatgactgaattgccaatgcaccagcctgtctacatgatgaataaataaagagtccatccagtgtgatggctcatgcctgtgtgagtgtgactgaatccatcagtgtgtgtgtgtgttgtgtcaaccatgtgtgaataaggtgtcaaaaatcgtggctggaaatccatgtggttctagctttatgtaaatg

SEQ ID NO: 405237 - DNA, 298 bp, Oryza sativa nipponbare
gcgcccacgcgtccgcccacgcgtccgcccacgcgtccgaaagaatctgcgcctgctcagcccacagtaacagacttgattaatgtgtacaatattaaacagattggtccagatactaaggtgtatggtattatcgggaaaacctgttggccacagtaaaagcccaattttgcataatgaagctttcagatcagtgggtctcaatgctgtatatgtgccctttttggtggacgacctggctaactttctaatacatacttttcaccagagtttgctggtttagttgcacaattcccat

SEQ ID NO: 405238 - DNA, 456 bp, Oryza sativa nipponbare
cgccgccgttaggtttttatttattttttttctcgatctgatccgaggaggagcgagagcgaagaagggcacgatgcattcgaccgatctactgctggaagagcccagcagacatcacatcaaagggaggtggatgatctcttatacaagtatgggcgaatagctgatattgacttgaagatccctccgaggccaccaggctatgcttttgtagagtttgaagatcctcgtgatgctgaagaagcatgtgctggcagggatggttataactttgatggacatcgtctaagggttgaacctgctcacggtgggagaggtaatggtggttccttctttgaccgccccagcaactttggtggtggaggactccgtggtgtgtccaggcactcagaataccgtgttttggttactggtttggcttcttctgtattatgggtagatttaaaggaccatatg

SEQ ID NO: 405239 - DNA, 359 bp, Oryza sativa nipponbare
  unsure (1)..(359): unsure at all n locations
gcccaacccaaaccctaggtcacccagcgccgcggcgcccccggttgctgacttgccgcgggaaggaggatgagcaggcggtggagccggacgatctacgtggggaatctccctggtgacatcagggagagggaggtggaggatctcttctacaagtatggccgaattgttgatattgacttgaagatccctccgaggccaccaggctatgcttttgtagagtttgaagatcctcgtgatgctgaagaagcatgtgctggcagggatggttataactntgatggacatcggctaaaggttgaacctgctcacggtgggagagggaaatgtggttcctcctttgaccgccccagcaactt

SEQ ID NO: 405240 - DNA, 376 bp, Oryza sativa nipponbare
  unsure (1)..(376): unsure at all n locations
acctcaacgccatgaacaagctcagcaccaagaagccgtgggctctgtccttctccttcggccgtgctctccagcagagcacgctcaaggcctggggcggcaagacggagaacgtggtgaaggcgcanaaggccttcatcaccaggtgcaaggccaactctgaggctacccttggtacataccagggtgatgctgtgctcggcgagggtgcctctgagagccttcacgtcaaggactacaagtactgatctgcttctggtggtggctgaagatccgattggacatccctgcgtatgcatatttagggatctgagtgtgggttggctatcaagcgttcaatcttagcggtatcaaatactcttgtcgcaataatttg

SEQ ID NO: 405241 - DNA, 393 bp, Oryza sativa nipponbare
cccacgcgtccgacaacattcaatgaagttgttgctgtaactggtgatggcacaaatgatgcgcctgcgcttcatgaagcagatattggacttgcaatgggcattgctgggactgaggtggcgaaagagagtgccgatgtcataattctggacgacaacttctccacaattgttactgttgccaaatggggacgctctgtttacgtcaacattcaaaagtttgtgcagtttcagctgactgttaacgttgtggctttacttgtcaacttctcttcagcttgctttacaggaaatgcacctctgacagctgttcaacttctttgggtgaacatgatcatggacacccttggcgcccttgcattagctaccgagccacctaacgatgacttaatg

SEQ ID NO: 405242 - DNA, 229 bp, Oryza sativa nipponbare
cgaaaccaacccggaacgctggcggtgaatctgactttctctctgtgatctaggagcttacgccgccatagctgctgccagaggcgtcgtccacaaccttaaccataaggctatgaatagcgagtatgcaatgcgtcgagagattgcgatccatgctaatagcctgcagaacaagctcagacttactaggagatattcattgtgatgagatcctatactgaacattggg

SEQ ID NO: 405243 - DNA, 245 bp, Oryza sativa nipponbare
cccacgcgtccgcacgctgcacgcggggaaccatctggcgtgcgatttcccgaggctgatcgcgtcggggccggaggagtaccggctggtggcggacgcgttcgggccggagaagccgacctacgtggggctcctctcgggcgtggagggcatcacgggggtcgccatggtggtgctcatgaccgtctccttcacgctggccacccacccgttccgcaagggcgagaagggtggcagcggcggtg

SEQ ID NO: 405244 - DNA, 174 bp, Oryza sativa nipponbare
  unsure (1)..(174): unsure at all n locations
cattttccgtttcactcangcgaactctgaggtgtctgctcttcttggacgtattccatctgctgtgggatatcaaccaactcttgctactgatcttggaggacttcaagagcgacatacaactacaaagaagggttccattacatctgtccaagctatntatgtgcctgctga

SEQ ID NO: 405245 - DNA, 361 bp, Oryza sativa nipponbare
acgattctctggtggagtttttggggacgcaggcaagattaagatcggaatcaacggtttcggaaggatcgggaggctcgtggccagggtggccctccagagcgaggatgtcgagctcgtctccgtcaacgaccccttcattaccaccgactacatgacctacatgttcaagtccgataccgtgcacggccaatggaagcacagcgacatcaagatcaaggactccgagactctgctcttgggcgagaagccggtcaccggtttcggcatcaggaaccctgacgagattccgtgggctgaggctggtgctgagtatgtcgtggagtccaccggtgtctttactgacaaggagaaggctgct

SEQ ID NO: 405246 - DNA, 396 bp, Oryza sativa nipponbare
  unsure (1)..(396): unsure at all n locations
accacgcgtgcgaccacgcgtccggcaaaagaagaagaggtagacgaaggaggaggagatcaggtgatcatggggactcaggtggcagataactacccaccggccaaggatggccggagcgcgcaggagaaggcgatcgacgactggcttcccatcacgtcgtccaggaacgccaagtggtggtactccgccttccacaatgtcaccgccatggtcggcgccggcgtnctcagcctnccctacgccatgtccgagctcggctggggacctggcaatgcggtgctgatcctgtcatggatcatcacgctctacacgcttgggcagatggtggagatgcacgagatggttgcccggaaggcggtcgacaggtaccacgagcttcggcagcacgcgttc

SEQ ID NO: 405247 - DNA, 534 bp, Oryza sativa nipponbare
tgcttaagtggaatgcttttggtggaggctgttttgcaatacaagggctggtcgtttcagaattggtgtgacctgtacactgatctgcccagtagacaattgaaggttaaagttcaagatcgaaattctattgttacaacagatgcagaaagaagggtttgccagcctaatgggctgcaggaactgatagatggggagatatcaaattactctcatgggcgatgtttcgtgcgggcatctggtaccgaggatgtggtgcgtgtatatgcagaggcatctttagaggaagcagctgattgccttgcaaaacgagtggcgcagcatgttgagcgcattcttggataatttgccttccctttttttatctcttcattttccagaagtttaaagtgttcactttagctcaattgcctgacacatttgaagaatttaaaatccattgttttaatgcacactacatgttattgaaatttagatgacatctggtgtgagcatagttttgccaaaaaatttgacagatggttcacctttttt

SEQ ID NO: 405248 - DNA, 266 bp, Oryza sativa nipponbare
ctgtgccgtctcttgcttcctcctcctcatcgtccgccatggcttctctcaccgatctcgtcaacctcaacctctccgacaccacggagaagatcatcgccgagtacatatggatcggtggatctggcatggatctcaggagcaaggctaggactctctccggccctgtgactgatcccagcaagctgcccaagtggaactacgatggctccagcaccggccaggcccccggcgaggacagtgaggtcatcctgtacccacaggct

SEQ ID NO: 405249 - DNA, 209 bp, Oryza sativa nipponbare
cggacgcgtgggcggacgcgtgggcaaatcctgagaaatttgacaaaatggacaccgaaggtattgaaacagtgagaagggacaactggttattaataaagaacctggttactgagtgccttcataaaatactagtggacagagatgttcctgtgcagttaattgtaagaacaccatttgattactagacggtgatatttttgttacaa

SEQ ID NO: 405250 - DNA, 339 bp, Oryza sativa nipponbare
cccacgcgtccgcccacgcgtccgcccacgcgttcgcggacgcgtgggcgcgatcgcacagccggagaccgaatcggataagctcgccggagtaatcgccgtcgatgccaccgccggcggcggcgattcttttggccgcggccgttctcgcttcggcggcggcggcacttgctgacccttcttccccttcgttcccgacgccgtggccagggcggtttcacgcggggctttttcgaacctgacccatactaggtgcggccggaagcttctgatgaccgacctttactactactggtctggggggcgcgacctttaacctcttgtcggtcaatttttcgg

SEQ ID NO: 405251 - DNA, 232 bp, Oryza sativa nipponbare
ccggagcgcgccgcgccgccgcccgtggtggaggttgacgcggagcagcggatgacggcgtggactcgaccgtcgcgccccgcctcggcgtccgcctgcagcgcctccctcccgttgagcgagacgacgtctgagtcgacccggaacgtggcgatgcttgcgtcgacgtccggcgggaactgctcggagatgatggtcgtcacctgtacgctccaccgacccacctgctcct

SEQ ID NO: 405252 - DNA, 153 bp, Oryza sativa nipponbare
aaagcattcgcatccacgagaccactcgaacccgacccgccttgccgtcggcgtcaccgaagtaatcccttaattggtcaaaatgtctcgggaggagaatgtctacatggccaagctggccgagcaggctgaaaggttgaggagaggttgagt

SEQ ID NO: 405253 - DNA, 312 bp, Oryza sativa nipponbare
  unsure (1)..(312): unsure at all n locations
gaggctatatatgagctgatgttaggaatttagagaatttagagagggtgttttcttcgatgaactatataaaaacaagaagcaagatgagcaacaatctacatttattggaagagaattttntgtacaagttaaaggatgaggacatcatcactcatttttaaaatatcaagcattgaaaagttcttctctaaattgtaagttttttttatcattataccactttctatcctttacatgttatatatgttggcactttcatatgtcgaacaattagtacttatatatgttaaagaaattggacctaatgat

SEQ ID NO: 405254 - DNA, 384 bp, Oryza sativa nipponbare
cccacgcgtccgcccacgcgtccgtcgcttcccccgggttcgattcgagtcttctctctcgcagcacaaagatggacgcaaacagacgccaaagtggaatccagcaattgttggctgcagagcaagaggctcagcaaatagtaaatgctgctagggctgcaaaatcggcaaggcttaggcaagcaaaagaggaggctgagagggaaatagctgaataccgtgcccagatggaggctgaatttcagaggaaggttgcagagagtagccgtgactctggtgcaaatgtcaagcgtcttgagcaggagacagcggaaaaaatcgcacaactcaagcagcaggctgcaagtatcttccctgaagtgattcaaatgcttctgaggcatg

SEQ ID NO: 405255 - DNA, 486 bp, Oryza sativa nipponbare
ggactggtgattcgcgagggtttgcgttcgtgaggtacaagtatgaggacgaggcgcagaaggcagtcgatcggcttgacgggagagtggtagatggaagggagatcatggtgcagtttgccaagtacggcccgaacgctgaacgaatccataaaggaaaaatcatggagacagttccaaggtctaggggtcgttccagaagccgcagtccaagacgggggtaccgtgatgactatcgggagagagactatagaaagcggagtcggagtagagatagatatggacgtgacaggtatagggagagagattatcgtcgtcgtagcaggagccgcagctacactcctgatgattacaggagacgtggcagagacagtgtgtcacctgcacgcagaagcctgagtcgtaacaggagtcgtagctacagtcctgatgattacaggaagcgtggcaaacacagccccagtgcaaaaagaaagccccagtatg

SEQ ID NO: 405256 - DNA, 406 bp, Oryza sativa nipponbare
cattgcatacaagttcctgaagagtttacaagagacccagaagatcaagatgtcgtgcggtggaagttgcaactgcggttcttgcggctgcggcggtggctgtggaaagatgtaccctgacctggctgagaagatcaacaccaccatcactactgcaaccactgtcctcggtgttgcacctgagaaggggcattttgaggtgatggttggcaaggcaggtgagtctggtgaggctgcccatggctgcagctgtggctccagctgcaagtgcaacccctgcaactgctaaggccaagatgatctatgactgaattgccaatgcaccagcctggctacatgatgaataaataaagagtccatccagtgtgatggctcatgcctgtgtgtgtgtgtgtttgtctcaacc

SEQ ID NO: 405257 - DNA, 325 bp, Oryza sativa nipponbare
cggacgcgtgggctgcgggagtacaccagtgcatcttcttctaatgtttcaaatgaaggcttggtgccttatactctggaggatctgcaaagttacttaaacaaatttgaaccatcatattatacaaagaatggaaaagaccccttggtctatccatatgttctgctgttaagcatccaattgcttccagcaattctttatttgtctaaagaagttggagaggaaggataccatgtagatgctgtgcatatttcaattgctttatctgatcatggtgttcttcctgatggtgttgggtcaggccagaagatgggtatcatggatg

SEQ ID NO: 405258 - DNA, 274 bp, Oryza sativa nipponbare
gcgtggaagtgttcactcttcgtatgggattgctgacaacttggatgatccaaagtaccgccactacaaatactggtcaaatcccttggaaacaaaattaccaaatgcacctgaaatggaaatattttcaatgtatggagttggcattccgacggagagagcatatgtctataaattagccccacaagcagagtgctatataccttttcagatagacgcttcacctgagggtggggatgagaatagctgtctggaaggcggcgtttacctgtct

SEQ ID NO: 405259 - DNA, 188 bp, Oryza sativa nipponbare
gaaaaatttctccccaatctcgcgaggctctcgtcgtcgaatcgaatcctctcgcgtcctcaagatgcagatctttgtgaagacattgaccggcaagactatcaccctcgaggtggagtcctctgacaccatcgataatgtcaaggctaagaaccaagataaggagggcattcccccggaccagcagc

SEQ ID NO: 405260 - DNA, 325 bp, Oryza sativa nipponbare
cccacgcgtccgcatacgtggtggcccaggtgctgggatccaccatggcaggcctgacgctgtgcgtggcgttcgcccgcagtatcagcgcgcggggggagcactcgttcttgtggacgacgcctgcggggtcgatggcgcaagcagcggcgctagagttcgtcatatctgtctgactcatgttcgtcgtctccagcgtcgccacggacaacagagcaatccgtgaattggctgggctcgctgtcggtgcgaccgtcgcggtgaacgtgctcttcggagggccggtgactggggcgtcgatgaacccggctcggagccttggtcc

SEQ ID NO: 405261 - DNA, 176 bp, Oryza sativa nipponbare
ctcaccccgccgccgccgccgccgcagcctcctcaaggctgctcccatcctctccttcgagttagcttcctccttattcaaccatgggtaaggagaagacgcacatcaacattgtggtcattggccacgtcgactccggcaagtcgaccaccacgggccatctgatctacaagctt

SEQ ID NO: 405262 - DNA, 212 bp, Oryza sativa nipponbare
  unsure (1)..(212): unsure at all n locations
gcgcccacgcgttcgaccacgcgtncgcccacgcgttcgaccacacatagtgtgggtgcctgtgaaggaaaaaactcctttgtggaggctagtaccagattgttccttttcgtgggcactataagtgcttatattttgcttggtnttacaacatttactgtgctgtccatatgtacccgtttgttctgagagggtctagtaaattgatatgc

SEQ ID NO: 405263 - DNA, 281 bp, Oryza sativa nipponbare
  unsure (1)..(281): unsure at all n locations
ccagcacgctttgaaatatgcttgggcattgcaagaggtctggcttatcttcatgaagagtcaagcatccgtgttgtgcacagggacatcaaggccagcaatgtcttacttgacgccaatctcaatcctaagatctcggatntcgggctagccaaactttatgatgacaagatgactcatgttagcacaaaagctgctggtacatatggctatcttgcacctgagtacgccatgagaggacatatgactgacaaagtgatgtgtttgcatttggcgtgggc

SEQ ID NO: 405264 - DNA, 369 bp, Oryza sativa nipponbare
  unsure (1)..(369): unsure at all n locations
ctaccgttcgcaatgtcatggatatgaatgctggttttggaggatttgcggcgtcactcatccacaaacctttgtgggttatgaacgttgtaccttgtgatcatccagaagccttgcctatcantttcaacagaggtttgattggggtatatcatgactggtgtgaatcttttaatacatatccncggacctatgatcttgttcacatgagttatctccttcagggcctcacanataggtgtgatatcattgaagtagcagcagaaattgataggatacttagacctggaaaattggtcgtgttgcaagatactgagcaagtgattagaaaaatggatccagttcttcgctctttgcactacaggactg

SEQ ID NO: 405265 - DNA, 325 bp, Oryza sativa nipponbare
gcaactgatgagacccctgagttgatgcccctcagccatgtccttgctaccaagcttggcgctcgtcttacggaggttcgcaagaatgggacctgcgcatggctcaggcctgactggaagacccaagtgactgttgagtaccgcaatgagagcggtgccagggtccctgtccgtgttcacaccgttctcatctttacccagcatgatgagacagtcaccaacgatgagattgctgctgacctgaaggagcatgtcatcaagcctgtcattcccgagcagtaccttgatgagaagacaatcttccatcttaaccctatctgtctgt

SEQ ID NO: 405266 - DNA, 268 bp, Oryza sativa nipponbare
  unsure (1)..(268): unsure at all n locations
gattccgtcgccacgcgccggcggagcagagcncagcagcggcgacaagccgtcatagattcttcttcctccccgtcactcctcaccaacaaccatcctgcaccctccaagatggacgccgccgtcgaccggctcaaggatgggttcgccaagttcaagaccgagttctatgacaagaagccggagctcttcgagccgctcaaggccggtcaggcacccaagtacatggtgttctcgtgcgccgactctcgcgtgtgcccgtcggtga

SEQ ID NO: 405267 - DNA, 335 bp, Oryza sativa nipponbare
atgacggtcagagaattgttccagaggagtgggtcccatatgttgggcaggctctaaacattgtgcgggaagaggttaacaatgaagctgtcgtgtcgggctttgttggagctccctttacattggcatcctattgtgttgaaggaggttcatcaaataacttttcaaagattaagaaaatggccttctcagaaccagagattctgcataatttgctacagaaatttactacgtccatggctaactacattaaataccaagctgacaacggagcacaagctgtccaaatttttgactcatgggctacagaactcaacccagttgattttgaggag

SEQ ID NO: 405268 - DNA, 148 bp, Oryza sativa nipponbare
aaggagcacctcaagcgcctcgccggtatcgacctccagatcctctccgcccaggttacacaatcgacggacttcacagagctggtaaaccagcagccatggctgtcaaccatgaagttggtcgtgaagcccgacatgctgttcggga

SEQ ID NO: 405269 - DNA, 270 bp, Oryza sativa nipponbare
  unsure (1)..(270): unsure at all n locations
cccacgcgtncgggtcgccctcaagaagttctttgaacatgttttgcaagctttcctgaagcatatngattttgaagtagtccaatgtgcttgtattgcaagcccaggttttactaaggatcagttccgcgattatatgcatcttggagctgcacggggagacttaagattaataattgagaacaaacagcgcattgttcttgcacatgcaccttcaggttacaagcatagccttgaggaagttttggatagcccaagtgtgatgacact

SEQ ID NO: 405270 - DNA, 397 bp, Oryza sativa nipponbare
atttcatccaactatacaagttcaagagtttacaagagacccagacgatcaagatgtcgtgcggtggaagttgcaactgcggttcctgcggatgcggcggtggctgcggaaagatgtaccctgacctggctgagaagatcaccaccaccaccactactgcaaccactgtcctaggtgttgcacctgagaaggggcactctgagggggttggcaaggcagctgaatctggcgaggctgcccatggctgcagctgtggctccagctgcaggtgcaacccctgcaactgctaaagccaaagcgatctatgactgaattgccaatgcaccagcctgtctacatgatgaataaataaagagtccatccagtgtgatggctcatgcctgtgtgagtgtgactg

SEQ ID NO: 405271 - DNA, 160 bp, Oryza sativa nipponbare
gcggccgaagcggaagcagcagcagcagcagcggcgacgaagccgtccatagattcttcttcctccccgtcactcctcaccgacaaccatgcccaccctccaagaggacgccgcgcaccgctcaggagggtcgcagtcaaaccggtctatgacagaagcg

SEQ ID NO: 405272 - DNA, 389 bp, Oryza sativa nipponbare
cccacgcgtgcgggaggcatgccagtgtacctggactgttccagtgggatggacagcaacacggtgatgttgagcaccacaccttctgtggttgtctccaccacttcgtccaatacggttgctgatcccgggcagaacctcaaatatggagggcccctggcagctgattggtcacgtcttgagctcgatgtgctgaaagatggcctccagaaatatggaaatgaacaaggcatcatgaagcatataaagatagcagcttgattaccaagcaagaccgtgagagatgtcacaatgaaatgtcagtggctcaggaaaagagaaaattcaaggcggccgaaggctgaagaccatcacacttgaagaaagatgaaagaaagatagcttaaatg

SEQ ID NO: 405273 - DNA, 299 bp, Oryza sativa nipponbare
  unsure (1)..(299): unsure at all n locations
ggcagattatcaaatggcaccccagtggctgtcaaaaaaatccttaacaatctaggacaagctgagagagaattcagagtggaagttgaagcaattggtcatgtccgacacaagaatttggttcgccttttggggtactgtgttgaaggcactcaaaggatgcttgtgtatgagtatgtcaacaatgggaatctcgaaagttggttacatggagagttatcccaatatagttctctcacttggctagcgcgcatgaaaattcntttgggtactgcaaaggcccttgcttacttacatga

SEQ ID NO: 405274 - DNA, 428 bp, Oryza sativa nipponbare
  unsure (1)..(428): unsure at all n locations
ccacgcgtncgccacgcgtncggtggaaatatcacccctgtggagctcataaagaagggtgacaaggggtgggctcctgcgagtcttgctcttgcttgccaaagcttggggtatccgcccctttctcatatgggctggttattaccaatgtctatgacagtggtcagtcttcagcctgaggtgcttgacctactgaggatgacctgtggagaagtttcttctggtgttttatggttgctcagtctccttggcatctcgtacccactattgctgtgaccaacatgtnctcatgggacaagaatggctgtgtgtgtgaaccgatctctaccactctgtagacaagagttgaagatctgtcattactatatgagtctatgtgtatgctactaaatatatgaatcatctaagctgctgtgctacttgtgtgt

SEQ ID NO: 405275 - DNA, 306 bp, Oryza sativa nipponbare
cccacgcgtccgtatcagcaggatgaagcagttcagggcaatgaacaagcttaagaaagttgcattgaaggttgttgcagagaacttgtcagatgaagagattacaggctcaaaagaaatgttcagatccttggatactgataacagtgggacaataactcttgaggagctaagatctggtttaccaaaacttggcaccaaaatttctgaatcagaaattagacagctgatggaggcggctgatgttgatggaaatggaaccaatgactatgctgagttcatatcaacgacaatgcacatgaacag

SEQ ID NO: 405276 - DNA, 511 bp, Oryza sativa nipponbare
cccacgcgtccggtcaatgcagattctcagtatcaaattgtgacgacagcagaactgcagccatctgcagaagatatctctgaagagaaacagaccatggagctgataacacagtttgagaagccaacattagcttcagaaaatgccatgacaaaaggatttgatgttgtgaccgactgttctgatcaccactttgtcaaagaaattggtcacgaaaatgtcaaaagaggttgggtgaagaagatacaacaggaatggtcaatcttacaaaacgatctgccagatggtattcatgttagagtttatgaagaaaggatggacctcctgagggcatgccttgtaggtgcagctggaacaccttatcatgacaatcttttcttctttgatattttctttcctcctgattatcctcatgagccaccttctgttcactaccaattccggggcctccgtttgaacccaaatttgtatgagtcttggcaagtgtgccttagcctgctcaaaacatggg

SEQ ID NO: 405277 - DNA, 454 bp, Oryza sativa nipponbare
ccgaactccagaaccgatgtgtgaacatgattgcacacctcttcaatgctcctctaggggactctgaaacggccgtcggagtcggcactgtcggctcgtctgaggccatcatgctcgccggtttggccttcaagaggaggtggcagaacaagatgaaggcagccggcaagccatgcgacaagcctaacattgtcaccggcgccaatgtccaagtttgctgggagaagttcgcgcgatacttcgaggttgagctcaaggaagtgaagctgagtgacggctactacgtcatggacccagctaaggccgtggatatggtcgaccagaacaccatctgcgtcgcggcgatcctcgggtcgacgctgaacggggagttcgaggacgtgaagctgctcaacgatctgctcaccaagaagaacgctgaaacaggctgggacaacgcgatccacgtggacgc

SEQ ID NO: 405278 - DNA, 420 bp, Oryza sativa nipponbare
  unsure (1)..(420): unsure at all n locations
gtgtcatggcttctcgtagaagtgcagcagctagtccggccatggcagcagcagctgcggtagtagctgtatctgtatacttgctggtgtgcagtgctccggcggcggcgacggcggcggcggtggcgaagaagccgtcgtacccgccggtggcgaaggggctatcgttcgaccactacaagaagagttgcccgcaggcggaggccatcgtgttcagcttcctgcgcgacgccatcggcaaggacgtcggcctcgccgcggcgctgatccggctccacttccacgactgcttcgtccagggctgcgacgcctccatcctcctcaccaagacgcccggcgggcccgacggcgagcagcaggcgatacccaacgagtcgctgcggnccggcgcgttcaaggccgtcaacgacatccgcgccc

SEQ ID NO: 405279 - DNA, 170 bp, Oryza sativa nipponbare
  unsure (1)..(170): unsure at all n locations
cacaccactccatttctgagctcttctagtttgagtgagagagcagcagaagggagtagtgcaagatgccgatccgcaacatcgccgtggggagccaccaggaggtgtaccacccgggtgcactcaaggcggcgttggccgagttcatctncaccctcatcttcgtcttc

SEQ ID NO: 405280 - DNA, 336 bp, Oryza sativa nipponbare
cccacgcgtccgatatcagacaagtaaatctagcttgctgtaaacacagttagttcgtaattatcgcatagggccatggggaagtacagtgtgggtctcgtggttttagggttgctggcccttgcgttttcgaccactgtgctggctgaaacacatgttgttggtgactccaacggttgggacttctctgtgtcgtttgatagctgggctgatggaaaggtcttcgctgctggtgacactcttgttttcaactacaaaccgggcgcacacaacgtgctggccgtggacgcggcgacgtacaagagctgcaaggtgggcagctcggcggactcggtg

SEQ ID NO: 405281 - DNA, 274 bp, Oryza sativa nipponbare
  unsure (1)..(274): unsure at all n locations
gcgcccacgcgtacggaacttctggcagcaggacaagtggaatggatttttcccagtaaaatggcacattatcaaggatgtgcctaatccacaatttcgccacataatactggagaacaacgaaaacaaacctgtgacaaacagcagggatacacaagaggtcaagtttccacaaggttcagagatgctgaacattttcaagaacttttcatgtaaaacgtcaatattggatgactntgacttctatgaaaataggcagaaagtaatgcaggac

SEQ ID NO: 405282 - DNA, 440 bp, Oryza sativa nipponbare
  unsure (1)..(440): unsure at all n locations
gttatccttggagttcacaaggctgggaagacgaccttgctagaaaaggtgaagtcaatctatttgaaagaggaaggccttccacatgatcgtatcgttccaacagttgggcttaatattggacgtattgaagatgccaatgtaaaacttgttttctgggatctgggaggccagcctggcctacgaacaatctgggagaaatattacgaagaggcacatgctgtcatatatgttattgactctgctgctgcatcatcatttgaagatgccaaatctgctctggagaaagttcttcatcacgaggatctgcaaggagtgcctctactcatatttgcaaacaagcaggtggtttaccttccacttgtatgaaaattcttttatgcgctatacntaaatacatgcattcacttagttgaaaactttgtcttccttgcatgaaa

SEQ ID NO: 405283 - DNA, 403 bp, Oryza sativa nipponbare
gatctccatacagttacgagctgtctcgacatgatccgcactatcgttacacatcagtggacaacgatataagtatctggaactacaagtgggtgtcgactcggcatcgagccgtgctggtggcacagcgtggcgctgcatagcgaggatgtctagctcgtcgccgctaacgatccctatcatgaccacctagtccatgacatacatggtcaagtatgacaccgtacacggacagtggtagcatcatgaggacaagcgtcaaggactacaagaccctcatgtctggcacgaaagacgccgcacagatcaggtggaaggacactgaggagataccatgggctcgcgttggcgctgaatacgttgttgaggatacaggtgacatgaccgacatggacaaggcgac

SEQ ID NO: 405284 - DNA, 479 bp, Oryza sativa nipponbare
gcggcgcggagggcatcaggatggcggcggcgctcgctccgggggtgtcccggaagctgaagaaggtgctggagacgcggacggacaacccggatctgctcgcctcgctgggcgcgctctccaccttctacgtgcagaacaccccgcaagcgcgccgcaacctcaagtcctccgtcgagcagcgcggcctcaccatcaaccggcatttcctcgacgcctccctccctggccacaaggcgttggatcgcgtcgagggagaggggcacgccctcaacgattcctggaagaagaatgaagaagcattgggcaggtggagggcaaggacgggggatatcatcagtacaacggggaggctgcaaccagaacctgaggttatcactcagcgccaggaaaatgtgtcatgcctcctgagggattaccaactttcaaatgaagagatacatgcactccgggacgaagaaatagatgagaaattcttc

SEQ ID NO: 405285 - DNA, 371 bp, Oryza sativa nipponbare
gtaccctctgtgctccatttatatttctcacaaaggggcatgactacatggggaaaccatgggaacagagctagatgaatcacaatcatcagacatgggcacacagtatgcagcaatagtgaagacctcagcactgaagaacagtatgcaggctaaggataaaatggttcacctgtacatgactgatcttcaggtcacgatgatatctctgatggatcgcagaagttgagatgcattgtgtttgggagagtttctggcagggcttgtttggcacagctccagctccagctccacccctcctagagctcagccaaacagtttcagctccaccaaaactgggagtggagctgggtggaactctctcacaaaat

SEQ ID NO: 405286 - DNA, 425 bp, Oryza sativa nipponbare
acaaccaggacgtgaactcgctgggtctcgtctcggccaggaagaccctggaggcggtggacatcctcaagctcatgacctccacctacatcgtcgccctgtgccaggccgtcgaccttcgccacctcgaggagaacatcaagagctccgtcaagaactgcgtcacccaggtggccaagaaggtgctcaccatgaaccccaccggcgacctctccagcgcgcgcttcagcgagaagaacctcctcaccgccatcgaccgcgaggccgtgttcagctatgccgacgacccgtgcagcgccaactacccgctcatgcagaagctccgcgccgtgctcgtcgagcacgccctcaccagcggcgacgccgagcccgagggcctcgtgttctccaagatcaccaagttcgaggaggagctccgctctgcg

SEQ ID NO: 405287 - DNA, 139 bp, Oryza sativa nipponbare
  unsure (1)..(139): unsure at all n locations
cggtactgctactccggcacggcgtgcccggacttccgcagggcgggtgcaagcgcggcgacgcctgcgagttcgcgcacggngtgttcgagtgctggctccacccggcgcgctaccggacgcagccctgcaggacgga

SEQ ID NO: 405288 - DNA, 417 bp, Oryza sativa nipponbare
cccacgcgtccgcccacgcgtccgcccacgcgtccgcggacgcgtgggcgagcgcagagtagagggaatggcgtccgacggcgtgctcctggggatgggcaaccccctcctcgacatctccgccgtcgtcgacgacgccttcctcaccaagtatgacgtcaagctgaacaatgcaattctcgctgaggaaaagcacttgcctatgtatgatgagttggccagcaagggcaatgttgaatatattgccggaggagccacccagaactctatcagggttgctcaatggatgcttcaaactcctggtgcaacaagttacatgggttgcattggaaaggataagtttggtgaggagatgaagaagaatgcccaagctgctggtgttactgctcaatactacgaggatgaggctgctcccac

SEQ ID NO: 405289 - DNA, 408 bp, Oryza sativa nipponbare
atcttcgtgagcttgctttggctcgaatggaagatttaggcttgaagtgccgagatgttagaactcgtgaggcgggaattcaggatatccatcacaaaattagacctgacgaagtagagcttgttaggcgtgactatgctgcaaatgagggctgggagacctttctctcatacgaggatacacagcaggatatccttattggtctgctgcgattgcgaaaatgtggccgcaatgttacatgccctgagctagtaaggaggtgttcaattgtccgtgaacttcatgtatatggaactgcagtccctgtacatggtcgtgatgcagacaaactacaacaccagggttatggtactcttttgatggaagaagcagaaagaattgctcgcaaggagcatcgttcaaagaaaa

SEQ ID NO: 405290 - DNA, 554 bp, Oryza sativa nipponbare
gccaacttccatgtttacactgccctattgaaaccacatgagagaatcatggctttggatcttcctcatggtggacatctttctcacggctaccagactgatactaagaagatttcagcagtttcgatattctttgagacaatgccctacagattggatgaaagcactggcttgattgattatgatcagatggagaaaagtgccgttctttttaggccaaagttgatcgttgcgggtgcaagtgcatatgcgcgtctttatgactatgaccgcatgcggaaggtttgtgacaagcagaaggcaatacttctagcagatatggcacatatcagtgggcttgtcgcagctggtgttgttccatctccttttgattatgcagatgtagtgactaccactactcacaagtcactccgtggaccacgtggagccatgatcttttacaggaagggggtgaaaggagtaaacaagcaaggcaaagaggttatgtatgaacttgaggacaagatcaatgctgctgtctttccaggtcttgaaggtggaccacataatcatac

SEQ ID NO: 405291 - DNA, 411 bp, Oryza sativa nipponbare
gcctccccctccaccccccgcctcgccgtctcccgttcggaacaccaagctccagcgccccccctccggcgaaatggccccgaagcgaggcggcagggcgccggtgccggcgaagaagaagacggagaaggtgacgaacccgctgttcgagaagaggccgaagcagttcggaatcggcggcgcgctgccgcccaagaaggaccttcaccggttcgtcaagtggcccaaggtggtgcgcatccagcgccagcgccgcatcctcaagcagcgcctcaaggtgcccccggcgctcaaccagttcactcgcaccctcgacaagaacctcgcaactaatctgtttaagatgctcctcaagtaccgccctgaggacaaggctgctaagaaggagaggcttttgaagagggcccaagc

SEQ ID NO: 405292 - DNA, 498 bp, Oryza sativa nipponbare
caagttctcagaagtgaagcctattcagctggtgacttaggcactgctgttcatagagctttcttcaggatggacgaaatgatgcgaggacagagaggctggagagaactatctgcacttggagataagataaacaagattggtggtatgattgaagggttgatttggtctccgagaggcagtgattcgaataatggacaagatgattggtctttcgaagagggaccccacttcgattttgctgggccaacatgcggatgcacagcatgtgtagcgctaataagaaataaccaactagttgtggcgaacgctggtgattcccgttgtgttatttctagggctggccaggcatacaatttgtcaagagaccacaagccagagcttgaagctgagagagacagaatagtaaaagccaggggtttcattcatatgggacgaataaattgaagtttaaacttgacaagagcaattggagatatggaatttaaacagaacaaa

SEQ ID NO: 405293 - DNA, 562 bp, Oryza sativa nipponbare
  unsure (1)..(562): unsure at all n locations
ggacgtctggctgaaatgcctgcggatagtggttaccctgcatatttggctgcacgtttggcatccttttacgaacgtgctggtaaggtgaaatgtctcggcagtccagatcggacaggcagtgtcacaattgttggtgctgtctctccacctggaggtgatttttcagatcctgttacctctgcaactcttagtattgtgcaggtcttttggggattggataagaagctggctcaaagaaagcatttcccatctgtcaattggctcatctcttactcaaaatactcaaaggctctggaatccttctatgagaagtttgatcaagatttcattgatattagaacaaaagctcgtgaagtgttacagagagaggacgatctaaatgaaattgtccagcttgttggtaaagatgcactggcagaatctgataagattacattggaaacagccaagctactaagggaagattacttggcacagaatgcatntaccccatatgacaaagtctgtccattctacaagtctgtntgatgatgcgcaacattattcattcaatacatta

SEQ ID NO: 405294 - DNA, 400 bp, Oryza sativa nipponbare
cggacgcgtgggcggacgcgtgggcggacgcgtggggggcgtctcgctgtcgagcatgaacctctccgggaggatatcgccggcgatcgccgcgctgacgaccctgacacgccttgagctcgactccaactcgctgtcggggagcgtgccagccgagctgagcagctgcacccggctcaggtttctgaacctctcctgcaacggcctcgccggcgagctgccggacctgtcggcgctggcggcgctcgacaccatcgacgtcgcgaacaacgacctctccgagaggttcccggcgtgggttggcaacctattcggcctcgtcacgctcagcgtcgggatgaacagctactatcccgtggagacgccagcgagcattggtaacctgaagaacttgacgtat

SEQ ID NO: 405295 - DNA, 274 bp, Oryza sativa nipponbare
gcagacgccaccaccgcgattcgaatcgccgccgtctcaaactcaaaactcacagatcgatcagatcatgggggacgtggtcaaggacctggtggcgggcaccgtcgggggagcggccaacctcatcgtcggccaccccttcgacaccatcaaagtcaagctccagagccagcccacccctgcccccggccaattccccaagtacgccggcgccgtcgacgccgtcaagcagaccatcgccaccgagggccccaggggcctctacaaggggatg

SEQ ID NO: 405296 - DNA, 240 bp, Oryza sativa nipponbare
tcggaatcccggtcgaccacgcgtccggttgttttacaaagcccagctagctctcgatcatttgttacagagaaattgatcaaagcaggaaattaaccagctgtcaggaagcaatggctctcgtggaggataacaatgccgtagcggtgagcttcagcgaggagcaggaggcgctggtgctcaagtcatgggcgatcttgaagaaggattccgccaatattgcccttcgcttcttcttga

SEQ ID NO: 405297 - DNA, 409 bp, Oryza sativa nipponbare
tgcaatctcagctggaaagtactactattttgtccgtctgatgggtagaaaagcatctcacgtggcctttgaatgtgcacttcaatcacacccaaacatgcttatcttagcggaggaggtagcactatcaaaactcacactgatggaagttattaacaagatatgtgatggagtacaagcaagggcagaattagggaaattccatggtgtgctccttattccagaaggactaatagaaagcattccagaaatgtatgctctgcttcaggaaatcaatatcctccacaacaacaatgttcctgtggcagagatgccatcacaactgtctccttgggcagcttggcttgtccagttcttgccacccttcatcagaagagagctgctgcttcattaaggatcagacaactct

SEQ ID NO: 405298 - DNA, 555 bp, Oryza sativa nipponbare
cccacgcgtccgctcgcgcatcctcctccgactacctcggttgggttttgggggcggctggagatgtcggactccgaggagcaccacttcgagtcgaaggccgacgccggcgcgtccaagacctacccgcagcaggctggtactattcgcaagaacggtcatattgtcatcaagaaccgcccatgcaaggttgttgaggtctccacctccaagactgggaagcatggacatgcaaaatgccactttgtggccattgacatcttcaatgggaagaagcttgaagatattgtgccctcctcccacaactgtgacgtcccccacgtgaaccgtactgattatcagctgattgacatttctgaagatggatttgtcagcctcctgactgaaagtggaggcactaaggatgacctgaggctccctagtgatgaggctctgcttactcagatcaaggatggattcgccgagggggaggatctgattgttaccgggatgtctgccatgggtgaggagcagaattgcgctctgaaggatattggccccaagaactagaatacc

SEQ ID NO: 405299 - DNA, 408 bp, Oryza sativa nipponbare
  unsure (1)..(408): unsure at all n locations
cccacgcgtccgatcaaggttgacaagggtaccgttgaggttgccggcaccaacaaagagaccaccacccagggccacgatgatcttggcaagcgttgcgccaagtactacgaggccggtgcccgcttcgccaagtggcgtgctgtcctcaagattggccccaacgagccatcgcagctttccattgacctgaatgctcagggtcttgctcgctatgccatcatctgccaggagaacgggctggtgccgattgtcgagcctgagatccttgtcgatggctctcatgacattgagcgctgtgcctatgtcaccgagaaggtcctcgctgcctgctacaaggccctcaacgaacaccatgtnnctcctgagggttncctcctgaagcccaacatggtcaccccaggatct

SEQ ID NO: 405300 - DNA, 488 bp, Oryza sativa nipponbare
ctccatcccgcctcaactccgccgctcgatcgcctccacccgccgccgttccgtctacctctccgacccccggcgggcgccgccgccgccgccgcgcctaccatggctaatacgctgcgattgtatctcacttgcataaggaacactctggaggctgccatgtgcctgcagaatttcccttgccaagaggtcgagaggcacaacaaaccggaggtggagctaaagactagccctgaacttctgctgaacccagtgctcatttgccgtaatgaagcagaaaagtgtttgatagagacttcaatcaactctattcgtattagcatgaaggtcaaacaggcagatgagctagaaaatattcttgcaaagaagtttcttaggtttttatcaatgagagcagaagcattccaagtgctgaggagaaaaccagttcagggttatgatatcagtttcctgataacaaactaccactgtgaggacatgcacaagca

SEQ ID NO: 405301 - DNA, 380 bp, Oryza sativa nipponbare
ctcccccgcgtcggtcgcttcgcttctactggaggagagcagaggtggtggttggtgagagaggatgcgcggcggcggcggcggcggcggcggcggcggcgaggaggccggccagaagctgaagagcatggacgtcgacaagctggagaacggcggcgacaagcccgccctcaagtaccacggctggagggccatgcccttcatcatagggaacgagacgttcgagaagctggggacgctggggacgtcggcgaacctgctggtgtacctgacgcaggtgttccacatgcggagcgtggacgcggcgacgctgctcaacggcctcaacggcaccaccagcctcgcccccatcatcggcgccttcctcttcgacgcctacc

SEQ ID NO: 405302 - DNA, 236 bp, Oryza sativa nipponbare
gaggatgtgccaaaaagcaggatattctatatctaatggtccccagacaatgcaaaagtgaggagcaagatgctttatgctagctccaacgaaagattcaagaaggagctgaatggcattcagttggaagtgcaagctactgacgccggcgaaatcagtctcgatgcgctcaaagatctgtgaaatagcattgcatgcctttatgatcttgaataggactggtattatggatttgg

SEQ ID NO: 405303 - DNA, 207 bp, Oryza sativa nipponbare
gttcctgaaattgagtcatggctgccaagctagctcgcctccacagtctccgcgaacgcctcggtgccaccttctcgtctcatcccaatgagttgattgcactcttctctaggtatgttaaccagggaaagggaatgctccagcgtcaccagctgcttgcggagttcgatgccttgatcgaagctgacaaagagaaatatgctccct

SEQ ID NO: 405304 - DNA, 481 bp, Oryza sativa nipponbare
aaaagacccttgctttccctcaggatcggccatggcgaccgccgttgcgtcccaggttgctgtctctgctccggctggctcggatcgcggcttgaggagttctgggatccagggtagcaacaatattagctttagcaacaaatcatgggttggcaccacattggcgtgggagagcaaggccacgcgaccgaggcatgcgaacaaggtgctctgcatgtcagttcagcaagcgagcgaaagcaaggttgctgtcaagcctcttgatttggagagtgctaacgagccgccgctcaacacatacaaaccaaaggagccttacaccgccacaattgtctcggttgagaggatcgtaggccccaaggctccaggagagacatgccacattgttattgatcatggtggcaatgtgccttactgggaggggcaaagctatggcattattccttcaggggagaacccgaagaagcctggtgcaccacat

SEQ ID NO: 405305 - DNA, 361 bp, Oryza sativa nipponbare
cccaaatctcctttgcgtcctctcgattcctcagcgaccatgtcggcctactgcggcaagtacaaggacgagctcatcaagaatgctgcctacattggcactcctggcaagggtatccttgctgcagatgagtccactggcaccattggcaagcgctttgccagcatcaatgtcgagaacgttgaggagaaccgccgctctctccgcgagctgctcttcaccacccctggtgccctccagcacctaagtggtgtgatcctcttcgaggagaccctgtaccagaagaccaaggacggcaagcccttctgcgatgtcctcaaggagggtggtgttcttcctggcattaaggttgacaagggta

SEQ ID NO: 405306 - DNA, 569 bp, Oryza sativa nipponbare
  unsure (1)..(569): unsure at all n locations
cccacgcgtccgcccacgcgtacggaacttacaatataatgataaaggggctctttgacagtggtatggttgatgaggctatagagtgatgggacctattggagaaagatgtggcttgcattcctgacacagtgacttttggcactctgatccatggattatgccagaatggctgtgctaataaggcatttacaatatttgaggaagctcgagtcagtggcaaacaattagatgtgttctcatatttacaatgcactaataagtgggttctgccaagtatacaggactagtgatgctgttagaatttacagcacgatggcagacaatggttgttctcctacagtcatcacatacaacactntaatagatggtctgtgtaaggctgaaaagtatcaagaagcttcaagtgttgcaagggaaatggtagagaatggctttacaccagatatcactactttatggatcgttgatccgtggccttattagtgacaagaagattgatgatgctctttctatttgggaaacaaattctttaatagggtctcaaggttgatgtgagatgcataaca

SEQ ID NO: 405307 - DNA, 342 bp, Oryza sativa nipponbare
cccacgcgtccgcccacgcgtccgcccacgcgtccgcccacgcgtccgcggacgcgtgggtggcagtggcagtggcagtggcagtgggagttccagggacgtagagcagcgcggtgcggattgtgcggggaggcgcgggaggaggaggaggaggaggggaagatggagagcaccatgaaggggatccgcggggacaacgcgccgtgcgtgctggacctggacgacgcggcgacggtggggggcgtgttatgtgcacctactgtgaggactgttctaccgaggatcatctcatttctccgtggacttttttcgttgttagtgtgtacattttgctgtgggatt

SEQ ID NO: 405308 - DNA, 277 bp, Oryza sativa nipponbare
cccacgcgtccgcctgacatgaaaacatcatgggacgtgttcagggtcgcagcaggcaagtacccagataatcggatgctcggatggcgtcctgtaaaagatggagtgatagggccatacatatggaaatcatacagggaagtgtatgaagaagtcctgcaagttggatctgctttgcagcagctgggggtgaagccaggttcccggattggaatttatggatcaaactgcccttagtggatagtagctatgcaagcttgcaatggttacagcttaa

SEQ ID NO: 405309 - DNA, 557 bp, Oryza sativa nipponbare
  unsure (1)..(557): unsure at all n locations
cccacgcgtccgcccacgcgtccgcccacgcgtccggtttttctttcccttcacaaaacaagctaggatgtctctccagtctccatataaaaaatgaagatgtttcaccactcccctgtaaacaaatctgcaggttgtgcaaattcccggagttggaagcaaatttgcagcctctacattgaaaggccctgtctgataaacctttatctgtgcaaatctgagcccagattccagaggaatttcttggcaccaacactagttcacatgggaaaaaagaagccaataactgaacagatgttgtgataatcgaacaggagagtaatgaatcattttcactttttcagcctaatctaaaactctcagttcatacatctccttgaacagccaaacaaaacagagagagacaccaaatgatccatccagttggatcaaatccatcatctcgatcttgacgaatatttacacatgaaagcaagcaagaaagaaagaagcgaanaaagagagagagagagagagagagagagagagcgagagaggagagcttgccaagaacaagg

SEQ ID NO: 405310 - DNA, 549 bp, Oryza sativa nipponbare
cccacgcgtccggttgttcaatgatgcacaaaaactaagcttcctcgatatcaaggaatcgactggtattgaggataaagaattgcgaagaacgctgcaatcacttgcatgcggtaaagttcgggttctccaaaagatgccaaaagggcgagacgtagaagataaggacgaatttgtatttaatgaagaatttagtgcccctctctatcgcataaaggtgaatgctattcagatgaaggagacggttgaagaaaacacaagcacaactgagagagtattccaggacagacagtatcaggtggatgctgccatagttcgaataatgaagacacgtaaaaccctcagccacacgcttctaataactgagctttttcagcagctcaagttcccaatcaagccatcggatatcaagaaaagaatagagagcctaatcgacagggagtacctggagagagacaggagtaacccccagatctacaattacctggcttgacagcgcttgccatcataacatgaaagctcgtcgtcttcatttcattgtcagagaca

SEQ ID NO: 405311 - DNA, 498 bp, Oryza sativa nipponbare
cgcgtccgccacaatcaagagtacataagactccatctattacacgaggataccaaataaaagtttaacaaaacggttaaagaagaacaacagtctaagcctgatggttttcacttttcaggtgagcttcaccggctcgacggaggtcggccggctggtgatggaggcggcggcgaagagcaacctgaagcccgtctcgctcgagctgggtggcaagtctccggtcatcgtgttcgacgacgccgacctcgacacggccgtgaacctggtccacatggcctcctacaccaacaagggtgagatctgcgtcgccggctcgcgaatctatgtccaggaggggatctacgatgcgttcgtgaagaaggcgaccgagatggccaagaaatcggtggtcggagatccgttcaacccgtgagttcatcaaggccctcagattgacaaggagcaatacttgaagatcctcaagtacatcgacatcggttagcgcgaaggcgcgac

SEQ ID NO: 405312 - DNA, 297 bp, Oryza sativa nipponbare
aaaagcacttgcctatgtatgatgagttggccagcaagggcaatgttgaatatattgccggaggagccacccagaactctatcagggttgctcaatggatgcttcaaactcctggtgcaacaagttacatgggttgcattggaaaggataagtttggtgaggagatgaagaagaatgcccaagctgctggtgttactgctcattactacgaggatgaggctgctcccacgggcacatgtgctgtctgtgttgttggtggtgaaagatcactggttgcaaacttatcagcagcaaact

SEQ ID NO: 405313 - DNA, 255 bp, Oryza sativa nipponbare
cccacgcgtccggttgttgtaaagttgcaagagagagatcagttgttgagtgcgtggaagcagagatcaggaagatgctggagaagctgtgggacgacgtggtggccgggcctcgaccggagaccggcctggagaagctccgcaaggccgctacaacccgcccccttgtcatcaacaaagatggcgacggcgaggcgagcggggcggcgtacaagcggacgcagtcgatgccgactaccccgacgacgccggtga

SEQ ID NO: 405314 - DNA, 423 bp, Oryza sativa nipponbare
gccatccttgccttcgcctgcgccttcttccgccgccgcatcgcgtcgtcgaaatggccccgaagaaggacaaggccccgccgccgtgcgtccaagcccgccaagtccggcggtggcaagcagaagaagaagaagtggagcaagggaaagcaaaaggagaaggtgaacaactcggtgctgttcgaccaggccacctacgacaagctgctctccgaggtgcccaagtacaagcagatcaccccctccgtcctctccgagcgcctcaggattaatgggtccctggctaggagggctatgaaggatctgatggatagggggcttatcaggatggtgtcggttcattgcagccaacagatttacacctgggcaacgaacacatgatgttgtcttatccatttgttagtcttatagacctgatgttgt

SEQ ID NO: 405315 - DNA, 508 bp, Oryza sativa nipponbare
ccgaagcacgagagagaggtggaggctctgacgagaagctacaaggagcagtaccgcaactggctgttcgagctcaggtgcggatttgggctcctgatgtatggatttggatctaagaagatgttgcttgaggattttgcgtccacgaccttgagcgatttcaccgtcattgtggttaatggctatctcccttccatcaacttgaagcaagtcatagtgacaatagctgaaatattttgggaacaaacaaaacttaagagaaaacgccagacagcaacaaggtcccagttgcagccatttgcatcccaatcaatagatgatattatctcctttctaaataaccagacatctgacaatggggatgacaatgtatgccttcttattcacaacatcgacggaccttgcctgcgtgacgctgaatcacagcagtacctagctcaagttcgtgctgcccgaagtccatgtgtcgcataagtgacatgtaatgcaccttgtatggacaagaaat

SEQ ID NO: 405316 - DNA, 145 bp, Oryza sativa nipponbare
ggatctttggattgttgagttctttgcaccatggtgtgggcactgcaagaaattggcacctgaatggaaaaaggctgcaaagaacttgaagggccaagtgaagctaggtcatgtggattgtgatgctgaaaagtctttgatgagc

SEQ ID NO: 405317 - DNA, 475 bp, Oryza sativa nipponbare
cggacgcgtggggtctccggccttcctccaccgcgagctccgaccaccaccgacggcgacgatgcaggcggcggcggcgtggaggcgtcacctcctcgacggcaacatctcccccaccaccgcggcggcgatctccgccttcagatccgcctcccagccggcgctcgcaccccaaggattgggtggagcggatggcgcgaggtacatgtccgcgagggcgccggcggtcaaggggacggggcatctcgtccgcaagggaaccggagggaggtcgtctgtgagtggaatcatagctacggtgtttggagctactggatttcttggccgctaccttgtccaacaacttgcaaagatggggtctcaagtgcttgtaccattcagaaggtctgaggattggcaccgacaccctgaagttgatgggtgacctgggtcagatggtcctatgaaatacaatccaagagatggggattcaatt

SEQ ID NO: 405318 - DNA, 526 bp, Oryza sativa nipponbare
  unsure (1)..(526): unsure at all n locations
cccacgcgtccgcttcatttctcccaggaaaaagggctccccgatggcgccgtcgcagccgaagtccgggctcttcgtgggcatcaacaagggccacgtcgtcaccaagcgcgagctgccgcctcgcccgtccgaccgcaaggggaaatccaccaagagggtgacctttgtcaggaacttgatcagggaggttgctggatttgctccctatgagaagcgtatcactgagcttctcaaagttggcaaggacaagcgtgcactgaaggtggcaaagagaaagcttggcacccacaagagggccaagaagaagagagaggagatggctggtgtcctcaggaagatgaggtctgngtgcggtcacgctcacaccgagaagaagaaatagagtatctccaagttcatgaagtccatggcaatattgtcttggtgagtttactcttgtagaaccctactactagaattgcactctattatccagctaaacaatcatggtgttagttctgtgttaaaaaccctcctgtcttgt

SEQ ID NO: 405319 - DNA, 466 bp, Oryza sativa nipponbare
cccacgcgtccgcccacgcgtccgcccacgcgtccgcccacgcgtccggaacaaggagctgcgaggagtggccaagcttgaccccgaaaagaacaccctctactccatgcgatgctaccttgcaactgggatctccaaacgcctcaacactaccacagacacaagagttggacgacctgaggaggatgcagaagccgccgagtagaatgtgcgaacccagtgacatatatgcatcatactgcagcctgcctggatgcaaatattatcgtatcagtggtttgttggcttgaatgggggttaagggagttgcgctgttgctgggcatatataagtttgtgacaagaatcttatccaggttgcttactttgggttgatgataaaagtacgagtagacgtgaataacattaatatatgttggcttattttttgaaataaaatagtcagtctcgggaaccgcggctgcaat

SEQ ID NO: 405320 - DNA, 522 bp, Oryza sativa nipponbare
cgcgtacgcccacgcgtgcgaagccaagaagagggagagcaccaaggacacgcgactagcagaagccgagcgaccgcctcctcgatccatatcttccggtcgagttcttggtcgatctcttccctcctccacctcctcctcacaggttcttggtgtagcttgccactttcaccagcaaagtttcatgtctgatctcgacattcagatcccaactgccttcgatccctttgctgaggccaatgctggagactctggtgcggctgcaggatcaaaggactacgttcatgtacgcatccagcagcgtaatggccgtaagagcctgaccactgtccagggattgaagaaggaattcagctacaacaagatcctcaaagatctcaagaaagagttttgctgcaatggtactgttgtccaggacccagagcttggccaggtcattcaacttcagggtgatcagaggaaaaacgtatcaaattttcttgttcaggccggcattgtgaagaaggacacatcaagattcat

SEQ ID NO: 405321 - DNA, 451 bp, Oryza sativa nipponbare
  unsure (1)..(451): unsure at all n locations
ctcttctcttctctggtggtgtgggtgtgtccctgtctcccctctccttcctcctctcctttcccctcctctcttcccccctctcacaagagagagagcgccagactctccccaggattcagccatgaagggggccaaatccaagggcgccgccaagcccgacgccaagttggctgtgaagagtaagggcgcggagaagcccgccgccaagggcaggaaggggaaggccggcaaggaccccaacaagcccaagagggctccctccgctttcttcgttnttatggaggagttccgtaaggagttcaaggagaagaaccccaagaataaatctgtcgctgctgtangaaaagcagccggtgataggtggaaatccctgaccgaagcggacaaggctccctatgtagccaagccaacaagctcaaggccgatacaacaaggcatngctgctaca

SEQ ID NO: 405322 - DNA, 597 bp, Oryza sativa nipponbare
ctcttctcttctctggtggtgtgggtgtgtccctgtctcccctctccttcctcctctcctttcccctcctctcttcccccctctcacaagagagagagcgccagactctccccaggattcagccatgaagggggccaaatccaagggcgccgccaagcccgacgccaagttggctgtgaagagtaagggcgcggagaagcccgccgccaagggcaggaaggggaaggccggcaaggaccccaacaagcccaagagggctccctccgctttcttcgtttttatggaggagttccgtaaggagttcaaggagaagaaccccaagaataaatctgtcgctgctgtaggaaaagcagccggtgataggtggaaatccctgaccgaagcggacaaggctccctatgtagccaaggccaacaagctcaaggccgagtacaacaaggccattgctgcctacaacaagggcgagagcactgccaagaaggcacccgccaaggaggaagaggaggacgactaggaggaatctgacaagtccaagtccgaggtcaatgatgaggatgacgacgagggcagcgaagaggatgaagacgatgacgagtg

SEQ ID NO: 405323 - DNA, 532 bp, Oryza sativa nipponbare
gtcatgcctggctagatgctgcagctggctcatgattaatactggctgctgcggagctgtggtggggaagagttcatgaatttactcaaggattggggcttggtgcgtgcccggaactgaagagtggaggaggattgtgctcagtgcctcttcagtcagaggtatatgaacaagtgctagttctacagttaatatcagacaagtcattggccgtaagcttcctaaggcaacatgacagagttcaaggttgggagccttgatgcccgagcaacaaagatcagaaatgtccccattgctgtaacaccagaaggattctggtgctgcccgtcgcaggccgtgctccaaaagacaatgaagaaccaaaatcagcaggcaaagcctaaagggggtgcatctcctcttgcatcaaaggccttcttcggttcagagggcgcctaccatttcatcagagagaagagcgcattcaactccgacaaggtctagaatcaattcggatgaacagaagtgcgcgccagcggaaaattcaacaccc

SEQ ID NO: 405324 - DNA, 498 bp, Oryza sativa nipponbare
  unsure (1)..(498): unsure at all n locations
aagacgcgtgggcggacccaaacccgccatgtccaacgtccccttgctcctcctacttgtcgacgctagcgccggcgcgggcgatggagccgcgccggcgtcgaatgcgcgcccgtgcgcctcgccggcggccagcgcctaccccttctgcaacgccaccctcccgttccctgcccgcgcgcgcgccctcgactccctcctcaccctcgacgagaagatagcgcagctctccaacaccgccgcgggcgccccccgcctcggcgtcccgcccttcgagtggtggtcggagtccctccacggcgtctgcgacaacgggcccggcgtcaacttctcctcgggccccggccgttccgcgaccatcttcccccaggtcatcctctccgccgacgcgttcaaccgctcgctgnggcgcgcggcggcacgggctcatccctggggaggcgcgcgctatgcacatcgcctgccaggccgggcttacgttctgggcgcccaacaata

SEQ ID NO: 405325 - DNA, 67 bp, Oryza sativa nipponbare
cccacgcgtccgcccacgcgtccgcccacgcgttcgtggacgcgtgggcggtcgcgtgggcgtcgcg

SEQ ID NO: 405326 - DNA, 366 bp, Oryza sativa nipponbare
gaaattcgtctcctccgctcctagcgccgccgagtcgcggctgaacagaacaagggagggaggggcggcgatctccatctggcgagcagagcaggggaggggatcctcatctggaagaggctcttctttttaatttcagagccttaaccttaatacaagtaacagtttgtttgttccccgatccgcccctgctgctggtacttgggctatttgattcctgcatagtttcagagctagagctagtgttgctctttacagctttggggcggattcgcgatgggcggttgaaaaagtcgcttgctttaacttttggcagaaccaatttgaaggaaaatgggggcctgaagttccttaagcctttccttg

SEQ ID NO: 405327 - DNA, 323 bp, Oryza sativa nipponbare
cccacgcgtccgcggacgcgtgggtgcgccgccgccactcactcccaaaccctaaccccggaggagagggaggagcagccatggccgtgggcaagaacaagaggatctccaagggcaggaagggcagcaagaagaagaccgtcgatcccttttccaagaaggattggtacgacatcaaggcgccgaccgtgttctccgtccgcaacatcggcaagaccctcgtctccaggacccaggggaccaagattgcatctgagggtctcaagcatcgtgtctttgaagtctccttggcggatcttcagaatgacgaggatcaggcttac

SEQ ID NO: 405328 - DNA, 495 bp, Oryza sativa nipponbare
tccgcgggtcgacgcgcacgcgtccggcgggtgtgtccctgtctcccctccttcctcctctcctttcccctcctctcttcccccctctcacaagagagagagagcgccagactctccccaggattcagccatgaagggggccaaatccaagggcgccgccaagcccgacgccaagttggctgtgaagagtaagggcgcggagaagcccgccgccaagggcaggaaggggaaggccggcaaggaccccaacaagcccaagagggctccctccgctttcttcgtttttatggaggagttccgtaaggagttcaaggagaagaaccccaagaataaatctgtcgctgctgtaggaaaagcagccggtgataggtggaaatccctgaccgaagcggacaaggctccctatgtagccaaggccaacaagctcaaggccgagtacaacaaggccattgctgcctacaacaagggcgagagcactgccaagaaggcacccgc

SEQ ID NO: 405329 - DNA, 356 bp, Oryza sativa nipponbare
gctgtttcaattacaattcgtattgtgcttggttttatgcttcttgctctgatatggaagttcgatttcccaccatttatggtcctgatcattgccatcctcaatgacggtaccataatgaccatttcaaaggacagagtaaaaccatccccacaacctgatagctggaagttatctgagatttttgcaactggggtcgtccttggtagttacttggccatgatgacagtcattttcttctgggtagcatacaagactgatttcttcccgagagtgtttcacgttgaaagccttgaaaagactgctcaggatgactttcagaagcttgcatctgctgtctatcttcaagtcagcac

SEQ ID NO: 405330 - DNA, 430 bp, Oryza sativa nipponbare
ctcggaaagcaccaccaccagcacagagccagcgcgagagagagagagagggagaccaaaccccatcccggatctctcgtcgtcggcggcgtctgcgatggcgctctccgaccgctcccgcgagtcgctcctcccgagcttcctctacacctcctccgccgcgaggtccttcgccaccggcgccacccgcttcccctccccggtgtccccagcttccccggctccgggtgccgtcgggggcggcgcgcccatctcgatccaggctcccagggagaagatcgagatgtactcgccggcgttctacgccgcctgcactgccggtgggatcgccagctgcgggctcacccacatggccgtcacgccgctcgacctcgtcaagtgcaacatgcagattgatccagcaaaatacaagagcataacatctgggttt

SEQ ID NO: 405331 - DNA, 276 bp, Oryza sativa nipponbare
ctcacgcgtccgcggacgcgtgggctgacgcgtgggagagtcatagaagctgaggtcagaagcagagatagaatgtctgaatgtggagacgctctatgatgggacggcgagctttaaggtgacgaggctagcccgacgccaagttgactgtgaagagtaagggcgcggagaagccctccgccaagggcaggtaggggaaggccggtaaggaccttaacaagctcaagagggctacatacgctttgttggtttttatggaggagtttcgtaaggagt

SEQ ID NO: 405332 - DNA, 407 bp, Oryza sativa nipponbare
caccacaccacctgctgcacacagctcgatcgagttagcccactagctaccaaccaagctgccggcgagaggtatggcggcgtggcgcggtctggcgttggcagcggtggtggcgtggtgcgtggcggcggcggcggcggcgccagacgcggcgctgcagagcaaatgccagcaggacttcacgaagctgacggactgcatggactacgcgacggggcacgaggaggcgccgtcgtcgacgtgctgcggcgacatgtcggcgacgcagcaggcgcggcccgagtgcctgtgctacatcatccagcaagtgcacggcggccggaacgaggtccagtcgctcggcctccgcttcgaccgccttctcgccatgcccaccgcctgcaagctccccaacgccaacgtcttcc

SEQ ID NO: 405333 - DNA, 406 bp, Oryza sativa nipponbare
cccacgcgtccgggaaaattcttcctgaagggattggagaggttcaggaaatcattgacatgtgtgattatgctgtgggcctaagtcgccagctaaatgggtccatcataccatctgaacgcccgaatcatatgatgatggaggtgtggaatcctcttggagttgttggtgttatcacagcattcaattttccttgtgctgtgctgggttggaatgcctgcatagctttggtatgtggaaactgtgttgtctggaaaggtgctccaactactccgttgatcactattgcaatgactaaaatagttgccagtgtattggagaggaacaacttgccaggctcaatttttacagcattctgtggtggtgctgacattggccaagcaatttcttttgacacaaggatacc

SEQ ID NO: 405334 - DNA, 373 bp, Oryza sativa nipponbare
caacgccatagccgccgaggttgaggtgagccaccgagaggggagagagagcgcgccgagatgtccggcgaggaggaggagaacgcggcggagctcaagatcggggaagagttcttgaaggccaagtgcctgatgaactgcgaggtggcgataatcctggagcacaagtacgagcagatccagcacatgtcggacggggacccgtcgtcgcaggtgtcgcaggtgttcgagaaatcgctgcagtacgtgaagcggttcagccggtacaagaacccggacgcggtgaggcaggtgagggagacgctgagccgctacggcctcgccgagttcgagctctgcaccctcggcaacctctgccccgacaccagcgacg

SEQ ID NO: 405335 - DNA, 382 bp, Oryza sativa nipponbare
ctcaagtctctgtctcgtcgtcctcgcatctccactcgccatgggcaagattaagatcggaatcaacggtttcggaaggatcgggaggctcgtggccagggtggccctccagagcgaggatgtcgagctcgtcgccgtcaacgaccccttcatcaccaccgactacatgacctacatgttcaagtacgataccgtgcacggccaatggaagcacagcgacatcaagatcaaggactccaagactctgctcttgggcgagaagccggtcaccgttttcggcatcaggaaccctgacgagattccgtgggctgaggctggtgctgagtatgtcgtggagtccaccggtgtcttcactgacaaggagaaagctgctgctcacttg

SEQ ID NO: 405336 - DNA, 339 bp, Oryza sativa nipponbare
ggcgcgtgcgccgccgccatcgcggcggggctcgtcgtgttcctcgccgggacgcggaggtacaggttcaagaagctggtggggagccccctgacgcagatcgccgccgtcgtcgtcgccgcgtggcggaagcgccgcctcgagctcccctccgaccccgccatgctctacgacatcgacgtcggcaagctcgccgccgccgaggtcgagctggccgcctcctccaagaagagcaagctcaagcagcgactcccccacaccaagcaattcaggttcttggaccatgcggcgatcaacgacgcgccggacggcgagcagagcaagtggacgctggcgacg

SEQ ID NO: 405337 - DNA, 247 bp, Oryza sativa nipponbare
cccacgcgtgcgtgctagtggccgtatttggtttggtattgcttccgcacatgatttcggaagtcatgattatatcacggaggaacgtgtttatcacaacatttatgctatgaactaggcgcgatgggcaataatctatggatggacgtccggacatctgcatgatgtctgttgacagggaagactcgaataatgcatacaggatcgctatagacgtgatagctattgatgacgcgatcaagcatcc

SEQ ID NO: 405338 - DNA, 462 bp, Oryza sativa nipponbare
  unsure (1)..(462): unsure at all n locations
cccacgcgtccgcagaaagtgcaattagcctgcaggcagctaatcagtagtagcttgctagccatggcttctgcaactaattcttcacttagcttaatgctgctggtggctgcagctatggcgtcagtggcatcggcgcagctctcggcgacgttctatgacacgtcgtgccccaatgcgttgtccaccatcaagagcgtcataacagccgccgtgaacagcgaggctcgcatgggggcgtcgctgctcaggctgcacttccacgactgcttcgtccaagggtgcgacgcgtcagttctgctgtccgggcaggagcagaatgctggcccgaacgtggggtcgctgaggggattcagcgtcatcgacaacgccaaggcgcgggtggaggccatctgcaaccagaccgtctcctgcgccgacatncctcccgtcgccgcccgtgactccgtcgtcgcgctggga

SEQ ID NO: 405339 - DNA, 402 bp, Oryza sativa nipponbare
cttaaaaccctctccttgttcttcccaacttcgcaagacgcgattcaatggtggacgagattggagcggcaaagaaggggtgaagaggtgaatcgcccctctcttttctgttcgtagtcagtatgcctgaatcgagctcagatcctaacaacgggagaggaaagtcatccaagaggaatctcccttcttggatgggttcgaaagacggggaggaaaatccaggcaagaagaagcacatggccacccacgagaaggtgcagaaaggatcggatttctccaaacttttggaatgggtggtctttgtactttcagggtttgtgaaccctgaaagaggcacattgcgctcccaagcattggatatgggagccgagtatcgacccgattggacatcagattgcacac

SEQ ID NO: 405340 - DNA, 451 bp, Oryza sativa nipponbare
caccaacacccactggcccgacaagccccaccatctccgggatgtcacggagaagttcttcgtggcgacgaggggattggggatcgagctgctgcggctgctgtgcgaggggatggggctcaggccggactacttcgagcgcgacctcaccgccggcgatgtcatcatcaacgtcaaccactaccctccatgcccggatccgagcctgacgctgggcttgccgccgcactgcgaccgcaacctcatcaccctgctcctccagggcgacgtcttcggcctccaggtctcctacaatggcgactggatcaacgtcgaccccgtccccgacgccttcgtcgtcaactttggccacctcctcgagattgcgacgaacggagtgctgaagagcatcgagcacagggcgatgacgaactccgcggtggcgaggacgtcggtggcgacgttcatgatg

SEQ ID NO: 405341 - DNA, 460 bp, Oryza sativa nipponbare
gcggcgacatgacgacgacgacgacgaggtttgttcagcttgccgcgtgcgcggcggcgtcgctgctcgccgtggcggcgagtggcgcggcggcgcaaggcgtcgggtcggtcatcacgcaggcggtgttcaacagcatgctgcccaaccgcgacaactcgcagtgcccggcgaggggcttctacacgtacgacgccttcatcgccgccgccaactccttcccggcgttcggcacctccggcggcagcgccgagctcatccggcgggagctcgccgccttcttcggccagaccttccacgagaccaccggtggaacgaggggtagttctgaccaggtccagtggggttactgcttcaaagaggagataaacaaggcgacttctccaccctactatggacgtggcccaattcaattgacagggcaatcgaactaccaagcagccgggaacgcgctggggct

SEQ ID NO: 405342 - DNA, 416 bp, Oryza sativa nipponbare
cccacgcgtccgcgcgtttttcaggaaataagtgatctactacagtatgaagaggctattcaagtggcacaggtaatggatcaatctcttgataatagtaacatggaaatggtgacaagatgcattgagttatctgagaatcgactaagcacagcaccaaaagaagaaaatgcaactagggctgaacctcccccatcattcttctcacgtttttcagcttcctcggtctattcgaagatacttacgttaggtgtatctgtttatgaacgagaccgtaggtatactgatgcaataagagttctaaagagactactcagtactgttgcttcggatagaaagcgaggatattgggctttgagactatctgttgatttggagcacatgaatcgttccaatgagagcctgtcaatagctga

SEQ ID NO: 405343 - DNA, 452 bp, Oryza sativa nipponbare
cccacgcgtccgggcatgttcacattcagcttcttgtggataaggaccctggtttggttgggaatctccttgttgagagattggtgggagcgcatattgatcttgtttcaaaagaagaatatggaaaaattggcagtgtggctttagcggacttgctgaaaaagaagcttttggaagaaggccgaaaaccatatgttattcctgttggtggatcaaactctctaggaacttggtattgttttctgttcaatcctaactattgaaccatttttgcattttcaatttctttgtgcgtttatagcatactttgaatattcctcagggactattattattcatggattggtgtttgccatcagtctatcagaaaagaagagattaggttgtatttgaataaacattagggcatcacttttttttggcaaatttctattggcaatatactatgttgg

SEQ ID NO: 405344 - DNA, 464 bp, Oryza sativa nipponbare
atcaaggatgagggttttgcttcattgtggagaggaaacactgccaatgtgatccgttacttccccacccaggctttgaactttgctttcaaggattacttcaagaggctgttcaacttcaagaaagacaaggatggttactggaagtggtttggtggcaaccttgcctctggtggtgctgctggtgcttcatctctgttttttgtgtactcccttgactatgctaggacaaggttggccaatgatgcgaaggctgccaagggaggaggtgaaaggcagttcaatggccttgtggatgtttaccgcaagactctcaagtcagatggcattgctgggttgtaccgtggatttaacatctcatgtgttggaatcattgtctaccgtggtctgtactttggaatgtatgattctctgaagccagttgtactcactgggtctctccaggacaatttctttgcaagctt

SEQ ID NO: 405345 - DNA, 462 bp, Oryza sativa nipponbare
cccacgcgtccggcagttgcctttcaatatcatctttaacatcaatcccttctgaagaggaacaaaagtaccttcttgaggaaattgatagactgttacctttccaaaggggggtcacatcttgcaagctgttatttggtcttctgcggacagcaatcatcctaaaagccagcccttcttgcgtgtcaaacttggagagacggataggtatgcagcttgataaggctaccctggaagatcttctgattccaaacatctctgagtctgttgaaacgctctatgatgtggattgtgtccacaggattcttgaccatttcttggcaatggatcaagaaactggtggggcttcccctggccttggtgaagatgcacaaatgttagcttcaccatcacttatgcctataacaatggtcgctaagttgattgatggctacctagcttaagttgcaccagatgtcaacc

SEQ ID NO: 405346 - DNA, 460 bp, Oryza sativa nipponbare
  unsure (1)..(460): unsure at all n locations
ctcacacgcattgcagaggagaggcgacaatggaggggaaggaggaggacgtgcggctgggggcgaacaggtactcggagaggcagccgatagggacggcggcgcagggcgccggggacgacaaggactacaaggagccgccgccggcgccgctgttcgagccaggggagctcaagtcgtggtctttctaccgggccgggatcgccgagttcgtcgccaccttcctcttcctctacatcaccatcctcaccgtcatgggggtctccaagtcctcctccaagtgcgccaccgtcggcatccagggcatcgcctggtccttcggaggcatgatcttcgcgctcgtctactgcaccgccggcatcttcggaggacacatcaancccacagttacttttgggctgttcttggccaggaaagctgccctgacccgggccatcttctacatagtgatgcaatgcct

SEQ ID NO: 405347 - DNA, 460 bp, Oryza sativa nipponbare
ggcaccgccgcgtcctccgcgctcttcgccgcgcagctcagcgaccacgcccgatccggcgccctccgacgcggcagcattgtgcagctcagcgagtacgtcatcaacgaagtcggccccagaaggattattgtcattctgaacctggaagttcttgtttcggagtgtgagataattgggaatcctacagcgctttcagaaactggatctcctatcccaaatccgacaagagtagagcaatttaacggagcacctcaatatggtttgatggcagggaactcatcaaatacaaccacaaagcctagtgacaatgttccattgttccaaaattcgatggcaggaaactcctctaactttgccactaggcccagtgacaaagttccggtcttccaaccaacagtccagccatcttatcgccctgcacctaattacaaaaaccatggagcaatcatgaaaaatg

SEQ ID NO: 405348 - DNA, 459 bp, Oryza sativa nipponbare
cggacgcgtgggcggacgcgtgggctgcgaggtctttacttctgatccggccgtcgttgagcatgtcctcaagaacagcttcagtaaatacagcaagggggacttcctcactacagccatgaaggatctctttggagatggaatttttgcaacagatggggatatgtggcgtcatcagaggaagctagcgagctacgaattctcaaccaaagtgttacgtgacttcagcagtgacacattcagaaggaatgctgcaaaactggcagagaagatctcatgtgcagcagctaacagaattagcataaatattcaggatcttttgatgagagcaactatggactcaatctttaaagtggggtttggttttgagctcaacacactatctggatcagatgaatctggcattcaattcagcaaggcctttgatgaggcaaactcccttgtttactaccgatttgt

SEQ ID NO: 405349 - DNA, 463 bp, Oryza sativa nipponbare
cggacgcgtgggcggacgcgtgggcgcaaacaaactagggtttttaggcgtcagctcgccgagggcaggaaggagagcgcgcgaggtcgaggagaagcgaactccgccgccatggcgtccaccaaggtgcagaggattatgacccagcccatcaacctcatcttccgcttcctccagagtaaagcgcgcatccagatctggctcttcgagcagaaggacctccggattgagggcagaatcatcggctttgacgaatacatgaatttggtcttggatgaagctgaggagatcaacataaagaaggacactagaaaatctctgggccggattctcttaaaaggagacaacattacattaatgatgaacacgggaaagtgataacagctcgccgtgccctccattgcaagaattactgataacctatctatcccaaccttctatgaagttagaatttgagcctgta

SEQ ID NO: 405350 - DNA, 434 bp, Oryza sativa nipponbare
catccatctcatcatcagcaaccaattcgcaccgatcgatcgatcgatccagcaactagatcaacagtactagctaggaagcatggcccgtgcacagttggtgttggtcgccctggtggcagctctgctcctcgccgccccgcacgccgccgtggccatcacctgcggccaggtcaactccgccgtcgggccctgcctgacctacgcccgcggcggcgccgggccgtcggcggcctgctgcagcggcgtgaggagcctcaaggcggcagcaagcacgaccgcagaccggcgcaccgcctgcaactgcctcaagaacgcggcccgcggcatcaaagggctcaacgccggcaacgccgccagcattcccttcaagtgcggcgtcagcgtcccctacaccatcagcgctttcatcgactgcttcagggtgagctgag

SEQ ID NO: 405351 - DNA, 443 bp, Oryza sativa nipponbare
ctttccgatcgataaatactactcccgcttccggtagctactagcacggcggtggcagtggcagtggcagtggcagtgggagttccagggacgtagagcagcgcggtgcggattgtgcggggaggcgcgggaggaggaggaggaggaggggaagatggagagcaccatgaaggggatccgcggggacaacgcgccgtgcgtgctggacctggacgacgcggcgacggtggggggcggcgtcggggacacctacggcgaggactgcgccaccgaggagcagctcgtcacgccgtggaccgtctccgtcgccagtggttacaatttgctgagggatcctcgctacaacaaggggcttgccttcaacgaaagggagcgcgaaacgcactaactccgtgggcttctgccaccagcaatcgtatcccaggagctccaggaaaggaaaa

SEQ ID NO: 405352 - DNA, 455 bp, Oryza sativa nipponbare
  unsure (1)..(455): unsure at all n locations
cccacgcgtccgcccacgcgtccgcgctttttaattccgatggccccgccgccgccggcccgcgtataaaccacagtccgccccgcccccgcccgacgaatgcaccaccgcctcctcctccgccgcggcgcgatgcccgtccccccgccgctgcccccgcggacgccgccgccgggggtcgcgcgccccttcgcctccctccctcccncaccgcctctccagtcacgcagggaggtgcatgtttggtatgtttgccctgatgagctgaatgatcactcccacctggatatgtacatggaactcctttctccctccgaaaggaagaacgcgctgtctatgaacgggccgaggctgcagaaagatgctatgttgtcgcgtgcattgctgcgcactaccctctcaagatatacaaattctaaaattgatccaagatcatttgagtttaagaagaataa

SEQ ID NO: 405353 - DNA, 384 bp, Oryza sativa nipponbare
cgtgttgttagcttcgttttcttcttgtttcatcaatccaaggagtgtggaaggccacacgccaagattatatctatgctaatttgattagcagtaggattaattcagtggctagcgtagcttgattagttggtttaattagttggagagtaaagaagatgttgggagtgttcagcggcgacgtggtggaggtgccggcggagctggtggccgccggcagccggacgccgtcgccgaagacgcgggcgtcggagctggtcagccgcttcctcggcggcgccgagccggccgtgtccgtgcagctcggcgacctcggccacctcgcctactcccatgccaaccaagccctcctccgcccaaggtcatttgcagcaaaagatgaca

SEQ ID NO: 405354 - DNA, 420 bp, Oryza sativa nipponbare
caataatccatcctcgaatcctcgatttatcatggagataaactcggcagccaccctcaccctcgtctctctcctcaccctccccattcttctggcgttgctgacccgcaagtcgtcgtcaaagaagaggaggcctccagggccatggaacctccccttggtcggcggcctcctccacctcctccggtcgcatccgcaggtcgcgctccgcgagctcgccagcaagtacggcccggtgatgttcctccggatggggcagatcgacacggtcgtcgtctcatcgccggcggcggcgcaagaagtgctccgcgacaaggacgtcatgttcgcgtcgcggccgagcctcctcgtcttcgagatcttctgctacgacaaccctcgacgtcggcttcgcgccctacggcgcctactggcggatgc

SEQ ID NO: 405355 - DNA, 362 bp, Oryza sativa nipponbare
cccacgcgtccgcccacgcgtccgggaggatatacccaacgagggagaggttgaggagagatgccggagctgccggaggtggaggtggcgcgacgggcgctggaggagcactgcgtcgggaagaggatcgtgcggtgctcggctgcagatgacaccaaggtcatcgacggcgtcgccccgccgcggctggaggcagcgcttgtcgggaggaccatctccgctgctcgccgcaagggcaagaatctgtggcttgcgctagattctccgcccttcccttccttccagttcggaatggctggagctatttacatcaagggtgtggaactgagcaaatacaaaaggtctgcagtgagcccgactga

SEQ ID NO: 405356 - DNA, 374 bp, Oryza sativa nipponbare
atctacttcactgaccctgttgacgagtacttgatgcaatacctcatggactacgaggacaagaagttccagaacgtctccaaggagggtctcaaactcggcaaggactctaagctcaaggacctcaaggagtccttcaaggagctgaccgactggtggaagaaggctcttgacaccgagagcgtggactcggtgaagatcagcaaccggctgagcgacaccccctgcgtggtggtgacatccaagtacgggtggagcgccaacatggagaagatcatgcagtcacagaccctctcggatgccagcaagcaggcgtacatgcgcggcaagagggtactcgagatcaaccccaggcaccccatcatcaaggaact

SEQ ID NO: 405357 - DNA, 447 bp, Oryza sativa nipponbare
cggacgcgtgggcggcaccaaggtgacgagggaggtgctggaggccgggcgcgggcggctgcgcgtggtgggccgcgccggcgtcgggatcgacaacgtcgacctccaggccgccaccgaggccggctgcctcgtcgtcaacgcccccacctccaacaccgtcgccgccgccgagcacggcatcgcgctcctcgcctccatggcgcgcaacgtctcccaggccgacgccgccctcaaggccgggaaatggcaaagaaccaagtacgttggagtttctctggtcgggaagacacttgcggtaatgggctttggcaaggttggttcagaggtagccaggcgggcgaaagggctcggtatgcatgtgattgctcatgatccgtacgcccctgccgatagggctcgtgccattggagctgaactggtctctttcgatgaggccattggcag

SEQ ID NO: 405358 - DNA, 455 bp, Oryza sativa nipponbare
cccacgcgtccgcgaagagctactcagcttaaaaatgaagcgattttcaaagcttttagtagcgaaagttcaaagatgcgcacactgtcggctgtggctgattccttgaaacatggaagtgtttttcacatttgttacaacccaagggctactgcttctgagtacgttgttccatattggaagttcgtgaaaagcttcaaccatccagtttgtattggaatgaggttcaagtttcattttgagagtgaagatgttaatgagaggcgttctggaatgattgccggtgttagtgaagtagaccccatcagatggcctggttcaaagtggagaagccttctggttcgatgggaggatgctactgactgcaacagccaaaatagagtatctccatgggagattgagatagttgggggtcaatctctgttgctcattctctgtcggcatccagttctaaa

SEQ ID NO: 405359 - DNA, 433 bp, Oryza sativa nipponbare
cggacgcgtggggcactctgctgggccgacactgacactgagagaagaatgcacaggtgagcaagatcctcatggagcagaagcttatggaaaaggacagctccaagaggcagcaacagattgataatgaaatgttccttgcccgagagaaagctcttacagatgcgaactattacaggataacgaaggaagcagaggccaacaggcttaaacttacaccggagtaccttgagctgaggttcattgaatcaatcgccaataactcgaagatattctttggtgaaaagattccaaacatgatcatggatcaaaggatgcttaggaattacctcgacaatggttccaccaaggaccatttggaaatatagcagttgtctctgtgaattgcaaagaacattggcttgttttctgatcccacggggaaattaggatt

SEQ ID NO: 405360 - DNA, 461 bp, Oryza sativa nipponbare
cccacgcgtccgcccacgcgtccgcagaaacctcacaaccctagttcggcgagagccggaagctatcaagctaagcgagatacgaaggaaagcggttcttgcagcagaaatttcaaggctttgccgccaaatttggcccaagtttggctcaaaatccaccattgcaggcccctgcccctcgggaggctaaagcgagacgaaggccatgtcgcggcggtctgggtatcgcgcggcggagcaggaagaccgccaggttgatctgatgggcgactccgacttcgacgacgacgagtacggacaacctatagagtccaaagaagatacgtcggcggtggatgtgaagaaagggaaggacatacaaggaattccatgggataatttgagcttctcaagggacaggtataggaagactaggatggtacagtacgcgaactttgaaaatgtacccaactccgggaaaa

SEQ ID NO: 405361 - DNA, 343 bp, Oryza sativa nipponbare
cggacgcgtgggcgcgggtgctggtggccctggaggaggccggcgccgagtacgaggtcgttccgatgagcaggtccggcggcgaccaccgccggccggagcacctcgccagaaacccgttcggtgagattccagtactggaggatggcgacctgacgctctatcaatcgcgagcaatcgctaggtacatctttcgcaagtacaaaccagagttcctgggactcggagaaggtggaagcctggaggagtcggcaatggtggacgtgtggctggacgtggaagcccaccagcacgaggccgccgtgaggcccatcctgtggcactgcatcatcaacaagttcga

SEQ ID NO: 405362 - DNA, 428 bp, Oryza sativa nipponbare
cccacgcgtccggcgcgcggagctgagcgacgtgctcggcgggaaggaggccgtggaggaggccgacgcggcgaggctgccctacctccaggccgtgctgaaggaggccatgaggctgcacccggtgggcgcgctgctgctgccgcacttcgccgcggaggacggcgtggagatcggcggctacgcggtgccgaggggctccacggtgctcttcaacgcgtgggcgatcatgcgcgacccggcggcgtgggagaggcccgacgagttcgtgccggagcgcttcctggggaggtcacccccgctggacttcagggggaaggacgtggagttcatgccggtcgggtcccggaggcggctgggccccgggctgccgctggccgaacgcgtcgtgccggtcattctggcgtcgatgctgcacacgttcgagt

SEQ ID NO: 405363 - DNA, 452 bp, Oryza sativa nipponbare
gttcctccctgatgtacgaagctcccctcggctacagcattgaggacctccgacctgccggcggcatcaagaagttccgctctgctgcttactccaactgcgcgaggaagccctcttgatagcccccttggctaccttgacctagtagtttagttactcctctgaattctcgttttgggctttcttacatctctctggctagctgcttcccagtgaccgggaaggtcatcagtcctgcttcctttcttcctcatctctggcatcgtccttcgaaacaatggcagtcctgtcagttgctgactctccaccggtctcggcgatcgggtttgagggatatgagaaacgcctcgagatcactttctccgaagcgcctgtctttgctgaccccaatggcaaggggttgcgtgcactggcacgtgctcagattgactcttgtcttgatctggcgaggg

SEQ ID NO: 405364 - DNA, 446 bp, Oryza sativa nipponbare
cggacgcgtgggcgagacctcgaagctgtgaaaagaccagaatacccctcatccccaaaagccccaaacccgaggaggcgagaggaggaggaggaggagctcgtcggcggcgagcgatggcggcggcggtggcggagctgtgggagacgctgaagcaggcgatcgtggcgtacacggggctgtcgccggcggcgttcttcaccgccgtggcggcggcggcggcgctgtaccacgtcgtgtcggggatcttcgcggggccgcccccgccgccgccgcggccgagggacgagcccgaggcggagccgctcccgccgcccgtgcagctcggggaggtctccgaggaggagctccgccagtacgacgggtccgatcccaagaagcccctcctcatggccatcaagggccagatctatgacgtcacgcagagcatgatgttctatggacct

SEQ ID NO: 405365 - DNA, 460 bp, Oryza sativa nipponbare
cccacgcgtccggtgggtgtgtccctgtctcccctccttcctcctctcctttcccctcctctcttcccccctctcacaagagagagagagcgccagactctccccaggattcagccatgaagggggccaaatccaagggcgccgccaagcccgacgccaagttggctgtgaagagtaagggcgcggagaagcccgccgccaagggcaggaaggggaaggccggcaaggaccccaacaagcccaagagggctccctccgctttcttcgtttttatggaggagttccgtaaggagttcaaggagaagaaccccaagaataaatctgtcgctgctgtaggaaaagcaaccggtgataggtggaaatccctgaccgaagcggacaaggctccctatgtagccaaggccaacaagctcaagggcgagtacaacaaggccattgctgcctacaacaagggcgagag

SEQ ID NO: 405366 - DNA, 433 bp, Oryza sativa nipponbare
caaaaccctagccttgtcgcctcgtcggcggatggcgccgccggcgccggcgacggcgcggcgcccgatggcggccgtccgctgctccgcggcgaagaggagctacaacgtcacgctcctccccggtgacggcatcggcccggaggtggtcgccgtcgccaaggacgtcctctccctcgccggcgctctcgaaggcgtcgagttccgcttccaggagaagctgatgggcggcgcggcggtggatgcgtacggcgtgccgctcccggaggagacgctcgcggcggcgcaggcgtcggacgccgtcctcctcggcgccatagggaaggtataagtgggataacaatgagaagcacctcaagccagaaactgggttgctccagaaacgcgctgggcttggcgtctttgctaatctgaggccagctgcagtggtgcc

SEQ ID NO: 405367 - DNA, 428 bp, Oryza sativa nipponbare
ctggtggtcttgattctgtgcttacagccacaattactcctgctggaatgcatgacaatcaagcgaagccgcagacactgttgttgaaacaaagcgttaagctcttagaaagtttgcaggcctgctggagtgacgatgttcttgttttctcccactctgataagttcctccgcttgtctttgcagcttatttcaaggtatacaacatggctttcttctggtttggctgcacggaaagcttctgatgggggctcaagttctcctgcggatgctgaatgggcactatctgtacctgtggaggatttcatttatgtaatgcatgatgtaaatgctgtaataagcgagctttttgaatcaggccaatttgtggaacatgtaaaccaattgctagcatcatgcccaaccgaagtacttggtctcgtgaaacac

SEQ ID NO: 405368 - DNA, 450 bp, Oryza sativa nipponbare
cccacgcgtccggagagagggattcattgaatcatctccggcacaggattgtgacctctgctgcaaaatgcctgatttctgccgagagtgctgctgtgttttctgccgcagggttgttgactattcctttggaggttatagctacattaagtgtgaggcagtcctagaagagaacaaaatatgtgggcatattgggcaccttgattgtgctctccgtacttttatggctggaacagttggaggatgtattgacttggacatgcagtattgttgcagacgttgtgataacaaaacgaacttgatgctgcacgtagaaaaattcttggaaatatgccaatctcttcaatcaagggatgacattgaacctatcctgaatactggcttatgcctagtgcgtggttcaagacaaacaagagcaaaaagcttggagagcattatgagatcagcaat

SEQ ID NO: 405369 - DNA, 458 bp, Oryza sativa nipponbare
ggactacccgctgagtttaagcatataaataagcggaggagaagaaacacgagaccagttggctgatgcactataccaaaagggtcttgcattggcagagattgagtcgctaaagactgatgagtcaactgaggcatctgctaaagatgtttttgaagagaattacaaagaattaattaaatgggttgatgccaaaactacaaaatacggctctttaactgtcctgcgtgagaggcgctgtggaagacttggcactgcattgaaggttctgaatgacatgattcaagatgactctgagcaaccaaagaaaagactttatgatttgaagatccaattgattgaggagataggatgggtccatgtatcggcctacgagaagcagtggatgcatgtccgatttcccccatctttgccttcgttttaattgttaggactatttttcacatcattttcatcac

SEQ ID NO: 405370 - DNA, 463 bp, Oryza sativa nipponbare
cgagtttcgagaggagggaggggggacaaggaggaggagcgcaccaccctctcggagaggtcgcctccgttcttgcatcgttttctttggatagggcagcgctttgacagctttggggagttagtcgagaagtgtgcacatggagtccaacagtggtgaaatcgaggagttgccacctcccccacctttgccaccaaatgctgagccaattaaaactgatgatacaaaaaagttatcaaaacctaagagggccttgatggctcgctctggttgtggcaaaaaagggcagccgatacagctgctgacgaaccacttcaaggtttcactgaaggcagcagacgaatttttccatcactactatgttaatctgaagtatgaggatgatagaccagtggatggaaagggcataggtagaaaggtgctggacaaactccaacagacctatgcgtctgagctggcaaat

SEQ ID NO: 405371 - DNA, 444 bp, Oryza sativa nipponbare
ataaagtcttatagataagccaaagtttttcatttctgttggctaacaaggggaggcaaaaattgagttgcgctctcaagagtgtacaatgcttacacttgttggcacaagagattcttttgctcagtcacaggcacaactttgtgctggcatgcagctcaaggctccaacaagggcgaaatattcccaaggctttatgcccataggagaatccgacgcatactgtgctctaatacctggcttacctgaagatctcgcaaagatatgtcttgctcttgttcctcggagccagttccctgttatgggttcagtgtccaagaggtggatgtcattcctcgagagtaaggaattcattgctgtaaggaaagaggttgggaagcttgaggagtgggtgtatgtcctgactgctgatgctggatcaaaggggtcccattgggaagtttt

SEQ ID NO: 405372 - DNA, 257 bp, Oryza sativa nipponbare
cattcatcctatcaaacattgcaagcatactggatggtcttcaagaaactggagtccaagcatgtggttgcgccggagaaggtcgtggcggcgcttaagctgatggagcaccggtaccgcgccaaggatttcacgaccagccaggacacgagcctggttgcttcaagcacctactatctcacccacgttgacttcatgtacaggagggtctacgcccgcaaaggggaaaccgtcaccgaagtgttcaatgggcattg

SEQ ID NO: 405373 - DNA, 384 bp, Oryza sativa nipponbare
  unsure (1)..(384): unsure at all n locations
caactccatttcctcctccgccgccgcctcctcctccctgcttgtcctcgccttgctgccgccccccgccgcggcgaccgagcacgcgcacgagcaggagccatggatgaggagtacgacgtgatcgtgctcgggacgggcctcaaggagtgcatcctcagcggcctcctctccgtcgacggcctcaaggtgttgcacatggatagaaatgactactatggaggggattccacctcgctcaaccttaaccagctgtggaagaggtttagaggggaagacaaacccncagctcatctgggtgcaagcagagattacaatgtagatatggtcccaaagtttatgatggcaaatggcacattggtaaagaccctgattcacactgat

SEQ ID NO: 405374 - DNA, 453 bp, Oryza sativa nipponbare
atcgccaccagatcgccatggagacgctggcgagcgccatgcggcgggagaaccgccgcttcaagcccccctcctcctcctccgcctccgcctccgccgccctctcctcggggagggtccccctcgtcatggccttcctctcctgcctcgcgtggctctacgtcgccggccggctgtggcaggacgcgcagacgcggatgatcctgtctggtctcctcgagaagagctccggcaatcttccgaaggtgctgtcggtggaggacaagctgaggaatctaggatgcattggaattgggaggaagattgcggaggcagaaatggaccttacaaaggcgaagagcgaggggtatctgggggggaatggaactgctactggtagttctgacaagaaaaaacttcttgctggtattggagtttacactggttttggttcccggctcaagaggaacacct

SEQ ID NO: 405375 - DNA, 412 bp, Oryza sativa nipponbare
cccacgcgtccgcccacgcgtccgcccacgcgtccgcaccaacagggaggtaggctgcagcttatcatggcggcaaggagggctgcttcctccctcctctctcgcggcctcatcgcgaggccttctgctgcctcctccactggcgactccgctatccttggagcacgctcagcacggggcttcttgcctggatcacttcacagattcagcgctgcaccggccgccgctgccaccgccgcagccactgaggagccgatccagccgccggtggacgtgaagtacaccaagctcctcatcaatggcaacttcgtcgatgcagcatctgggaagacgttcgcgacggtggatccccgcaccggcgatgtcattgcccgcgtggcccgaggcgacacggaagacggtaaccgcgccg

SEQ ID NO: 405376 - DNA, 427 bp, Oryza sativa nipponbare
aaattactggtgctgcaaactctaggatgccattgcctgttgatccttctgtagaagagcccatatttgtcaatgcaaagcaatacaatgcgatccttagaagaaggcaaacgcgtgcaaaattggaggcccaaaataaggcggtgaaaggtcggaagccttacctccatgaatctcgacatcatcatgctatgaagcgagcccgtggatcaggtggtcggttccttaccaaaaaggagctgctggaacagcagcagcagcagcagcagcagaagccaccaccggcatcagctcagtctccaacaagtagagccagaacgaagccgggtgccgttgtccttggcaagaacctgggcccagaaaacaacacattctgctcgccatcgacaccgacaggcttcgagatcttcaacatcttatttggggg

SEQ ID NO: 405377 - DNA, 252 bp, Oryza sativa nipponbare
gctgactgaacgaagcttacctagctactcgatcgatcatccatcagtctagatagatatggcggctttgaacttcaaggcggtggccgccgtgatggtgatggcgatggtggtggcggcgccgggggcgtcggcggcgataacgtgcgggcaggtggggtcggcgatcgcgccgtgcatctcttacgtgacggggaggggtggcctcacccagggatgctgcaacggcgtcaaggggcttgaacaacgccg

SEQ ID NO: 405378 - DNA, 352 bp, Oryza sativa nipponbare
cccacgcgtccgcggacgcgtgggcgcgaacccactcccagccgccgccgccgccacctgcaaccgagggctcgccatgccgccgaagctcgacccgacgcaggtggtggatgtgttcgtccgcgtgaccggaggcgaggtgggcgcggcgtcgtcccttgcccccaagatcggccctctcggtctctcccccaagaagatcggtgaggacatcgccaaggagacggccaaggactggaagggcctccgcgtcaccgtcaagctcaccgtccagaaccgtcaggcgaaggtgtccgtcgtcccctccgccgcggcgctcgtcatcaaggccctcaaggagcccgagcgggac

SEQ ID NO: 405379 - DNA, 295 bp, Oryza sativa nipponbare
gtttcttgctccatccatctatccatccaaggagtgtggaacgccacacgtattttttttttatctatgctaatctgatcattagcagaggagagttttagcagtaggattggattaaattggagtagtttcatagtttgtgtgtagtgatcttaattagctttgattagacagacagtacagtagagtagaggatgttggctgtgttcagcggcgcggtggtggaggtgccggcggagctggtggccgccggcagccggacgccgtcagccaatacgcgggcgtcagagctggt

SEQ ID NO: 405380 - DNA, 455 bp, Oryza sativa nipponbare
ccagaatttggtgctgcagctgatggtgatgctgatcgcaacatgattctgggtaaaagattcttcgtaacaccttcagattcggttgccattattgcagccaatgctgttcagtcgattccttacttttcttctggccttaagggagttgccaggagcatgcccacatcagctgcccttgatgttgtcgctaagaatttgaatctcaagttctttgaggtgcctactgggtggaaattttttgggaacttgatggatgctggaatgtgctcaatttgtggtgaagaaagctttggcactggttctgatcacattcgtgagaaagatggtatttgggctgttctagcatggttatctattcttgctttcaagaacaaggacaaccttggaggcgataagcttgttactggtgaagatattgttcgccagcactggggtacttatggtcgccatta

SEQ ID NO: 405381 - DNA, 322 bp, Oryza sativa nipponbare
gacccacgcgtccggcgtcctgttgactgaacgaagcttacctagcctactcgatcgatcatccatcagtctagatagatgtggcggctttgaacttcaaggcggtggccgccgtgatggtgatggcgatggtggtggcggcgccgggggcgtcggcggcgataacgtgcgggcaggtggggtcggcgatcgcgccgtgcatctcttacgtgacggggaggggtggcctcacccagggatgctgcaacggcgtcaaggggctgaacaacgccgtccgcaccaccgttgaccgtcaggctgtctgtcggttctttaaagattt

SEQ ID NO: 405382 - DNA, 382 bp, Oryza sativa nipponbare
gtctcatcccaatgagttgattgcactcttctctaggtatgttaaccagggaaagggaatgctccagcgtcaccagctgcttgcggagttcgatgccttgatcgaagctgacaaagagaaatatgctccctttgaagacattctccgggctgctcaggaagccattgtgctgccgccctgggttgcactggccatcaggccaaagcctggtgtctgggactacattcgggtgaatgtaagtgagttggcagtggaagagcttaatggttctgagtacttggcattcaaaggaccacttggtggtggacacaccaacaagcactttggtcttgagcctggttttgaagcctttaatggcttctttccgggcccggtcatgttc

SEQ ID NO: 405383 - DNA, 375 bp, Oryza sativa nipponbare
cccaaccagagagcttgcggaagcgggggtttggtgcgggcgcgcgcgtgtgaggggggagagaaggccaggaggaggcgacgccgtcgcccgagggaggcaaaaatccgatcctcctcctgccctgctcgctcgctcgctcgcctgcgctgcgcgcacttggccccgtcccgtccgttcccgctcgccaggcatagaaagatggtgctctgggtcttcggctatggctccctgatctggaaccccggattcgacttcgatgagaagatcctgggcttcgtcaagggctacaaacgcaccttcaatcttgcttgcattgaccattggggcacgcccgaacattctgccaagacctggacacctgaattccaccag

SEQ ID NO: 405384 - DNA, 129 bp, Oryza sativa nipponbare
cggacgcgtgggcggacgcgtgggcggacgcgtgggtgccgctggagctgaagctgctgccgctggagctgaagctgcagctgctcctctcgctaaaaaccaacccccaaccgcttccctttcttcttc

SEQ ID NO: 405385 - DNA, 399 bp, Oryza sativa nipponbare
gaatctcactccccaccgccgccgccgcccccactccaagcacccgctctaccgtcgccggagaagaagaggaggagcccggcatggggcgcgtgcgcacgaagacggtgaagaagacgtctcggcaggtgatcgagaagtactactcgcggatgaccctggacttccacacgaacaagaaggtgctggaggaggtgtcgatcctgccgtcgaagcgcctccgcaacaaggtggccggcttcagcacccacctgatgcgccgcatccagcgcggccccgtccgcggcatctccctcaagctccaggaggaggagcgcgagcgccgcatggacttcgtcccggacaggtcggcgctcgaggtcgacgacatccgcgtcgacaaggagaccctcgacatgc

SEQ ID NO: 405386 - DNA, 440 bp, Oryza sativa nipponbare
  unsure (1)..(440): unsure at all n locations
gtcgtcttctccccttcttctcctcctcctcctcgattcggagctccacccgcagccatggctaagaactaccccgtcgtgagcgccgagtaccaggaggccgtcgagaaggccaggcagaagctgcgcgccctcatcgccgagaagagctgcgcccctctcatgctccgcctcgcgtggcactcggcggggacgttcgacgtgtcgtcgaagaccgggggcccgttcgggacgatgaagaccccggcggagctgtcgcacgccgccaacgcggngctggacatcgcggtgcggatgctcgagcccatcaaggaggagatacccaccatctnctacgccgatttctaccagcttgccggagttgtggccgtcgaggtgtccggtggacctgccgtccccttccacccaggaagggaggacaaacctgcacccccacctga

SEQ ID NO: 405387 - DNA, 368 bp, Oryza sativa nipponbare
ggaagatgaagaacaatgccatcgtttgcaacattggtcactttgacaatgagattgacatgctcggccttgagacctaccctggtgtcaagcgcatcaccatcaagcctcagaccgaccgctgggtcttccctgagaccaacactggcatcattgtccttgctgagggtcgtctcatgaaccttgggtgcgctactggccaccccagttttgtcatgtcctgctcattcactaaccaggtcattgctcagcttgagctgtggaaagagaagagcactggcaagtacgagaagaaggtgtacgttcttcccaagcacctcgacgagaaggtggccgccctccacttgggcaagcttggtgccaggctg

SEQ ID NO: 405388 - DNA, 427 bp, Oryza sativa nipponbare
  unsure (1)..(427): unsure at all n locations
tcttcgccggcgccgccgcccatggcctcttccatggccgccaccgccaccctctcgccgccggttttatccgccgagaggccgactgtccgcggcggcctcttcttgcccccttcgccggcgacctcccgctctctccgcctccaatccgcccgccgctgcggcatctcgccggcgaccaggaagccacgctccttgcctcgagcagccaaggttgttgtggctgtgaaggctgatcctttgaaggtcatgatagcaggggctccagcatctggaaagggaacgcagtgtgagctcatcaagagcaaatatggtctggtgcacatttctgctgggagatttgctagggcaganattgctgcangcagtgagaatgggaagcgagctaaggaatntatggagaagggtcagctggttcctgatgaga

SEQ ID NO: 405389 - DNA, 461 bp, Oryza sativa nipponbare
cccacgcgtccgcggacgcgtgggcagctaccggcggcgcagccacacagcagcagcaggtgaggaggagaggagacccgccgccgccgccgccatgggtatctcgcgtgattccatgcacaagcgccgcgccacgggcggcaagcagaaggcatggcgcaaaaagcgaaagtatgagctcggaaggcagcctgccaacaccaagctgtcaagcaacaagacagtgaggagggtgcgtgtccgtggaggtaatgtgaaatggagggccctccgtttggatactggcaactactcatggggaagtgaggccgtgacccgcaagacccgtatccttgatgtggtctacaatgcatccaacaatgagcttgtcaggactcagacccttgtaaagagtgctattgtgcaagttgatgctgcccccttcaagcagtggtacctcactcactatggagtggatattg

SEQ ID NO: 405390 - DNA, 463 bp, Oryza sativa nipponbare
acgagcaccaccaccactcaccacgcgccacccacccccgcaccgcacgccaagatccgaccgccgccgccgccgccgccggagtagggagagggagaggagatggggcggagggcggggtcctacccctactacgtggaggcggcgccgccggtggacgtgaacaagaacacggagtggttcatgtaccccggggtgtggaccacctacatcctcctcctcttcttcgcctggctgctcgtcctctccgtctccgcctgctcccccgggatcgcgtggaccgtcgtcaacctcgcccacttcgccatcacttatcacttcttccattggaagaagggaactccatttgctgctgatgaccaaggcatctacaacagactaacttggtgggaacaaattgataacgggcagcaacttactcgtaataggaagttcttgactgtggtacctgtggtgctgtacc

SEQ ID NO: 405391 - DNA, 370 bp, Oryza sativa nipponbare
cccacgcgtccgcgctcgtcttcctcccaccttccgccgccgccgccgtcgctctcctcttcgctccgccgcgcaggtaagaaggagaggaggagaaaatggtgaagcacaacaacgttatccccaatggccacttcaagaagcactggcagaactatgtcaagacatggttcaaccagcccgcccgcaagcagaggcgccgcattgctcgccagaagaaggctgtgaagatcttccccccgccaacatctggccctcttcgacccattgttcagtgccaaactttgaagtacaacatgaagtcgagggctgggagaggctttacccttgaggagctgaaggctgcgggcatccccaagaagtatgcttc

SEQ ID NO: 405392 - DNA, 392 bp, Oryza sativa nipponbare
cccacgcgtccggccgccgcagccgcggaggcgacccctcccccgccgccgccaagatgcagatcttcgtgaagaccctgacggggaagaccatcacgctggaggtggagtcctcggacaccatcgacaacgtgaaggccaagatccaggacaaggaagggatccccccggaccagcagcgcctcatcttcgccggcaagcagctcgaggatggccgcaccctcgccgactacaacatccagaaggagtccaccctccacctcgtgctccgcctccgcggcggcgccaagaagcgcaagaagaagacgtacaccaagcccaagaagatcaagcacaagcacaagaaggtgaagctcgccgtgctccagttctacaaggtggacgacgccacc

SEQ ID NO: 405393 - DNA, 467 bp, Oryza sativa nipponbare; identical to SEQ ID NO: 391573

SEQ ID NO: 405394 - DNA, 379 bp, Oryza sativa nipponbare
cctcgcaaggcgtcttcagactcttgtcttcaaggctggcatggccaagtccatccaccatgctcgtgtcctgatcaggcaacgccacatcagggtcggcaggcaaattgtcaacatcccgtcgttcatggtgagggttgagtctgagaagcacattgacttctcactgacaagcccattcggtggaggcccccctggtagggtgaagaggaagaaccagaagaaggcaagcggcggtggcggtgacggtgaggaggaagatgaagaatgagaaaagaagtttgcaactagttgtttccttaatgatcataaaactttctgtgctgagtaactgggcccaaattctgtagcttgcctatctggatttcagaattcaagc

SEQ ID NO: 405395 - DNA, 452 bp, Oryza sativa nipponbare
gtcggtcgatccagctgctggggatgagtacttagttagctcggagctagctactaatggatgatatacttatgctagttagttaaatacagttattagttagttgtaggttgcatctatcatatctccatcggttaattaattgattgatagctagattatcaacaattaatgagcatggtggtgcagcaggagcaggaggtggtgttcgacgcggcggtgctgagcgggcagacggagatcccgtcgcagttcatatggccggcggaggagagccccgggtcggtggcggtggaggagctggaggtggcgctgatcgacgtgggggcgggggcggagaggtcgtcggtggtccggcaggtgggggaggcgtgcgagaggcacggcttcttcctggtggttaaccacggcatcgaggcggcgctgctggaggaggcgcaccggtgcatgga

SEQ ID NO: 405396 - DNA, 459 bp, Oryza sativa nipponbare
cccacgcgtccgcccacgcgtccgcaattcttgagctcaatcagcaacaacatctatctccttcttgcttagttaagtccttcgccctcccaagaagaagaagatgtcttgctgcggcggcaactgcggctgcggcagcggctgccagtgcggcggcggctgcggcggatgcaagatgttccctgatgtggaggccacagccaccaccaagaccttcgtcctcgctgctccatccaacaaggcgagctctggaggaatggagatggcggtggagagcggcgagaacggcggctgcggctgcaacacctgcaagtgtggcaccagctgccgcggctgctcctgctgctcctgcaactgaatctatcgtcgtcgtcgcccggctgcatgaggatttatcgtatggatgctgctactgtcgatcagagctttgatcgaggccctaatttgcttgcattagta

SEQ ID NO: 405397 - DNA, 455 bp, Oryza sativa nipponbare
gcctggagctgagttcccgaacgctgctcgctggtatgataccgtcgctgcggccctcgcttcaaggttccctggcaaggcagttggagtgaatctgcctggaggaggtgcggcatcgtctgctgcagcggctgcgccagctgctaaggatgctgatgaagatgatgatgacctggatctttttggtgatgagaccgaggaagacaagaaagcagcagatgagcgtgcagcttccaaggcctcttcaaagaagaaagaaagcggaaaatcatctgtcctgttggatgtcaaaccatgggacgacgagactgatatgaagaagttggaggaggctgtccgcagtgtgcagatggagggtctcacctggggagcatcaaagcttgtgcctgtgggttacgggatcaagaagttgcagatcatgttgaccatttgtgatgacttggtgtctgtggata

SEQ ID NO: 405398 - DNA, 435 bp, Oryza sativa nipponbare
aaaaagcttaaaaaaaactgcagttatttaggtaggattaagcatacgcgcacggcgcatcatatcgctcactctgcatggcttcggcttcttctgtcagcttaatgctgctcgtggctgcagctatggcctcagccgcctcggcgcagctgtcggcgacgttctacgacacgtcgtgcccaaacgcattgtccaccatcaagagcgcagtgacggccgccgtgaacagcgagccccgaatgggagcctcgctggtcaggctgcacttccacgactgcttcgtccaaggctgtgacgcgtctgttctgctgtccggccaggagcagaatgcaggcccgaacgctgggtcacttcggggattcaacgtcgtcgacaacatcaagacgcaggtcgaggccatctgcagccagaccgtctcctgcgccgacatcctcg

SEQ ID NO: 405399 - DNA, 337 bp, Oryza sativa nipponbare
cgggggcgtcatggcggggcccggtgtcgcgggagggggaggaggaggagggggaggcggcgttgggggcgacgtggagctcgtcagcaagacgctgcagttcgagcacaagctgttctacttcgatctgaaggagaacccgagggggaggtacctgaagatctccgagaagacgtcctccacgcgctccaccatcatcgtccccgtcgccggcgtcgcctggttcctcgacctcttcgactactacatccgcaccgacgagcgcgacgccttcagcaaggagctccgcctcgacaccaaggtgttctacttcgatattggggagaacaagagaggc

SEQ ID NO: 405400 - DNA, 385 bp, Oryza sativa nipponbare
cccacgcgtccgcccacgcgtccgcccacgcgtccgcggacgcgtgggctgggctggtggtatgagccctacaccgacgcggtggcagatgcagctgctgcaatcaggatgaatgaattccatattggatggtttatgaatcctctggtgcatggagactaccctccggtaatgaggagccgcgtaggcgctcggttgccatccataacggcgtccgattcggagaaaatacggggatcgttcgacttcatcggcatcaaccattacttcgttatctttgtgcaatccagcgacgcaaatcatgaccagaaactaagggactactacgttgatgcaggtgttcaagagaatggtggaggaggattcgacaaggagcactatcagc

SEQ ID NO: 405401 - DNA, 452 bp, Oryza sativa nipponbare
cccacgcgtccgcccttctatccacccacaccagcaagccgctcaggcgcgctctccgctccaccgccatggcgtccatcaccctcctctccctcgctcccgcggccacattgctccacctcccggcctccacttcgctctccacctccttcgtcgccgctccaggccccatctccggccgccggtccgtcgtcctccgcgcccgcccgcgccgctgcgtcacggtcgtgtgcagcgccgcggcggccgaggccgcggaggcggagcccgcggagaagttccggctcgacaacctgggcccgcagaaggggtcgcggcggcggccgaagcggaaggggcgcggtatcgcggcggggcagggcgcgagctgcgggttcggcatgcgtggacagaagtcgcgctcggggccaggcgtccggcgcgggttcgagggagggcagatgccgctctac

SEQ ID NO: 405402 - DNA, 465 bp, Oryza sativa nipponbare
cccacgcgtccgcccacgcgtccgcttttggttggtacacagccaagagttgaagctgctatggttaatgcaagaatccggaagactgttagagcgacacaagctaaggttgcttatattggacctccaactgacttcaactatgaccatgagcatcttggcactggaccacaaacccttgttgagattgcagagggtcggcatcccttctgttcaactctgcagtctgctaagaatcctgtcatcattgctggggccgggttatttgaccgggaagaccaagatgcccttttctcaacgatagagactgtagccaaaaaattcaatgtggttagaccagactggaacgggcttaatgttctattgctgcatgctgcacaagctgcagcgctggatcttggtcttgttgctaatcctacagagagcatcaagtccacaaagtttctgtatctgatgggagctgat

SEQ ID NO: 405403 - DNA, 455 bp, Oryza sativa nipponbare
cccacgcgtccgctctcccttcttggttcttcttctcatctcctcccactccagctctgcccctgagccaagaactgagcagcagagagctcgtggtctctttgccagcttctcctcagtcctcaccaagctgttcttgcagagaaaacatagccaaagagctaatttgagctcccaccatgaagtacgtgctggtgacaggaggggtggtgagcggcctcggcaagggcgtgaccgcgagcagcatcggcgtcgtgctcaaggcctgcgggctccgcgtcaccaccatcaagattgacccatacctcaacactgatgctggaaccatgtctccgttcgagcatggtgaggtcttcgttttggacgatggtggagaggtggacttggaccttggaaattacgaacgttttctggacatcaaattgacccgtgataacaacataaccacgggaaaa

SEQ ID NO: 405404 - DNA, 413 bp, Oryza sativa nipponbare
agcggccaacggtatcgccgcgcttaagctttccgatcgcacctgcaccggagtcctcgcctcccatccgctctcccgcgatatccacatagagtccctctcattaacatttcatggccatgaccttattgttgattctgagttggagctcaactatgggaggcgttacggtttgctcggcctaaatggctgtggcaaatctactctgctcacagccataggctgcagggaactccctatccctgaacacatggatatttaccatctctccagtgagattgaggcttcagatatgtctgcgctacaggctgttatctgttgtgacgaagagaggatgaagttggaaaaggaagctgaaattttgtctgctcaggatgatggtggcggtgatgctttggatcgtatatatgagc

SEQ ID NO: 405405 - DNA, 411 bp, Oryza sativa nipponbare
  unsure (1)..(411): unsure at all n locations
cccacgcgtccgatcagatccgcctccgcctcctcctcctccacctcctcccaccccctcgccgatccagatccatcgccggggaggcgccagccatggccggcggcgggggcgccggcggcatgtcggagtcggtgctccgcaaggtgctcctctcctactgctacgtcggcgtctggatcttcctctccttcgccgtcatcgtctacaacaagtacatcctcgaccccaagatgtacaactggcccttcccgatctccctcaccatggtccacatggccttctgctcctccctcgccgtcgccctcgtccgcctcctccgcgtcgtcgagccgccctcgtcgcccgccatgaccccgcagctctacacctnctccgttgttcccatcggcgcgctctacgccatgtcgc

SEQ ID NO: 405406 - DNA, 315 bp, Oryza sativa nipponbare
cccacgcgtccgcccacgcgtgcggcacatagcagctctagctagctacaggcatcagcggtcagtagagagatcagttgcaactagctagctagctagattatatcttcagggatggctccgggctgcgtctccgaccagcacgccctctcaggatccggggagctgctagcgaaagcgttcatggacgcgtccactttgcccaaggccttgcccggcttggtccgacgacattgccgtcgagggaacggcggtccagacaccatctacaccatggagcttaaccctgccgcgggtgagggaagcacatacaag

SEQ ID NO: 405407 - DNA, 402 bp, Oryza sativa nipponbare
gcggtctcaagacccgcaagtacaacgaggtcaagcccgcccttaccaacatggtttcggccgccaagctcatccgcacccagctcgccagcgcgaagtgaggatatccatagctgcaagttcccttcggttgcgaggacgatgccgtcatagccatctgtttttgaataatctgggtccagtggatccaattgtctgtggttaggtttagtcagtctcggtgggaagatccctcatacccgttttacttttgaatcaatttggtggtttttgaggcagtttgtcggtgtatttgtattgtgtgtaatctgagtgggaatcagcagtgtttcatctgcatctgaatcgttgcggatcaaattacaaaattttcaaggagagttcttgatgttatggtcttcc

SEQ ID NO: 405408 - DNA, 439 bp, Oryza sativa nipponbare
ggtgaacaccaccacccgctacctgccgcggcagaaggccgacctgaccatcgcctacgacgtcctccaagcgttcggcaacaactacatggtgcaggtgaccatcgacaactggagccccatcggccggctcgacaactggaacctcacctgggagtggaagcgcggcgagttcatctacaaaatgcgcggcgcgtacacgctcaacaaggaaggccccgcctgcgtgtacagccccgccgccggctactacaaggacttcgacttcacgccggcgtacagctgcgagaagcggcccatcgtcgtggacctcccgccggagcgcgagaaggacaaggacgtcgggaacatccccttctgctgcaagaacggcacgctgctgccgcccaccatggacgagtccaagtcgcgggccgtgttccagatgcaggtgttcaag

SEQ ID NO: 405409 - DNA, 466 bp, Oryza sativa nipponbare
gcgcaaggaagggaaatgcatttctccgcctgcagccagtgcctatgagatttgctgtttgctgtgccgcaaaaaaggagacagtggagaaggtttgtgacattgttaagaagcaactcgctgttcctgagggcactgaagtttctggtgcatccaagttctcagatcttggtgctgattcactggacacggttgagattgtgatgggtctcgaggaggagttccacatcagcgtcgaagagtcaagtgcgcagtcaattgcaacggttgaagatgccgctgcactcatcgacaagcttgttgagcagaaatctgctgaagcgaaatcatcttgatatgcacaaatcacaatgttgaagctcgtaaactagctttacttctaacttgggccagcccttggtggtttaagattgtatccttatcgccttttttttttatgacttgatggtttggtggtgttctcaag

SEQ ID NO: 405410 - DNA, 442 bp, Oryza sativa nipponbare
cactaacacgtcaccaataatggcgtccctcgccaactcttctgtccacctcctcctcctcgtcgtggtgctcgccgccgccgccgatgcggtgacgttcaccatcgtcaacaagtgcgggtacaccgtgtggccggcggcgctgccgtcgggcgacggcaatcagctcgacccggggcagagctgggccgtgtacgtgccggcgggcaccaagggcgcgcgcgtgtgggggcgcacgggctgcggcttcatctccggcggcagcctagggcagtgccagacgggcgactgcggcggcacgctgcggtgcgcggccgtcagcgcgccgcccgtcacggtggccgagttctcgctgggccaggcgagcaaggacgactacttcgacatctcgctcgtggatgggttcaacgcgccaatggccatcgtgccggcggcagctggc

SEQ ID NO: 405411 - DNA, 470 bp, Oryza sativa nipponbare
cccacgcgtccggaaaactccgcctccattcattacatagaatcagatccagttggcttgactgaagttgaggtcggcaaaatctatgaagttgtaataactaactttgcaggtctatatcggtacaggctaggagatgtcgtgaagatagcacgcttccacaactccacacctgagctccaattcatctgtcgcagaagcctagtgctgagcatcaacatcgacaagaacaccgagaaagacctccagttggctgttgaggaggcatcaaagttcctggaaggagagaagctcgaagtcatggatttcacgagcttcgtggaacgatcaagcgatccagggcgctacgtgatcttctgggagctgagtggcgatgcgagtgatgaggtcttgagcagctgcgcaaatgccttggatctagccttcattgacgcaggctacacgggctcgaggaagatcaagacaatcgg

SEQ ID NO: 405412 - DNA, 467 bp, Oryza sativa nipponbare
cccacgcgtccgctcatgttcggcaccgtcccggcggcgctcacctactactggcggatgaagatgcccgagacggcgcggtacacggcgctcatcgcccgcaacgcgaagcaggcggcggccgacatgtccaaggtgctgcacacccagattgaggagagcgcggaccgcgccgagacggtggccgtcggcggcgagagctggggcctcttctcgcgccagttcctgcgccgtcacggcctccacctcctcgccaccaccagcacgtggttcctcctcgacatcgccttctacagccagaacctgttccagaaggacatcttcagcaaggtcgggtggatcccgccggcgaagaccatgaacgcgctcgaggagctctaccgcatcgcccgcgcccaggcgctcatcgcgctctgcggcaccatccccggctactggttcaccgtgcattcatcgagatcatgggc

SEQ ID NO: 405413 - DNA, 464 bp, Oryza sativa nipponbare
cccactcccccggccgccgccgcatctgcgctcttaaggcctctccttccccatccccaaatttcccctccggccatggccaccgacggcacaggcgtcgtcaccgtctacggctccggcaccaacggtgccgccttgctcgagccctccaaccacaagtccgccaccttctctgtcaaggtgggcctcgcccagatgctgcgcggcggcgtcatcatggacgtcgtcacccccgaacaggcgcgcatcgccgaggaggccggtgcctgcgccgtcatggctctcgagcgcgtccccgccgacatccgcgcccagggcggcgtcgcccgcatgtccgaccctggcctcatccgcgacatcaagcgcgccgtcaccatccccgtcatggccaaggcccgcatcggccacttcgtcgaggcccagatcctcgaggccatcggcgtcgactacgtcgacgagagcga

SEQ ID NO: 405414 - DNA, 428 bp, Oryza sativa nipponbare
cccacgcgtgcgcccacgcgtccgctactttgaacgttattttacttattccgcgagtcggaagcggggcctcttcctgtgaggaacattattggaagatctgggtttcggtactggcctgcatcaagaataacagatacaatatacgagcctcgcgctgaatattctgaggctgggttgtctggaggatgatccagaccttctggccatgctggatagccgatgagtcatactctcttgtggagctccacttatgagccgagctccagttcacagctgtcactgttgtgtatagagtgtctggaaaatcactctggctagaccaattggtgttttcaactgcctgtttggcagatctttgctatattaatacatgcgaagctgaaagagacttctatctcgtcagagcaaactgctgaaggagcatt

SEQ ID NO: 405415 - DNA, 464 bp, Oryza sativa nipponbare
cgaatcgtaaaagctcaaaaaaaaaaagagaaaaaaagaaaaaaaagggagacgcggccatggcggggacggggagcttcaaggtgacgaggatctcggagggggcggtgaagccggcggcggcgacgccggaggagacgctgccgctggcgtgggtggaccggtacccgacccaccgcgggttggtggagtcgatgcacatcttccggtcgggcgccgacgcggccccgggcgtcatccgcgacgcgctcgccagggcgctggtcttcttctacccgctcgccgggcgcatcgtggagcccgaggccgggtcccccgccatccggtgcaccgccgacggcgtctacttcgccgaggccgccgccgactgcagcctggaggacgtccgcttcctggagcgccccctcctcctccccaaggaggacctcgtcccctaccccggcgacgaccgctggggcgtcgag

SEQ ID NO: 405416 - DNA, 458 bp, Oryza sativa nipponbare
cattaactggcagtgatattcttgcaagagcaaaaaatggaactggcaagactgctgcattttgtatacccgcgctggaaaagattgatcaagacaaaaatgctattcaagttgttatattggttcccacaagggaattggctctacaaacatcacaagtttgcaaggagcttgggaaacatttgaagattcaagtgatggtcactactggaggaaccagcctaaaggatgatattgtccgtctttatcaacctgttcatttacttgttggaactcctggtcgcattttagaccttacaaagaaaggtgtctgcgtcctgaagaactgttcaatgcttgttatggatgaggcagacaagcttctttctcctgagttccaaccgtctattcaggaattgattcggtatcttccatcgaatcggcaaaatttgatgttccttgcaacattccctgtgact

SEQ ID NO: 405417 - DNA, 466 bp, Oryza sativa nipponbare
cggacgcgtgggcggacgcgtgggcgctcgctcatcggcaatggaggccacggcgctcacgctctcctcccgccccgccgccgccagccgctcgccggcgaagggaaccttcgcctccctccacccccgccgccgcttctccgcgcacgctgtccacctccgcgcggcccagagcgcctccctgcgcgccccctccccgggggcgaggaggagacggaggagggggagcgggctggtggtgcgggcggagatgttcgggcagctcaccaccggcctggagtccgcctggaacaagctgcgtggcgtcgatgtactaacaaaggagaatatcgttgagccaatgcgggatataagaagagcacttctggaagctgatgttagtttgcctgtagtgagaagatttgtttcgtctataagtgaaaaggctctggggtctgaacttataagaggagtccgccggaacagc

SEQ ID NO: 405418 - DNA, 461 bp, Oryza sativa nipponbare
cccacgcgtccggtggttgcgccgacgacgaggtgagcgggttgacggaggaggaggcagcgcgcgccggcttcgggtgtcgttgtccctgctcgccaggtgctcggttgtcgctgacatactgctgagcagaaaaccagcacccatcggcttagtacctgtctgctctgctgtctcagcctctcaggttgcaaaccccatatcccagagctcgacgccacccatgtggtttttcaacttcaaccgaaatggcccctctggcttctccggcgcctccaccgccgaggaggtcaccgccggcgtcgacgcccggggcttggccgccgtcgtcacaggcgcgtcgagcggcatcgggctggagacgacgcgcgtgttggcgctgcgcggcgtgcgcgtcgtcatggccgtgcgcaacgtcgccgccgggcacaaggcccgcgaggcgatccgggcggagatca

SEQ ID NO: 405419 - DNA, 442 bp, Oryza sativa nipponbare
ccacgcgtccgcccacgcgtccgcccacgcgtccggttccaggcgctgatgctgcacggcatgaagaagacgtcgccggccatcgcctccaccatgcccaacctcgccccggtcttcatcttcgtcgtcgccgcgtgcctcggcttcgagagggtcgacctcagctgccggtacacgagggccaagatcgccgggacggtgctgtgcctcgccggcgccgtcaccatgagcgtcctgcagagccccgccgccgccgtcgccacgcgtagcagcagccacaggacgacgacggcggcggcggcgaacgccggcgggggggactgggccgtcgggtgcgcgtgcctcctgggcgcggtgctggtggtgtccggcaccaccgtgctgcaagcggccaccatggtgcactttccggcgccgttcacgctctggtccgtcacgttgc

SEQ ID NO: 405420 - DNA, 470 bp, Oryza sativa nipponbare
cccacgcgtccgcccacgcgtccgaatgaaaggaaacaatattttccgagtggcccttttgtcatatattattctcactatcggaggaaaggagctcaaatccacaaatagtggagaaaacacaggtctaacattcacaaatcaacaagttaataagactgttcagacagaagatggtgatatatacgattgtgttgacgtcaatcaacagccaacctttaaacacccgctgttcaaagaccatgaaattcagatggaaccaagctcttcccccataaggttggatatcaaatcgccactggtagctgcagtctcacatgcacagttgtctaccatcgactgccccataggaacaattccaattctgcgtaacaacaaactggacaccacgatggtgcatggtatcaacacgttggctagcaatgattttacaacaactggtaccagaaataaatattgggatgagatat

SEQ ID NO: 405421 - DNA, 466 bp, Oryza sativa nipponbare
gtgaatctgcctggaggaggtgcggcatcgtctgctgcagcggctgcgccagctgctaaggatgctgatgaagatgatgatgacctggatctttttggtgatgagaccgaggaagacaagaaagcagcagatgagcgtgcagcttccaaggcctcttcaaagaagaaagaaagcggaaaatcatctgtcctgttggatgtcaaaccatgggacgacgagactgatatgaagaagttggaggaggctgtccgcagtgtgcagatggagggtctcacctggggagcatcaaagcttgtgcctgtgggttacgggatcaagaagttgcagatcatgttgaccattgttgatgacttggtgtctgtggatagccttatcgaagaacatctgactgaagagccgatcaacgaatttgtccagagctgcgacatcgttgcgttcaacaagatttaaaatatcaaaaggggat

SEQ ID NO: 405422 - DNA, 480 bp, Oryza sativa nipponbare
ccacgcgtccgcccacgcgtccgcccacgcgtccggctttctctttccctcgaaaaccaaaaccaaaaccaaatcgcgggaaagcgggcgcggcggagatcgccgccggtcgccggagatgtcgtcggtggtcaacaagctcactaacgccgccgagagggagtcgtcggaggcggaaacccttatcgcggagattcgcaaggcgatcggcgaaatgaagtccatcgccgtcgattacgagagggagaacaagtccgacaaggtgaagcagcttgaggcggcggcgctggaactggttgcttcgtgcgaagattgcacgtgctacgccgacgcgatccggaaggtgcctggggcgtaccagccatctaatcagatgacggatttcgaaaagctgatcgaggctgaggttaacaaggtcaaggggaactcatcaacatcagtagagaaccatctgctcattcggcagttcagagaggcagt

SEQ ID NO: 405423 - DNA, 475 bp, Oryza sativa nipponbare
cccacgcgtccgggaaccgcaagggttaattgagatcaagttcaggtcagaggaactccaggattgcatgagtcggcttgacccaacattaattgatctgaaagcaaaactcgaagtagcaaataaaaatggaagtgctgacacaaaatcgcttcaagaaaatatagaagctcgaacaaaacagttgatgcctctatatactcagattgcgatacggtttgctgaattgcatgatacatccctcagaatggctgcgaaaggtgtgattaagaaagttgtggactgggaagaatcacgatctttcttctataagagattacggaggaggatctctgaggatgttcttgcaaaagaaattagagctgtagcaggtgagcagtttttccaccaaccagcaatcgagctgatcaagaaatggtattcaagcttacatgcagctgaattggatgatgacgatgcttttgttgcttggatg

SEQ ID NO: 405424 - DNA, 454 bp, Oryza sativa nipponbare
  unsure (1)..(454): unsure at all n locations
ctctcctcctctaatctcaagtctctgtctcgtcgtcctcgcatctccactcgccatgggcaagattaagatcggaatcaacggtttcggaaggatcgggaggctcgtggccagggtggccctccagagcgaggatgtcgagctcgtcgccgtcaacgaccccttcatcaccaccgactacatgacctacatgttcaagtacgataccgtgcacggccaatggaagcacagcgacatcaagatcaaggactccaagactctgctcttgggcgagaagccggtcaccgttttcggcatcaggaaccctgacgagattccgtgggctgaggctggtgctgagtatgtcgtggagtccaccggtgtcttcactgacaaggagaaggctgctgctcactngaagggtggtgccaagaaggttgtcatctcagtcccgagcaaagatgctccgatgttt

SEQ ID NO: 405425 - DNA, 456 bp, Oryza sativa nipponbare
cgcagcactaagcaagtcaatgccgcaatgactacatgcaacaacctcaacttggatggcctggtcatcatcggaggagtgacatccaattcagatgctgcacagcttgcagaggcccttgtccagaataactgtaagaccaaggttgtcggtgtgcctgtttcactgaatggtgatcttaagaaccaatttgttgaaacaaccgtgggatttgatacagtgtgcaaggttaactctcagcttgtgagcaatgtttgccttgatgcaatctcagctggaaagtactactattttgtccgtctgatgggtagaaaagcatctcacgtggcctttgaatgtgcacttcaatcacacccaaacatgcttatcttagcggaggaggtagcactatcaaaactcacactgatggaagttattaacaagatatgtgatggagtacaagcaagggcagaatta

SEQ ID NO: 405426 - DNA, 463 bp, Oryza sativa nipponbare
cccacgcgtccgcccacgcgtccgcggacgcgtgggcgccgctactcccccctcgccgagagagctctagggtttccgctgccgaatttttttttttaattcggggggagagatttgaagaggcggcaccatgttggtctaccaggatctgcttaccggtgacgagctcctgtcggattcgttcccctacagagagatcgagaacggcatcctctgggaagtcgatggcaagtgggtcgttcaaggagctattgatgtggacattggtgccaacccatctgctgagggtggtggtgatgatgagggtgttgatgaccaagctgtgaaggtggtcgacattgtggacaccttccgtcttcaagagccatctccttttgacaagaagcagtttgtgaccttcatgaagcgctacatcaagaacctttccgccaagctggatgcggaaaagcaagaggaattcaag

SEQ ID NO: 405427 - DNA, 434 bp, Oryza sativa nipponbare
acctttttggtgaggagactgaagaggagaagaaggcagctgaggagcgtgctgctgctgtcaaggcttctggcaagaagaaggaatctgggaagtcctcagtgttgcttgatgtcaaaccatgggacgatgagactgacatgaccaaattggaagaagctgtgaggaatgttaagatggaaggcctcctttggggcgcatccaagcttgtcccggttggttacggtatcaagaaattgcaaatcatgatgaccattgtcgatgatcttgtgtcggttgatagtctgattgaggactacttctacaccgaaccagcgaatgagtacatccagagctgcgacattgttgcgttcaacaagatctagatcttccttgagtcaggtgatggcgatcggtgcacaaagataaaaagaaaaatcccgaaggttggaata

SEQ ID NO: 405428 - DNA, 465 bp, Oryza sativa nipponbare
cttgcaattacaaatcttaccaactacctcactaaagagaaccgggctgaggagctgcgaaaccttctaacccagctcaggcctttttttctcgttgattcccaaggcaaagactgcaaaattgtccgtggaatcatcgatgctgttgccaagataataggaacatctgaacttcagatctcactctgcaaggagatggttgaatggacccgtgctgagaagcggacattccttaggcagcgtgtggaggcaaggctagcagcccttctgttagagaatcaggagtacactgatgctcttactctccttactgatcttatcaaggaagtcaggaggcttgatgacaagttgcttcttgtggacattgatcttctggagagtaaactccacttttctctgagaaacctgccaaaggccaaagcttcattgactgctgctagaacagcagcgaatgccatttatgtt

SEQ ID NO: 405429 - DNA, 467 bp, Oryza sativa nipponbare
  unsure (1)..(467): unsure at all n locations
cccacgcgtccgcccacgcgtccgcccacgcgtccgccgccggatccggcgggaacgggtgcgaggagaacaagacgatctgggttggcgacctccagtattggatggacgagaactacctccacagctgtttcggacccagcggcgaggtagtgacgataaaagttatccgcaatagacaaactggacaatccgagggatatggttttgtagagttctactctcacggatcggcagagaaggctcttcagaattttactggtcatgtgatgcctaacactgatcgacctttcaagttaaactgggcttcatatagcatgggtgaaaagcgatctgaagttgcttctgactactcaattttcgttggtgatctagctgctgatgttactgatgaaatgttgatggagctttttgctaataagtaccgctctgtgaaaggagctaaagttattattgatgcanacaca

SEQ ID NO: 405430 - DNA, 468 bp, Oryza sativa nipponbare
aaaaaaaagaggccaacgccaacccacgcatcccctcccctccccttcctccgcccacgagtccacgaccaatccggcaatcgagttaaaaatggcatcagctgttaccatcagttcggttggcgctcaggctggcatgatctcaaagccaaggaatcatggcttcacaagctacagtggcctgaaggcagcatcatccgttagctttgaatcagggtcgtcattcctgggtaggaatgcatctctccgggcatctgttgctccaaggattgtaccaaaggcgaagtctggttctcaaatttctcctgaggcttcgtacaaagtggcagtgctcggtgctgctggtggtattggccaaccattgggccttttgattaagatgtctcctctggtctcagagctgcatctgtatgatattgcaaatgttaagggagttgctgctgatctcagccactgcaacacaccttc

SEQ ID NO: 405431 - DNA, 460 bp, Oryza sativa nipponbare
ggcagccaccgcatctttcctcctctttccctggagccatttcctcccctaaagggcctttccttttcttgatctctcttctatcttcgatccatccatccatgcggccatccttcctaggtgaatttcaacgatgcagttcagcagtgtgtttcccttagagggtaaagcatgcgtgagcccaataaggagaggtggtgagggctcagctagtgatagattgaagatcggggacagtagcagcatcaagcatgatagagcagtgaggaggatgtgtcttggttataggggcaccaaaaacggtgcacaatgtgtgctcacctcagatgctggcccagacactcttcatgtccgaacatcattccggaggaactttgcggatccaaatgaggctgctgctgccatattgtgtggtggcaccgggactcaactttttctcttacaagcacaagggccacgc

SEQ ID NO: 405432 - DNA, 461 bp, Oryza sativa nipponbare
gttcctggacgcgctcgaggtcgccaagaagcagatcacgtggctcagcgtcgccgacctgttcccgtcgtccaagctcgcgcggatggtggcggtggcgccacgcaagggcctcgccagccgcaagaggatggagctcgtcataagacggatcatccaagaacggaaggaccagctgatggacgacagcgccgccggcgccggcgaggctgcggcggggaaagactgcttcctcgacgtcctgcttcggctgcagaaggaaggtggcacgccggtcccagttaccgacgaaatcatagtcgtgcttctgtttgacatgtttacaggggctagcgagacatccccaacagtattgatttggatcttggctgaactcatgcggtgtccaagagttatggcgaaggcacatgctgaggtacgacaagctgctgttgggaagactaggatcacagagaatgata

SEQ ID NO: 405433 - DNA, 460 bp, Oryza sativa nipponbare
cccgcctcgtcgccgatccgatccgcctccgcctccgcctcgcggcccggcctgcctgcctcgccgtcggtggtcccgatccgaggttgctcttgctgggcatcaaacatgggtctggtgaaggatggcgccgccgatttggaggaggggaccctggagatcggcatggagtacaggactgtttctggtgtggcaggacctctggttatcttggataaagtaaagggcccaaagtaccaggaaattgtaaacatccgattgggagatggcaccactcgccgtggccaagttctggaagttgacggtgaaaaggctgttgtgcaggtctttgaaggcacttcaggaatagacaacaaatataccactgtgcagttcacaggagaggtcctgaaaactcctgtctcacttgatatgcttgggcgcatttttaatggatctggaaaacccattgataatggcc

SEQ ID NO: 405434 - DNA, 459 bp, Oryza sativa nipponbare
cccgaccagcggcgccagagcagaggcagtgaggccgagctcctcgcctcgcctcgccgtctccgcccgcgcggcgctgccgccgagccgccgccggcctcctcctcctcctccttcccggttcggatcgggcccaagagccggactgcagccatggcagatctgcaggagcccctcgttcgtccgaagaggaagaaggttttggtggactacttggtaaagttccgatggattctggtgatctttgtggtgctccccatttccgctctgatctacttcaatatctatttgggcgatgtctggtctgccatgaaatctgagaaacgtcgccagaaggaacatgatgacaatgtgcaaaaaggtgtgaagcggctcaagcagaggaacccaaagaaggatggccttgtttgcacagctaggaagccctggattgctgttggcatgcgcaatgtagactac

SEQ ID NO: 405435 - DNA, 413 bp, Oryza sativa nipponbare
cccacgcgtccgcagctatggttacccagctcacctacctagctgcatcagcaggagtgtgcttggcttcagctctagccatcgccttgctgtccatcgccctctacatcatcggcgtcgtcgcctccttcgccgtcctctgcgccaaggagttcgccgagagagcccacgaccggccgccgctcgtcggaacagttttccggcagctcaagaacttcgacagaatgttcgatgaacatgtcaactatgcaaccgcgcatcgcaccagcaggattgtgtatcccggtcactgcgaggtctttacttctgatccggccgtcgttgagcatgtcctcaagaacaagcttcagtaaatacagcaaggtggacttcctcactacagccatgaaggatctttttggagatgggaattt

SEQ ID NO: 405436 - DNA, 287 bp, Oryza sativa nipponbare
gagaaagctgcccatagacgtgaaggggataactctagacagtggtgactacaacattaagactgttccaggctgcactgttgagcaaatgtaaattgacatgggaggcactgcaatcggtgtgggtgcaccaaaagctctgggccaaataaaacacaatggagtactggttcatattatagttgcagtatgataaaacatgattagttggcacatacgtgatacctgtggacagagagactgcttagaacgagaatactattgagggcaagaacactgattacgag

SEQ ID NO: 405437 - DNA, 460 bp, Oryza sativa nipponbare
gtggacaatgccctcagagatgcaaagttgtcatttaaagacatatatgaggtgatccttgtcggtggctccaccagaattccagctgtgcaggatcttgtgaagaaaatgactggaaaggaccccaatgtgactgtcaaccctgatgaggttgttgcacttggagcagctgttcaggcaggagtgttgtctggtgatgtgagcgacattgttcttcttgatgtaacaccactttctctgggtttggagacactgggtggtgtgatgaccatgattatcccaaggaacacaactttgcccaccttcaagtcagaggtcttctcaaccgttgctgatggccagactagcgtggagatcaatgtccttcaaggagagagagagtttgtcagggacaacaaaatctcttggtagctatttgctttgatggaaattccttctgccccacggggtggtccacaaa

SEQ ID NO: 405438 - DNA, 404 bp, Oryza sativa nipponbare
  unsure (1)..(404): unsure at all n locations
ntctgatctaattaatttaccttctccacctcctcctcctccccccgatcggatcggcccggcttctgctcctccgccgccgtcaccgtcgtcgtatataggagaagatggtcgtacttgataccttcctctttacctaggagtctgtgaacgagggccaccctgacaagctctgcgaccaagtcttagatgctgtgcttgatgcctgccttgccgaggaccctgacagcaaggtcgctttgtgagacctgcaccaagacaaacatggtcatggtctttggtgagatcaccaccaaggctaacgttgactatgagaagattgtcagggagacatgccgtaacatcggttttgtgtagctgatgtcggtcttcgatgctgaccactgcaaggtgcttgtgaacat

SEQ ID NO: 405439 - DNA, 387 bp, Oryza sativa nipponbare
cccacgcgttcgcacactcgtacgctgctattagtattcaagcgccatggcaggcagctacgatgtttttgctgatgcaaggaagctggtgggcaaggtggcggtgatcaccagcggcgcgagcggcatcggcgcgtgcacggcgcggttgttcgtgaagcacggcgcccgcatcgaggtcgccgacatccaggacgagctgggagctagcctagtcgcggagctcgacccggacgcctccagctacgtgcactgcgacgtcacgaacgagggcgacgtcgacgacgcggtcgaccacgccgtcttcacatacgggaagctcgacgacaggttcaacaacaccggcgtaaccggcccgacgagcttcaggagcacgcgaagcaccaa

SEQ ID NO: 405440 - DNA, 363 bp, Oryza sativa nipponbare
gttcttgtggtacctgttcttcatgtacttcaccttgctgtacttcactttctatggcatgatgacaacggcgatcactcccaaccacactgttgcgcctattattgctgctccattctacacgctgtggaatctcttctgtgggttcatgatcccaagatagaggattcctgcgtggtggaggtggtattactgggccaacccggtgtcatggaccctgtacggcctgctaaccttcctgtttggcgacctggatcagtcgttgctgctcgcctacggcatcaccaccaccaccgccgacgacttactccgggaccactttggattccggcacgactttccttagtattattcttcgggatt

SEQ ID NO: 405441 - DNA, 463 bp, Oryza sativa nipponbare
ctgccaagtaaacctactcaccaataatccatcctcgaatcctcgatttatcatggagataaactcggcagccaccctcaccctcgtctctctcctcaccctccccattcttctggcgttgctgacccgcaagtcgtcgtcaaagaagaggaggcctccagggccatggaacctccccttggtcggcggcctcctccacctcctccggtcgcatccgcaggtcgcgctccgcgagctcgccagcaagtacggcccggtgatgttcctccggatggggcagatcgacacggtcgtcgtctcatcgccggcggcggcgcaggaggtgctccgcgacaaggacgtcatgttcgcgtcgcggccgagccttctcgtctggagatcttctgctacgacaacctcgacgtcggcttcgcgccctacggcgcctactggcggatgctgcgcaagctctgcacggtggagc

SEQ ID NO: 405442 - DNA, 253 bp, Oryza sativa nipponbare
tcgtggacgcgtgggcggacgcgtgggtggtaatgcctccattatggtgcaagcttgataggatgtggtttggacatcctggagttttggaaggaacgctggcaacaccctgttccatctgtgcaatggatcatgtttttgaggtacatgttatgctaaaggacttacctaaggaggagtttggcccacacattgattttagagaatactcgtttcttgagaatccatcattgcctaaacaggtcaaagaatc

SEQ ID NO: 405443 - DNA, 435 bp, Oryza sativa nipponbare
acgatccaatacaagttcacatcataagcatagtacaggtcattgagacttgagagagcatggcagggaacaaaaagcgtggtggcaggaacatggatcaggtcaagaaggcggcagtgagatcggatggggtgggaggtagtgcgaccaaacccgagctgtcgatggccaacctcgtacgcctgataaagaaagtgctcccagggaaagcgaagatcgggggagcagccaagggtctcacccatgattgcgcggtggagttcgtcgggttcgtcggcgacgaggcctccgagaaggccaaggcagagcaccgccgcaccgtagcgccggaagactacttgggctcattcggcgaccttggcttcgatcgctacgtcgaccccatggatgcctacatccatggttaccgtgagtttgagagggctggtgggaata

SEQ ID NO: 405444 - DNA, 421 bp, Oryza sativa nipponbare
tgaaattcgaaaaggcatcctctttccatcaatctcaagtatcaggcacatcaccgcacgtgtcggcgccgcagtcgtccgtgccgctgttgatgaagatctggccgaggggcgctgtgatgtagacgctagggacctcaagagcatgactgaggcggacacagtcgactttgtggctcggaagatgtggtaccctatttacagccccctcgtgaacgataagtgaagctcgatgaagtgaaaaatctgacgttgcacgaagcagatgtagcacctgaacaactatcagtcacatatttgttcagacttattttttttggtgctattttcatttagctgcgctactggagggtaattcagcagataccgatgcccacgtctatggctatgtattacgccacgccatttttttgttctgttt

SEQ ID NO: 405445 - DNA, 457 bp, Oryza sativa nipponbare
cagccaagcgtttggttggggggatcggagcggcggcggcggcgatgcagtcgctgcaggacaaggcgtcggagtggagcggcgtggcggcgggggatgcgttcgccatcgacgatgggaacgtcttcgaggcgctgggcggcaccacgcagccgttcgtcgacctctccaccaacttctacaccagggtttatgaggacgaggaggagtggttccggcagatcttcgcggggtcgaagaaggaggacgcgatccggaaccagtacgagttcttggtgcagcgcatgggcggcccgcagctcttttcccagaggagaggacatcctgccctgatagcaccgcatcgaccattccctggtacccaccaggctgcagagcgatggctgcaccatatgcagcaagctgtggatactactggcaggataaacgctgccacaaaaaccaaatgatgtatttt

SEQ ID NO: 405446 - DNA, 456 bp, Oryza sativa nipponbare
cccacgcgtccgcccacgcgtccgcgccgcctcccgacctcgacgacgacgacgaccgacgacgaggtgcggctgaatttgctggaggattgattgattggccatgtcgacggcggtgaaggcgttcctgaacagccccgtcggccccaagaccacccatttctgggggcccgttgctaactggggcttcgtcctcgcgggtttggttgacatgaacaaacctcctgaaatgatatctggcaatatgacagcagccatgtgcgtgtattcaggactctttatgagatttgcctggatggtacaaccacggaactatttacttttagcatgccatgcttccaatgaatcggttcagctctatcagatgtctcggtgggctagggcacaggggtatttggagaaaaaggagccagaggcttcagagtaaaaaaaagacgcaaagcgcagcatttagct

SEQ ID NO: 405447 - DNA, 422 bp, Oryza sativa nipponbare
  unsure (1)..(422): unsure at all n locations
gtcttcttggcgtcgctgcttctggcggcggtggcgccggcgagggcggcaggaggggggtgcgcggcggagaggttcagcagcaaccgcgtgtacgcggcgtgcagcgacctgccccacctgggcgcgtccgtgcactggacctacgacgccgcggcgtcggcgtcgctgtccgtggcgttcgtcgccgcgccgccgtcgcccggcgggtgggtggcgtgggggctcaacccgaccggcggcgggatggccggcacgcaggcgctcgtcgcgctgcccaaggggggaggaggcgggtacgaggtccagacgttcgacatcgaggggtactcgctctccgcgccggggaagctcaagtacnccggcgaccgacctcgccgcgaggtcgccgccgacggccgcgtcagcgtcttcgggaagct

SEQ ID NO: 405448 - DNA, 143 bp, Oryza sativa nipponbare
agcacctcgctgtcacttgttggaccgtcctccgccgccgcctctcccgtggttcagcttgccagcgcaggcgaagaccgaggacggattggcctccgttttattggcgggccagacaacggccccaattgccgccacggtgg

SEQ ID NO: 405449 - DNA, 320 bp, Oryza sativa nipponbare
cccacgcgtccggcggcgaggtcgcggacggggaggtggggcgcggcggcgatgatactggtggcggagctgaacgagcggctgacgacgctggggatcgccgtgaacctggtcacctacctgacggcgacgatgcacgccggcaacgccgaggccgccaacgtcgtcaccaacttcatgggcacctccttcatgctctgcctcctcggcggcttcgtcgccgactcctttctcggccgctacctcaccatcggcatcttcaccgccgtccaagcctcgggggtgacgatcctgacgatctcgacggcggggcccgggct

SEQ ID NO: 405450 - DNA, 448 bp, Oryza sativa nipponbare
cacggatcctcctccgccattaagccgagggcgctcgtcgtagtcatgcacgggttgaacgagcacagtgggagatacgatcatctagctaggaggttgaacgacatcggtgttaaggtttatgggatggactggactggtcatggtggaagtgatggtcttcatggttacgtgcaatctcttgaccatgctgtcagtgacttgaaaatgtatctcaagaaaattttagctgaaaaccctggtcttccatgcttctgttttggccactcaactggtggaggcatcattttgaaggctatgcttgatccagaggtagattcttgtgttgagggcatcttcctgacatcaccagctgttcgtgttcaacctgcccatccaatcataaaggtcatggcccctgtttttacccctcatagccccaagataccaattcacggtttcacacaag

SEQ ID NO: 405451 - DNA, 342 bp, Oryza sativa nipponbare
gacctgtgtcgtcgcatgcacctcgatcacattcaccggtggctttgggacatatattcttgcaatgggaaagaaagcagctgtaggggatgtcaatgcccaaaataacgttgaggagccaagctttgccaggatgatcaccttcctcttccttatcagctttgctggcatgttcatcatcatgcccttcaggaaggtcatgatcattaggcaccggttgacattccccagcggcacagcaacggcgcacctcatcaatagcttccatacacctcaaggtgtcaagcaagcaaggaagcaagtgacattattgtttaaatcgtttggaggaaccatcgcatg

SEQ ID NO: 405452 - DNA, 476 bp, Oryza sativa nipponbare
  unsure (1)..(476): unsure at all n locations
gcgtccggacctatgtcgtcgcatgcacctcnaccacattcaccggtggctttgggacatatattcttgcaatgggaaagaaagcatctgagcggatgtttatttcaaaagggacgggagcacccaatctttgccaggatgatcaccttcctcttccttatcagcatcgctggcatgctcatcatcatgcccttcaggaaggtcatgatcattacgcaccggttgacattccccagcggcacatcaacggcgcacctaatcaatagcttccatacacctcaaggtgccaagcaagcaaggaagcaagtgacattattgcttaaaccgattggaggaaccatcgcatggtcgctcttccagtggttcttccactcttggccgacctgttgcttaaaattctttcacacattcggccttcaggcatataaacaccgatccttcttctatttcaccatggccaatgtccgcattggcat

SEQ ID NO: 405453 - DNA, 431 bp, Oryza sativa nipponbare
cttattgtcacttccatctcattctcctaattgtcatcactagcttctagctagcttaattaattaattagccatggcggaggagaagcaccaccaccacctgttccaccacaagaaggacgacgagccggccaccggagtagactcctacggcgagggcgtctacacgtcggagacggtgaccaccgaggtggtcgccggcggccaggacgagtacgagaggtacaagaaggaggagaagcagcacaagcacaagcagcacctcggcgaggccggcgccctcgccgccggcgccttcgccctgtatgagaagcacgaggcgaagaaggacccggagaacgcgcacaggcacaagatcacggaggagatcgcggccacggccgcggtcggcgccggcggctacgccttccacgagcaccacgagaagaaga

SEQ ID NO: 405454 - DNA, 271 bp, Oryza sativa nipponbare
cgcactcgtcctcctatgtttcatcgctgctgctcgttacctgccagtatgccacgaaagatggcgtctcacattgttgggtacccccgcatgggccccaagaggagctcaagtttgccctggagtctttctgggatgggaagagcagcgctgaggatttggagaaggttgcgaccgacctcaggccagcatctgaagcaatggctgacgctggatcatacatcccacactttgactatacagttgccgtctctgctgcaacctctatgct

SEQ ID NO: 405455 - DNA, 383 bp, Oryza sativa nipponbare
ctcccagatacctgctgctgccactagcccactaccatggatccttgcaagttccggccgtcgagctcgttcgacacgaagacgacgacgacgaacgcgggagctccggtgtggaacgacaacgaggcgctgacagtggggcccagggggccgatcctcctcgaggactaccacctgatcgagaaggtggcgcacttcgcccgggagcgcatcccggagcgcgtggtccacgcccgcggcgcctccgccaagggcttcttcgagtgcacccacgacgtcaccgacatcacctgcgccgacttcctccggtccccgggcgcccagacccccgtcatcgtccgcttctccaccgtcatccacgagcgcggcagcccggagacgat

SEQ ID NO: 405456 - DNA, 307 bp, Oryza sativa nipponbare
  unsure (1)..(307): unsure at all n locations
cccgcgtccgcctcgtgctccgctttctccccccaaattcctcgccgccctcggtcgtcgccgccgcctccgccgcctcgcctcccggagattcgccgccttcgccgccgccgccatgaatcccgagtatgactacctcttcaagcttctgctcatcggagactcgggcgtcgggaagtcttgcctgcttctgaggtttgcggacgattcatatctggagagctatatcagtaccatcggtgttgattntaaaatccgcactgttgagcaagatgggaagacaataaagctgcaaatttgggatact

SEQ ID NO: 405457 - DNA, 209 bp, Oryza sativa nipponbare
accttggaggatgttgtctcggaggctgacatctttgtgaccaccactggcaacagggacatcataatggttgaccacatgaggaagatgaagaacaatgccatcgtttgcaacattggtcactttgacaatgagattgacatgctcggccttgagacctaccctggtgtcaagcgcataccataagcctcagaccgaccgtgggtctt

SEQ ID NO: 405458 - DNA, 244 bp, Oryza sativa nipponbare
tgatggaggtactcctaaacattggctgatgttaaaggtggtaccctcatctcttacgaagggagagttcagctgttggagattgctcaagtccctgatgagcatgtgaatgaattcaagtcaattgagaagttcaagatcttcaataccaacaacctgtgggtgaacttgaaggccatcaagaggctggtagaagctgaagcacttaagatggaaatcattcctaaccctaaggaagttgatg

SEQ ID NO: 405459 - DNA, 516 bp, Oryza sativa nipponbare
  unsure (1)..(516): unsure at all n locations
ccgcccacgcgtccgcggacgcgtgggtttgcattgtagattgacaatggcctcttgtctgtcagtcctgttgctcttgtgtctagcacttgcaggttcagtctccgggcaacaactgtcggctacattctattcgaggtcgtgcccgagagctctggccatcatcagggccggcgtgagagctgcggtggcgcaggagcctcgcatggnggcgtcactgctcaggcttcacttccatgactgctttgtccaagcaagtcgtgcatttccacactancttgactacatttntatatccatcagtcaattacatngtggtcgcagcctttgcagtttcagttctttacactctntcagtctctcttccagtttaatgtgctgcgtcagaacagaatggactcgtagcactgtgttgacgttggattagagagactatggccaccgaatntgctctcaagtcatactagttcctactactactctgaattaacctgaaaaaattaactcaacgtgcta

SEQ ID NO: 405460 - DNA, 465 bp, Oryza sativa nipponbare
ctcctctcttcccccctctcacaagagagagagagcgccagactctccccaggtgaggattcagccatgaagggggccaaatatcaagggcgccgtcaagcccgacgccaagttggctgtgaagagtaagggcgcggagaagcccgccgccaagggcaggaaggggaaggccggcaaggaccccaacaagcccaagagggctccctccgctttcttcgtttgtatggaggagttccgtaaggagttcaaggagaagaaccccaagaataaatctgtcgctgctgtacgaaaagcagccggtgataggtggaaatccctgaccgaagcggacaaggctccctatgtagccaacgccaacaagctcaatgccgagtacaacaaggccattgctgcctacaacaagggcgagagcacttgcaagaatgcacccgccaaggaggaagaggaggactacgaggatgaatc

SEQ ID NO: 405461 - DNA, 442 bp, Oryza sativa nipponbare
gtttacaagcactttggtaaggagataattgcaaaggagcttgaagttagtgaagaccatgaagatgttcatcggttgtatcttgcaatatataaaagctttgttgaggcgcttgatgcagtcgacaacggaatcaatcaatatgacacagaccaacccccaaagtatgtgaacaacacacacttgtcttcacgcgttgggcgtcttaatccagactggaccgatccagaccagtcacctgagaaggaaaatgctgcatttcaacaggcaatgatgcttgctggaagtgaatttatggagagtgttcgctttcatgttaagtcatggttacctgcgagatctattgtcttggagtgtttgttgtcaagaagaaaggttgatccaagtgaagaaattatggttttggatagattctgcccatggaaacttcatctgtttgagc

SEQ ID NO: 405462 - DNA, 524 bp, Oryza sativa nipponbare
cccacgcgtccggtgtacaagcactatggtaaggagataattgcaaaggagcttgaagttagtgaagaccatgaagatgttcatcggttgtatctggcgagatggtataactttgaagaggcgcggcgatgcacccaacaactgaatcaatcaatatgacacataccaacccccaaagtatgtgaacaacacacacttgtcttcacgcgttgcgcgtcttaatccacactggaccgatccagaccagtcacctgagaaggaaaatgctgcatttcaacaggcaatgatgcttgctggaagtgaatttatggagagtgttcgctttcatgttaagtcatggtaacctgcgagatctattgtcttggagtgtttgctgacaaaaggaaagcgtgatccaagttaacaaattatggctttggatagattctgcccatggaaacttcatctgtttgagcttgaagaggagctgaagattgatcccctcacaaactatgtgttgtaccaggattaaatgagcaaaactt

SEQ ID NO: 405463 - DNA, 497 bp, Oryza sativa nipponbare
  unsure (1)..(497): unsure at all n locations
ccggaatttgttcggcttcagacattcaacagaagtggatttcagcaaattcagctggatatggaatttctcaagacatcccttaaggagtttgttgatgatgaagcagctattagctttttacttaaagaggtgaacaatgctgctcacgagagatgtcttgacccaatccctctcgagccgcccatattggataagctcatcagtgcanaactagcaaagattaaagagcaaagtccaaatatgcagtagctacgcccaattggttattccttccnctagcaatcagtttcatctggtcatacaccgttcacagctatgtgcatatgtaaatctgtcaaacactcaaactgaaccaactcaccccgaaaatgtaatactatgttgagctctcagcatcgagaaatgctctgttagtnctgtgtgcatngtctcgagttcaggggaaatatngatgatcaagggactngaattaatcaacgtagtccaccgccaca

SEQ ID NO: 405464 - DNA, 510 bp, Oryza sativa nipponbare
  unsure (1)..(510): unsure at all n locations
ccggtcgcgtcgacgtgccggagttcatcgccggacatggcgaccgccgtcgtacccgggatttgccacgcggtggcgttgatgtggcttcttctcgtgttgttttgctgggcgccggggttgacgtcggcggccgatacggcggcgtacattgtgcacatggacaagtcggccatgccgagggcgttcgccagccaggcgagctggtacgagtccaccctcgccgcggcggcgcccggngccgacatgttctacgtgtacgacaacgccatgcacggctttgcggcgcgggtgaccgcggacgagctggagaagcttgaggggtccaggggcttcgtgtcgtgctaccccgacgacgcgagggcggtgaggcgtgacacgacgcacacggcggagttccttggcgtcagcgcgtcgtcnggcgggctgtgggaggcgtcgagtacggggaggacgtaatgtccgcgtggggacaccgncgtgtggcccgagagcgcgagcttccgcgac

SEQ ID NO: 405465 - DNA, 282 bp, Oryza sativa nipponbare
gtggctatggcccccaccgtgatggcctgctcaggcaccttcgtggctccattccaagggctcaagtccaccgtcgtgctgccagtcagccgccgctccagcaactagggcttcggcaacgtcagcaatggccgaaggatcaagtgcatgcaggtgtggccaattgagggcatcaagaagttcgagaccctatcgtacctgccaccactcaccgtggaggatcttttggagcagatcgagtacctgcttcgatccaagtgggtgccttgtctcgagttcagc

SEQ ID NO: 405466 - DNA, 558 bp, Oryza sativa nipponbare
cgtccgagcagctctagctagctacaggcatcagtggtcagtagagtgatcagttgcaactagctagctagttagattatatcttcagtgatggctccggcctgcgtctccgacgagcacgccgtcgcggtgtcggcggagcggctgtggaaggcgttcatggacgcgtccactttgcccaaggcctgcgccggcttggtcgacgacattgcggtcgaggggaacggtggtccgggcaccatctacaccatgaagcttaaccctgccgcgggtgtgggaagcacatacaagacccgggtggcggtgtgcgacgccgcaagtcatgtcctaaagtcggatgtgctcgaggcagaaagcaaggtggggaagctcaagtcacactcgacggagacgaagctggaggccaccggcgatggctcctgtgtggccaagctcaaggtggagtacgagctcgaggacggcagctcactgtcgccggagaaggagaaggacatcgtggatggctactatggcatgctcaagatgatcgaggactacctcgtcgctcaccctgccgaa

SEQ ID NO: 405467 - DNA, 416 bp, Oryza sativa nipponbare
cccacgcgtccggcctccgattctgtaccacgcgccgacgtcgactccaccgaaagcagcagccgacggcgagccagccagcagcctagccatgtcggaatcgaaggccgccgcggcggtgaccctgcgcacccgcaagttcatgacgaaccgcctcctctcccgcaagcagttcgtgctcgaggtgctccacccggaccgcgccaacgtctacaaggcggatctgaaggagaagctggcgaagctgtacgaggtgaaggactccaactgcatcttcgtgttcaagttgcgcacccacttcggaggcggcaagtccaccggattccggctcatctacgacaacctcgatgccgccatgaagtaccggcccaagtacaggcttatcaggaatggtcttgtcactaagggtgagatgt

SEQ ID NO: 405468 - DNA, 458 bp, Oryza sativa nipponbare
  unsure (1)..(458): unsure at all n locations
tccggccggattcccnnncnncccgcgtccgtgatctctttagctcggatcatctctgcatttgcatttgcagctgctcgtcacggcaatggcatccaccaacagctggacccacgagatcgagtcgccggtggccgcgccgcgcctgttccgcgccgccgtcatggactggcacacccttgcccccaagatcgcctcccacatcgtcgccagcgcccaccccgtcgacggcgacggcagcgtcggcagcgtcaggcagttcaacttcacctcagccatgccattcagccacatgaaggagaggctggagttcctggacgtggacaagtgcgagtgcaagtcgacgctggtggagggcggcggcatcggcaaggcgatcgataccggcgcgtcgcacatcaaggtggagccggcggcgaacggcgggagcgtcttgaaggtggagtcacgtacaagct

SEQ ID NO: 405469 - DNA, 403 bp, Oryza sativa nipponbare
  unsure (1)..(403): unsure at all n locations
tccggccggattcccnnncnncccgcgtccgcttggaagctaccttgctctgatgaccgttattttcttctgggccatgcacaagacagactttttcacggacaaattcggtgtcagatcaatcaggaacagtgaacatgagatgatgtctgcactgtacctccaagtcagtattgtgagtcaggccctcatcttcgtcacccgttctcgcagctggtccttcatcgaacgccctggtcttctcttggtcactgcattcatgcttgcacaactggttgcgacattcctcgctgtctatgccaactggggctttgccaggatcaagggcattggctggggctgggctgcgttatctggctttacagcattgtgttctacttccctcttgacatcttcaagttct

SEQ ID NO: 405470 - DNA, 390 bp, Oryza sativa nipponbare
  unsure (1)..(390): unsure at all n locations
tccggccggattcccgggtcgcccgcgtccgcccacgcgtccggtcgaactgttgaggaatcgctcgctcgctcgctcgctcgccggcggcgcggacgaggagggggcgagatgttcttccacatcgtgctggagcggaacatgcagctgcacccgcggcacttcggcccgcacctccgcgacaagctcgtctccaagctcatcaaggacgtcgagggcacctgcagcgggcggcatgggttcgtggtggcgatcacgngggtggagatgtcggcaaggggctcatcagggagggcacgggctacgtcaccttcccggcaagtaccagtgcgtcgtcttccgcccttcaaggcgaatcctgaggccgcgcaccatggcacaagatgggtc

SEQ ID NO: 405471 - DNA, 490 bp, Oryza sativa nipponbare
  unsure (1)..(490): unsure at all n locations
cccacgcgtccgtgcttcttcttcccgttcttgtcaagactgaaactcactggatcatcgaggagtggcaatggcggagcagcagctgatgcatggcaccctcgacgccaccatcttcgaggccaccaacctcaccaaccccacccgcctcaccggcagcgcccccgagggcatccgcaagtggtgggaaggggtggagaagacgaccggggttgggcagggcgggacgcggctgtacgcgacggtggatctcggcaaggcgcggctcggccggacgcgggtcatcgacgacgagccggtgaacccgcggtgggacgagcgcttccacctctactgcgcccacttcgccgacaacgtcgtcttctccgtcaaggtctcgctgcccatcgacgccgcgctcatcggccgcgcctacctccccgtcggngacctcctgtccgggcgagcgtcgagcgcaagctcgacatcctcgacgagcacaagaataagc

SEQ ID NO: 405472 - DNA, 440 bp, Oryza sativa nipponbare
aggggatcctgagctgctatcccctcccctgcccatgctggttgttactaaacctggtcaactcccagttgagtttcttgaaccctctgctgcccagaaactggtgattggatttgattgtgaaggcgtagacctttgccgccatggtgctctctgtatcatgcagattgcatttcctgacgctgtttacttagttgatgctattgagggtgggaaagaacttattgaagcttgcaaaccagcacttgaatcagaatatgtcaccaaagttattcatgactgcaaaagggacagtgaggctctgtatttccagtttggcataaaattgcataatgtgatggatacacagatcgcttattctctgttagaggagcaagaagggaaaaagagaggatacgatgagtacatatcttttgtcagccttcttgctgatccccgat

SEQ ID NO: 405473 - DNA, 386 bp, Oryza sativa nipponbare
ctccctcggatctctcctcgctcgcgcgttcgcgccgccgccttcccccttcccccgttgattgattgggaggaggatcaatggagtgcgtccgctccggctccggggttcttgatcccaggtgctctccgcggttcctggggaagaagggtggttcgctcacgtcatgtggtaaagccacttctacaaatcttgccatttgtaccaaacacgagcaaaacttgcatgggaatgttaaaccctcacagttagcagcaagtggatcctcttattctgttcacagaagtccagtgcttaagcagagacagaatctttctgctaggtctacctctgcagatgtatatactacttttgatgaaaatgtcagagctgtatcttcacatgct

SEQ ID NO: 405474 - DNA, 417 bp, Oryza sativa nipponbare
  unsure (1)..(417): unsure at all n locations
gnggcgagatgttcatcgagagcttccgcgtggagagcccgcacgtgcggtacggcgcggcggagatcgagtcggactaccagtacgacacgacggagctggtgcacgagagccacgacggcgcctcccgctggatcgtccgccccaagtccgtccgctacaacttccggaccaccaccaccgtccccaagctcggggtgatgctcgtggggtggggcggcaacaacggctcaacgctgacggctggggtcatcgccaacagggagggaatctcatgggcgaccaaggacaaggtgcagcaagccaactactatggctcactcacccaggcgtncaccatcagggtcgggagctaccaacgggagggatctacgcgcncttcaagagcctnctgcccatggtgaaccctgatgacct

SEQ ID NO: 405475 - DNA, 382 bp, Oryza sativa nipponbare
tccgtccgaattcccggtcacccgcgtccgcccacgcgtccgatccaggacaaggagggcattcccccggaccagcagcgtctcatctttgccggcaagcagcttgaggacggcaggacccttgctgactacaacatccagaaggagtcaacgcttcaccttgtcctccgtctcaggggaggcatgcaaatcttcgtgaagactctgaccggcaagaccatcaccctcgaggtggagtcttctgataccatcgacaatgtcaaggccaagatccaggacaaggagggcattcccccggaccagcagcgcctcatctttgctggcaagcagctggaggatggcaggacccttgctgactacaacatccagaaggagtccaccc

SEQ ID NO: 405476 - DNA, 391 bp, Oryza sativa nipponbare
  unsure (1)..(391): unsure at all n locations
gtggtggtctcggcggcggcggacgcggcggtggtgctcttctcgctcacggtggcggtggcggcgccgctgatcgacgcgcagtccgtgctcccgcgccacctcttcccggcgccgctcgtctccctcaagcggtggtacgcccgcgagttcggcgactacctcgtggcccgccccccgggcttcctccgggggctcgtctggctcgagctcgccttcctctggccgctcgccctcgccaccctctacggcatcctcgcccgccgncgctgggccggcaccaccttcctcatcgccggcgtctgcaccctcacctccatgtcagcaatacttggagagatggtgggctcgaagaaagcgacactaaaattgcttcagatgtatggtcctt

SEQ ID NO: 405477 - DNA, 472 bp, Oryza sativa nipponbare
cccacgcgtccgcccacgcgtccgtttttttgcaaactgaagccttcacgtgattacttgcagaataaaaagaacaacaaatatctttgtatcctcatcactaccacatatacacacattcataaagccaacaggaagccgcactgcaaccatcaaacgtaaatccaacactaatgaccaattacagcaagaaaagaatagatcagtggaagggaataacgacatgagatgatatacaagcgcaaaagaattgtcacgacgtgcatagtatcttctcccaaacatctcggttgcctcccactcgcaatgctcagaggcttccgaaagattctatggacaagagcttcctgttctgcgcaggtggtgccagtcctgggatgtctctgatgttcttgttgtgagggttgacaatcttaacaacaatgattgcaatcacaccacagactatcagaaataggaatgccatgatgca

SEQ ID NO: 405478 - DNA, 490 bp, Oryza sativa nipponbare; identical to SEQ ID NO: 391555

SEQ ID NO: 405479 - DNA, 490 bp, Oryza sativa nipponbare
gtccgcggacgcgtgggcggacgcgtgggcggacgcgtgggctcatttgattggccaggctccaggcacttttgttgcagcagctgctcgaaacccagtatgtaatttatcattgatggtaggaacaactgacatacctgagtggtgttttgtggagatttatgggaaagaagggaaaaactgcttctcagagtatccttcatttgatgatctttgtcaatttcaccagaaatcaccaatatcacatatatcaaaggtgagcacgccaacactttttctccttggagcacaagatctcagagttcctgtttctaatggcttacagtatgcaaggaccttgaaggagatgggagttgaaaccaaaattattgtctttccagaagatatgcatggccttgacaagccacagtctgattttgaaagcttcctcaatataggtgttggttcaagaagcacatgagcaaataaacaacatgcctctgtaccacac

SEQ ID NO: 405480 - DNA, 303 bp, Oryza sativa nipponbare
cccacgcgtccggtgatgagtcgttgggggtgaagattgcgaataggctcaacgtgaagccaagcatgtgaagaaactaaggcacaagaatgcatcatctcttgttaattaattggagtactaccaaccaaataaggccagacaatgtcagatgcacgcatcttctgttgtcgttgggccatcttttgtatgcatcctattgttaattactagtacatgatatccaaatgatcatcaacaaggctacagaaattctgtaatacggataattaaaagaaaccaaaatggagcctgcatatgtgt

SEQ ID NO: 405481 - DNA, 373 bp, Oryza sativa nipponbare
cgatgaactaccctatagactcatgggaatttggtaatgagttgagtggaagtggaattggtgcaagtgttggagctgaacaatatggaaaagatataattgagctcaagaacatcatcagccagttatatggaaactctaggaaaccattggtggttgccccaggaggattctatgaccaaaaatggtatgctcagcttcttgatatctctggtccaaatgttctcgacacaatgactcatcatatttacaatcttggtgctggtaacgatccgcaagttgcaaataggatcttgaatccgcagtatttgagccagagctctgatacattcagagatctccaaatgacgatacagcggcatggaccatggtc

SEQ ID NO: 405482 - DNA, 477 bp, Oryza sativa nipponbare
ggcgaggctcccttacctccaggccgtggtgaaggaggccatgcggctgcaccccgtggggccgatcctgctcccccaccgcgccgtggaggacggcgtggagatcggcggctacgcggtgcccaggggcgccatggtgatcttcaacgcgtgggcgatcatgcgcgaccccgcggcgtgggagaggcccgacgagttcgtgccggagcgcttcatggagacgactacggcgatcgatttccgcgggaaggagtacgagtacctgccgttcgggtccgggaggaggctgtgcccggggctgccgctggcggagcgcgtcgtgccgttcgtgctggcctcgctgctgcgcgcgttcgagtggcgccttcccgatggcgtgtccgccgaggaccctgacgtcagcgagaggttcaacaccgccaatgtgctcgccgtgcctttcaaggtcgtgcctgtcattgtcaactagtcacacct

SEQ ID NO: 405483 - DNA, 460 bp, Oryza sativa nipponbare
  unsure (1)..(460): unsure at all n locations
gtcgtggaggtggaaatcaaggagaagggctccgaggagtggaaggcgctcaaggagtcatggggtgccatttggaggatagacacccccaagccgctcaagggccccttctccgtccgcgtcaccaccgagggtggcgagaagatcatcgccgaggacgccatccctgatggctggaaggccgacagcgtgtacaagtccaacgtccaggccaagtgagcattttaagcaaggaagaaaccagcgtacgtacgatccggcgcggctgcctatatatatatatatatatatatatatatatatatatatatatatatatatatatatatatatatatatatatatatatatatatatatatatatatatatatntntttntntntntntncncntttttncccccccccctccccatctatattctttcatatatatccacctctctctatctctataaa

SEQ ID NO: 405484 - DNA, 430 bp, Oryza sativa nipponbare
  unsure (1)..(430): unsure at all n locations
ataaagtgagagaccgtgattggatcgatcaccggagcgacgatcaatggcgacgctcaccgtgcccgccgccgtgccgcccgtcgccgaggactgcgagcagctgcgcaaggcgttcaaagggtggggcacgaacgagaagctcatcatctccatcctcgcccaccgcgacgcggcgcagcgccgggcgatccgccgcgcctacgccgaggcgtacggcgaggagctgctccgcgccctcaacgacgagatccacggcaaattcgagagggcggtgatccagtggacgctggacccggcggagcgggacgcggtgctggcgaacgaggaggcgaggaagtggcacccggngggccgcgcgctcgtcgagatcgcgtgcacgcgcactccatcgcagctcttcgctgcgaagccagcgtaccacgagcgc

SEQ ID NO: 405485 - DNA, 474 bp, Oryza sativa nipponbare
cgtccgcccacgcgtccgatttctggcaggtagcaataattggccgcccaaatgttggcaagtcaagtctgctgaatgcttggagtaagcttgcagagtgaaagggctattgttactgaaatagctggaaccacaagggatgtagtagaagcaaatgtctcaattcatggcatccctattacccttctagatactgctggtataagagaaactgatgacatcgtggaaaaaattggtgtggaacgatcagaagctgctgcactgggagctgatctgattattatgacaataagtgcagttgatgggtggactgaagatgacactaaacttattgagcatgtgttgatcagtaagaaatcttcaggtgcctcagtgcccatggtccttgtaatcaacaaggtagattgtgcaccatttatttcaagagaacagtttgaacaattcccatggattttcaaaaaacatgtgcaaaca

SEQ ID NO: 405486 - DNA, 235 bp, Oryza sativa nipponbare
  unsure (1)..(235): unsure at all n locations
ccagcgtccggcggcggcggcgtcttgtgcgcgtgagaaagagaggagaagaagatggcgacgatcgtgaacacgacggaggaggagccgatgctggccgtggtgcgcttcaccgccgagctggcctgggcggacgccggcgccgacgtcgccgagccggaggtcacccgtctctgcgtcgaggcgcagcagcacatcctcgccgcccgctggctcgacatgngcctcctcatgc

SEQ ID NO: 405487 - DNA, 413 bp, Oryza sativa nipponbare
  unsure (1)..(413): unsure at all n locations
tccggccggattcccggtcgaccaccgtccgggttggttcgctcgctccccgggattatcagccatggggcccacccgtcagtctcactccctcctcctcaccttcctcctcgtcggcgccgccgccgccgccgccgcggcctcgccggaggacgggagccccttcctccgcctccccaccgcctcggacctccccgtccccgccgggcagctcccccgctccgccgccgtcggcctcatccgcgccctcaacctncacccgcgcgacgcctncccctnccccttcagccgcggtgatggggacgtccccgccggaaccctagtcgagaggcccatccacctcgccttcatggccaccgggaagagcggggctcgtcggctgagacctngncaccacgcggtactaccgctcc

SEQ ID NO: 405488 - DNA, 338 bp, Oryza sativa nipponbare
cgttcatggaccacaaagctggcaaagcgtctcaacgtctgtgggctcatgaactgccagtatgctattactacttctggtgaggtattccttcttgaggcaaatccccgagcctcacgcactgtcccttttgtctcgaaagcaattggacatccattggcaaaatatgcatctctggtcatgtctggtgtgaccttgccagagcttgggtacactcaggaagttgttcctaagcatgtttctgtcaaggaggcagttcttccatttgagaaattccaaggctgcgacattcttctgggaccagaaatgcccaacaccgggaaggtgatgggcattga

SEQ ID NO: 405489 - DNA, 472 bp, Oryza sativa nipponbare
ggaagacatgatggtactcccacacattcagtatgctttgtttggaacagtggtcgggagggtgaggatgtggaattggtgggggattttacaagtaactggaaagacaaagtaaagtgtaaccacaaaggtgggtcaagatatgaagctgaaattcgacttcgacatgggaagtactattacaaattcatagcagggggccagtggaggcactcgacttcattgccaacagagactgatgaacatgggaatgtcaacaatgttatcagggttggtgacatcgttcgtattcggcctgctcccaaccaactgcagataagggacccaactgttgtcaaagttatagagagggcactaactgaagacgagcgattcttactggccttcgctgcacgcctcatggcatttgcaatctgctcaatcaaaatgtcttccaagcaatgaacacattataattcctactgagattaac

SEQ ID NO: 405490 - DNA, 338 bp, Oryza sativa nipponbare
accacgtcctacgaattcgatcgcttcacaccaagaaaacctcgctagctagcttgtagctcgccatgccgggcggcggcgcgatggtggcggcgagcggcgccggccggcctgagtacccgggcgggctcaccatgttcgtgtccatggcgtgcctcgtggcggccaccggcggcctcatcttcggctacgacatcggcgtctccggcggcgtcacctccatggacccgttcctcagcaggttctttcccgtggtgtaccgcgcgcagtcggcggcggctgcggcggccggcgggaaccagtactgcaagttcgacagccagctgctgaccatgttc

SEQ ID NO: 405491 - DNA, 433 bp, Oryza sativa nipponbare
  unsure (1)..(433): unsure at all n locations
cccacgcgtccgcccacgcgtccgcccacgcgtccgcccacgcgtccggcagcagcagcagttatacagcatcgctcgctcgtcttcgtcatcctcgtcggagcgccaaccagccgaccacgacggcgatagcgccgccgatgagccgcgcaccattgcttacgacggcgacagcgatggcgatgctaaagaaggtctccgtgattcatccaggagcatggtgcagatgcagagggaagtccagaggaagctccaggagcagattgaggtcaagaggcatctgcaactgaggatggaggcacaggggaggtacctgcagtcagtgctacgcagggcgcagcaagtcctggccgaccatagcctggcaagctcgccggaggccgccacggcggagctctcggagctcgcctncgccgtggacatcgagtgcatg

SEQ ID NO: 405492 - DNA, 396 bp, Oryza sativa nipponbare
cgtccgatccaattcagttcatggaaaccaaaattgcatccactgtgttagtcttgctcctcctcacccttgatggtgtggcggctgccaagatgtgtcatgatccaagccaaaccttcagaggcttgtgcggccaccccaccaactgcatcgcctgctgcaccaacgagggctacacaggaggctactgcacaactgttagacacaaatgcatgtgcaccaaagcgtgtggaggggagagtccgcctgatgatccgccgtcggcgatgccggcatcgccagtgacgacgacaagagcctgatcgctgaaaatatatatgttgcaatggagaattaatgagatgtacttgctgaaattaaatggatgcaacaataaagaaagatgattcacaggtg

SEQ ID NO: 405493 - DNA, 204 bp, Oryza sativa nipponbare
  unsure (1)..(204): unsure at all n locations
cgctactaaggactatctactgcgtcctaactagcctaacatagtggccataagcnaagaattcaccttggcataatctatcttcatgacaagcctactgctgataactgtccacagaaggtatatgatgctttggttgatgcacttgagcatgtcagccagtatgagggatacattctagagactggtcaagggccttgctcg

SEQ ID NO: 405494 - DNA, 257 bp, Oryza sativa nipponbare
cgcgtccgcccacgcgtccgcccacgcgtccgcaccgaagcagagtagagaaggagaggagcggagcgccatcagccgtccgatcgagtgatccgatggctctcgctctctccacctctgctgctgctgccgctgccgccgcggcgcgggcgctcgcggcgagggtgacgacgacgaggggttacgccgcgtcggcggcgtcgtcggcgatgaggcgggcggcggcggcggtggaagggaagggcgctgcggggatg

SEQ ID NO: 405495 - DNA, 421 bp, Oryza sativa nipponbare
  unsure (1)..(421): unsure at all n locations
cacgcgtccgatcgcctattggcgtccatgaaggcaatctaaagatcaaagaaatataccacttcactcaagatgatctgatgacagaagatgtattcattctggactgtcactcagatatatttgtttgggttggccagcaggtagatgtcaaagtgcgattacaagctctggacattggtgagaaattcgttaagcttgatttcctgatggaaaatctatccagcgacacaccaatttttgttatcatggaaggaagtgagcctacattnttcacaaggttcttcacttgggactcagcaaagtcacttatgcatggcaattcataccagaggaagctttccattgtaaaggngtggggttctcctgctttggataaaccaaagcgacgaacaccaacatattcagggagaagcactgt

SEQ ID NO: 405496 - DNA, 324 bp, Oryza sativa nipponbare
cgtccgcccacgcgtccgctcgaagtgcaagcgctacttccacaaccgtctgaagccagccaagcttacatggacagccatgtacagaaagcagcacaagaaggatattcacgccgaggcagtcaagaagaggcgccgcaccaccaagaaaccgtactcccggtctatagttggtgctacccttgaagtcatccagaagaagagagctgagaagccagaggttcgtgatgcagcaagggaatccgctcttcgtgagatcaaggagcgcatcaagaagacaaaggacgagaagaaagcgaagaaggcagaggtggcaaaatcgca

SEQ ID NO: 405497 - DNA, 375 bp, Oryza sativa nipponbare
tccgatgaacttcaaccacgatgaggctgacatcatggaacaggaagttggtgcgctgctatctcgactcagatacatatcgtccactctattctacaccgatgtcacatacctggagttcttggacagggtgcacacttctgagctgaagctgagggctcaaggcctctgggaagtcccacacccgtggctgaatcttctgatcccaaggagcacagtccacaaatttgcaaaggaagtcttcggcaagatcctaaaagatagcaacaatggtcccatactgctttacccagtgaacagaaccaagtgggacaacagaacatcagtggtcataccagatgaagaaatttctacctggttgggtcctatcttcag

SEQ ID NO: 405498 - DNA, 388 bp, Oryza sativa nipponbare
cccacgcgtccgcccacgcgtccgcacccaccctctcgccgtcgcagatccgatccaggaagagctcgccgccgccgctgccatggcgctctccgtggagaagacctcgtcggggagggagtacaaggtgaaggacctctcccaggcggacttcggccgcctcgagatcgagctcgccgaggtcgagatgccggggctcatggcgtgccgcgccgagttcggcccctcccagccgttcaagggcgcccggatctccgggtccctccacatgaccatccagaccgccgtcctcatcgagaccctcaccgcccttggcgccgaggtccgctggtgctcctgcaacatcttcttcacgcaagaccacgccggcggcggcatcggcagggac

SEQ ID NO: 405499 - DNA, 372 bp, Oryza sativa nipponbare
gcaatggcgatgagaggcggtggtgcgacgatgctgtcgtggtacttgcaggtggcggcggtgagcttgctggcgatggcgacggggctggaggcgcagctgcgggtggggttctacgacaactcgtgcccggcggcggagatcatcgtgcagcaggaggtgagcaaggcggtgtcggccaacccgggcctcgccgccggcctcgtccgcctccacttccacgactgcttcgtcagggggtgcgatgcgtcggtgctgatcgactcgacgaaggggaaccaggcggagaaagacgccgggccgaacaccagcctgcgtgggtttcgagtggtcgaccgcatcaaggcccgcgtcgagcaagcttggtttcgg

SEQ ID NO: 405500 - DNA, 380 bp, Oryza sativa nipponbare
cggacgcgtgggaaattatacaactacggcagtggaaggcatccatggggtgatcttaaacctgattaccttgaaaagaaaggttgtgtcgaagctcattccgatgatggattgcttgaaatattcggtctgaaagaaggttggcatgcttcattcgttatggctgagctaattaaagcaaagcacattgctcaggctgcagccatcaagtttgaaatgaggggtggccaatggaatcgtgcgtatgttcagatggatggagagccatggaaacaaccactcctacaggagcagtcaaccattatcgagataaacaaagttccttacccttctctgatgataaatggggagcaaatagatcttccccgatttcaatcagg

SEQ ID NO: 405501 - DNA, 423 bp, Oryza sativa nipponbare
cggacgcgtgggtacgacttcgagggcaggaaggacctcgtcaggttcgtgaaggccgtcgccgacgccggcctctacgtgcacctcaggatcgggccgtacgtctgcgccgagtggaactacggagggtttccggtatggctgcacttcgtgccggggatcaagttccggacggacaacgaggcgttcaaggcggagatgcagcggttcacggagaaggtggtggacacgatgaagggcgcggggctgtacgcgtcgcagggcgggccgatcatcctgtcgcagatcgagaacgagtacggcaacatcgactcggcgtacggcgccgccgggaaggcctacatgcggtgggccgccgggatggccgtctccctcgacaccggcgtgccgtgggtcatgtgccagcagtccgacgcccccgac

SEQ ID NO: 405502 - DNA, 377 bp, Oryza sativa nipponbare
  unsure (1)..(377): unsure at all n locations
acgcgtcacggcgacgcgtccgaccacgcgtccggttttgttggcccccattcctcccccaccccggtgtcctcccctccgccgctcgcgtcgccgggtttttcccctatggcgctgccgaatcaggggaccgtggattaccccagcttcaagctggtcatcgtcggcgatggcgggactggtaaaactacatttgtgaagaggcatctcactggagagtttgaaaagaaatatgagccaaccattggtgtcgaagttcaccctctagattntaccaccaactgtggtaagatccgcttctactgctgggacactgctggacaagagaaagtnggtggacttagggatggatactatatccatggtcaatgtgcgat

SEQ ID NO: 405503 - DNA, 386 bp, Oryza sativa nipponbare
  unsure (1)..(386): unsure at all n locations
cccacgcgtccgcccacgcgtccgcccacgcgtccgcggacgcgtgggttcataactagtccaaaagggtttgcccaatgggaattggatttattataccggcaccatgcatgttccaatcttttgtcctgtctcaccaccttggaatccctttccagtttggtccaatcactccccagaatgattgttatggatgaaattgggaggcaggttgagctttctcttgaagctgcaagtttagctcaaagaaacgcaagcctcggaataagtgactcttcagcagtatctgcaacaagagcgagggctttggctgaggatgcatnttttcatccatcntgtatgtctatcagttatgcttcaatagagcactatnntgcgattacatg

SEQ ID NO: 405504 - DNA, 407 bp, Oryza sativa nipponbare
  unsure (1)..(407): unsure at all n locations
cggagaagctgatgacccagatcttcgacctcaagttcacctccaagtcgctgcagcggcaggcgcgcaagtgcgagaaggaggagaaggagcagaagctcaaggtgaagaaggcgatcgagaaggggaacatggacggcgcgcggatctacgccgagaacgccatccgcaagcgcaccgagcacatgaactacctccgcctcgcctcccgcctcgacgccgtcgtcgcgcgcctcgacacccaggcgaagatgcangtcatcggcaagtccatggccaacatcgtcaagtcgctcgactccgcgctcgccacggngaacctgcagaagatgtccgagaccatggacaacttcgagcgccagttcgtcaacaatgaggtccaagccgagttcatggagggcgccatg

SEQ ID NO: 405505 - DNA, 429 bp, Oryza sativa nipponbare
cggagcgtacgtgctaagctgcagcacaacccaaagccatatatctacgataatggcgaactcaccgacgctgacaatgctggtgtgcctagctattgggctatctgtcgtcctctccgcagccggcgtgtctgtggagagcgtggtcaccgaggcgtacttcaacgggatcaagaaccaggccccgaacggctgcgccggtaagagcttctacacacggtaatcgtttctgaacgccgaccgctcctactcgggctttgccaatgaccgcaccaacgacgactccaagcgcgagatcgctgccttcttcgcgcatgtcacacacgagactggacatatgtgctacatcaatgagataaatggggcaaacatggactatcgtgacaggagcaacaaacagtggccggccagccgggccaagagtactac

SEQ ID NO: 405506 - DNA, 456 bp, Oryza sativa nipponbare
cccacgcgtccggctgctgctgctgctggtggtggtagacagcgaagccggcgaaccacctcggtttcgttggcatcgtcagtcctccaggtccacggccactagctaccatctagaagcttccggaagcttcgggaaggaagccgccccccgcgccgccttgccgggcctcgcaatgccggaggagaaggagtacgcgcccgtgcccctcggccaggcgccggaggcggtggaccccgaggacccggtcaagtcgccgccgcggcccacctcgccggcgaactccacccgcaaggcatgttttgctgttcttcaaagctgggtgtcaagaaaatttatgacaggatgcgtagttcttttccctgttgctgttacattcttcatcacctggtggtttgttaagtttggtgatggatttttcagtccactgtatgcaaagcttggatttgatatatt

SEQ ID NO: 405507 - DNA, 437 bp, Oryza sativa nipponbare
cccacgcgtccgggggctgcaactacaaaatctccttggaatgcacctgagcttttcgatctatctcttcttgaaggtgaatctcttagagaatggctattctttgacacaccaagacgggcatttgatagcggcaatcggaagcaaaggtcattgccagattacaatggccgtggatggcatgaatcaaggaagcaagtgatgaaagattttggaggtctgaagaggtcctattacatggatccacaaccatccagcaactatgagtggcatctttttgaatatgaaaccaatgattctgatgctctagcgctgtatcggcttgagtacaagtcttctgatactaagaggagtgttaaatcaaaattggcaagcagtccactgagtgaaatacagcaacaaatggtcaggcttagtgcagacaagtctgtggaaag

SEQ ID NO: 405508 - DNA, 393 bp, Oryza sativa nipponbare
cccacgcgtgcgcccacgcgtccgggcagaaattgcacgggtagatgcaagctgctccacgttcattctagtacactatctcccttgcaatggtcacaatagctctttgtggatctgaggatcagaagcacaagaacttgccatcccttgatcaacttactgctgatggttgctgggcattgacagaaccaaatcatggaagcgatgcaagctctttgatcactacagcaaccaaggtacctggtgggtggcacatagatggacaaaaacgctggattggtaacagtacttttgctgatctgctcgtggtattagctaggaatgccaatacaaaacaactaaatggatttattgtgaggaagggtgctcctggcttgaaagctacaaagattg

SEQ ID NO: 405509 - DNA, 464 bp, Oryza sativa nipponbare
cccacgcgtccgcggacgcgtgggcgcacctgcagagtgcagacagagacaaaggcgacgtctatcatgtccctgcgactgcgtctcgccttccgtctcctcttctgctactgcctcctcctcgccgccgctcatccgtcgtcccgccgcctcctccccctcctcgtcgtctccgccgccgaacgcacgaacgtcgccagcctccctggcctcgatggcgcgctcccttcccgcttcgaaaccgggtacgtgaccgtcgacgaggagaacggcggcgagctgttctactacttcatcgagtcggagggcgaccccggcgccgaccccgtcctcctctggatcaacggcggcaaccgctgctccgtcctcagcgcgctcttcttcgagatcggtccggtgaagctggcgatagagccgtacgacggcggcgtgccgcggctgcggtacaacccctacacgtggac

SEQ ID NO: 405510 - DNA, 545 bp, Oryza sativa nipponbare
  unsure (1)..(545): unsure at all n locations
cccacgcgtccggcactcctctcctctcatctgacatatctcctcccgtcctttcgaagcctctcgaatcgcatcgccgagccggatggcggtcaccgccgacgtgaagctcgagggcctccgcgccgccaccgacaagctcgaccagatcagcgagaacgagaagtccgggttcatcagcctcgtttcgcgctacctcagcggcgaggcggagcagatcgagtggagtaagatccagaccccgaccgacgaggtggtggttccctacgacacgctctcggctgctcccgaagatctcaacgagacgaagaagctgctcgacaaactcgtcgtgctcaagctcaatggaggcctcgggacgaccatgggctgcactggtcccaagtctgtcattgaagtccgcaatggctntacgtttctagaccttattgtgattcaaattgagtccctgaacaagaagtatggatgcaatgtccctttgcttctaatgaactcattcaacactcatgatgacacacagaaagatggtngagaagtactccaac

SEQ ID NO: 405511 - DNA, 504 bp, Oryza sativa nipponbare
  unsure (1)..(504): unsure at all n locations
cgacgccgtcgtggacgcgctcggccgcgcgcgccagttcgacgccgcgtggaggctcgtcgtcgaggccgcggcggacggcgccgccacgccccgcacgttcgcggtgctcgcgaggaggtacgtcgccgccgggatgacgcggcaggcggtgcgcgcgttcgacgacatggaggcgttcgtcgggagggagcccgacgccgccgagttcaccacgctgctcgacaccctctgcaagtacaagtatccaaaggttgcagcggaagtattcaacaaaagaaaatacaagtatgaaccaaacgaaaagatgtacactgttctaatttatggttggtgcaaggcatgcaagcttgcaccctgattaccggttagatagaacagttcgtgcagctgaggatctctngaaagaaatgcatcaaaggggaatcgaacccgatgatacaggctactctgtcatcctgcatggttacagtcgtgcgcatatacctgagctatgtctttgat

SEQ ID NO: 405512 - DNA, 406 bp, Oryza sativa nipponbare
cccacgcgtccgcggacgcgtgggcccaactcggcgtcgcgccgcctcaaccgaagcaaggagcaaagcggggattcagaacgggaaggagaaggtccggttcgtccgctctcgagctcaagtgtcagttgaagtgttttgaaagtcatggcggagcatttggcttcaatatttgggactgagaaggatagggttaactgccccttttacttcaagattggggcttgccgtcatggggatcgttgctcccgtctgcacaacaggccaactgtgtcgccgacaattgtgcttgctaacatgtatcagcgccctgatatgatcacaccaggagtcgatgctcaaggccaacctattgatcctgaaaagatgcaggagcactttgaggatttctatgaggatatctatg

SEQ ID NO: 405513 - DNA, 419 bp, Oryza sativa nipponbare
  unsure (1)..(419): unsure at all n locations
atctcctctccctctccgcccatttctcctctccacctgcgatccatccgcgcccgcgaggaggagggagccggacgctcccgcggggagagcaggggagagaaggagaggaggagatcgccgtcnccgtcgccgtcgccgtcgccgatctcgagcgggagcggagatggggctcacgttcacgaagctgttcagccgcctcttcgccaagaaggagatgaggatcctcatggtcggtctcgatgcggccggtaaaaccaccatcctctacaagctcaagctcggcgagatcgtcaccactatccccaccatcggttttaatgtcgaaactgttgagtacaagaacattagcttcaccgtttgggatgttggggtcaggacaagatcaggcccctgtggaggcactatttccagaacac

SEQ ID NO: 405514 - DNA, 320 bp, Oryza sativa nipponbare
gcccttacgggatcaacccggccggttacacaatccacagggttatccatgaggtgcggcacgatgtgactggtgtgctgcacacccacacggccgccggtgtcgcggtttcggcacagcagcagggcgtgttgcccatcacccagcaatcgctgttcgtgctgtcaagcctggcctatcacgcttacgaaggggtggccctcaaccatgaggagaaagcgcggttgcaggccgatctcggcgaaaacaactttctgatgctgcacacccacggcctgctcacctgtggctcgaccatcgccgacaccttcctgatgatg

SEQ ID NO: 405515 - DNA, 453 bp, Oryza sativa nipponbare
acacgccggactctccccttctctctgtctcgctccttcgttcgctcgctttatcccccccgaataaaggcgagaagccgcagcggcggacgaagaagagggcagatagaaatggcggcggagactttcctcttcacctccgagtccgtgaacgagggtcacccggacaagctgtgcgaccaggtgtcggacgcggtgctcgacgcgtgcctcgcccaggaccccgacagcaaggtggcgtgcgagacgtgcaccaagaccaacatggtgatggtgttcggcgagatcaccaccaaggccaccgtcgactacgagaagatcgtccgcgacacctgccgcggcatcggcttcgtgtcctgacacgtcggcctcgacgccgaccgctgcaaggtgtcgtcaacatcgagcagcagtcgcccgacatcgcgcaggggggcacggcacttaccaagc

SEQ ID NO: 405516 - DNA, 392 bp, Oryza sativa nipponbare
cccacgcgtccgggcttacaaccttatttgaagagagggcaaaatgggtaccagcatatgtcaaggatactttctgggctggtatatccactgttcgccgcagtgagcggttggaggccttttttgatggatacattacaccagagaccacaattaagacatttattgaacaatttgatactgctatgaagcttaggtctgaccgagaagcgtatgatgattttcgctcatttcagcaaaggcctcaagtcttgtctggtctactctgtgaggagcaatttgcaaatgtttatacaataaatatgtttcagaagttccaagatcacttgaagcagctgatgaacgtgacttgcacttgagtcagtaggaatggatcaatagtgacttacact

SEQ ID NO: 405517 - DNA, 408 bp, Oryza sativa nipponbare
  unsure (1)..(408): unsure at all n locations
cccacgcgtccgcccacgcgtccgcccacgcgtccgccgactgcttccggcggagcgtcagggaggaagggctccccgtgctgtggcgcggcctctgcaccgtcgtcgcgcgggcgttcgtcgtcaacggcgccatcttctctgcctacgagctggcactccggttcttggctagcagcagcaacgaccagaggctggtcatggaggagaactgaatcaccgagacggcgagactgcaggggttgtacatagactagtattcattggcagcatttccgaggctcgtagcgtcgcaggaagatgagattntcagagaaagcatcgttgctgcagaggtcgtgtagattggcattataggtttgccaaatgatgatgatgatcaatcctcaatgtctagggaaaactttt

SEQ ID NO: 405518 - DNA, 399 bp, Oryza sativa nipponbare
  unsure (1)..(399): unsure at all n locations
gtccaaaccctcgcgaaggcagagtcggggatagggatatcgccgaggtgggagaaggcgacgtcgccgacatgaagctgttcgtgaagaccctgaagggcaccaacttcgagatcgaggcgagccccgaggcgtcggtggctgaggtgaagagaatcattgagagtactcaggggcagaatgtgtacccggcggatcagcagatgctcatacaccaagggaaaattctcaaggatgatacaactttggaaggcaacanagttgctgagaactagcttctttggtataatggtgtctaaagcccaaagcatcataaaggggagctttaactggtttaaaaggaccttgtagccagtctcaaccagcaactccagttgcctcagttgcaagaacaccacc

SEQ ID NO: 405519 - DNA, 98 bp, Oryza sativa nipponbare
cggacgcgtgggttgatctgtgtgatttgagtgagtgagtgagattctttggaggagggattttggtttggtttggtttggcggcttgtgcgggattt

SEQ ID NO: 405520 - DNA, 535 bp, Oryza sativa nipponbare
cccacgcgtccgcccacgcgtccgaagaactcctcctcccctcccccagcattgccgtgggatgtggcggcggcggcggcggagttgaggcgatcaacaatggctgcggcgatggcggagtcggataataacggcagcgaggtcagccccggcggcggcgggagggactcggcgtcggcggcggcggcggtagcttcgccggtgaaggcgaaggcgagggcgttgctggagctggagacggccagcgcggcggcggcggcgtcggagtcgtcggaggcgagggtcgacgacggcaacatccaggaggccgagtcgtcgctccgcgagggcctctccctcaactacgaggaagcgagggctctcctagggagactggaataccagagaggcaatgtagaagctgcactgcgagtatttgatgggatagatcttcaagctgctatccagcgctttcaaccatcgctttcagaaaagccaccctcaaaaacaagtaacaaaatacgttcagattcatcgaatttaggatcgcagcatg

SEQ ID NO: 405521 - DNA, 470 bp, Oryza sativa nipponbare
atactgattgctcgctcgctcgctcgctgcgtcgccgcactttctccacagatttttctgctgctgttgcttcgtcgcctcgcccgcggattccgtactactaccggagggtttggttggttgatttggtttggtttagccatggccgggagagggaaggcgatcggctcgggcgccgccaagaaggccatgtcgcggagctccaaggccgggctccagttccccgtgggcaggatcgcccggttcttgaaggccggcaagtacgccgagagggtcggcgccggcgccccggtctacctcgccgccgtcctcgagtccctcgccgctgaggttcttgagctcgccgggaacgcggcgagggacaacaagaagacccgcatagtgccccgccacatccagctcgccgtccgcaacgacgaggagctatcctcgctgctcggcacggtcacaatcggcagcggaggcgtatg

SEQ ID NO: 405522 - DNA, 568 bp, Oryza sativa nipponbare
  unsure (1)..(568): unsure at all n locations
cccacgcgtccgcccacgcgtccgcgagaacaagatcaacaggcaggtgacgttcgcgaagcggaggaatgggctgctcaagaaggcgtacgagctctccgtgctctgcgacgccgaggtcgccctcatcatcttctccaaccgcggcaagctctacgagttctgcagcggccaaagcatgaccagaactttggaaagataccaaaaattcagttatggtgggccagatactgcaatacagaacaaggaaaatgagttagtgcaaagcagccgcaatgagtacctcaaactgaaggcacgggtggaaaatttacagaggacccaaaggaatcttcttggtgaagatcttgggacacttggcataaaagagctagagcagcttgagaaacaacttgattcatccttgaggcacattagatccacaaggacacagcatatgctngatcagctcactgatctccagaggagggaactaaatgtgtgtgaagcanataagtgcctcagaagaaaactggaggagagcaaccagttgcattgaccagtgtgggagcacggcgccaccctactc

SEQ ID NO: 405523 - DNA, 375 bp, Oryza sativa nipponbare
  unsure (1)..(375): unsure at all n locations
gcttttgcccaacctcgagacatacatgcagcttttagagccggaattacaacttgataagcagaaaaatgagatgaaaagaaaggaagcatggcgtgtttatggtgccctgctgtgtgctgcaggaaaatgcttatatgatcggctcaagttgtttcctaatttgctttctccatcaacacggcctcttttgaggagtaataagagagtcgtgactaacaacccanataaacggaagtctagtacagatctctccacatcccagccacctctgaagaagatgacaacagatggtgcgatgaattctatgacttcagctcccatgccaggaacccatggatggcttctccacccaattaccaaccctagcatgac

SEQ ID NO: 405524 - DNA, 361 bp, Oryza sativa nipponbare
cccacgcgtccggaaaaatgttcctactgagattgcctcaaaacttgttcatccatcaaggagattgcctgtggttgtttctggtcttcttcaacatgagtcaaaaatatcggttctccatttcagcataaagaaacatgactcctatgaagctcctatcaaatcaaaggactccttaattttcaatgttgggttccggcagtttactgctaggccattgttttcaactgacaacatcaattgcaataagcataagaaggagaggtttctacatcatgggcggtttctggtgcctctgtatatgctccaatttgctttcctccactccctcttattgttctaaagagcagagatggggagc

SEQ ID NO: 405525 - DNA, 493 bp, Oryza sativa nipponbare
  unsure (1)..(493): unsure at all n locations
cccacgcgtccggatgaatgtatcgattcaaatgaaagaagatcaggagacagataaagcttttggatgggtcttggaaatgtatgcatatgctgttgctagtgcactccatggggttcaacatatccttcgaaaagatttcatgattcagccaccttttgataccaaacttgggaatacatttattatccacttcacttacggatgtgactatacactcaagggtgtactaacctatggaaaaattggtgaatggagatttgacaagagagcataccaagacaggccaccgccacgaaatcttacattgccccctccaggagtcctcagaagtgggttacacttgtaaagatggtaaacgaggctaccgcanacctttcagggtgggatgatggaagatagactatgacgaccaatgttgctgattagtgattactcattctgatagctgccccattcctctctattcaggggcaatacaccataaatgata

SEQ ID NO: 405526 - DNA, 320 bp, Oryza sativa nipponbare
cccacgcgtccggggcattcccccggaccagcagcgtctcatctttgccggcaagcagcttgaggacggcaggacccttgctgactacaacatccagaaggagtcaacgcttcaccttgtcctccgtctcaggggaggcatgcaaatcttcgtgaagactctgaccggcaagaccatcaccctcgaggtggagtcttctgataccatcgacaatgtcaaggccaagatccaggacaaggagggcattcccccggaccagcagcgcctcatctttgctggcaagcagctggaggatggcaggacccttgctgactacaaca

SEQ ID NO: 405527 - DNA, 421 bp, Oryza sativa nipponbare
cggacgcgtgggcggacgcgtgggtccccctccgccgccgccgcagcggagcagcaacagcaggcgagcgacatgggagggtttgtcaagacccagaagacccatgcctacttcaagcgtttccaagtcaagttcaagagacggaggcagggcaagactgactacagggccaggattaggctcaccaaccaagataagaacaagtacaacacaccgaagtaccgctttgttgtgagatttacaaacaaagatatcacagctcaaattgtctatgctaccattgcgggtgatatcgtgatggctgctgcctactcccatgagctgcctcgttatggtcttgaagttggtctcaccaactatgcggcagcttactgcactggcttgcttctggctcgccgtgtgctcacgcttccgggttgga

SEQ ID NO: 405528 - DNA, 483 bp, Oryza sativa nipponbare
  unsure (1)..(483): unsure at all n locations
cccacgcgtccgcctcccccgccccgcctcctcctcctccgcaccgcgcgaaccgacccgacccccacttcgccgccgccgccgcagccgcagccgcgatggggacggagcggaagcgcaaggtgagcctcttcgacgtggtcgacgagacctccgtctccgccaagctcggccgcgccgccaccaccaacggctcggccgccgccgccgcggccaacccgtccatcaatcggtggacggggaggccctactcggcgaggtacctcgagatcctcgagaagcgccgcacgctacccgtgtggcagcagaaggacgatttcctcgccgtcctccgcgacaaccagaccctcatcctcgtcggagaaaccggaagcggcaagaccactcagattccccaattcgtgctcgaggctgaaggctngagcaaccgctcaatggttgcttgcacccagccgcggagggtggcagctaatgtcagtttcc

SEQ ID NO: 405529 - DNA, 360 bp, Oryza sativa nipponbare
cgtgtattagtactggctgcaactaataggccatttgaccttgatgaggctgttgttaggaggcttcctaggcggttgatggtgaatttgccggatgcatcaaatagaagaaaaattcttagcgtgatactagctaaagaagatttggcagatgatgtcgatcttgaagctgtacctagcttgactgaagggtattctggcagtgatctcaagaatctatgtataactgctgctcatctccctattaaagatatccttgaaaaggaaaagaaggagaaagctttagcagaggcagaaaataggccgctgccccaatcattttcaagtaacgatgtccgtgccttacgactaagtgatttc

SEQ ID NO: 405530 - DNA, 432 bp, Oryza sativa nipponbare
cggacgcgtgggcgctgctactcaccacaccagccgccgccgcctcctgagccacgcagtttgcaggtctgatactgcttggtggttcctccccaacaaaatgcttggctcacttatgtcttactcaccttcagtggattcaaagacggagaacactgatgagttaattgcgactggtgttcttgctagtctgcagaatttcatccgcaaatgcattgtagctgtcctctcgtatggcccaatgcctaagcatattgcatttattatggatggtaaccgtagatatgctaaattcaggagtatccaggaaggctctggtcacagggtgggcttctctgctctcattgccagcctgctctactgctatgaaatgggcgtgaagtatatcacggtgtatgcatttagcatcgataattttaagcgagatccgac

SEQ ID NO: 405531 - DNA, 447 bp, Oryza sativa nipponbare
gttcgcaacctcctccctccaggctccacttcccagacgaatcggcggcagcggcggcggcggcggtgatggagtgcgttatcggggtcgtcggccgcgacttcgcggtggtggccgccgacacatcggcggtgcagagcatcctggtccacaagaccgacgaggacaaggtgatggtgctcgacagccacaagctgatgggcgcgtccggagagcccggcgaccgggtgcagttcaccgagttcatccagaagaatctccacctgtatcagttccgcaacaacatcccgctcagcaccgccgccaccgccaatttcacccgcggcgagctcgccaccgccctgcggaagaatccgtactatgtcaacgtgttgcttgctggatatgattcggatgttggtgcctctttgtattacattgactacatcgcaacattccataagatcg

SEQ ID NO: 405532 - DNA, 527 bp, Oryza sativa nipponbare
  unsure (1)..(527): unsure at all n locations
atccatttgatgtcattgaggaggacccttcaatgcgacgagctcctgctgcaagaagggtagatggcatgattgacaagatgcaaaaaaagcttcctggacaaccaaagtttctgctctgtgttcttgctgagaggaagaattcagatatttatgggccctggaagcggaaatgtcttgctgaatttgggattattacacaatgtgtggcccctactagggtcaatgatcagtatattacaaatgtactgttaaagataaatgcaaagcttggtggcttgaactccctgcttcaaattgaaacatccccttccattcctcttgtatccaaggtcccgacaataatattgggaatggatgtttcccatggatcacctggacagtctgatataccttcaattgctgcggtcgttagttctcgtgaatggcctcttgtatcaaaatacagggcttcagtccgttctcagtcacctaagttagaaatgattgatggactatttaagccacaaggagctcangaagatgat

SEQ ID NO: 405533 - DNA, 441 bp, Oryza sativa nipponbare
caaggagcgatgcatatcgcacagctgatccaactccaagaggtcctcaacctgtgaaagtgcaaccaattgcagtccccatcattcctgttgatgaaattagggaagtgactaagaattttggtgatgaagctttgattggtgaaggttcctttggcagagtgtattttggtgttctaagaaatggtagaagtgcagcggtcaaaaagctagactctagtaagcagccagaccaagaatttttggcacaggtatctatggtgtcgaggcttaagcatgaacatgttgttgagctgcttggttattgtgttgatggaaatctccgtgtccttgcttatgagtttgcgactatgggttctcttcatgatatgcttcatggaagggaaggtgttaaaggagctcaacctggtccagtcttatcatgggcaccaacgtgtgaag

SEQ ID NO: 405534 - DNA, 208 bp, Oryza sativa nipponbare
cggacgcgtgggcggacgcgtggggtctggcgccacacgccgtggatcggcgcccacactcacaagggccccgagcgcccgctccgccgcgtactgcaggggctcgatccgctgacaacggcgcggctgttcgcggaggcgctgcgcgtcagccagaagaaggtgaactgcgaagactgcttcattctaaagctggtggccgacccgc

SEQ ID NO: 405535 - DNA, 456 bp, Oryza sativa nipponbare
tggaaacacatgagggcctatgatgatgttgaccctctagattatttgggaggatataatgttgaggacattcaacttatttgttgccaaccggatgcatcgacgatgtggttgataccagctccagtgcaaaccagattcattcaatcccttgaggagacagaaatgatttttggaaacatggagcttattttaaattgggattttctcagagctagaccaaaagggaaggaactagtgaaatatgagtcacctgttgatcgtagtccaagtgtagatgatgttaaacgagtgctaaacgggactataaatagcttcaggataactgatgcttaccctagatactttcgggttactggatcaggtgaagtgcgacgattagaagcatcgatagaatcaggtagtggcgaactgctcttgaataatggcactccttctttggggtcatctatgata

SEQ ID NO: 405536 - DNA, 463 bp, Oryza sativa nipponbare
taaccaacaagcatggggagaagctcgtgggagtgctgcatcacacgggttcaagcaagatcgtcgtattgtgtcatggttttatatctaccaagaacgacagtctcattcttgacctgatggctgcattgacaaagaaagggattagtgtctttcgctttgatttcagtggaaatggagaaagtgaaggagaattcgagtatggaaactacaggaaagaggctgatgatttgcactccgttgtatcatatctttgtaaggaaaagtatgatgtaacagcaattgttggccatagtaaagggggagatgtagtaactctatatgcttctatttatgatgatgtacgcttggttattaatgtatctggtagatttgacttagagaaaggcattgaagaacgtataggggaaggatcaattgatagaataaataaagaaggctatcttgatgtcaaggataaatc

SEQ ID NO: 405537 - DNA, 407 bp, Oryza sativa nipponbare
cccacgcgtccgggagacggcgccggcgaggccctcaggaagagccgcaacgacctgaagcgggaggctcgtcgcgccgtgcagtggggtatggacctcgctaagttctcccctctccagatcaagcgcatcctcagggctgcgtcgctagatcgcgaggtgttcgacgctctcatgctcgtgaagagatttggatcagatgtgcgggaaggaaaaaggaggcagttcaactatatcggaagacttctgcgtggtgcacaacccgaattgatggacactctaatccagtattcgaaggatggcgatgataacaggttacttgcattaatgagtgaaaatacattcttgatggaagatgaggaaatagaggacttgccttgcaatgaagaagagggtgacaaagagca

SEQ ID NO: 405538 - DNA, 496 bp, Oryza sativa nipponbare
cccacgcgtccggtcaatgttgccaaataaagtcacagcattgaatcccaacgcagcagaatttgtaccttcatgtattagaccatcttttgagagtagcgctgtctcagatgtaagtaaggcagatcttagggcttctgggaaaactatcctagataggtccgagtcatcaaagtcaaataactcggatgatgaggcacaccagttttggcgtaagcagcttcctgatgacattattccagacttcagttttgagaaaattgaacaagaacctgaagaattgtctcttgctggattatccttgaatgcaccccctttctatggaacaacagctagccgcttttcaagagagcatgatttatcttctcaagctaacaagagcctggaactggggcttaccagtttactttatgaagataattcacaagcatcgtttccaactatgggttcaagcaattgggagcaaaaatttgtaaggggatctcattttacgaat

SEQ ID NO: 405539 - DNA, 524 bp, Oryza sativa nipponbare
cggacgcgtgggctgcaattgatttatcctcactgattgtcgttgatggaaaggtctgctgggatctctacattgatggacttgttgttagttctgatggaaatttgcttgatgcattggctgctgcaataaaggtggctttgagtgatacaggtatcccaaaagtcaatgtttctcttagtgctacaacagatgaggaacctgaagttaatgttagtgatgaagaatttttgcaatttgacacctccagtgtgcctgttattgttacattgacgaaggtaggtaagcactacattgtggatgctacctcagaggaagaatctcagatgagctctgcggtttcagtatcagttaataggcatggtcaaatacgtggattgactaagaggggcggtgcagggttggatccaagtgtcatttttgatatgatatctgtggctaagcatgtaagtcgacaattcatctcggtattggattcggagacattagctgctgaagcggctgagtagagaggaaggagagca

SEQ ID NO: 405540 - DNA, 115 bp, Oryza sativa nipponbare
gaaggttcaagacacaaataatgagtaaaggtctgatcacataatagcccatggaggtctaacacatagcggtccaaccataggggcatggcaggcatagaacccacacataagt

SEQ ID NO: 405541 - DNA, 293 bp, Oryza sativa nipponbare
cccacgcgtccgcccacgcgtccgctcctcgttccgcctcgtcgacgccaagccgccgccgcgccacccgcggttcggccccaagtggcgcttcaaccagcgtccgcagctcccgcagcgccgcgacgaggaggtggaggcgcgccgccgcgaggccgagaaggagcgcgcccgccgcgagcgccacttccagaacaaccgctcccaccaccaccccggcttccgcggcaaccagtcctcgtcggccaagtcctccgtcgacatccagcccgactggaccatgcgtgagcaga

SEQ ID NO: 405542 - DNA, 468 bp, Oryza sativa nipponbare
gctgcgaacctgaacaagttcccgaatgaagaacgggatagcccaacactggtctgcactgacctagcagctcgaggcctacacttggatgttgaccatgtcatcatgtttgacttaccatcaaactctattgattacctccatacaactggaagaacagcacgcatgggagccaaagggaaagttacaagcctcgctgcgaagaaagatgtgactttagcaacaccgatagaagaggctatgaagaaaaacgagagcttagaggcactgacgactaataatgtcagaagggcggccgtcaacccacagtacactagtaccaaatgacgaccaagcgctctaaaggtagtaaactcagaaggtagaatgggagttgcactgcagaccaagtcatgaaggattgtcaaggacacaacttcatccagaaggcgctcgccaattaggagtcaaccaaggtcgaaatcgaca

SEQ ID NO: 405543 - DNA, 243 bp, Oryza sativa nipponbare
caaatatccgtgattggtgtatttcgaggcagctttggtggggacatcgcgttcctgcttggtatgttatacttagaagatgatcaagagaaaatcctgggttctgctaatggccggtggaattgttgctagaaacgaaagtgagccaaacctggaggcacagcaaaaggattcctgggaagaaattcgagtaacatcaagatcctgatgtgtgggatacatggttttcatctggtctctttc

SEQ ID NO: 405544 - DNA, 299 bp, Oryza sativa nipponbare
  unsure (1)..(299): unsure at all n locations
ctcttcttttctttctctgacaccttctcagaagcttcgtctctatctgcaatcatgtcagcctactgcggaagtacaaggatgagttgatcaggaacgcggcgtacattgggacgccggngaagggcatcctcgccgccgacgagtcgacggcacgatcgggaagcggctggcgagcatcggcgtggagaatgtcgaggagaaccgccgcgcgctccgggagctcctgttcacggcgcccggcgcgctggactgcctcagcggcgtcatcctgttcgaggagacgctctaccagagca

SEQ ID NO: 405545 - DNA, 473 bp, Oryza sativa nipponbare
cccacgcgtccgcccacgcgtccgcccacgcgtccgcgcgcgggtcgtcgccgtcgccgccgcccccgccgcatcgccgccgccgcgctcagatccagacccctgagacatggtctctcgccgagcgatgcgagcgccggagatgctccggtggctcgccgcggggcggcgctcgtggctctgctcgccgccgcgccggccgtcgggttctacctgcccggcgtcgcccccaccgacttcgggaagggtgattcacttcccgtgaaggtgaataagctgacatcagtaaaaactcaactaccctatgcatattactcccttcctttctgcaagccagaaactatcgttgacagtgctgaaaatctcggtgaggttcttcgtggtgatcgcattgagaactctccatatgtgtttcaaatgagagagcccaagatgtgccagattgtctgcaaattaactgttggtgagaaaga

SEQ ID NO: 405546 - DNA, 516 bp, Oryza sativa nipponbare
  unsure (1)..(516): unsure at all n locations
gttggcttctcctccccctctttaccttttcctcctcggttcggttccgtggttcgtctagggtttagtgggttgagatggcggcgccggatgtcgagtaccgctgcttcgtcggcggcctcgcctgggccaccgacgaccgctccctcgaggccgccttctccacctacggcgagatcctcgactccaagatcatcaacgacagggagacggggaggtcacgtgggtttggcttcgtcaccttctcctccgagcagtcgatgcgcgacgccatcgagggcatgaacggcaaggagctcgacggccgcaacatcaccgtcaatgaggcccagtcccgccgctccggcggcggaggcggnggctacggcggcggcggtggcggctacggcggcggtcgtggaggcggcggctactgaggaggtggcggcggcggctactgggccgtgagggcggctacggtggcggcggcggctacggcggctgtcgtggcggcggcggcggcggctacggtggcag

SEQ ID NO: 405547 - DNA, 432 bp, Oryza sativa nipponbare
  unsure (1)..(432): unsure at all n locations
cgcctccgccgccgccggcgactgctcccgctccccgtcgttgcttccgttccgatcggtctccttccatggcggcggcggaggaggggcagtgggtgctcatggccaccggccgatctcccaccaacatcgccgtcatcaagtactgggggaagagggacgaggcgctcattcctccccgtcaacgacagcatcagcgtcaccctcgaccccgaccacctctccgccaccaccaccgtcgccgtcagcccttccttcccctccgaccgcatgtggctcaacggcaaggagatctccttgtcaggagggaggtttcagagctgcctgagggagatccggaagcgtgctcaagatgtcgaggatgagaagaaggggatcaggatcaagaaagaggactgnnggagctacatgacacantagcatcgtcacaac

SEQ ID NO: 405548 - DNA, 482 bp, Oryza sativa nipponbare
cgaggcggttcgggtgggcggagatcgagtcggtcacgggcggattctcgtcccgggtgatcgggcagggcgggttcagcaccgtgtacctcgcgtcgctcacctcctcccgcctcggcgccgtcaaggtgcagcgcagcagcgagcgcctccaccgcgccttctgccaggagcgcgacgtgctcctctccctccgccacccccacgtcgtccgcctcctcggctactgcgacgaacgagatgagggtgtattggtgttcgagtacgcaccgaacggcgacctccacgagaggctccaccaccggagcggcgggaagagccggacggtgctgccgtgggcgcggcgcatggccgtcgcgttccaggtggcgatggcgctggagtacctccacgagagccgggaccccggcgtcatccacggcgacatcaagtccctcaacgtgctgctcgacgccaaccacgacgccaagctctgcgacttc

SEQ ID NO: 405549 - DNA, 325 bp, Oryza sativa nipponbare
cccacgcgtccggacagccccgtcgccggtgtcgggtccaacctgtggaaggagcagggcgaggcgctccggtggctggacggccggccgccgcgctccgtggtgtacgtcaacttcgggagcatcacggtgatgtcggccgagcacctggcggagttcgcgtgggggctcgccggcagcggctacgcgttcctgtggaacttgcgccccgacctcgtcaagggcgacggcggcgcctgccccgcgctgccgccggagttcgcggcggcgacgagggagaggagcatgctgactacgggtgcccgcaaggcggggtgctggagca

SEQ ID NO: 405550 - DNA, 163 bp, Oryza sativa nipponbare
gcagcggcaaagcaagtgatctctttagctcggatcatctctgcatttgcatttgcagctgctcgtcacggcaatggcatccaccaacagctggacccacgagatcgagtcgccggtggccgcgccgcgcctgttctgcgccgccgtcatggactggcacacc

SEQ ID NO: 405551 - DNA, 349 bp, Oryza sativa nipponbare
  unsure (1)..(349): unsure at all n locations
gcttctctcctcctctaatctcaagtctctgtctcgtcgtcctcgcatctccactcgccatgggcaagattaagatcggaatcaacggtttcggaaggatcgggaggctcgtggccagngtggccctccagagcgaggatgtcgagctcgtcgccgtcaacgaccccttcatcaccaccgactacatgacctacatgttcaagtacgataccgtgcacggccaatggaagcacagcgacatcaagatcaaggactccaagactctgctcttgggcgagaagctcgtcactcgtttcggcatcaggaaccctgacgagatccgtgggctgaggcggtgctgagtatgcgt

SEQ ID NO: 405552 - DNA, 540 bp, Oryza sativa nipponbare
ttgatctcatggtaaaccatgaagtgaggcatattttcaagacaagatcaaaagttgtctcttttattcggaaatttcttgatggtcttgactttttagaggtggagactccaatgatgaacatgattgcaggtggagcagctgcaaggccttttgtcacacatcataatgagttaaacatgaggctttatatgcgtattgctcctgagctctatctgaaggaattggttgttggggggctggatcgtgtttatgaaattgggaagcagttcaggaatgaaggaattgacctgacgcacaatcctgaattcacaacatgtgaattttatatggcatatgcagattacaatgacttgatagagcttactgaaaccatgttatctggtatggttaaggagttgacaggtggctacaagattaaatatcatgctaacggagttgagaaaccaccaatagagattgatttcacacctcccttcagaaagatagacatgattgaagaattagaggctatggctaaactcaatataccctaagatc

SEQ ID NO: 405553 - DNA, 489 bp, Oryza sativa nipponbare
cggacgcgtgggttcagcttgccgcgtgcgcggcggcgtcgctgctcgccgtggcggcgagtggcgcggcggcgcagggcgtcgggtcggtcatcacgcaggcggtgttcaacagcatgctgcccaaccgcgacaactcgcagtgcccggcgaggggcttctacacgtacgacgccttcatcgccgccgccaactccttcccggcgttcggcacctccggcggcagcgccgagctcatccggcgggagctcgccgccttcttcggccagacctcccacgagaccaccggtggaacgaggggtagttctgaccagttccagtggggttactgcttcaaagaggagataaacaaggcgacttctccaccctactatggacgtggcccaattcaattgacagggcaatcgaactaccaagcagccgggaacgcgctggggctggacctggtggcaacccagacctgggtcaccgacgccgggtctcttaaga

SEQ ID NO: 405554 - DNA, 417 bp, Oryza sativa nipponbare
ggatgcttccatcggagagaggccctatgtggacgaatctatagtcaagaatataaggaagattggactagggtagcagggagaacagaagatgctaatgagttggaagaaatgggcaggtcacttgtgacttgcacatatgagcataacaccatctggggaattgagaagggggttaggtatgggtgcccactggaggatgtaactacaggattacaaatccaatgccgtggatggagatcagtgtactacaaccccaaaagaaagggattcttaggcatgacacccacctcactaggccagatcctggtcctgtacaagagatggacagaagggttcctccaaatatccctctcacggtacagccccttcttattaggtcatgggaagatcaagctgggtcttcaaatgggctac

SEQ ID NO: 405555 - DNA, 431 bp, Oryza sativa nipponbare
cccacgcgtccgcccacgcgtccgcccacgcgtccgcccacgcgtccgcccacgcgtccgcagctaccaaatcgaacctaccaactcattcccgatcgatcgatcttaaaaaaaaactaatcgtaacttttctctctctctcctatctttagaactagcaggtagcaactgcttcgagtgtagtctggtgaacgtacgatctttcgttcgttcatcaagatgaccgtgatcgacggcgccgtcgctgccgacgccggcggcgcagccgcggcggtggtgcagccggggaacgggcagaccgtgtgcgtgaccggcgcggccgggtacatcgcgtcgtggctcgtgaagctgctgcttgagaagggctacactgtcaagggcaccgtcaggaacccagatgacccgaagaacgcgcacctgaaagcgctcga

SEQ ID NO: 405556 - DNA, 437 bp, Oryza sativa nipponbare
cccacgcgtccgaaagaaaaggcctgtgtcaaggagagggtagtagcaccttgctctcctttgccttcagagaaaccggaagcaatggcgtctgctactctcctcaagtcatctttccttcccaagaagtctgaatggggtgccacccgccaggctgccgcccccaagccggtgactgtctccatggttgtccgcgctggtgcctacgacgatgagcttgtcaagaccgcgaaaaccattgcatcaccaggaaggggtatccttgccatggatgagtcgaacgcgacctgcggtaagaggcttgcgtcaattggccttgagaacaccgaggccaaccgccaggcttaccggaccctccttgtcaccgcaccgggcttgggacagtacatcttcggtgctatcctcttcgaggagactctgtaccagtcaactgtaga

SEQ ID NO: 405557 - DNA, 439 bp, Oryza sativa nipponbare
  unsure (1)..(439): unsure at all n locations
gagcggagtcctccaattgaggaggtgatcaacacaggggtggtgcctcgctttattgccttcctccaacgtgaggattatccccaactccagtttgaggctgcatgggcactcactaacattgcatcaggcacatcagataacaccaaagtggtagttgagtctggtgctgtgcccatctttgtcaaactgcttagctcccccagtgaggatgtccgtgagcaggctgtatgggctctgggaaatgtggctggtgactcaccaaaatgccgtgacctggtgcttgcaagtggtgggttatacccattgttgcaacagcttaatgagcacgccaagctctcaatgctcaggaatgccacatggacactgtcaaacttctgccgtgggaagcctcagctctaatttgagcaggtcaaaccagcgctntctgactgcagcg

SEQ ID NO: 405558 - DNA, 466 bp, Oryza sativa nipponbare
cccacgcgtccgcggacgcgtgggctttctcgcaagtgctggtgaggattgtgtcatccatgtctgggaggtgttggagtggaagatgatagaggagaaggggttggaagaaaatggggtctttgatccagagtcgatgttggtatccacggcttcagagggaagccatcgggagaagaagctgcgggcaaaggcagtacacaatcagagatcagtaagctcagaccggttgatggtgccagaacatgtgtttgcactatcagagaaacccgtgataacctttgcagggcattctgaggatgtgcttgaccttagctggtccaaatctcaggttgctgttgggtatgaaattattgctggtgggtttaatggagataaagttcatctagtactacaaacttaaagcgagtacaaatgggcatctcttcatgtacctttacttgctttcatcttcaatggataaaac

SEQ ID NO: 405559 - DNA, 419 bp, Oryza sativa nipponbare
cccacgcgtccggcggcgttcctgctgctcgccgacgcggcgctcgtcgccctcatcgtcgtcttcgtcccgtataccaagatcgactgggacgcgtacatggctcaggtggacgcgtttgtggaaggggagagggattacaccaagatcgagggcgacacggggccgctcgtctacccggccggcttcctctacgtttactccgccatcaagcttctcaccgccggccaagtcttccccgcgcagattttgtttggtgtcctgtacattgtgaaccttagccttgttctgctgatgtacgtcaagactgaagtgcttccaaggtgggctttaggtttgctttgcttgtcaaagagggttcactccatctttgtgctccgccttttcaacgattgtttcgcttatgacgtttctccatg

SEQ ID NO: 405560 - DNA, 486 bp, Oryza sativa nipponbare
gaaggagagaaacatctagagtgaataagaaagatggggttcgtccgtgccctgttcctgctggcgatggtgtgcgtggcggcgcacgcgaaggactaccccaaggaggagggcgcgaaggcggaggggccggccgccgcctcggggggcggcggcggtagcacccacgacgtggtgaagctgggcggcaagggcgacggcaagacggacagcaccaaggcggtcaacgaggcgtggacggcggcgtgcgctggcaccggcaagcagacgatcgtcgtccccaagggcgacttcttgacgggtcccctcaacttcaccgggccatgcaagggcgacatcgtcatccagctcgacggaaacctgctcggctccaccgacctcgccttattcaagtcgaactggatcgagatcatgcgcctcgaaagcctcgaaatcagcggcaagggcaagctcgactgccagggcgcctgcgtctggagcaagaac

SEQ ID NO: 405561 - DNA, 396 bp, Oryza sativa nipponbare
  unsure (1)..(396): unsure at all n locations
cccacgcgtccggcataaactcttgccggaagcaactattgttgctgaagatgtttcgggcatgccagtgctttgtcggccagttgatgaaggtggagtagggtttgacttccgcctggcaatggccattcctgatagatggattgactacctgaagaacaaagaggaccgcaaatggtcaatgagtgaaatagtgcanactttgactaacaggagatatacagaaaaatgcattgcctatgccgagagccatgatcagtccattgttggtgacaagactatagcatttctcttgatggacaaggaaatgtacactggcatgtcagacttgcagcctgcttcacctaccatcaaccgtggcattgcactccaaaagatgattcacttcattacgat

SEQ ID NO: 405562 - DNA, 524 bp, Oryza sativa nipponbare
cccacgcgtccgcagagcgccgccgccgaggagagtccaatcgagaagaagggaggagaggcaagcggagaggaagaagaagaagaagagaggatgggcttcgagaagacgatcctgaaagccggcaccggtcccaagcccgtcaagggccagaaggtcaccgtccactgcaccggcttcgggaaagataatgatctcgctaagaagttttggagcacaaaggacgcaggccaggagccattcagtttcaatataggccagggttcggtgatcaaaggatgggacgagggagttatgaccatgcaagtgggtgaagttgctcgtattcagtgcaccccggattatgcgtatggagctagtgggtttccggcctggggaattcgaccaaactcagtgctgggttcgagattgaggtcttagcgcccagtaacgcatatgtattccggatggtctaaaatccatgagtactgaaataatgaacgcacacacgctgcggtacgttgatgtcatgtatgacagtacgt

SEQ ID NO: 405563 - DNA, 376 bp, Oryza sativa nipponbare
  unsure (1)..(376): unsure at all n locations
ggaggaagaagaggcgggcagcgaggagggaggagatcggcggcgagcggcgagaggggaggagaaggtaggttgcgatggcgtccgggtggggcatcaacgggaacaaggggcggtgctacgacttctggctggacttcagcgagtgtatgagccgctgccgncagnccaccgactgcggcctcctccgggaggactacctcgagtgcctccaccactccaaggagttccagcgcaggaacagaatctacaaggaggagcaacgtaagttaagagctgctattcgtcgtagggaggaggcggcaaaggagaaggctgagggagctcctgctgtttcagctcagcattagccactccgataaaatacaatgggctt

SEQ ID NO: 405564 - DNA, 402 bp, Oryza sativa nipponbare
  unsure (1)..(402): unsure at all n locations
cggacgcgtgggtttggaatgaaattactgaggaaaagagatgtgcctgaagagaaatatacgaatgcatttcttgggtttggacctgaggacaccaactttgcacttgaattgacatacaattatggtgttgataagtacgacattggagcaggatttgggcatttcgctattgcaactgaggacgtgtacaaattggctgagaaaattaaatccagttgttgctgcaagatcactcgtgaacctggtcctgtcaagggaggatccactgtgattgcctttgcacaggatcctgacggttacatgtttgagcttatccagaggggtccaacacctgagcctctnttgccaagttatgcttcgggtgggtgaccctgatcgctccatcaagttctacgagaa

SEQ ID NO: 405565 - DNA, 205 bp, Oryza sativa nipponbare
cccacgcgtccggtcaaggctaagatccaagataaggagggcatccccccggaccagcagcgtctcatcttcgctggcaagcagctggaggatggcaggacccttgctgactacaacatccagaaggagtcgacccttcaccttgtcctccgcctccgtggggctgcgattttgcaagactctgaccgcagactatacctgaggg

SEQ ID NO: 405566 - DNA, 287 bp, Oryza sativa nipponbare
cccacgcgtccgccgcctccagcttctctccccgcagcgcgcaggcaccatgggcgaagctgaggtcaaggacaacgaggtgtacgaggaggatgtcgtcgactacgaggaggaggtcgagaacggcgccgaccgcggcgccgccgccgccaacgcctccgccgacgtcgtcaagaaggggtacgtggggatccacagctcggggttcagagacttcctgctcaagccggagctgcttcgcgccatccaggactgcgggtttgagcacccttccgaagtgcaacacg

SEQ ID NO: 405567 - DNA, 244 bp, Oryza sativa nipponbare
accgaaccaatcatcagccatggcgcgaaggctctcgctgctggccgtcgtgctggcgatggtggcggccgtgtcggcgagcacggcggcggcgcagagctgcgggtgcgcgtcggaccagtgctgcagcaagtgggggttctgcggcaccggcagcgactactgcggcacggggtgccaggcgggcccctggacgtgccggccaccaacgacgtgtccgtggcgagcatcgtcacgccggagt

SEQ ID NO: 405568 - DNA, 380 bp, Oryza sativa nipponbare
atcacgttcttaaaatctacacaaacgactaagaattaatatttcagctgttgatgcggtccatgcaatactcaaggaactagttcgcaaggctatcagtgagacagatgagttaaatcaattccccactctccgtgtggaaataagcaatgcagcttttgaatcattggacagaatgcggaatgaaagcaagaaaagtactctgaagctggttgatatggagtgcagctatttaactgttgatttcttttggaagcttcctcaggatgttgagaagggtggaaatccaacaaactctatttttgacagatacaatgattcataccttagacgaattagtactaatgttctggcatatgtcaaatattggatgttcaagc

SEQ ID NO: 405569 - DNA, 403 bp, Oryza sativa nipponbare
gaactttttatgcaaactttgcattctgttggattcaatgctgaaagtcttcgtgaccagctaaaggcattagaaatgtatcctgattggttggatgatgatacaattgaggatataactcttcctggcttagctgaactgagaggttattggcgtggttctcttgatgccagtggtggagggaacggcgatactatggctgattttgatttcaatggtgaagattgggagtggggcacttacaagacacagcgtgttctggcatctggttcattcagcaataatgatggcctgcgtcttgataagttatttattcagaaagataatgccactctttatgctgatggatcaatttttggcccataacaaatcttactttgctggctaattcccagtggcttat

SEQ ID NO: 405570 - DNA, 437 bp, Oryza sativa nipponbare
  unsure (1)..(437): unsure at all n locations
cgccacggaagcgcagcatcaacaaaggcagcagcagcagcagcagcagcgttggtggtggtggtgtgtcatcaccaacattttcacgagaggagaaggatggaaatggcggcggcggttgggggcagcgggaggagggacgcggaggcggagctgaacctgccgccgggcttccgtttccacccgaccgacgaggagctcgtggtgcactacctctgccgcaaggttgcccggcagccgctccccgtcccaatcatncgccaggtcgacctctacaagctcgacccctgggatctccctgagaaggcgttgttcgggaggaaagagtggtacttcttcacgccgagggaccggaagtacccgaacgggtcgaggccgaaccgcgcagcggggagagtgtctggaggcgacgggagccgacaagccggggcgcccaa

SEQ ID NO: 405571 - DNA, 443 bp, Oryza sativa nipponbare
  unsure (1)..(443): unsure at all n locations
gcgaagctttgcgttctctaatcgcctcgtcaagatgcagatattcgttaagaccctcactggcaagaccatcaccttggaggttgagtcctccgatacgattgacaatgtgaaggctaagattcaggacaaggagggcatccctccggaccagcaacgccttatcttcgctggcaagcagcttgaggatgggcgtactctcgcggattataacatccagaaggagtccaccttgcaccttgtcctccgccttcgtggaggcatgcaaatattcgtgaagaccctcaccggcaagaccattanccctgaggtcgagtcctccgacacgatcgataatgtgaaggccaagatccaggacaaggagggaatcccaccagaccagcagcgtctcatctttgctgggaagcagctcgaggatggccgcacccttgcagactacaaca

SEQ ID NO: 405572 - DNA, 390 bp, Oryza sativa nipponbare
  unsure (1)..(390): unsure at all n locations
aactgttccacgcagaagcaaagcaacgccggtaatctctctccgccgcccccgccgccgccgcaccgttcgccggggatctagggaaggatggagagcggaagctacgagggcgtcctcctgggcatgggaaaccccctcctcgacatctccgccgtcgtcgacgaggccttcctcgcaaaatatgatatcaagccagggaatgcaattctagcagaggagaagcatttgcctatgtacaatgaattggctagcaaggtcaatgttgaatatatcgctggaggatccactcaaaattctattagggttgctcagtggatgctccagattcctggtgcaacaagttacatgggttgcattgggaaggacanagtcggtgaggagatgaag

SEQ ID NO: 405573 - DNA, 289 bp, Oryza sativa nipponbare
gcttgatacagctttaattccagctgcaagaaaagctgatcttaaaggccgggtgtcgaagttggaggatgaacttaggaaggccaagaagaagatgggcgaggagaacatccagaaggccgtgaagtttgcaatagatgccggccaaactgctctgtctgaaggaaagcgcttctgcgttgctcatgtagatgtgggtcttgacacaagtgctattctggacgcagttatcaaagtcaaggaccagaaggatttgccaatcatgctattcagcacggatgaagccacg

SEQ ID NO: 405574 - DNA, 522 bp, Oryza sativa nipponbare
gcggttccgttccgttccgtcgccccccccggccggcgagggcgagggcgatgtccttcttcttccgcatggcgtcgcggctgcggccgtggacgccggaggaggtggtccgctccatcaaggactccttccaggccctccacaccaagaacggcgccagggctctagaagaggttgagaaaaacctctcgtcattgaggcaaatgctgtctggtgatggagaagcagaaccaaatcaagaacaagtcttgcaaataacccttgagatttgcaaggaggatgtcctttccctctttgttcagaatctgccttcgcttggttggggagtacgaaaagatctggttcactgctggtgcattttgctcaggccagaagttgatgagagctactgctgtgtgaagtacattgagaaccatctggagcttttagatttcctagttggctgctacaagaacttgggcgtgcactgaattgcgggaacatgttgagagaagcataaaatacccaacactacaaaataca

SEQ ID NO: 405575 - DNA, 524 bp, Oryza sativa nipponbare
gcgcccacgcgtccgcggcggaagagagcgacgcagacggacggcgtggtggtctccccctccggcgacgtagctcgagctcgcaaccatggcgaggggattgaagaagcatctcaagaggctcaatgcgcccaagcactggatgctcgacaagctcggcggagcttttgcccccaagccatcgtctggacctcacaagtccagggaatgcctgcccctgatcctcatcatcaggaacaggttgaagtatgcgctgacataccgtgaggttatctctatcctgatgcagcggcatgtcttggttgatgggaaggtcaggactgacaagacctaccctgctggtttcatggatgtgatttccattccaaagactggtgagaactacaggcttctctatgacaccaagggtcgcttccgccttcagtccgtcaaggatgaggatgccaagttcaagctttgcaaagttcggtctgtccagtttggacagaaggggcatccctatctgaacacctatgatggacgca

SEQ ID NO: 405576 - DNA, 260 bp, Oryza sativa nipponbare
gcggcaggatctgatacgcgcgccgaagttcgcggtggggtggaacgacaggttgaggatcgcgatcggagtagcagaagggttggtgtaccttcaccgtgattacactcctcgctttctgcatcgcgatctcaagtcgagcaatgtgttgctgggtgatgattttgagcccagagttaccggatttgggatcgatcgtgtcgttggcgagaaggcgtatcgatcttcgttggcttctgatctgaattacagctgctaca

SEQ ID NO: 405577 - DNA, 224 bp, Oryza sativa nipponbare
ctcacagaacctggtcttagtgtgatcatcagtgctgtgcttacaagtcgtgcaattttccagcgtatgaagaactacactatctatgctgtctgggtcaccattcgtatagtgcttggatttatgctacttgcgctcatctggaaattcgatttccccccttttatggtcctaatcatagcaattctaaatgatggtaccatcatgactatatcaaaggatcg

SEQ ID NO: 405578 - DNA, 476 bp, Oryza sativa nipponbare
  unsure (1)..(476): unsure at all n locations
cggacgcgtgggcggacgcgtgggccgccgctgagctctatctatctactagttagtttagtcgtctcgagggtaaattgagctttgtgtgcgggtttgaggggagtacatcggcatgaggatccagtgcgacgcgtgcgaggccgcggcggccaggtggtggctgccggacaggtgttctntctcccttggtggttttatctgttttttatttcttttgcttttgatctttttttttctctttgttttgtctttatataattaattaggtttttttacttttttttgttatttttatttattttttttatttttgtttttattttttagtgtgttttttttattttttttattatttattttaattattttattgtgattgtatttttttctaagtttatattttttgttttatcttatttattttattgttatgttatttttcgatgtttttatatttttttttgtttattatt

SEQ ID NO: 405579 - DNA, 310 bp, Oryza sativa nipponbare
  unsure (1)..(310): unsure at all n locations
gcgcacaaagattagaagaaagcaagcaacaatggcgtcagctccggccgcctcttccgcagtgctcctcgtcgtggtcctggtggcgagcgctcccgccggcggcgccaacgcggcgaccttcaccatcaccaaccgttgctcgttcacggtgtggccggcggcgacgccggtgggcggcggcacgcagctgaacccggngcagacgtggaccatcaacgtgcccgccgggaccagctccggcagggtgtggngccggaccgggtgcagctttgacggcgccggccgcggcggtgcgccaccggcgact

SEQ ID NO: 405580 - DNA, 301 bp, Oryza sativa nipponbare
agagcaagaagctcagctcctcctcctctcgcatggcagccatggccaccaccgcgtccagcctcctcaagacctccttcgccggcgtgcgcctccccgccgccgcccgcaaccccaccgtctccgtcgcgccgcgcaccggcggcgccatctgcaactccatctcgtcgtcgtcgtccactcccccctacgacctcaacgccatcaggttcagccccatcaaggagtccatcgtgtcccgcgagatgacccggcggtacatgaccgacatgatcacctacgccgacaccgacgtcgtcgc

SEQ ID NO: 405581 - DNA, 330 bp, Oryza sativa nipponbare
  unsure (1)..(330): unsure at all n locations
cggacgcgtgggcggacgcgtgggcggacgcgtgggcggacgcgtgggcggacgcgtgggcggacgcgtgggccgccgccggcatcctgcccgagccctagctctcccctatccctcgccgcacgcaccaccaccaaccatggccggcgcgcaggagtctctggtgttggccggcgtgatgcacggccacaacgacgtggtgacggccatcgcgacccccatcgacaactcgccgttcatcgtctcctcctcccgcgacaagtcgctgctggtgtgggacctcaccaaccccgtccagaacgtcggcgagggcgccggcgcctncgagta

SEQ ID NO: 405582 - DNA, 340 bp, Oryza sativa nipponbare
gcacgcgtgcgcgtgtaccacagtacaccgagacgagggcgcgagatccgcattcgagtctcatctccatccttcacgcgacgtgctgctccgctccgctccgtcgtcaagcccccgcccccctcacacttcatgcggcgcccgcgcgagccagccacttcgagaagcgaaacgcggaagcggaggggagatcgagagagatcgcgagatggagcagcccaacgacgtcgggatcctcgccatggacatctacttccctcccgcctgcgtccaccaggaagcgctggaagcgcacgatggagccaagcaggggtagtacacaattggtcttggcaggact

SEQ ID NO: 405583 - DNA, 279 bp, Oryza sativa nipponbare
  unsure (1)..(279): unsure at all n locations
cggacgcgtgggtagcctcagatttgctgtccaatccagtccaagttaacattgggaacactgatcaactggttgccaataagtcaatcactcagtatgtggatgttatcacacctccggagaaatcgaggcggcttgatcaaatcctaaggtcacaggaacctggatcgaaaatcataatattntgctccacaaagaggatgtgtgatcagctggctcgaaacctagcacggcagtatggtgcttctgctattcatggtgataaatcacaagccgaga

SEQ ID NO: 405584 - DNA, 210 bp, Oryza sativa nipponbare
  unsure (1)..(210): unsure at all n locations
cggacgcgtgggcggacgcgtgggtagttctagatcgcgagcggccgctcgcgatctggccagatctatgacgtcacgcanagcaggatgttctatggacctggtggaccttatgcgctattcgctggcaaagatgccagcagagcactcgctaagatgtcttcgagcccaggatttgaccgggacatttggctggcattgactcgccat

SEQ ID NO: 405585 - DNA, 413 bp, Oryza sativa nipponbare
ccaaaacaacaccaggaaacttcttttcaatcgatcactccactggtgagtagtgagtggctagtgactggtcagttcatcacttgtgaaggttttgcaatcaggaaaagttcagaagatcatgggcaagctctggacaatcctcactcacgttcattcccttgcagggcctaccgtcatgctcctgtaccccttgtatgcgtcggtgcaggccatggagagcccatcgaagcttgacgacgagcagtggctggcctactggatcctctactccttcatcaccctcgtggagatgcttctcgagtccctcatctactggataccgatctggtacgagctgaagctgctgttcaacgcgtggctggcgctgcccaacttcaggggagccgcgttcatctacaacagggtcgtca

SEQ ID NO: 405586 - DNA, 391 bp, Oryza sativa nipponbare
  unsure (1)..(391): unsure at all n locations
tcgcagcaccggtccggagtcgccggacgcatccacgcgcgcgatccccttctcccatttttcctctcctcgcttctcgccgcagccgccgccgcctcctcctcctctcgccatggccgccgctgctccggccgcgggccccgggctctactccgacatcggcaagaaggctagagatctcctgtatagggattaccacacggaccagaagttcacgctcaccacctacgccgcgaacggagctgcaatcactgttgctggcacgaagaaaaatgagtccatcttctctgaaatccagagccaggtgaagaacaacaatgtgtccgtggatgtgaaagcaacttcagactcaaaatngataactacattcacagttcatgatctgggcact

SEQ ID NO: 405587 - DNA, 420 bp, Oryza sativa nipponbare
cgcgtgaagctgtaccactgtacacagctacgagggcgcgggagcgcgcattcgagactggtcgatgagtacacacacatgatgcggcaggcgactgaaccactatccacattcttacagtatataacgtatggccacatgatcgacaatgttgtacttattggtaccggaacattgcatgagagagatgttaatgaactattggagaaatgccatccattgggaatgtttgacagcattgcatctcttgcagttgctcaaaatatgcgcgagctttacagattggttttggttgacacaccgttagccccatacttctcagaatgcattacatctgaggatttggatgacatgaatatcgagattatgaggaacactctttacaaagcataccttgaggactttacaaatttgtgaaaa

SEQ ID NO: 405588 - DNA, 419 bp, Oryza sativa nipponbare
cccaccgtccgcccacgcgtccgagcgtgccaagagggccctcagcaaccagcaccaggtccgtgttgagattgagtccctctttgacgggaccgatttctcggagccgctgacccgtgccagatttgaggagttgaacaatgatctgttccgcaagaccatgggacctgtcaagaaggctatggacgatgctggccttgagaagagccagattcatgagattgttcttgtcggtggtagcaccaggattcccaaggttcagcagctcctcagagactacttcgagggcaaggagcccaacaagggtgtcaaccctgatgaggctgttgcctatggtgctgcggttcagggaagcattctcagcggcgagggcggtgacgaaaccaaagatatccttttccttgatgtggcacccctta

SEQ ID NO: 405589 - DNA, 498 bp, Oryza sativa nipponbare
cggacgcgtgggtgctcgtggtgtccaaaaggttcttcagaactacaagaatcttcaggatattattgcaattttgggtatggacgagctcagtgaagatgacaagttgaccgtcgctcgcgcaaggaagatccagcgtttcttgagccagcccttccatgtggctgaagttttcacgggtgctcctgggaagtacgtggagctgaaggagagcgtcaacagtttccagggtgttttggatgggaaatatgatgaccttcccgagcagtcattctatatggtgggaggcattgaggaagtcattgctaaagctgagaagatcgccaaggagtcggcttcataagatctcttcattgttaagttctgtacaagttaaatttttggattctggtttctatatgcccgttctgtagccacggacgtgattacaagcaagggtgacatcttctgatgaggcgatgtttttttgtcttccttttctccttttacccctaataa

SEQ ID NO: 405590 - DNA, 438 bp, Oryza sativa nipponbare
  unsure (1)..(438): unsure at all n locations
gtcctccttcctcctcatcctccccaaccactgcatccgggtcggcgtcctcctcctcctcctcctcctcgcagaatgcaacgggcaattcaagctatcgggtcacatggcagtctcctcaagtctgctgttctgcgacacatcagtgctccaaaaccatctattttacctgctgtatattcacgctccatgtcagtttcatctgctcaaatagaggagagtggatttgagactgccactgtggcagatattttgaagtctaaggggaagagtgctgatggatcttggctctggtgcactactgatgactctgtctatgatgctgtcaaatctatgacgcaacacaatgttggagctctggtggttgttaaacctggacaggataaatcaattgctggtattgttactgagagagatacctcatngaaatcatagtgc

SEQ ID NO: 405591 - DNA, 350 bp, Oryza sativa nipponbare
gcctaccgtgattgatgaggtgaggactggtgactaccgccagctcttccaccctgagcagctcatcagtggcaaggaggatgcagccaacaactttgcccgtggtcactacaccattggcaaggagattgttgatctgtgccttgaccgcatcaggaagcttgccgacaactgcactggtctccagggcttccttgtgttcaacgctgttggaggaggaacgggctccggtctcggttcccttctccttgagcgtctctctgtggactatggcaagaagtccaagctcgggttcaccgtgtacccgtcccctcaggtctccacctctgtggttgagccatacaacagtg

SEQ ID NO: 405592 - DNA, 289 bp, Oryza sativa nipponbare
  unsure (1)..(289): unsure at all n locations
cccacgcgtgcggngaagacagggtcttgatcttaattctggccctggaagtgtggatgtagaagtgaaggacgatagagtaactttaccagtgagacaaaattttattgcgccaccacatgcctttgtggacgagcatacgagaatgtatcaaatgcctccaggtgttggaataaagaggaaggaaccagagggcagttgggatgccgaacgatcttcatacaaacaattgtcatggcaatgagcttttgctggtatcatttctcagcgacttcggcatncaatgagc

SEQ ID NO: 405593 - DNA, 316 bp, Oryza sativa nipponbare
acgcccacgcgtccgtgatcatctgcaaagctgggatgccctgcgagccgcgttgcctgttggaacagttagtggagcaccaaaggtgaaagccatggagctgatagacgagctagaggtcacaagacgaggaccatacagtggcggccttggagggatatcatttgacggagacatgcttatcgctcttgcactccgcaccattgtgttctcaacagcgccaagccacaacacgatgtactcatacaaagacaccgagaggcgccgggagtgggtcgctcaccttcaggctggtgctggcattgtcgctgatagc

SEQ ID NO: 405594 - DNA, 406 bp, Oryza sativa nipponbare
gcggcgcagcgcacgtctcctcctccttgcgacctcgtcgagtccaccaccaacctcgccgccgctgctacagccgtcgtctcccaccggacgccccgccccgccccccacccatcgccggcgacgcggatccctcctcgacggtgcgcccgcctgagcagccgtgctatacctctgtcgggggcatattccccgccggcgcagcaagctgagcggagaggaggatgccgaagcggacgacgcacacgtactccagcgaggacgccctgccggaggggcccgagtccgacctcttcgtctactactgcaagcactgcgcctcccacgtcctcatcaccgatacccaattgcagaaaatgccaaagaggaagactgacagagcacatgtactagacaagaaaaaaca

SEQ ID NO: 405595 - DNA, 354 bp, Oryza sativa nipponbare
cgccgtcgtctctcccgacttcggcgacaagcgagcgacgcaggccaccgcgcgcggttcgttttcgcgagggaggccgccgccgaccagccgccatggtctcgccggacaccatccgcacggccatcggcgtcgtaggcaatggaaccgccctcgtgctcttcctctccccagtgccgacgttcatacggatctggaagaaggggtcggtggagcagtactcggcggtgccgtacgtggcgacgctgctcaactgcatgatgtgggtgctgtacggcctccccgcggtgcacccgcacagcatgctggtcatcaccatcaacggcaccggcatggccatcgagctcacctaca

SEQ ID NO: 405596 - DNA, 321 bp, Oryza sativa nipponbare
cggacgcgtgggcttgcaccgaagatcctggaagacctgtacttcctgatcaagaaggctgttgctattaggaagcatttggagaggaacaggaaggacaaggactcaagtttcaggcttattcttgttgagagcaggatccaccgcctcgtccgctactacaagcgcacaaagaagctcccacctactttgcggtcttggattatttttctcgagttttctacagttttctcctgcagtttgtacttttacaaagcttgataatgttctgaattgactgctcataatataagattacgaatctgggcaagcttagtaatt

SEQ ID NO: 405597 - DNA, 468 bp, Oryza sativa nipponbare
gcatccactccacacaagacgagactcgatagctcaagtacagtttgcacttgagagaggtattccagcaatatcagctgtcatgggcaccaaaaggctcccataccccagcagggtctttgatgtcattcattgcgctcgctgcagggtcccttggcacattgaaggtggcatgctattgctggaactgaaccgcctattacgccctggtggttacttcgtctggtctgccactcctgtttaccagaagctccctgaagatgtcgagatttggaatgccatgtcttctctaacaaaggccatgtgctggaaaatggttaacaagactaaggataagttaaatcaagttggtatggccatatatcagaagccaatggacaacagttgctatgagaaaagaccagaaaacagcccaccgttatgcaaggaaactgatgatgctgatgctgcattggaatgtacctttgc

SEQ ID NO: 405598 - DNA, 347 bp, Oryza sativa nipponbare
  unsure (1)..(347): unsure at all n locations
cacgcctccccccaatcctcgtgagccctatccgattccgcaccaccgctactcgccgccgtctcctcccctcctccgcgctccgcctgacccgcccgctctcctcctcctgctccgcgtcgccgctcgccgtcgtagcctccatggagacgccgccggagaactaccgcaccaacgtcggcatctgcctcgccgacccctccctcaccaagattttcaccgcgtccaggatcgacatcgccaacacatggcagatgcctcagggtggtattgatgcgggagaggatccgagggaagctgctntcagagaattgagggagggaaacggtgttacatctgcagaaatg

SEQ ID NO: 405599 - DNA, 407 bp, Oryza sativa nipponbare
ctccttcctcctctcctttcccctcctctcttcccccctctcacaagagagagagagcgccagactctccccaggtgaggattcagccatgaagggggccaaatccaagggcgccgccaagcccgacgccaagttggctgtgaagagtaagggcgcggagaagcccgccgccaagggcaggaaggggaaggccggcaaggaccccaacaagcccaagagggctccctccgctttcttcgtttttatggaggagttccgtaaggagttcaaggagaagaaccccaagaataaatctgtcgctgcttgaagaaaagcaaccggtgataggtggaaatccctgaccgaagcggacaaggctccctatgtagccaaggccaacaagctcaaggccgagtacaccaaggcca

SEQ ID NO: 405600 - DNA, 432 bp, Oryza sativa nipponbare
  unsure (1)..(432): unsure at all n locations
gctggagctggccaaggttgtccaggacaccatcgaccctaacgcaaagatcgagttccgtcccaacacccaggacgacccgcacaagcgcaagcctgacatcggccgtgccaaggagctccttgggtgggagccaaagatccctctccacaagggtcttcccctcatggtcaccgacttccgcaagcgcattttcggtgaccaagacagcaccgtcacaaccaccggaggccaacaagggtagaaggaggaggaggcataagactctnggaaatttgatggcctgctttctagctgcttggttaagctccttactgacaaaaggcatggcctcatagttagttcctctnggagcttgtttgtactaaaaatacccttggtgatgatgctgctgctgctgccttgtatgcaattcttttttcttggaatttt

SEQ ID NO: 405601 - DNA, 396 bp, Oryza sativa nipponbare
gcgcccacgcgtccggaaaggcgtcttcgtactcgcctctctccgcgccctcctccgccgccgctcgccgccgttcgtctccgccgccaccggcgccgccatgagggagtgcatctcgatccacatcgggcaggccggtatccaggtcgggaacgcgtgctgggagctctattgcctcgagcatggcatccagcctgatggacagatgcccggtgacaagaccgttgggggaggtgatgatgcttttaacaccttcttcagtgagactggtgctgggaagcatgtcccccgtgctgtcttcgtcgatcttgagcctaccgtgattgatgaggtgaggactggtgactaccgccagctcttccaccctgagcagctcatcagtggcaaggaggatgc

SEQ ID NO: 405602 - DNA, 390 bp, Oryza sativa nipponbare
cgggagagtaggcaaaacatctcttgtgctgcggtatgtgaatgatgtcttctcagacaaacaggaagcaactgttcaagcttcatatttgacaaagcgccttgttgttgaaggtgtgcctattacgctctctatctgggatacagctggacaagagaagttccatgcactaggccctatatactatcgtgatgcagacgctgctcttttagtatatgacatcacagacaatgatacttttcttcgtgtcacaaagtgggtgaaagagcttaagcaaatggcaaataaagatattgttatggccattgcagcaaataaaagtgacctggttagatcaaaacacatagacactaatgaagcagcaagctatgcagaaagtattggggcaac

SEQ ID NO: 405603 - DNA, 184 bp, Oryza sativa nipponbare
cggacgcgtgggtcagattattgcgacaaaagtttttaataattaatacctgtcatcggtagtagttttttggtattcctgtaatcaaatgctgcgtatggtaaattggagcagcggctttaattccatgctatctttttattgttattttctgctactcctatgttaattaaaccttttacct

SEQ ID NO: 405604 - DNA, 424 bp, Oryza sativa nipponbare
cggacgcgtgggcaagtgtggcaaccggaaagtgacattctaatgaatgacactgctaatggcaaccctgaagaagcagctgcctgcagtctactatccaaaaatgactgctatctaatttctgcatctggtggcaaagtttcgttgttcaacatgttaaatttcaagaccatgactactttcatagcacctccaccctctgcaactttcctcgcattccacccgcatgacaataacatcatagctattggaacggatgactcttcgattctactctacaatatccgtgttgacgaggttaaatgggtgctcaagggccatcagaaaaagataactggactggtattctcgctatcaatgaatgtgcttgtatcttcagctatgtgttttgagtattggagattgggcgaagaagaaatccaga

SEQ ID NO: 405605 - DNA, 299 bp, Oryza sativa nipponbare
gtgttattggtgaaggttgtgttattagacattgcacaatcaaccattctgtggttggactccggtcctgtatatctgaaggcgcagtgatagaggactctctgctaatgggtgcagactattatgagacggagacggacaagaaagccctttctgagactggtggcattcccattggtattggaaagaatgcacacatcagaaaagcaataattgacaagaatgctcgtattggagaaaatgttaagataatcaatgtcgacaatatccaagaagcttcaagggagactgatggatac

SEQ ID NO: 405606 - DNA, 421 bp, Oryza sativa nipponbare
taataagtttcagggtccagtgcctgatgcaatcagcagccttgacaaactggtagttcttaaactccaaatgaacaatctggatgggcctatgccaagtgtattttgtaatctgacatgcctgatcacattgaatcttagtggtaattcattcactggagggataccaagagaaatcggcaagctgccaaagctttccattttgaatttgcaatgcaacatgagcagcggcaccattccatattcactccatttattaacttctctaattgagctcaatctggggaataatattttgactggtaccatcccaacaatgccgaccaaattgagtacttgttctaatctaagccacaacaatgttaagtggatctatttttttatatattgacttattgagtgtccttttgattcttgattt

SEQ ID NO: 405607 - DNA, 403 bp, Oryza sativa nipponbare
catccacacctgagatgacgcgtgggcgataaggcacgaggagactatctcctccgctgagaactgtaagatggttgaacgtctccgctagcaatactgttgttccataagcgaaaagggactggagcagatcgcaacctcctgccctacatctaaagagatagacctcactgactgtggagtgaatgatgcagcattgcggcccttggccaagtgctctgaactgctcgtactgaaattaggcctgtgctcaagtatttctgacaaaggtcttgcttttatcagttcaagctgtggaaagctgattgagcttgatctctatcgctgcaattctattaccgatgatgggctggcagctttagctaatggctgcaagaagataagatgctaaacctatgctact

SEQ ID NO: 405608 - DNA, 409 bp, Oryza sativa nipponbare
  unsure (1)..(409): unsure at all n locations
cccacgcgtccgcccacgcgtccgcccacgcgtccgcactcccatcccccctcccaccgctggcagcctcccccgcccgacgccacatgtcccctgtctccccaccggcgccatctctcccctctagtggcgcagcttcccttcttctcccctctccccactggcgcgccgctccctctccccctttccctcccatctcgcctgcacggcgcgacgatggcggngtgcgaggagacgacggtgatagtcgtnccttcttcttctnctnctncctctccccgtcggccctgatggccgtcccttcctcttagggacggcaccctctccaccctcaagatccgacggcgtcggtggtttcccttgggcagatccagtgccgacggcttcctgctggggatccaacggcaac

SEQ ID NO: 405609 - DNA, 458 bp, Oryza sativa nipponbare
  unsure (1)..(458): unsure at all n locations
aggcaatccaatcctatgcgatacatgtgctctccttgacataccagaaagttcctaggcctgttcttgcggaggccatcaacattgagggtcttgcattggacaagttcctggagcaccatattgcaaactccggttgggtgatcgagaagggtgcacgatctcagctgattgtccttccacgcaacgagttcaatcaccctgagctcaagaagaacacagctgaaactgttccgttcgagcatgtaactcgcatattccctgtccttagctgagtcaacaaccagaccaactgagattttgcattacagaacttctgagcgcgtgaagatactctgggcgcatctgttttctctgctgtgatgtactgcgttntgatatgcctgttttagctaaacaagtcaattctagtggacatccgagcgtcatatctgcctagttatgtttatgtaagcatt

SEQ ID NO: 405610 - DNA, 250 bp, Oryza sativa nipponbare
  unsure (1)..(250): unsure at all n locations
cccacgcgtccgaagttttttagctatgagcaagcatcaagtggaattttatggctttatcggcaacaaacagggaatgaggatgctcagcttagtccactattgcgccttggagctggtgcttgtgctggtatcatagccatgtctgctacttacccgatggatatggttaggggtaggattaccgtgcagacggaaaagtctccttatcagtaccgtggtatgtttcatgcattgngttcagtatacc

SEQ ID NO: 405611 - DNA, 332 bp, Oryza sativa nipponbare
  unsure (1)..(332): unsure at all n locations
attgttgaacgcatttatccgccaaaaccctgngctattggagaagtcattctctctgatgttgaaaatccctcgcttgattgaatttgacaacaagcgtgcatatttccggtctaaaattaagcatcagcatgatcatcatcatagccctgttagaatttctgtgcgccgggcatatattttggaggattcatataaccagcttaggatgcgttcaccacaggatttgaagggtagactgactgttcatttccaaggtgaagaaggcattgatgctggtggactaacaagggaatggtatcagctgctatcaacaagtgattttgataagg

SEQ ID NO: 405612 - DNA, 210 bp, Oryza sativa nipponbare
  unsure (1)..(210): unsure at all n locations
cccacgcgtccgcccacgcgtccggcagagcagagcagcggcaaagcaagtgatctctttagctcggatcatctctgcatttgcatttgcagctgctcgtcacggcaatggcatccaccaacagctggacccacgagatcgagtcgccggtggccgcgccgcgcctgttccgcgccgccgtcatggactggcacaccctngcccccaaga

SEQ ID NO: 405613 - DNA, 288 bp, Oryza sativa nipponbare
  unsure (1)..(288): unsure at all n locations
cggacgcgtgggcggacgcgtgggcggacgcgtggggcttgaagcagccaagttatttagcaagcctctggatcttaggagccttgtcactcccctgactcttcaaggaagagggcgagaatcgcccagaagaagcaagaattgcaagaagaagtcgagctgccgataccagaagctgttgccagagctcaagacagaggaacgcagagtggagctggaaagagangtcaagctttgtgcaccacgataaacctatagacttaaacatataatgagagtgttgcgtgg

SEQ ID NO: 405614 - DNA, 354 bp, Oryza sativa nipponbare
  unsure (1)..(354): unsure at all n locations
atcagtacgcttggcttaaggctgatctagctaaggttgacaggaaaaggacgccatggctcatcgtattgttgcatgcaccatggtataatagcaattgggctcatcaaggcgaaggtgacagtatgatggctgcaatggagcctttgctctatgctgctcatgtggatatggtaatcgcaggtcatgtgcatgcttatgaacgtgcggagcgagtctacaaggggggacttgatcctttgtgggttgttcacataacanatggggatggtggaaaccaggaaggcttggcccacaggtaccgcaatccgaaaccagcttggtcagtcttccgggaagcaagncttgggcatg

SEQ ID NO: 405615 - DNA, 276 bp, Oryza sativa nipponbare
gtccaagctacctcatgcaacaatatttaagcctcaacaaccatacaaaaggcgaatatcagagacttacaaagattttccacagtcagcactgcgattgattgaaacactgctcgcaattgatccagctgatcgtttaacagcgacttctgcattaagaagtgatttctttacaactgaaccttatgcatgtgaaccatcaagtcttccagcatatcctccaagcaaagaaatggatgcaaaacgaagagatgaagaagccagacgtttgagagc

SEQ ID NO: 405616 - DNA, 343 bp, Oryza sativa nipponbare
cacagagcgccgccgccgaggagagtccaatcgagaagaagggaggagaggcaagcggagaggaagaagaagaagaagagaggatgggcttcgagaagacgatcctgaaagccggcaccggtcccaagcccgtcaagggccagaaggtcaccgtccactgcaccggcttcgggaaagataatgatctcgctaagaagttttggagcacaaaggacgcaggccaggagccattcagtttcaatataggccagggttcggtgatcaaaggatgggacgagggagttatgaccatgcaagtggggtgagttgctcgtattcagtgcacccccggattatgcgtatg

SEQ ID NO: 405617 - DNA, 392 bp, Oryza sativa nipponbare
cggacgcgtgggtgccagcctatgtggccgacatgccggacttggtgacgctcgacctggcggtcaacaacttgacaggaagcattcctccggggatctggagcctgaagaagctgcagtgcctgtttctatttgcgaacaagctcaccggcgacatcgtcgtcgccgatggtgctttcgccgcagtgaatttggttttcatcgacctgtccgcgaatcccaagctgggtggaccgattcctcaagactttggtctcttgcagaagcttgaagtcatccacctgtactttaacaacttctccggtgagataccggcgagcatcggtcggttgccggcattgaaggaaatacacctattcaataatagtctcaaccgcgttctaccaccggag

SEQ ID NO: 405618 - DNA, 236 bp, Oryza sativa nipponbare
  unsure (1)..(236): unsure at all n locations
tcgacccacgcgtgcggngaactcagcaacagaaccatacattgttgctcataattttctcttatcacatgctgcagctgttgcaagataccggactaagtatcaggcagctcagcaaggcaaagttggaatagttctggacttcaattggtatgaagctctttccaactcaactgaagaccagcancggctaaagagccaggacttcacatggtggatctgaccatgtaaggcat

SEQ ID NO: 405619 - DNA, 319 bp, Oryza sativa nipponbare
  unsure (1)..(319): unsure at all n locations
agcgcatgcgtacaaaaacctcatcatgcatagacctacttgttactagcgatctaacacacgcgactaggcaatggcgggaagcggcgagctgaagctgctgggcgtttggagcagcccgtacgcgatcagggtccgcgtcgtcctcaacctcaagtcgctgccgtacgagtacgtggaggagaacctgngcgacaagagcgacctcctcctcgcctccaacccggtgcacaagagcgtccccgtcctgctccacgccggccggccggtgaacgagtcgcaggtcatcgtgcagtacatcgacgaggtctggccgggc

SEQ ID NO: 405620 - DNA, 364 bp, Oryza sativa nipponbare
ccaccactcaccaccaacatggcgacgacgacggcggcggcgatggtggtggcaatgtcggtgctgctgctgggtggcggcgaggcggcggcgccgcggaagccggtggacgtggcgttcgagaagaactacgtgccgacgtgggcggaggaccacatccactacgtggacggcgggcgcgaggtgcagctctacctcgacaagtccaccggcaccggcttccagacccggggctcctacctcttcggccacttcagcatgcacatcaagctcgtcgccggcgactccgccggcaccgtcaccgccttctacctgtcgtcgcagaactcggagcacgaccagatcgacttcagtcctggggaca

SEQ ID NO: 405621 - DNA, 65 bp, Oryza sativa nipponbare
cacgtacggtgaagcagcgacatgacgacaacgactacgaggtttgttcagcttgccgcgtgcgc

SEQ ID NO: 405622 - DNA, 230 bp, Oryza sativa nipponbare
  unsure (1)..(230): unsure at all n locations
cttcatcctgaccgcgcgcgcgcgcgcccgcgcngtgctgtgctctccgcgagcccgccatcccatcgccatcgccgctggccgtcgcggccccgacgggcacctagtcgccagcctcccgggcttccatggcgccttcccctccaagcactactccgggtacgtgacggtggacgaggggagcgggaggcggctgttctactaccttggtgacgtcggaagcgcgacgc

SEQ ID NO: 405623 - DNA, 325 bp, Oryza sativa nipponbare
gtcgcctccccgtccccggcgacacggacccaccttctcgtctgccgcgcccagaagcaggacgacgccgacgtctcccggcgcgcggcgctcgcgctgctggccggagcgacggcggcgctgggggtgaaggtggcgcccgccgccgcggcctacggcgaggcggcgaacgtgttcgggaagcccaagacgaacacggagttcatcgcctacagcggcgaggggttcaagctgctgatcccgtccaagtggaaccccatcaaggagcgcgagttccccggacaggtactccggtacgaggacaactttgacgccaacagcaacg

SEQ ID NO: 405624 - DNA, 276 bp, Oryza sativa nipponbare
cccacgcgtccgtggacgcgtggggcggcgacatgactacgacgacgacgaggtttgttcagcttgccgcgtgcgcggcggcgtcgctgctcgccgtggcggcgagtggcgcggctgctcatggcgtctgttcggtcatcacgcaggcggtgttcaacagcatgctgcccaaccgcgacaactcgcagtgcccggcgaggggcttctacacgtacgacgccttcatcgacggcgccaactccttcccggcgttcggcaccttcggcggcagagccg

SEQ ID NO: 405625 - DNA, 56 bp, Oryza sativa nipponbare
cccacgcgttcagcagggccaatcttcaatgactacagctctgtcggtactccttc

SEQ ID NO: 405626 - DNA, 150 bp, Oryza sativa nipponbare
gccggcggtgccgttgggtgctaattacaggctcatagatatcccggtcagcaactgtctgaacagcaatgtgtcgaagatctatgtgctgacacagttcaactccgggtcgctcaatcgtcacctctcgagggcctaggaaacaacatg

SEQ ID NO: 405627 - DNA, 364 bp, Oryza sativa nipponbare
  unsure (1)..(364): unsure at all n locations
cccacgcgtccgcgcatctcatcagtgtcaagatggctactactaagcattaggctcttgccatccttgtacttcttagcattggtatgaccaccagtgcatgaaccctgctaggttatggccccggatgacgaggtggaggtggttcgtgccttgtatcgtgctcgtcgacgtcaccctggcgctcgnccaggcgaagaaatcgaagcggatttgactgaggtcacccacaaggtctacttcgacgtctagattgatggcaagcccgcatgacgggttgtcatgtgacttttcgggaagactgttcctaaaacggcagagaactttcgagcactttgcacaggagagaatgaactggaaagag

SEQ ID NO: 405628 - DNA, 393 bp, Oryza sativa nipponbare
  unsure (1)..(393): unsure at all n locations
aatttcggttggattcgtggaggcggattgnggatttggatttggattggagagaggggggagatggaccaggtgctgaacaaggtggggagctactggttcagcaagagggcaagcaaggagatcgactccatcggcgacgacatcagctcaatctctacaagcattggaacaggagctaaatggatggtgaacaagatcaaagggaagatgcagaaagcattgccagaccttctcaaggaatatgacatgcccgcgggcctcttcccaagggatgctactaactatgagttcaatgaggagacaaagaagctaaccgtgtacattccttcagcttgtgatgtcaggtacaaggattcgtctgttctgcgattctttacctgtgtgactggc

SEQ ID NO: 405629 - DNA, 298 bp, Oryza sativa nipponbare
  unsure (1)..(298): unsure at all n locations
gcggaggcggcggcgcaaccgacaaggaaaagcaaagcgagagcaggaaaacctcgccggcggcgacaccaccaccaccagcaggcagggatggcccggtacgaccgcgcgatcaccgtcttctcccccgacggccacctcttccaggtggagtacgccctcgaggccgtccgcaagggcaacgccgccgtcggcgttcgcggcaccgacaccgtcgtcctcggcgtcgagaagaaatccacccncaagctccaggactccaggtccatgcgcaagatcgccagnctcgacacccaca

SEQ ID NO: 405630 - DNA, 185 bp, Oryza sativa nipponbare
attatgcttgcaggactggcattcaagaggaagtggcaaaacaaacggaaggaacaggggaagccatgtgacaaacccaacattgttactggtgctaatgttcaggtttgctgggaaaaattgccagatatttgaaataaactgaagaggtaactcatgaagaactatgtatgatccgaagcgtg

SEQ ID NO: 405631 - DNA, 403 bp, Oryza sativa nipponbare
tgacttcaactcaagggcagagtacttctggtcccatgggctgatttcagactcaacatacagaattttcacctcagtttgcaactattctcgctatgtcaccgagtactatggcgggtcgcttaccccgctttgcgcaagggtgatgaaccaagtgacaagggagactagccgattcgtcgacaaatacgacgtcacattggatgtctgcctgtcatcagtcctctctcagtccaagatcctcactcctcatcaacaagtatgacagcgaattgatgtttgcgtcgaggacgagacggtgtactacctgaaccggaaggatgtgcaggaagcactccatgcgaagctcatcggtgaaagaattgggcagtttgcagcagtgttcttgagtatgagctactca

SEQ ID NO: 405632 - DNA, 419 bp, Oryza sativa nipponbare
cccacgcgtccgcacccatggttcctcaagaacctgccgatcgagatgactgacgagtaccagatgagcgtccagatgaacgacatcaacaccccgtcacagggcctggaggagatcatggccatcatacaggaggcgcggaagccgggtgatggctccaaattctccgggcagatcccgggcctagggagcatggagctcgacgacgttgacaccgacgacatcgacgtcgaggacagcggcgacttcgtgtgcgcattgtgacgaggccgtgaacttgctttctcttcttggagtgtgctgctccttttgttgtgctgctgttcatttctgagagctccattctgttgttgtgtcagtgtttgtaaacgaggtgctgtggataatctgaactcttttatatgttgggttcttagctg

SEQ ID NO: 405633 - DNA, 377 bp, Oryza sativa nipponbare
cccacgcgtccgcgagaacaagatcaacaggcaggtgacgttcgcgaagcggaggaatgggctgctcaagaaggcgtacgagctctccgtgctctgcgacgccgaggtcgccctcatcatcttctccaaccgcggcaagctctacgagttctgcagcggccaaagcatgaccagaactttggaaagataccaaaaattcagttatggtgggccagatactgcaatacagaacaaggaaaatgagttagtgcaaagcagccgcaatgagtacctcaaactgaaggcacgggtggaaaatttacagaggacccaaaggaatcttcttggtgaagatcttgggacacttggcataaaagagctagagcagcttgagaaac

SEQ ID NO: 405634 - DNA, 491 bp, Oryza sativa nipponbare
  unsure (1)..(491): unsure at all n locations
gcgaaaatgatggcaaggtaaaggttgatatgggccagcccattctctctggaccagatattccaacaaaactgccatccaccaagaatgaagccgttgtccaagctgatttggcagttgatggctcaacatggcaagtaacctgtgttagcatgggcaatccacattgtgtcacatttggcacaaaggagctcaaggttttgcatgttgatgatttaaagcttagtgatattgggcctaaattcgagcatcatgaaatgtttcctgcccgcaccaacacagaatttgtagaggtcctgtctcgctcacacctcanaatgagagtctgggagcgtggtgctggtgcgacgcttgcttgtggaaccggtgcttgtgcagtagttgttgcagctgtcctcgagggtcgagctgaacggaaatgtgtagttgatttgcctggtggaccattggaaatcgaatggangggagatgacaatcatatttacatgact

SEQ ID NO: 405635 - DNA, 437 bp, Oryza sativa nipponbare
  unsure (1)..(437): unsure at all n locations
cgaggaggcgccagctcgactccgcgcgagccgaggcctcgaaccctaacccccattcgatttccggcgagatgcccaccggcgtctgagccttgctcgtcggcggcgaggtggtgtggtgcgtggggcggtggcggctagggatggaggcgaggcgggtctccgcgaaccctcggccgtcctgcgtgcggagggtgcttgcgcggaagcggcggaggcccgaggcgacggcgaacagcgcgcggaagctgcagcggcgggagatctccgcgctgccgtgccgcgcgttctccgcgagcaccacgcgggagcggttccgcaacatccagctccaggaagagtttgatactcatgaacccaaggagatgggttcactactaccttacttgatgaaaaggtctgaganttatgagatagttggagccagtgatatcatc

SEQ ID NO: 405636 - DNA, 452 bp, Oryza sativa nipponbare
  unsure (1)..(452): unsure at all n locations
gtcctgcacttaccatatcaaaggtcctcctgtcaatttgttcactgctgacggacccgaaccccgatgatccgttggtgccggagattgctcacatgtacaagactgatagggccaagtatgaatccaccgctcgctcctggacacagaagtacgccatgggctaaagccagccaaactggtggacgtgtcgaaacccaacgacgttatcacctaaataaccatcaagtcaccactctccccccaacgaagtatgaatggacttttgagggctgttgtgcccagttgaactcatatgtaccctaccttgtgaagtccgtttcagtctggtagtctgttctacctgactgttctgtaatttaagtcgtttnctaaatcatatttattattcgtgctttgtcgtgccatagctatgatttatatgtgatcaacacggcacggatggaagattt

SEQ ID NO: 405637 - DNA, 403 bp, Oryza sativa nipponbare
ggcgtgcgcggctcaaccgtctcgcataggcgagctctggcgatgatgctgagtgggaggaattgcggctcaagcggatccgggttgattacatgctgcggatgtgatactactacaccgacacgaatctcgcggagacttgcggcattcaggaccttgttgacgttgacgtttttctcgatgcaaaaagagtaatggattctcttcagaacaaggaaatcgctcctgctttagcttggtgtgcagaaaacacgtctcggctaaagaaatgaaagagtcagcttgagttttttctgaggcttcaagagtttgtggaacttgtcaaggccaagaacttcatgcacgctatagcatatgctcgaaaatacctttctccctggggggctacacacatgaaagaatt

SEQ ID NO: 405638 - DNA, 186 bp, Oryza sativa nipponbare
  unsure (1)..(186): unsure at all n locations
actacaccccgctccactctcaggcaggcaatcagcggcgaggcaccagcccaccggtcggcaatggcgtncacctcctgcttcttcacagtccacggccgcgtcgccggccgcgtgctcccgtcccggggaccgaccacctcctgttgcggccagaacagacacccacttcgcgcggctgctgtg

SEQ ID NO: 405639 - DNA, 449 bp, Oryza sativa nipponbare
  unsure (1)..(449): unsure at all n locations
cggacgcgtgggcggacgcgtgggcggacgcgtgggacggaatagctgatcaattgaacaaaatatttgattcggaatggaaattattggaaaggaaatggaaagacagaaatttggtacaagagcagccatcactgaaggtattaaaggctcagcctgctgttaccccaaaacctgtgctacctaagggggtgactgcaggcacanattcagctgtgagcaagacactggcaactgcattatcctccaaagtaaaaattaaattttctgtgcgaggctctgagctgacctcttccaaagacacgnccttgcaagcagttggcagaagagacggcacaattaaccaatctctcccttgcaccaaggacaatgctaagacaccaaggatacaatcaagtgangacagatctgaatcaactggaaatgaatngcggccttgcgatgatgct

SEQ ID NO: 405640 - DNA, 357 bp, Oryza sativa nipponbare
tgaccagaccaccagcttcctcggcaccggccctcgccgggatgagctcgtccgccgcgtcggcgactccggtggccgcatcaccatgcgccgcaccgtcaagagcgcgccccagagcatctggtatggacctgaccgtcccaagtacctgggcccgttctcggagcagacgccatcgtacctgaccggagagttcccgggagactacgggtgggacacggcggtgctatcggccgacccggagacgttcgcgaggaacaaggagctggaggtgatccactcgcggtgggcgatgctgggggcgctgggctgcgtcttcccggagatcctgtccaagaacggtgtgaagttcgggga

SEQ ID NO: 405641 - DNA, 346 bp, Oryza sativa nipponbare
  unsure (1)..(346): unsure at all n locations
ggacatttcatcctttcatccttcataccaagcgcttctacactgttcttatntggcgtagagttcttgccttcttatgtgcttctcaattcttacggatagtcacattctattccacacaacttccagggcccaactatcattgccgtgagggctcagctcttgccagattaccacatcctcaaaatgtagcagaggtgcttctcattaatttcccaagaggagtanattacgggtgcggtgacttgatattttcatcccacatgattttcactatagtcttcgttgtaacataccagaaatatggaaatataaggtttataaagatgcttgcatggtgcataac

SEQ ID NO: 405642 - DNA, 225 bp, Oryza sativa nipponbare
gtacttctgcttcgcggagcagtcgagccagtcgctgacggcgatgtacaactcctaccgcgcctcgcaaatcgtcttccccggcgacgacgaccgcctggagcaactcatggcctactggcgcgccttcctcgaggagcggcgagccaccggcaacctcatggacaagtgggtcatcgccaatggcttgcccagcgaggtcgagtacgcgccggatttcccatg

SEQ ID NO: 405643 - DNA, 399 bp, Oryza sativa nipponbare
  unsure (1)..(399): unsure at all n locations
ctccggcctgcgtctacgacgagcacgccgtcgcggtgtctgcggatcggctgcggaaggcgttcatggacgcgtccactttgcccaaggcctgcgccggcttggtcgactacatttcggtccatgtgaacggcggtccgggcaccatctacaccatgaagcttaaccctgccgcgggtgtgggaagcacatacaagacccgggtggcggtgtgcgacgccgcatgtcatgttctaaagtcngatgcgctcgaggcagaaagcaaggtggggaagctcaagtcacactcgaccgagacgaatcttgacggcaccggcgatggctcctgcgtggccaagctcaaggtggagtacgagctctatgacagcagctcactgtttccgagatggagaggacatc

SEQ ID NO: 405644 - DNA, 373 bp, Oryza sativa nipponbare
  unsure (1)..(373): unsure at all n locations
tgaagatgacaagttgaccgtcgctcgcgcaaggaagatccagcgtttcttgagccagcccttccatgtggctgaagttntcacgggtgctcctgngaagtacgtggagctgaaggagagcgtcaacagtttccaggggtggtttggatgggaaatatgatgaccttcccgagcagtcattctatatggtgggaggcattgaggaagtcattgcttaagctgagaagatcgccaaggagtcggcttcataagatctcttcattgttaagttctgtacaagtaaaatttttggattctggtttctatatgcccgttctgtatccaggacgtgattacaagcaggggtgacatcttctgatgagcgatgtttttt

SEQ ID NO: 405645 - DNA, 144 bp, Oryza sativa nipponbare
gtggggcgtatccacaggcagctcaagtcgagggcgtcggctcatggccgcgtcggcgccaccgccgccgtgtactccgcggcgattctcgagtacctaaccgccgaggtcctggagctggccggcaacgcgagcaaggatctc

SEQ ID NO: 405646 - DNA, 380 bp, Oryza sativa nipponbare
  unsure (1)..(380): unsure at all n locations
tctctctcagctctcacagctcactgcatcaatggccgcggccaccatggcgctctcctccccggtgatggcccgcgcggcgccgtcgacctcctccgcgctcttcggcgaggcgcggatcaccatgcgcaagaccgccgcgaagcccaagccggcggcgtcgtcggtgagcccgtggtacggcgccgaccgcgtactctacctcgggccgctctccggcgagccgccgagctacctcaccggcgagttcccgggcgactacgggtgggacaccgcggngctctccgccgacccggagacgttcgccaagaaccgggagctggaggtgatccactcccggtgggcgatgctgggcgcgctcggctgcgtcttcccggagc

SEQ ID NO: 405647 - DNA, 481 bp, Oryza sativa nipponbare
ctcccccacatctccccttcccttccactcctcctcctcctcggatcgggaggcggagcgagcaatcccccaaggaatttgtatttgtagcgtgatttgcaaagctagtcaagatggtgaagttcacagtagaagagctccgccggatcatggacaagaagaataacatccgtaatatgtccgtcattgctcatgtggaccacggaaagtctacacttacggattctcttgtggcggctgctggtattattgcccaggaagttgcgggtgatgttcgcatgactgatacccgtgcagatgaagctgagcgtggtattacaatcaaatccactggtatctctcttttctatgagatgagtgatgaatcactcaagttgtacaagggtgagagagatggaaatgagtacctgatcaaacctattgattcacctgggcacgttgatttttctttggaggtcactgctgctcttcgtattactga

SEQ ID NO: 405648 - DNA, 422 bp, Oryza sativa nipponbare
cagagtctcaaaagagaaagaagcatagcccttcatgctgtcacatgcactcgcgtctaagagctccacctgcatcacaccaggactgcaacgttgtcactgctcgacagccttcttctactgctacaactggtgccggcatcctctgccgcggtgttggagctccacgcgaacgcctaccctattggccatttcttcatcacacatgaacatctgtgacgcggcaaaatcctactttctggacatcgacaccggcagcaccctcacctggctgcagtgcgacgcccgctgcacgaattgcaacattgtaccacacgtgctgtacaagccaaccgcaaagaagctggtgacctgtgccgactcactctgccctgacctgtacactgatctgggcaagcccaagagatgtggatcccagaagc

SEQ ID NO: 405649 - DNA, 440 bp, Oryza sativa nipponbare
  unsure (1)..(440): unsure at all n locations
ggcaagccaacataaacctctattcttaccaggtgttcctaatgcaaccgctctggagcctcggttccttgtagagtcttcgcgttccaatcttcaatccttacggttcactgaacccgctgagatgatctatcctgatgagatgatgttaaagcaccgcctgacttcagctagtgagagcacaattgtgccaggaaccgatgagaagtcggttaggcagaacacatacatgatgaatgctgatcgttttgatagatatgcactcagcanagaccagttgcagcacattatgccgaaaaacacagaaagtgtactngatatgccacacttgcaaaagatataagctgacgattcagcttccaatcttggacaggttgcataaccagtgacacccaaagttagggtcgagggcagaatcaaagtaaacccatgatctaatt

SEQ ID NO: 405650 - DNA, 434 bp, Oryza sativa nipponbare
  unsure (1)..(434): unsure at all n locations
tcgtccacgcgtccgaccacgcgtccgaagaaaaggcctgtgtcaaggagagggtagtagcaccttgctctcctttgccttcagagaaaccggaagcaatggcgtctgctactctcctcaagtcatctttccttcccaagaagtctgaatggggtgccacccgccaggctgccgcccccaagccggtgactgtctccatggttgtccgcgctggtgcctacgacgatgagcttgtcaagaccgcgaaaaccattgcatcaccaggaaggggtatccttgccatggatgagtcgaacgcgacctgcggtaagaggcttgcgtcaattggccttgagaacaccgaggccaaccgccaggcttaccggacccttcttgtcaccgcaccgggcttgtgacagtacatctncngtgctatcctcttcgaggagactctg

SEQ ID NO: 405651 - DNA, 336 bp, Oryza sativa nipponbare
  unsure (1)..(336): unsure at all n locations
tcgcccacgcgtccgcccacgcgtccgcgcttcccccctccacccgtctcctccgtctccggcgccggcgccggcgagctcgcccnccgcgattcgtgccctccgatcagaggcgaggcgggagaagagatggggctcacgttcaccaagctgttcagccggctcttcgccaagaaggagatgcggatcctgatggtgggtcttgacgcggccggaaagaccacaatcctctacaagctcaagctcggcgagatcgtcaccaccatccccaccatcggattcaatgttgaaaccgtggagtacaagaacatcagcttcaccgtctgggatgtgggg

SEQ ID NO: 405652 - DNA, 373 bp, Oryza sativa nipponbare
cccacgcgtccggcggcgccgtcccccctctctctctctctctctctctctctctctctctctacactgctcacgcctctctctctctctgctcccaaatctgcgtgggagagagagagagagaaatccagtggggggagggattggtctctggaggggatctagcagcagcagcagcagcagccatgaacatcttcaagaagaaggtcgaccccaaagaggctctcatgaccagcaagagggagatgtcagttgctacacggggagttgagagagagattggctccctgcatatggaggagaagaaactagttgctgagattaagaaaactgcctagacaggaaatgaggctgcgaccaaaatcctagctcg

SEQ ID NO: 405653 - DNA, 322 bp, Oryza sativa nipponbare
cccacgcgtccgcccacgcgtccgcgtgctttcccttcagtagttaagcgtagagaatttgaggccatggcaatcagcagaaggagctccatgctgttggtgatggccttagtgcttgggacggtctcccttgccacggccgcatctggagtcgccaccttctacactcaatacacaccgtcggcgtgctacgggaacaggaacatggggaacatggtggcggcggcgaacgacaggttgtacaacaactgcgccgtgtgcgggcggtgctacgccgtgaagtgcgccggctcggcggccggcggcggctgatgcaacccct

SEQ ID NO: 405654 - DNA, 393 bp, Oryza sativa nipponbare
agtcaatgacgggtcatctgctaggagctgcaggtggaatagaagctgtggctgctatacaagctataaggactggttgggtccacccaaatatcaatttagacaacccggagaaaaatgtggatgtcagcattctagtgggatcacaaaaagagagatgtgatgtaaaggtggcgttgtcgaactcgttcggattcggtgggcataactcatcggttttgtttgcacccttcaagtgacctcagctgatgatttggtaggctatggtccgattgcatcatggggactttgtataagaggatttaccaggctgaataacattcctgagttgcaaactacaaagaaatccaagcttagtagagttacttcgccatacaacggagcaagaacaac

SEQ ID NO: 405655 - DNA, 266 bp, Oryza sativa nipponbare
accacgcgtccggccaaatgggaattttgaagttggagttcatattgctgacgtcactaactttgttcatcctggtactcctcttgatgaggaggcctcacaaaggggcacttctgtatatcttggtggacagcgaattgacatgcttccaaagcctcttacttgaaatgtttgctctcttcgcgctgatggtgagagattggcgttctctgtcatttgggaaatgacacctcatgctgatatcatattcacaagatatacaaaga

SEQ ID NO: 405656 - DNA, 287 bp, Oryza sativa nipponbare
cccacgcgtccggcaaaacaacatcaagctgtacgtacgccgggtgtttatcatggacaactgtgaggagttgatcccagagtggctcagctttgtcaagggcattgttgattctgaagaccttcccctcaacatctcacgtgagatgctccagcagaacaagatcctgaaggtgatccgcaagaaccttgtgaagaagtgcgtggagctcttctttgagatcgctgagaacaaggaagactacaacaagttctacgaggctttctccaagaatctcaagcttggca

SEQ ID NO: 405657 - DNA, 369 bp, Oryza sativa nipponbare
  unsure (1)..(369): unsure at all n locations
cccacgcgtccgaactactcatggggaagtgaggccgtgacccgcaagacccgtatccttgatgtggtctacaatgcatccaacaatgagcttgtcaggactcagaccctngtaaagagtgctattgtgcaagttgatgctgcccccttcaagcagtggtacctcactcactatggagtggatattggtagaaaagaagaagctcctgcagccaagaaggatgctgaggggcaggatgctgaagctaccacagaggaagcgtagaaaagcaaccatgttgtcaggaagcttgagaagcgccaacagggacgcacacttgacgcccacatcgaagaacagtttggcagtgggaggttgctggcctgcatt

SEQ ID NO: 405658 - DNA, 324 bp, Oryza sativa nipponbare
  unsure (1)..(324): unsure at all n locations
tcgcggacgcgtgggcggacgcgtgggcggacgcgtgggtcatcangcagatagtttccgcaggaggggtgctgaattcgactgttctgcgaactcggtcagcgatcgtttcgcagataaagatgcatggagggattgcaagcagccccggtacaactttcaagatatcagatgcagagatcttcctctactccgggatcggaaccgcggagtcccgacgccctagctcatgctctagcaatggcaagtgtgaccatgcccatcatggagatgcacaatgcggaaatgctgaaaaccatggatcttcagagaagaagctgagct

SEQ ID NO: 405659 - DNA, 416 bp, Oryza sativa nipponbare
aggtgctgaaggtgatattcagattttcagagtgagtgctcgtgtgttgtgcgatcagtgcccgcagttcgatcgatccgtgttgatctttgaaagaaagatgtcgtgctgcggaggaaactgcggctgcggatccggctgccagtgcggcagcggctgcggaggatgcaagatgtacccggagatggctgaggaggtgaccactacccagactgtcatcatgggtgttgcaccttccaagggtcatgccgaggggttggaggccggcgccgccccccgagcaagagcagagaaccggtgcaagtgcggcgacaactgcacctgcaacccctgcaactgcggcaagtgaagcaagcaacctcctgacgaaaccaaggagatggaagggcctagtactgctaaactagtagtttgat

SEQ ID NO: 405660 - DNA, 562 bp, Oryza sativa nipponbare
  unsure (1)..(562): unsure at all n locations
gccctctcgccgacctcctcctcctcctcctcttgcctcctccgctgaggcagccagtgcgtgcgccgcgcgggcagcgtcggcattagaggagtggtggcgggcggcgcgccgacggagacgccagatattcagcagaaggcacttcctctgtttgatttgcaaaaatggcttgctgctttatgtttgggaatgatacaaaacaaactagtgaaggtgaacaaggagaaaaagcggtcaggattttttcttacaatgagctgagaagagctacacatgattttagtggggcgaacaagattggtgagggcggcttcggttctgtgttcaggggaaggctcagagatgggacaatagttgcagtaaaggtgctctctgctacttcaaggcaagggcgtccgcagttcattaatgaactgacagcaattntccgtgtgatgcatgaaaacctaattacgttagtcggctgctgtgctggagggtctantaggatccttgatacaattatcttgagaacaacagccttcaacatacactactagggtcaggccgtagcaacatc

SEQ ID NO: 405661 - DNA, 536 bp, Oryza sativa nipponbare
ggcgcgaaggctctcgctgctggccgtcgtgctggcgatggtggcggccgtgtcggcgagcacggcggcggcgcagagctgcgggtgcgcgtcggaccagtgctgcagcaagtgggggttctgcggcaccggcagcgactactgcggcacggggtgccaggcgggcccctgcgacgtgccggccaccaacgacgtgtccgtggcgagcatcgtcacgccggagttcttcgcggcgctcgtcgcccaggccgacgacggctgcgccgccaagggcttctacacccgcgacgccttcctcaccgccgccggtggctacccttccttcggccgcaccggctccgtcgacgactccaagcgcgagatcgccgccttcttcgcccacgccaaccacgagaccataaagttctgctacatcgaggagatcgacggaccgagcaagaactactgcgacgagacgagcacgcagtggccgtgcatggcgggggaagggtactacgggcgcgggccggctgagatctcgtggaacttcaactacg

SEQ ID NO: 405662 - DNA, 429 bp, Oryza sativa nipponbare
gtccatctctttctttcattaagggtgtactaccaaaatatttccactcggagtggtctgtagctcagttcagactccacgagggggagcaatatattgttgcatttggccatgagaagaataccgtggcagttgttggcatggatggaagcttctaccgatgccagttcgaccctgtaaacggaggagagatgctgcagctggagtgctacaatttcctaaaaccatcatcggatcaaccacagtagcagcccaagcagcggatctgtttttcctcccttgtatcggggttgtacagtatctgtgtgccctctcgattattgttattatttgtaaatatatcttagtggtgattctacaagtatgctctgttgagggttaaaagaacccttgtgcagatggacataataatattactcccacgttagc

SEQ ID NO: 405663 - DNA, 570 bp, Oryza sativa nipponbare
cccacgcgtccgggcggcggcgcggcgcggagcagaggaggacgaagcagcaggcggcggcggcagagcacggcgacctagcccgacctcgcaaccatggcaaggggtttgaagaagcatctgaagaggctcaatgcgcccaagcattggatgctcgacaagcttggtggagcttttgcccccaagccatcttctggtcctcacaagtccagggagtgcctgcctctgatcctcattatcaggaacaggctcaagtatgctctgacataccgtgaggttatttctatcctcatgcagcgccatgtcttggttgatggcaaggtcaggactgacaagacctacccagctggtttcatggatgtcatttccatccccaagactggtgagaactacaggcttctgtacgacaccaagggacgtttccgccttcagtctgtcaaggatgaggatgctaagttcaagctttgcaaggttcggtctgtgcagtttggccagaagggaatcccctacctgaacacctatgatggtcgcaccatccgctaccctgacccgatcataaggcaaacgaca

SEQ ID NO: 405664 - DNA, 547 bp, Oryza sativa nipponbare
agaaaggcaagatctgaagagagacattgatatccagagggtggaattgctaaattctgctaaggcaaggcagatggaaatagattcttatttgagggaaagggaggaagagtttgagcagaaaaaggccaaggaactcgaacacatcaattctcagaaggagatgatcaacacaaaattagaacatgttgcagttgaattgcagaaacttgaggatgagagaaaagaagctactttggaacgtgagaggagagagcaagagttgtctgagataaaaggcactattgaagccttgaataatcaacgggagaagctgcaagagcaaagaaaactattacattcagaccgagaagcaattacagtgcaaattcaacaacttaatgtgttggaagaactgaaaattgattctgaaaataagcaactgtctttgttacaacatgataagtcaaagctttgaagtgataataatgtgaaagacaatcatcatgataactcccattcttcaccaaaacaacgttttggaaggaaactagacctttctccagtc

SEQ ID NO: 405665 - DNA, 510 bp, Oryza sativa nipponbare
ctcacgcgtccgctttttttttttttttgcacaaaaagtggaaatttgtattatattgaattcggttgaattaagaaagggcataatcgaaatcatttctttgatatgccatatgctttacgaaactgcatacacatcaagaaatgaaaattgcatacatgcataatacaactaccggctggtaggtatatataaaaagggaccttggaaaaccaacaagaacaagttccccatctgctaagcctggctacgtgatctatgaaccatcaaattcttctagcatatatatatactcagaagccggaggaggacggtggaggcgccaccaccaccaccacccttcgccatgcaggaccaggccgcccccgtcccatggtccaccgacctctttgactgcttcgacgacagcagcaactgttttatgacgtggttgtgcccgtgcatcacgttcgggcagatcgcggagatcgtcgaccggtggtcgtcggcgtgcgggacgagcgggtcgtt

SEQ ID NO: 405666 - DNA, 533 bp, Oryza sativa nipponbare; identical to SEQ ID NO: 391415

SEQ ID NO: 405667 - DNA, 497 bp, Oryza sativa nipponbare
agaggatctttttctgttgaagtcatactcactctttttgctttcaagtgcctctatccgacaggtatgtaccttgcaagaggaaaccatgagagcaagagcatgaataagatatatggttttgagggagaagtgaggtcgaagttgggagaagcatttattgaactatttgcggaagcattctgttgcctaccccttgctcatgtcatcaacaacaaggtctttgttgttcatggaggtctctttagtgttgatggtgttaagctttcagatattagagccatcgatcgattccgtgagcctcctgaagaaggtctaatgtgtgaagtattatggagtgatcctcagcctcaacttggtagaggtccaagcaaacgcggtgttggtctttcgtttggtgcagatgtgactaagaaatttctacaagaaaataatctggaccttgttgttcgatcccatgaagtgaaagatgaaggctatgaaattgaacatgatgg

SEQ ID NO: 405668 - DNA, 479 bp, Oryza sativa nipponbare
gggagctccagaaggagcgcgaacgcagcgaccgcaaccgtgactaccgtgaccgcgatgttagacgtaggaaagatgacggtgcagagccagaagctgatccagaaagagatcaaaggactgtatttgccttccagctatctttgaaggcagatgaaagagacgtctatgagttcttctcaagagcagggaaggtccgtgatgttcgccttattatggacaggaactcgcggcgttccaaaggagttgggtacattgagttctatgatgctatgtctgttccaatggcgatagctctaactggtcaggtgcttcttgggcaacaagtgatggttaagccctcagaggctgaaaagaatctagttcagtcaaacgtggcatcaggtggaatagcttcaggtggagcaagaaagttgtatgttggcaacctacattccaatatcactgaggatcaattgagacaggtattcgaaccattt

SEQ ID NO: 405669 - DNA, 483 bp, Oryza sativa nipponbare
gcgccgccggcccccgcaaggagcccccgcaccgccgacctcgggaacccgccgcctcgcgcacctgggtggattggagtacttcaaatgacaagggtcatccatgactctggagaaggcatgcagaaggaggcacttgctatggtatcttctgatgttaacttccccaagggccattttccagactacaagattgggccaaacaaccaaatcattgatccagaagagatacatgaggctgtacctttgaaggagatcgttgcgaaggaaacagcacagctgctagagcagcgaaggcggctttcagtgcgtgacctgaaggagaagtttgagaagggtctatcaggtgcctcaaaactgtctgaagaggctaagcgccgagaagcagcttcgttggacaggcaggttcttctgaagaagcttagagatgttttagacactctgaaaaagcgtgtggctggtagaaatagagacgatgctgat

SEQ ID NO: 405670 - DNA, 427 bp, Oryza sativa nipponbare
cccacgcgtccgcccacgcgtccgcgacattgtcatcgagggtaccggagtgttcgtcgacggccccggcgccgggaagcacatccaggccggcgcgaagaaggtcatcatcactgctccggcgaagggtgctgacatccctacctacgtcctcggtgtcaacgagggagactactcccacgaagtggccaacattatcagcaatgcttcctgcacaaccaactgcctcgctccgttcgtcaagatcttggacgaagagttcggaatcgtaaagggaaccatgaccacaactcactcctacaccggcgaccagaggttgctggacgcgtcgcaccgtgacctgaggagggcccgggcggcggcgctgaacatcgtggccacgagcaccggcgccgcgaaggccgtggcgctggtgctcccgcagctg

SEQ ID NO: 405671 - DNA, 422 bp, Oryza sativa nipponbare
  unsure (1)..(422): unsure at all n locations
cgagaacattcttaaagtaggagaaaccgacaagaccttggctgcaggtgatgtgaatgtcttttcccagatgattgatgaagcggaaggtttggaaaagattgagaacttgcagagccatgataacaatgagatctatgaaaaagctgtgaagattcttgaggcctactggatggatgaggaggatgatacaatgggagctaccacggtagctgctccccaaggtgctacttttgactttggccaaggcggtggtgctgctcaattcaaataaatacagatttgaccagaggtggtaaattgtggccactgtgcggngtactgaattgttctggtggttcaataagctaaaggtttcaagggggccagtgttacattatttccctactggtcacggatatcatatcacttacgtctgtaac

SEQ ID NO: 405672 - DNA, 538 bp, Oryza sativa nipponbare
cccacgcgtccgtgtgtctcgggacttgtacaacttcgttgctcgttacaagaaagaaagaattgagggtatggacactcaatttgcactgagccttttgaacgaacagaaggaaagagatgcagaatttttctttgagtacaatactgatgccggaggtcatctgaagaatatgttctaggccgatgcacaatctcggatcaactatgacgcatttggaggtgttgtggtttttgacgccacttaccgtgtcaaccggtacaaccttccttttgttccttttattggtgtaaaccatcaccgtagcacggttgtctttgggtgttgtctgctctcagatgagacggtttcttcatatgtgtggctgctggagaccttcattaaggcgatgggtggcaagcatcctagatcgtttatcaccgatggggacctttccatggcaaacgccatcgccaaggtctgtcctgatgcagatcatcgggtatgtacatggtacattgaggagaacgcaaaacgccatcttcatggggatgcgctc

SEQ ID NO: 405673 - DNA, 516 bp, Oryza sativa nipponbare
aaggagaagtcttcctttggttttgttgactattatgatcggaggtcagcggctcttgcaataatgacccttcatggtcgtcacatatgtggccaagcaatcaaggtgaactgggcttatgcaagtacacagagggaggatacatctgggcatttccatatttttgttggtgatttaagttctgaagtgaatgatgcaactctttatgcctgtttctcagcatatccttcttgttctgatgctcgagtcatgtgggataacaaaaccggacgctccagaggttatggttttgtctccttccgtaatcaacaggaagctgagactgctataactgaaatgactgggaaatggcttggaagcagacaaataaggtgtaattgggcaacaaagaacaatgcagaagagaaacaagaaactgacaaccataatgcagttgtactaacaaatggtagttctagtaatccaggaatggaggcaagtcaggacacccgaaagtaagagaatccagagaacaac

SEQ ID NO: 405674 - DNA, 470 bp, Oryza sativa nipponbare
gcgcttgcatctactcttgtaattgttatttctaagagtggaggcacacctgaaacccggaatggtctgcttgaagtgcaaaaagccttccgagatgctgggctggatttctcgaaacagggagttgcagttactcaagaaaattctctgttagacaacactgccagaatagagggatggttagctagatttcccatgtttgactgggttggtggaagaacatcagaaatgtcagctgtcggattgcttccagctgcattacagggtatcgatatcaaagaaatgttagttggcgcagcactaatggatgaggaaaccaggaatactgtggttaaggaaaatccagcagccttacttgctttgtgctggtattgggcatcggaaggaataggaaataaggatatggttgtacttccgtacaaggatagtttgctacttttgagtagatatttgcaacagcttgtcatgga

SEQ ID NO: 405675 - DNA, 81 bp, Oryza sativa nipponbare
aagatatgtatctagagcatatctgataaattcgtcgacaataaaaaaaatggatggtattacgtaattatgtttgttttt

SEQ ID NO: 405676 - DNA, 494 bp, Oryza sativa nipponbare
  unsure (1)..(494): unsure at all n locations
cccacgcgtccgcccacgcgtccggttggtttgcagagggtgggggagatgatgcggcagctcaagtacgtgcggggcctggagttcgcggcgggggtcgggtacgtggacttcctctcgcgcgtgaaccgggtggaggacgaggcccgccgcaacgggagctgggccgcgccgcacccgtggctcaacctcttcatctcctcacgcgacatcgccgccttcgaccgcgccgtcctcaacggcatgctcgccgacggcgtcgacgggcccatgctcatctaccccatgctcaagtccaagtgggacccggccacgtcggtggcgctgccgaatggcgagatcttctacctggtggcgctgctccgattctgccggccctacccccggggtggcccgccggtggacgagctggtggcgcagaacaacgcaatcattgacgccctgcggtccaacggctacgactacaagatatacttnccgagctaccacgccca

SEQ ID NO: 405677 - DNA, 493 bp, Oryza sativa nipponbare
gcagcacaaaaacatttctctcgcgagtcgcgagttgcaccgatcgaattaagggtcgaagatgtttgggttcgggcaccaccacaaccaggcaccggcggcgccgtcggacccgaaccagatcttcaagatcttctgccgcgccaacgagaactactgcctcaccgtccgcgacagcgccgtcgtcctcgcccccgtcaaccccaaggacgagcaccagcactggttcaaggacatgaggttcagcaccaaggtgaaggacggggagggcatgccggcgttcgccctcgtcaacaaggccaccggactcgccgtcaagcactccctcggccagtcccaccccgtgaagcttgtgccgttcaacccggagtacgaggacgcgtcggtgctgtggacggagagcaaggacgtcggcaagggcttccgctgcatccgcatggtcaacaacacccgcctcaacttggacgccttccacggcgacaaggaccacggc

SEQ ID NO: 405678 - DNA, 556 bp, Oryza sativa nipponbare
  unsure (1)..(556): unsure at all n locations
cccacgcgtccgcccacgcgtccggctaaagtggtcaaggatcgtcggcggaagaatcctgttagcagcataattcttctttctgatggtcaagacacccattcatttctatctggtgaggctgatataaactacagtatacttgttcccccttcaatccttcctgggacaagtcatcatgtgcaaatccacacctttggttttggtacagaccatgattcggctgccatgcatgctattgctgagacatctaatggcacattttcatttattgatgctgaaggctcaatccaagatgcatttgctcaatgtatgggtggcctccttagcgttgtagttaaggatatgcggctgtgcatcgagtgtatagatgaaggcgtgtctcttacctccatcaagtcaggcagctatgcaagtcaagtagctggaaatgaacgcagtggattgttgataatgtgacctctatgcagatgaagagaggggatttctggcactctactgtncagncgacatggacagactgnctgacaaaccaaatgcacatcctagatgcata

SEQ ID NO: 405679 - DNA, 353 bp, Oryza sativa nipponbare
cacgcgcctagcgcacgccgtcaccgtcgtcgggtacggcaccgacgcgtcttccggcgccaagtactggaccatcaagaactcatggggccagtcatggggcgagcgcggctacatccggattctccgcgacgtcggtggccccggcctgtgtggcgtcacactcgatatcgcctacccgaccctgaccctgtgaacgaagtcaacgaacggcatgaaaagacgcgcagatatgactatatcactgtacacacgactaccctactataccgtgagtgtctgccgacgagacgtatccactatacatgtatgaattgtggaccgtgcctaaataaaatgcatgctgcgcgcgt

SEQ ID NO: 405680 - DNA, 526 bp, Oryza sativa nipponbare
cggacgcgtgggctgagctgagctagctatagccatcacagcaagtgtcaggtggaaactagcttagatagagatggctccggccttcgtctccgacgagcgcgccgtcgcggtgtcggtggagaggctgtggaaggtctgcttggacgtgcactccctgcccaaggtctgcgccggattcatcgacgccgtcgaggtcgaggggaatggcgggccgggcaccatccacatcatgaagcttaaccctgccgcggacgcagggagcgtatacaagaccaaaatagtggtgtgcgacagcgcaactcacgtgctaaaggctgaggtgttggaggttaagagcagggtgggcaacctcaagtcgcactcgacggagacgaagctcgaggccaccggcgacgccacctgcgtggccaagctcacggtggagtacgagctcgaagacggcgcctcgctgtcgccggagcaggagaggatgacgtcgacggctacttcagcatgctccagatgatcgagtgtacctcgtcgc

SEQ ID NO: 405681 - DNA, 538 bp, Oryza sativa nipponbare
  unsure (1)..(538): unsure at all n locations
gaagatggcaagtactcctggggtcagtgcaaccctttttgatgcacttgcaaaggcaaatattaatgtaagggcaatagctcaaggttgtagtgagtacaacatcactgttgtattgaagcaagaggactgcgtaagggctctgagagctgctcactcaaggttcttcctctccaaaaccacacttgctgtcggaattattggacctgggttgattggtcgtactctccttaaccagctgaaggatcaggctgcagttcttaaggaaaatatgaacattgatctgcgtgtcatgggaatcactggttcgaggacaatggttttgagtgatacaggaatagatttggcccattggaaagagcagctacaaactgaagcagaaccagccaaccttgacaagtttgttgatcatttgtccgagaatcaattattccctaacagggttttggtggactgcacagcagancacaagtgtngcatcccactattatgactggttaaagaagggaatccatgtcatcacgccaaataagaaagc

SEQ ID NO: 405682 - DNA, 509 bp, Oryza sativa nipponbare
cggacgcgtgggcggacgcgtgggcggacgcgtgggtagggaagctcctagattgtgctcttgggcataatgaatctgcactttttaggcgagctcaacttaaagctcttgtctctatccatagcaaagaggctggcaagggtggagagcttacccatgatgagactacaatcataagtggagccttggacttgactgagaagactgctgaggaggctatgacacctattgagtcaactttctcattagatgtggactccaagttggattgggaagcaatcggcaaaatccttgctcggggtcatagccgtgtgcctgtatactctggaaaccctaggaacattattggtctcctgctggtgaaaagtcttctgacagttcgtgctgaaacagagacaccagttagtgctgtttccattagaaggattcccagggttcctgcagatatgcctttatatgaacatactgaatagtttcagaaaaggaagtagcatatggcctgctgtgtg

SEQ ID NO: 405683 - DNA, 419 bp, Oryza sativa nipponbare
cggacgcgtgggtgtgggtgtgtccctgtctcccctccttcctcctctcctttcccctcctctcttcccccctctcacaagagagagagagcgccagactctgcccaggtgaggattcagccatgaagggggccaaatccaagggcgccgccaagcccgacgccaagttggctgtgaagagtaagggcgcggagaagcccgccgccaagggcaggaaggggaaggccggcaaggaccccaacaagcccaagagggctccctccgctttcttcgtttttatggaggagttccgtaaggagttcaaggagaagaaccccaagaataaatctgtcgctgctgtaggaaaagcagccggtgataggtggaaatccctgaccgaagcggacaaggctccctatgtagccaaagccaacaagctc

SEQ ID NO: 405684 - DNA, 513 bp, Oryza sativa nipponbare
  unsure (1)..(513): unsure at all n locations
cccacgcgtccgccgccatctactcggagctcccggatcgaggggagcgctcgccgccgccgcagcgacctcgccggatcacggcggcgggggccgatcgatcggaggtcggtcgattgccttcggcgggtgggagatggatggcggcgtgggaggcgcgcacagctcgcggaggagcgtgtcctcgtcgaccggatccaggaggagggccgggcccacggagaacggccaccacgacgccgccgctgccgccgccggcaggaggtcctccgcttccatctcccgcgcctcgcagcagtcgatgaccggggagaggaccgtgnagaggttaagattgtccaaggcactgacgattccggatcacacaaccgtctacgaggcttgtcggaggatggctgcacgcaaggtggacgctgtgttgctgaccgactccaatgctntgctgtgcggatccttactgacaaggacataaccacaagagtaattgctcgcgaattgaagctagaagagaca

SEQ ID NO: 405685 - DNA, 497 bp, Oryza sativa nipponbare
  unsure (1)..(497): unsure at all n locations
cccacgcgtccgcccacgcgtccgctttccaaactggtttttccggtcagcgattttatgatgactggttccagtccctttataatgtcattttcacggccctacctgtaattatggttggattgtttgataaggatgtgagtgcgtctctgtcaaaaaaatatccgaagctttaccaggaaggaatcaggaatacattcttcaagtggagggtgatagcagtgtgggctttctttgccttctatcagtcgatagtgttctattacttcactgcagctgcaagtcggtatggtcatggttcatccggcaagattcttggtctttgggatgttagtacaatggctttcacctgtgttgtggtgactgtgaatctccgacttctaatgtcatgcaactctataacaagatggcactatatcagtgtagctggcagtataacagcctggnttatgttcatcttcatctactctgcaataatgacatcattcgacagacag

SEQ ID NO: 405686 - DNA, 559 bp, Oryza sativa nipponbare
cccacgcgtccggagaaggagaaggtaggctccagccatggcttcccagctctccgccgccacatccgtgccgcagttccatggcctccggacctactcctctcctaggtccatggtgacgctgccatcgttgaggatgagcaagaagaggtcccagggcatccggtgcgactacatcggctcagccaccaacgttatcatggtgacgacgacgacgctgatgctgttcgcggggaggttcgggctggcgccgtcggcgaacaggaagtcgacggcggggctgaagctggaggcgcgcgactccggcctgcagaccggcgaccccgccgggttcacgctcgccgacacgctggcctgcgggcgccgcggccacatcattggccgtcggcgcgtcctcggcctcaagaacaatcgcgtcctggaccagatcatcggctaatcaaattcattaagctagtcacacgaatcaatactcctatgtgtaatcgatgcatgagtgcctggtgatggacgatgtaatgacatgtaaattgggcgtggaatcaggctatctagctta

SEQ ID NO: 405687 - DNA, 502 bp, Oryza sativa nipponbare
gaacggcatcctctgggaagtcgatggcaagtgggtcgttcaaggagctattgatgtggacattggtgccaacccatctgctgagggtggtggtgatgatgagggtgttgatgaccaagctgtgaaggtggtcgacattgtggacaccttccgtcttcaggagcaacctccttttgacaagaagcagtttgtgaccttcatgaagcgctacatcaagaacctctccgccaagctggatgcggaaaagcaagaggaattcaagaagaacattgagggtgccaccaagtacttgcttggaaagctcaaggaccttcagttctttgttggtgagagcatgcatgatgatggcggcttggtgtttgcctactacaaggacggagccaccgacccaaccttcctttacttctctcatgggctgaaggaggtcaagtgctgagcggttccttctgctcgacactgatgttttatctatgcagtccgcggtatttttggtctagtctat

SEQ ID NO: 405688 - DNA, 470 bp, Oryza sativa nipponbare
aaacgaacccctctcactcccagatacctgctgctgccactagcccactaccatggatccttgcaagttccggccgtcgagctcgttcgacacgaagacgacgacgacgaacgcgggagctccggtgtggaacgacaacgaggcgctgacagtggggcccagggggccgatcctcctcgaggactaccacctgatcgagaaggtggcgcacttcgcccgggagcgcatcccggagcgcgtggtccacgcccgcggcgcctccgccaagggcttcttcgagtgcacccacgacgtcaccgacatcacctgcgccgacttcctccggtccccgggcgcccagacccccgtcatcgtccgcttctccaccgtcatccacgagcgcggcagcccggagacatccggacccgcgcgggttcgcgcaagttctaacccggagggcaactggacctctggaacacttcccgttttta

SEQ ID NO: 405689 - DNA, 573 bp, Oryza sativa nipponbare
  unsure (1)..(573): unsure at all n locations
gcgctcgtgtcgccgccggcggaggctgcggcgagccttcaccccccacccgcccaccgccggcgagccacggcgtgggcgacctcctggcctctcccgatcccctctgggccttaggtaggggcttctccccagtccccaccacacgcgcgtgcgtggccgacgagcaccccaggttcggatcggatggaagaccagaagaaaaatgcaaaaccagaggggtcttctggctcgcaaaggggagctcccccggcacctgatgcaggccttcccaatccttttgatttttctcagtttagcaacttgctcaatgatccatctataaaggagatggcagagcagattgcaagcgaccctgtgttcacccagatggcagagcagctgcagaagagtgctcatgtgaccggggaacagggtggccctgcattggatcctcagcagtacatggaaacaatgacacaagtcatgcaaaaccctcaattcatgtcaatggcagaacgtcttgggaatactcttatgcaggatcctggaatgtccagtatgctcgagagttngactagtccttctcataag

SEQ ID NO: 405690 - DNA, 471 bp, Oryza sativa nipponbare
gcactcctctcgatctccattcgtttttgagttcctcgtttgctccgcctctctttcactcatgggcaagattaagatcggaatcaatgggttcggccgcatcggcaggctggtggccagggtggcgctgcagagcgaggatgtcgagctcgttgccgtcaacgatcccttcatcaccaccgagtacatgacatacatgttcaagtatgacaccgtccacggccagtggaagcatcatgaggtcaaggtcaaggactccaagaccctcatctttggcacgaaagaggttgcggtgttcggctgcaggaaccctgaggagatcccatgggctgcggctggtgctgaatacgttgttgagtctactggtgttttcaccgacaaggacaaggcagcagctcacttgaagggggtgccaagaaggtcgcatttctgctccagcaaagaccccccatgttcgtgtgggtaacgaga

SEQ ID NO: 405691 - DNA, 361 bp, Oryza sativa nipponbare
gccaagaaggccgccgcgccgaggaaggcacgctccaccgccacccacccgccgtacgccgagatgatctcggaggcgatcgcgacgctgaaggagaggaccgggtcgagccagtacgcgatcggcaagttcctcgaggacaagcacaaggaccacctgccatccaacttccgcaagcagctgctcgtccagatcaagaagctcgtcgccgccggcaagctgaccaaggtcaagaactcctacaagttgccgccgacgcgcgcgccggccgcggccaagcccaaggcgaagcccgccgccgccgcaaagccgaagccgaagccgaaggccgcagctaagcccaaggcggctgccaagccga

SEQ ID NO: 405692 - DNA, 432 bp, Oryza sativa nipponbare
cccacgcgtccgcccacgcgtccgggcttattcactccaatgatgaggaagttctcactgatgcgtgctgggctctttcatatttatctgatggcactaatgacaagatccaagccgtgattgaagctggtgtttgcccccgtcttgtggagcttctcctccatccatcaccttcagtgcttatacccgcactacgaactgttggaaatattgtaactggagatgacgcgcaaactcagtgcatcattgatcatcaagccctcccttgcctcctaagtctgttgacacaaaatctcaagaaaagcatcaagaaagaggcttgctggactatttcaaatattactgctggtaacaaagatcagatacaggctgtcataaatgctggcattattggtcctctggtgaatctgctccaaacggcagagttcgata

SEQ ID NO: 405693 - DNA, 460 bp, Oryza sativa nipponbare
cacctttcatcccaacgcacatacgcacctacgcatcactcaatcgatcaacaatggcgtcgtcttcactgccggcgttcacggtgcggcgaggcgagccggtactggtgacaccggcggcgccgacgccgcgggaggtgaaggcgctgtccgacatcgacgacggcgagggcatgcggttctacagctcgggcatccacctgtaccgcaacaacccggccaagaaggggcaggacccggccatggtgatccgggaggcgctggccagggcgctcgtcccgtactaccccctcgccggccgcctccgcgaggaggccggcaggaagctcgtcgtcgagtgcgccggccagggcgtcatgttcgccgaggccgatgccgacctcaccgccgacgacttcggcgacgtgcagagcccgccgttcccttgcttcgagcggtcatcctcgagagcccaccgtcg

SEQ ID NO: 405694 - DNA, 501 bp, Oryza sativa nipponbare
cccacgcgtccgaatcaatgcggtgaagagccagtgaatgtggtaaatcgacccatccctgactacttggagcaaaggaccattcagaagctcctgttggttggatcagggacaaacaccatactcaagcaggccaagttcttgtacaagagcagaccattttctgtagaggagtgtgaagatctcagacttatcatacaaagtaacatatacaactaccttggtatactacttgaagggcgtgaaagatttgaagaggaagctatagctgacagaagaactacctgccaaagtgatccttctagctctggccattgtgaaccagagctttgtaatgacattactgagtactatattgctccacgcctgaaagcattctctgattggattctaaaagctatggccataggtaatcttgaagacattttccctgcagctagtcgtgaatatgcaccaatggttgaggaactatggaaagatcctgctattcaagctacatat

SEQ ID NO: 405695 - DNA, 437 bp, Oryza sativa nipponbare
cccacgcgtccgcagcagttgagctctttttccactacgcactagtagtagcactctggtattctcccatggcgactgcgaccgaggaggttgccgctgcggctgctgccgccggcgaggcgccgccgccgccgccgccagcggtggtagaggaggcgaaggaggctttggaggcaccgaagccggaggaggcgccgaaggctgaggagggggaggagaagaaggcggagggtgagaaggagaaggagaaggcgaagaaggagaggaaaccgagggcgaggaagccccgatcggcggggccacaccacccgccctacttcgagatgatcaaggaggcgatcatggcgctggacgggaacggcaagggcgggatcgagcccgtacgcgatcgccaagtacatgggggagcagcacacatggggttctcccggcgaact

SEQ ID NO: 405696 - DNA, 479 bp, Oryza sativa nipponbare
  unsure (1)..(479): unsure at all n locations
cgatgacactggtggtagccccgagaatgatgatgatggagttttggatgattgggaagctgttgccgatgcactctcagtggatgacaaccataatcaccaggatccagtgccggcagatccaccagttgtacctgcatcttgtccagtgcccgctaatgcagcaacaaggcaagaaccaatcaagagtagtacaagagcttggagcccagatgatgcattccgtccacagagtttacccagcctctccaaacaagtcagctttccagctagcatgggtaactgttgggtggcaatggggataggatctgcacaaaagggagtcccctcaaagccgacatcctgccctatatgctacgaggaccttgatccaacagattcaagcttcctcccttgcccctgcggttntcatctgtgtctgttctgccacaagagaattctngaggcagatgggcgctgtcctgcctgcaggaagcagt

SEQ ID NO: 405697 - DNA, 521 bp, Oryza sativa nipponbare
  unsure (1)..(521): unsure at all n locations
caaaccctagccgccgccgccggcgtactcgagagaaacatcagcatccatggcgggcaagggcgagggtccggccatcggcatcgaccttggcacgacctactcgtgcgtgggcgtttggcagcacgaccgcgtggagatcatcgccaacgaccagggcaaccgcaccaccccctcctacgtcggcttcaccgactccgagaggctcatcggagatgctgccaagaaccaggtcgccatgaaccccatcaacaccgtcttcgatgccaagcgtctcattggcaggaggtttagcgatgcttctgttcagagtgacattaagctctggcccttcaaggtgattgctggacctggtgacaagcctatgattgttgtccagtacaagggtgaggagangcagtttgctgccgaagagactcctccatggtcctcatcaangatgcgtgagatgctgaggcctaccttggcaccaccatccagaattgccgtgtcactgttcctgcctacttcaatgactccca

SEQ ID NO: 405698 - DNA, 542 bp, Oryza sativa nipponbare
  unsure (1)..(542): unsure at all n locations
cccacgcgtccgggatccagataagatgctccagtgggaagatattgtatgtgtaagatattatagcccttgtgaggtgcaatgccctatttgcttggagagcccattgtgcccacagattacatcatgtggtcatatatattgctttccatgcattttacgttatttacttatgggaaaagaagattacaaaggtgaaagctggaagaagtgcccactgtgtttcatgatgatctcaacaaaggagttgtatacaatctatattactcaagtccagcattttcatgttggtgacaatgtgacatttacacttttgagccgctcaaaaaattcactcactccttctattaagaacctcactgatgaatctactatagacgaagatccttgcagtgcattctccaagttcattttgacgtctgatgtggaactttctgttagagaggcaaaaacagatcttgttaattggttgcatatggcagatntaggccttgtggatgacttggagaaacttccatacgtntctaccgctttggagcagc

SEQ ID NO: 405699 - DNA, 485 bp, Oryza sativa nipponbare
cccacgcgtccgcaaccctcgcataatccacagagatgtcaagtcctccaacatcctgctcgacgagaacttcgaagcgcacctctcagatttcggcatagccaaatgtgtcccctctgccaagtcccatgcctccacttatgtgctaggaaccatcggctacattgatccggagtatgccaggacttccaggctcaatgagaaatctgatgtgtacagcttcggcatcgtccttctggaattgctcacagggaagaaggccgtcgacaacgaatcgaacttgcatcaattgatactctccaaagctgatgacaacacagtcatggaggcagtggactcggaggtgtcagtgacgtgcacggacatgggactggtcaggaaggccttccagctcgcccttctgtgcaccaagaggcacccttcagaccggccgaccatgcacgaggtgcagggtgctgctctcctgcttgcgccctcgcatgaca

SEQ ID NO: 405700 - DNA, 457 bp, Oryza sativa nipponbare
ctcctgaagcaagggatctcatttgccggttattatgtgatgttgaccacaggattggcagtgcaggagcagaccaaataaaggcacatccttggttccgtggagttgcttgggaaaaactatatgagatggaagctgcatttaagcctcaagtaaatgatgaactggacacacagaacttcatgaagtttgaggaaatggataatgctccaaccagaacaggttccgggccctcaagaaagatgatgctgaattccaaagacctcagctttgtgggatatacgtacaaaaactttgatgctgtgaaaggattgaaacattcagatcaacaaaggaaccaatctctaataaggccctctattggctccatttttggtccagcagaatatggatccatctagagaaccaaatggaagggacaagcacatgcacacagtttcttcttgggatccgatga

SEQ ID NO: 405701 - DNA, 586 bp, Oryza sativa nipponbare
cccacgcgttcgcgtggttcctggcgagcagagcaagataggggaggagatcctgatctggatgaagaaggagctcttctccgaatgtcagaaccctaaacctcagtacaagcaacagtttgtttgttcccccaaagtacccccaccaatgtcccaagctggatcggaatccgacgctgccaaggagccggcgttcaaagagggcgagagagtgctcgcctaccacggcccgctcctctacgaggccaaggttcacaagtccgaaaacaaggaggatgagtggcggtatcatgtccattatcttggctggaataagagctgggatgaatgggtcacacatgatcgcttactgaaattgaccgacgaacatatccgcatacaacaggagcttgaaaagagccaagtcgttgacaaaagcgtaaaatctggacggtcagcgcaacataagccaacaggctctaatgctgatgcaaaaactgctaaagaagacaccaagattattatcaaggtgaagaacgcattagtcacgctgggggactggggagaaagatagaaattatttgtgagtcttttatgtcacattttc

SEQ ID NO: 405702 - DNA, 451 bp, Oryza sativa nipponbare
gacagacccaccaccatcaagaacatcaggaggagaagtagatagatgggcaactgcgggacgcgagaggagaatgccgtcgttgcggcgcacgcccaagttcagcagctccatttgttacaacatcctgtcaagaatgctgttgcagagaggaagcacacccgcatctcatcagatatgagtgatccttcaacacctaggaaaattgaagatgccaagaacatctccatatacaatgatgtgattgacttcacattgtttgaactcgagactatcacaaggagcttccgtgctgactacgttcttggtgaaggagggtttgggactgtttacaagggctacatagatgagaatgtcagggttggtctgaagtcactacctgttgcagtcaaggtgctcaacaaagatggacatcaaggacacagagaatggcttactgagggtaggtcct

SEQ ID NO: 405703 - DNA, 427 bp, Oryza sativa nipponbare
ctcgctcctccacgcgccgccgccgccgcagcggagcagccacagcaggcgagcgacatgggagggtttgtcaagacccagaagaccaatgcctactacaagcgtttccaagtcaagttcaagagacggaggcagggcaagactgactacagggccaggattaggctcaccaaccaagataagaacaagtacaacacaccgaagtaccgcttcgttgtgagatttacaaacaaatatatcacagctcaaattgtctatgctaccattgctggtgatatcgtgatggctgctgcctactcccatgagctgcctcgctatggtcttgaagttggtctcaccaactatgcggcagcttattgcactggcttgcttttggcctcgccgtgtgctcaaagcctcgggtttggaccaggagtacgagggcaat

SEQ ID NO: 405704 - DNA, 476 bp, Oryza sativa nipponbare
  unsure (1)..(476): unsure at all n locations
cccacgcgtccgcggacgcgtggggtttgcttctgcacacgtcgctcgaggccgcagaaagctgcgtcctttacagctggccacggtggagttgatcggttgatggcagcgagcggcggtgggtcgctgctagagagacgaagctcggtgcgacggtcgcagagtatggtgagcgaggagggccggggcacgccggccgatgaggatctcggcggcggcggcacgctcaagattggcgccgtgctcgacaaggacagcgcggcgcccaagtcgcggctcgccaaggacaccggcgaacacggcggcggaggaccttccgagatggagctgatgaaggagaagttcgccaagctgctgctcggggaggacatagtcgngtccgggaagggcgtgccgtcggccctggccgtgtccaacgccatcaccaatcttgcagcttctgtggttgggagcaacggaagctggagcccatggcg

SEQ ID NO: 405705 - DNA, 446 bp, Oryza sativa nipponbare
gttcactgagggaaatgagaggggtgtttggttgaatgacttccagtatgctatttttggtcttggcaatcggcagtatgagcatttcaacaaggttgccaaggttgttgatgagctcctagttgagcaaggtggaaaacgtcttgttccggttggtcttggagatgatgatcaatgcattgaggatgacttcaacgcatggaaagaaactctctggccagaattggatcagttacttcgggatgaaaatgatgtttcaacaggcactacctacacagctgccattcctgaataccgggttgaatttgttaagcctgatgaggcagcccatttggagagaaaattcagtcttgcaaacggttatgcggttcatgatgctcagcatccttgccgggccaacgtggctgtgcgacgggaactccacactcctgcttctgatcgtcatg

SEQ ID NO: 405706 - DNA, 473 bp, Oryza sativa nipponbare
cccgacttcccgagcaccagcaccatccgaggaagaagagtcttcttcccacgcggcttgtccgagccgagcgaatgcgattgtaaagcaccgtcgtgaacctgacgacgagctccaggcggcggcgatggggtgctccttctccgggctgaacgcgctctacgacaccgtcggcggcggcggaggcgacatctgggtcaacgactaccgcttccgcgtcgtccgcaggctcggtgacgccgggccagcggggtccttcgtcttccttgtcaaggagttgtcgccgccgccaccgcctccgacggcactggtgtgggggtgcccggcgcctctgggctcgccaagaagaagggcatcgatccatcccacatctcagctgatggaacatatgccttgaagaaagttcttattcagaatgaacagcacttagagcaagttcgacaggagattcgagtgtcctctcaaatcagtca

SEQ ID NO: 405707 - DNA, 485 bp, Oryza sativa nipponbare
cccacgcgtccgcccacgcgtccggttctggacggtgtacgcccagatgaccaccttctccgtgtcccaggcgaccaccatggaccgccacatcggcgcctccttccagatcccggcgggctccctcaccgtcttcttcgtcggctccatcctcctcaccgtgcccatctacgaccgcctcgtcgtgcccgtggcgcggcgcgccaccggcaacccgcacgggctcaccccgctccagcgcatcggcgtcgggctggtgctgtccatcgtcgccatggtgtgcgccgcgctgacggaggtgaggcggctccgcgtggcgagggacgcgcgcgtcggcggcggcgaggccgtgcccatgaccgtgttctggctgatcccgcagttcctgttcgtcggcgccggcgaggcgttcacctacatcggccagctcgacttctttctccgcgagtgccccaaggggatgaagacgatgagccccggggctg

SEQ ID NO: 405708 - DNA, 387 bp, Oryza sativa nipponbare
cccacgcgtccggtaaattatgttggatgataatttaatatgttttaatgtatatcttcatactaaattctcgcagcaatgcgcggggtttcacctaatttatttaatgacagcttcctcatgctgacacgacttgatttatttattcaacaacagtttcctttttttttcttttccatttcgtttcctgtcgacgacattgcggtcgaggggaacggtggtccgggcaccatctacaccatgaagcttaaccctgccgcgggtgtgggaagcacatacaagacccgggtggcggtgtgcgacgccgcaagtcatgtcctaaagtcggatgtgctcgaggcagaaagcaaggtggggaagctcaagtcacactcgacggagacgaag

SEQ ID NO: 405709 - DNA, 550 bp, Oryza sativa nipponbare
  unsure (1)..(550): unsure at all n locations
caagtatggtcagctagggcatggtgattttgaggatcacctggttccacacaagttggaagcattgaaggatactactatatctcaaatttcaggtgggtggaggcatacaatggcacttgcagcagatgggaaactctatggatggggatggaacaagtttggacaagtcggtgttggcgataatgaagatcactgctccccggtgcaggtcaattttccaaacgaacagaaagttgttcaagttgcttgtggatggaggcacactcttgccctgacagaagccaaaaatgttttctcatggggaaggggcaccagtggacagcttggccatggtgaaatagttgataggaacatacccaagatgatcgatgccttgagctcggatggatcagctngcaagcagctggaatcatcaaaagccgtcccaatgtcagctaaaagttgggtctcgccatcagagcgatatgccatcgtgccggatgagaaggctggaaaaggcatccctgctggcaatggaacagagactcatgtgccccaaggagatgtg

SEQ ID NO: 405710 - DNA, 505 bp, Oryza sativa nipponbare
  unsure (1)..(505): unsure at all n locations
cccacgcgtccgcatggagtctatgaagaaggcattgatgagatatgcaggataattcatgagaacggtgggcaggtatacatggatggggctaacatgaatgctcaggtcggattgacaagccctggctttattggagcagatgtttgccaccttaaccttcacaagacattctgcattccacatggtgggggtggtcctggaatgggtcctattggtgttaagaagcacttagcaccatttttaccatctcatccagtgatcaccactggtggcttccctctccctgagaaaaccgaccctcttggtaccatttctgctgccccatggggatcagcgttgattctgccaatttcctacacatacatagccatgatgggttctaagggtctcactgatgcttcaaagattgcaatcttgaatgcaaactacatggcanagcgtctggagaaacactacccagttcttttccgtggagtcaatggaactgttgcccatgaattca

SEQ ID NO: 405711 - DNA, 374 bp, Oryza sativa nipponbare
  unsure (1)..(374): unsure at all n locations
cccacgcgtccggcgccgagccggaggaatcctgaccggaggtcggcctcgccctcccctcctcgcgcgcgcgccgccgccgccgggaaggccggctggcgaggtagtcgaaaaatatcgcctctgaaggtcagcactgaggcatnggggagtgcagtgagcacaggtgttgggacgagctactaccggacgcactgggcctcatctttcgcaaactctcactcaaggatgtgctcaccgtggtgccgcgggtttgcaaatcctgggggcgggtggttgcagggccttactgctggcaggagatcgacatccaggagtggagccagcagcagagcaagccggaccagctcaagcgcatggttcgcatgctcgtc

SEQ ID NO: 405712 - DNA, 473 bp, Oryza sativa nipponbare
caccgccgcgccggaggtggaagacggacggggtagagttggggtctcgcggtgagccgattcctctctagtggtcgcgcctggtgtgttcgccgacgacgccggcgtggcgtcagccatgggtgggctcgaggagatcaagaatgaggccgttgatctggagaacataccgatcgaggaggtgttcgagcagctgaaatgtacgcgcgaggggctctcctccgaggaggggaaccggcgtatcgagatgttcggccccaacaagctcgaggagaagaaggagagcaagatactcaagttcttggggttcatgtggaacccgctgtcgtgggtcatggagatggccgccatcatggccatcgcgctggccaacggcggcggcaagccaccggactgggaggacttcgcggtatcattgtcctgctggtatcaactcaccatctcctcatcgaagagaacacgccggcaacgcg

SEQ ID NO: 405713 - DNA, 477 bp, Oryza sativa nipponbare
cggacgcgtgggcggacgcgtgggggaagaagaaataatcaatggagtgttgggagaagaagccaaggaatctgggtggctcgctgccggtgcccaacgtgcaagacctcgccgcccgcccggaccacctcacgcccaccctcctccgccgctatcttcgcccgcaccacctgtccctgcccgccgacgaccaccatgccatggctatgatacctgtcgttgactttgccaggctcatcgatcaccatgaggaggccgccaagctgaggcacgcctgcgaggagtggggtttcttccaggtgatcaaccacggaatcgccgacgagacggtggaggagatgaagcgcgacgtcatggccttcttcaacctcccgctggccgacaaggcggcgttcgcgccagcagccggaatggatcgagggctacggcccaggcgttcgtcacgtcggaggaccagacgcctggactggtccgacc

SEQ ID NO: 405714 - DNA, 478 bp, Oryza sativa nipponbare
  unsure (1)..(478): unsure at all n locations
ggagcgggtcaccctttttctgaatctggcaaatgatcccaccattgaacgtatcatcacccctcgaattgcactgacaactgcagaatatggggcatatgaatgtgggaagcacgtgcttgtcatcttgacagatatgagttcatatgcagatgcgctccgtgaggtatcagcagcccgagaagaagtgccaggtaggcgtgggtatcctggatatatgtatactgatctggcaaccatatatgagcgagctgggcgtattgaaggaagatcaggctccattacccaaattcccattctaacaatgcctaatgatgatattacacatccaactcctgatcttacggggtacattaccgaaggacagatatacattgacaggcagctgcataacagacagatatacccacccatcaatgtcttgccatctctctctcgnatgatgaagagtgctattggtgagggtatgacccgtcga

SEQ ID NO: 405715 - DNA, 465 bp, Oryza sativa nipponbare
  unsure (1)..(465): unsure at all n locations
cccacgcgtccgctctcgcctcccctccccgccggcttccgcctccagatccgcgccgcccgccgccgccgcgctcgctcgagcgggagctatagctgccgccttcgattcgacgctgcatgtactggcgagaggcgtagcgcgtggcgtgctctccccgacgcgcgcctcgcctcctccccgttcattacaagatggcgatgatggtggaccctcctaatggcatgggaaaccaagggaagcattactacacaatgtggcaaacgctatttgagattgacaccaagtatgtgccaatcaagcccatcggaagaggggcttatggaatagtttgctcctctataaaccgtgcaaccaacgaaaaagttngcaataaagaagatcaacaatgtctntgacaaccgtgtggatgcactgaggaccctaagggagctgaaactactgcgacactngcgccatgaaaat

SEQ ID NO: 405716 - DNA, 478 bp, Oryza sativa nipponbare
gcgggcgtcttcgtactcgcctctctccgcgccctcctccgccgccgctcgccgccgttcgtctccgccgccaccgccgccgccatgagggagtgcatctcgagccacatggggcaggccggtatccaggtcgggaacgcgtgctgggagctctattgcctcgagcatggcatccagcctgatggacagatgcccggtgacaagaccgttgggggaggtgatgatgcttttaacaccttcttcagtgagactggtgctgggaagcatgtcccccgtgctgtcttcgtcgatcttgagcctaccgtgattgatgaggtgaggactggtgactaccgccagctcttccaccctgagcagctcatcagtggcaaggaggatgcagccaacaactttgcccgtggtcactacaccattggcaaggagaaggttgatctgtgccttgaccgcatcaggaagcttgccgacaactgcactggtc

SEQ ID NO: 405717 - DNA, 507 bp, Oryza sativa nipponbare
  unsure (1)..(507): unsure at all n locations
gaactgcaggccatcgagattttgactggctgctacatcttagttcaggttttccaatacttcttactttatgtgctacatttaaattttcattgtgggataacctcctttttactctttatatcaactgatttgattgctattgctatattaaaagggaaacactgttgctgctatgggttcctggaagggattgaaacaagtccgaagggttgtggaggactgcataaagaacatcaagcaccctgtgtaccacatcaaggaactcctaattaaacgtgagctggccaaaaatcctgcgctagccaatgaaagctgggacaggtttctcccgaagtttaagaagaaaaatgtcaaacaaaagaaaccgataacaaaggagaagaagccatacacaccctttccacctcctcagcaacctaggcaggatgatctntgaacttgagagtggtgagtattccatgagtgacannaaagaagccgcaaagaaatggcaagagaagcttg

SEQ ID NO: 405718 - DNA, 511 bp, Oryza sativa nipponbare
cggacgcgtgggcggacgcgtgggcggacgcgtgggctagtaggataaagccacagagagagcagtagtagtagcgagctcgccggagaacggacgatcaccggagaagggggagagagatgagcggcggtcaggacctgcagctgccgccggggttccggttccacccgacggacgaggagctggtgatgcactacctctgccgccgctgcgccggccttcccatcggcgtccccatcatcgccgagatcgacctctacaagttcgatccatggcagcttccccggatggcgctgtacggagagaaggagtggtacttcttctgcccgcgagaccgcacgtacccgaacgggtcgcggccgtaccgcgccgacgagtcggggtactggaaggcgaccggtacctacaagtcggtgggctcgtcgaagccggtgctaatcaagaaggacctcgtcttctacgccggcaaggcgcccaagggcgagaagaccaactggatcatgcacgagta

SEQ ID NO: 405719 - DNA, 464 bp, Oryza sativa nipponbare
cccacgcgtccgcccacgcgtccgggttggtctccgccatggcgagctcgtcgtccgaccccgacaagctcatgtccaaggccgacaagctaacaaaattgagcttcacgagatggaatgccgattggaagagtgctacctccttgtatgagcaagctgctattgcttataggttcaaaaaggagaatgagaaagcaaaggatgcctttgagaaggcttcaaaaggacaggaaatgatttcttcaccctgggatgctgctaaacacatggaatctgctggtgctttagcgaaagagcttggacgctggaatgaagtttcagatttttatcgcagagcatcagaattctatcgtgaatgtggaagagcacaacctgcctctgatgctcttgcaaagggtgccagtttcttggaggataacactccagacgaagcaataaaaaatgtatgatgagggctgttcaat

SEQ ID NO: 405720 - DNA, 488 bp, Oryza sativa nipponbare
  unsure (1)..(488): unsure at all n locations
cccacgcgtccgcccacgcgttcggagattagtgtcagtggaagatgtagctagggaacactgggcaacctatggaaggaatttcttctccagatatgattatgaggagtgtgaatctgagagtgcaaataagatgatggagcatcttagagatgtgatcgcaaaaagcaagcctggagagaaatatggaaactatacccttcagtttgccgatgatttcagttacactgatccggtggatggtagcactgtatctaaacaagggcttcgatttgtattcaccgatggatctaggattatcttccgcctttcgggaaccggatctgctggagcaacaatccgtatatacattgagcaattcgagtctgatgcctcaaagcatgatctggatgcacaaatagctntgaagcctntaatagacctagctctatctgtttcaaagttgaaggacttcactggaagagataagcctactgtcataacataaa

SEQ ID NO: 405721 - DNA, 424 bp, Oryza sativa nipponbare
gacgagtcgcggctgaacagaagagggggagtaggcggcgatctccatctggcgactcgcgagcagagcaggggaggggatcctgatctggaagaagctctcctcttaatttcagcgccttaaccttaatacaagtaccagtttgagtttgtttgttcccaagttggatccggccctgggtaatttctttcttgctgaaggtggagagactgagctgagctatggacaacttgtggcatctcggggatgagttccgtgggcagtcgaaggtagtggaggaccgtcagtggtctctcatgacatcgaagttggctgagatcaacaagtccaaggcggagaggacgaatgagcttgactatgcgcggatgaacaccatccctgatgtcaagcaatgggataaggtatcctaccaccaagatgagag

SEQ ID NO: 405722 - DNA, 456 bp, Oryza sativa nipponbare
cgcgtacagacgcacgcgtccgacagtatgctgactttccaccggtctcggcgatcgggtttgagggatatgagaaacgcctcgagatcactttctccgaggcgcctgtctttgctgaccccaatggcagggggttgcgtgcactgtcacgtgctcagattgactctgttcttgatctggcgaggtgcaccattgtgtctgagctctccaatgaggtcttcgactcgtatgtcctttctgaatcgagcctctttgtgtacccatacaagattgtgatcaagacctgtgggactaccaagctcctgctcgccattccgaggattcttgagcttgctgaagagctatctctgccacttgaagctgtgaagtactctcgtgggacattcatttttcctgaagcacagccctctccacacaagaacttctctgaggaggtgcagtcctgaaccgtacttc

SEQ ID NO: 405723 - DNA, 469 bp, Oryza sativa nipponbare
gaagcggcgacatgacgacgacgacgacgaggtttgttcagcttgccgcgtgcgcggcggcgtcgctgctcgccgtggcggcgagtggcgcggcggcgcagggcgtcgggtcggtcatcacgcaggcggtgttcaacagcatgctgcccaaccgcgacaactcgcagtgcccggcgaggggcttctacacgtacgacgccttcatcgccgccgccaactccttcccggcgttcggcacctccggcggcagcgccgagctcatccggcgggagctcgccgccttcttcggccagacctcccacgagaccaccggtggaacgaggggtagttctgaccagttccagtggggttactgcttcaaagaggagataaacaaggcgacttctccaccctactatggacgtggcccaattcaattgacagggcaatcgaactaccaagcagccgggaacgcgctggggctggacct

SEQ ID NO: 405724 - DNA, 572 bp, Oryza sativa nipponbare
cggacgcgtgggcggacgcgtgggccggattggtagccgccctgctcgtgctgcattcgctagccacgccgtccgctcaggccgaggcgcatcgcgcagggggagaaggggaggagaagatgtcgagcgacggagggccggtgcttggcggcgtcgagccggtggggaacgagaacgacctccacctcgtcgacctcgcccgcttcgccgtcaccgagcacaacaagaaggccaattctctgctggagttcgagaagcttgtgagtgtgaagcagcaagttgtcgctggcactttgtactatttcacaattgaggtgaaggaaggggatgccaagaagctctatgaagctaaggtctgggagaaaccatggatggacttcaaggagctccaggagttcaagcctgtcgatgccagtgcaaatgcctaaggcccatctcgtatcctatgtgtatcaagttatcaagaagatggggaataatatggtgtggatatagctattggacatgttaattatccacatgataatatggcttggatataaggatctcacacgataatatggctggatata

SEQ ID NO: 405725 - DNA, 502 bp, Oryza sativa nipponbare
  unsure (1)..(502): unsure at all n locations
aaaaaaaaagccggagaaaaggatagagagggaaagcaaccagccatggagtcgctgactctccgggcatcgccgtcgacggccgcgccgttgcgccgcgtccccgggcggcggcacgcggcggtgtccgtccgcgcctccgccggcgccggcgagccggacctctccgtgcgcgtgaacgggctgaagatgcccaacccgttcgtgatcgggtcggggcccccgggcaccaactacaccgtcatgaagcgcgcgttcgacgaggggtggggcggcgtcatcgccaaaaccgtatccttggatgctgagaaagttatcaacgtaacccctcgctatgcccggctcagggcggaccccaatggatctactaagagtcctatcatcggatggcagaacattgaacttatcagtgatcggcctctagaaactatgctgaatgaattcaagcaactggagaaaagagatnctgacaggatactcattggctcaataatggaggagt

SEQ ID NO: 405726 - DNA, 73 bp, Oryza sativa nipponbare
cccacgcgtccgcggacgcgtgggcgaggaggccaagaagcctaccctgatgcctttgtccgtatcatcggct

SEQ ID NO: 405727 - DNA, 153 bp, Oryza sativa nipponbare
cccacgcgtccgcccacgcgtccgcccacgcgtccgcggacgcgtggggcgtcgcgtcgctcgccacgacggacatgcagcacctgccggcgacgtgctcgagtcggcggtggaacgcgtgccgcgcccgatctcgccgccgggcgctgtgtc

SEQ ID NO: 405728 - DNA, 316 bp, Oryza sativa nipponbare
caagaagaccttggacggtgcaaaattggcaagggaggaaagccatcgtctgagagccgacggtttaagtgatgacataggtcctgtggacaactacctggacacgcagtactttggagagatcggcatcggcactccaccacagaacttcactgtgatattcgacactggaagctccaacttgtgggttccatcagtgaaatgttatttttcgatagcatgctacttacaccacaggtacaagtcaaaagggtcgagcagttacaaaaagaatggagaatcttgcagcatttcctatgggtctggatcaattgct

SEQ ID NO: 405729 - DNA, 279 bp, Oryza sativa nipponbare
  unsure (1)..(279): unsure at all n locations
ccggtcgaccacgcctgcgcgacgcgtgagcaagtacaaatactatggcgagttccgttttctctccgttttctatatacatttgtgttcttctattatgccgtggttctatggcacaactatntaatcccancacaaacccatggcatagtcctcggcaaggaagtcttagggagtgtagatttgatagactacaagcatttgaaccacttcggaaagtgaggtcagaagctgtggtgactgantacttccatgagaacaatgaattattccaatgca

SEQ ID NO: 405730 - DNA, 262 bp, Oryza sativa nipponbare
  unsure (1)..(262): unsure at all n locations
cgagcctcttnctctctnttctctcgtctcttccatccacattcttctctctctctcgattgcttcgcactgcgaatggcgatagaccatgcgtcctctttctcgctgaagaacagaggcgacatgggaggaagggggtatgaggaggaagaggtggagaaccagcggtggccgccgtggctgaagccgctgctgtcgacgagcttcttcgtgcaatgcangatccacgccgacgcgcacaagagcgagtgcaacatgtact

SEQ ID NO: 405731 - DNA, 181 bp, Oryza sativa nipponbare
  unsure (1)..(181): unsure at all n locations
gcgcagacgcgtgggttctcgtcgagatgggccgcaagttcttcgttggtggcaactggaaatgcaatgtgaccactgatcangtggacaaaattgtggaattctaaatgagggacagattgcttctacaaatgtcgtttaggtggttgtcagccccccttatgtgttccttcctgtggtc

SEQ ID NO: 405732 - DNA, 147 bp, Oryza sativa nipponbare
accttcctacactgactgagaaggataaagaagacattttgggatggggtgtgccaaatgacatagacatgattgctctgtcgtttgtccgtaaaggatcagatttggttaccgtcaaacaacttcttggacagcatgcaaagcgca

SEQ ID NO: 405733 - DNA, 401 bp, Oryza sativa nipponbare
cccacgcgtccgcccacgcgtccgcgccgccatctgccgtcgagagccccggttgcccacccccgcggcgacgatggcgggccaggagtcgctcaccctggcgggcgtcctgcgcggccacaacgacatggtgacggcgatcgcggcgccgattgacaactcgcccttcatcgtctcctcctcccgcgacaagtcgctgctggtgtgggacatcaccaacccgtccaccgccgtggccacggatcccgaggcggccccgccggagtacggcgtctcgtaccgccgcctcaccggccactcccacttcgtccaggacgtcgtcctcagctccgacggccagttcgcgctctcggatcctggacgggagctccgctctggacctagcaccggcgaccaccgcg

SEQ ID NO: 405734 - DNA, 364 bp, Oryza sativa nipponbare
cccacgcgtccgctcgagcgccgcagaggagagcagcaatgaggccgtcgctgatgagatccgcctcgcaggtcctccgccgccgccgcggctactcctccgcctccggccagccggagcggaaggtcgccatcctcggcgcggccggcggcatcgggcagccgctctccctcctcatgaagctgaacccgctcgtctcctccctctccctctacgatatcgccggcacccccggcgtcgccgccgacgtctcccacatcaacgccccggcccaggtgaaggggttcatgggggatgaccagctcggggaggcgttggaggggtcggacatcgggatcatcccggccggcgtgccgaggaagcc

SEQ ID NO: 405735 - DNA, 430 bp, Oryza sativa nipponbare
  unsure (1)..(430): unsure at all n locations
cccacgcgtccgcccacgcgtccgcccacgcgtccggcccgccatgcaggagagaggcttctgagatgctggggcggtgggacaggatgggttgtggaggacacaaaggacaagatagcaaagcttctggaggagtacgagagcggaggcgatgtangagaagcttgcaactgcatccgcgagctgcacatgccgttcttcaatcatgaggtggtcaagaaggcgcttgtcatggcaatggaaaagaagaacgacaggatcctcggtctgctgcaggagtgctttggtgaagggatcatcaccatcaaccagatgaccaaggggttctcaagggtgagggatgggcttgatgatctggctcttgatattcctgatgccagggagaagttcctgtactatgtggagcatgccaagaaaaacggatgggttt

SEQ ID NO: 405736 - DNA, 378 bp, Oryza sativa nipponbare
aataggcgaattttcagcattccggagaatcgattgatgaacatgttcaaagggagattataaaccaccgatcactgaagcatgcagacataatgcgcgttcaaggagttatggaatatgctgctggtggtgagctatttgaaaggatttgcaacgcacggagattcagtgaggatgaggcaaggttcttcttccaacagctgatttctggagtgagctattgtcattctatgcaagtatgccatagagatttgaaactcgaaaatactctcttggatggcagtgtcacacctcggcttaagatttgtgattttggtactccaagtcttctgtcctgcactctcaaccgaaatcaactgttggcacaccggcttacat

SEQ ID NO: 405737 - DNA, 303 bp, Oryza sativa nipponbare
atggtggcaccggtcgctttggttgtcagacggaattgtttccaattgatcatggcctgtgcttgccagagaatttggaggacccttatttcgagtggatccactgggctcagtcatcaatcccattctctgaagaggagctcgagtacattaagaatcttgatccaatgagggatgtggcaatgctgcgtagggagcttcctataatccgcgaggcctgccttcgtgtcctggtgctgtgcacaatcttccttaaggaggctgctgcttctggtctttgcttggcagagataggtgagatga

SEQ ID NO: 405738 - DNA, 337 bp, Oryza sativa nipponbare
  unsure (1)..(337): unsure at all n locations
cccacgcgtccgctctcctcctctaatctcaagtctctgtctcgtcgtcctcgcatctccactcgccatgggcaagattaagatcggaatcaacggtttcggaaggatcgggaggctcgtggccagngtggccctccagagcgaggatgtcgagctcgtcgccgtcaacgaccccttcatcaccaccgactacatgacctacatgttcaagtacgataccgtgcacggccaatggaagcacagcgacatcaagatcaaggactccaagactctgctcttgggcgagaagccggtcaccgttttcggcatcaggaaccctgacgagattccgtgggct

SEQ ID NO: 405739 - DNA, 145 bp, Oryza sativa nipponbare
  unsure (1)..(145): unsure at all n locations
cacccctcgatctctcgctcgctcgccgccgatcggatcgcgtggttggatcatcacaactcggcaaagatgagagagatcctgcacatncaaagcgagcaatgtggcaaccagaatcgggccaaattctggaggtggtgtgtga

SEQ ID NO: 405740 - DNA, 388 bp, Oryza sativa nipponbare
  unsure (1)..(388): unsure at all n locations
cccacgcgtacgtcgtcttcgtcttcctctcgccgctgattcgattcgatccgatccgatccaaggggaggggaagcaatggcgacgaagaggagcgtggggacgctgggggaggcggatctgagggggaagaaggtgttcgtgcgggccgacctcaacgtgccgctcgacgacgcccagaagatcaccgacgacacccgcatccgtgcgtncgtgcccactgtcaagttcctactcgagaagggcgccaaggtgatcctcgtcagccatctgggtcgttcgaagggtgtcaccctcaagtacagcttgaagcctcttgttccacgcttgtgtgagctacttggagtcgatgttgtgatggccaatgattgcattggtgaagaagttg

SEQ ID NO: 405741 - DNA, 412 bp, Oryza sativa nipponbare
cccacgcgtccgatggtgtatgagctctgcagtgaggtcttcgactcgtatgtactttctgaatcgagcctatgtgtgtacccatacaagattgtgatcaagacctgtgggactaccaagctcctgctcgtcattccgaggattcttgagcttgctgaagagctatctctgccactcgaagctgtgaagtactatagtgggacattcattattcctgaagcacagacctctacacacaagaacttctctgaggaggttgcatgcctgaaccgctacttcggcggtctcaaatctggtggcaacgcatacgtgattggagatacttgacagccagcgcagaagtggcatgtctactatgccacccagcacccggagcaacctgtggtcactatagagatgtgcatgactgggc

SEQ ID NO: 405742 - DNA, 189 bp, Oryza sativa nipponbare
  unsure (1)..(189): unsure at all n locations
agcagctctagctagctacaggcatcagtggtcagtagagtgatcagttgcaactagctagctagttagattatatcttcagtgatggctccggcctgcgtctccgacgagcacgccgtccggtgtcgccgacggctgtgaagcgncatggaccgtcacttgccaagctcccgctgtcacacatgcgca

SEQ ID NO: 405743 - DNA, 434 bp, Oryza sativa nipponbare
cccacgcgtccgcgctagaacaatggcgtccggtggcgaggagaagaagagcaggatcctggtggtgggcggcacggtgtacatcgggcggcacgtcgtcttggccagcgcgcggctgggtcatcccaccaccgacctcgtcagggacctctccccctccgaccccgccaagtcgcagcttctccagagcttccgcgacgccggcgtcaccctcctccacggcgacctctacgaccacgccagcctgctcagcgccgtccgcgacgccgacgtcgtcatctccacgctgggcgcgctgcagatcgccgaccagaccaagctcatcgccgccatcaaggaagggcggcggtggcaacgttgcgaggttcctgccgtcggagttcgggctggacccggaccacacgggcgcggtggagcccgccaggttcatcttt

SEQ ID NO: 405744 - DNA, 285 bp, Oryza sativa nipponbare
cacgttgatccgggccggcgttggtgttgcgcgggaggtgtggtactggttccagaaccggaagtactcgcagcgctctaggaactggaccaagatgctaccggcggcgtctggcgaccacaagtcggccttcgctcgctcctcacgtatgatgttgctgccttcctttcccatagatggtcccagtctggtgaactggaagtatgggttcgattttctggatttggagctagggacgacgaatggattgatgtccgtacatgtgtgcggcaacgttctcatcca

SEQ ID NO: 405745 - DNA, 156 bp, Oryza sativa nipponbare
ggatgctgatgaagatgatgatgaccttgatctttttggtgatgagaccgaggaagacaagaaagcagcagatgagcgtgcagcttccaaggcctcttcaaagaagaaagaaagcggaaaatcatctgtcctgttggatgtcaaaccatgggacga

SEQ ID NO: 405746 - DNA, 233 bp, Oryza sativa nipponbare
  unsure (1)..(233): unsure at all n locations
ggtacccctatgttgaaggtcgttcgagcttttcctgggagtatggcatgggttacatacttcagcgccgtagcgcctggtatgagcctcgtggagaagcaatggctagtccacggngctcatacttcagcgctgcagcgctgggtactcggacctcggctcgaggcattntctctaccccttcttaccctgaaaaagcagggtcaccttgtgtccttaaacctataaccatc

SEQ ID NO: 405747 - DNA, 372 bp, Oryza sativa nipponbare
ctgctgtcaagaaagcatatagaagggcaaccctttgtgtccatcccgataaactacaacaaaggggtgctacaatcagacagaaatatatttgtgagaaggtgtttgatcttcttaaggaggcatggaacaaattcaattccgaagagcgatagctcgggatgtaggggacaataaattggatttttgattttctagttttaccaaaattatattttattaaacaaatttcaaagcctaatgataaaaaatgatcgataacaaaactgtgaatagcgttgtggaaagcggttttgatatgtgatctgaacaaaattacatgttgttaggctctaaaatttgttttaataaaatctaattttggcagaacga

SEQ ID NO: 405748 - DNA, 459 bp, Oryza sativa nipponbare
cccacgcgtccgcccacgcgtccgcccacgcgtccgctcctgcaacgtgcaggagtgggaagcttatgacccttaccgttcacggtggatgacactcccaaagatgccacacaatgagtgtttcatgtgctcagacaaggagtcacttgcagtgggcaccgaactcctggttttggcaaggagattctttcccacattgttctgagttacagtattctgacaaactcgtggtcgcctggtgttgatatgaatgcccctagatgcttgtttggatcagctagctttggagagaaagcaattgtagctggtggcatggatgctcaaggtcgggtgctacgctctgctgagctgtacaactctgaaactaagagatggataacactcccatgcatgaacaaggctaggcgaatgtgttctggagtctttatgaacggcaaattttacgtaattgggggaatg

SEQ ID NO: 405749 - DNA, 460 bp, Oryza sativa nipponbare
cctagccctagcgccgccgccgccgccgccatgaagttcaacatcgccaacccgaccaccgggtgccagaagaagctcgagatcgatgacgaccagaagctccgggcattttatgacaagaggatctcccaggaagtcagtggtgatgctcttggcgaagaattcaagggctatgtattcaagatcatgggaggctgtgacaagcaaggtttccccatgaagcagggtgtgcttacttctggacgtgtccgccttctcctccacaggggtaccccctgcttccgtggatatggcaggcgtgatggtgagcgcagaaggaagtcagtccgtggttgcattgtcagccaagatctctctgttatcaacttggtgattgtaaagaagggtgataatgaccttcctggcttgactgacactgagaagcccaggatgaggggacccaagagggcatctaagatca

SEQ ID NO: 405750 - DNA, 380 bp, Oryza sativa nipponbare
  unsure (1)..(380): unsure at all n locations
cccacgcgtccgcccacgcgtccgggagtagaaggccggcgcggcggcctcctnctccagccataggcgggtatcgagcgcgctcctcgcccggagcatcaccaccgcccagcccggcgccggcggctctcgccggaaccaccacccgtggaggtcccacatcacgtccacgggctggccgtcgacgaacaccgtctggttccccctgaagttccaccggagccgccgcgcctgcaccgcgcgcttcccgtcgatgctcacccacagctcgtncccgccgtcgccgccgtcgccgccaggcgcgcaccccacgctcaccttgtgctccggcactgcctacgagaaccgggctcgcgcggtgtgcgttacctgcgccgacg

SEQ ID NO: 405751 - DNA, 480 bp, Oryza sativa nipponbare
ccatccaaaatgtgatgtctgcaagaactttattccaacgaacaggaatgggctgatcgaataccgagcacatccattctggatgcaaaagtactgtccttcccatgaagatgatggcactcctaggtgttgcagttgtgaaagaatggagccgatggacatcaaatacatcacattagatgatgggaggaaactctgcttggaatgtctcaattcttcaataatggatacaccagagtgtcaacagctgtatatggacattcaggaattttttgaaggtctgaacatgaaagtggagcaacaagttccaatactcttggttgagagacaggctctaaatgaggctttagaaactgagaaaaatgggcatcatcttcctgaaacaaggggactatgtctttctgaagagcaaattgtcaaaacgatcttaagaagaccaataattggaccgggaaacagaattattagattgatcacagc

SEQ ID NO: 405752 - DNA, 433 bp, Oryza sativa nipponbare
cccaccgcgcgccgctgcgtcgccgcgatggccgtgtccacccccaggtcggccgccgccgccgcgttcctcgagcgccgcgagtcggagcgcgccctccacttcgtcaagtaccagggccttgggaacgacttcatcatggtggacaatagggattcggccgtgccgaaggtgacgccggaggaggcggcgaagctgtgcgacaggaacttcggcgtcggcgccgacggtgtgatcttcgtcatgccgggggtcaatggcgcggactacaccatgaggatcttcaactcggacggcagtgagccggagatgtgtggcaatggagttcgttgctttgcccggtttatagctgaactggaaaacttacaaggaacacaatagtcaaaaattcacactggcgctgggcttatcaatttctgatatacaaaatgat

SEQ ID NO: 405753 - DNA, 376 bp, Oryza sativa nipponbare
caaccagacactgcacacatcatcatcttctcccccgagaccgggtgatcttgggttagcttagctagctaaattaagctgcgtgcaggatggggctcctcgaccagctctgggacgacacggtggccgggccgcggccggactccggcctcggcaagctccgcaagtacgcctccttctccccttcctcctcctcctcgacgatggcggcgtcgccgtcgcccatctcggcggcggcggcggcggccgacgcgccggccgtgacgcgcagcatcaccatcctccgcccgccggcgctgtccgggacgtcgccgcgcggcagcgagtcgggccccttcacgccgtcgtatccggccagagtgccggacttcccctt

SEQ ID NO: 405754 - DNA, 223 bp, Oryza sativa nipponbare
ctcgccgcgctcagcgctcgctcgaaagaaaaccggtgcagctaaagcgacaagtgaaagcctctgtaccttcttttgtcgccgcgcgcgccgccgacgccttcgaagatgctcgacatcaacctcttccgcacggagaagggcggcgacccggagctgatccgcaggtcgcagcgcaaccgctccgcctccgtcgagctcgtcgacgaggtcattcgccctc

SEQ ID NO: 405755 - DNA, 449 bp, Oryza sativa nipponbare
gcgacatgacgacgacgacgacgaggtttgttcagcttgccgcgtgcgcggcggcgtcgctgctcgccgtggcggcgagtggcgcggcggcgcagggcgtcgggtcggtcatcacgcaggcggtgttcaacagcatgctgcccaaccgcgacaactcgcagtgcccggcgaggggcttctacacgtacgacgccttcatcgccgccgccaactccttcccggcgttcggcacctccggcggcagcgccgagctcatccggcgggagctcgccgccttcttcggccagacctcccacgagaccaccggtggaacgaggggtagttctgaccagttccagtggggttactgcttcaaagaggagataaacaaggcgacttctccaccctactaatggcgtggcccaattcaattgacagggcaatcgaactaccaagcagccgggaacgcg

SEQ ID NO: 405756 - DNA, 386 bp, Oryza sativa nipponbare
  unsure (1)..(386): unsure at all n locations
gcaggtgtcgctggccatggcgaggaggagcagcagcagagcgtgcgcggccatggcgacggccgccgtctttgcgctgctggccgcgacggcgacggcgtcggggctcgtacgggtggagcacccggccaagagcgacgggtcgctgagcctgctcgtcgtcggcgactggggccggaagggcacgtacaaccaatccagggtcgccgagcagatggggaaggttggggagaagctaaatatagacttcgtcatatccaccggtgacaatttctacgaggatggactcactggcgtcgatgaccaggcgtttgaggaatcgtttaccgatatctacacggcaaagagctngcagaagccatggtacctggtgctgggaaatcatg

SEQ ID NO: 405757 - DNA, 373 bp, Oryza sativa nipponbare
ggataatgactatttatcaaggttgacgcatgctcttacatccattcggcatgttaacaagacagatgttgtgacgcttggctcatcttttgggtcactttcacaagttatgaatgcttctatggaagaactagctcgatgcccaggaattggtgagcggaaggtaaaacgacttcatgacactttccacgagccattcaaacgggtttccagccgcccaaacattgtagtgcctgacactcctgacagagagaaggcgtcaggccaaccttcatcgacaaatgatggtgcacaggatgctgtggagaagccagacgcatccgtgaacaagaagagttctaatgtaagatcagcccttactgaagcccttgca

SEQ ID NO: 405758 - DNA, 504 bp, Oryza sativa nipponbare
agagcaatggcgttgttcctgaacgtaatggtggtgctgtccctgcaaaacagcagttggacgggaaggacaccttgcggtacgccagcatcctccgctcccgcaacaaatttgccgaagcactccagttgtacaataatgtccttgagaaggatgaagccaatgtggaggcccttattggcaaagggatttgcctccaggcacagagcctacctatgcaggccatcgagtgcttcaacgaggccgtcaggatcgacccagggaatgcatgtgctctcacttattgtgggatgatatacaaagatgagggtcacttagttgaagctgcagaggcttatcaaaaagctcgaaatgcagatccttcctacaaacctgctgcagagtttcttgctattgtgttgaccgatcttggaactagcttgaagcttgcaggtaatacagaggaggggattcaaaaatattgtgaagcttttgaagttgacagccactatgcgcctgcttatt

SEQ ID NO: 405759 - DNA, 380 bp, Oryza sativa nipponbare
cggacgcgtgggttccacgtcgtcaccgaccgaatgaaccttggcgccatgcaggtgataattcgcctaatggacttaaaaggcgcgcactatgaggtcaaagcatttgaagactacaagtttcttaactcctcatatgttcctgtgcttcggcaactggagtcagcaaacctccagaagttctattttgagaacaagcttgagaatgctacaaaagatgctagtaatatgaagtttaggaaccccaagtatctctcgatgctcaatcacttgcggttctatttgccggagatgtacccaaagctgcaccggatacttttcttggatgatgatgttgtggtacagcgggatcttacaggattgtggaagattgacatgga

SEQ ID NO: 405760 - DNA, 324 bp, Oryza sativa nipponbare
tgcatgtctgttgttgaggaaagctttgaatatcttgatgcaccagttgagagaattgctggagctgatgtacccatgccctatgctgccaatgcttgaaagatggctggcccacaaggtgaccatattggcccggccacgaaacctgccttcttccaaaccggggccaatggcagcacctgcctgataggaaagacctttttaacataatcttccttttccgcgccggccaccatatgatacataatggtgtccaacaatggcccaaactcaaagcgagctaatttggcaggatatttcaaggacccccacctattcttttag

SEQ ID NO: 405761 - DNA, 445 bp, Oryza sativa nipponbare
  unsure (1)..(445): unsure at all n locations
atgaggatgcacaccattccattattgatggcagtgaagtgcttgtagattactacaggcaacaacttatgcctggatggataccgaggagatcaggaggagggcttggagggaagaaagaatctggccagcttcgatttggaggtcgagagaggccatttcgtgctcccttgaggccaattccgtatgatgaactgaaaaggcttgggatcccaccaccacctgaagggcgatacatgacacgttatcaggttcccccaccaccaagacgaaaaagcagtgatatctacagggaagagtcacctcccaagagaagatccaaagacagggttgatagcagtcactacagaagatattgtagcccaacccaagacgacgacagcacggtcagcacccataggncggaaggtagccatgaccggcgagaagaaaccgagaggaggac

SEQ ID NO: 405762 - DNA, 367 bp, Oryza sativa nipponbare
  unsure (1)..(367): unsure at all n locations
tggtggccaacatccggtctcgtcgtctggagctttgttcgaagcctttgattctaggcccttattggcaaagggatttgccgacaggcacataaactaattatgcaggcaatctagtgcttcaacgaggccgtcaggatcgacccagggaatgcatgtgctctcacttattgtgggatgatatacaaagatgagggtcacttaattgaagctgcacatgcttatcaaaaatctaagaattgatatactttctacaaacctgctgcagagtttcttgctattgtgttgaccgatcttggaactagcttgaagctngcaggtaatacagaggaggggattaaaaatattggaagcttttgaagttgac

SEQ ID NO: 405763 - DNA, 538 bp, Oryza sativa nipponbare
gcggggtggagttccccgtggggatgaaggtgctggtggtggacgacgaccctacatgcctcgccgtgctcaagaggatgctcctcgagtgccgctacgacgcgacaacttgttctcaggctacaagagcattaactatgctgcgagagaacaggcgtggttttgatgttataattagcgatgttcatatgcctgatatggacggattcaggttacttgaacttgttggccttgagatggatctcccagttattatgatgtctgctgattcaaggacagatatcgttatgaaaggaataaaacatggagcatgtgactacttaattaaacccgtcagaatggaggagttgaagaacatctggcaacatgttataaggaaaaagtttaatgaaaacaaggagcatgagcattcaggtagcctagatgatacagatcgtaccagaccaaccaataacgataatgagtatgcttcatctgcaaatgatggagctgaaggtaggctgaagtctcagaaaaagaaacgggataaagatgatga

SEQ ID NO: 405764 - DNA, 351 bp, Oryza sativa nipponbare
gcacaagcagctctagctagctacaggcatcagtggtcagtagagtgatcagttgcaactagctagctagttagattatatcttcagtgatggctccggcctgcgtctccgacgagcacgccgtcgcggtgtcggcggagcggctgtggaaggcgttcatggacgcgtccactttgcccaaggcctgcgccggcttggtcgacgacattgcggtcgaggggaacggtggtccgggcaccatctacaccatgaagcttaaccctgccgcgggtgtgggaagcacatacaagacccgggtggcggtgtgcgacgccgcaggtcatgtcctaaagtcggatgtgctcgaggcag

SEQ ID NO: 405765 - DNA, 270 bp, Oryza sativa nipponbare
  unsure (1)..(270): unsure at all n locations
gtaccgtcctgtatcccgntcgaccccgcgtccgcccacgcgtccgcccacgcgtccgcggacgcgtggggcggccatggcttcggacaacattggctcgagagatgtatgtgttgttggggttgcacgcacccctatgggtggtttcctaggtgccctgtcttccttgtcagctaccaaacttggttccatagcaattgaagctgctctgaagagggcaaatgttgatccaacccttgtgcaagaggtcttctttggtaatgtgttgag

SEQ ID NO: 405766 - DNA, 407 bp, Oryza sativa nipponbare
ggcattgattacggatgttcgatttagtccaagcatgtcacggcttgctacatcttcctttgacaaaaccgtgcgggtttgggatgctgacaatacaagttattcactccgtactttcacgggtcattcagcatctgttatgtcacttgacttccatccgaacaaagaagatatgatttgctcctgtgatggtgatggtgaagtccgcagctggagcataaataatggtagctgcctgacctttgttaaggtctttaagggaggtgctactcagatgcgatttcaacctcaaaagggaaaatatcttgcagctgcctcagagaaggccatctacatacttgatggagagacacaacttgcttgtagaaaccctctgcaggggcacacaaagaatattcactcacttt

SEQ ID NO: 405767 - DNA, 491 bp, Oryza sativa nipponbare
  unsure (1)..(491): unsure at all n locations
acggtaccctcctctctcctcctccgaccaccatggccatggccacgcaagcctccgccgccaagtgccacctcctcgccgcctgggcaccggcgaagccgcgctcatccaccctctccatgcccacctcgagggcacccacctccctcagagcggcggcggaggatcagcccgccgcggcggcgacggaggagaagaagccagcccccgcggggttcgtgccgccgcagctggaccccaacacgccgtccccgatcttcggcgggagcacggggggactcctccggaaggcgcangtgngaggagttctacgtcatcacatggacgtcgcccaaggagcaggtgttcgagatgcccacgggcggcgccgccatcatgcgcgagggccccaacctgctgaagctggccccagaagggagagtgcctggccctgggcaccaggctccgctccaagtacaagatcaactaccagttctaaccgcgtcttcccc

SEQ ID NO: 405768 - DNA, 391 bp, Oryza sativa nipponbare
  unsure (1)..(391): unsure at all n locations
accatgggcaccctcccaccattcccgcccctcctcctcctcgtcgccgtcatcttctccttcctctcctcgtcgtgctttgctgtgaccagccatgaggcggcggccatcgcgcggcgccagctgctcaacttcgagaagcacggcgaccacgtccacatcgatatcgacatcgagatcaaggtgagcaacccgcggctggcggcggcgcacagggcgctgcacgcgctgaagcgggcgctctactccgaccccggcaacttcaccggcgactgggccggccncgacgtgtgcgcctacaacggcgtgctctgcgcgccgtcgccggacaacgcgtcggcgaggcgccgcgcgtcgctggacatgaacgccgngcgcgncgcgggctacc

SEQ ID NO: 405769 - DNA, 493 bp, Oryza sativa nipponbare
ggtgactgttgcaccaactgacacagtgttgacggcatcaaaaaagatgcttgaagttaaagtaagttcagcggttgtagcaattgaaaacaagcctggggggattctgacctctagagatattttgatgcgtgttatagcccagaatctcccacctgaatctactactgttgagaaggtcatgacccagactcctgaatgtgccacggttgacactccaatccttgatgccctccatacaatgcacgacggaaagtttttacatttgcctgtcttagacaaggatggaaatgttgtaactgtagttgatgtccttcacataacccatgctgcaattgcaactgttggaaacagcgcgggatctggatctgaggcgacatcagctatgatgcagagattttgggattcagcaatgtccattggacctcttgatgatgatgatgactcccagaagtgaaggatcaacctaaaggtgcgtctgaggcaacagatg

SEQ ID NO: 405770 - DNA, 464 bp, Oryza sativa nipponbare
cccacgcgtccgcccacgcgtccgcccacgcgtccgctgttttttcaaagttttgagactggtatatcattttttctgtaaaaaaggcttttgtttattcacacaagttcattttttatgatattgcattgggtccatataattatttcaatccttctcgacaattctttctttgttttgtggtttcattgcgcatagttttagaaaatgtgcacttcaatgctctctgttagcatttatagtgactgagactctctttgcttgagtagaccgccacacattcctacgtctacttctcagtgttgagtaaaagtcagcaatgtcaaggagaactaccattcaagattttgttagccttttcagggctgcaacataacctaccgaagagagtggtataatacgcgagttttgagtgaaagaggctgccgtgcttttatgggagcttgttgagatacaaatctgca

SEQ ID NO: 405771 - DNA, 503 bp, Oryza sativa nipponbare
  unsure (1)..(503): unsure at all n locations
cgacaaaactcatgcgatgactgaaatgaatggtgcatattgctctacccggccaattcgtataggacctgcaacacctagaagatcgtcaggtgattctggctcctcgccaccaaggcagtcagatagtgactcaactaacaggacgatatatgttggcgggcttgatcccaacgctactgaagatgaactaaggaaagcatttgctaagtatggtgatcttgcctctgttaaaattcctgttggcaaacagtgtggttttgttcaatttgtcaacagacctgatgcagaagaagcactgcaagggttgaatggatcaacaattggaaagcaggcagtgcgtctttcctggggccgcagtccagcaagcaaacagtctaggggtgattccggccaccggcgcaatggcatgtactacggtacacctttctacggggatatggctatgcgtcgccacttncacaccanacatgtatgcagcgcatatggagctaccctactac

SEQ ID NO: 405772 - DNA, 374 bp, Oryza sativa nipponbare
cggacgcgtgggccggcctgcgtctccgacgagcacgccgtcgcggtgtcggcggagcggctgtggaaggcgttcatggacgcgtgcactttgcccaaggcctgcgccggcttggtcgacgacattgcggtcgaggggaacggtggtccgggcaccatctacaccatgaagcttaaccctgccgcgggtgtgggaagcacatacaagacccgggtggcggtgtgcgacgccgcaagtcatgtcctaaagtcggatgtgctcgaggcagaaagcaaggtggggaagctcaagtcacactcgacggagacgaagcttgaggccaccggcgatggctcctgtgtggccaagctcaaggtggagtacgagctcgagga

SEQ ID NO: 405773 - DNA, 442 bp, Oryza sativa nipponbare
gcaaacgccacagccactccaccagaccaccaccaccaccaccaccccacccagctggtgcgcctccaagaattcctcctcctcttcctcggattccttccccctcttcggcggcgggctcccccaccggcaccggcgtccccgctcccggcgtcgccattggcctcctccctcgtctctgctcgacggaatatgaagttaaggccaaaaagacctggatggaagtcacttatgcctctgcagttgagcaggaaatctgcactgcgttctttttgtttcccaaggttcaggctgcgggtcaatctccagatgacacaccagtttatcttaatgtgtatgatttaacacccatgaatggctatgtatattgggcagggcctggtatatttcactccggaaatgaagttcatggtgtgaatatgcatttgggcacatgactacc

SEQ ID NO: 405774 - DNA, 407 bp, Oryza sativa nipponbare
cggacgcgtggggcctccacaaatccgccgccgccgacgtcgagagagaagggacagagagcgagtgcttcgccgtccccgccgccgcgatgagggccaagtggaagaagaagagaatgaggaggctcaagaggaagcgccgaaagatgaggcagagatccaagtagtcgttatcagtagtgtgatggtcttcttacatcatgttgaccggtgcatttggattgatggtgccttcggattcttgatgttccagttattggtgtaggaatgtgaaaccttttctggttttggttaattctagctgttgaaatgtctctggttatgttcctagactggagtattatgtaatgtgatgaccataattcgctttatgaaagtttatgagatttgaagtacctttacctgtc

SEQ ID NO: 405775 - DNA, 479 bp, Oryza sativa nipponbare
  unsure (1)..(479): unsure at all n locations
gacaaagatacaacgtgttgaatggaacaacagatcttttctctgatcgccttaaggggcctatcacattccgcaattcaatcatcggcacttttgcattaggggtttctgtgggctacttcatcgctgaccttgcaatgatcttctggttgtatccttcccttggtggaatggaatacatcgtccatcatactctttctctagttgcaatagcttacacaatgttgtcaggggagggtcagttctacacatacatggttcttatttcagaaacaaccacccctgaaattaacttgagatggtttcttgacacagctggactgaaaaagtcaagtgcttacttggttaatggtattctgatgttcgttgcatggctggttgcaaggatacctttgttcaattacgtattctatcacatctatttgcactacagtcaggtnatgcagatgcatgcttttgggtactacttgacatttatt

SEQ ID NO: 405776 - DNA, 502 bp, Oryza sativa nipponbare
  unsure (1)..(502): unsure at all n locations
ccattacaagattgcatcagagaagatatcttcatagataattgttggagcaagaacacaagaaaacacgtaggttcaattataatcgatcgtggagatggtgaccagcaaggagtttgcaagggatcaggcggccatggatcagaagatcaagagcgacgtcggcgaggtggtgctcgccggagacgaggaagaagacggggacgtggtgctcccggggttcaggttccacccgaccgacgaggagctcgtcacgttctacctccggcggaaggtggcgaggaagtctctcagtatagagatcatcaaggagatggacatctacaagcacgatccatgggatctccccagtaagtgcatccccaattaatttgacaaataacctcaaacacaaatcattttcaaaataattgagctaaattctgtgtntgtgtttgaatggaatggaatgatttgtgcagatgcgagcacggtaggtggagagaaaggagtggacttcttc

SEQ ID NO: 405777 - DNA, 429 bp, Oryza sativa nipponbare
gcttggcctcggaaacaccgaggactccttgctcccacaaaagattcaagcttttgagggtgtccgtgtaaaaatgattgctgctggtgccgagcacaccgctgctgtaacagaagatggtgatctctacggttggggctggggtcggtatggcaacttgggactaggcgatcgcgatgaccgcttaatcccagaaaaagtttcttctgtgaatggtcaaaagatggtgcttgtagcgtgcgggtggcgccataccatcaccgtgtcctcctccggtagcatctacacatatggatggagcaagtatggtcagctagggcatggtgattttgaggatcacctggttccacacaagttggaagcattgaaggatactactatatctcaaaattcaagggggtggagcatacaatggcacttgcagcagat

SEQ ID NO: 405778 - DNA, 455 bp, Oryza sativa nipponbare
cccacgcgtccgggcatgttcacattcagcttcttgtggataaggaccctggtttggttgggaatctccttgttgagagattggtgggagcgcatattgatcttgtttcaaaagaagaatatggaaaaattggcagtgtggctttagcggacttgctgaaaaagaagcttttggaagaaggccgaaaaccatatgttattcctgttggtggatcaaactctctaggaacttggtattgttttctgttcaatcctaactattgaaccatttttgcattttcaatttctttgtgcgtttatagcatactttgaatattcctcagggactattattattcatgggattgggtttgccatcagtctatcagaaaagaagagattagtttgtatttgaataaacattaaggcatcacttttttttggcaaatttcttatggtcaatataactatgttgga

SEQ ID NO: 405779 - DNA, 356 bp, Oryza sativa nipponbare
cccacgcgtccgcccacgcgtccgatcgcggcgacgaggctgagcgtggcgacgaccacggtgttctacatgctgtgcgggtgcatgggctacgcggcgttcggcgacgcggcgcccgacaacctcctcacgggcttcggcttctacgagcccttctggctgctcgacgtcgccaacgtcgccatcgtcgtgcacctcgtcggcgcctaccaggtgttcgtccagccaatcttcgccttcgtcgagcgctgggcctcccgccggtggccggacagcgcgttcatcgccaaggaggctcgcgtggggcccttcgcgctcagcctcttccgcctgacgtggcgcctcggcgttcgtct

SEQ ID NO: 405780 - DNA, 341 bp, Oryza sativa nipponbare
atctcccgtcacttcgtctcctccgctccttgcgccgccgccaagacgagtcgcggctgaacagaacaggggaggggcggcgatctccatctggcgagcgagcagagcagggcgaggggaggggatcctggtcgtatattcacctaccttggagtaattcgcatacgtcacaagttaaaagatgggtatccttgagaggatcaaggagattgaagccgagatggctcggacacagaaaaataaagcaacagaataccatcttggacaactgaaagcaaaaatagcaaagttgaggacacaattattagagccccctaaggttccactggtggaggagatgg

SEQ ID NO: 405781 - DNA, 459 bp, Oryza sativa nipponbare
cccacgcgtccgcggacgcgtgggcacgactcgtcgccgtcttgctctgctgcctctcgcgcccgcgcagcagtgagcagcagcaagagcaggaaaatggctctacccgggcgcctccgcgccctcatcctcgccgttgcattgccgctgctcttcctgtccgcttcagaggcgggcacggtggggatcaactatgggagggtggcgaacgacctgcccaacccggcggcggtggtgcagctgatgaagcagcagggcatcgcgcaggtgaagctgtacgacaccgagccgaccgtgctgcgggcgctggccaacaccggcaataaaggtgtggtcgcgctgcccaacgagcagctgcttggcgcggcgtccgcccgtcgtacgcgctcgcctggtgcgccgaacgtcgagcgtatacccggcacgcaatcagggcatcgcgcggaacgaggtgtcgct

SEQ ID NO: 405782 - DNA, 359 bp, Oryza sativa nipponbare
agaaattggaccagggcctctgaagatgtcctattcatcaaaatctggacaactcaagagaatgttcaattctatctctgcagtggatttgccaattcaacagagctttctttggtatgcttcaagcacgggagattctgaagattcacaggcatccggagcatatattttcagaccaaataggactacaccgactatagtttcaggaatggcgccattgaaagttatccatggacctcttggtgcgaagtccaccaacagttcagctcatggattatcaggtcacgagactctacaagaataaaggagcacgctgaagtgatatactattggaccaataccctgtgatgatgatgatg

SEQ ID NO: 405783 - DNA, 478 bp, Oryza sativa nipponbare
  unsure (1)..(478): unsure at all n locations
gctatatctgtcttcaaacaaacttaacggaggaattccagatacattgggccaatgtcaaaatttggtgatcgtccaaatggacaagaacaatctgtcgggaaacattccagattcattaggaaatttaaagagcttgagtatgctcaacctttcctataacagtttgtcagggacaatcccaagaagtctaaatgattttaaatttatagctaaactagacttatctcacaattatttacaaggagaaatacctagaactggaatattggataatgcttcagttgtttcactggatggaaattcgggactttgtggaggagcaacgtatctccatctcccaccatgcccttctggtcctcgaaaaacagagagacgatactatttggtcaaaatatgatcccgatatntggttcatgtcactcgggtatgactacttttattcttgagagaggctcagaaaagatcaagactgatg

SEQ ID NO: 405784 - DNA, 434 bp, Oryza sativa nipponbare
cccacgcgtccgcctctcctctcctctcctcatccggagacgccacgccgacacgcagctgcgtgtgcgaggaggaagaaacccagaggagcagcaggagcgaagcaggaaggaagcagaggagagggaatccaaggtgagggagggagagcatggagtgctccatctcgaggacgaatctgaattgcatcagcctgggtgacccggacaccaagaaatcggtcgcgctcctcaagcaggcatgtctggattcaggcttcttctatgtggtggatcatggaataagccaggagttaatggatgatgtttttgcccaaagcaagaaattctttgaccttcccatcaatgagaaaatggagcttcttcgggatgagaagaatcgaggctatacacccatgctagatgagattcttgatccagaaaatcaagtgaat

SEQ ID NO: 405785 - DNA, 402 bp, Oryza sativa nipponbare
gcggccgtaagctcaagtcacgtcgcaccgaatcacagtagagaaggagaggagcggagcgccatcagccgtccgatcgagtgatccgagggggctagctctctccacctctgctgctgctgccgctgccgccgcggcacgggcgctcggcggctacgggaggagtacctcgagcaacggtagcaatactgttaacttctgcaacaaatcatggattggaaccacattagcatgggaaagcaaggccctaaaatcaaggcatatgaacaagatcttttccatgtccgttcaacaagcaagcaaaagcaaagttgctgtaaaacctctggaattggataatgcgaaggagccaccccttaacttatacaaaccaaaggagccttacacagccacaattgtctc

SEQ ID NO: 405786 - DNA, 373 bp, Oryza sativa nipponbare
gtcaggcgggactacccgctgagtttaagcatataaataagcggaggagaagaaacttacgaggattcccctagtaacggcgtcataagtatgtgttttgttggatgtctcaggatatggtgcagtggacaaatctggaggtggagttgtacaagcagagctgtttggtagtccggataggagggctcaaattgttcgacgaaggtggacctctatggattttccaacaaggatgctgctgtggccggcggatccagtgacaattgacttccctgtattagaggtgcttgaactggttcactaaacccaaaggcttttgtagcaatgggatgccaggtgcctgaggttactttgagcagatattggggtgatt

SEQ ID NO: 405787 - DNA, 425 bp, Oryza sativa nipponbare
atcgacgccacgcgtgcgcgggcctttacctctactcagcttcgcgtcaattccagagatcaagaccctagccaacccctcctcctcctcctcttcctcgcgatggaccggcgatggcctccgccctcggggctcaggcgtctgtcgcggcgcccatcggtgcgggcggctacgggaggagttcctcgagcaagggtagcaatactgttaacttctgcaacaaatcatggattggaaccacattagcatgggaaagcaaggccctaaaatcaaggcatatgaacaagatcttttccatgtccgttcaacaagcaagcaaaagcaaagttgctgtaaaacctctggaattggataatgcgaaggagccaccccttaacttatacaaaccaaaggagccttacacagccacaattggctcagtcgaa

SEQ ID NO: 405788 - DNA, 476 bp, Oryza sativa nipponbare
cccacgcgtccgctcccgtctcttcccgtccccgctccagtgggcgggctctctccctcttcctcctccgctccgctccacctcggttgaccaccacccgatcggcggcgagggcggggagctccggcgtgctcagtgaaaatggatggaaatgctaaaggcggtgggcattctgaggcactgaagaactacaatcttggaagaactttaggtattggctcatttggaaaagtgaagattgcagagcataagcttacaggacacagagttgctataaagatcctgaaccgccgccaaatgagaaatatggaaatggaggagaaagcaaagagagaaatcaagatactgagattgttcattcatccccatatcattcgcctttatgaggttatatacactcctacggatatatatgttgtgatggagtactgcaagtttggagaactggttgattacattgttgagaaaggcaggtt

SEQ ID NO: 405789 - DNA, 393 bp, Oryza sativa nipponbare
  unsure (1)..(393): unsure at all n locations
cccacgcgtccgcccacgcgtccgcccacgcgtccgcggacgcgtgggctacaacactagattagtgaagccatcaatcctggacttgcagcttaggaatttggtatgggcaacgtctaancatgatgtctacttcatgtcaaattccacagtaggccactggtcatcattgtctcacaatctatcagaggttcttgatttctccgggcatgttgctcctgcgcagaaacaccctggcagtttactggaagggtttagcggcgttcaagttagcacactttcaataaatgagggtttattggtagctggtggttttcatagagaattatattgcaaggtcgtgggtctccttgtttatacattctttattatgtcttcctttaaatgccattg

SEQ ID NO: 405790 - DNA, 441 bp, Oryza sativa nipponbare
gaaagcataagcaacacaagggattaactcatcactcacttagctaattaaatcttcgaccatgtcggacaagtgcggcagctgcgactgtgctgacaagagccagtgcgtgaagaaaggtaccagctatggcgtcgtcatagttgaagccgagaagagccacttcgaggaggtcgccgccggcgaggagaacggcggctgcaagtgcggcaccagctgctcctgcaccgactgcaagtgcggcaagtgaagtcacgaagcaaccgaacactcgccgccggcgagtcacctaccttaattagtccacaataaaaaccacccatatgagtgtggtttgtgtgtgtgctgattattgctgaattaaacccgtgtgttatcgattaattaagcagctggtcgcttcggcgactatgcgtgtatcaacgtatgaatttgtgtgat

SEQ ID NO: 405791 - DNA, 330 bp, Oryza sativa nipponbare
gtcagtcaatgaagtcatctgccatggaattccagatgccaggaaacttgaagatggtgacattgtaaatgtcgacgtagctgtgtgttacaaaggagttcatggtgatttgaacgagacatattttgttggaaatgttgatgaagcttccaagcagcttgtccgttgtacctatgagtgcttggataaagctattgcaatagtgaaacctggagttcggtttcgagaggttggggagataataaatagacatgcatctatgtcaggtttatctgtggttaagtcttactgtggtcatggcataggagaattgttccactgtgccccaaa

SEQ ID NO: 405792 - DNA, 406 bp, Oryza sativa nipponbare
  unsure (1)..(406): unsure at all n locations
gaacggcatcctctgggaagtcgatggcaagtgggtcgttcaaggagctattgatgtggacattggtgccaacccatctgctgagggtggtggtgatgatgagggtgttgatgaccaagctgtgaaggtggtcgacattgtggacaccttccgtcttcaggagcaacctccttttgacaagaagcagtttgtgaccttcatgaagcgctacatcaagaacctctccgccaagctggatgcggaaaagcaagaggaattcaagaagaacattgagggtgccaccaagtacttgcttggaaagctcaaggaccttcagttctttgttggtgagagcatgcatgatgatggcggcttggtgtttgcctactacaaggacggagccaccgacccaaccttnctttacttc

SEQ ID NO: 405793 - DNA, 440 bp, Oryza sativa nipponbare
  unsure (1)..(440): unsure at all n locations
cccacgcgtccgcccacgcgtccgcccacgcgtccgcccttccctttccctcccggcgtgtggtggtcggaggttgccattcattgggcggcgggaccaccgcacccgccggtgaggagggacaccgccatcacattcttgctatatccaacgacctccattgattaactacgtgcgtgtgagaaactaatcaaccggccggcgtgctggctttcctcatcttcaagatgcaccggtggttcattgccagctgcggagacatacgtgcggcggcggcgcgctcatcccgccgccgaggaggcgatgcgattgcgcccaagtcggcgccgnccgcgccgtcgccggcgccgaggctgaggaagacggtgtcggagacggctgcggtgatgctggccgtgcccaaagacgtgnaggagttccggaccattccggcgtacggg

SEQ ID NO: 405794 - DNA, 421 bp, Oryza sativa nipponbare
gtcagtcaatgatccgatcgtgccaagagggccctcagcaaccagcaccaggtccgtgttcagattgagtccctctttggcgggggcgatttctcggagccgctgacccgtgccagatttgaggagttgaacaatgatctgttccgcaagaccatgggacctgtcaagaaggctatggacgatgctggccttgagaagagccagattcatgagattgttcttgtcggtggtagcaccaggattcccaaggttcagcagctcctcagagactacttcgagggcaaggagcccaacaagggtgtcaaccctgatgaggctgttgcctatggtgctgcggttcatggaagcattctcagcggcgagggcggtgacgaaaccaaagatatccttcttcttgatgtggcaccccttaccctcggta

SEQ ID NO: 405795 - DNA, 430 bp, Oryza sativa nipponbare
cggacgcgtgggtgagctcagttcattcttctgtcgccgtggtgggggcgggggaggcggagccggatgctatgctgctaggctggtggtccctgacgtcgtgggtgcgtcgcctcgtcgcctgcgttggagcagaaattgttttggatgtgcgaaacctactccaataatagccgttgatgagccttcaaaaggtttaagaattcaagggcgctcaataaagcagcggagtttgtcggaggacttttggagttcaagcccgccgggaatggagaatagtgccatgcaatctcagcgtagcatgtcttcaatcagtacggcagcacaatcgagcgatcagcatggagctggaagtagcaccaacccaaatgagtttgtaaatcaaggacttctcctgtggaaccagactaggcaacaatgggttggaaac

SEQ ID NO: 405796 - DNA, 384 bp, Oryza sativa nipponbare
ggatgagcaagagtcatatagaaataggaagcaaacaatctctcagaattgtatggttgcttgtgattttgatttgaagtttgtgcatatacatcctggatgggagggatcagcttcagatgcaagagttttacataatgcacttaatcatggttttcaagttcctggtggtaaattttatctcgtagatgctggttatgcaaatactacttgttgctgctcatcgccgccgcccgccggcaacaacttctctgaaccaaacaagattgccattgggcaggcgctatgaacccttgtgtgttacagctgcgaccccattcgcggcgacccaaatgctaaggtatatgcaaggaagcagcagggggcatcagatctacgcataac

SEQ ID NO: 405797 - DNA, 432 bp, Oryza sativa nipponbare
gccgcccacgcgtccgaaattaacacaaagattagaagaaagcaagcaacaatggcgtcagctccggccgcctcttccgcagtgctgctcgtcgtggtcctggtggcgagcctcgccgccggcggcgccaacgcggcgaccttcaccatcaccaaccgttgctcgttcacggtgtggccggcggcgacgccggtgggcggcggcacgcagctgaacccggggcagacgtggaccatcaacgtgcccgccgggaccagctccggcagggtgtggggccggaccgggtgcagcttcgacggcgccggccgcggcaggtgcgccaccggcgactgcgggggctcgctgtcgtgcatgctgtccgggcagtcgccgcttactctggcggagttcacgctggggactatcagctgttatccggacttttacaatctg

SEQ ID NO: 405798 - DNA, 578 bp, Oryza sativa nipponbare
  unsure (1)..(578): unsure at all n locations
cccacgcgtccgtgcaccggggggcactactgcactcgatcgatcagtggaaagaagagctctcggctctcgcggagtggaggacttggagtggttgattgatcgatcggagcggatggggcggtcgccgtgctgcgagaaggaggccgggctgaagaaggggccgtggacgccggaggaggaccagaagctgctcgcctacatcgagcagcacggccacggctgctggcgctcgctgcccaccaaggccgggctgcggcggtgcggcaagagctgccggctccggtggacgaactaccttcggccggacatcaagaggggcaagttcacgctgcaggaggagcagaccatcatccagctccacgcgctcctcggaaacaggtgatcatcgcctcgtgctgtgcaggtgtacgcagcacttctgcaggaatcatatgctntattttcgacattcttttcgccctctacactaagaaattattctaaactctcctgggatactctttcgtgttatatgacatctaaatggtataaaaaaataacaagatatattaatatgtgataaatactccataaat

SEQ ID NO: 405799 - DNA, 396 bp, Oryza sativa nipponbare
  unsure (1)..(396): unsure at all n locations
gcttctctcttctcaccggaatctcgagagcacagcgccgccccgacgacgagatccctcaccggcgccgccgccgccgcggccaggaggccgaggggccatgacgaccatccgccggttctgctgcgacgacctcctccgcttctcctccgtcaacctcgaccacctcaccgagaccttcaacatgtccttctacatgacgtacatggctcgctggcccgactacttncacgccgccgtcagccccggggaccgcgtcatgggatacatcatgggtaaggttgaaggacaaggtgaatcttggcatggacatgttacagcagtgtctgttgccacagaaattcggaggcagaagctagccaaaaaacttatgaaccctttggaggaaatcagtga

SEQ ID NO: 405800 - DNA, 235 bp, Oryza sativa nipponbare
attccttaccagagattgtttggcttatgctaagataaagcccgcagtgaatcaaatcgagacacatccctacttccagcgcgactgtcttgtcaagttctgccagaagcatgggatcttagtcactgcccatacccctctgggtggctccactgccaatactgagtggtttgggtccgtctcatgcctcgacgaccctgtcatcaagtctctggctgagaaatatggcaagaca

SEQ ID NO: 405801 - DNA, 523 bp, Oryza sativa nipponbare
cccacgcgtccgctttgctcctggatatatagctagcttctttctttcttcctctctccctgtgtggcacgcgcctccaatcgatctcttcggtgagtagacgcatcgagatcggggggaaatgtcggtccagtttacatcggagcatgtttgctatgtcaactgcaactattgcaacactatccttgtggtgaatgtgccaaacaattgttcctacaacattgtgactgttagatgtgggcattgcacaatggtgctctccatggatcttgctccttttcaccaagcacgcactgttcaagatcaccagaacagaggatttcaaggtaataactttggaagctatgacatagcttccagaaatcagaggacatcgacagccatgtacccaatgccaaccagtcagcaacaagtgtcacctatacgttcccctgagaaaagacagcgtgtcccatctgcatacaacagattcattaaggaggagatacagaggattaaaaccagcaattctgagatagccaca

SEQ ID NO: 405802 - DNA, 446 bp, Oryza sativa nipponbare
gcgaaagaaaggaaaaaaaaacaaaacacaccaagccaaataaaagcgacaatgggatcgctcaccaccaacatcgtcctcgccgtcgccgtggtggcagcgctggtcggcggcgggtcgtgcggcccgcccaaggtgccacccggcccgaacatcacgaccaactacaacgccccgtggctccccgccagggccacctggtacggccagccctacggctccggctccaccgacaatggtggcgcgtgcgggatcaagaacgtcaacctgcctccctacaacggcatgatctcctgcggcaacgtcccaatcttcaaggacggcaggggatgcggctcatgctacgaggtgaagtgtgagcagccggcggcgtgctcgaagcagccgggtgacgtgttcatcacggacatgaactacgagcccatctcggcgtaccacttcgactt

SEQ ID NO: 405803 - DNA, 471 bp, Oryza sativa nipponbare
gcgctgtggagcaagataatgttaattttgcattcaaaaaaatatttcctgggaagtatcgtctagaggtgaagcattcatcatgtgaggcggctgcacaggatgattggtgctgggaccaaaatgcaatggatataaatgttggttctgatgatgtgacggacattgtgtttgtacagaagggctattgggtagagctagtctcaactcatgagaccaaagcatacattcaacatccagattcttctaaacttgatttgctgataaagaaaggatcacaaaggatctgcatagaaactcctgggcaacatgagcttcatttaattaattcctgcatttcctttgggagctcgccagtggtatttgatacaaagaatccaatgcctgttcatatcagtgcaaagaaatatcttgtaagggtgaactccatgtggagatgggctcccttcaagaaattgatttatccaaaaa

SEQ ID NO: 405804 - DNA, 513 bp, Oryza sativa nipponbare
gccattgttgccatgctatatgttgggcgagggtctatcatcacaacctctattgagtgctatgctcttacatctgttatttctggctatgacagtgctggcactctactcaaggaatggtggtcaaaactgcataaaggctatcatccttacagcatccctatatgcattcttgtgcttggcaataggctatgttctgaatacaatggctatcttctaccgatcattagcggcaataccatacggcacaatggttgtcatgttcgctctttgggccttcatttcttttccgctggagcttctgggaactgttgctggtaggaactgcagtggtgctcctaacaatccctgccgagtcaagactattccacggcctattccagagtagaagtggtaccttacaccttctgttatctcattgatgggtgggctgctatccttcggcagactcttcattgagatgtactttggtgtcacgtcattctggaactacaaggtttattatgtctacag

SEQ ID NO: 405805 - DNA, 487 bp, Oryza sativa nipponbare
  unsure (1)..(487): unsure at all n locations
cccacgcgtccgcccacgcgtccgcttcccagcttcgaattgtaagagaaaatgggattatgtcatctgccgactcggcatggaatcctggaggtggagcttcaaacaggatgaagcactctgtttctactcctaatcttatgtctggtgggtcctctgttcaggcactaagtacatctaacggtggcaataaaaaacaacagccaccacaaagcagccaaacattgcctgctgctgatgatgttcgtgctgccaataagaccctggttgaaagaatgcgcagtgctttaggcatggatgaagataggtactctgcatttaaagaaatcgctggtgaataccgtcaaggcatcattggtacttcagaatatctttcatatgttgagcnaattggtctgtcacaccttgtgcctgaaatggcttaggctgtacctgatcctcagaagcagaaaagaacttgctgatgcctatcacaccaatatacgct

SEQ ID NO: 405806 - DNA, 407 bp, Oryza sativa nipponbare
cccacgcgtccgcccacgcgtccgcccacgcgtccggcggcggcggcacaccgcgggttgaggccaccggcgacagcgctgcacagcgcggcgggactcctctcctattctcgttccatccccacgtacgccgagggaaccggttgacccaggtctcagccccgattcctgtcctccccggtccagttccccccattcgaagctagattgctccagtacaatgagctggagatttcctcttttcggcagctcgcagcagcagcaacctgatacaaatttccaggacaaccctacacaaccatggtaccctccgtctgtccttggttcatcttcacatccatccctgcccagctcgtccagtggtagtccacatcaaagagcttctgataatccccaatcattgcatg

SEQ ID NO: 405807 - DNA, 418 bp, Oryza sativa nipponbare
  unsure (1)..(418): unsure at all n locations
cccacgcgtccgnaggagagctcactgacctttggtgatctggttctgaataatgatctcagcagtattcgcaatgactgagcactggggctcagaaagaatcagatgcaccggagcatctcaactccttgcctctctcctactgctcatgatgtgcaggagcaagatcacagcgaacccattgaaatccttggatgtttgagcccctcttctcggatgaagcagcttgctaaggatgttgtggaagccataaggaatggtgttgacccggtacctgttaatagtggcatgggtggcgcatactacttcaagaacatttacggggaacgtgttgcaattgtcaagccaccgaatgaagaaccatttgccccaaataatcctaaaggttttggggggagaacccttggactgccaggcc

SEQ ID NO: 405808 - DNA, 294 bp, Oryza sativa nipponbare
cccacgcgtccgcccacgcgtccgcggacgcgtgggggcggcgtacatccgtcgctgctcgagctcgccggtgaccaccaggcgcaggcggggttctacgacgacgacgacgaggatggggcgcctccgccgcgctgcagcagaagctgaagaaggcgaggacggaggagcagcagcaggcggcgttccacgtgtccgacgtggccacgctgcacgcgcatgccgcggcggcggcggcggcgaggcacgacgaggtgagccaccgggagctcctcatgaagttcatggagagcg

SEQ ID NO: 405809 - DNA, 472 bp, Oryza sativa nipponbare
cccacgcgtccggcgaaatccaagaagagagaagcagccatccatggcgcccaaggcggagaagaagccggcggcgaagaagcccgcggaggaggagcccgcggcggagaaggccccggcggcggggaagaagcccaaggcggagaagcggctccccgcggggaagggcgagaagggcggcgccggcgaggggaagaaggccgggaggaagaaggggaagaagagcgtggagacctacaagatctacatcttcaaggttctcaagcaggtccaccccgacatcggcatctcctccaaggccatgtccatcatgaactccttcatcaacgacatcttcgagaagctcgccgccgaggccgccaagctcgcccgctacaacaagaagcccaccatcacctcccgcgagatccagacctccgtccgcctcgtcctccccggcgagctcgccaagcacgccgtctccgagggcacc

SEQ ID NO: 405810 - DNA, 339 bp, Oryza sativa nipponbare
cccgcgcgttctcctacgcgtgatttggtactgctacatccaccagcctgctcaacctaagatgatctctcatttagctacaggtgataatacttatgtggatggtgtggatcaccctaataaaccacccaccttcaaaactagctggttcaataccagcaaattgagtcctgtctttgttgctggccccaatatggatgaagctccacctgtttgggttgacagagttggattcaaagccaacataacagagagcttcacacgtcagagcaaattcacatatggccttgtggtagaagagattacaacgcgtgatgaaaccaacagcatctgcactca

SEQ ID NO: 405811 - DNA, 559 bp, Oryza sativa nipponbare
gactaatttgatgaagctgcggtctgattataaggatgagtttgtcaccaagcacggtgtcaaattgggtctgatgtcctgctttgtcaaggctgctgttacagcacttcaaaaccaaccaattgtcaatgctgtcattgatggtgatgacatcatatacagagactatgttgacatcagtgttgctgttggtacttccaagggtcttgtggtgcctgttatccgagatgctgataacatgaactttgcggacattgagaaagggataaacgcccttgcaaagaaggctactgagggggcactctcaattgatgagatggcaggaggaacattcaccatctctaacggtggtgtttacggaagccttatcagcacacctatcatcaaccccccacagtctgctattcttggaatgcactccattgtacaacgccctgtggtcgtggacggcaacattctcgcgaggccaatgatgtaccttgcgctgacatatgaccacaggctgatcgacggcagaaaagctgtctacttcctgcgccgcataaaggaccgtggtgag

SEQ ID NO: 405812 - DNA, 412 bp, Oryza sativa nipponbare
ctcctcctcctccccctcccggtaaggcggacgaccgagctgaggctgagctagggctagggcacccacctcctccccttccgtatgctggatggctgctggtcggggcattaaccagctcctacggagaacactccataatcagtcctcaggctcatctctgctatcctcgttccggataaagcatgaagaatcctccgctggactgagagcattggctcttcttggagttggtgcttctggtcttttaagctttgctacaatagcttctgcagatgaagctgagcatggtttggcagcagctgaatatccctggccacatgctggcattcttagctcttatgaccatgcatctattcggcgtggacatcaagtttatacacaagtgtgtgcctcttgccattccatgtca

SEQ ID NO: 405813 - DNA, 535 bp, Oryza sativa nipponbare
gcgggcgtccgctcgtccagaccaccgccgccgtccgccggccgcttccccttcgccgccgggagcaagatcaggcggcgggggctcggggggatctgcccccatccatggactcgcttggcgccgcttctgattgctccgcctcgcgttgatgcgctgcgcgcggcatcgagccacaaggttttcctcatattaatcaataatcatggcgcttagcaaggttgaagtgaacttgttaaggttgcttgaggcagctcctcggcagcagaaccaggctaaacttgtccattatgtaaccacagccagggaattgttggagcagctaggagcagaaactactccagaagggatatcaagtgtatcaaaagctaagataagtgagtattcagaaaagattgaagcattggctgcccggcttgctgttccagagccagaaaatgaagtgccagttgatgagaataagagggtagaaagctcttatgaaggagaaaagcccagaagccaatatcattatcatcagggatacgtaggagac

SEQ ID NO: 405814 - DNA, 489 bp, Oryza sativa nipponbare
  unsure (1)..(489): unsure at all n locations
gcgcggaatcgaagcttccgccgagttccccgtcgccgactcgcctggatcggcccgccgtcgagctcgcccccgaccatccgctcgatgggaggccggggagctgcgtctggtggtgaatcncatccgccgcggagcggttcgatttcggcggcggatttcgcgggggtagaggagatcgaaggggggcagagcagccatgagcgaggtgttcgagggctacgagcggcagtactgcgaggtgtccgcctccctcttccgcaagtgcaccaccgcctccgccctcgatggagagaaaaagaagcagaagctgtccgagattcagtccggcgtggaggaggctgagtcgctgattcggaagatggacctggaggctaggagcctacaaccgagcgtgaaggccngtttgcttgcgaagctgagggagtacaaatctgacctcaacattctcaagagtgagcttaagaggagtctggctcccaatgcaag

SEQ ID NO: 405815 - DNA, 446 bp, Oryza sativa nipponbare
  unsure (1)..(446): unsure at all n locations
gcgcgtgcggaccaccgtagcacgccgcctccccgcccagcgacctcggcaactccggcgaagatgggcgccttcaggttccaccagtaccaggtggtggngaggggcctgccgacnccgaccgacgagcaccccaagatctaccgcatgaagctctgggctaccaacgaggtacttcctccgcaagctgaagaaggtgaagaagagcaacgggcagatccttgccatcaacgagatttttgagaagaacccaacaactatcaagaactatggcatctggctgcgttaccagagtaggactggctaccacaacatgtacaaggagtaccgtgataccaccctcaatggtgccgttgagcagatgtacactgagatggcttcccgccaccgtgtcagattcccttgcattcagatcatcaagactgctactgtccactttaaactct

SEQ ID NO: 405816 - DNA, 478 bp, Oryza sativa nipponbare
cggacgcgtgggcgccgccaccgccagccgcaacagcaccgacgacgaggacgagctgagaatacgaggcgatgccgaaatccaagcgcaaccgccctgtaaccttatccaagaccaagaagaagcctggattagagcgcaagggcaaagttgttaccgatatcaaagatgccgtcgagcactacgctaatgcctatgtcttcacctacgataacatgaggaatcagaagctcaaggacctcagagagcagctcaagtcctccagcaggatattccttgctggaaagaaggtcatgcagatagcgttggggcgttcacctgctgatgaagctaaaacaggccttcataaactttccaagttcctacaaggtgatactggactgttctttactaatcttccaagagatgatgtagagagattatttcgagaattcgaagagcatgatttcgccaggacaggaagtattgcgacagaaac

SEQ ID NO: 405817 - DNA, 375 bp, Oryza sativa nipponbare
cccacgcgtccggaggagagctcactgacctttggtgatctggttctgaataatgatctcagcagtattcgcaatgactcaccactgctcctcagaaagaatcaaatgcaccggagcagctcaactccttgcctctctcctactgctcatgatgtgcaggagcaagatcacagcgaacccattgaaatccttggatgtttgagcccctcttctcggatgaagcagcttgctaaggatgttgtggaagccataaggaatggtgttgacccggtacctgttaatagtggcatgggtggcgcatactacttcaagaacatttacggggaacgtgttgcaattgtcaagccaacagatgaagaaccatttgctccaaat

SEQ ID NO: 405818 - DNA, 495 bp, Oryza sativa nipponbare
gcgcggacgcgtgggcggacgcgtgggcggacgcgtgggctattgcctcgagcatggcatccagcctgatggacagatgcccggtgacaggaccgttgggggaggtgatgatgcttttaacaccttcttcagtgagactggtgctgggaagcatgtcccccgtgctgtcttcgtcgatcttgagcctaccgtgattgatgaggtgaggactggtgactaccgccagctcttccaccctgagcagctcatcagtggcaaggaggatgcagccaacaactttgcccgtggtcactacaccattggcaaggagattgttgatctgtgccttgaccgcatcaggaagcttgccgacaactgcactggtctccagggcttccttgtgttcaacgctgttggaggaggaacgggctccggtctcggttcccttctccttgagcgtctctctgtggactatggcaagaagtccaagctcgggttcaccgtgtacccgtcccc

SEQ ID NO: 405819 - DNA, 489 bp, Oryza sativa nipponbare
gcggggaagggatatattgatgcacgagggtcctcgagcattctatagaggtctggttccatctttgcttggtattgtcccttatgccggagttgatcttgctggatatgagacattgaaagacgtatccaagacatatatcctgaaggatagtgatcctggtcctctagtacaactgggctgtgggactgtatcaggagccttgggggcaacatgtgtttaccctttacaggttatcaggacaagactgcaagctcaacgagccaattcagaatctgcatatagaggtatgtctgatgtattctggagaacgctacagcatgagggtgtttctggattctacaaaggaatcctaccaaatcttcttaaagtggtgcctgcagcaagtattacctacctagtgtatgaagcaatgaagaaaaatctctcccttgattgaaataccgagctgtttggcaaatcggccatcatttattgacatggctgact

SEQ ID NO: 405820 - DNA, 396 bp, Oryza sativa nipponbare
cggacgcgtggggggaaactgcaccagctttactccaaaatggggattaagtgatcttcactgtaagggtatggttccaattgatgaggatgaaactcacgaaggcataaagacaattaggattcagaaagcctgtgaattcaccaccagttcagttctttgcgtctgcattatcacctggaacatgaacggcaagatgtctgtggaggatgtaacaaagttagtgagctccaacaggaagtttgatttgctagttttcgggttgcaagaggtaccaaaatgtgatgttgcacaggttctgcaagaaaccatggctgagacacacattctattatgccagaaaaccatgcagtctcttcagatgtttctttttggagcaaagagttcagagaaata

SEQ ID NO: 405821 - DNA, 418 bp, Oryza sativa nipponbare
gcgcagcgacatcgacagcaccaacaagacgctgctcaagagcgacgccctgtacaagtatgtcctggacacgacggtgctgccacgggagccggagtgcatgcgcgatctgcgcctcatcacggacaagcaccagtgggggttcatgcagtcgtcggcggatgaggcgcagctgctggggatgctgctgaagatggccggagcgaagaggacaatcgaggtgggtgtcttcaccggctactcgctgctggcgacggcgctggcgctgccggaggacgggaaggtggtggcgatcgacccggacagggagagctacgagatcgggcggccgttcttggagaaggccggggtggcgcacaaggtggacttcctcgaggggaaggggctggagaagctggacgagcttctctcctaggag

SEQ ID NO: 405822 - DNA, 424 bp, Oryza sativa nipponbare
  unsure (1)..(424): unsure at all n locations
gcgcccacgcgtccggcccggtgtctcctcctcccaactacacacccccgcaatctcgctcgctagctcgctgatcgatcaagctgaagctgaagctagcttcgggcggcggcaatggcggcgcangcgtctcctccaacgaagaaggtgttggtgccgatcgtcgccggcacggagccggtggaggcggcggtgcccatcgacgtcctccgccgcgccggcgcggacgtcaccgtggcttccgccgatgatggcgagctggtcgtcgaggtcatgtacggcgtcaggatcgtcgcggacgcgcttcgtcgccgcggcgactgcgccgccgctcacttcgacctcatcgtcctcccgggaggggttccaggcgcggcgaacccttgcggctgcgcggcgctggaaaccatggtgaggaggcacg

SEQ ID NO: 405823 - DNA, 493 bp, Oryza sativa nipponbare
cggacgcgtgggtttgcgtttgcactcctctcgatctccattcgtttttgagttcctcgtttgctccgcctctctttcactcatgggcaagatgaagatcggaatcaatgggttcggccgcatcggcaggctggtggccagggtggcgctgcagagcgaggatgtcgagctcgttgccgtcaacgatcccttcatcaccaccgagtacatgacatacatgttcaagtatgacaccgtccacggccagtggaagcatcatgaggtcaaggtcaaggactccaagaccctcatctttggcacgaaagaggttgcggtgttcggctgcaggaaccctgaggagatcccatgggctgcggctggtgctgaatacgttgttgagtctactggtgttttcaccgacaaggacaaggcagcagctcacttgaagggggtgccaagaaggcgtcatttctgtcccagcaaagaccccccatgttcgttgtgggtaacgaga

SEQ ID NO: 405824 - DNA, 414 bp, Oryza sativa nipponbare
gcgggctgagcaggctaatcaaccgactgtccttcagaagttcggtggccagttccaccttggctccagcttttctgaaggtgtacgggcgtggaacatctgcccatctgtctcatcctatgacaggcgctttaccacaaggagctacatgacccagggccttgtcaatggtggcatcaacgtcccaatgatgtcgtcctctccaatttttgctaatgctccagctgagaaaggtggcaaaaacttcatgattgatttcctcatgggtggagtgtcagccgcagtttcaaagactgctgctgctccgattgagcgtgtgaagctgcttatccagaaccaggatgaaatgatcaaggctggtaggctctcagagccatacaagggtattggggactgcttcggacgcactatcaa

SEQ ID NO: 405825 - DNA, 424 bp, Oryza sativa nipponbare
gcgctctactactactagccagtaagctagctaactaactacgtggctatggcccccaccgtgatggcctcctcggccacctccgtgggtgcattccaagggctcaagtccaccgccggcctccccgtcagccgccgctccaccaactcgggcttcggcaacgtcagcaatggcggaaggatcaagtgcatgcaggtgtggccaattgagggcatcaagaagttcgagaccctatcgtacctgccaccactcaccgtggaggatcttttgaagcagatcgagtacctgcttcgatccaagtgggtgccttgtctcgagttcagcaaggttgggttcgtctaccgtgagaaccacaggtctcccggatactacgatggcaggtattggaccatgtggaagctgcccatgttcggctgcaccgatg

SEQ ID NO: 405826 - DNA, 379 bp, Oryza sativa nipponbare
  unsure (1)..(379): unsure at all n locations
ggaactgtttgcctgttgcattgagtatctgatattagagagtgataatttgtcaaagttgttccccaatgcacacctgaccattgggacatttacaataaatgcgcatatattattcgcaatcctgactactctgattgtcatgccaacaacttggcttcgcgatctcagctgtctaagcttcatttcagctggaggagtgattgcatctatagtcattgttgcttgcctgttctgggttggacttgttgatcacattgaggccaaggatgaagggacagcactgaatctcccaggaattcccattgccgttgggttgtatggctactgctactcangtcaatgagtgttccctaacatctactcttccatgaagaaa

SEQ ID NO: 405827 - DNA, 510 bp, Oryza sativa nipponbare
  unsure (1)..(510): unsure at all n locations
gctcagtccgaggaagaagctgctacagctgaagttgttgatggggctgatctaggaatcgtcagtgatgatacacaagtttccagcgatgggcctctaagtccggctcctggtgtggagacagtatgtgtttttcccaaaaacgctggcaaaattgtgctagcaggtgaagaaactgaactactggttggcctgcanaacgagggtgaatcaacttttgaatgttgttgctatccattcaactctccatcttcctttggaccataagatgtatggacaaaaccttactgttcagaacttcttcaatgcatcagttcctgtctctgtacaagcaacctttccgtatacattcgccgtgagcaagttcttgcagcctggagcatatgatctagttggttacatagtgtatgagaatgatcagaacccataccaagaatgtcttttacaatggcacttgtagaggtgttgaggccttgaggttacttcagcgtgagtctggttccttattac

SEQ ID NO: 405828 - DNA, 419 bp, Oryza sativa nipponbare
gaacagagtttcaaaagagaaagaagtatagcccttcaggctgtcacagcacttgtgtctaagagctccacctccatcacaccatgactgcaaggttggcactgctcgccagccttcttctcctgctccaactggtgccgccatcctctgccgtggtgttggagctccacggtaacgtctaccctattggccatttcttcatcaccatgaacatcggcgacccggcaaaatcctacttcctggacatcgacaccggcagcaccctcacctggctgcagtgcgacgccccctgcacgaattgcaacattgtaccacacgtgctgtacaagccaaccccaaagaagctggtgacctgtgccgactcactctgcactgacctgtacactgatctgggcaagcccaaggagatgtgatcccag

SEQ ID NO: 405829 - DNA, 437 bp, Oryza sativa nipponbare
  unsure (1)..(437): unsure at all n locations
caagggtgaggagaagcaattctctgccgaagaaatttcatccatggttcttatcaagatgcgtgagatcgctgaagcttacctagggtgcaactgtgaagaatgctgttgtcactgttcctgcatacttcaatgattcccagaggcaggcaactaaagatgcaggtgttattgcgggtcttaatgttatgcgtatcatcaatgagccaacagctgctgcaattgcttatggtcttgacaagaaggcgactagtgttggtgagaagaacgtgctcatttttgaccttggtggtggtacttntgatgtctccctccttaccattgaggagggtatttttgaggtgaaagcaacagctggtgacactcaccttggtgggggggactttgacaaccgcctggtgaaccactttgtccaagagttcaagagaaagcattag

SEQ ID NO: 405830 - DNA, 381 bp, Oryza sativa nipponbare
cccacgcgtccgcccacgcgtccggaaatggccgattcttggcagtgtaaggagattattactgaggggaaattcagtgctgaggttgaggaaaaattgagtaagctagaggagttggaaaatgaggcaagagagcttagggttgtcaattcaaggctgcagcaggagaatgcacatcttgccaggcgattggagctcacacgcctgccccctgtacccaagcccatcaataacatggaggtaaaagcattgcaggaagctgatcatttgaggcaagaaaatgacaagctggcaaaagaggttgaacagctcaagactgacaggttttcagatgttgaggaaatggtatatctgaaatggatcaacgcttgcctgcgttac

SEQ ID NO: 405831 - DNA, 497 bp, Oryza sativa nipponbare
atgtgctttcgctgttgaacaaggtagcatcagatgtgttggatctaactgacttcctccactgtgagataactacatcaaagtatgaggatgcatcaagtggacaaggagctgttgccaactcaggtgacatcgaaaacatccaggatcaaaatttatgtgcaactaagctagtacctcttttactgcaaaagggtgtcctcaggactaactgcatagactgcttggaccgcacaaatgttgcacagtttgcgtatggcttagctgctttagggcgtcaacttcatgtgctccagctcaatgaaacccctacaattgaattgcatgctcctttggccgatgatcttatggatttctatgaacggatgggtgatacgctagctattcaatatggtggctctgctgctcacaacaagatcttctgtgagcaaagaggccaatggaaggcagcaacacaatctcaggagttcctccggacccttcagcgctactacagt

SEQ ID NO: 405832 - DNA, 504 bp, Oryza sativa nipponbare
cccacgcgtccgcaatttcttcctggtgctcacctcctcctcccccgggatcttccagaagcttccagaactgaccttggtgcgggcgagatccaaggaggagggtttcctgccatggtgaaggataccgcgtactacgacaccctgggggtcagcgtggacgcctcccccgccgagatcaagaaggcctattacctcaaggcgaagcaggtgcatccggacaagaatcctgggaaccccgatgcggcgcagaaatttcaggaactcggagaggcataccaagttttaagcgatccttcaaaaagggaggcttatgataagcatggaaaggaggggcttcctcaggataacatggtggatcctgctgctgtctttgggatgctttttggaagtgactattttgaagattatgttggacagcttgcactggcatccatagcatcagtggaagtcgaggaaaacttaaacagtcaagaagcaagaagggaaggttcaagagaaaat

SEQ ID NO: 405833 - DNA, 510 bp, Oryza sativa nipponbare
cccacgcgtccggcaccaccaccagcagctcaagcagcaacagctcaaacggaggaagatctcatcgccatgacgaccggcaatggcgacgcaccggtgatcaagaacgcccacagcgacatcgacagcaccaacaagacgctgctcaagagcgacgccctgtacaagtatgtcctggacacgacggtgctgccacgggagccggagtgcatgcgcgatctgcgcctcatcacggacaagcaccagtgggggttcatgcagtcgtcggcggatgaggcgcagctgctggggatgctgctgaagatggccggagcgaagaggacaattcgagggtggtgtcttcaccggctactcgctgctggcgacggcgctggcgctgccggaggacggggaaggtggtgggatcgacccggacagggagagcttacagatcgggccgccgttcttggagaagggcgggtggcgcacaaggtggactttcgcgaggggaaggggctggagaagctggac

SEQ ID NO: 405834 - DNA, 380 bp, Oryza sativa nipponbare
atcaacgatcgaacgaacaacgcactctgcagctagctatacaatctctgtttaattagctaggtagctagcgagtcataaatcaagaagccatggacttttacgggcggcgcgagcagtacggcgggtatggcgggtacggtggcggcggcgccctggcgacgccggggtacgcgccggcggcgccgtacgggatgtcgcaggtgaacatcgaggggaacgggtgtggcaggacgctgccgccgcagccgacgggtgaggtgtactgccgggcgaacccgaactacgcgatgacggcgcggaaccggcgcgtggtgctggcgccggcgaaccccaaggacgagtaccagcattggatcaaggacatgaggtggagcacc

SEQ ID NO: 405835 - DNA, 412 bp, Oryza sativa nipponbare
cgagttgaagactacatttgtaagtctttgggtgcagattcaagatacataccttctcgccggagatcagtagatgtcgctgcttcgagtgatcacaatgtcattgagctgacagggactgaccggccaggcctcctctctgaagtcagtgcagttcttgcaagcctcaagtgcaacgttgtcagcgccgagatctggacccataacaccagggctgccgccgtgatgcgagtcaccgatgagggcaccggatcggccgtcacggacgccgacaggctcgagaggatcagggataggctgtcctaccttctccggggaggcaacctctcgcgcggcgcggcccatggcggtgtcgacggggacctgcagcacgcacaccgagaggaggctgcaccagatgatgctggatgat

SEQ ID NO: 405836 - DNA, 444 bp, Oryza sativa nipponbare
gcgggagttaagaaaatgggagaactccacctggccatcaggttcacagccacatcccttctcaatgtgctcttcacatattctcggcccgggttgcccaagatgcagtacgcgcaaccactgtcaatagtgcagcaggaaatgctccgccaccaagctgtgcaacttgtcgcacagcgtctagggcgcatggagccaccagttcgcagggaagttgttgagttcatgtcagatgcccgctcacacctgtggagcatgcggcgaagcaaggctaacttcttccgtcttatgcaagtcttctccggattcattgctgcaggaaagtggtttggcgacgtttgtcagtggaaaaacccagtcacaacagttttagttcatgtgctatttatcatgcttgtcttctacccagaccttatccttccaacaatcttcctctacatgttc

SEQ ID NO: 405837 - DNA, 423 bp, Oryza sativa nipponbare
cgcaagcagacgagcccacggccgccgacgccgcccgccgccggacttcgccggaatttcgccattctgatataaattagtgcattggagcagaaaaatggttgtggggttaataaatgctaaccctgtagtttatgagaaaaaagagaggcgttctcggcaggcaccagaaaccacagatgaaaatgcggcagaggctattgaccagctagaaatatttgatcatattagagacataaaggatccagagcacccatactcactcgaagagcttaatgttgtaactgaggattcagttgaaatcaatgatgaacttagtcatgtcagggttacttttaccccaacagtggagcgttgcagtatggcgaccgtcattggactttgcctgcgtgtgaaacttatgcggagtctttcccctcgata

SEQ ID NO: 405838 - DNA, 365 bp, Oryza sativa nipponbare
cccacgcgtccgcccacgcgtccgcccacgcgtccgctcgaagcctaggtagggttttgcgctcgcttcgcttccaacccacccatggcgggcgtcgaggcggcactgcttcctccgccaccgccgccgccgcaggcgaggtgggcctccgtgcggcgacccctgctccggctcctcgcgctggccgctgacgtgctggtgtacggactactcgccgcgatgtggctgaacaacgccgtcttccccgccgacatcttctcgcgctgggccagcggcgagggctccaccaccgtgggcatattgtcgcgctcggccagaggcgaggggttccgcggcgtcgacatcgtaggcgtcacgatggtctg

SEQ ID NO: 405839 - DNA, 428 bp, Oryza sativa nipponbare
tctcacctgcgtttgtcgccggcggcgaggaagaagaagaagagagagagagaagatggtggggatgttgccggagacgaatgcgcaggcggcggcggaggaggtgctgggcgacgcgtgggactaccgggggcggccggcggcgaggtcgcggacggggaggtggggcgcggcggcgatgatactggtggcggagctgaacgagcggctgacgacgctggggatcgccgtgaacctggtcacctacctgacggcgacgatgcacgccggcaacgccgaggccgccaacgtcgtcaccaacttcatgggcacctccttcatgctctgcctcctcggcggcttcgtcgccgactccttcctcggccgctacctcaccatcgccatcttcaccgcgtccaagccttcggggtgacgatctgacatctcga

SEQ ID NO: 405840 - DNA, 451 bp, Oryza sativa nipponbare
ttcgcaatctgatggacatgaaaatttttgtggacacagatgctgatattaggctagctcgacgaataaggcgtgatacagttgaaagaggtagagatgttagctcggtgcttgagcagtatggcaggtttgtgaagccagcatttgatgattttgttctcccttcgaaaaaatatgccgacgtgatcataccacgaggaggtgataatcatgtggcaattgacctgattgttcaacatattcgtactaagcttggtcagcatgacttgtgcaaaatctatccacatgtttatgtggttcaaacaacattccagatccgaggaatgcatactctgattcgtgacagggacatcactacacctgactttgtcttttattcagatcggttgatcccgttggtagttgagcacggactggggcatttgccatttacagaaaagcagattattac

SEQ ID NO: 405841 - DNA, 402 bp, Oryza sativa nipponbare
cccacgcgtccggattcgatgagaggggacaaaccagattatagccaattaattaacctcgtaaaggaagtcaggaattcgttacatgagttggcctcaaatgagttgaaggaggaaattcttgagaacattgacctcgaaattttgtctcaggtgcttcagtcaggctcccaggacacgcgatatctggggcagattttgcagtactccctggatatggtcaggaaactatctgcccctgcaaaggaagatgacatgaagaggagtcatgagaaattgttaaacgagttggctgcaagttccgaagttaatgacaatggtatcagctcctttgtcattgctgtcatcaagggcctgcgtttcactctcgaagaaataaagcaactgcaaactgaagttagc

SEQ ID NO: 405842 - DNA, 459 bp, Oryza sativa nipponbare
ccggcaccatgctgctgcgatcgccggcgaggtcgagcccccacctccgctcgctcctgcgggcgcgaggcttcatctcctccgcctcgccctcggccgccaccgcggcggaaggggacgacgggaagatcgtggcgtccgtgctgttcgagcgcctccccgtcgtcatccccaagatccaccccgtcgtctacgccttccaagaattctcgtttcggtggaggcagcagtacagacggaagtaccccgacgacgtgctgggaaaggccgacgcgaggggcaagggagattatcagatagattatgtgcctgctccaagaatcacagacgctgacaaaacaaacgacaggaagtcactacaacgagctcttgataatagactctatctccttctgtatggcaaggcttatggggctcctgatgacaagcctgtttggcattttccaaaaaaagttatga

SEQ ID NO: 405843 - DNA, 499 bp, Oryza sativa nipponbare
gagcaatgaacctatttgaagtggcccatttcgtaccagaaaaacccatgtatgaacaagggttgattttacttccgcacttagctactctaggttggggagtagggcccgggggagaagttctagatacttttccgtactttgtatctggagtacttcatctaatttcctccgcagtcttaggcttcggtggcatttatcacgcgcttctgggaccggagactcttgaagaatcttttccattctttggttatgtgtggaaagatagaaataaaatgactacaattttgggtattcacctaattttgttaggtataggtgcttttcttctagtactcaaagctctttattttggcggtatatatgatacctgggctcctgggggaagagaatgttgatcaggagaaatcgtcagcatggcgaacttgaggttgaggccctgctgctgccttgtctgggtgctgatctgattggcggcgagtgcagacaggaacagaag

SEQ ID NO: 405844 - DNA, 510 bp, Oryza sativa nipponbare
  unsure (1)..(510): unsure at all n locations
ttcaaattcttaagaaaactggagggtctctaaaggactcctttttggatgaagggttcattctagacaagaaaatcggtcttggccaaccgaagaggattgaaaacgccaagattttggttgcaaatactgctatggacaccgacaaagttaagatatatggagcacgtgtacgggttgattcaatggctaaggttgctgaaattgaagctgctgaaaagcaaaaaatgagagaaaaagtgcaaaagatcataggtcatggaatcaactgtttcgttaacaggcagttgatctacaacttccctgaggaactctttgcagatgctggcatactggcaatcgagcatgctgattttgagggcattgagcggcttgctcttgtcactggtggtgacatcgcctccacttttgataacnccggagtctgtcaaacttggtcattgcaaggtcattgaagagattatgaattgggaggacaggctgattcatttctttttgggttgaaatggg

SEQ ID NO: 405845 - DNA, 510 bp, Oryza sativa nipponbare
  unsure (1)..(510): unsure at all n locations
ccaaccccgtctccttcctccattcctccgccgctagaaccttctagaagctctcctcctcctcccatggcggcgacgatcgtgtccgtcaaggcgcgccagatcttcgacagcaggggcaaccccaccgtcgaggtcgatgtgtgctgctcagatggaacctttgcaagggctgcagttcccagtggtgcatcaactggtgtctatgaagctctcgaattgagggacggtggatctgattacttgggaaagggtgtttccaaggctgtcgacaatgtgaactcggttattgccccagctctgattggcaaggaccctacgtcacaggctgagcttgataacttcatggttcagcagcttgatggaaccaaaaatgagtgggggggtgcaagcagaagctnggtgctaatgcaatccctgctgtgtcactggccatttgcaaagctggagctatcatcaagaagatcctctgtaccagcacattgccaaccttgctggaaacaagcaact

SEQ ID NO: 405846 - DNA, 486 bp, Oryza sativa nipponbare
cccacgcgtccgcccacgcgtccgcccacgcgtccgcgccctccctccatggcgtcgacggatgccgacgaggaccagctcctcaagagcttcctcgccgaggtcagcgaggccgaacgcgacaacgaagtgctcaggattcttggttgcttcaagttaaaccctttcgagcatcttaagttgtcatttgattcatcagcagatgaggtgaagaagcaatataggaagttgtccttgttggttcatcctgataaatgcaagcatccgaaagcacaagaagctttcgcagctctggcaaaagcacagcagctcctacttgatccacaggagagaggatatattcttgatcaagttactgctgcaaaagaagagctgagggcaaagaggaaaaaggagctgaagaaagacagcgcgtcaaagataaagtcccaagtagatgagggaaaatatgaagagcagtatgaacgatcagaagaatttcagaag

SEQ ID NO: 405847 - DNA, 446 bp, Oryza sativa nipponbare
cccacgcgtccgcggacgcgtgggccgctgcagcctccttcccccttcaccgccgtacaccctccagccagccatggcggagcagactgagagagctttcctgaagcagcccaaggtcttcctttgcccaaagaaatctggcaaagggaagaagcctggcaagggaggtaaccgcttctggaagaatattggccttggcttcaagacaccccgggaagcaattgaagggacctacatcgataagaaatgcccattcactggaactgtttctatcagaggtagaattattgctggaacatgccacagtgccaagatgaataggacaatcatcgtacgcagaaactacctccattttgtgaagaaatatcagcgatatgaaaagaggcactccaacattccagctcacatttctccatgcttccgtgttaaggaaggagaccatgtca

SEQ ID NO: 405848 - DNA, 484 bp, Oryza sativa nipponbare
cccacgcgtccggcgtgatggcggagcagagaggaaatatgttgatgaaaaagtatgagatggggaaattactcgggcaaggaacctttgccagaggtttaccatgcccgtaacaccgagacttctgagagtgttgctatcaagatgattgataaagagaaggttttgaaaggcgggctcatggatcagatcaaacgtgagatttctgtgatgaagttggtgaggcatccaaacattgtgcagttatatgaggtcatggctaccaagactaagatatattttgtgctggagcacgtcaaaggtggagagttgttcaacaaagttcagagaggaagactaaaggaagatgcagcaaggaagtacttccaacaactgatttgcgctgttgacttttgccacagcaggtgtgtttattaccgtgatttgaagccagaaaatcttcttcttgatgagaacagcaatctgaaggtttcagattttggtc

SEQ ID NO: 405849 - DNA, 513 bp, Oryza sativa nipponbare
ccgatagaaagggaggaaaaaaaaagagaaggcgaaaccccaaatccgccgcgatggccgccgccgccctcctccgccgctcgccggcggcgcgcgccctcctctccccggcgctctcctcccgcctcgtcgcctccaagccccactcgtcgtcccccgcgccgccgccgccgccgtcgaaggcgggggcgaacaccaagacgttctcgatctacaggtgggatcccgactcgccgtcgacgaagccccacctcaaggactacaaggtggacctctccgactgcgggccgatggtgctcgacgtgctgctcaagatcaagaacgagcaggacccgtcgctcaccttccgccgcagctgccgcgaggggatctgcgggagctgcgcgatgaacatcgacggtgacaacggcctcgcctgccttaccaagatctcgtcggcgttctcggccttcacgatctcggcgcttccccacatgttcgtcatcaaggacctcgtcgtcgatatgaccaact

SEQ ID NO: 405850 - DNA, 426 bp, Oryza sativa nipponbare
cccacgcgtccgcccacgcgtccgcccacgcgtccgggaggagaagaagcctgaacaagcaaaagcacagggtgagaggggcagtgttgactcccttctaaatctgcttaggaagcactcagtggaccaacgaaggaagagcggtgatgagaaagaacagagtgttgaccaaacaaagagaagcaatgaatctggaaataaacaaaattcaagcatcttcataaagaatgacactcaggaagaacagaaaaagccacatcctgcagccttcaaaaggccagcttcaaattttaggcgaagatcccctgttcctaatgtaaagttccagcctgttaccaatgttgatgccgaacgagtcatcaataacatcaatgatgccgtacaagaggctaagccaactttggaaaataaggctgctacagatga

SEQ ID NO: 405851 - DNA, 453 bp, Oryza sativa nipponbare
gaagagctgaggcatactccgaacccagccagagagctagctcagtgagcagtacacagtacactccccgggttatctctcccagcacgccagctagcttttgcttgcaatggcggactgcatgcaggagtggccggagcccgtggtccgcgtgcaggcgctcgccgatagcggcctggaggccatcccgcgctgctacgtcaaaccaccgtgcgaccgccccgcccccgaggcggacgacgcgtcctccggcgccagcattccggtggtcgacctcggcaacggcggcgacgacgagggcggccagctcgcggaggccgtggcggcggcgtgccggggctggggcttcttccaggtggtaaaccacggggtgcggccggagctgatgcccccggcgcgggaggcgttgcacggcttcttccgcctggcgcttcaggagaagcagaagtacgc

SEQ ID NO: 405852 - DNA, 553 bp, Oryza sativa nipponbare
catagctcctcctccttccaccgcatctgcgctacactacctccaaggcgactgatccattagtccaagagaaggaagagagacctcaacggctgactcctcctatcgattgcctctagcctaaccctctagaacatccacgaggtcatggagattaaccagggcagaacaggcaggcaccgattcaccataaaggcactcattcatgttagaagcttcggcactcgccttcggcctttgacgctcagtttcccaaagcctcttgttgatttcgcgaacaagcccatgattctgcatcagattgaggccttgaaagaagttggagtaacagaagttgttttagccatcaactaccgaccggaggtaatgctcaatttcctgaaggactttgaggataagcttggcatcacaatcacgtgttcccaagagactgagcccttgggaactgctggccctcttgctctagcaagggacaagcttggggatggatctggtgagccattctttgtcctcaacagtgacgtcataagtgaatacccttttgctgagctca

SEQ ID NO: 405853 - DNA, 576 bp, Oryza sativa nipponbare
  unsure (1)..(576): unsure at all n locations
cccacgcgtccgcccacgcgtccggttgaggaatcgctcgctcgctcgctcgctcgccggcggcgcggacgaggagggggcgagatgttcttccacatcgtgctggagcggaacatgcagctgcacccgcggcacttcggcccgcacctccgcgacaagctcgtctccaagctcatcaaggacgtcgagggcacctgcagcgggcggcatgggttcgtggtggcgatcacgggggtggagatgtcggcaaggggctcatcagggagggcacgggctacgtcaccttcccggtcaagtaccagtgcgtcgtcttccgccccttcaagggcgagatcctggaggccgtcgtcaccatggtcaacaagatggggttcttcgcggaggctgggcctgtgcagatcttcgtgtccaaccatttgattcctgatgatatggagttccaatctgnggatgtgccaaattatactacttctgatggatcggtgaaaattcagaaagataagtggggtcggttgaagattattgggacacgtgttgatgcaacagaaaattttgcatggcacaataaaagatgac

SEQ ID NO: 405854 - DNA, 472 bp, Oryza sativa nipponbare
cccacgcgtccgcttcctcctccccaaaccctagccgccgccgccggcgtactcgagagaaacatcagcatccatggcgggcaagggcgagggtccggccatcggcatcgaccttggcacgacctactcgtgcgtgggcgtttggcagcacgaccgcgtggagatcatcgccaacgaccagggcaaccgcaccaccccctcctacgtcggcttcaccgactccgagaggctcatcggagatgctgccaagaaccaggtcgccatgaaccccatcaacaccgtcttcgatgccaagcgtctcattggcaggaggtttagcgatgcttctgttcagagtgacattaagctctggcccttcaaggtgattgctggacctggtgacaagcctatgattgttgtccagtacaagggtgaggagaagcagtttgctgccgaagagatctcctccatggtcctcatcaagatgcgtgag

SEQ ID NO: 405855 - DNA, 490 bp, Oryza sativa nipponbare
agttgacaaatggttcatcagaaggtggaaaggataatgcaaatgaagatggtcctgaaaacaacccacagtacacgactgtttatgttggcaatcttcctcatgatgtcaacagcaatgatgtgcacagatttttccattcacttggggttggttcaattgaggaggtgcgtgtaacgcgtgataaaggttttggctttgtgcgttacagcacccatgaagaagctgctctagcaattcagactggtaatggacaacttattggcggtaggcagatcaagtgttcctggggaagcaagccaactccaccagggacagcattcgcgcccctaccccctccggcaccagcaccattcaatcctggcatgtcggcgaccgacctcctagcctacgagcgcaccctggcgctgagcaagatggcagcgaacccggccctgatgagtcagcacgccgccctaaagcaggctgccgccatggggatgggcgccgg

SEQ ID NO: 405856 - DNA, 492 bp, Oryza sativa nipponbare
cggacgcgtggggtcggtggagcagtactcggcggtgccgtacgtggcgacgctgctcaactgcatgatgtgggtgctgtacggcctccccgcggtgcacccgcacagcatgctggtcatcaccatcaacggcaccggcatggccatcgagctcacctacatcgccctcttcctcgccttctccctcggcgccgtccgccgccgcgtcctcctcctcctcgccgccgaggtcgccttcgtcgccgccgtcgccgccctcgtcctcaacctcgcccacacccacgagcgacgctccatgatcgtcggtatcctctgcgtcctcttcggcaccggcatgtccgccgcccccctctccgtcatgaaaatggtgatccagactaagagcgtggagtacatgccccttttcttgtccctggcgtcactggtcaacggcatctgctggactggctacgccctcatccgcttcgacctctacatcacgatccccaacgg

SEQ ID NO: 405857 - DNA, 345 bp, Oryza sativa nipponbare
gggtcgagctacgcgtgctggtggacataaaggtggcgcctggatcacatgcaactgaaactgcagtgaacaagcaactgaacgacaaagaacgtgttgcagctggtctggaaaatccaaacctggtggacattgttgaggagtgcttgtcaccaacgtttgcttgagacctgaatacaagtatacaactgggagcctgtgtgttgaaatgtttcaaaactacactgaattactctactacgtgttgcatgaccttgtcatttgagataccttatgtagtgcagtgcttttgcattaaactttatatcattacttttcatatataatagttcatttttttttatt

SEQ ID NO: 405858 - DNA, 485 bp, Oryza sativa nipponbare
cccacgcgtccgaccacgcgtccggccacgcgtgcggcgaagctatgcgttctctaatcgtcttgtcaagatgcagatattcgttagagaccctcactggcaagaccatcaccttggaggttgagtcctccgatacgattgacaatgtgaaggctaagattcaggacaaggagggcatccctccggaccagcaacgccttatcttcgctggcaagcagcttgaggatgggcgtactctcgcggattataacatccagaaggagtccaccttgcaccttgttctccgccttcgtggaggcatgcaaatattcgtgaagaccctcaccggcaagaccattaccctggaggtcgagtcctccgacacgatcgataatgtgaaggccatgatccaggacaaggacggaatcccaccagaccagcagcgtctcatctttgctgagaagcagctcgaggatggccgcacccttgcagactacaacatccaa

SEQ ID NO: 405859 - DNA, 470 bp, Oryza sativa nipponbare
  unsure (1)..(470): unsure at all n locations
cccacgcgtccgcgaaggggagggggagcgaagctttgcgttctctaatcgcctcgtcaagatgcagatattcgttaagaccctcactggcaagaccatcaccttggaggttgagtcctccgatacgattgacaatgtgaaggctaagattcaggacaaggagggcatccctccggaccagcaacgccttatcttcgctggcaagcagcttgaggatgggcgtactctcgcggattataacatccagaaggagtccaccttgcaccttgtcctccgccttcgtggaggcatgcaaatattcgtgaagaccctcaccggcaagaccattanccctgaggtcgagtcctccgacacgatcgataatgtgaaggccaagatccaggacanggagggaatcccaccagaccagcagcgtctcatctttgctgggaagcagctcgaggatggccgcacccttgcagactacaaca

SEQ ID NO: 405860 - DNA, 371 bp, Oryza sativa nipponbare
caaaaaaggattgagttatttcgagaaatatattaaaccaactccaatccttttaccaattaacatattagaagatttcacaaaaccattatcgcttagttttcgacttttcgggaatatattggcggatgaattagtcgttgttgttcttgtttctttagtccccttagtagttcctataccggtcatgtttcttggattatttacaagcggtattcaagctcttatttttgcaacgttagccgcagcctatataggtgaatccatggagggtcatcattgaattgactaggtttcaaaatagtcttttttttagcttaactcaattcatgcatgggtgcggaaaattcgcttggttggaaaacaaaata

SEQ ID NO: 405861 - DNA, 521 bp, Oryza sativa nipponbare
cccacgcgtccgcccacgcgtccgcgcgacgccaaggccaggtacgtcaagttccactggaagcccacctgcggcgtcagctgcttgatggacgacgaggccacgctcgtcggcggcaagaaccacagccacgccacccaggacctctacgactccatcgccgccggcaacttccccgagtggaagctgttcgtccaggtaggtgatcatccagaaattaacgcctatacgatctgagttcgaagccgcagtactccttctaattaattatttaatactgttaggtgatcgacccggaggaggaggagaggttcgacttcgacccgctggatgacaccaagacatggccggaggacgaggtgccgctccggcccgtggggcgcctcgttctcaaccgcaacgtcgacaacttcttcaacgagaacgagcagctggcgttcgggccggggcttgtggtgcccgggatctactacttcgacgacaagatgctgcaatgcacggtgttcgcgtacgccgacacg

SEQ ID NO: 405862 - DNA, 360 bp, Oryza sativa nipponbare
  unsure (1)..(360): unsure at all n locations
gcgcccacgcgtccgcccacgcgtccgcccacgcgtccgcccacgcgtccgcccacgcgtccgcccacgcgtccggatgcacgcatcttctgttgtcgttgggccatcttttgtatgcatcctattgttaattactagtacatgatatccaagtgatcatcagcaaggctacagaaattctgtaatacgataaattaaaagaaaccaaaatggagcctgcatatgtgtaacttaattaatgtactggcgtattaatgccactgctgcatgttgtaatactccatcnaanaaaaaaaaaaaaaaataaaaaaaaaattaaataaataaaataaaaaataaaattattttaaaattataata

SEQ ID NO: 405863 - DNA, 450 bp, Oryza sativa nipponbare
gtgtactcccttgactatgctaggacaaggttggccaatgatgcgaaggctgccaagggaggaggtgaaaggcagttcaatggccttgtggatgtttaccgcaagactctcaagtcagatggcattgctgggttgtaccgtggatttaacatctcatgtgttggaatcattgtctaccgtggtctgtactttggaatgtatgattctctgaagccagttgtactcactgggtctctccaggacaatttctttgcaagctttgcccttgggtggctgatcaccaacggtgtaggtcttgcctcttaccccattgataccgtccgcagaaggatgatgatgacctctggagaggctgtcaagtacaagagctccatggatgctttctcccagatcctgaagaacgagggtgccaagtcactgttcaagggtgctggtgcccacatcctacgt

SEQ ID NO: 405864 - DNA, 383 bp, Oryza sativa nipponbare
cggacgcgtgggcgccggcggcggcggcggcggcggcgctgcctagcaagtagaataccaagatacggcacagaagagcgatgaggagccgcagccccagcaagaggagaaggcatggcagcaggggaagaagccctccaagctcacgacatggctgtgccaaggataaggaaggtgctgctgtaagcctcttcgtcagcaaccttccgcgaagctgcagacctgaggatgtccaagttccatttcaaaagtttggtcctgttcgggatgtttatctgccaaaagactacaacactggggagccaagaggatttgcatttgtggagtttgctcactcttctgatgcttctaaagcgcgatatcacatgaaccgtaagatgctt

SEQ ID NO: 405865 - DNA, 516 bp, Oryza sativa nipponbare
cttccacatctccacccaaattccaaatctctcggtgatcggagcggttagctgcggcgatgtcggggcgcggcaagggaggcaaggggctgggcaagggcggcgcgaagcgccaccgcaaggtgctccgcgacaacatccaggggatcaccaagccggcgatccggaggctggcgaggaggggcggcgtcaagcgcatctccgggctcatctacgaggagacccgcggcgtgctcaagatcttcctcgagaacgtcatccgcgacgccgtcacctacaccgagcacgcccgccgcaagaccgtcaccgccatggacgtcgtctacgcgctcaagcgccagggccgcaccctctacggcttcggaggctagacgagtacagattcgatggtgttgggcgtagcagcgctagcattattatgtcgtgtgctccgtgtgtgtcgttgtgtctgtgactccctgtgttctaggtcgtcggtgtgtttcatcaagtttcgacttctggtcgacctgatgt

SEQ ID NO: 405866 - DNA, 555 bp, Oryza sativa nipponbare
  unsure (1)..(555): unsure at all n locations
caaactctctctgtttgaagccacggagaaaaagcttgggtgatttcttggaagcgaagagtgaggggagaagaagaagaagaagaagaagaagaggggggaggaggaggagcagcatggctgagcacaaggaggagcagtcggtgatggagaagctctccgagaagctgcacggcgactcctcgtcgtcttcctcggactcggacgacgacaagaagggttcctcctcgtcgtcggcggcggcggccatgaaggccaagatctaccgcctcttcggccgcgagaggcccgtccactccgtcctcggcggcggcaagcctgctgatctcgtgctatggaggaacaagaagatctccggtggggtgctcgccggagccacggtcatctggctactcttcgagatcatggagtaccaccttctcaccttggtgtgccactgcctcattctcttcctggctgtcctcttcctctggtccaatgcctncactttcatccacaagtccccttcaaacatttctgaggtgaaaaattcagaggacttgacagtaaacattg

SEQ ID NO: 405867 - DNA, 433 bp, Oryza sativa nipponbare
cccacgcgtccggcagattacttggcatcagcatggcgttttaagacgattggtccgaccgtaccatccttctacttggatgacgatcgcttacaaccaaacaagaactatgggttcaacatttctgacagcacttcaccttgcttggcgtggctagataatcagcccccttgctctgttgtctatgcttcctatgggactgttgctgatcttgacccaactcagttagatgagctgggcaatggattttgcaattccggtaaaccgttcctttgggtcgtgaggtcctgtgatgaacacaagctatcagaagaactccgtgacaagtgcaaggagaggggcctaatcgtttcttggtgtccccagcttgaggtcttatctcacaaagccacaggctgtttcttaactcactgtggatggaactcaacaacag

SEQ ID NO: 405868 - DNA, 474 bp, Oryza sativa nipponbare
aatctccagctctcttcccccccgcgtccagttccatctaatcagcttctcgtcgagatgggccgcaagttcttcgttggtggcaactggaaatgcaatgggaccactgatcaggtggacaaaattgtgaaaattctgaatgagggacagattgcttctacagatgtcgttgaggtggttgtcagcccgccttatgtgttccttcctgtggtcaagagtcagctgcgcccggagatccaagttgctgctcagaattgttgggtgaagaagggcggggctttcaccggtgaggtcagcgctgagatgcttgtcaaccttagtattccctgggttattcttggacactctgaaaggaggagcttgttgggtgaatcaaatgagtttgttggagacaaagtggcatatgcgctctctcagggcttgaaggtcattgcatggtgtggtgagaccctcgagcagagggaatctggatcg

SEQ ID NO: 405869 - DNA, 550 bp, Oryza sativa nipponbare
  unsure (1)..(550): unsure at all n locations
cccacgcgtccgcccacgcgtccgcccacgcgtccgcccacgcgtccgggaagagccccaatggcacaattaggaatattatcaatggcactgtattcagagagccaattatatgcaaaaatgtcccaaggcttgttccaggatggactaagcccatttgcattggaaggcatgcttttggtgatcagtaccgagcaactgatgcagttctgaaggggcctggcaagctcaagctggtttttgagggaaaggatgagcagattgatctggaggtgttcaacttcactggtgctggaggagttgctttgtctatgtacaacactgatgagtcaatccgagcttttgctgaagcttctatgacaactgcttatgagaagaaatggccgctttatcttagcaccaaaaacacaatcctgaagaaatatgatggaaggttcaaggatattttcccaggggtctatgaagctgggtggaaatccaagttngaggctgccggaatatggatgagcatcgtctcatcgatgacatggttcttatgcacttaagagtg

SEQ ID NO: 405870 - DNA, 587 bp, Oryza sativa nipponbare
  unsure (1)..(587): unsure at all n locations
ataaatcgcagcgttccccgtccctctctctcctttcctcctccctccgccgccgccgccgccgcctccgcctcctctttgtttctcctcttaggggctagggcttggctttcgagaggcagcaccgccgccggggcaatcgagcaggcggaggggaggagctaatcaaatcaagtcaaatcgaatcaaatcaaaatcaaattcaaattcgactagggcagcaggaggaggatggtttccctgtcgacgtggtttcgctacgccgcgcacaagttcgagtactccatctccctctcatggaagaagtataacgttggccagatcaacagcacccagttaaccgatgccgtctggaagaacttcttccaaggcaagctcacctacatgcattggaacaaggggggagaagccatggcccccatcgaatctactacgggaggaaccctccttgttagaaagctcgtcnaattgtctccaacacaagtctttggtggtgatttgtcttactaaaagacccagagaaatctgatgatttaatcgntcgacgattggctgccctagaaggtatgagatggtctctatgatga

SEQ ID NO: 405871 - DNA, 599 bp, Oryza sativa nipponbare
  unsure (1)..(599): unsure at all n locations
agagactctgaattacataatctgtgcaatattcttgcacttgagggtcttccggataaagtctatacgcttgctgcggaggtggtaaaaaaattggctagtgtggcggtatcccaccggaaattcttctctatggagctagccagtgctgctcagagcttaagttcttcagcagtagaggagcttgtaacattgaagaacacacaaatgcttgggctcaattcttgttctatggctggggctgccatcctgcgggtcttacaggtcctatctacattgacctcagatatgagtggtaatagccaggatcaggctgtgggacaggaagaacagtctattntgtgggatttgaatatatcacttgagcctttgtggcaagaactaagtgactgtataagcactacagaggcaaaacttgttcataattcaagtttcaatccccaggttcctttgatggatgcaatagaaagtggtgcctcatcctttacttgcccacctctttctccaggcacacaacgccttttgccatttatagaatcctcttttgttctgtgtgagaagcttcaaacaagccaagcagttggccatctgatccaatg

SEQ ID NO: 405872 - DNA, 402 bp, Oryza sativa nipponbare
gagataaactcggcagccaccctcaccctcgtctctctcctcaccctccccattcttctggcgttgctgacccgcaagtcgtcgtcaaagaagaggaggcctccagggccatggaacctccccttggtcggcggcctcctccacctcctccggtcgcatccgcaggtcgcgctccgcgagctcgccagcaagtacggcccggtgatgttcctccggatggggcagatcgacacggtcgtcgtctcatcgccggcggcggcgcaggaggtgctccgcgacaaggacgtcatgttcgcgtcgcggccgagcctcctcgtctcggagatcttctgctacgacaacctcgacgtcggcttcgcgccctacggcgcctactggcggatgctgcgcaagctctgcacg

SEQ ID NO: 405873 - DNA, 432 bp, Oryza sativa nipponbare
ctcacactctacttgtactaggtagatcgctagaacaatggcgtccggtggcgaggagaagaagagcaggatcctggtggtgggcggcacggggtacatcggccggcacgtcgtcttggccagcgcgcggctgggtcatcccaccaccgccctcgtcagggacctctccccctccgaccccgccaagtcgcagcttctccagagcttccgcgacgccggcgtcaccctcctccacggcgacctctacgaccacgccagcctgctcagcgccgtccgcgacgccgacgtcgtcatctccacgctgggcgcgctgcagatcgccgaccagaccaagctcatcgccgccatcaaggaagggcgcggtggcaacgtggccgggttcctgccgtcggagttcgggctggacccggaccacacggggcgcggggagcc

SEQ ID NO: 405874 - DNA, 493 bp, Oryza sativa nipponbare
  unsure (1)..(493): unsure at all n locations
ctgaaggtgatattcagattttcagagtgagtgctcgtgtgttgtgcgatcagtgcccgcagttcgatcgatccgtgttgatctttgaaagaaagatgtcgtgctgcggaggaaactgcggctgcggatccggctgccagtgcggcagcggctgcggaggatgcaagatgtacccggagatggctgaggaggtgaccactacccagactgtcatcatgggtgttgcaccttccaagggtcatgccgaggggttggaggccggcgccgccgccggagcaggagcagagaacgggtgcaagtgcggcgacaactgcacctgcaacccctgcaactgcggcaagtgaagcaagcaacctcctgacgaaaccaaggagatggaagggcctagtactgctaagctagtagtttgatccagttacaagtgatgagttattgtcactggtaacttgtgtttnctgagtttggatctaagacctgagactgaagaaatgca

SEQ ID NO: 405875 - DNA, 573 bp, Oryza sativa nipponbare
  unsure (1)..(573): unsure at all n locations
ggaaaccagtgcagagaatgtgctccatatgtcctggcaagatggtggtgggcacagcggttctagcactgttcttgctgatcagcctcatcaccatcagggtcttctccaccctcacccagatcagggtgaccattccctgcagattgggtattcttcttttcttccagttacagttaatttcttgcctgaaaaaattcccaaaatgcagaggtcatgttctttttaaactattcactaaattattaaacagagtatttgctcaagttcgaacaatacactttcttaaaagatggtttgctatgtattacttagaccacttatctcgatttacttgtatattttattttttttcaaatatttaatttataactatataatcgagtatatcgataatcctgacaataattcgcccaataatctagatcaaattgggcctaattntgtctttgttattcagtaatntaaaatttatgtatatatactccatcgttttcatagctntaatttaatttttccttggtgaaggtatcatcaccctcatgctcaccatcaccaggcctacatggacca

SEQ ID NO: 405876 - DNA, 594 bp, Oryza sativa nipponbare
  unsure (1)..(594): unsure at all n locations
ccgagacgagacaaagatcatggcgactcccaaaccctaaatcccgctctcactggagagcagaagcaagtaagaggtggagcaatggcgcggcggagcaaaggcggcggcgcggagggggacggcatgcggatgcaggtggtgtggcggaagggcgcggtgcggctggtgctcgtctccgccatcgcctgggcgctgctcgtcatcctcgccctcgccttccacctctggtcctgcaactccgacgtcccctttctctcagctctctgtaaaaaagacagtaaagttctgtatgcgttggactccatacgatcctcatcaaagccacttcaccgctgccccatacctgttgcagatgatcctgattctattaccattccaaagagaactcccaacacaatcgtgaaaaggttgtcctacataacagttgacaaacaggacanagatccatcaccgctgttcggaggacgtcaaagctggaaacagagggaggacagcttcaaactgaatgctacaatgaaggcaactactttcctttaatggggttggatatcttcttatcttcttaagtataatatatgatcctctgataag

SEQ ID NO: 405877 - DNA, 433 bp, Oryza sativa nipponbare
cccacgcgtccgcccacgcgtccggcttagctcagctcaaccacatctcgaactaaccaactaagctaaagctaagctagcttcaccgtcatcctccactgacacatggggagcttggacgccaacccggccgccgcctacgccgcgttcgccgccgacgtcgagcccttccgcccgctcgacgccgacgacgtccgctcctacctccacaaggccgtcgacttcgtctacgactactacaagtcggtggagtcgctcccggtgctccctggcgtcgagccgggctacctcctgcggctgctgcagtcagcggcgccgtcgtcgtcggcaccgttcgatattgctatgaaggaagctcagggaggcggtgtccccgggatgacccactgggcgagcccgaatttctttgcgttctttccggcgacgaatagcg

SEQ ID NO: 405878 - DNA, 513 bp, Oryza sativa nipponbare
  unsure (1)..(513): unsure at all n locations
cccacgcgtccgcccacgcgtccgcccacgcgtccgcccacgcgtccgcccacgcgtccgcgccttctctcgtgccgccgatctccatcgccggcgtgcggtgcaccgagatccacccgagatgtggcgcggctgcgtctcgcgtggcctcaggagcctctccaagggcaagggctcctcctcctccgcccccgtctccgccgccgctaggctcttctccaccgcctcgtcgtcgtacacggtggtggatcactcgtatgacgcggtcgtggtgggagccggcggcgcggggctccgtgcggcgatcgggctctccgagcacgggttcaacacggcttgcatcaccaagctctntcccccgcggtcgcacaccgtcgcggcgcagggtggcataaatgctgctcttggaaacatgacggaagatgactggagatggcatatgtatgacactgtcaagggtagtgattggcttggtgaccaggattctattcagtatatgtgcagagaagcacc

SEQ ID NO: 405879 - DNA, 336 bp, Oryza sativa nipponbare
ggcttctcctccccctctttaccttttcctcctcggttcggttccgtggttcgtctagggtttagtgggttgagatggcggcgccggatgtcgagtaccgctgcttcgtcggcggcctcgcctgggccaccgacgaccgctccctcgaggccgccttctccacctacggcgagatcctcgactccaagatcatcaacgacagggagacggggaggtcacgtgggtttggcttcgtcaccttctcctccgagcagtctatgcgcgacgccatcgagggcatgaacggcaaggagctcgacggccgcaacatcaccgtcaatgaggcccattcccgcc

SEQ ID NO: 405880 - DNA, 429 bp, Oryza sativa nipponbare
cccacgcgtccgcgaatccagcagcagaagcagcagcagcagctcagccgccgccgatggcgtccacgatcatggccccaacctcccgcgtcctcgccgccaagacccccttcctcggccatccccgcccctccaatgcccccgtccgcgacatcgccgccgccgccaccggccgcatcaccatgagcaaggagctgtggtacgggccggatagggtgaagtacctggggccattctcggcgcagacgccgtcgtacctgaggggcgagttcccgggcgactacgggtgggacacggcggggctctccgcggacccggaggcgttcgcgaggaacagggcgctggaggtgatccacggccggtgggcgatgctcggcgcgctgggctgcatcacgcccgaggtgctccagaagggggtgcgcgtcgact

SEQ ID NO: 405881 - DNA, 247 bp, Oryza sativa nipponbare
tgacgaccatggaggtggcggcgccattgttgcagaggtcgaggctgacctccatgccggagttgccgcagccgacgacgagcaccttcttcccggcgaactcgtcccctctcttgtagctgctggtgtgcatcacggcgccgcggtaggcgcccacgccctccgccggccacgccgccaccgcgttctcgccggtggccaccatcagccaccgcgacaggaactccgtctcgcctccggcgcctcc

SEQ ID NO: 405882 - DNA, 567 bp, Oryza sativa nipponbare
  unsure (1)..(567): unsure at all n locations
gacagacttgataaccctcgttccccaaattcgcaatccctctctctcccatggccggctacccgccaaaccccggctccggctacccctacggcggcgccggcggctacggtgccccgccaccgccctacggctcctcccccgccccctccgccccgccctacggcgagaagcctcccaaggaaggtaagacctcctcctcttccgccccttactacggcggcggaggcggctacggcgccccgccctccacccagccctacggcagcggaggcggctacggcgccccaccctccacccagcggccccagtcctacggcggcggctacggggctccgccctccagccagccgtacggcgcgccatacggngccccgccgccctcgtcgncgccgtacggngcgcccggcgggtacggcagcccgttcgcgtcgctggtgccaacggcgttcccgcccgggacggatcccaacgtggtggcgtgcttccaggcggcggaccgcgacggcagcgggatgatcgacgacaaggagctgcagtccgcgctgtccgggtacagtcagagct

SEQ ID NO: 405883 - DNA, 502 bp, Oryza sativa nipponbare
cggacgcgtggggtaaatatcaaaattattaaattacgaatttcaaatctaaattaaagtattgcagctggtttgttctggcactattcaccaccttctaaccagttatgggctggttaccagttgttttccaaacgctgtcaacatgcactagttcttaaattggtttcctccataaaaacaaacaaaagtttcctaaattgtaggtcattatcattgatccatgtaacctgaattttttttccaacagaactttgttttgaatcatttggtctcttttaggtctcacggagacttgtgctggatctttcgtctccctaccaaatcagatgtgcatgatagggactgttggtcctccagtgccaaatattgatgtctgcctggaatcagtgcctgaaatgaattatgatgcacttgcaactagaccgcgtggcgaaatctgcatcaggggagaaacagtattctcaggatactaacagcgtgaagaccttacaaaaagatg

SEQ ID NO: 405884 - DNA, 472 bp, Oryza sativa nipponbare
cccaagcagatcccgacgatgctgcccacgacggcgtccaaagggcgcggcgccgcccgctctgcgccgccgctcttcggcccctacctccgccgcatcgtcaagtggcaacaaatggatatcgagtacacattttggcaaatggtccatctctgtacttcaccaaaagtagtctatcagcacaccaaatatcacaagcaaacaaagaatcagtgggctcgggatgatcctgcttttgttgtcattctaattcttttccttgtgtttgcaacatcagcttactgtgcagcgtatggagagagtccttcacatgctgctttaacaatcacttcagttgtgcttgtccatttcttgtttgctgggatagttctggccacactttgctggtttcttacaaattcttacttgagggaggaacctaacagtcatgtggttgagcaacgtgtggagtggctctatgcatttgatgttc

SEQ ID NO: 405885 - DNA, 536 bp, Oryza sativa nipponbare
cgcacccacgcgtctctctccctctctctccgccgccgccgccgccgcagccagccagccatccagccatgtcgggttgggacgagggcgccgtcttctacagcgaccaggcgcagttcccgcgcggcggccccggcggcgacccctccgccgacctcacccgccactccgccctccgcaagttcaaggagttcctccgcggcttcaccggcccaaccggcgacttcccctaccgcgagagcctggtgcacaaccgcgaccatgtcaccgtcgccatcgaggacctcgacgccttcgacgccgagctgtccgacaagatccggaagtctcccgctgattacctaccgctgtttgagacggctgcgtccgaggtcctcgcgagccttcggtccaaggtcgctggagagaccggcgagatggaggagcccgccaccggcgacgtgcagatcttcttgttctcaaaggagaacttgctgtccatgaggtctattggggcggattacatgttcaagctggggaagattggcgggatcaca

SEQ ID NO: 405886 - DNA, 421 bp, Oryza sativa nipponbare
  unsure (1)..(421): unsure at all n locations
ggtggagctagctcgatctcgccgcgcgcgctcagctcgtcgacaaggcagcgtgcacccaccaagatagcgggatgatccagtgagcgcgtggaggcggtgtttgattctagattgttctagaaccgaacgagcgagcttagctagctagctagctgctgctgcttcgatcgatcggtcgttgcctcatgcaggagttccagtccatcccggggctcgccgggcggctgttcggcggcgcggcggcggctgacatccggcgcgcgcaggcgcagcaaggccccggggtgggtgcggcgggataccgtcgccggaggccgtgagtgcncgcggtgcgagtcgaccaacaccaagttctgctactacaacaactacaacctctcgcagccgcgccacttctgcaagagctgtccgcggtact

SEQ ID NO: 405887 - DNA, 392 bp, Oryza sativa nipponbare
ggctcacctcatggagatccagatcaacggtggcactatcgtcgacaaggtggactatggctacacgttctttgagaaggaaatacctgttgatgcactcttccagaagcgcgagatgattgacatcattggtgtcactaagggtaagggttatgaaggtgtcgtcactcgttggggtgtcacccgccttcctcgcaagacccacaggggtctccgcaaggttgcttgtattggtgcctggcatccagccagggtgtcctacactgttgcccgtgctggtcagaacggataccaccaccgcactgagatgaacaagaaggtttacaagattggcaagtctggtcaggagtctcatgcggcctgcaccgagttcgacaggactgagaaggaca

SEQ ID NO: 405888 - DNA, 377 bp, Oryza sativa nipponbare
gtacatttaaggacatcttcaatgagcctcgttttattaaagctctggaaggggatgtcagcattgtgaatgacttgcctcaaagcctgcagtctgttccaagagctcggaagcactttacttcatggtctggtgctagttattatgaggaggtgaaacaactttggaaggatcacaaggtagttcacatcccgaaatcagattcacgacttgctaacaatggtcttccgattgatatccagagattaagatgccgctgtctttaccaagcactgcgtttttcagatccaattgagaaccttggaaagaagcttttggagcgtctaagatcacgtggaaaatttattgctcttcatctccgatatgaaaaagatatg

SEQ ID NO: 405889 - DNA, 471 bp, Oryza sativa nipponbare
ctcaccaccaacatggcgacgacgacggcggcggcgatggtggtggcaatgtcggtgctgctgctgggtggcggcgaggcggcggcgccgcggaagccggtggacgtggcgttcgagaagaactacgtgccgacgtgggcggaggaccacatccactacgtggacggcgggcgcgaggtgcagctctacctcgacaagtccaccggcaccggcttccagacccggggctcctacctcttcggccacttcagcatgcacatcaagctcgtcgccggcgactccgccggcaccgtcaccgccttctacctgtcgtcgcagaactcggagcacgacgagatcgacttcgagttcctggggaacaggacgggggagccgtacatcctgcagacgaacgtcttcttcggcgggaagggggaccgggagcagaggatctacctctggttcgaccccaccaaggactaccactcctac

SEQ ID NO: 405890 - DNA, 465 bp, Oryza sativa nipponbare
  unsure (1)..(465): unsure at all n locations
gccgcggcgacgtcgagggaatcggggcggngccggagctagctagttcgccgccggcgagacgcgtgtgccatggtggcagcggcggggacgatggagctggagatcctggggatcaacttcgggtgcgtcctcgcggcgctcgcggacgccaagatcccggagaaggactgcctgctcccgctcgcctccaagctgctcggctacgccatcgtcgccgcctccaccaccgtcaagctccctcagatattaaagattttgaagcacggaagtgtaagaggacttagtgtagcatcctttgagcttgaggttgtcggctacacaattgctctagcatattgtattcataaaggactgccattttctgcgtatggggaactagctnttctgttaatccaagcaattaatttggttgcaatcatttactattactccccaccaatgggaaccaagacatggatgaaa

SEQ ID NO: 405891 - DNA, 461 bp, Oryza sativa nipponbare
ctaactcgtattcagcaaaaaatcagagccagcgcccaactgcaaacctcatgggtatgcatgcacagataccttcgtcgggaatgggtttgacatctcctagttatcataccaggatgtacccagacaacagattatatgggcagtatggtcagtatgggaacgcacttaaaactgggcttggtttcggatcaaatatgtacaactccagaaataatggacggtggggaattgttgatagcaagtacaagcctagaggtcgtgcatcttttggttttggcagtgagaaccaagatggcttcactgagcttaacagaggaccaagatctggaggattcaagcaccaaaaacagtttggaccttctgtcacttatgctggaagggccaagccctccctcagtcggaaacaggagatagtgccatccagataggccaattccccaggaggtttcagtacatac

SEQ ID NO: 405892 - DNA, 481 bp, Oryza sativa nipponbare
cccacgcgtccgcccacgcgtccgcccacgcgtccgaccgattgagggaaaaaaaaagagaaaaagaaaagaaaaaaaagaagaagaagagagaactcgaactctcgcctaccatttcgcccccctccgcaagcaatccaccactgcatcggcggcgagggctcaccggcggcgagccatgtgcggcggcgccatcatccaccacctgaaggggcacccggaggggtcgcgccgggcgacggaggggctcctgtggcccgagaagaagaagcccaggtggggcggcggcgggaggcgccacttcggggggttcgtggaggaggacgacgaggacttcgaggccgacttcgaggagttcgaggtggactccggggactcggatttggagctcgggggaaggagcgacgatgacgtcgtcgagatcaagccggccgccttcaagagggccctctccagagataacttgagcaccattaccact

SEQ ID NO: 405893 - DNA, 536 bp, Oryza sativa nipponbare
cccacgcgtccgcccacgcgtccgcacgattgcccatctcgtcttgcaaagaagataggagagaggaagctgaaaatcattggcccaagagaaaaccttgctaggctagcagggcacagcaagaacaaggccagaaccaatggcggcgacagctacacttgctgccccctccttcttggcacatcagtcgatcttgagccacaagcctctgaggaagcttggtctatccctggaactgccaagaaccagatctgtcaaaattagagctgcaaagctgcctgcaggggttgaggtgccgaggaagcagccaaagctgagtgagcccttcctgggtttcaccaggactgcagagatatggaactccagggcctgcatgattggcctcattggcaccttcatcgtggagctggtgctgaacaagggcattcttcagatgattggtgggtgagcggcaagggacttgatctccctctttaaatgctagtccatatatatttgtaccatatatactatgagatttatcagtgaaattatag

SEQ ID NO: 405894 - DNA, 469 bp, Oryza sativa nipponbare
cccacgcgtccgtggttcccgaagtttggggtgtaaaagataaaatcaagcagttttcagaaacttttaggagtggatcatgggttggggcaactggtaaagcattgacaaatgttgtgtcagttggaataggtggtagctttcttggtcctctgttcgtgcatgctgccctccagacagatccagaagctgcagaatctgccaaagggcgacagttaagattccttgcaaatgttgaccctgttgatgttgcacgaagcatcaaagatttagatcctgaaacaacacttgttgtgttgtctcaaagaccttcacaacagctgaaacaatgttaaatgctcgaactctcaaggagtggattgtctcttctcttggacctgatgctgttgcgaaacatatgattgctgtcagtaccaatcttgagcttgtgggagagtttggaattgaccctaaaaatgcttttgcattt

SEQ ID NO: 405895 - DNA, 427 bp, Oryza sativa nipponbare
ccaccccgcgcggcgccggcgcccgtccgtcctctcctctcctgcctccgccgcatcctcgcctcgcctcgccgaacacacaagattttgaggatgccgagggccacgagcgatgcgaagcttctaattcagtccctgggcaaggcttatgctgccacaccaacaaatctcaagatcattgacctctatgtggtctttgcagtcgccactgcccttattcaggttgtttacatgggaatagtggggtcatttcctttcaactctttcctttctggcgtcctctcatgcataggaactgcagtcctcgctgtttgccttcgtattcaagttaacaaagataacaaggaattcaaggatcttcctcctgaaagggcgtttgcaagattcgttctgtgcaatctggtgctccacttggtgatcatgaact

SEQ ID NO: 405896 - DNA, 214 bp, Oryza sativa nipponbare
  unsure (1)..(214): unsure at all n locations
gtttctcacgtctctcgctgccgccgccgccgccgccgccgccgcgagaagccgtaggaggaggagagagagggagggatggcggagaagaagcagcgccccggcggcgcgaggaaggacgaggtggtcacccgcgagtacaccatcaacctccacaagcgcctncacggatgcaccttcaagaagaaggctcctaatgccatcaaggagatca

SEQ ID NO: 405897 - DNA, 361 bp, Oryza sativa nipponbare
gcaagagagaccattggaagggtggctgcaggagctcttgcaaagaaaattcttaagctcaaatctggagtagagatcttggcgtttgtgtccaaggtgcatcaagttgtactaccagaagatgccgttgattatgacactgtaacaatggaacagatagaaagcaacattgttagatgtcctgatccagaatatgcacagaagatgattgatgcaatcgataaagtacgagttagaggtgattcgattggtggtgtggtcacatgcattgcaagaaatgttcctcgtgggattggcgctcctgtatttgacaaacttgaggctgaattggcgaaagctatgctttctcttcctgcaagca

SEQ ID NO: 405898 - DNA, 411 bp, Oryza sativa nipponbare
  unsure (1)..(411): unsure at all n locations
ctccaaccacgccgcgattcccccatttttacctcactacctccgcccccgaaaatcccaacaattttttgatccttcgccgccggcaagcgccgcggagggttccccccagggagtggagaggagaggagcgggcgggttggtgttgggaagggagggatggggttggaggaggacacgccggtgacgaagacggtgaaggccgcggcgactgggctggccgcggggaccatctggggcacggtcgtcgcgacatggcacgacgtgccccgggtcgagcgccacgttgcgctcccggngctcatccggacgctcaagatgtgcggcagctacggngccacgttcgccgccgtcgggggcctctacatcggcgtcgagcagctcgtgctgaggcagcgcaagaagaacgac

SEQ ID NO: 405899 - DNA, 421 bp, Oryza sativa nipponbare
ggaagccacaaaacgaacgcgaactcgagcggcgaagaagaagagagagagagataaggcggcggcagcgagatggcggtgacgatccagtccgtgaaggcgaggcagatcttcgacagccgcgggaaccccacggtggaggtggacgtgggactcagcgatggcagcttcgcgaggggcgccgtgccgagcggtgcttccaccggaatatatgaggccttggagttaagagatggaggatccgactatcttggcaaaggtgtactcaaggctgtgagcaatgtaaacactattattgggccagcactcatcggaaaggatcccactgagcaagttgacattgataacttcatggttcaacagcttgatggaacctccaacaactggggctggtgcaaacaaaagcttggagcaaatgcta

SEQ ID NO: 405900 - DNA, 561 bp, Oryza sativa nipponbare
accctctccacctctccatatccggcttccagacgcttctctcctcctctaatctcaagtctctgtctcgtcgtcctcgcatctccactcgccatgggcaagattaagatcggaatcaacggtttcggaaggatcgggaggctcgtggccagggtggccctccagagcgaggatgtcgagctcgtcgccgtcaacgaccccttcatcaccaccgactacatgacctacatgttcaagtacgataccgtgcacggccaatggaagcacagcgacatcaagatcaaggactccaagactctgctcttgggcgagaagccggtcaccgttttcggcatcaggaaccctgacgagattccgtgggctgaggctggtgctgagtatgtcgtggagtccaccggtgtcttcactgacaaggagaaggctgctgctcacttgaagggtggtgccaagaagttgtcatctcagccccgagcaaagatgcctcgatgtttgtctgcggtgtaacgaggacaagtcacttcagatttgatatggctcaatgctagctgaccacaactgctt

SEQ ID NO: 405901 - DNA, 411 bp, Oryza sativa nipponbare
  unsure (1)..(411): unsure at all n locations
cccacgcgtccgcccacgcgtccgactttattagcaccaaccccgtctccttcctccattcctccgccgctagaaccttctagaagctctcctcctcctcccatggcggcgacgatcgtgtccgtcaaggcgcgccagatcttcgacagcaggggcaaccccaccgtcgaggtcgatgtgtgctgctcagatggaacctttgcaagggctgcagttcccagtggtgcatcaactggtgtctatgaagctctcgaattgagggacggtggatctgattacttgggaaagggtgtttccaaggctgtcgacaatgtgaactcggttattgccccagctctgattggcaaggaccctacgtcacaggctgagctngataacttcatggttcagcagcttgatggaaccaaaaat

SEQ ID NO: 405902 - DNA, 524 bp, Oryza sativa nipponbare
caagattgcatggccttctgcagtgaggtggaggatgtcatctcgatgagcatgacagttgtcacatccctgctgaaaaaatacaaggtcgatccaaagctgattggtcgattggaggttggcagtgagacagtcatagacaagagcaaatccatcaagacttggctgatgcagattttcgaggaatgcggtaatactgacattgaaggagttgattccagtaacgcgtgttatggtgggacagcagcgctgttgaattgtgtgaactgggttgagagtaactcctgggatggacgctattggcctgttgtttgcacggacagcgcggtttatgcggaaggcccagctcgtccgacaggtggtgctgctgctattgcaatgctcattggtcctaatgctcctattgcattcgagagcaaatacaaagcttctcacatggctcacgtctatgatttctataagcctgatcttgcaagtgaatattcggtcgttgatggaaaactattccaaacatgctacttgat

SEQ ID NO: 405903 - DNA, 388 bp, Oryza sativa nipponbare
gtactcctcctcctgcttcccctccggcgacggcggcgcagatctccggttggaagttagggtgttcatcttgacacaaaatcatgccgaaatcaaactgtaccgaagcgaaaataagatatggattagctctccttccaattgatttatcgttctgtcaatattgatccgaatacgaaaattttaagtgctgttattttgaaggtttcggaaccggaattcggaattgcagtagcagtggatgcctttataaatcaagttcttgtccttggcttcaaatactcgatgtgtttcttggctaatcctaatccctagctgcttgtgtgttgcgtgtgcaatttctgacccttttggtgggggtatatcaacagagaaatctctagctttt

SEQ ID NO: 405904 - DNA, 429 bp, Oryza sativa nipponbare
gggtatcaagaatttcgtactgtcgctggaaggcattatgatacaatgaaaacatattatcagaaagctgccatggcatattccaaaggagaaaaatcttatgcctcctatctcgcagaggaggggaagcattaccgtgaattagctcgcatggaagatgagagagctagcagggaaatatttgaagccaggtaatttgcataactttcccagctattacttttaaatcacatctgcgtgctaatcttctgtttgcagaaataagcatataacgaatacagtgactattgacctgcatgggcaacatgttaaacaagccatgaggcttctcaaggttcacatgatgatttgtgtgtgcatgccaagggagtattctagtatgacccgattgggtgctacactgattatcagtgttaatattttttattc

SEQ ID NO: 405905 - DNA, 486 bp, Oryza sativa nipponbare
  unsure (1)..(486): unsure at all n locations
cccatgcgtccgcggacgcgtgggttccaaaccagcaggagtcncctcgcctcctccttcatcctcctcgtcgtcgccgcgggggtcgcctgagatcacattaacaatggtgaaggctgttgttgtgcttggtagcagtgagattgttaagggcactatccactttgtccaagagggagagggtcccaccactgtgactggaagtgtctctggcctcaagcctggtctccatgggttccatattcatgcacttggtgacaccaccaatggttgcatgtcaactgggccacactacaatcctgccggaaaggagcatggagcaccagaagatgagacccgccatgctggtgatcttggaaatgtcaccgctggagaagatggtgttgctaatatccatgttgttgacagtcagattccacttactggaccaaattcaatcattggcagagccgnccgtgtgcatgccgatcctgatgatcttggaaa

SEQ ID NO: 405906 - DNA, 444 bp, Oryza sativa nipponbare
cccacgcgtccggttctagatcgcgagcgggggcgctttttttttttttttacatgagtgaaacaaacattggtacataacgtccgagcatagcatttgcatgagctgatcagaagtcctcaagcatgtatcaagtgtaacaacagcctcgaggcaaacaaaaatcaagggaaatggaggaaaagtgaaacaaaaactcaaccatgtataacactacttattccttacaatcagtaaacatcctggtaaaatatatcatagcgaagtcttaagagagactagaaagaatataagggagcatatctaccgacgcttatctcgactgcgtaggggagcagaggaggcctgaagcatctgcaccaaccacggcaagctcacatatggtacaaagctgcccttcgatcgaaggaacaaaccgggagccacagtacgggcaggaaacat

SEQ ID NO: 405907 - DNA, 150 bp, Oryza sativa nipponbare
cccactcgtgggctgaagtattcttggcgctcggagcacaaattactcagattttaaaagatgatgataagtaccagtgtgctgaccctggacctattcgaggtttacttaaccactattcccagtttgtgtcattccccatatatacat

SEQ ID NO: 405908 - DNA, 459 bp, Oryza sativa nipponbare
cggacgcgtgggctcatcccagccgccgccgccgcagcctcctcctctcgccatctcccgtcctctccttcaagtcagctacctgcttaatcaaccatgggtaaggagaagacgcacatcaacattgtggtcattggccacgtcgactctggcaagtcgaccaccacgggccatctgatctacaagcttggaggtatcgacaagcgtgtgattgagaggttcgagaaggaagccgctgagatgaacaagaggtccttcaagtacgcgtgggtgctcgacaagctcaaggccgagcgtgagagaggtatcaccatcgatattgccctgtggaagttcgagaccaccaagtactactgcacggtcatcgatgcccctggtcaccgtgacttcatcaagaacatgatcacgggtacctcccaggctgactgtgccgtgctcatcattgactccaccactggg

SEQ ID NO: 405909 - DNA, 436 bp, Oryza sativa nipponbare
ctacgcactagtagtagcactctggtattctcccatggcgactgcgaccgaggaggttgccgctgcggctgctgccgccggcgaggcgccgccgccgccgccgccagcggtggtagaggaggcgaaggaggctttggaggcaccgaagccggaggaggcgccgaaggctgaggagggggaggagaagaaggcggagggtgagaaggagaaggagaaggcgaagaaggagaggaaaccgagggcgaggaagccccgatcggcggggccacaccacccgccctacttcgagatgatcaaggaggcgatcatggcgctggacgggaacggcaaggcgggatcgagcccgtacgcgatcgccaagtacatgggggagcagcacatgggggttctcccggcgaactaccggaaggtgctcgccgtgcagcttcggaacttc

SEQ ID NO: 405910 - DNA, 464 bp, Oryza sativa nipponbare
ctctgtttgtagatccgatgaacccatctctgaaattgcaggttgtctctgagtggatgaggccttctgatattgcgaaggaggtatctatcagttcacaaccgtgcttattttctggttctgtgaattcgtcagatgtgtgtcagggtcggttgggcgactgttggttcttgagcgctgttgcagttttgacagagatggcccgtatatctgaagttataatcactcctgagtataatgaagaagggatttacactgtcagattctgtatccagggtgaatgggtggcagtggtggttgatgattggatcccctgtgagtctccggggaaaccggcatttgctactagtagaaagcaaaatgagctgtgggtatccattcttgaaaaagcttatgcaaagcttcatggctcttatgaggcattggagggtgggcttgtgcaagatgctctagtggatctcaca

SEQ ID NO: 405911 - DNA, 505 bp, Oryza sativa nipponbare
  unsure (1)..(505): unsure at all n locations
cggacgcgtgggcggacgcgtggggttcatgtagtactacaacaacatggcatccataaatcgccccatagttttcttcacagtttgcttgttcctcttgtgcaatggctctctagcccagcagctattaggccagagcactagtcaatggcagagttctcgtcgtggaagtccaagagaatgcaggttcgataggttgcaagcatttgagccaattcggagtgtgaggtctcaagctggcacaactgagttcttcgatgtctctaatgagcaatttcaatgtaccggagtatctgttgtccggcgagttattgaacctagaggccttctactaccccataacactatggtgcatctctagtatatatcatccaagggagaggtataacagggccaactttcccaggctgtcctgagtcctaccaacaccagttccaccaatnaggccaagcccaattgaccgaaagtcaaagccaaagtcaaaagttcaaggatgaacatcaaa

SEQ ID NO: 405912 - DNA, 392 bp, Oryza sativa nipponbare
gcgcccacgcgtgcgcccacgcgtgcgcgcactcgtccgcaaatcttcaattgcgactactttctgcgaacttctgatcgaccattgcagaatccaactaattgtgtcttcagacttcttcagagcattctccaggacacttcgaacgaaacatggcgaacgcgacgtctggtgtggcggtgagcgaggagtgcaaggcgaggttccaggagctgagggcggggcgggcccacaggttcgtggtgttcaagatcgacgacgcgatgcggcaggtggtggtcgacagggtgggcccacgcgacgccggcttcgacgagctcaccggcagcctccccgccgacggctgccgctaccccgtgtacgaccacgacttcaccgtcagcgacgccacg

SEQ ID NO: 405913 - DNA, 446 bp, Oryza sativa nipponbare
gccagacactagtcaatggcagagttctcgtcgtggaagtccaagagaatgcaggttcgataggttgcaagcatttgagccaattcggagtgtgaggtctcaagctggcacaactgagttcttcgatgtctctaatgagcaatttcaatgtaccggagtatctgttgtccgtcgagttattgaacctagaggccttctactaccccattacactaatggtgcatctctagtatatatcatccaagggagaggtataacagggccaactttcccaggctgtcctgagtcctaccaacaacagttccaacaatcaggccaagcccaattgaccgaaagtcaaagccaaagtcaaaagttcaaggatgaacatcaaaagatccacccgtttagacaaggagatgtaattgcattgcctgctggtgcaccttattggtgctacaatgatg

SEQ ID NO: 405914 - DNA, 528 bp, Oryza sativa nipponbare
  unsure (1)..(528): unsure at all n locations
cccacgcgtccggcggggagctcggtgggggagggttgctcggatctaggctgatgaagcacgggaggggcaatgcgggggaccaggagcacgaatggaggccgccggcgaagcaggcgaggggcggggacgcgtcctccgccgcggggtttnngaggggatggtgttaaaaaatgtgaagacataaatgagtgcaaagagaaaaaagcttgtcaatgtccagaatgcagttgcagagatacatggggtgactatgaatgtacttgcagtggggacctactgtacatcaaagagcatgatacttgcataagtaagacagctgttcagggtaaagcagcttgggctgcagtttggggaatcttgatagtcttggtagttgtggcagcaggaagttatgttgtctacaaatacagactaaggtcatacatggactctgagatcagagcaatcatggcacagtacatgccactggacagtcaaggggaggggccaatcataccattgatgaaaaacaccattagcaagagt

SEQ ID NO: 405915 - DNA, 554 bp, Oryza sativa nipponbare
  unsure (1)..(554): unsure at all n locations
cccacgcgtccgcccacgcgtccgcggacgcgtgggcaagtacaaatagctatggcgagttccgttttctctcggttttctatatacttttgtgttcttctattatgccatggttctatggcccagctatttaatcccagcacaaacccatggcatagtcctcggcaaggaagttttagggagtgtagatttgatagactacaagcatttgaaccacttcggaaagtgaggtcagaagctggggtgactgagtacttcgatgagaagaatgaattattccagtgcacgggtacttttgtgatccgacgtgtcattcagcctcaaggccttttggtacctcgatacacaaatattcctggcgtggtctacatcatccaagggagaggttctatgggtttaaccttccccggntgccctgcgacttaccagcaacaattccaacaattttcatctcaaggccaaagtcagagccaaaagtttagagatgagcaccaaaagattcatcaatttaggcaaggagacattggtgcactcccagctggtgttgcacattg

SEQ ID NO: 405916 - DNA, 462 bp, Oryza sativa nipponbare
  unsure (1)..(462): unsure at all n locations
acaaacgatacagacaaagcatcaagggacagactatctcgaattgaagcagaactgtcactattgaaagaaaagcagaaggacctgactgagcagtgggagcgtgagaagtcggtgatgactaagattcaatctattaaagaagagattgatagggtcaatgtggagatccagcaggccgaacgtgagtatgatctcaatcgtgctgctgaactgaagtatggcagtctgaacgcattgcagcgccagcttcaaacaacagagaaagagctagatgaatatcaaagttctgggaaatccatgctaagagaagaggtcacccaagatgatattgcagaaatagtgagcaggtggactggtattccagtatctaaactaaagcaatctgatagggagaagttgctgtatctagaggaagaactgcacaagcgngttggtgggcaggatcctgcagncaaagca

SEQ ID NO: 405917 - DNA, 438 bp, Oryza sativa nipponbare
cccacgcgtccgcccacgcgtccggtgaaatcgttgtctctgctggcgcaattggcagcccccagctgctattgctcagtgggattggacccaagaatgaccttaggagccataaaattcctgtagttctccataacaagtatgtgggtaaagggatggctgataaccccatgaactgcatattcataccgacgaaaagcccccctcgccagtccctgattgagactggtggaataactgaagctggtgtgttcattgaggccagtagtggttttggccagtcaccagaaagcatccattgccaccatggaatcatgtccgctgagattggacagctgtccacaattcctccgaaggaaagaagcctggaaaaagcacagaagtatgcaaataccaaacttaatctacccaaagagatattccatgggggggttatcc

SEQ ID NO: 405918 - DNA, 320 bp, Oryza sativa nipponbare
  unsure (1)..(320): unsure at all n locations
cccattctgtgcgatatgattcacgggcgagctggagttcaagtcgttagtaactttggaaagactgtgtttgatggtgtccttcgcccaggacaattattgatcattccgcaacattatgctgtcttgaagaaagcagagcgtgaaggatgccaatatattttttttttttacaaacgctggcgcctncgncagccaccttgcagggaaaaactcagtattccgtgcggtggcagctgatgtagtctctaatgcgtatcgcatctnaagggagcaagcccgaagcctcaagaacaacaggggagaagagcacggtgcct

SEQ ID NO: 405919 - DNA, 394 bp, Oryza sativa nipponbare
  unsure (1)..(394): unsure at all n locations
gtgacgggttgctgcatccggaggatacatcgaggatggctacctcaacggagtcctatccgtgacacgggccctaggggactgggacatgaaaatgcccgacggctcgatatcccctctcatcgccgagccagagttccgacagaccatgctcacggaggacgacgagttcctcatcatggggtgcgacgggatctgggacgtgatgaccagccagcacgcggtgagcatcgtccgacgggggctccggcagcacgacgaccccgagaggtgcgcgagggagcttgtcatggaggccaagaggctcgagaccgccgacaacctgacggtgatcgtcgtctgcttcntctcggagcttgggtcgccgcggcaggagcaggtgggggggcaggcg

SEQ ID NO: 405920 - DNA, 389 bp, Oryza sativa nipponbare
cccacgcgtccggttcaaggaaggtgttgatgcatctggaagggtagccaagggaaagggtctttaccagttttccaacaagtatggagcaaatgttgatgggtacagcccaatatataccccagaagaatggtcttcaactggtgatgtctatgttggaggaaaggcaggtttacttctctgggcaatcactcttgctggaattctagttggcggcgctattcttgtctacaacactagtgcactggcttagctaagtgcagcagaccaagctgtgcctgcttccatgtatataatcttcactaggaatgtaaccagttatgtacctggactggacttgactgccagcggtggtaatgaataaggccgagtaatgttaattctaagtt

SEQ ID NO: 405921 - DNA, 423 bp, Oryza sativa nipponbare
cccacgcgtccgcccacgcgtccgcccacgcgtccggctcctccgctcctcgcctcttttacccgctcttccccccgatctccccggactcccacagccgcagcgaacaaatcccgcgcgggttgggaagagcgagctcgtgaggagagcagagggaaagcgcgagggggaaggaggaggaaaggtgcacaaggtcagactaagtttgcgttgaagaacaaaggagaggaaaaatgtcgcctgctgaggcatcgcgtgaggagaatgtgtacatggcaaagcttgccgagcaggctgagcgttacgaggaaatggtcgaattcatggagaaggtggcaaagaccactgatgttggtgagctcaccgttgaggagcggaacctgctttctgtggcttacaagaacgtgattggggctcggaggg

SEQ ID NO: 405922 - DNA, 487 bp, Oryza sativa nipponbare
atattaggcaatatcaggtgcagtcgcctctcctgctacagcaacaggtgcttagcccatataatgagttcgtaaggcagcagtatagcattgcggcaagcaccttcttgcaatcagctgcgtttcaactgagaaacaaccaagtcttgcaacagctcaggctggtggcgcaacaatctcactaccaggacattaacgttgtccaggccatagcgcaccagctacacctccagcagtttggcaatctctacattgaccggaatctggctcaagctcaagcactgttggcttttaacttgccatctacatatggtatctacccttggtcctatagtgcacccgatagcattaccacccttggcggtgtcttgtactgaattttcacaatattgtagttcggaagtgaaaatataagctcaggtatcatcgtatgtgacatgtgaaacttgaggtgatataaatagaaataaaattatctttcatattt

SEQ ID NO: 405923 - DNA, 119 bp, Oryza sativa nipponbare
  unsure (1)..(119): unsure at all n locations
cttgcaggctttgcagctgtacacttgggtaggaagcctgctgttgtaacgacagaggcggggtattccttggtttattgattctnataggctcatagcacacataaatgtacctaaag

SEQ ID NO: 405924 - DNA, 284 bp, Oryza sativa nipponbare
gtccgtgttacttggtgtggatgatatggatatcttcaagggaatcaacttaaaacttcttgcgtttgagaatatgctgaggacgcatcccaagtggaagggaagagctgtgttggtgcagattgcaaacccagcacgagggaagggaaaggatctggaggctgtccaggctgagattcgggagagttgtgatagaattaacaaggagtttggccagtcaggttacagtccagtgattttcattgaccagagcgtgccaagtgcggtgaggcttgcatattata

SEQ ID NO: 405925 - DNA, 535 bp, Oryza sativa nipponbare
gtttaaaggcgatggctacagcaattgtgaacctgctggaccaggaaagtgcttgataaatcatggcggctgttggcatgagactcgcaatggcaaaacattttctgcttgtcaggaatcaggaaatggaaaatgccagtgtccagctggtttccgaggggatggtgttaaaaaatgtgaagacatcaatgagtgcaaagagaaaaaagcttgtcaatgtccagaatgcagttgcagagatacatggggtgactatgaatgtacttgcagtggggacctactgtacatcaaagagcatgatacttgcataagtaagacagctgttcagggtaaagcagcttgggctgcagtttggggaatcttgatagtcttggtagttgtggcagcaggaagttatgttgtctacaaatacagactaaggtcatacatggactctgagatcagagcaatcatggcacaatacatgccactggacagtcaaggggaggtgccaaatcatacaaatgatgaagaacaccattagcaaggagttagt

SEQ ID NO: 405926 - DNA, 561 bp, Oryza sativa nipponbare
gtcaagttcggcgaggcggtgtggttcaaggcggggtcgcagatcttcagcgagggcgggctcgactacctcggcaacccgagcctgatccacgcgcagagcatcctcgccatctgggcggtccaggtggtgctcatgggcgccgtcgaggggtaccgcatcgccggcgggccgctcggcgaggtcgtcgacccgctctaccccggcggcagcttcgacccgctcggcctcgccgacgacccggaggccttcgcggagctcaaggtgaaggagatcaagaacggccgcctcgccatgttctccatgttcggcttcttcgtccaggccatcgtcaccggcaagggccccctcgagaacctcgccgaccacctcgccgaccccgtcaacaacaacgcctgggcctacgccaccaacttcgtccccggcaagtgagcgccgccgccgccgtgctgccatggcgacgcatcgccttcagctaagctagctaggttgacgacgatgcccgtctctgcaggagagtgtgcgtgtgtgtacccggtgcagtagatgtacgtacgtgta

SEQ ID NO: 405927 - DNA, 460 bp, Oryza sativa nipponbare
cccacgcgtccgcccacgcgtccgctccttgctgctgtgtatctctctcatcattttataatgacacaattgtgaactgcccaacatgctcttgtggctgccaaaacaatgggacaagtcctggaagctgtgtaaatgagaattcaccttatttacaatctgccattgatggccctggcaaatggaccggtcagcctcttgtccaatgtacttctcacatgtgcccgatcagaatccactggcatgtgaaactcaactataaggaatattggagagtgaagatcacgattacgaacttcaactaccgcatgaattacacacagtggaatttggtcgctcaacatcctaacttcaataatatcacccagctgtttagcttcaactacaagccacttactccatatggaagcaagataaatgatactgggatgttctggggagttaagttctataacgattt

SEQ ID NO: 405928 - DNA, 492 bp, Oryza sativa nipponbare
cccacgcgtccggttctagatcgcgagcgggggcgctttttcgtctctgggtacctaggtatccaccgcaagccttaacctgtacggctcccaccccttctacatggacgtgcgctccggcggcggcggcggcggcggcgcggcgcacggcgtgctcctccttaacagcaacggcatggaggtcatctatggcggatcctacgtcacctacaaggtgatcggcggcgtgctggatttctacttcttcgccggcccgtcccctctcgccgtcgtcgaccagtacacccagctcatcggccgacctgcccccatgccgtactggtcattcgggttccaccagtgcaggtacgggtacaagaacgtggctgatcttgagggcgtcgtcgccggctacgccaaggcgaggatcccactggaggtgatgtggacggacatcgattacatggacgcctaccaggacttcacgcttgatccggtgaacttcccggccga

SEQ ID NO: 405929 - DNA, 461 bp, Oryza sativa nipponbare
cccacgcgtccgcgattttgcaatttagcccctagggaggcagggaatccggctccggtccctgtgccgctccccccggctctccttgcctcccttgctcctccgatcgaggctgaagcggcttcaggatatacatttttgtgggaatggggaattcttgccaaaatggaacctatgggagcaattaccagaacagcaaccggtttcagaatgaccgttttgcttctcggtacgttgatgggaatgatactgaggattgctactcgggctcgtcaagggccagcttagcgggtgctctgcggcaagggctgaacctaaagtcccctgtccttggatacaagactccaaatgtaagggagctctatactcttggccgggagcttggacagggacagttcgggaaaacatacctctgcacctgagattagcacagggtgtcaatatgcatgcaagactatctt

SEQ ID NO: 405930 - DNA, 498 bp, Oryza sativa nipponbare
cccacgcgtccgcccacgcgtccgcccactgagtccggcagtgccgtctatcaaccaccatccgctgtctttcgcaccccagcgcgcatgtccgtgcactcagcatgtccgtccttcgcgacatcttgaacagcggacaaataaactccagtaagctcatccaaggggaacaccggaatggcatccagagcccaacctaccagtgcttggcagcaagcatcatcaactggcaagccgatgtggagagatgcatagagtgggaagcccacagccgccgcgccaccgggctgacgctcgccttcctcaccgcggcggcgaaggagctcggctgcccactcacttgctgacaaggccacaccatgactgtcactgcaagcagctgctgtaggatcagcgagtaggaaaggatgacttgccggccagtttcctgagatgtgatttaagactgatattagctgatgttcccaagcatgataacggggcttgctcccaagatgt

SEQ ID NO: 405931 - DNA, 463 bp, Oryza sativa nipponbare
aaagaaggagagagcttggtgagctgcagagatggccccctccgtgatggcgtcgtcggccaccaccgtcgctcccttccaggggctcaagtccaccgccggcatgcccgtcgcccgccgctccggcaactccagcttcggcaacgtcagcaatggcggcaggatcaggtgcatgcaggtgtggccgattgagggcatcaagaagttcgagaccctctcctacctgccaccgctcaccgtggaggacctcctgaagcagatcgagtacctgctccgttccaagtgggtgccctgcctcgagttcagcaaggtcggattcgtctaccgtgagaaccacagatcccccggatactacgatggcaggtactggaccatgtggaagctgcccatgttcgggtgcactgacgccacccaggtgctcaaggagctcgaggaggccaagaaggcgtaccctgatgcattc

SEQ ID NO: 405932 - DNA, 507 bp, Oryza sativa nipponbare
ctttgacacaacagcaagaacaagcacaagcacaagatcaatatcaacaagttcaatacagtgaacgacagcaaacatcttctcgatggaacggattggaggagaacttttgcacgatcaaggtgagagtaaacattgaaaatcctagtcgtgctgattcatacaacccacgtgccggaaggataacaagtgtcaatagtcagaagttccccatccttaacctcatccaaatgagcgctaccagagtaaacctataccagaatgctattctctcgccgttctggaacgtcaatgctcatagtttggtctatatgattcaagggcgatctcgagttcaagtcgttagtaactttggaaagactgtgtttgatggtgtccttcgcccaggacaattattgatcattccgcaacattatgctgtcttgaagaaagcagagcgtgaaggatgccaatatatcgcaatcaagacaaacgctaacgccttcgtcagccaccttgcagggaaaa

SEQ ID NO: 405933 - DNA, 542 bp, Oryza sativa nipponbare
cccacgcgtccgcccacgcgtccgcggacgcgtgggctttatctctacttattataaaacttaaagatgattctgtactcatccttatttccgtccatagtccgactttagagctgggatgtcgtgcgtgaacgggtcacgcgatggagggagtatatacgactgaaataaatttaaacggtataatttttatattatggaatgaagggagtatatccgactgaagtgcagaagtattctctccttaaggggttgtttagtttaaaaaaaaaacttttcccaaaaagcatcacatcgaatctttagatatatatgcatggaacattaaaatatagattaaaaaaactaattgtacaattagggaggaaatcgcgagacaaatcttttgagactaattagtccatgatttagccataagtgctacagtaacccacatgtgctaatgacggattaattaaactcaaaagattcgtctcgcggttttcatgcgagttatgaaattaattttttcattcgtgtctgaaaaccccttccgacatctg

SEQ ID NO: 405934 - DNA, 530 bp, Oryza sativa nipponbare
caatttctcagttcctgcgactgcgcgaaaaaacaaaaccatggtgactgttgtggaggaggtcgaccaccttcctccaacttagggtccagatcatatataggaaggaattcaaggatcacttcaactataggataaaaagatacctcgaccagaaatgcctgattgaaaaacatgaggggggccttgaagaattttctaaaggctatttgaagtttgggattaatacagttgatggtgccacaatatatcgtgaatgggcgcctgctgcacaagaagcacagctcattggtgagttcaataactggaatggtgcaaaacacaagatggagaaggataaatttggcatttggtcaatcaagatttcacatgtcaatgggaagcctgccatccctcacaattccaaggttaaatttcgctttaggcatgggggtggagcatgggttgatcgtattcccgcatggattcgttatgcaacttttgatgcctctaaatttggagctccatatgatggtgtacactgggatcct

SEQ ID NO: 405935 - DNA, 260 bp, Oryza sativa nipponbare
aacctacgtacgaataactaactggatgggtagggcgaccatagctttctctcggttatctatctacttttgcgttcttctcctatgccatggctctatggcccatctatttggtccgaacgtaaatccatggcacaaccctcggcaaggaggttattattttctcttttatgcgagggggtgcaagcatctgaaccacttcggagagtgaggtcaaaagccgggggtggggagcaccctgatgagaggagggaacaata

SEQ ID NO: 405936 - DNA, 613 bp, Oryza sativa nipponbare
  unsure (1)..(613): unsure at all n locations
cccacgcgtccgcccacgcgtccgttcatcacatctacatctcatgctatttgaattggtgaagaactccttgcgtgcagtacaggaacgatatatgaattccgataaagatgttcctccagttagaattatcgttgctgatggggcagaggatgtaactatcaaggtattcatctattacatcaccaaacatctgttattaatagcatcctagctccctgggtatgagcagtcattaaatgagttgtacctttacaagtttttagactcaaatgactgtaatggaagttccactggcaccaatttatcatacgattttaacattcttggcataaatagcaaatatgaataactctgacttatatagttatatcgaattagttgagttggatggtgactggcagaaggatcaggtaagaattagcgctggctgctgaacaggacatgtctcaactttaaaccaatctggcagtaagaaagatgctatattttatctttgaagtggatgcaaattgaatggttttatttgttctagtaatattgacnaacagaaaatttaattagcttgaagacattattttgtttactggtattatgggatgcaggtaaggct

SEQ ID NO: 405937 - DNA, 491 bp, Oryza sativa nipponbare
cacagattgagagcaagcagcgtggcgacgcccaaatcgcgcgattcgatcgaggcaaccctccccaattccctcaaatcccctatccgaaatccgccaattggccgcgtccgccacgccaagagaataaaggaaaacatcggcgtatcaacaagtgaagctgcattttcttagagctcagatgaagcggcctcgaaggcgtctgtggtgggatgactgatgagggatgatagtgacattgatgaacttgttacgggcatgctggagaccatcatccaaccagcatgcccgggcaggctcagatgttgccggcaggcaggatggacttctatggtacaaggacactggtcagcatgtaaatggggaattctctatggctgtggtccaggccaacaacttacttgaggatcagtgccagattgaatcgggtccattgagctttcttgactctggtccatacggaactttcgtcggggttaatgatggacatg

SEQ ID NO: 405938 - DNA, 700 bp, Oryza sativa nipponbare
  unsure (1)..(700): unsure at all n locations
gcaagtacaaatagctatggcgagttccgttttctctcggttttctatatacttttgtgttcttctattatgccatggttctatggcccagctatttaatcccagcacaaacccatggcatagtcctcggcaaggaagttttagggagtgtagatttgatagactacaagcatttgaaccacttcggaaagtgaggtcagaagctggggtgactgagtacttcgatgagaagaatgaattattccagtgcacgggtacttttgtgatccgacgtgtcattcagcctcaaggccttttggtacctcgatacacaaatattcctggcgtggtctacatcatccaagggagaggttctatgggtttaaccttccccggttgccctgcgacttaccagcaacaattccaacaattttcatctcaaggccaaagtcagagccaaaagtttagagatgagcaccaaaagattcatcaatttaggcaaggagacattgttgcactcccagctggtgttgcacattggttctacaatgatggtgatgcacctattgttgccgtatatgtttatgacgtanacaacaacgccaatcagcttgaacctaggcanaaggagttcctattagccggcaacaacaatcgggctcaacaacaacangtatantggtagctcaattgagcaaacactctgggcaaacatattcag

SEQ ID NO: 405939 - DNA, 297 bp, Oryza sativa nipponbare
cccacgcgtccgaagagtagaatcctctgtatgttgtgctgcacaccaccacaacgcggtacaactggcggggcaccggccctatcaatatggaggaccgggttaactggggcgcgccggccgacggtatggccggaggggagcatgaccaggcgcagggcatggtggagcaccaagccgagcgcgtgggcaagatccagggcccgaccctacgggttgctctagctggggccgttgtccaggcagaggacgagctacgtgaccgcggagatctccagcaactaccggtgggacacc

SEQ ID NO: 405940 - DNA, 395 bp, Oryza sativa nipponbare
  unsure (1)..(395): unsure at all n locations
gtgaactttcaccatgagatgcactgtgtattgtgtgaggagattttgatcaactgaagatgtttttaagatgaaaggtattctccacctagcggacgtagtcattttttcctctattccaaccgttgttgtgagttgtaactgctagagttaattaatctagatacatgcaacccgggtgtgcaagggtttaagagcaacgctatgttgattatcgtgattggcagatagaattctgtcatattcaagtgaaaatgtagccacctgccgttcaaaattctgatgtgtgacctgaagattagctgtgtcagctcttgacaaaactgtaatacgattgcaagtacctgtttccttggcatttttttatcatgtccagtncaaatttatttttcctt

SEQ ID NO: 405941 - DNA, 385 bp, Oryza sativa nipponbare
  unsure (1)..(385): unsure at all n locations
atgatctggagaagctcgtgtagggcgaactaggatgataaccaatgagcccatcaaccctcgctggtatgagtcgttccacatctattgcgctcatatggcttccaatgtgatcttcactgtcaagattgataaccctattggggcaacgaatattgggagggcttacctgcctgtccaagagcttctcaatggagaggagattgacagatggctcgatatctgtgataataaccgcgagcctgttggtgagagcaagatccatgtgaagcttcagtacttcgatgtttccaaggatcgcaattgggcgaggggtgtccgcagtaccaagtatccaggtgtnccttacaccttcttttttcagaggcaagggtgcaaagttacc

SEQ ID NO: 405942 - DNA, 446 bp, Oryza sativa nipponbare
cccacgcgtccgtggaggtggtggtgaagctggactggcgcgagtcgatgccccaccccgacgagcgggtggagtacgagctgtggaccaacagcaacgacgagtgcggcgcccggtgcgacgagcagatggagttcgtccgcggcttccgcggccacgcccagatcatggagagaggtggctacgccctcttcaccccgcactacatcacctggtactgccccgaggccttcaagctcacccagcagtgcaagtcccagtgcatcaaccatggcaggtattgtgcgccggacccggagcaggatttcggggaggggtacgaggggaaggacgtggtggtggagaacctgaggcagctgtgcgtgcaccgggtggccaacgagaccgggcggccatgggcgtggtgggactacgtcatggactacaagatcaggggcttcatgaag

SEQ ID NO: 405943 - DNA, 517 bp, Oryza sativa nipponbare
  unsure (1)..(517): unsure at all n locations
cccacgcgtccgcccacgcgtccgcccacgcgtccggcattatacagcaaaatagaaagatctagtgtcccgcagcaatgaagatcattttcgtctttgctctccttgctattgctgcatgcagcgcctctgcgcagtttgatgttttaggtcaaagttataggcaatatcagctgcagtcgcctgtcctgctacagcaacaggtgcttagcccatataatgagttcgtaaggcagcagtatggcatagcggcaagccccttcttgcaatcagctgcgtttcaactgagaaacaaccaagtctggcaacagctcgcgctggtggcgcaacaatctcactatcaggacattaacattgttcaggccatagcgcagcagctacaactccagcagtttggtgatctctactttgatcggaatctggctcaagctcaagctctgttgggttttaacgngccatctaaaatatggatctaccctagggactatggggcacccagtaccattaccacccttgg

SEQ ID NO: 405944 - DNA, 531 bp, Oryza sativa nipponbare
  unsure (1)..(531): unsure at all n locations
cggacgcgtggggttcagtcccacaaaaacatggcaaccatcaaattccctatagttttctccgtcgtttgcttgttcctcttgtgtaatggttcgttagcccaacttcttagccaaagtactagtcaatggcaaagttctcgccgtggaagtccaagagagtgcagatttgatcggttgcaagcatttgagccgattcgcactgtaaggtcccaagctggtacaactgagttttttgatgtctctaatgagttgtttcaatgtactggagtatttgttgtccgtcgagttatcgaacctagaggtcttctgttacctcactactccaatggagcaactttggtatatgtcatccaaggcagaggtataacaggaccaactttcccaggatgtcctgagacctatcaacaacagtttcagcaatccgagcaagaccaacaattggaaggccaaagccaaagccataaatttagagatgaacatcanaagatccaccgntttcaacagggggatgtagttgcattgcctgct

SEQ ID NO: 405945 - DNA, 317 bp, Oryza sativa nipponbare
  unsure (1)..(317): unsure at all n locations
gtacaatagctatggcgagttccgttttctctcggttttctatatacttttgtgttcttctattatgccatggttctatggcccagctatttaatcccagcacaaacccatggcatagtcctcggcaaggaagttttagggagtgtagatttgatagactacaagcatttgaaccacttcggaaagtgaggtcagaagctggggtgactgagtacttcnatgagaagaatgaattattccagtgcacgggtacttttgtgatccgacgtgtcattcancctnaaggcctttngggacctcganacacaaatattcct

SEQ ID NO: 405946 - DNA, 572 bp, Oryza sativa nipponbare
atcagtgggcaggtagtaccgtctaggtgtttttcaagtggagcagatttgcctccacatcaggaaatcggaatgccttcactctcccctaccatgactgaggtgggtgaagaaagaaggagataaagtctcacctggtgaagttctttgtgaagtagagactgataaagcgacagtggagatggaatgcatggaggaaggctaccttgctaaaattatccatggagatggtgccaaagaaattaaagttggtgagattattgccgtaaccgtggaagaagaggaagacatcggcaaatttaaggattataaggctccatcatctgctgaatctgcagctccagccgaatcgaagccccaatctgagcccacagaaccaaaaaaggagaaagagcagcccaaggctcctgagccaaaggctacaaagacagaagaatcttttctttcagaggatcgcacattctccagtccaattgcaaggaaattggcagaagacacaatggaccactgtcaagcataaaagggactggccccgatgggcgaattttgaaggccgatattgaggattactt

SEQ ID NO: 405947 - DNA, 366 bp, Oryza sativa nipponbare
  unsure (1)..(366): unsure at all n locations
gcgtccgattgtgcagtaaaaaaatgtcatatcccctaggcacccaagaaactgctccttaagtccttataagcacatatggcattgtaatatatatgtttgagttttagcgacaatttttttaaaaacttttggtcctttttatgaacgttttaagtttcactgtcttttttttttcgaatgggggggggggcttcaaattctaatccggggtccaaattgtaataaacttgggttgtgctaattaacatcttaattgatttatttgaaaaccaattcaaattcttttaggctcaccaaaccttaaacaattcaattnaaggtggagatctttccccgcaacaggtagacaacccccgggggggg

SEQ ID NO: 405948 - DNA, 334 bp, Oryza sativa nipponbare
  unsure (1)..(334): unsure at all n locations
ccggtcgaccccgcgtccgctcgacgacgcccagaagatcaccgacgacacgctcatccgcgcgtccgtgcccactgtcaagttcctcctcgagaagggcgccaaggtcatcctcgccagccatctgggccgtccgaagggtgtcacccccaagtacagcttgaagcctcttgttccacgcttgtctgagctactggggggggatgttgtgatggccaatgattgcattggtgaggaanttgagaggtggggtgctgctttgccggaagggggtgttctactcctanagaatggtanattctacaaggaggaagaaaagaatgatccttagttt

SEQ ID NO: 405949 - DNA, 479 bp, Oryza sativa nipponbare
cggacgcgtggggcaaaatagaaagagctagtgtgccgcagcaatgaagatcattttcgtctttgctctccttgctattgctgcatgcagcgcctctgcacagtttgatgttttaggtcaaagttataggcaatatcagctgcagtcgcctgtcctgctacagcaacaggtgcttaggcggtataatgagttcgtaaggcagcagtatggcatagcggcaagccccttcttgcaatcagctgtgtttcaactgagaaacaaccaagtctggcaacagctcgcgctggtggcgcaacaatctcactatcaggacattaacattggtcaggccatagcgcagcagctacaactccagcaggttggtgatctctactttgatcggaatctggctcaagctcaagctctggtggcttttaacgtgccatctagatatggtatctaccctaggtactatggtgcacccagtaccattaccaccc

SEQ ID NO: 405950 - DNA, 428 bp, Oryza sativa nipponbare
  unsure (1)..(428): unsure at all n locations
tgagaatattgtcattgagtcatttcagtcaccttttgaggagatcaaatctgcagcgtcatatgctctcggaaacattgctgttggaaatttatcgaagtatttgccttttatcttgaatcagattgacaaccaacagaagaaacagtatctattgcttcattcactgaaagaggtaattgcacggcagtctgttgaccatactggccagagtgagctccaggattcaaacattgagaagattttggcattgctctttaatcactgtgaaagtgaggaggaaggagttcggaatgtagttgcagaatgcttaggcaaaattgctctgattgaacctaggaaattaatccctgctctanaggaacgcacatctagtcctgctgcaaacacaagagctacagntgccattgctataaaatattcaattg

SEQ ID NO: 405951 - DNA, 183 bp, Oryza sativa nipponbare
cccacgcgtccggactagttctagatctgcgtcgcgtgtgcactatgttagtcgtttaaaactcgtttatttctattcggttaaaaacttggatgctctgagtcttattgttgcccttcggttgttgtggaatgcgagtacttacagtgctaaaaaaaaaaaaatttaaaagagaaggggggg

SEQ ID NO: 405952 - DNA, 518 bp, Oryza sativa nipponbare
cccactcgtccgcggacgcgtggggtccaagggggcaggagtcgcctcgcctcctccttcatcctcctcgtcgtcgccgcgggggtcgcctgagatcacattaacaatggtgaaggctgttgttgtgcttggtagcagtgagattgttaagggcactatccactttgtccaagagggagagggtcccaccactgtgactggaagtgtctctggcctcaagcctggtctccatgggttccatattcatgcacttggtgacaccaccaatggttgcatgtcaactgggccacactacaatcctgccggaaaggagcatggagcaccagaagatgagacccgccatgctggtgatcttggaaatgtcaccgctggagaagatggtgttgctaatatccatgttgttgacagtcagattccacttactggaccaaattcaatcattggcagagccgtcgttgtgcatgccgatcctgatgatcttggaaagggggggcacgagctgagcaagaccaccggaa

SEQ ID NO: 405953 - DNA, 444 bp, Oryza sativa nipponbare
  unsure (1)..(444): unsure at all n locations
cccacgcgtccggttctagatcgcgagctncgtccctttttttttttttttacatgagtgaaacaaacattggtacataacgtccgagcatagcatttgcatgagctgatcagaagtcctcaagcatgtatcaagtgtaacaacagcctcgaggcaaacaaaaatcaagggaaatggagagaggagtgaaacaaaaactcaaccatgtataacactacttattccttacaatcagtaaacatcctggtaaaatatatcatagcgaagtcttaagagagactagaaagaatataagggagcatatctaccgacgcttatctcgactgcgtaggggagcagaggaggcctgaagcatctgcaccaaccacggcaagctcacatatggtacaaagctgcccttcgatcgaaggaacaaaccgggagccacagtacgggcaggaaaca

SEQ ID NO: 405954 - DNA, 414 bp, Oryza sativa nipponbare
cggacgcgtgggctcatcccagccgccgccgccgcagcctcctcctctcgccatctcccgtcctctccttcaagtcagctacctgcttaatcaaccatgggtaaggagaagacgcacatcaacattgtggtcattggccacgtcgactctggcaagtcgaccaccacgggccatctgatctacaagcttggaggtatcgacaagcgtgtgattgagaggttcgagaaggaagccgctgagatgaacaagaggtccttcaagtacgcgtgggtgctcgacaagctcaaggccgagcgtgagagaggtatcaccatcgatattgccctgtggaagttcgagaccaccaagtactactgcacggtcatcgatgcccctggtcaccgtgacttcatcaagaacatgatcacgggtacc

SEQ ID NO: 405955 - DNA, 427 bp, Oryza sativa nipponbare
ctacgcactagtagtagcactctggtattctcccatggcgactgcgaccgaggaggttgccgctgcggctgctgccgccggcgaggcgccgccgccgccgccgccagcggtggtagaggaggcgaaggaggctttggaggcaccgaagccggaggaggcgccgaaggctgaggagggggaggagaagaaggcggagggtgagaaggagaaggagaaggcgaagaaggagaggaaaccgagggcgaggaagccccgatcggcggggccacaccacccgccctacttcgagatgatcaaggaggcgatcatggcgctggacgggaacggcaaggcgggatcgagcccgtacgcgatcgccaagtacatgggggagcagcacatgggggttctcccggcgaactaccggaaggtgctcgccgtgcagctg

SEQ ID NO: 405956 - DNA, 522 bp, Oryza sativa nipponbare
ctctgtttgtagatccgatgaacccatctctaggattgcaggttgtctctgagtggatgaggccttctgatattgcgaaggaggtatctatcagttcacaaccgtgcttattttctggttctgtgaattcgtcagatgtgtgtcagggtcggttgggcgactgttggttcttgagcgctgttgcagttttgacagagatggcccgtatatctgaagttataatcactcctgagtataatgaagaagggatttacactgtcagattctgtatccagggtgaatgggtggcagtggtggttgatgattggatcccctgtgagtctccggggaaaccggcatttgctactagtagaaagcaaaatgagctgtgggtatccattcttgaaaaagcttatgcaaagcttcatggctcttatgaggcattggagggtgggcttgtgcaagatgctctagtggatctcacaggaggagctggtgaagagattgacatgcggagcccccaagcgcagattgatcttgcta

SEQ ID NO: 405957 - DNA, 433 bp, Oryza sativa nipponbare
cggacgcgtgggcggacgcgtggggttcattggtactacaacaacatggcatccataaatcgccccatagttttcttcacagtttgcttgttcctcttgtgcaatggctctctagcccagcagctattaggccagagcactagtcaatggcagagttctcgtcgtggaagtccaagagagatgcaggttcgataggttgcaagcatttgagccaattcggagtgtgaggtctcaagctggcacaactgagttcttcgatgtctctaatgagcaatttcaatgtaccggagtatctgttgtccgtcgagttattgaacctagaggccttctactaccccattacactaatggtgcatctctagtatatatcatccaagggagaggtataacagggccaactttcccaggctgtcctgagtcctaccaacaacag

SEQ ID NO: 405958 - DNA, 469 bp, Oryza sativa nipponbare
  unsure (1)..(469): unsure at all n locations
cccacgcgtccgcccacgcgtgcgcgcagtcgtccgcaaatcttcaattgcaactactttctgcgaacttctgatcgaccattgcagaatccaactaattgtttcttcagacttcttcagagcattctccaggacacttcgaacgaaacatggcgaacgcgacgtctggtgtggcggtgagcgaggagtgcaaggcgaggttccaggagctgagggcggggcgggcccacaggttcgtggtgttcaagatcgacgacgcgatgcggcaggtggtggtcgacagggtgggcccacgcgacgccggcttcgacgagctcaccgncagcctccccgccgacggctgccgctacgccgtgtacgaccacgacttcaccgncagcgacgccacggccacggcggccgccggcnagggcggcgaggcgccccgcagcaagatcttcttcgnngtctggtcgcccgcggcggcgga

SEQ ID NO: 405959 - DNA, 373 bp, Oryza sativa nipponbare
ggccagagcactagtcaatggcagagttctcgtcgtggaagtccaagagaatgcaggttcgataggttgcaagcatttgagccaattcggagtgtgaggtctcaagctggcacaactgagttcttcgatgtctctaatgagcaatttcaatgtaccggagtatctgttgtccgtcgagttattgaacctagaggccttctactaccccattacactaatggtgcatctctagtatatatcatccaagggagaggtataacagggccaactttcccaggctgtcctgagtcctaccaacaacagttccaacaatcaggccaagcccaattgaccgaaagtcaaagccaaagtcaaaaggtcaaggatgaacatc

SEQ ID NO: 405960 - DNA, 521 bp, Oryza sativa nipponbare
cccacgcgtccggcggggagctcggtgggggagggttgctcggatctaggctgatgaagcacgggaggggcaatgcggtggaccaggagcacgaatggaggccgccggcgaagcaggcgaggggcggggacgcgtcctccgccgcggtctttgggaggggattgtgttaaaaaatgtgaggacatcaatgagtgcaaagagaaataagcttgtcaatgtccagaatgcagttgcagagatacatggggtgactatgaatgtacttgcagtggggacctactgtacatcaaagagcatgatacttgcataagtaagacagctgttcagggtaaagcagcttgggctgcagtttggggaatcttgatagtcttggtagttgtggcagcaggaagttatgttgtctacaaatacagactaaggtcatacatggactctgagatcagagcaatcatggcacagtacatgccactggacagtcaaggggaggtgccaaatcatacaaatgatgaagaacaccatta

SEQ ID NO: 405961 - DNA, 512 bp, Oryza sativa nipponbare
cccacgcgtccgcccacgcgtccgcggacgcgtgggcaagtacaaatagctatggcgagttccgttttctctcggttttctatatacttttgtgttcttctattatgccatggttctatggcccagctatttaatcccagcacaaacccatggcatagtcctcggcaaggaagttttagggagtgtagatttgatagactacaagcatttgaaccacttcggaaagtgaggtcagaagctggggtgactgagtacttcgatgagaagaatgaattattccagtgcacgggtacttttgtgatccgacgtgtcattcagcctcaaggccttttggtacctcgatacacaaatattcctggcgtggtctacatcatccaagggagaggttctatgggtttaaccttcccccggtgccctgcgacttaccagcaacaattccaacaattttcatctcaaggccaaagtcagagccaaaagtttagagaatgaccccaaaagattcatcaatttag

SEQ ID NO: 405962 - DNA, 495 bp, Oryza sativa nipponbare
acaaacgatacagacaaagcatcaagggacagactatctcgaattgaagcagaactgtcactattgaaagaaaagcagaaggacctgactgagcagtgggagcgtgagaagtcggtgatgactaagattcaatctattaaagaagagattgatagggtcaatgtggagatccagcaggccgaacgtgagtatgatctcaatcgtgctgctgaactgaagtatggcagtctgaacgcattgcagcgccagcttcaaacaacagagaaagagctagatgaatatcaaagttctgggaaatccatgctaagagaagaggtcacccaagatgatattgcagaaatagtgagcaggtggactggtattccagtatctaaactaaagcaatctgatagggagaagttgctgtatctagaggaagaactgcacaagcgtgttgttgggcaggatcctgcagtcaaagcagtttctgaggctattcagagatccagggctggt

SEQ ID NO: 405963 - DNA, 436 bp, Oryza sativa nipponbare
cccacgcgtccgcccacgcgtccggtgaaatgatgtgtctctgctggcgcaattggcagcccccagctgctattgctcagtgggattggacccaagaatgaccttaggagccataaaattcctgtagttctccataacaagtatgtgggtaaagggatggctgataaccccatgaactgcagattcataccgacgaaaagcccccctcgccagtccctgattgagactgttggaataactgaagctggtgtgttcattgaggccagtagtggttttggccagtcaccagaaagcatccattgccaccatggaatcatgtccgctgagattggacagctgtccacaattcctccgaaggaaagaagcctggaaaaagcacagaagtatgcaaataccaaacttaatctacccaaagagatattccatggggggttta

SEQ ID NO: 405964 - DNA, 429 bp, Oryza sativa nipponbare
cccatgcgtccgatatgattcaagggcgatctcgagttcaagtcgttagtaactttggaaagactgtgtttgatggtgtccttcgcccaggacaattattgatcattccgcaacattatgctgtcttgaagaaagcagagcgtgaaggatgccaatatatctttttgttagacaaacgctaacgccttcgtcagccaccttgcagggaaaaactcagtattccgtgccttgccagttgatgtagtcgctaatgcgtatcgcatctcaagggagcaagcccgaatcctcaagaacaacaggggagaagagcacggggccttcactcctagatttcaacaacaatactacccacatttattgaatgagtccgaaagcgagacctcttagtaatgtaattgagaactactatcgtcgtagagtaaaataaaa

SEQ ID NO: 405965 - DNA, 537 bp, Oryza sativa nipponbare
gtgaacgggttgctgcatccggaggatacatcgaggatggctacctcaacggagtcctatccgtgacacgggccctaggggactgggacatgaaaatgcccgacggctcgatatcccctctcatcgccgagccagagttccgacagaccatgctcacggaggacgacgagttcctcatcatggggtgcgacgggatctgggacgtgatgaccagccagcacgcggtgagcatcgtccgacgggggctccggcagcacgacgaccccgagaggtgcgcgagggagcttgtcatggaggccaagaggctcgagaccgccgacaacctgacggtgatcgtcgtctgcttcgtctcggagcttgggtcgccgcggcaggagcaggtgggggggcaggcgggggtggcgaggccgaggagttgcaagagcctttctgcggaggccctgtgcaacctgaggagctggctggagactgatcgctagggcaagggcccggtgtttggttgtggccactttacacttgggtacatatgctgacatt

SEQ ID NO: 405966 - DNA, 428 bp, Oryza sativa nipponbare
  unsure (1)..(428): unsure at all n locations
cccatgcgtccggttcaaggaaggtgttgatgcatctggaagggtagccaagggaaagggtctttaccagttttccaacaagtatggagcaaatgttgatgggtacagcccaatatataccccagaagaatggtcttcaactggtgatgtctatgttggaggaaaggcaggtttacttctctgggcaatcactcttgctggaattctagttggcggcgctattcttgtctacaacactagtgcactggcttagctaagtgcagcagaccaagctgtgcctgcttccatgtatataatcttcactaggaatgtaaccagttatgtacctggactggacttgactgccagcggtggtaatgaataaggccgagtaatgttaattctaagttnanaaaaaaaaaaaaaaaaaaaaaaaaannnnnnnnaaa

SEQ ID NO: 405967 - DNA, 486 bp, Oryza sativa nipponbare
cccacgcgtccgcccacgcgtccgcccacgcgtgcggctcctccgctcctcgcctcttttacccgctcttccccccgatctccccggactcccacagccgcagcgaacaaatcccgcgcgggttgggaagagcgagctcgtgaggagagcagagggaaagcgcgagggggaaggaggaggaaaggtgcacaaggtcagactaagtttgcgttgaagaacaaaggagaggaaaaatgtcgcctgctgaggcatcgcgtgaggagaatgtgtacatggcaaagcttgccgagcaggctgagcgttacgaggaaatggtcgaattcatggagaaggtggcaaagaccactgatgttggtgagctcaccgttgaggagcggaacctgctttctgtggcttacaagaacgtgattggtgctcggagggcatcgtggaggatcatctcttctattgagcagaaggaggagagccgtgggaatgaggcatatg

SEQ ID NO: 405968 - DNA, 489 bp, Oryza sativa nipponbare
  unsure (1)..(489): unsure at all n locations
atattaggcaatatcaggtgcagtcgcctctcgtgctacagcaacaggtgcttagcccatataatgagttcgtaaggcagcagtatagcattgcggcaagcaccttcttgcaatcagctgcgtttcaactgagaaacaaccaagtcttgcaacagctcaggctggtggcgcaacaatctggagtaccaggacattaacgttgtccaggccatagcgcaccagctacacctccagcagtttggcaatctctacattgaccggaatctggctcaagctcaagcactgttggcttttaacttgccatctacatatggtatctacccttggtcctatagtgcacccgatagcattaccacccttggcggtgtcttgtactgaattttcacaatattgtagttcggaagtgaaaatataagctcaggtatcatcgtatgtgacatgtgaaacttgaggtgatataaatagaaataaaattatctntcatatttt

SEQ ID NO: 405969 - DNA, 266 bp, Oryza sativa nipponbare
  unsure (1)..(266): unsure at all n locations
cccagcgtccgngaaatgtccttggttgtgcggtttcttgcaggctttgcagctgtacacttgggtaggaagcctgctgttgtaacgacagaggcggggtattccttggtttattgattctcataggctcatagcacacataaatgtacctaaagtcatgcgacttttttcttcatagtgaacggaacaagaacgacaatgtagagcacagagaagttttgtacatctgtgagaagaaaaaaaatgcattttgtactttatcgttc

SEQ ID NO: 405970 - DNA, 370 bp, Oryza sativa nipponbare; identical to SEQ ID NO: 391746

SEQ ID NO: 405971 - DNA, 529 bp, Oryza sativa nipponbare
gtttaaaggcgatggctacagcaattgtgaacctgctggaccaggaaagtgcttgataaatcatggcggctgttggcatgagactcgcaatggcaaaacattttctgcttgtcaggaatcaggaaatggaaaatgccagtgtccagctggtttccgaggggatggtgttaaaaaatgtgaagacatcaatgagtgcaaagagaaaaaagcttgtcaatgtccagaatgcagttgcagagatacatggggtgactatgaatgtacttgcagtggggacctactgtacatcaaagagcatgatacttgcataagtaagacagctgttcagggtaaagcagcttgggctgcagtttggggaatcttgatagtcttggtagttgtggcagcaggaagttatgttgtctacaaatacagactaaggtcatacatggactctgagatcagagcaatcatggcacagtacatgccactggacagtcaaggggaggtgccaaatcatacaaatgatgaagaacaccattagcaagag

SEQ ID NO: 405972 - DNA, 533 bp, Oryza sativa nipponbare
gtcaagttcggcgaggcggtgtggttcaaggcggggtcgcagatcttcagcgagggcgggctcgactacctcggcaacccgagcctgatccacgcgcagagcatcctcgccatctgggcggtccaggtggtgctcatgggcgccgtcgaggggtaccgcatcgccggcgggccgctcggcgaggtcgtcgacccgctctaccccggcggcagcttcgacccgctcggcctcgccgacgacccggaggccttcgcggagctcaaggtgaaggagatcaagaacggccgcctcgccatgttctccatgttcggcttcttcgtccaggccatcgtcaccggcaagggccccctcgagaacctcgccgaccacctcgccgaccccgtcaacaacaacgcctgggcctacgccaccaacttcgtccccggcaagtgagcgccgccgccgccgtgctgccatggcgacgcatcgccttcagctaagctagctaggttgacgacgatgcgcgtctctgcaggagagtgtgcgtgtgtgta

SEQ ID NO: 405973 - DNA, 499 bp, Oryza sativa nipponbare
cccacgcgtccgcccacgcgtccgctccttcctgctgtgtatctctctcatcattttataatgacacaattgtgaactgcccaacatgctcttgtggctgccaaaacaatgggacaagtcctggaagctgtgtaaatgagaattcaccttatttacaatctgccattgatggccctggcaaatggaccggtcagcctcttgtccaatgtacttctcacatgtgcccgatcagaatccactggcatgtgaaactcaactataaggaatattggagagtgaagatcacgattacgaacttcaactaccgcatgaattacacacagtggaatttggtcgctcaacatcctaacttcaataatatcacccagctgtttagcttcaactacaagccacttactccatatggaagcaagataaatgatactgcgatgttctggggagttaagttctataacgaattgctcatgcaagctggtccacttggaaatgcacagtcaga

SEQ ID NO: 405974 - DNA, 394 bp, Oryza sativa nipponbare
  unsure (1)..(394): unsure at all n locations
aagacccctgacataacttccatgcttgcaccgaccatgacaggtgttgatgactccgcattcctccagaacaatgccagtgatgcaatggtacctcctgtgatggggaatgctagcattgatcttgccgacctggagccgtacatgaaatttctgatcgatggtggttcggatgagtcgattgacacccttctgagctctgatggatctcaggatgtggccagtagcatggacctttggagcttcgatgacatgcccgtgtcggccgagttctactgaggggtttggggtgtagcaactggtgcctgtttatataaggacaaatggaataaacattctggacatncaagaagcggcatgtgtttgtngggcgcttntagttgcgctatatagc

SEQ ID NO: 405975 - DNA, 475 bp, Oryza sativa nipponbare
ccagcgtccggttctagatcgcggcggcgccctttttcgctctgggtacctaggtatccaccgcagccttaacctgacggctcccccccttctacatggacgtgcgctccggcggcggcggcggcggcggcgcggcgcacggcgtgctcctccttatacagcaacggcggggagggcatctatggcggatcctacgtcacctacaaggtgatcggcggcgtgctggatttctacttcttcgccggcccgtcccctctcgccgtcgtcgaccagtacacccagctcatcggccgacctgcccccatgccgtactggtcattcgggttccaccagtgcaggtacgggtacaagaacgtggctgatcttgagggcgtcgtcgccggctacgccaaggcgaggatcccactggaggtgatgtggacggacatcgattacatggacgcctacaaggacttcacgcttgatccggtgaact

SEQ ID NO: 405976 - DNA, 472 bp, Oryza sativa nipponbare
cccacgcgtccgcgattttgcaatttagcccctagggaggcagggaatccggctccggtccctgtgccgctccccccggctctccttgcctcccttgctcctccgatcgaggctgaagcggcttcaggatatacatttttgtgggaatggggaattcttgccaaaatggaacctatgggagcaattaccagaacagcaaccggtttcagaatgaccgttttgcttctcggtacgttgatgggaatgatactgaggattgctactcgggctcgtcaagggccagcttagcgggtgctctgcggcaagggctgaacctaaagtcccctgtccttggatacaagactccaaatgtaagggagctctatactcttggccgggagcttggacagggacagttcgggaaaacatacctctgcactgagattagcacagggtgtcaatatgcatgcaagactatcttaaagagtaatct

SEQ ID NO: 405977 - DNA, 562 bp, Oryza sativa nipponbare
  unsure (1)..(562): unsure at all n locations
cccacgcgtccgcccacgcgtccgcccatgcgtccggcagatgccgtctatcaaccaccatccgctgtctttcgcaccccagcgcgcatgtccgtgcactcagcatgtgcgtccttcgcgacatcttgaacagcggacaaataaactccagtaagctcatccaaggggaacaccggaatggcatccagagcccaacctaccagtgcttggcagcaagcatcatcaactggcaagccgatgtggagagatgcatagagtgggaagcccacagccgccgcgccaccgggctgacgctcgccttcctcaccgcggcggcgaaggagctcggctgcccactcacttgctgacaaggccacaccatgactgtcactgcaagcagctgctgtaggatcagcgagtaggaaaggatgacttgccggccagtttcctgagatgtgatttaagactgatattagctgatgttcccaagcatgatacggngcttgctcccaagatgtgatttttactttacttttggttaatgtgctaccgctgacattagatgttcaagcatatgaaaact

SEQ ID NO: 405978 - DNA, 461 bp, Oryza sativa nipponbare
aaagaaggagagagcttggtgagctgcagagagggccccctccgtgatggcgtcgtcggccaccaccgtcgctcccttccaggggctcaagtccaccgccggcatgcccgtcgcccgccgctccggcaactccagcttcggcaacgtcagcaatggcggcaggatcaggtgcatgcaggtgtggccgattgagggcatcaagaagttcgagaccctctcctacctgccaccgctcaccgtggaggacctcctgaagcagatcgagtacctgctccgttccaagtgggtgccctgcctcgagttcagcaaggtcggattcgtctaccgtgagaaccacagatcccccggatactacgatggcaggtactggaccatgtggaagctgcccatgttcgggtgcactgacgccacccaggtgctcaaggagctcgaggaggccaagaaggcgtaccctgatgcat

SEQ ID NO: 405979 - DNA, 509 bp, Oryza sativa nipponbare
ctttgacacaacagcaagaacaagcacaagcgcaggatcaatatcaacaagttcaatacagtgaacgacagcaaacatcttctcgatggaacggattggaggagaacttttgcacgatcaaggtgagagtaaacattgaaaatcctagtcgtgctgattcatacaacccacgtgccggaaggataacaagtgtcaatagtcagaagttccccatccttaacctcatccaaatgagcgctaccagagtaaacctataccagaatgctattctctcgccgttctggaacgtcaatgctcatagtttggtctatatgattcaagggcgatctcgagttcaagtcgttagtaactttggaaagactgtgtttgatggtgtccttcgcccaggacaattattgatcattccgcaacattatgctgtcttgaagaaagcagagcgtgaaggatgccaatatatcgcaatcaagacaaacgctaacgccttcgtcagccaccttgcagggaaaaac

SEQ ID NO: 405980 - DNA, 377 bp, Oryza sativa nipponbare
  unsure (1)..(377): unsure at all n locations
cggtccgtattcccggtcgcccagcgtccgagcctgaagtttctttcagtacaccagccgtcgccggtgccaccgccgccggctcacccgccacgcgcaaccgcccgccggcgcctgcgtctccagccgccatggtctccctccgcttccccggcgccacctttccgcgccttcagctagagtcgtttttttttttacaggggggggtggtnaacccatataatgagtgcgtgaggcagcagtatggcataggggggggcctcttcttgcatttagctgcgtttcaactgagaaacaaccaagtctggcaacagctcgcgctggtggcgcatcaatctcactattaggacattaacatttgttcaggcctatagcgc

SEQ ID NO: 405981 - DNA, 541 bp, Oryza sativa nipponbare
cccacgcgtccgcccacgcgtccgcggacgcgtgggctttatctctacttattataaaacttaaagatgattctgtactcatccttatttccgtccatagtccgactttagagctgggatgtcgtgcgtgaacgggtcacgcgatggagggagtatatacgactgaaataaatttaaacgggataatttttatattatggaatgaagggagtatatccgactgaagtgcagaagtattctctccttaaggggttgtttagtttaaaaaaaaaacttttcccaaaaagcatcacatcgaatctttagatatatatgcatggaacattaaaatatagattaaaaaaactaattgtacaattagggaggaaatcgcgagacaaatcttttgagactaattagtccatgatttagccataagtgctacagtaacccacatgtgctaatgacggattaattaaactcaaaagattcgtctcgcggttttcatgcgagttatgaaattaattttttcattcgtgtctgaaaaccccttccgacatct

SEQ ID NO: 405982 - DNA, 617 bp, Oryza sativa nipponbare
caatttctcagttcctgcgactgcgcgaagaggcaaaaccatggtgactgttgtggaggaggtcgaccaccttcctccaacttagggtccagatcatatataggaaggaattcaaggatcacttcaactataggataaaaagatacctcgaccagaaatgcctgattgaaaaacatgaggggggccttgaagaattttctaaaggctatttgaagtttgggattaatacagttgatggtgccacaatatatcgtgaatgggcgcctgctgcacaagaagcacagctcattggtgagttcaataactggaatggtgcaaaacacaagatggagaaggataaatttggcatttggtcaatcaagatttcacatgtcaatgggaagcctgccatccctcacaattccaaggttaaatttcgctttaggcatgggggtggagcatgggttgatcgtattcccgcatggattcgttatgcaacttttgatgcctctaaatttggagctccatatgatggtgtacactgggatcctccagcctgtgaaagggacgtgtttaagcatcctcgacctccaaaacctgatgctccacgcatctatgaggctcatgtggggatgagt

SEQ ID NO: 405983 - DNA, 397 bp, Oryza sativa nipponbare
aaatctagatagatgacacgcccaccaatgctcatggaaaccatagctgtctctcggctatctatctacttttgcgttcttctcctatgccatggctctatggcccagctatttggtccgaacgtaaatccatggcacaaccctcggcaaggaggttttagggagtgtagatttgatagactacaagcatttgaaccacttcggagagtgaggtcagaagccggggttacagagtactttgatgagaagaatgaacaattccagtgcacaggtacatttgacatccgacgtgtcattgagcctcaaggccttctggtacctagatacagcaatactcctggcatggtgtacatcatccaacggagaggctttatgcgattaactctcgccgcttgcc

SEQ ID NO: 405984 - DNA, 436 bp, Oryza sativa nipponbare
ccacgcgtcgccacgcgtccgttcatcacatctacatctcatgctatttgaattggtgaagaactccttgcgtgcagtacaggaacgatatatgaattccgataaagatgttcctccagttagaattatcgttgctgatggggcagaggatgtaactatcaaggtattcatctattacatcaccaaacatctgttattaatagcatcctagctccctgggtatgagcagtcattaaatgagttgtacctttacaagtttttagactcaaatgactgtaatggaagttccactggcaccaatttatcatacgattttaacattcttggcataaatagcaaatatgaataactctgacttatatagttatatcgaattagttgagttggatggtgactggcagaaggatcaggtaagaattagcgctggctgctgaac

SEQ ID NO: 405985 - DNA, 310 bp, Oryza sativa nipponbare
  unsure (1)..(310): unsure at all n locations
ctggtcatgtgatgcctaacactgatcgacctttcaagttaaactgggcttcatatagcatgggtgaaaagcgatctgaagttgcttctgactactcaattttcgttggtgatctagctgctgatgttactgatgaaatgttgatggagctttttgctaataagtaccgctctgtgaaaggagctaaagttattattgatgcaaacaggccgttctaggggctatgggtttgttagatttggagatgacaatgacanatcccatgccatgactgaaatgaatggtgcgtattgctctactaggccaattc

SEQ ID NO: 405986 - DNA, 603 bp, Oryza sativa nipponbare
cacagattgagagcaagcagcgtggcgacgcccaaatcgcgcgattcgatcgaggcaaccctccccaattccctcaaatcccctatccgaaatccgccaattggccgcgtccgccacgccaagagaataaaggaaaacatcggcgtatcaacaagtgaagctgcattttcttagagctcagatgaagcggcctcgaaggcgtctgtggtgggatgactgatgagggatgatagtgacattgatgaacttgttacgggcatgctggagaccatcatccaaccagcatgcccgggcaggctcagatgttgccggcaggcaggatggacttctatggtacaaggacactggtcagcatgtaaatggggaattctctatggctgtggtccaggccaacaacttacttgaggatcagtgccagattgaatcgggtccattgagctttcttgactctggtccatacggaactttcgtcggggtttatgatggacatggtggcccagaaacggcttgctatatcaacgatcacctattccaccatctgaaaaggtttgcatctgaacagaattcgatatttgctgatgtgctgaagaaagcatatgaagc

SEQ ID NO: 405987 - DNA, 545 bp, Oryza sativa nipponbare
gcaagtacaaatagctatggcgagttccgtgttctctcggttttctatatacttttgtgttcttctattatgccatggttctatggcccagctatttaatcccagcacaaacccatggcatagtcctcggcaaggaagttttagggagtgtagatttgatagactacaagcatttgaaccacttcggaaagtgaggtcagaagctggggtgactgagtacttcgatgagaagaatgaattattccagtgcacgggtacttttgtgatccgacgtgtcattcagcctcaaggccttttggtacctcgatacacaaatattcctggcgtggtctacatcatccaagggagaggttctatgggtttaaccttccccggttgccctgcgacttaccagcaacaattccaacaattttcatctcaaggccaaagtcagagccaaaagtttagagatgagcaccaaaagattcatcaatttaggcaaggagacattgttgcactcccagctggtgttgcacattggttctacaatgatggtgatgcaccta

SEQ ID NO: 405988 - DNA, 323 bp, Oryza sativa nipponbare
  unsure (1)..(323): unsure at all n locations
cgtccgnattcccggtcgcccagcgtncgcccgcgtccgaacagtagaatctcttatgttgtagctgcacaccaccacacaccagaacaactggcgccgccacgcccctatcaatatggaggacccggttaactggggcgcgccggccgacgatatggccggcgggcaccttgaccaggcgcagcgcatggtggcacaccaccgcgagcgcgtggtcaagatccagggcgccaccctacgggttgctctagcgggcgccgttgtccaggcagaggacgcgctacgtgaccgcggagagctcgaccagctaccgctggcacacc

SEQ ID NO: 405989 - DNA, 395 bp, Oryza sativa nipponbare
gtgaactttcaccatgagatgcactgtgtatggtgtgaggagattttgatcaactgaagatgtttttaagatgaaaggtattctccacctagcggacgtagtcattttttcctctattccaaccgttgttgtgagttgtaactgctagagttaattaatctagatacatgcaacccggcgttgcaagggtttaagagcaacgctatgttgattatcgtgattggcagatagaattctgtcatattcaagtgaaaatgtagccacctgccgttcaaaattctgatgtgtgacctgaagattagctgtgtcagctcttgacaaaactgtaatacgattgcaagtacctgtttccttggcatttttttatcatgtccagtacaaatttatatttcctt

SEQ ID NO: 405990 - DNA, 444 bp, Oryza sativa nipponbare
attgatctggagaaagctcgtgtagggcgaactaggatgataaccaatgagcccatcaaccctcgctggtatgagtcgttccacatctattgcgctcatatggcttccaatgtgatcttcactgtcaagattgataaccctattggggcaacgaatattgggagggcttacctgcctgtccaagagcttctcaatggagaggagattgacagatggctcgatatctgtgataataaccgcgagcctgttggtgagagcaagatccatgtgaagcttcagtacttcgatgtttccaaggatcgcaattgggcgaggggtgtccgcagtaccaagtatccaggtgttccttacaccttcttctctcagaggcaagggtgcaaagttactttgtaccaagatgctcatgtcccaaacaacttcattccaaagattccgcttgccgat

SEQ ID NO: 405991 - DNA, 529 bp, Oryza sativa nipponbare; identical to SEQ ID NO: 391756

SEQ ID NO: 405992 - DNA, 488 bp, Oryza sativa nipponbare
cccacgcgtccgcccacgcgtccgcccacgcgtgcggcattatacagcaaaatagaaagatctagtgtcccgcagcaatgaagatcattttcgtctttgctctccttgctattgctgcatgcagcgcctctgcgcagtttgatgttttaggtcaaagttataggcaatatcagctgcagtcgcctgtcctgctacagcaacaggtgcttagcccatataatgagttcgtaaggcagcagtatggcatagcggcaagccccttcttgcaatcagctgcgtttcaactgagaaacaaccaagtctggcaacagctcgcgctggtggcgcaacaatctcactatcaggacattaacattgttcaggccatagcgcagcagctacaactccagcagtttggtgatctctactttgatcggaatctggctcaagctcaagctctggtggctttaacggggcctctagatatggtatctaccctaggtactatg

SEQ ID NO: 405993 - DNA, 500 bp, Oryza sativa nipponbare
  unsure (1)..(500): unsure at all n locations
cggacgcgtggggttcagtcccacaaaaacatggcaaccatcaaattccctatagttttctccgtcgtttgcttgttcctcttgtgtaatggttcgttagcccaacttcttagccaaagtactagtcaatggcaaagttctcgccgtggaagtccaagagagtgcagatttgatcggttgcaagcatttgagccgattcgcactgtaaggtcccaagctggtacaactgagttttttgatgtctctaatgagttgtttcaatgtactggagtatttgttgtccgtcgagttatcgaacctagaggtcttctgttacctcactactccaatggagcaactntggtatatgtcatccaaggcagaggtataacaggaccaactntcccaggatgtcctgagacctatcaacaacagtttcagcaatccgagcaagaccaacaattggaaggccaaagccaaagccataaatttagagatgaacatcaaaagatccacccgtt

SEQ ID NO: 405994 - DNA, 384 bp, Oryza sativa nipponbare
  unsure (1)..(384): unsure at all n locations
gtacaatagctatggcgagttccgtgttctgtcggttttctatatacttttgtgttcttctattatgccatggttctatggcccagctatttaatcccagcacaaacccatggcatagtcctcggcaaggaagttttagggagtgtagatttgatagactacaagcatttgaaccgggggggaaagtgaggtcanaagctggggtgactgagtacttcnatgagaagaatgaattattccagtgcacgggtacttttgtgatccgacgtgtcattcaacctcaaggccttttgggacctcgatacacaaatattcctggcgtgggctacatcatccaagggagaggttctatgggtgtaaccttcccccggtgccctgtgactt

SEQ ID NO: 405995 - DNA, 487 bp, Oryza sativa nipponbare
atcagtgggcaggtagtaccgtctaggtgttggtcaagtggagcagatttgcctccacatcaggaaatcggaatgccttcactctcccctaccatgactgaggtgggtgaagaaagaaggagataaagtctcacctggtgaagttctttgtgaagtagagactgataaagcgacagtggagatggaatgcatggaggaaggctaccttgctaaaattatccatggagatggtgccaaagaaattaaagttggtgagattattgccgtaaccgtggaagaagaggaagacatcggcaaatttaaggattataaggctccatcatctgctgaatctgcagctccagccgaatcgaagccccaatctgagcccacagaaccaaaaaaggagaaagagcagcccaaggctcctgagccaaaggctacaaagacagaagaatcttttctttcagaggatcgcacattctccagtccaattgcaaggaaattg

SEQ ID NO: 405996 - DNA, 340 bp, Oryza sativa nipponbare
  unsure (1)..(340): unsure at all n locations
attgtgcagtaaaaaaatgtcatatgccctaggcacccaagaaactgctccttaagtccttataagcacatatggcattgtaatatatatgtttgagttttagcgacaatttttttaaaaacttttggtcctttttatgaacgttttaagtttcactgtcttttttttttcgaattgggggggtggcttcaaattctaatccccagtccaaattgtaataaacttcaatgctcctaattaacatcttaattcatttatttgaaaaccagttcaaattcttttaggctcaccaaaccttaaacaattcaattnagggtagagatcttccacagcaacaggt

SEQ ID NO: 405997 - DNA, 442 bp, Oryza sativa nipponbare
  unsure (1)..(442): unsure at all n locations
ctcgacgacgcccagaagatcaccgacgacacgctcatccgcgcgtccgtgcccactgtcaagttcctcctcgagaagggcgccaaggtcatcctcgccagccatctgggccgtccgaagggtgtcacccccaagtacagcttgaagcctcttgttccacgcttgtctgagctactggggggggatgttgtgatggccaatgatggcattgatgangaagttgagaaattggctgctgctttgccggaaggtggtgttctactcctagagaatgttagattctacaaggaggaagaaaagaatgatcctgagtttgccaagaagcttgcagctgtcgctgacctctatgtaaatggtgcttttggcactgcacacagagcttatgcttcaactgagggagngaccaaatttttgaaagcctggtgtngcttgcttcctgatg

SEQ ID NO: 405998 - DNA, 513 bp, Oryza sativa nipponbare
cggacgcgtggggcaaaatagaaagagctagtgtgccgcagcaatgaagatcattttcgtctttgctctccttgctattgctgcatgcagcgcctctgcacagtttgatgttttaggtcaaagttataggcaatatcagctgcagtcgcctgtcctgctacagcaacaggtgcttagccgatataatgagttcgtaaggcagcagtatggcatagcggcaagccccttcttgcaatcagctgtgtttcaactgagaaacaaccaagtctggcaacagctcgcgctggtggcgcaacaatctcactatcaggacattaacattgttcaggccatagcgcagcagctacaactccagcagtttggtgatctctactttgatcggaatctggctcaagctcaagctctgttggcttttaacgtgccatctagatatggtatctaccctaggtactatggtgcacccagtaccattaccacccttggcggtgtcttgtaatgaggtttaacagtata

SEQ ID NO: 405999 - DNA, 337 bp, Oryza sativa nipponbare
  unsure (1)..(337): unsure at all n locations
atgctcaattttaggccgatttattccaactcaatttcgtcaatttttattcagatgagctattaataatgctcgaattctaaggcttaattaataggtcatcacgaccttgagatcgaactcctgcccgacgaccagcgtcagcccgctgacgtgcgcgacgcccagcgctcccttctccgggctcccgggggcgccgccgaccgccgtgctcgcgttcacctggacgccgntggcataaacggcgaaccccttgggcggcgccgccgaccggagccccatgagcaccaccttgccgatggccatcgtccggctcggcgcgtacgagtcgtgcacc

SEQ ID NO: 406000 - DNA, 500 bp, Oryza sativa nipponbare
  unsure (1)..(500): unsure at all n locations
tgagaatattgtcattgagtcatttcagtcaccttttgaggagatcaaatctgcagcgtcatatgctctcggaaacattgctgttggaaatttatcgaagtatttgccttttatcttgaatcagattgacaaccaacagaagaaacagtatctattgcttcattcactgaaagaggtaattgcacggcagtctgttgaccatactggccagagtgagctccaggattcaaacattgagaagattttggcattgctctttaatcactgtgaaagtgaggaggaaggagttcggaatgtagttgcagaatgcttaggcaaaattgctctgattgaacctaggaaattaatccctgctctaaaggaacgcacatctagtcctgctgcaaacacaagagctacagntgccattgctataaaatattcaattggtgaacggcctggaaaaatagatgaaattatgtactccgagatttctaccttcccgatgttgattaaagaca

SEQ ID NO: 406001 - DNA, 392 bp, Oryza sativa nipponbare
cccctcctccgctggaggcggcgccgcgcgcgttcctgcagcccagccactaccacccccacacaggtgttctacctcaaggagggccagggccttatcctgcttcttccttaggggaggagggagtccgtcttcgtgagggagggcgacgccatggtcattcttgccggcgccatggtgtactccgccaacacacacagctccaagtggttccgcgtcgtcatgctgctcaaccccgtctccactcccggccacttctaggaatacttttccttttgctgttactctgtcttagttcttttttattcgattattactactaccgacacgcggcacccaaacccccacaccaagcaccccctttttttttttttttcctttttttttttaaa

SEQ ID NO: 406002 - DNA, 170 bp, Oryza sativa nipponbare
cccactcgtccggactattactagagctgctgcggtgtgcactatgttagtcgtttaaaactcgtttatttctattcggttaaaaacttggatgctctgagtcttattgttgcccttcggttgttgtggaatgcgagtacttacagtgctaaaaaaaaaatttttttaag

SEQ ID NO: 406003 - DNA, 368 bp, Oryza sativa nipponbare
ccaaactctcctttaccccaatctcgtgagcggcgacgaactttgccaccgatttcgatcctttttttggcagcgtgtagtgacgcgagagagaaatggcgagcaagaggagcgtgggcaccctgacggagtcggatctgaaggggaagaaggtgttcctccgcgccgatctgaacgtgccgctggatgacagccagaagatcaccgacgacacccgcatccgcgcgtcggttcccaccatcaagttcttgatggggaagggcgccaaggtcatcctggccagccatctgggtcgcccaaaaggtgtaaccccgaagtacagcttgaagcctcttgttccgcgcttgtctgagcttcttggtgttgat

SEQ ID NO: 406004 - DNA, 384 bp, Oryza sativa nipponbare
cccacgcgtccgctccttcctaccgtgcattggcatgaagcctgccggctacgtctctgaggcctcgagggaatccggtctagtcatcatcgacaacagccttgcccttgtagagaccctcatggatgagagacggtggtctgacatgttctcgtgcatgattgctaaggcaacagtgcttgaggaggtgtctaccggcattgcaggaagcagaaatggcgcgttgctgctgatgaaggctgagctacaggtgctctcacctctagtaccaattagggaggttacatttctccggttttgtaagcagctggctgagggtgcatgggcagtagttgatgtgtccattgatgggttagtgagagatcattattctggaaccggacc

SEQ ID NO: 406005 - DNA, 282 bp, Oryza sativa nipponbare
  unsure (1)..(282): unsure at all n locations
cggacgcgtgggcgcctccacaaatccgccgccgccgacgtcgagagagaagggacagagagcgagtgcttcgccgtccccgccgccgcgatgagggccaagtggaagaagaagagaatgaggaggctcaagaggaagcgccgaaagatgaggcagagatccaatgtttcgttatcagtagtgtggatgtcttcttacatcatgttgaccggtgcatttggattgatggtgccttcngattcttgatgttgcagttattgggtgangaaatgtgaacctttt

SEQ ID NO: 406006 - DNA, 219 bp, Oryza sativa nipponbare
  unsure (1)..(219): unsure at all n locations
cctgccggatcgagcaggtagggtttcgacctttttttttcccaccaggagggcgacgagatgttcgggcgcgcgccgaagaagagcgacaacacgcggtactacgaggtgcttggggtgcccaaggatgcgtcccangatgacctttttttggcgtacgggggggcggccatcaataaccacccggggcgggggcggagaccccaaagaggggggggg

SEQ ID NO: 406007 - DNA, 466 bp, Oryza sativa nipponbare
  unsure (1)..(466): unsure at all n locations
cgtccgcattcccggtcgccccgcgtccgtgatcgcgagcggccccttattttttttttattgttttcattctattgatccttcactatgtttatctctattatcattgttccttgacaaggcggcgacggtcaccgaggaggactactgcacttccggagaacatgcaggatccgtggaggctgtgcacggtgacccatttggaggaagtgaagtgcatcctgaagatgctgcccatctggctgagcacgatcgtatactcggtggtgtacacccagatggcgtcgctgctcgtggagcaaggaaccaccatgaacaccttcgtcttggtcgttccacaaaccccgcagcgagcatgtcagcgtttgaaatgcttaacntgctggcgtncatggncatctaccggcgcgtgctcttgccggtcatgtggcgcctgaccggcaacccagaagggctgacctatctg

SEQ ID NO: 406008 - DNA, 454 bp, Oryza sativa nipponbare
tgggcctacacgataccctcctctcccttcccttcccttgccgcttccaactccaagtctcgctgtgatcaggagctagggtttgtgcgatcttcgggaggaggggaagatgatcgaggtggtgctgaacgaccggctggggaagaaggtgcgggtgaagtgcaacgaggacgacaccatcggcgacctcaagaagctggtggcggcgcagaccgggacgaggcccgagaagatccgcatccagaagtggtacaacatctacaaggaccacatcaccctcaaggactacgagatccacgacgggatgggcctcgagctctactacaactagacgccgcgcctctggctggtatgaatttagtcatggatggcaaacagattatgcccatttgagcggccagcgttcatagcttatatataaaactctagtgagctgtgcatttctgtgtgccaa

SEQ ID NO: 406009 - DNA, 489 bp, Oryza sativa nipponbare
  unsure (1)..(489): unsure at all n locations
cggacgcgtgggatctacttctcctgaganttgaatggagtagtgtctgaagtcaaacaggtattacctggtttgattcggcgacatcgacattctgatagcactggcagcacaacttcctcaagaagtaatccaatgcgagaggacatgttgaaccgatcaaacacacaccgtgccggaggtgaatttttagaaaatcatctagcaaaattattcgagcagaaaatggagatattcaccaaagttgaatacacacaggaatctgtaatttctgctgtcctcaagctctgcctgaaaagcttgcaagaatttgttcggcttcagacattcaacagaagtggatttcagcaaattcagctggatatggaatttctcaagacatcccttaaggagtttgttgatgatgaaccaactattanctttttacttaaagaggggaacaatgctgctcacgagagatgtcttgacccaatcccttttgagccggcc

SEQ ID NO: 406010 - DNA, 628 bp, Oryza sativa nipponbare
  unsure (1)..(628): unsure at all n locations
cccacgcgtccgcccacgcgtccgacccggttgcctccccgccgctctcctctccggtctactcctccgccgtcgccgtcggcaccgccgccggagctcctccctgctccctctactgggttggcggggagtggatcggggatctgcacgcaggggccgatttcttctcttcgtaaggagtagataacacagaatagttgaagatgagcagcataggcacaggatacgatctgtccgttaccaccttctctccggatggtcgcgtcttccaggttgagtatgccacgaaggctgtcgacaacagcgggactgttgttggaatcaaatgcaaagatggaatcgtcctgggtgtggagaagctagtaacttcgaagatgatgctggagggatctaataggaggatccattcagtgcactggcactctggcttggctgttgctggtttagctgcagatggcagggaaattgtttcaagagcaaaatcggaagcgggcaggtatgaagaaggctatggggaaaccatttctggaaaaaaattgggctgatcgtgtgggtagctacgtnaattttgtacacttaattgggggttaaggcttttggtgtggatgtatcttggaggtataaaggg

SEQ ID NO: 406011 - DNA, 421 bp, Oryza sativa nipponbare
cccacgcgtccgcataagttcaaggatgaacatcaaaagattcaccgtttcagacaaggagatgttatcgcgttgcctgctggtgtagctcattggtgctacaatgatggtgaagtgccggttgttgccatatatgtcactgatatcaacaacggtgctaatcaacttgaccctcgacagagggatttcttgttagctggaaataagagaaaccctcaagcatacaggcgtgaagttgaggagtggtcacaaaacatatttagtggctttagcactgaactgcttagcgaggcttttggcataagcaaccaagttgcaaggcagctccagtgtcaaaatgaccaaagaggagaaattgtccccgttgaacccgggctcattttgcttgcaccatatgcattattgggagatcctgataccg

SEQ ID NO: 406012 - DNA, 720 bp, Oryza sativa nipponbare
cccacgcgtccggtttgcttgttcctcttgtgcgatggctccctagcccagcagctattaggccagagcactagtcaatggcagagttctcgtcgtggaagtccgagaggatgtagatttgataggttgcaagcatttgagccaattcggagtgtgaggtctcaagctggcacaactgagttcttcgatgtctctaatgagttgtttcaatgtaccggagtatctgttgtccgccgagttattgaacctagaggcctactactaccccattacactaatggtgcatctctagtatatatcatccaagggagaggtataacagggccgactttcccaggctgtcctgagacctaccagcagcagttccaacaatcagggcaagcccaattgaccgaaagtcaaagccaaagccataagttcaaggatgaacatcaaaagattcaccgtttcagacaaggagatgttatcgcgttgcctgctggtgtagctcattggtgctacaatgatggtgaagtgccggttgttgccatatatgtcactgatattaacaacggtgctaatcaacttgaccctcgacagagggatttttttgtagctggaaataagaaaaaccctcagcatacaggcgtgaagttgaggagtggtcacaaacatatttaaggggtttagcctgaactgcttaccagggttttggctaaaccaccaatttgagggagctca

SEQ ID NO: 406013 - DNA, 205 bp, Oryza sativa nipponbare
  unsure (1)..(205): unsure at all n locations
ccagacgcttctctcctcctctaatgtgagntgtctgtctcgtcgtcctcgcatctccactcgccatgggcaagattaagatcggaatcaacggtttcggaaggatcgggaggctcgtggccagggtggccctccagagcgaggatgtcgagctcgtcgccgtttactaccccttgggggggggcgactacatgacctagggggg

SEQ ID NO: 406014 - DNA, 239 bp, Oryza sativa nipponbare
cgcatagtatagatccacaggcacctgctagactagtgtttgcctgcttggctgcggtgtttctactggcctcggagcagtatggaataccgcataggttgaagcaggttttatcgttgctatttttggacttggcacagttggacttgcagttgctgagggttcatccctgctggggcttgtcggataatcggctttttcattgatcgcaaaaagtttgatgttgcggggggcgttgg

SEQ ID NO: 406015 - DNA, 282 bp, Oryza sativa nipponbare
  unsure (1)..(282): unsure at all n locations
ccgggtcgcccagcgtccgatcaggccaagcccaattgtacgaaagtcaaagccaaagtcaaaagttcaaggatgaacatcaaaagatccaccgtttcagacaaggagatgtaattgcattgcctgctggtgtagctcattggtgctacaatgatggtgaagtgccagttgttgccatatatttttttgatctcaacatttgtgctaatnaacttgaccctagggaaagggatttnttgttggggggggggagagaaacccttatgggggggggcgtgaggt

SEQ ID NO: 406016 - DNA, 405 bp, Oryza sativa nipponbare
  unsure (1)..(405): unsure at all n locations
cgaaacccttgtcttcctcccaacccatcttgacccaaaccctaaaaaaccaaaaaaaaaatccgcaaaattacccccgaaaatcccaaaaaatatncgccggaaccctatccttcgatcggatccacctatccccctccccggtgatggcggcgcaggttcaggcggtgccggcggcggagggtggtggcgcgccgccgcaggccaacggggtcgtggctgcgggctctgctgccgccgctgcggcgaccttccaggcgacgtcgctgtacgtgggggacctcgacgtgagcgtgcaggacgcgcanctgttcgacgtcttcagccaggtcggatcggtggtatcggtgcgcgtttgccgggacntcaataccaggctgtcgctggggcacgccctattgtcac

SEQ ID NO: 406017 - DNA, 271 bp, Oryza sativa nipponbare
  unsure (1)..(271): unsure at all n locations
cctgcagtacgtccgatcctgtcgccacgcgtccgacacatgagacattttcgtatttgctctccttgctttgttgcatgcaatgcctctgcgcggttgatcctttagcaaagtataggcaatcaactacagcgcattctatcagnacaggctacccagcagtgagtcgaaggacagatagcatagggacccctctggcaaccactcgttcattgaaaacaccatcatgcacacatgtgccacactcagctggaaacacaattcctaccag

SEQ ID NO: 406018 - DNA, 149 bp, Oryza sativa nipponbare
  unsure (1)..(149): unsure at all n locations
gtttccataacatcctcaaatagcgatnncgaccatagctttctctcgggtatctatctacttttgtgtgcttctcctatgccatggctctatggcccanctatttggtccgaacgtaaatccatggcacaaccctngggaaggagggg

SEQ ID NO: 406019 - DNA, 249 bp, Oryza sativa nipponbare
  unsure (1)..(249): unsure at all n locations
cccggtcgaccacgcgtccgcccacgcgtccgcggacgcgtggggggagggttctggtaccaccatgcagaggaaacttacttaatgcttgcatactggcttccagctacaacacatacattacctgtaaatgctactcaccgtgtgggtgttggagcatttgtaatgaatgacaaaagagaggtattggctgtccaagaaaagagtggtgtacttcgaggcctangtgtatggaaatttccaactgga

SEQ ID NO: 406020 - DNA, 452 bp, Oryza sativa nipponbare
  unsure (1)..(452): unsure at all n locations
cgctactggagatcaagaagtccttccgcaatgtggacaacgtgctgtacgattgggccggcgatggcgcgccgcggcgctactgctcgtggcgcggcgtgctctgcgacaacgtcaccttcgccgtcgcggcgctcaacctctcggggctcaatcttgggggcgaaatctccccggccatcgggaatctgaaaagcgtcgagtcgatcgacttgaagtcgaatgaactttctgggcagatccctgatgagattggcgattgcacgtcgcttaaaactctggacctgtcctctaacaatctaggaggaggtcgagaggttgacgaggctcaaggctggccggatgaaggagctcgtgctcaagaggaggttggagctggagagcatctgcaggagcatgcacgtcnagcctgacaccagcactgtgccggagaagtccatcgcgtngattga

SEQ ID NO: 406021 - DNA, 403 bp, Oryza sativa nipponbare
  unsure (1)..(403): unsure at all n locations
cctacttccaaaaaagagagaaaaaaaaatccagcgacttaggcggaggaggaagcgagcagaggttgcgagtggaagggaactgaggaagcggagcgcaatggcggcggcggcgagagacgctctcctggacgagctgcgcgcgctcatggcggcgcactccccgccgctccacgcgcgtggggtcccctccgaagacgcccaccagagcgagtacgtgtcggagcgggacaagcggcggcagttcgtctccgggttcaccgggagcgccggtttggcgcttataactatgaaggaggcgctattgtggacggatgggcgttacttcttgcaggcagagcancaacttagtgatcggtggaaattgatgcnaatgggagaagatccccccnngtgaagttgg

SEQ ID NO: 406022 - DNA, 207 bp, Oryza sativa nipponbare
  unsure (1)..(207): unsure at all n locations
cccacgcgtccggcatgccatggtgcaaaagcttatagaattcagatgccataaatactactatccctggagctaaaggttggtgggtcgaggagaccatcttgtcaccaagaaagctctcagaactctccatctctaggccagcttagggctggaccagctatttttcattgggagggtgtatcanttnataaggggaggagggga

SEQ ID NO: 406023 - DNA, 530 bp, Oryza sativa nipponbare
  unsure (1)..(530): unsure at all n locations
cccacgcgtccgcccacgcgtccgcccacgcgtccgcccacgcgtccgatagctatggcgagttccgttttctctcggttttctatatacttttgtgttcttctattatgccatggttctatggcccagctatttaatcccagcacaaacccatggcatagtcctcggcaaggaagttttagggagtgtagatttgatagactacaagcatttgaaccacttcggaaagtgaggtcagaagctggggtgactgagtacttcgatgagaagaatgaattattccagtgcacgggtacttttgtgatccgacgtgtcattcagcctcaaggccttttggtacctcgatacacaaatattcctggcgtggtctacatcatccaagggagaggttctatgggtttaaccttccccggntgccctgcgacttaccagcaacaattccaacaattttcatctcaaggccaaagtcagagccaaaaggttagagatgagcaccanaagattcatcaatttaggcaaggagacattgt

SEQ ID NO: 406024 - DNA, 421 bp, Oryza sativa nipponbare
  unsure (1)..(421): unsure at all n locations
tttctgaacacagcaccaccccttgtgctgcgtgtcccacctccctctgaattgtgggcctgaggcgatggcggcgctcgccccgtccaagatgctcggcacccggctcaacttcgccggctcctcccgctacgccaccgcggcaccgaccaccggagcgcagaagatcgtctccctctgcagcaagaagcccgccccgaagcccaagcccgccgccgtcacctcctggagccccgacatcggcgatgagctcgccaagtggtacggccctgacaggaggatcttcttgccggagggtctcctggaccgctcagaggtgccggactacctcaacggagaggtccccggagactacggctacnaccctnttggcctcagcaagaagccaaaggactttttcaagtaccaggtctatgagctg

SEQ ID NO: 406025 - DNA, 533 bp, Oryza sativa nipponbare
cgcaacaatctcatcagatctcgagatctcatgaggtttggtttgttcccgtcggatttttcttttccactgttcgatcttcctgttcgtgcgagatggcgaagggagagggcccggcgatcggcatcgacctcggcaccacctactcgtgcgtcggcgtgtggcagcacgaccgggtggagatcatcgccaacgaccaggggaaccgcaccacgccgtcgtatgtcgcgttcaccgactccgagcggctcatcggcgacgccgccaagaaccaggtcgccatgaaccccatcaacaccgtcttcgatgccaagcgactgataggtaggcggttctccgacccgtccgtgcagagtgacatgaagctgtggccgttcaaggtcatccctggccccggcgataagcctatgattgtggtgcagtacaagggcgaggagaagcagttctccgccgaggagatctccctcctggtgctcatcaagatgagggagatcgctgaagcctacctcggctccaacataaaagacgccgtg

SEQ ID NO: 406026 - DNA, 368 bp, Oryza sativa nipponbare
  unsure (1)..(368): unsure at all n locations
gggccctagcattcagaactgatattataagaaacttttacagtacatagcagcaacgcaattggttgccaattatttatttatttatttagnnatncggggggggcattgccaacttaagaggagggcgccacattataaacgtcttggtagctcttgtattggaggggagtgaatgcaccgaactcatctcctctgttatgcttgagcctctgagcctcttctcttgagatgcgatatgcatttgctagaacatcagttgggagagcacggaagatggaactctttcctgcaatgtggcttaccatagagttagggtttgtcttgaatgcaatggaagcccatccttctctttgggccttctttac

SEQ ID NO: 406027 - DNA, 488 bp, Oryza sativa nipponbare
  unsure (1)..(488): unsure at all n locations
ggtgaggactcaaccccaaaagaaacgcctccaaaagctgtggttctgtaggggaggttttggatggcagacgcatctcgggaggttctactatgcgctgactccccttaacctcccctacagaaccacagctccctccaaaagaacgagaactttttgtgccaatgccggggctcangaagcgtattgcacaccgtttgaaggattcacaaaacacatttgcaatgctgaccacatttaatgaagttgacatgactaatttgatgaagctgcggtctgattataaggatgagtttgtcaccaagcacggtgtcaaattgggtctgatgtcctgctttgtcaaggctgctgttacagcacttcaaaaccaaccaattgtcaatgctgtccttgatggtgatgacatcatatacagagactatgttgacatcagngttgctgttggtacttcccagggtcctgtggcccctgttatcctacatgctgat

SEQ ID NO: 406028 - DNA, 531 bp, Oryza sativa nipponbare
cccacgcgtccgaaccgactttgacacaacagcaagaacaagcacaagctcaataccaagaagttcaatatagtgaacaacaacaaacatcttcccgatggaacggattggaggagaacttctgcacaatcaaggcaagagtaaacattgaaaatcctagtcgtgctgattcatacaacccacgtgctggaaggatttcaagtgtcaacagccagaagttccccatccttaacctcatccaaatgagtgctaccagagtaaacctataccagaatgctattctctcaccattctggaatgtcaatgctcatagtttggtctatatgattcaagggcaatctcgagttcaagtcgttagtaactttggaaagactgtgttcgatggtgtccttcgccctggacaactattgatcattccacaacattatgctgtcttgaagaaagcagagcgtgaaggatgccaatatattgcaatcaagacaaacgctaacgccttcgtcagccaccttgcaggaaaaaactcagtattcc

SEQ ID NO: 406029 - DNA, 344 bp, Oryza sativa nipponbare
  unsure (1)..(344): unsure at all n locations
cgccgtataggagtagtcgtgtggcggctggtgctagcaatggcggcttcttcttcttcttcttcctctctggcggtggtggtggtggcggcggcggtggcgctggtcgccggcggcggcgcggcggtggcgcagctgtgcgaggagtactacgactgctcttgccccggcgcggggggatcntgcggcgggtgctgagcgatgcgcaccggagcgacgcccggatcttcgcgagcctgatccggctccatttccacgactgcttcgtgcaggggtgcgacgcgtcnctgctgctggacagcgtccccnggatgcccgcggagaagacgtcncccnccaacaac

SEQ ID NO: 406030 - DNA, 358 bp, Oryza sativa nipponbare
ccaaactctcctttaccccaatctcgtgagcggcgacgaactttgccaccgatttcgatcctttttttggcagcgtgtagtgacgcgagagagaaatggcgagcaagaggagcgtgggcaccctgacggagtcggatctgaaggggaagaaggtgttcctccgcgccgatctgaacgtgccgctggatgacagccagaagatcaccgacgacacccgcatccgcgcgtcggttcccaccatcaagttcttgatggggaagggcgccaaggtcatcctggccagccatctgggtcgcccaaaaggtgtaaccccgaagtacagcttgaagcctcttgttccgcgcttgtctgagcttct

SEQ ID NO: 406031 - DNA, 373 bp, Oryza sativa nipponbare
cccacgcgtccgctccttcctaccgtgcattggcatgaagcctgccggctacgtctctgaggcctcgagggaatccggtctagtcatcatcgacaacagccttgcccttgtagagaccctcatggatgagagacggtggtctgacatgttctcgtgcatgattgctaaggcaacagtgcttgaggaggtgtctaccggcattgcaggaagcagaaatggcgcgttgctgctgatgaaggctgagctacaggtgctctcacctctagtaccaattagggaggttacatttctccggttttgtaagcagctggctgagggtgcatgggcagtagttgatgtgtccattgatggtttagtgagagatataattctg

SEQ ID NO: 406032 - DNA, 315 bp, Oryza sativa nipponbare
cggactgctgtgggcgcctctcacaaatccgccgccgccgacgtcgagagagaagggacagagagcgagtgcttcgccgtccccgccgccgcgatgagggccaagtggaagaagaagagaatgaggaggctcaagaggaagcgccgaaagatgaggcagagatccaagtagtcgttatcagtagtgtggatgtcttcttacatcatgttgaccggtgcatttggattgatggtgccttcggattcttgatgttccagttattggtgtaggaatgtgaaaccttttctggttttggttaattctagctgttgaaat

SEQ ID NO: 406033 - DNA, 435 bp, Oryza sativa nipponbare
tagcacgccgacggccgcccttactagttttatattgttttcattctaatgatccttcacatttaccatatcatgtttcttgacaaggcggcgaccgacaccatatgaggactactgcacgctttcacaacatgcaggatccgcgaaggctgcgcacggtgacccagatggaggaagtgaagtgcatactgaagatgctgcccatctggctgagcacgatcgtatactcggtggtgtacacccagatggcgtcgctgctcgtggagcaaggaaccaccatgaacaccaacatcgtgtcgttccacaaacccgcagccagcatgtcagtgttcgacatcctaagcgtgctggcgttcatcgccatctaccggcgcgtgctcgtgccggtcatgtcgcgccagaccggcaaccccaaagggctgaccgagctgcagc

SEQ ID NO: 406034 - DNA, 559 bp, Oryza sativa nipponbare
  unsure (1)..(559): unsure at all n locations
cggacgcgtgggatctacttctcctgaganttgaatggagtagtgtctgaagtcaaacaggtattacctggtttgattcggcgacatcgacattctgatagcactggcagcacaacttcctcaagaagtaatccaatgcgagaggacatgttgaaccgatcaaacacacaccgtgcgggaggtgaatttttagaaaatcatctagcaaaattattcgagcagaaaatggaaatattcaccaaagttgaatacacacaggaatctgtaatttctgctgtcctcaagctctgcctgaaaagcttgcaagaatttgttcggcttcagacattcaacagaagtggatttcagcaaattcagctggatatggaatttctcaagacatcccttaaggagtttgttgatgatgaagcagctattagctttttacttaaagaggtgaacaatgctgctcacgagagatgtcttgacccaatccctctcgaggccgccatattggataagctcatcagnggcaaactagcaaagattaaagagcaaagnccaatatggagtagctacg

SEQ ID NO: 406035 - DNA, 490 bp, Oryza sativa nipponbare
cccacgcgtccgcccacgcgtccgacccggttgcctccccgccgctctcctctccggtctactcctccgccgtcgccgtcggcaccgccgccggagctcctccctgctccctctactgggttggcggggagtggatcggggatctgcacgcaggggccgatttcttctcttcgtaaggagtagataacacagaatagttgaagatgagcagcataggcacaggatacgatctgtccgttaccaccttctctccggatggtcgcgtcttccaggttgagtatgccacgaaggctgtcgacaacagcgggactgttgttggaatcaaatgcaaagatggaatcgtcctgggtgtggagaagctagtaacttcgaagatgatgctggagggatctaataggaggatccattcagtgcactggcactctggcttggctgttgctggtttagctgcagatggcaggcaaattggttcaagagcaaaacggaagcg

SEQ ID NO: 406036 - DNA, 355 bp, Oryza sativa nipponbare
  unsure (1)..(355): unsure at all n locations
cggacgcgtgggtntgaaaggngtggaggtgagggcttaggtagttatnaatncaggaaatncaactgggcaggttcttgctgaggaaaaccaacgggacatagtgaagttctgcaaaaatgagggacttgttcttctggctgatgaggtgtaccaagagaacttttttgttgacaacgggagatttaactctttcaagaagatagcgagatccatggtatacaaggaggatgatctccctttagtatcatttcaatctgtatctaatggatattatggtgaatgtgagaaaagaggacgctacatggatattactggctttagtgctacagttagagagcacatctacaaagtg

SEQ ID NO: 406037 - DNA, 461 bp, Oryza sativa nipponbare
cccacgcgtccgcataagttcaaggatgaacaggaaaagattcaccgtttcagacaaggagatgttatcgcgttgcctgctggtgtagctcattggtgctacaatgatggtgaagtgccggttgttgccatatatgtcactgatatcaacaacggtgctaatcaacttgaccctcgacagagggatttcttgttagctggaaataagagaaaccctcaagcatacaggcgtgaagttgaggagtggtcacaaaacatatttagtggctttagcactgaactgcttagcgaggcttttggcataagcaaccaagttgcaaggcagctccagtgtcaaaatgaccaaagaggagaaattgtccgcgttgaacgcgggctcagtttgctgcaaccatatgcatcattgcaagagcaggaacaaggacaaatgcaatcaagagagcattatcaagaaggaggata

SEQ ID NO: 406038 - DNA, 558 bp, Oryza sativa nipponbare
cccacgcgtccggtttgcttgttcctcttgtgcgatggctccctagcccagcagctattaggccagagcactagtcaatggcagagttctcgtcgtggaagtccgagaggatgtagatttgataggttgcaagcatttgagccaattcggagtgtgaggtctcaagctggcacaactgagttcttcgatgtctctaatgagttgtttcaatgtaccggagtatctgttgtccgccgagttattgaacctagaggcctactactaccccattacactaatggtgcatctctagtatatatcatccaagggagaggtataacagggccgactttcccaggctgtcctgagacctaccagcagcagttccaacaatcagggcaagcccaattgaccgaaagtcaaagccaaagccataagttcaaggatgaacatcaaaagattcaccgtttcagacaaggagatgttatcgcgttgcctgctggtgtagctcattggtgctacaatgatggtgaagtgccggttgttgccatatatgtcacttgtatcaacaacggtgct

SEQ ID NO: 406039 - DNA, 278 bp, Oryza sativa nipponbare
  unsure (1)..(278): unsure at all n locations
ccagacgcttctctcctcctctaggtgaantgtctgtctcgtcgtcctcgcatctccactcgccatgggcaagattaagatcggaatcaacggtttcggaaggatcgggaggctcgtggccagggtggccctccagagcgaggatgtcgagctcgtcgccgtctactacccctggggggggggggactacatgacctacgtggggaagtacaatacccnncacggggggggggagcacagnnacatnaagagcaaggactccaagaatttgtttttgg

SEQ ID NO: 406040 - DNA, 309 bp, Oryza sativa nipponbare
cgcattgatagacccactataacctctagacaaagtttgcctgcttggctgcggtgtttctactggcctcggagcagtatggaatacctcataggttgaagcaggttccatcgttgctatttttggacttggcacagttggacttgcagatgctgagggtttttttttgctggcgcttgttggattattggcatctacattgatagcaaaaagttggatgtcgcaaagaacttttggggttacttgattttgggaacccaaaggaccatgactaatcaatccaacaggtcatagttgaccttacaaacg

SEQ ID NO: 406041 - DNA, 310 bp, Oryza sativa nipponbare
  unsure (1)..(310): unsure at all n locations
atcaggccaagcccaattgaccgaaagtcaaagccaaagtcaaaagttcaaggatgaacatcaaaagatccaccgtttcagacaaggagatgtaattgcattgcctgctggtgtagctcattggtgctacaatgatggtgaagtgccagttgttgccatatatgtcactgatctcaacagcggtgctaatcaacttgaccctaggcaaagggatttcttgttagctggaaataaaanaaacccttaagcatacangcntnaggttgaagagcggntacataacatatttattggttttatnacttaattt

SEQ ID NO: 406042 - DNA, 589 bp, Oryza sativa nipponbare
  unsure (1)..(589): unsure at all n locations
gcgaaacccttgtcttcctcccaacccatcttacccaaaccctaaaaaaccaaaaaaaaaatccgcaaaattacccccgaaaatcccaaaaaatatcgccggaaccctatccttcgatcggatccacctatccccctccccggtgatggcggcgcaggttcaggcggtgccggcggcggagggtggtggcgcgccgccgcaggccaacggggtcgtggctgcgggctctgctgccgccgctgcggcgaccttccaggcgacgtcgctgtacgtgggggacctcgacgtgagcgtgcaggacgcgcagctgttcgacgtcttcagccaggtcggatcggtggtatcggtgcgcgtttgccgggacgtcaataccaggctgtcgctgggttacgcctatgtcaacttcagcagtcccgccgatgctgcaagggcattggaaatgctgaacttcactcctattaacgggaagcctatcaggataatggtttctaaccgngaccccagttcacgtaaaagtggagccagcaacatatttattaagaatcttgacaagtcaatagataaacaagctttctatgacacattttct

SEQ ID NO: 406043 - DNA, 360 bp, Oryza sativa nipponbare
  unsure (1)..(360): unsure at all n locations
gtggaatggggatccatgtgcaccaaggacatgggatgcatgggagggagtcacttgcctccgcaaggacaaagggcttgtgatcacccaactggatcttgcaagtcaaggactaaaaggttacatcactgatgaaataagtcatctgacagacttggaacttgagctataattctttgactggaagcttacctccgggcttagggcaaccttcacttgctacattggatctgtcatcaaaccagtttactggaggaattcctggcaccataggttcatcaaaattacaaacagctttactgaacaacaatcaactngatgggcaagttccagaaagactttactttattggcgtacatg

SEQ ID NO: 406044 - DNA, 157 bp, Oryza sativa nipponbare
  unsure (1)..(157): unsure at all n locations
caacacaatgaagatcattttcgtgttggncgctccttgctattgttgcatgcaatgcctctgcgcggtttgatcctcttagtcaaagttataggcaatatcaactacagtcgcatctcctactacagcaacaagtgctcagcccatgcacagagtt

SEQ ID NO: 406045 - DNA, 161 bp, Oryza sativa nipponbare
  unsure (1)..(161): unsure at all n locations
gtttccaataacatcctcaaaagggtgggcgacatagctttctctcgggtatctatctacttttgtgttcttctcctatgccatggctctatggcccagctatttggtccgaacgtaaatccatggcacaaccctnggnaaggagggtntagggagttttt

SEQ ID NO: 406046 - DNA, 176 bp, Oryza sativa nipponbare
  unsure (1)..(176): unsure at all n locations
cccacgcgtccgccccgcgtgcggcgtttggatattctgggtgctggccgtcttccccaccgtcccgttcatgcccgtcggccgtacggccggctccctccttggcgccatgctcatggtcctcttccgngtcatctnnccggaggacncctattctttttttttggggggggggg

SEQ ID NO: 406047 - DNA, 68 bp, Oryza sativa nipponbare
  unsure (1)..(68): unsure at all n locations
tggagtagtgcctcagggatgctaagatggacaagagctctgttcatgatgttgnncttgntggtggc

SEQ ID NO: 406048 - DNA, 349 bp, Oryza sativa nipponbare
cccacgcgtccgcggacgcgtgggggaaggggtctggtaccaccatgcagaggaaacttacttaatgcttgcatactggcttccagctacaacacatacattacctgtaaatgctactcaccgtgtgggtgttggagcatttgtaatgaatgacaaaagagaggtattggctgtccaagagaagagtggtgtacttcgaggcctaggtgtatggaaatttccaactggagttgttgaaccaggagaagatataaacttaggagctgtaagagaagtaaaagaagagactgggattgatacagaatttggtgaagttcttggcttcagggagagccacaaagcttttttt

SEQ ID NO: 406049 - DNA, 498 bp, Oryza sativa nipponbare; identical to SEQ ID NO: 391776

SEQ ID NO: 406050 - DNA, 439 bp, Oryza sativa nipponbare
  unsure (1)..(439): unsure at all n locations
cctacttccaaaaaagagagaaaagggaatccagctattaggcggaggaggaagcgagcagaggttgcgagtggaagggaactgaggaagcggagcgcaatggcggcggcggcgagagacgctctcctggacgagctgcgcgcgctcatggcggcgcactcccctccggtccacgcgggtggggtcccctccgaagacgcccaccagagcgagtacgtgtcggagcgggacaagcggcggcagttcgtctccgggttcaccgggagcgccggtttggcgcttataactatgaaggaggcgctattgtggacggatgggcgttacttcttgcaggcagagcagcaactcagtgatcgctggaaattgatgcgaatgggagaagatcccccggntgaagtttggatagctgataacctgtcagatgaagctgttgttggaa

SEQ ID NO: 406051 - DNA, 154 bp, Oryza sativa nipponbare
gatggattatctgattgccgcctgggggtcgtagaaatggaacagaacttgtgctcacttatgaggacaaggatgaagattggatgcttgttggtgatgttccgtggcgaatgttcacagacagctgtaggaggctgaggattatgaaggggtc

SEQ ID NO: 406052 - DNA, 285 bp, Oryza sativa nipponbare
  unsure (1)..(285): unsure at all n locations
cccacgcgtccggcatgccatggtgcaaaagcttatagaattcagatgccataaatactactatccctggagctaaaggttggtgggtcgaggagaccatcttgtcaccaagaaagctctcagaactctccatctctaggccagcttagggctggaccagcttgcagccattggtagcctgtatcagttcataaggggaggaggngaaggcaaggaggcanctagcgaagaagaaaagcanacaccaaaactcaggnatgcatgacaaggaagaacatgatccta

SEQ ID NO: 406053 - DNA, 52 bp, Oryza sativa nipponbare
cggacgcgtgggcggacgcgtgggcggacgcgtgggcggacgcgtgggccca

SEQ ID NO: 406054 - DNA, 494 bp, Oryza sativa nipponbare
cccacgcgtccgcccacgcgtccgcccacgcgtccgcccacgcgtccgatagctatggcgagttccgttttctctcggttttctatatacttttgtgttcttctattatgccatggttctatggcccagctatttaatcccagcacaaacccatggcatagtcctcggcaaggaagttttagggagtgtagatttgatagactacaagcatttgaaccacttcggaaagtgaggtcagaagctggggtgactgagtacttcgatgagaagaatgaattattccagtgcacgggtacttttgtgatccgacgtgtcattcagcctcaaggccttttggtacctcgatacacaaatattcctggcgtggtctacatcatccaagggagaggttctatgggtttaaccttccccggttgccctgcgacttaccagcaacaattccaacaattttcatttcaaggccaaagtcagagccaaaagtttagagatgagca

SEQ ID NO: 406055 - DNA, 181 bp, Oryza sativa nipponbare
  unsure (1)..(181): unsure at all n locations
tttctgaacacagcaccaccccttgtgctncgttgccacctccctctgaattgtgggcctgaggcgatggcggcgctcgccccgtccaagatgctcggcacccggctcaacttcgccggctcctcccgctacgccaccgcggcaccgaccaccggagcgcatattatcgtctcgggggggg

SEQ ID NO: 406056 - DNA, 512 bp, Oryza sativa nipponbare
  unsure (1)..(512): unsure at all n locations
cgcaacaatctcatcagatctcgagatctcatgaggtttggtttgttcccgtcggatttttcttttccactgttcgatcttcctgttcgtgcgagatggcgaagggagagggcccggcgatcggcatcgacctcggcaccacctactcgtgcgtcggcgtgtggcagcacgaccgggtggagatcatcgccaacgaccaggggaaccgcaccacgccgtcgtatgtcgcgttcaccgactccgagcggctcatcggcgacgccgccaagaaccaggtcgccatgaaccccatcaacaccgtcttcgatgccaagcgactgataggtaggcggttctccgacccgtccgtgcagagtgacatgaagctgtggccgttcaaggtcatccctggccccggcgataagcctatgattgtggtgcagtacaagggcgaggagaagcagntctccgccgaggagatctcctccatggtgcttatcaagatgagggagatcgctgaagcctacctcggc

SEQ ID NO: 406057 - DNA, 376 bp, Oryza sativa nipponbare
ggccttagcattcagaactgatattataagaaacttttacagtacatagcagcaacgcaattgcttgcaatttatttatttatttatttagttattctgggggggcattgccaacttaagaggattccgccacattataaacgtcttggtagctcttgtattggaggggagtgaatgcaccgaactcatctcctctgttatgcttgagcctctgagcctcttctcttgagatgcgatatgcatttgctagaacatcagttgggagagcacggaagatggaactctttcctgcaatgtggcttaccatagagttagggtttgtcttgaatgcaatgtaagcacatccttctttttgggcctttttacaactacatag

SEQ ID NO: 406058 - DNA, 472 bp, Oryza sativa nipponbare
  unsure (1)..(472): unsure at all n locations
cggactcgtgggtgaggattcaaccccaaaggagacgcctccaaaagctgtggttctgtaggggaggttttgggtggcagaggcatcttgggaggttctgcttttggtgacttctcttntacccaaaatctnnaactacaaatcactgctaaatgacaagtactttttttgccgggggggggggtcacgcatcgttttgcgcatcgtttgacggattcacaaaacacatgttgcaatgctgaccacatttcatgaagttggcatgactcatttgatgaagctgcggtcttgttataaggatgagtttggcaccaggcacggtgtccaattgggtctgatgtcctgctttgtgaggggtgatgttacaggacttnaaaatcaaccaattggcaatgctgtcattgatggtgatgacatcatatacagagactatgttgacttcagngttgcttggtggtctttncaaggtctt

SEQ ID NO: 406059 - DNA, 514 bp, Oryza sativa nipponbare
cccacgcgtccgaaccgactttgacacaacaagaagaacaagcacaagctcaataccaagaagttcaatatagtgaacaacaacaaacatcttcccgatggaacggattggaggagaacttctgcacaatcaaggcaagagtaaacattgaaaatcctagtcgtgctgattcatacaacccacgtgctggaaggatttcaagtgtcaacagccagaagttccccatccttaacctcatccaaatgagtgctaccagagtaaacctataccagaatgctattctctcaccattctggaatgtcaatgctcatagtttggtctatatgattcaagggcaatctcgagttcaagtcgttagtaactttggaaagactgtgttcgatggtgtccttcgccctggacaactattgatcattccacaacattatgctgtcttgaagaaagcagagcgtgaaggatgccaatatattgcaatcaagacaaacgctaacgccttcgtcagccaccttgcagg

SEQ ID NO: 406060 - DNA, 530 bp, Oryza sativa nipponbare
  unsure (1)..(530): unsure at all n locations
gtccggttctagatcgcgagtcggcgcgcgctttatttactctttctactctgtctctctgaaccctagccccacccgcctcaacccctgctcgcctgagccccagcagcagcagcaggaggccggcgaccccctcgctgctctccctccggcgcacccatgccgcgccgccgccgctccgtgccgccgccgctgaccccaaggttgttaatggggaagatttcccccctatgaaggacctacttcgtctatacaagaaagcttttctagatggaaatgatgaggctcttggtggaattgagagtgctatcattgccattgagaaagaaaggagtaactcagctgctcagtatgaaagtattgcaaccgaaattacttcagggaaggacaagttcctccgtataaatgctgatctggagaatttccggaagcagactgaaaaggagcgtgctaggtttacctcanatatacaggtggatgttggtcagagtctattgactctggttgatagttttgagaaggtgaataag

SEQ ID NO: 406061 - DNA, 295 bp, Oryza sativa nipponbare
  unsure (1)..(295): unsure at all n locations
accaaagttcagtattacacctcacanaaaatggcccgtgtctgcagctgtgtttcttcttcgacaggcatgcgttcctctgtcgaaggggaacaacgtacgggcagctctttttttcacaggggggggggataacaattctatctgnggggtgaaaaaaaataacaaatgggggggggggggatatttttggggggggtataaaacctaaattanaaattttttttttaatttnataataattttttaaatttaataatttaaaaattttttaaaattaataaattacttttgg

SEQ ID NO: 406062 - DNA, 281 bp, Oryza sativa nipponbare
  unsure (1)..(281): unsure at all n locations
gtccggtcgccgcttcggctgatgccaccagggacgagattaagattatgaatgtgtacatatgggacatggatgaaaccctcattctgctcaagtcgctgctggatggctcgtatgctggtgcctttgatggcctcaaggaccatgataagagtgttgatatagggaagaggtgggagaatnttattctggaactntgtgacgagcatttnttntatgaggagattgagagtgagaatgaannnttttttaggggtggnaaanaatatgangatgggaaa

SEQ ID NO: 406063 - DNA, 498 bp, Oryza sativa nipponbare
aggagaggaggccggtggtggtggtgcccaccatgccggtgcggacgtcgagctgcaccaaggaggaggtggacgcgatcctcatccagtgcggccgcctcagccggagctcgtccgggagggccgcctcggctacaaggccaagcagggttatgtggtttaccgtgtccgtgtgaggcgtggtggcaggaagaggccagtgcccaagggtattgtctacggcaagcccaagcaccagggtatcacccagctcaagttccagaggaacaagaggtcagttgctgaggagagagctgggcgcaagttgggcggactcagggtgcttaactcctactgggtgaacgaggactccacctacaagtactttgagatcatccttgtggatgttgctcacagtgctatccgcaatgacccaaggatcaactggctctgcaagcctgtgcacaagcaccgtgagctccgtggtctcacctctgctggcaagaagtaccgtggtct

SEQ ID NO: 406064 - DNA, 343 bp, Oryza sativa nipponbare
caacaacatggcatccataaatcgccccatagttttcttcacagtttgcttgttcctcttgtgcgatggctccctagcccagcagctattaggccagagcactagtcaatggcagagttctcgtcgtggaagtccgagaggatgtagatttgataggttgcaagcatttgagccaattcggagtgtgaggtctcaagctggcacaactgagttcttcgatgtctctaatgagttggttcaatgtaccggagtatctgttgtccgccgagttattgaacctagaggcctactactaccccattacactaatggtgcatctctagtatatatcatccaagggaga

SEQ ID NO: 406065 - DNA, 139 bp, Oryza sativa nipponbare
tcctggtcgaccagcgtccgccattatgcgcgaggtacgcggggctcgccggaaaacacagcaaaatagaaagatctagtgtccccatcaatgaaaatcattctcgactttgctctcctttctattgctgcatgcaggg

SEQ ID NO: 406066 - DNA, 452 bp, Oryza sativa nipponbare
gttttaggtcaaagttataggcaatatcagctgcagtcgcctgtcctgctacagcaacaggtttagcccatataatgagttcgtaaggcagcagtatggcatagcggcaagccccttcttgcaatcagctgtgtttcaactgagaaacaaccaagtctggcaacagctcgcgctggtggcggcgacaatctcactatcaggacattaacattgttcaggccatagcgcagcagctacaactccagcagtttggtgatctctactttgatcggaatctggctcaagctcaagctctgttggcttttaacgtgccatctagatatggtatctaccctaggtactatggtgcacccagtaccattaccacccttggcggtgtcttgtaatgagttttaacagtatagtgggtcggaagttaaaaataagctcaaatatcatcatatgtgacatgt

SEQ ID NO: 406067 - DNA, 389 bp, Oryza sativa nipponbare
cggacgcgtgggtgaatctgtatcagctgccatttcagaaaatgatgttgttgctgctgctgttctgtcgggcaaccgtaacttcgagggtcgtgtgcacccattgacccgggctaattaccttgcttcaccgcctcttgtggttgcatatgcacttgctggcactgttgacattgattttgagaaagagccgattggagttggaaaggatggtaaagaagtcttcttcagggacatatggccctcaactgaagaaattgcagaagtggtccaatctagcgtactgcctgatatgttcaaaagtacatacgaggctattacaaaaggcaacccgatgtggaatcagctgaccgtgcccgaagcatcgctctattcgtgggatccaaact

SEQ ID NO: 406068 - DNA, 348 bp, Oryza sativa nipponbare
gcaagtacaaatagctatggcgagttccgttttctctcggttttctatatacttttgtgttcttctattatgccatggttctatggcccagctatttaatcccagcacaaacccatggcatagtcctcggcaaggaagttttagggagtgtagatttgatagactacaagcatttgaaccacttcggaaagtgaggtcagaagctggggtgactgagtacttcgatgagaagaatgaattattccagtgcacgggtacttttgtgatccgacgtgtcattcagcctcaaggccttttggtacctcgatacacaaatattcctggcggggtctacatcatccaagggag

SEQ ID NO: 406069 - DNA, 405 bp, Oryza sativa nipponbare
  unsure (1)..(405): unsure at all n locations
gagatcatacatgtgaagaatggccttcaattgttgaaaccgactttgacacaacagcaagaacaagcacaagcacaagatcaatatcaacaagttcaatacagtgaacgacagcaaacatcttctcgatggaacggattggaggagaacttttgcacgatcaaggtgagagtaaacattgaaaatcctagtcgtgctgattcatacaacccacgtgccggaaggataacaagtgtcaatagtcagaagttccccatccttaacctcatccaaatgagcgctaccagagtaaacctataccagaatgctattctctcgccgttctggaacgtcaatgctcatagtttggtctatatgattcaagggcgatctcgagttcaagtcgntagtaactttggaaagact

SEQ ID NO: 406070 - DNA, 492 bp, Oryza sativa nipponbare
tgggccacacgataccctcctctcccttcccttgccttgccgcttccaactccaagtctcgctgtgatcaggagctagggtttgtgcgatcttcgggaggaggggaagatgatcgaggtggtgctgaacgaccggctggggaagaaggtgcgggtgaagtgcaacgaggacgacaccatcggcgacctcaagaagctggtggcggcgcagaccgggacgaggcccgagaagatccgcatccagaagtggtacaacatctacaaggaccacatcaccctcaaggactacgagatccacgacgggatgggcctcgagctctactacaactagacgccgcgcctctggctggtatgaatttagtcatggatggcgaacagattatgcccatttgagcggccagcgtccatagctcatatataaaactctagtgagctgtgtagttcgttgtgccaatgactgttgtcaactttgaatatgtcgttgtagtatgat

SEQ ID NO: 406071 - DNA, 526 bp, Oryza sativa nipponbare
catgcaggcagtggtgtttatgaaatgaaaccgttatctgatgatgattccagacaattgttctgcaaacgaatatttgactctaacgatgactgtcctgctgatttgtgtggtgtcactgagaaaattttgaagaaatgtggtggtgtaccgctagcaatcatcactacagcatgcgtggtggctagcaaaccaaggaattcagaggaatgggacaaggtcaataagtctatcagtttggggcttgagaacaaccttgatgtggacaagatgcggaagatattaagcctcagttacaacgatctaccttttcatttgaagacttgcttgttgtctctaagcaaatatcctgaggatgaactaattagaaaagatgttttgatatggggttggttagctgagggttttattacagatgaaacacgacctgtagggaccagcttgcaggagattggagagagctacttcaacgagctcatcaatcgaagcttgatccacccgatgagtgagggcaatttttgggatg

SEQ ID NO: 406072 - DNA, 510 bp, Oryza sativa nipponbare
caagtttccaataacatcctcaaatagctatggcgaccatagctttctctcggttatctatctacttttgtgttcttctcctatgccatggctctatggcccagctatttggtccgaacgtaaatccatggcacaaccctcggcaaggaggttttagggagtgtagatttgatagactacaagcatttgaaccacttcggagagtgaggtcagaagccggggttacagagtactttgatgagaagaatgaacaattccagtgcacaggtacatttgtcatccgacgtgtcattgagcctcaaggccttctggtacctcgatacagcaatactcctggcatggtctacatcatccaagggagaggttctatgggattaactttccccggctgcccagcaacctaccaacaacaattccaacaattcttgcctgaaggccaaagccagagccaaaaatttaaggatgagcaccaaaagatccaccaatttagacaaggagatatcgtgcact

SEQ ID NO: 406073 - DNA, 464 bp, Oryza sativa nipponbare
cgaagattctcggttgaaaggcattgatgttagggctttggtagttatcaatccaggaaatccaactgggcaggttcttgctgaggaaaaccaacgggacatagtgaagttctgcaaaaatgagggacttgttcttctggctgatgaggtgtaccaagagaacatctatgttgacaacaagaaatttaactctttcaagaagatagcgagatccatgggatacaacgaggatgatctccctttagtatcatttcaatctgtttctaagggatattatggtgaatgtggcaaaagaggaggctacatggagattactggcttcagtgctccagttagagagcagatctacaaagtggcgtcagtgaacttatgttccaatatcactggccagatccttgccagcctcgtcatgaatccaccaaaggctggagatgcatcatatgcttcatacaaggcagagaaag

SEQ ID NO: 406074 - DNA, 261 bp, Oryza sativa nipponbare
cccacgcgtgcgctccttcctaccgtgcattggcatgaagcctgccggctacgtctctgaggcctcgagggaatccggtctagtcatcatcgacaacagccttgcccttgtagagaccctcatggatgagagacggtggtctgacatgttctcgtgcatgattgctaaggcaacagtgcttgaggaggtgtctaccggcattgcaggaagcagaaatggcgcgtcgctgctgatgaaggctgagctccaggtgctctaacc

SEQ ID NO: 406075 - DNA, 458 bp, Oryza sativa nipponbare
attttctgcaacaaaaatatggcttccaacaaggtagtgttctcagtgttgcttctcgccgtcgtctccgtgctcgcggcgacggcgaccatggcggagtaccaccaccaagaccaggtggtctacaccccgggcccgctctgtcagccaggaatgggctacccgatgtacccgctcccgcgttgccgggcgttggtgaagcgccagtgcgtcggccgtggcacggccgccgccgccgagcaggtccggcgagactgctgccggcagctcgccgccgtcgacgacagctggtgcaggtgcgaggcgatcagccacatgctgggaggcatctacagggagctcggcgcccccgatgtcgggcaccccatgtccgaggtgttccgcggctgccggagaggggacttggagcgcgcggcggcgagccttccggcgttctgcaacgtggacatccccaacgg

SEQ ID NO: 406076 - DNA, 452 bp, Oryza sativa nipponbare
ctgtgaactctagaattatccatggtgatgctaaatttagcacaagttcttctgatctggaaaatatcgtttggcctggagattcaacaacagtgcccaaaggctgggacttcccagtgaatgctaagatactccagattggtgtgccagtgagacgtgattttaaaacttttgtgaatgttgagactaatccgaacacgaatagatcaactgtcagtggctacagcattgatatgtttgaggcagctgtcaagaaattaccgtatgctctacgctacgagtacattccctatgattgtgctgtttcatatgacctgctagtatcccaggtcttttacaagaagtttgatgcagcagtcggtgatgtgacaattattgctaaccgaactagatatgtagatttcacaatgccatacacagagtctggtgtttcgatgcttgttctatctaag

SEQ ID NO: 406077 - DNA, 508 bp, Oryza sativa nipponbare
gaatgaacaattccagtgcacaggtacatttgtcatccgacgtgtcattgagcctcaaggccttctggtacctcgatacagcaatactcctggcatggtctacatcatccaagggagaggttctatgggattaactttccccggctgcccagcaacctaccaacaacaattccaacaattcttgcctgaaggccaaagccagagccaaaaatttagggatgagcaccaaaagatccaccaatttagacaaggagatatcgttgcactgccagctggtgttgcgcattggttctacaatgaaggcgatgcaccagttgttgctctatatgtcttcgacttaaacaacaacgctaatcagcttgaaccaaggcagaaggagttcttattggcgggtaacaacaacagggagcaacaaatgtatggtcgctcaatcgagcaacactctgggcaaaacatattttagcggtttcaacaatgagctactaagtgaggccttaggcgtcaatgc

SEQ ID NO: 406078 - DNA, 551 bp, Oryza sativa nipponbare
gcagaccatggtgtttggaaacatggggaacacctctggcacgggtgtgctcttcactaggaacccaagcactggagagaagaagctttacggcgaattccttgtgaatgctcagggtgaagatgtggttgctggaatcagaactccagaggatcttgatgctatgagggaccacatgccggagccttatgaagagctcgttgagaactgcaaaattttggagagtcactataaagaaatgatggatattgaatttactgttcaggaaaataggctttggatgcttcagtgcagaacaggaaagcgcacaggaaaaggtgctgtaaagattgctgtagacatggttaacgagggccttgttgagcgccgcacagcacttaagatggtagaaccaggtcacctggatcagcttcttcatcctcagtttgagaacccatcagggtataaagacaaagttattgccacgggcttacctgcatcacctggggctgctgtgggccaaattgtattcactgccgaggatgctgaagcatggcatgcccaaaggaaag

SEQ ID NO: 406079 - DNA, 485 bp, Oryza sativa nipponbare
  unsure (1)..(485): unsure at all n locations
aaggaatgagactcctatggcttttttgntcgaaaaactgcaaagtgctttgtgttcattggagcgcttccctgttgtgctcagccagtccagcagaataggtattggaggctcccgtttgacttcaggtttgagtgctctagctcagcccttcaagttgcgcctttgtcgaggtgagggggagaaatcacttcgggattattgcggaaatattgtgcttattgatccctttgcgagtctagcagctgttgaagagtttctttggcccagagttcagcgtagtgaggctgcttcgaagcctacagttccatcaggaaataattctgaatctggcatacctggcaccgcagctggtgcgtcatccacagctgcaccagctccatctggcaggcgtccaacaacaagatcaaaatcatctgctgcaagtagtggtgcatctaagaaggattctcaggaggaaagcacaaccctgccaagggaaaggg

SEQ ID NO: 406080 - DNA, 490 bp, Oryza sativa nipponbare
cgcaaagataaacccacaggcacctctagacaaagtttgcctgcttggctgcggtgtttctactggcctcggagcagtatggaataccgcaaaggttgaagcaggttccatcgttgctatttttggacttggcacagttggacttgcagttgctgagggggcaaaatcagctggtgcttctcggattattggcatcgacattgatagcaaaaagtttgatgtcgcaaagaactttggggttacagaatttgtgaacccaaaggaccatgacaaaccaatccaacaggtcatagttgaccttacagacggtggtgtggactacagctttgaatgcattggaaatgtttctgttatgaggtctgcattggagtgctgccacaagggctggggaacctctgtcatcgttggtgtagctgcttctgggcaagaaatctctacacgaccattccagctcgtcactggccgggtctggaagggaacagctttcggc

SEQ ID NO: 406081 - DNA, 235 bp, Oryza sativa nipponbare
  unsure (1)..(235): unsure at all n locations
cccggtcgaccagcgtccgcaatcgcagactcagcctggtgttctctcggtacacgagggaaanatatcaccaagtactttgtgagcagtggctttgcatttgtccatgcaaactccatcgctgatatcgtggctggtgaggctgtccccctggaccagatcgacccagccgcggtccatcttggtctcgcggaattcaacgccaagcttggatcggcctcaactgaactggaga

SEQ ID NO: 406082 - DNA, 75 bp, Oryza sativa nipponbare
cccatgcgtccgcccatgcgtccgcccacgcgtccgcccacgcgtccgcccacgcgtccgcggacgcgtgggcgc

SEQ ID NO: 406083 - DNA, 550 bp, Oryza sativa nipponbare
cccacgcgtccgattatagttgaagcatagtagtagaatcctacaaaaatgaagatcattttcgtatttgctctccttgctattgttgcatgcaacgcttctgcacggtttgatgctcttagtcaaagttatagacaatatcaactacaatcgcatctcctgctacagcaacaagtgctcagcccatgcagtgagttcgtaaggcaacagcatagcatagtggcaacccccttctggcaaccagctacgtttcaattgataaacaaccaagtcatgcagcaacagtgttgccaacagctcaggctggtagcgcaacaatctcactaccaggccattagtagcgttcaggcgattgtgcagcaactacagctgcagcaggtcggtgttgtctactttgatcagactcaagctcaagctcaagctttgctggccttaaacttgccatccatatgtggtatctatcctaactactacattgctccgaggagcattcccaccgttggtggtgtctggtactgaattgtatagtataatggttcaaatggtaaaa

SEQ ID NO: 406084 - DNA, 458 bp, Oryza sativa nipponbare
  unsure (1)..(458): unsure at all n locations
cggacgcgtgggcggacgcgtgggttgttgcactcccagctggtgttgcacattggttctacaatgatggtgatgcacctattgttgccgtatatgtttatgacgtaaacaacaacgccaatcagcttgaacctaggcaaaaggagttcctattagccggcaacaacaatcgggctcaacaacaacaagtatatggtagctcaattgagcaacactctgggcaaaacatattcagcggatttggtgttgagatgctaagtgaggctttaggcatcaacgcagtagcagcaaagaggctacagagccaaaatgatcaaagaggagagatcatacatgtgaagaatggccttcaattgttgaaaccgactntgacacaacangcagaacaagcacaagcacaagatcaatatcaacaagttcaatacagtgaacgacagcaaacatcttctcgatggaac

SEQ ID NO: 406085 - DNA, 553 bp, Oryza sativa nipponbare
gccgactttcccaggctgtcctgagacctaccagcagcagttccaacaatcagggcaagcccaattgaccgaaagtcaaagccaaagccataagttcaaggatgaacatcaaaagattcaccgtttcagacaaggagatgttatcgcgttgcctgctggtgtagctcattggtgctacaatgatggtgaagtgccggttgttgccatatatgtcactgatatcaacaacggtgctaatcaacttgaccctcgacagagggatttcttgttagctggaaataagagaaaccctcaagcatacaggcgtgaagttgaggagtggtcacaaaacatatttagtggctttagcactgaactgcttagcgaggcttttggcataagcaaccaagttgcaaggcagctccagtgtcaaaatgaccaaagaggagaaattgtccgcgttgaacgcgggctcagtttgctgcaaccatatgcatcattgcaagagcaggaacaaggacaaatgcaatcaagagagcattatcaagaaggaggatatcagcaaagtcaatat

SEQ ID NO: 406086 - DNA, 350 bp, Oryza sativa nipponbare
caggaatcctcgcttatcatgggactaaattatgtaatatcatcagtggccatctttgatgaatatacaaatgatgtgcttgacatggcaccaggatcctgctttcccaggtttaaataccggaaaaatgaagcttcgacagagggtggttcattatcaaggcctgcctcatttaaggacaagcaagacgggaagaaagctccatcacgtgttacatcgtttaagggcagctttgatgagttcaatccatttaagttgctagatcacctgtttgaggagtgtaagcaccgtggagaggttcttggtgctgaaggagtgataacaccaaaagacattgaaaaaccaagtca

SEQ ID NO: 406087 - DNA, 455 bp, Oryza sativa nipponbare
  unsure (1)..(455): unsure at all n locations
attagcaactgctaatagctatggcaactaccagttttctctcgtttttctatatacttttgtgctatgctattatgccagggttctatggcccaactatttaatccaagcacaaacccatggcatagtcctcggcaaggaagttttagggagtgtaggtttgatagactacaagcattggagccacttcgaaaagtaaggtcagaagctggggtgactgagtacttcgatgagaagaatgaattattccaatgcacaggtacttttgtcatccgacgtgtcattcaacctcaaggccttttggtacctcgatatagcaatactcctggcctggtctacatcattcaagggaggggttctatgggtttaaccttccccggttgcccagcgacttatcagcancaattccacaatttttcggtcaagggcaaagtcaaaggccaaagtttaggggt

SEQ ID NO: 406088 - DNA, 385 bp, Oryza sativa nipponbare
cggacgcgtgggcggacgcgtgcgcggacgcgtgggcggacgcgtgggttcaaatattatagttgaagcatagtagtagaatccaacaacaatgaagatcattttcgtatttgctctccttgctattgttgcatgcaatgcctctgcgcggtttgatcctcttattcaaagttataggctatatcaactacagtcgcatctcctactacagcaacaagtgctcagcccatgcagtgagttcgtaaggcaacagtatagcatagtggcaacccccttctggcaaccagctacgtttcaattgataaacaaccaagtcatgcagcagcagtgttgccaacagctcaggctggtagcacaacaatctcactaccaggccattagtatt

SEQ ID NO: 406089 - DNA, 409 bp, Oryza sativa nipponbare
ccaccaacagggctgatatcctggattctgctttactcagacctggacgttttgacagacaggtaagtgttgatgttcctgatgtacgcggaaggacagagattcttaaggtgcacggtagcaacaagaagttcgatactgatgtctctcttgaagtcatagcaatgagaacacctggctttagtggagcagacttggcaaatcttctaaatgaagcagccatattagcgggccgacgtggtcggacagcaatttcctcaaaggagattgatgattcaattgacagaatagtggctggtatggaaggaactgtgatgacagatgggaagagcaaaagtcttgttgcttaccatgaagttgggcatgcaatttgtggaactttgacgcctggccacgaccctgtccaaaa

SEQ ID NO: 406090 - DNA, 445 bp, Oryza sativa nipponbare
  unsure (1)..(445): unsure at all n locations
ctgccgtccgatctgatctcacatctctctgtgttngtgaccttctgcactcgtatcgctcttcttatcagcaatggcccgcacgtcgcctcttaccatattgtgtctcaaggatcatatggcgcggagcaccaaccacatgacacggcattaagaccaaaccaatcgcgctcccaagacagcacacgagatctacaaggctgcatcaatcacactcagtccaaatgttcctgggcagatctctatgggtttaatggttaaccctcctaagcctggagatatctcttatctgaagttttctgctgaaagcaagtctatcctcgagtctttgaggaggagagcacgcctgatgacagatggtttcaatagttgccgaaatgttgtctgcaatttcacagaaggagctatgtactctttcccncaaatacccttaccaccaaaagct

SEQ ID NO: 406091 - DNA, 488 bp, Oryza sativa nipponbare
ctcgctggacgccatcttgaactgtatgaggtggaaagcagcgaacgggagaataagcagcatgtcgtgagtttgataaaatacattcaatctaaaagaggtagcctgatgtgggagaatgaggatcctacccttgttcggactgaactacctagcgcttcactcttatcagcacttgtgcaaagcatggttagtgcaattttcttccaaggtgatcttcgtgaaacctggggttctgaagcacttaagtgggctatggagtgcacatctcgtcacttggcatgtcggtcacaccagatatatcgtgctttacgccccagtgttaaaagcgatagctgtgtattgcttatgaggtgcatccacagatgcttgggtaaccctgttccagctgttctgggttttgcaatggagatattgttgactcttcaagtcatggttgagaacatggaacctgaaaaggtgatactttacccacagctcttttgggg

SEQ ID NO: 406092 - DNA, 98 bp, Oryza sativa nipponbare
  unsure (1)..(98): unsure at all n locations
cttaagtttccattagcaactgctaatagctatggcaactaccattttctctcgtttttctatatactnttgtgctatgctattatgccagggttcta

SEQ ID NO: 406093 - DNA, 532 bp, Oryza sativa nipponbare
gcagcagaaacgcagtattggcaagaaaacgagaacagttgatacatacacgtttattcggggagagatgtaaaaaggctatcaaacaggaggccataaagaaagttcatgggtagcctcaaaagcattctagaatggctcttgaaaagtttatgtgatgacggtgggagcagatcggccagtgtactcttgcatctttgacagcttcagtgcaacatcaaccagaggagcaagggcatcctgcgaatccctgccggtcttggaagaatccttctcatactgctcgatgtagacacggatagtagcaccaacagagccagttccagagaggcggaacaccagccgggaaccatctccgaagaggtaccggacaccctgatgcttggagacagaaccatcaacaggatccttatactcaaactcatctgcggcaaccacatcagaaacatctgaccgaatctccttgatcaatttgttaacatcagaaagggacgactgcatgctgacaaggtttgccataagttctttagca

SEQ ID NO: 406094 - DNA, 527 bp, Oryza sativa nipponbare
cccacgcgtccgggaagttccattcaaaggaaatgcagctccttccaacacaatcaaactagccatctgagcctgaatgcactggtccactagcagtgttgaaaggcttcaggaacttacctactgggatgccttctgtgcttattgtgactggccttacctggttgtcttggttaccattcattctgtactacactgactggatcgtccgagagatctaccacggtgactcaaagggaactgatcctcagatcgaggctatcatccagggtgtcagggcaggtgcattactcctgctactgaattcgattgtgctacgatacagctcattcttgattgaaccaatgtgcctgaaagtcggaccaagggtggtgtgggtgactagcaatttgctcgtctgaatcgtcatggcgtggactgcactgatcagtttctggtcactcactgacttacatggaactgttcagaaagccatcactgcagacaagagcatcaaggctgtctgactcgcactgtttgcgtatgtt

SEQ ID NO: 406095 - DNA, 424 bp, Oryza sativa nipponbare
tctccatcttcctcgtgctgcagtgatgatgattgtggcaagactctgctcgagcctagcacatataaggatgtgttgatcttattccggttcgatgaccacgatctccctttcagactaaaagaagtaatactttctgatgtgaggctgttaacattgctagagtatggccttccttcatgggtcatttttctccagtcatatccagtgttctgcaagacatatcgcccatggatgtgtcctcttgccagggcattgtatgtcttgatgtcaatagttactgttctcataggattttatgacctctacaagaatgtccccatgttgaaggcaactgcatcaagattgtttggccctttctttgactggatagagacgtgggaaatgatttcacgactgaagtatcttggaaccatgctttttc

SEQ ID NO: 406096 - DNA, 492 bp, Oryza sativa nipponbare
gcaaggtggtgaaccacggcgtgccgccggagacgatgcgggagatggcggcggtgtgcgaggagttcttccggctgccggcggaggacaaggcggcgttctactccgacgcggaggagaaccccaaccgcctcttctccagcaccatctacgaggtcggcgaccagcgctactggcgcgactgcctccgcctcgcctgcggcttccccgtcgccgacgacaccaacacccactggcccgacaagccccaccatctccgggatgtcacggagaagttcttcgtggcgacgaggggattggggatcgagctgctgcggctgctgtgcgaggggatggggctcaggccggactacttcgagcgcgacctcaccgccggcgatgtcatcatcaacgtcaaccactaccctccatgcccggatccgagcctgacgctgggcttgccggcgcactgcgacccgaacctcatcaccctgcttcttcagggcgacgtct

SEQ ID NO: 406097 - DNA, 441 bp, Oryza sativa nipponbare
gttgcccattcatctgggttttcttctgcttctttttttttcctagagagtacggttttctttgtaattctttaatttgttgcaaccatgaatgtattggcatctaagatcttcccttcccgctccaatgttgccagcgagcaacaacaatcgaagcgcgagaaagcaactattgatgacgctaagaactcgtccaagaacaaaaatcttgaccgcagtgtcgatgagagtgtgcttggaatcattcttggaggtggtgcagggactagattgtatcccctcaccaagaagcgtgccaagcctgccgtgcctctgggtgccaactacaggcttattgatatccctgtcagcaactgtttgaacagcaacatatccaagatctatgtgctgacacaattcaactctgcctctctgaaccgtcacctgtcaagagcctatggg

SEQ ID NO: 406098 - DNA, 495 bp, Oryza sativa nipponbare
gttctagatcgcgagcggccgcccgcgatctagaactagtctcagagtcggatctatcacatctcaccttcttccatgctatcatcaaggagacattccgtctacatccatcaacaccgctctcgctgccacgcatggcatctgaggagtgtgagatcgcaggctaccgtatccccaagggtgcagagttgctggtcaatgtgtgggggatcgcccgtgacccagccatatggcctgacccactagagtacaagccctctcggttcctccccggtgggacgcacactgatgtggatgtcaagggaaatgatttcggacttataccattcggtgcagggcgaaggatatgcgccggcctcagttggggcctgcggatggtcaccatgacagcggccacgctggtgcatgcattcgactggcagctaccagcggaccagacgccagacaagctcaatatggatgaggcgtttaccctcctgctgcaaagggcagagc

SEQ ID NO: 406099 - DNA, 352 bp, Oryza sativa nipponbare
gtcagaagccggggttacagagtactttgatgagaagaatgaacaattccagtgcacaggtacatttgtcatccgacgtgtcattgagcctcaaggccttctggtacctcgatacagcaatactcctggcatggtctacatcatccaagggagaggttctatgggattaactttccccggctgcccagcaacctaccaacaacaattccaacaattcttgcctgaaggccaaagccagagccaaaaatttagggatgagcaccaaaagatccaccaatttagacaaggagatatcgttgcactgccagctggtgttgcgcattggttctacaatgaaggcgatgcaccagtt

SEQ ID NO: 406100 - DNA, 242 bp, Oryza sativa nipponbare
tcgaccccgcgtccgattcgaaattgatagtgaaacccatgatccgcttgacataggaatatatcaaattcgtgaggcgaatcaaatgattgaagagtttatgttggctgcaaatatctctgtcgctgagaagattttgaagcacttccccttgtgttcattgctaaggcgccatcctagcccaacaaagggggtgcttgagccattactccgaactgcgtcttctgtggggctaaatctgg

SEQ ID NO: 406101 - DNA, 550 bp, Oryza sativa nipponbare
ccagatttggtggaggaagtctttgaggatggatgtccttccctttcaagacggctagattctgaatatccagttcggaatatgttcaagctcttcatatgtgcaatttgtcaagtagagttagagtctggtcagggtatatccatacatgagggtttgtcaaagtcaggaaagctgcgtccatgggatgggcctttcctttgccacagttgccaggaaaagaaagaagcaatggaaggaaaacgtcactcacgagattcctcctcaagaaacagtgggtcaagtgaatagtagccaagttggagtcatcttgaagaaatcatctaacagctttctgagcgataacgcattagttgcatttcccttgggagtctttcagtggttcctctgctcatggattggtatgaaataggattatatatttatagaatggtacagctgtgacaaggtgactatcggcttatacattactgaaatctgaagacgcaacacattgtgtagcaagtatcttaccgagctactgtccaggcaaaatctccagtggggcttc

SEQ ID NO: 406102 - DNA, 538 bp, Oryza sativa nipponbare
  unsure (1)..(538): unsure at all n locations
cccacgcgtccgcattctagttgaagcatagtagtagaatcctacaaaaatgaagctcaattttcgtatttgctctccttgctattgttgcatgcaacgcttctgcacggtttgatgctcttagtcaaagttatagacaatatcaactacaatcgcatctcctgctacagcaacaagtgctcagcccatgcagtgagttcgtaaggcaacagcatagcatagtggcaacccccttctggcaaccagctacgtttcaattgataaacaaccaagtcatgcagcaacagtgttgccaacagctcaggctggtagcgcaacaatctcactaccaggccattagtagcgttcaggcgattgtgcagcaactacagcntgcagcaggtcggtgttgtctactttgatcagactcaagctcaagctcaagctttgctggccttaaacttgccatccatatgtggtatctatcctaactactacattgctccgaggagcattcccaccgttgggtggtgtctggtactgaattgaatagtataat

SEQ ID NO: 406103 - DNA, 476 bp, Oryza sativa nipponbare
caacaacatggcatccataaatcgcgcgataggtttcttcacagtttgcttgttcctcttgtgcgatggctccctagcccagcagctattaggccagagcactagtcaatggcagagttctcgtcgtggaagtccgagacgatgtagatttgataggttgcaagcatttgagccaatggggagtgtgaggtctcaagctggcacaactgagttcttcgatgtctctaatgagttgtttcaatgtaccggagtatctgttgtccgccgagttattgaacctagaggcctactactaccccattacactaatggtgcatctctagtatatatcatccaagggagaggtataacagggccgactttcccaggctgtcctgagacctaccagcagcagttccaacaatcagggcaagcccaattgaccgaaagtcaaagccaaagccataagttcaagggtgaacatcaaaagattcacc

SEQ ID NO: 406104 - DNA, 315 bp, Oryza sativa nipponbare
cgacccagcgtccggggagctccaagctgtggaaacctgtgtgggtgtgccacttcatgatggttagctactgccagtcgaggggcaagggttgttatccagtgccgaacgggtaagtatcgcgtaccaacctgaccttgggaggggaacaacaactggaaacggttgctaatactccctaatttgaggagcgggtggagaaatccttccaatgaggggctcgagtatgattatctagtgggggaggcaataacttaccaaggcgatgatcagcaactgggccgacaggatgaccatacaaactggtgctgagac

SEQ ID NO: 406105 - DNA, 125 bp, Oryza sativa nipponbare
cccacgcgtccgcccacgcgtccggctcagagtggcacctcaaaatttttgaaggctctaaaggagaataaagaccttggagccgataatggtctgattggccagtttggggttgggttttactc

SEQ ID NO: 406106 - DNA, 469 bp, Oryza sativa nipponbare
atattcaggtttgctactgcaatccaacaccatctcataactacattatcctaatcgagcctttttaagtaatgaggccagtacaattaaaaaaggtgccgtagacaatagcaaacccatgaagaactgaaaacaaatgaatgcaaaactaaaattgtcttagttctgtcgacaaatgccaactgctataatcgtacatgcgtctccgaagaaaccgccgacactgcctcactctccaagaaccataccaaacccaaatttgtaatctttcttccagtgatcaagctctgcagaaagaacgaaattcacgccgggggtcaaccgctcctccaaaagagcagaaacaacgccattggtatcaatcttccccctcagacgacactgtctcaacatataatcatagccgaaacttgctgttacatccttcgccatatgattgtacataaaatcagatgccagggaaaccttt

SEQ ID NO: 406107 - DNA, 506 bp, Oryza sativa nipponbare
gcaagaagttgcaaatgtcatcagtgctgtgacgctgggtctctcgtcccaggaaatccctcgttttgcttcccctcctctgagagaagatgacaaggatggacactttgtctttgctgttggagacaacctcacaccacgatacaggattaatgcaaaaatgggtgaaggtcagttgggagagctgcctccgttagaattgaacatcttaacttgagatgtttcttgcatgctgaatttgttgacagagcggagtatattgaaactgaaactttttggatatacatcaggtacctttggtcaggtattggaatgttgggatagggaaaggaaagaaatggtggccattaagatcatcagaggcattaagaagtacagggatgctgcaatgatagaaattggcatgctcgagcagcttggtaaatatgaaaaaagtagatccaggtttcatcccgttctccaaaggaaggttcctatttcaagcagctgcccaagtccagtgctat

SEQ ID NO: 406108 - DNA, 458 bp, Oryza sativa nipponbare
  unsure (1)..(458): unsure at all n locations
atcgagcccgccggaggccaaaacgccttgtgggggagcatccaccaattcgccatggcctccgagaccgagcccgacgccgtggtgttcgaggctccggcgcacttccgcatctacaagagcggcaagatggaccgccttcaccgaccaccctgcctgcccgctggcgtcgacgaggcgcgcggcgtcncctccaaggacgtcgtcatcgacgccggcaccggcctctccgtgcgcctntacctccccaagatccaagagccatccaagaagctccccgtcctcgtcttcttccacggaggcggcttcctcatcgagtcggccgactcctccacgtaccacaactacgtcaaccccttcgccgccgcggccggcgtcntcctggtgtccgtcgactaccgcctcgccccggagcacccgctgccggcggcctacgacgattcctgggccgggctact

SEQ ID NO: 406109 - DNA, 311 bp, Oryza sativa nipponbare
  unsure (1)..(311): unsure at all n locations
cccacgcgtccggttctagatcgcgagctncgtcccttttttttttttttttaccaaagttcagtattacacctcacagaaaatggcccgtgtctgcagctgtgtttcttcttcgacaggcatgcgttcctctgtcgaaggggaacaacgtacgggcagccattttttgcacagggtgggggggatagcanntctgcccgggggcgggcaatgtntntncttcggggcgtggtaggagtatatatttgtgggacctacncgagcccntacttggacaggggtcttagntttcgtacactttgcactcgggg

SEQ ID NO: 406110 - DNA, 306 bp, Oryza sativa nipponbare
tcgccgcttcggctgatgccaccagggacgagattaagattatgaatgtgtacatatgggacatggatgaaaccctcattctgctcaagtcgctgctggatggctcgtatgctggtgcctttgatggcctcaaggaccatgataagagtgttgatatagggaatatgtgggagaatctcattctggaactctgtgacgagcatttcttctatgaggagattgagaattacaatgaaccctttctcagtgctgtcaaagaatatgatgatgggaaagacttgacaacatatgattttgaagctgact

SEQ ID NO: 406111 - DNA, 484 bp, Oryza sativa nipponbare
  unsure (1)..(484): unsure at all n locations
aggagaggaggccggtggtggtggtgcccaccatgccggtgcggacgtcgagctgcaccaaggaggaggtggacgcgatcctcatccagtgcggccgcctcagccggagctcgtccgggagggccgcctcggctacaaggccaagcagggttatgtggtttaccgtgtccgtgtgaggcgtggtggcaggaagaggccagtgcccaagggtattgtctacggcaagcccaagcaccagggtatcacccagctcaagttccagaggaacaagaggtcagttgctgaggagagagctgggcgcaagttgggcggactcagggtgcttaactcctactgggtgaacgaggactccacctacaagtactttgagatcatccttgtggatgttgctcacagtgctatccgcaatgacccaaggatcaactggctctgcaagcctgtgcacaagcaccgtgagctccgnggtctcacctctgctggcaag

SEQ ID NO: 406112 - DNA, 396 bp, Oryza sativa nipponbare
caacaacatggcatccataaatcgccccatagtggtcttcacagtttgcttgttcctcttgtgcgatggctccctagcccagcagctattaggccagagcactagtcaatggcagagttctcgtcgtggaagtccgagaggatgtagatttgataggttgcaagcatttgagccaattcggagtgtgaggtctcaagctggcacaactgagttcttcgatgtctctaatgagttgtttcaatgtaccggagtatctgttgtccgccgagttattgaacctagaggcctactactaccccattacactaatggtgcatctctagtatatatcatccaagggagaggtataacagggccgactttcccaggctgtcctgagacctaccagcaggcagt

SEQ ID NO: 406113 - DNA, 90 bp, Oryza sativa nipponbare
cagtgtgcagtaaagaaatgtgatgtgcgctatcgccgcaacaaactgctccttaagtccttataagcacatatggcattcgaatatata

SEQ ID NO: 406114 - DNA, 493 bp, Oryza sativa nipponbare
  unsure (1)..(493): unsure at all n locations
gttttaggtcaaagttataggcaatatcagctgcagtcgcctgtcctgctacagcaacaggtttagcccatataatgagttcgtaaggcagcagtatggcatagcggcaagccccttcttgcaatcagctgtgtttcaactgagaaacaaccaagtctggcaacagctcgcgctggtggcgcaacaatctcactatcaggacattaacattgttcaggccatagcgcagcagctacaactccagcagtttggtgatctctactttgatcggaatctggctcaagctcaagctctgttggcttttaacgtgccatctagatatggtatctaccctaggtactatggtgcacccagtaccattaccacccttggcggtgtcttgtaatgagttttaacagtatagtggttcggaagttaaaaataagctcagatatcatcatatgtgacatgtgaaacttngggtgatataaatagaaaaaaagttggctttcat

SEQ ID NO: 406115 - DNA, 347 bp, Oryza sativa nipponbare
  unsure (1)..(347): unsure at all n locations
cccacgcgtccgtcggcggcgaggagggtggtggtggtggtgtgcgcggcgatggtggtggcggcggcggcggcgcagaagtacaatgcggtgtacaacttcggggactcgatcacggacaccggcaacctgtgcaccaatggcaggccgtcgcagatcaccttcacccagcctccctacggcgagacctacttcggctcccctacctgccgctgctgcgacggccgcgtcgtcgtcgacttcctcgcgagtaagttcgggctgccgttcctgccgccgtcgaagtcnacaagcgccnacttnaaaaagggagcgaacatggngatcaaccgagcccaccgnatgga

SEQ ID NO: 406116 - DNA, 447 bp, Oryza sativa nipponbare
cggacgcgtgggtgaatctgtatcagctgccatttcagaaaatgatgttgttgctgctgctgttctgtcgggcaaccgtaacttcgagggtcgtgtgcacccattgacccgggctaattaccttgcttcaccgcctcttgtggttgcatatgcacttgctggcactgttgacattgattttgagaaagagccgattggagttggaaaggatggtaaagaagtcttcttcagggacatatggccctcaactgaagaaattgcagaagtggtccaatctagcgtactgcctgatatgttcaaaagtacatacgaggctattacaaaaggcaacccgatgtggaatcagctgaccgtgcccgaagcatcgctctattcgtgggatccaaactccaactacattcatgagccttcatactttaaggacatgaccatgtccccaactggccc

SEQ ID NO: 406117 - DNA, 359 bp, Oryza sativa nipponbare
gcaagtacaaatagctatggcgagttccgtggggtctcggttttctatatacttttgtgttcttctattatgccatggttctatggcccagctatttaatcccagcacaaacccatggcatagtcctcggcaaggaagttttagggagtgtagatttgatagactacaagcatttgaaccacttcggaaagtgaggtcagaagctggggtgactgagtacttcgatgagaagaatgaattattccagtgcacgggtacttttgtgatccgacgtgtcattcagcctcaaggccttttggtacctcgatacacaaatattcctggcgtggtctacatcatccaagggagaggttctattg

SEQ ID NO: 406118 - DNA, 416 bp, Oryza sativa nipponbare
gagctcctacatgtgaagatatggccttcaattgttgaaaccgactttgacacaacagcaagaacaagcacaagcacaagatcaatatcaacaagttcaatacagtgaacgacagcaaacatcttctcgatggaacggattggaggagaacttttgcacgatcaaggtgagagtaaacattgaaaatcctagtcgtgctgattcatacaacccacgtgccggaaggataacaagtgtcaatagtcagaagttccccatccttaacctcatccaaatgagcgctaccagagtaaacctataccagaatgctattctctcgccgttctggaacgtcaatgctcatagtttggtctatatgattcaagggcgatctcgagttcaagtcgttagtaactttggaaagactgggtttgatg

SEQ ID NO: 406119 - DNA, 504 bp, Oryza sativa nipponbare
  unsure (1)..(504): unsure at all n locations
tgggccacacgataccctcctctcccttccctggccttgccgcttccaactccaagtctcgctgtgatcaggagctagggtttgtgcgatcttcgggaggaggggaagatgatcgaggtggtgctgaacgaccggctggggaagaaggtgcgggtgaagtgcaacgaggacgacaccatcggcgacctcaagaagctggtggcggcgcagaccgggacgaggcccgagaagatccgcatccagaagtggtacaacatctacaaggaccacatcaccctcaaggactacgagatccacgacgggatgggcctcgagctctactacaactagacgccgcgcctctggctggtatgaatttagtcatggatggcgaacagattatgcccatttgagcggccagcgtccatagctcatatataaaactctagtgagctgtgtagttcgttgtgccaatgactgttgtcaactntgaatatgtcgttgtagtatgatcaacctgcagat

SEQ ID NO: 406120 - DNA, 523 bp, Oryza sativa nipponbare
  unsure (1)..(523): unsure at all n locations
catgcaggcagtggtgtttatgaaatgaaaccgttatctgatgatgattccagacaattgttctgcaaacgaatatttgactctaacgatgactgtcctgctgatttgtgtggtgtcactgagaaaattttgaagaaatgtggtggtgtaccgctagcaatcatcactacagcatgcgtggttgctagcaaaccaaggaattcagaggaatgggacaaggtcaataagtctatcagtttggggcttgagaacaaccttgatgtggacaagatgcggaagatattaagcctcagttacaacgatctaccttttcatttgaagacttgcttgttgtctctaagcaaatatcctgaggatgaactaattagaaaagatgttttgatatggggttggttagctgagggttttattacagatgaaacacgacctgtanggacaagcttgcaggagattggagagagctacttcaacgagctcatcaatcgaagcttgatccagcccatgagtgaggacaatttttggg

SEQ ID NO: 406121 - DNA, 511 bp, Oryza sativa nipponbare
caagtttccaataacatcctcaaatagctatggcgaccatagctttctctcggttatctatctacttttgtgttcttctcctatgccatggctctatggcccagctatttggtccgaacgtaaatccatggcacaaccctcggcaaggaggttttagggagtgtagatttgatagactacaagcatttgaaccacttcggagagtgaggtcagaagccggggttacagagtactttgatgagaagaatgaacaattccagtgcacaggtacatttgtcatccgacgtgtcattgagcctcaaggccttctggtacctcgatacagcaatactcctggcatggtctacatcatccaagggagaggttctatgggattaactttccccggctgcccagcaacctaccaacaacaattccaacaattcttgcctgaaggccaaagccagagccaaaaatttagggatgagcaccaaaagatccaccaatttagacaaggagatatcgttgcact

SEQ ID NO: 406122 - DNA, 266 bp, Oryza sativa nipponbare
cccacttctgtgcgctccttcctaccgtgcgtgggcgtgaagcctgccggctacgtctctgaggcctcgagggaatccggtctagtcatcatcgacaacagccttgcccttgtagagaccctcatggatgagagacggtggtctgacatgttctcgtgcatgattgtttaggcaacagtgctggaggaggtgcataccggcattgcaggaagcagaaatggcgcgttgttgctgctgaaggctgagctacaggtgctctcacctct

SEQ ID NO: 406123 - DNA, 526 bp, Oryza sativa nipponbare
  unsure (1)..(526): unsure at all n locations
attttctgcaacaaaaatatggcttccaacaaggtagtgttctcagtgttgcttctcgccgtcgtctccgtgctcgcggcgacggcgaccatggcggagtaccaccaccaagaccaggtggtctacaccccgggcccgctctgtcagccaggaatgggctacccgatgtacccgctcccgcgttgccgggcgttggtgaagcgccagtgcgtcggccgtggcacggccgccgccgccgagcaggtccggcgagactgctgccggcagctcgccgccgtcgacgacagctggtgcaggtgcgaggcgatcagccacatgctgggaggcatctacagggagctcggcgcccccgatgtcgggcaccccatgtccgaggtgttccgcggctgccggagaggggacttggagcgcgcggcggcgagcctcccggcgttctgcancgtggacatccccaacggcggaggtggtgtctgctactggctggcgagatctggctactaactaggctactggagctagctgggca

SEQ ID NO: 406124 - DNA, 479 bp, Oryza sativa nipponbare; identical to SEQ ID NO: 391787

SEQ ID NO: 406125 - DNA, 518 bp, Oryza sativa nipponbare
gaatgaccaattccagtgcacaggtacatttgtcctccgacgtgtcattgagcctcaaggccttctggtacctcgatacagcaatactcctggcatggtctacatcatccaagggagaggttctatgggattaactttccccggctgcccagcaacctaccaacaacaattccaacaattcttgcctgaaggccaaagccagagccaaaaatttaagggatgagcaccaaaagatccaccaatttaaacaaggagatatcgttgcactgccagctggtgttgcgcattggttctacaatgaaggcgatgcaccagttgttgctctatatgtcttcgacttaaacaacaacgctaatcagcttgaaccaaggcagaaggagttcttattggcgggtaacaacaacagggagcaacaaatgtatggtcgctcaatcgagcaacactctgggcaaaacattatttagcggtttcaacaatgagctactaagtgaggccttaggcgtcaatgcattggtagc

SEQ ID NO: 406126 - DNA, 566 bp, Oryza sativa nipponbare
gcagaccatggtgtttggaaacatggggaacacctctggcacgggtgtgctcttcactaggaacccaagcactggagagaagaagctttacggcgaattccttgtgaatgctcagggtgaagatgtggttgctggaatcagaactccagaggatcttgatgctatgagggaccacatgccggagccttatgaagagctcgttgagaactgcaaaattttggagagtcactataaagaaatgatggatattgaatttactgttcaggaaaataggctttggatgcttcagtgcagaacaggaaagcgcacaggaaaaggtgctgtaaagattgctgtagacatggttaacgagggccttgttgagcgccgcacagcacttaagatggtagaaccaggtcacctggatcagcttcttcatcctcagtttgagaacccatcagggtataaagacaaagttattgccacgggcttacctgcatcacctggggctgctgtgggccaaattgtattcactgccgaggatgctgaagcatggcatgcccaagggaaagatgttattctggtga

SEQ ID NO: 406127 - DNA, 501 bp, Oryza sativa nipponbare
  unsure (1)..(501): unsure at all n locations
aaggaatgagactcctatggcttttttggggcagaaactgcaaagtgctttgtgttcattggagcgcttccctgttgtgctcagccagtccagcagaataggtattggaggctcccgtttgacttcaggtttgagtgctctagctcagcccttcaagttgcgcctttgtcgaggtcagggtgaaaaatcacttcgggattattcgtcaaatattgtgcttattgatccctttgcgagtctagcagctgttgaagagtttctttggcccagagttcagcgtagtgaggctgcttcgaagcctacagttccatcaggaaataattctgaatctggcatacctggcaccgcagctggtgcgtcatccacagctgcaccagctccatctggcaggcgtccaacaacaagatcaaaatcatctgctgcaagtagtggtgcatctaagaaggattctcaggaggaaagcacanacactgcccagggaaaggggaaggctgttgcaaa

SEQ ID NO: 406128 - DNA, 544 bp, Oryza sativa nipponbare
cgcaaatataaacccacaggcacctctagacaaagtttgcctgcttggctgcggtgtttctactggcctcggagcagtatggaataccgcaaaggttgaagcaggttccatcgttgctatttttggacttggcacagttggacttgcagttgctgagggggcaaaatcagctggtgcttctcggattattggcatcgacattgatagcaaaaagtttgatgtcgcaaagaactttggggttacagaatttgtgaacccaaaggaccatgacaaaccaatccaacaggtcatagttgaccttacagacggtggtgtggactacagctttgaatgcattggaaatgtttctgttatgaggtctgcattggagtgctgccacaagggctggggaacctctgtcatcgttggtgtagctgcttctgggcaagaaatctctacacgaccattccagctcgtcactggccgtgtctggaagggaacagctttcggcggtttcaagagccgaagccaagttccatggctcgttgagaagtacttgaacaag

SEQ ID NO: 406129 - DNA, 547 bp, Oryza sativa nipponbare
  unsure (1)..(547): unsure at all n locations
cgtccgaattcccggtcgccccgcgtccgcaatcgcagagctcaagcctggtgttctctcggtacacgagggaaacnatatcaccaagtactttgtgagcagtggctttgcatttgtccatgcaaactccatcgctgatatcgtggctgttgaggctgtccccctggaccagatcgacccagccgcggtccagcagggtctcgcggaattcaacgccaagcttggatcggcctcaactgaactggagaaggccgaagctcagattggagtggatgttcacagtgcgctcaatgccgctttggctggttgatcaatacgtttttaagttgctgtccctctctctcttttgcatcttcatttttagaatgggagctgaagtttgcaaactcatggatgatgggatggagggaatgatcttaaataaattatactccatctcaaagacagaacccttgttttttttttaacctgactcctggatgggattttggaatannngaaatttttttccnagcctacaaagnnnaanntntttgggtccannntt

SEQ ID NO: 406130 - DNA, 497 bp, Oryza sativa nipponbare
cccacgcgtccgattatagttgaagcatagtggtagaatcctacaaaaatgaagatcattttcgtatttgctctccttgctattgttgcatgcaacgcttctgcacggtttgatgctcttagtcaaagttatagacaatatcaactacaatcgcatctcctgctacagcaacaagtgctcagcccatgcagtgagttcgtaaggcaacagcatagcatagtggcaacccccttctggcaaccagctacgtttcaattgataaacaaccaagtcatgcagcaacagtgttgccaacagctcaggctggtagcgcaacaatctcactaccaggccattagtagcgttcaggcgattgtgcagcaactacagctgcagcaggtcggtgttgtctactttgatcagactcaagctcaagctcaagctttgctggccttaaacttgccatccatatgtggtatctatcctaactactacattgctccgaggagcattcccac

SEQ ID NO: 406131 - DNA, 449 bp, Oryza sativa nipponbare
cggacgcgtgggcggacgcgtgggttgttgcactcccagctggtgttgcacattggttctacaatgatggtgatgcacctattgttgccgtatatgtttatgacgtaaacaacaacgccaatcagcttgaacctaggcaaaaggagttcctattagccggcaacaacaatcgggctcaacaacaacaagtatatggtagctcaattgagcaacactctgggcaaaacatattcagcggatttggtgttgagatgctaagtgaggctttaggcatcaacgcagtagcagcaaagaggctacagagccaaaatgatcaaagaggagagatcatacatgtgaagaatggccttcaattgttgaaaccgactttgacacaacagcaagaacaagcacaagcacaagatcaatatcaacaagttcaatacagtgaacgacagcaaacatcttct

SEQ ID NO: 406132 - DNA, 643 bp, Oryza sativa nipponbare
gccgactttcccaggctgtcctgagacctaccagcagcagttccaacaatcagggcaagcccaattgaccgaaagtcaaagccaaagccataagttcaaggatgaacatcaaaagattcaccgtttcagacaaggagatgttatcgcgttgcctgctggtgtagctcattggtgctacaatgatggtgaagtgccggttgttgccatatatgtcactgatatcaacaacggtgctaatcaacttgaccctcgacagagggatttcttgttagctggaaataagagaaaccctcaagcatacaggcgtgaagttgaggagtggtcacaaaacatatttagtggctttagcactgaactgcttagcgaggcttttggcataagcaaccaagttgcaaggcagctccagtgtcaaaatgaccaaagaggagaaattgtccgcgttgaacgcgggctcagtttgctgcaaccatatgcatcattgcaagagcaggaacaaggacaaatgcaatcaagagagcattatcaagaaggaggatatcagcaaagtcaatatgggagtggctgccctaacggtttggatgagaccttttgcaccatgagggtaaggcaaaacatcgattatcctaaccgtgctgatacatac

SEQ ID NO: 406133 - DNA, 373 bp, Oryza sativa nipponbare
caggaatcctcgcttctcatgggactaaattatgtaatatcatcagtggccatctttgatgaatatacaaatgatgtgcttgacatggcaccaggatcctgctttcccaggtttaaataccggaaaaatgaagcttcgacagagggtggttcattatcaaggcctgcctcatttaaggacaagcaagacgggaagaaagctccatcacgtgttacatcgtttaagggcagctttgatgagttcaatccatttaagttgctagatcacctgtttgaggagtgtaagcaccgtggagaggttctggttgctgaaggagtgataacaccaaaagacattgaagaaacaaagtcaggaaaaatcgggattggagtac

SEQ ID NO: 406134 - DNA, 513 bp, Oryza sativa nipponbare
  unsure (1)..(513): unsure at all n locations
attagcaactgctaatagctatggcagactaccgttttctctcgtttttctatatacttttgtgctatgctattatgccagggttctatggcccaactatttaatccaagcacaaacccatggcatagtcctcggcaaggaagttttagggagtgtaggtttgatagactacaagcatgggagccacttcgaaaagtaaggtcagaagctggggtgactgagtacttcgatgagaagaatgaattattccaatgcacaggtacttttgtcatccgacgtgtcattcaacctcaaggccttttggtacctcgatatagcaatactcctggcctggtctacatcattcaagggaggggttctatgggtttaaccttccccggttgcccagcgacttatcagcaacaattccaacaattntcgtctcaaggccaaagtcaaagccaaaagtttagggatgagcatcaaaagatccatcaatttagacaaggagatgttgttgcactcccagctggt

SEQ ID NO: 406135 - DNA, 440 bp, Oryza sativa nipponbare
cggacgcgtgggcggacgcgtgggcggacgcgtgggcggacgcgtgggttcaaatattatagttgaagcatagtagtagaatccaacaacaatgaagatcattttcgtatttgctctccttgctattgttgcatgcaatgcctctgcgcggtttgatcctcttagtcaaagttataggcaatatcaactacagtcgcatctcctactacagcaacaagtgctcagcccatgcagtgagttcgtaaggcaacagtatagcatagtggcaacccccttctggcaaccagctacgtttcaattgataaacaaccaagtcatgcagcagcagtgttgccaacagctcaggctggtagcacaacaatctcactaccaggccattagtattggtcaagcgattgtgcaacagctacaactggagcaatttagtggtggctactttg

SEQ ID NO: 406136 - DNA, 402 bp, Oryza sativa nipponbare
ccaccaacagggctgatatcctggattctgctttactcagacctggacgttttgacagacaggtaagtgttgatgttcctgatgtacgcggaaggacagagattcttaaggtgcacggtagcaacaagaagttcgatactgatgtctctcttgaagtcatagcaatgagaacacctggctttagtggagcagacttggcaaatcttctaaatgaagcagccatattagcgggccgacgtggtcggacagcaatttcctcaaaggagattgatgattcaattgacagaatagtggctggtatggaaggaactgtgatgacagatgggaagagcaaaagtcttgttgcttaccatgaagttgggcatgcaatttgtggaactttgacgcctggccacgaccctg

SEQ ID NO: 406137 - DNA, 515 bp, Oryza sativa nipponbare
caatgagtttatttttgaaacgaatatttggcacagaagatatatgccctccccaattggaagaaatctcctgtaaaatattgaaaaaatgtagtggatctccattggcgattattaccatagctagcttattgactaataaagctagtacaaaagaagaatgggagagggtacataattcaattggttcgacactggaaaaagatccaagtgtcgaagagatgcagaggatattatcccttagctatgatgatcttcctcaccatttgaagacatgtctactatatctatgcatatttccagaagactgtgagattgagagagaccagctggtaaagagatggatcgccgaagggttcattaatacaggaagtggacaagatttggagaaaataggcgagtcgtatcttaatgatcttatcagcagaagcatgattcagccagtgaaagttcgatatgatggccaggttgattcatgccggatccatgatatgattcttgatctccttatgtcc

SEQ ID NO: 406138 - DNA, 444 bp, Oryza sativa nipponbare
ttctgtttgacatgggtcctcctatgagcagggaagttcagctggtttctttccatactgtgtcaaaaggatattggggggagtgtggacaacgtggagggtattttgaaatgacaaatcttcctcccaagacagtagacgagatctacaaggttgcatcaatcgcactcagtccaaatgttcctgggcagatctttatgggtttaatggttaaccctcctaagcctggagatatctcttatctgaagttttctgctgaaagcaagtctatcctcgagtctttgaggaggagagcacgcctgatgacagatggtttcaatagttgccgaaatgttgtctgcaatttcacagaaggagctatgtactctttcccccaaatacgcttaccaccaaaagctatagatgcagccaaaagggctggcaaagcggccgatgttttctact

SEQ ID NO: 406139 - DNA, 527 bp, Oryza sativa nipponbare
  unsure (1)..(527): unsure at all n locations
ctcgctggacgccatcttgaactgtatgaggtggaaagcagcgaacgggagaataagcagcatgtcgtgagtttgataaaatacattcaatctaaaagaggtagcctgatgtgggagaatgaggatcctacccttgttcggactgaactacctagcgcttcactcttatcagcacttgtgcaaagcatggttagtgcaattttcttccaaggtgatcttcgtgaaacctggggttctgaagcacttaagtgggctatggagtgcacatctcgtcacttggcatgtcggtcacaccagatatatcgtgctttacgccccagtgttaaaagcgatagctgtgtattgcttatgaggtgcatccacagatgcttgggtaaccctgttccagctgttctgggttttgcaatggagatattgttgactcttcaagtcatggttgagaacatggaacctgagaaggtgatactntacncacagctcttctggggctgtgttgcactgatgcataccgattatgtgcacatata

SEQ ID NO: 406140 - DNA, 403 bp, Oryza sativa nipponbare
gcagcagaaacgcagtattggcaagaaaacgagaacagttgatacatacacgtttattcggggagagatgtaaaaaggctatcaaacaggaggccataaagaaagttcatgggtagcctcaaaagcattctagaatggctcttgaaaagtttatgtgatgacggtgggagcagatcggccagtgtactcttgcatctttgacagcttcagtgcaacatcaaccagaggagcaagggcatcctgcgaatccctgccggtcttggaagaatccttctcatactgctcgatgtagacacggatagtagcaccaacagagccagttccagagaggcggaacaccagccgggaaccatctccgaagaggtaccggacaccctgatgcttggagacagaaccatcaaca

SEQ ID NO: 406141 - DNA, 398 bp, Oryza sativa nipponbare
cccacgcgtccgggaagttcgattcaaaggaaatgcacctccttccaacaaatatcaaactagccatctgagcctgaatgcactggtccactagcagtgttgaaaggcttcaggaacttacctactgggatgccttctgtgcttattgtgactggccttacctggttgacttggttaccattcattctgtactacactgactggatcgtccgagagatctaccacggtgactcaaaaggaactgatcctcagatcgaggctatcaaccagggtgtaagggcaggagcatgactcctgctactgaatacgattgtgctacgatatagctcattcttgattgaaccaatgtgcatgaaagtcggaccaagggttgtgtggatgactagcaatttgatcag

SEQ ID NO: 406142 - DNA, 516 bp, Oryza sativa nipponbare
tctccatcttcctcgtgctgcagtgatgatgagggtggcaagactctgctcgagcctagcacatataaggatgtgttgatcttattccggttcgatgaccacgatctccctttcagactaaaagaagtaatactttctgatgtgaggctgttaacattgctagagtatggccttccttcatgggtcatttttctccagtcatatccagtgttctgcaagacatatcgcccatggatgtgtcctcttgccagggcattgtatgtcttgatgtcaatagttactgttctcataggattttatgacctctacaagaatgtccccatgttgaaggcaactgcatcaagattggttggccctttctttgactggatagagacgtgggaaatgatttcacgactgaagtatcttggaaccatgctttttctacataacttccagcaggcttttacatgggctcttaagaattgaactgctactaaatctgctctaaggggtttgaccaagcccatcatggga

SEQ ID NO: 406143 - DNA, 473 bp, Oryza sativa nipponbare
  unsure (1)..(473): unsure at all n locations
gcaaggtggtgaaccacggcgtgccgccggagacgatgcgggagatggcggcggtgtgcgaggagttcttccggctgccggcggaggacaaggcggcgttctactccgacgcggaggagaaccccaaccgcctcttctccagcaccatctacgaggtcggcgaccagcgctactggcgcgactgcctccgcctcgcctgcggcttccccgtcgccgacgacaccaacacccactggcccgacaagccccaccatctccgggatgtcacggagaagttcttcgtggcgacgaggggattggggatcgagctgctgcggctgctgtgcgaggggatggggctcaggccggactacttcgagcgcgacctcaccgccggcgatgtcatcatcaacgtcaaccactaccctccatgcccggatccgagcctgacgctgggcttgccgnncgactgcgaccgcaacctcatcaccctg

SEQ ID NO: 406144 - DNA, 467 bp, Oryza sativa nipponbare
gttgcccattcatctgggttttcttctgcttctttttttttcctagagagtacggttttctttgtaattctttaatttgttgcaaccatgaatgtattggcatctaagatcttcccttcccgctccaatgttgccagcgagcaacaacaatcgaagcgcgagaaagcaactattgatgacgctaagaactcgtccaagaacaaaaatcttgaccgcagtgtcgatgagagtgtgcttggaatcattcttggaggtggtgcagggactagattgtatcccctcaccaagaagcgtgccaagcctgccgtgcctctgggtgccaactacaggcttattgatatccctgtcagcaactgtttgaacagcaacatatccaagatctatgtgctgacacaattcaactctgcctctctgaaccgtcacctgtcaagagcctatgggaacaacattggcgggtacaggaatga

SEQ ID NO: 406145 - DNA, 486 bp, Oryza sativa nipponbare
  unsure (1)..(486): unsure at all n locations
gttctagatcgcgagcggccgcccgcgatctagaactagtctcagagtcggatctatcacatctcaccttcttccatgctatcatcaaggagacattccgtctacatccatcaacaccgctctcgctgccacgcatggcatctgaggagtgtgagatcgcaggctaccgtatccccaagggtgcagagttgctggtcaatgtgtgggggatcgcccgtgacccagccatatggcctgacccactagagtacaagccctctcggttcctccccggtgggacgcacactgatgtggatgtcaagggaaatgatttcggacttataccattcggtgcagggcgaaggatatgcgccggcctcagttggggcctgcggatggtcaccatgacagcggccacgctggtgcatgcattcgactggcagctaccagcggaccagacgccagacaagctcaatatggatgaggcgtntaccctcctgctgcaaa

SEQ ID NO: 406146 - DNA, 369 bp, Oryza sativa nipponbare
gtcagaagccggggttacagagtactttgatgagaagaatgaacaattccagtgcacaggtacatttgtcatccgacgtgtcattgagcctcaaggccttctggtacctcgatacagcaatactcctggcatggtctacatcatccaagggagaggttctatgggattaactttccccggctgcccagcaacctaccaacaacaattccaacaattcttgcctgaaggccaaagccagagccaaaaatttagggatgagcaccaaaagatccaccaatttagacaaggagatatcgttgcactgccagctggtgttgcgcattggttctacaatgaaggcgatgcaccagttgttgctctatatgtctt

SEQ ID NO: 406147 - DNA, 437 bp, Oryza sativa nipponbare
attcgaaattgatagtgaaacccatgatcctgttgacataggaatatatcaaattcgtgaggcaaatcaaatgattgaagagtttatgttggctgcaaatatctctgtcgctgagaagattttgaagcacttccccttgtgttcattgctaaggcgccatcctatctcaacaaaggaggtgcttgagccattactccgaactgcgtcttctgtggggctaaatctggatgtgtcatcctcaaaagcattagcagaatcacttgataatgcaaagaatgatgacccatacttcaacaagcttatcaggattttggcaactagatgcatgacacaggcagtttatttctgtagcggagacttgaccttttctgagtattaccattatggccttgctgcttctctttacacacatttcaccttccctattcgcagatatg

SEQ ID NO: 406148 - DNA, 537 bp, Oryza sativa nipponbare
ccagatttggtggaggaagtctttgaggatggatgtccttccctttcaagacggctagattctgaatatccagttcggaatatgttcaagctcttcatatgtgcaatttgtcaagtagagttagagtctggtcagggtatatccatacatgagggtttgtcaaagtcaggaaagctgcgtccatgggatgggcctttcctttgccacagttgccaggaaaagaaagaagcaatggaaggaaaacgtcactcacgagattcctcctcaagaaacagtgggtcaagtgaatagtagccaagttggagtcatcttgaagaaatcatctaacagctttctgagcgataacgcattagttgcatttcccttgggagtctttcagtggttcctctgctcatggattggtatgaaataggattatatatttatagaatggtacagctgtgacaaggtgactatcggcttatacattactgaaatctgaagacgcaacacattgtgtagcaagtatcttaccgagctactggcaagtcaaaatct

SEQ ID NO: 406149 - DNA, 479 bp, Oryza sativa nipponbare
cccatgcgtccgcattatagttgaagcatagtagtagaatcctacaaaaatgaagatcaattttcgtatttgctctccttgctattgttgcatgcaacgcttctgcacggtttgatgctcttagtcaaagttatagacaatatcaactacaatcgcatctcctgctacagcaacaagtgctcagcccatgcagtgagttcgtaaggcaacagcatagcatagtggcaacccccttctggcaaccagctacgtttcaattgataaacaaccaagtcatgcagcaacagtgttgccaacagctcaggctggtagcgcaacaatctcactaccaggccattagtagcgttcaggcgattgtgcagcaactacagctgcagcaggtcggtgttgtctactttgatcagactcaagctcaagctcaagctttgctggccttaaacttgccatccatatgtggtatctatcctaactactacatt

SEQ ID NO: 406150 - DNA, 502 bp, Oryza sativa nipponbare
caacaacatgggatccataaatcgcgcgataggttgcttcacagtttgcttgttcctcttgtgcgatggctccctagcccagcagctattaggccagagcactagtcaatggcagagttctcgtcgtggaagtccgagacgatgtagatttgataggttgcaagcatttgagccagtggggagtgtgaggtctcaagctggcacaactgagttcttcgatgtctctaatgaggtggttcaatgtaccggagtatctgttgtccgccgagttattgaacctagaggcctactactaccccattacactaatggtgcatctctagtatatatcatccaagggagaggtataacagggccgactttcccaggctgtcctgagacctaccagcagcagttccaacaatcagggcaagcccaattgaccgaaagtcaaagccaaagccataagttcaaggattaacatcaaaagattcaccgttttagaccaggagatgttatcgcg

SEQ ID NO: 406151 - DNA, 171 bp, Oryza sativa nipponbare
cccacgcgtccgaaccccacagcagcagcagcagtagctgagcttgaagcagcagagcgaggtagacatggccgccgccaccatggccctctcgtccccggcgctggccggcaaggccgccgcgaaggtgttcggcgaggggcgcatcaccatgcgcaagttgtgtgcgaa

SEQ ID NO: 406152 - DNA, 483 bp, Oryza sativa nipponbare
cccacgcgtccgcccacgcgtccggctcagagtggcacctcaaaatttttgaaggctctaaaggagaataaagaccttggagccgataatggtctgattggccagtttggggttgggttttactcagcttttcttgtagcggaaaaggttgtggtctccactaagagccccaaatcagataagcaatatgtatgggaaggtgtagctgacagtagctcttatgtcatcaaggaagagactgatcctgaaaaaatgcttacacgtggcactcagattactctcgttttaaggcctgatgataagtttgagtttgctgatcctggaaggattcaaggcctagttaagaactactctcagtttgtgtctttccccatatacacatggcaggaaaaatccagaactgtcgaggttgaagaggatgaagaggcaaaagaaggtgaagaggcgaaagagggtgaacaaaagaaaaagaagaccattact

SEQ ID NO: 406153 - DNA, 491 bp, Oryza sativa nipponbare; identical to SEQ ID NO: 391796

SEQ ID NO: 406154 - DNA, 597 bp, Oryza sativa nipponbare
gcaagaagttgcaaatgtcatcagtgctgtgacgctgggtctctcgtcccaggaaatccctcgttttgcttcccctcctctgagagaagatgacaaggatggacactttgtctttgctgttggagacaacctcacaccacgatacaggattaatgcaaaaatgggtgaaggtcagttgggagagctgcctccgttagaattgaacatcttaacttgagatgtttcttgcatgctgaatttgttgacagagcggagtatattgaaactgaaactttttggatatacatcaggtacctttggtcaggtattggaatgttgggatagggaaaggaaagaaatggtggccattaagatcatcagaggcattaagaagtacagggatgctgcaatgatagaaattggcatgctcgagcagcttggtaaatatgaaaaaagtagatccaggtttcatcccgttctccaaaggaaggttcctatttcaagcagctgcccaagtccagtgctattaaggtgattgattttggcagcacaacatatgaccagcaggatcagacctatgtggtgtctactaggcattatcgagctccagaattatct

SEQ ID NO: 406155 - DNA, 552 bp, Oryza sativa nipponbare
cggacgcgtgggcggacgcgtgggcgagctagcaaaaaggatagcaatggtggaaccggggagagcgcgggagacgaaggtcaccgcctcagcctcaagctctgcaggctcagacgccgctgtcatgaagaagaagaagaagaagaagaagaagctggtggtagcaagcaggaaggtggatgagaaagacaagaagcaggtggattacaagtgcagtagaagcagcggcagagacgagtgctgcaaggtggagagccgtcatcagcagtgcacagagccggagagcccttcctacaggttagctctcaggagcctcttctcgtgcagaaacagcagcagcagcagccacgccggccaccaccaccaccgcgccgccgacggcaagaagctcggctgcaattccgcctccatctgcaaggtcaagcaagacaacccgatgcagcagcacatgcgcaaggcggaggatgagctcaaggtgaaggacaagccgccggtcgccgagccgtactgcaagcgcagagcttcggtgagcgcgtgcacatcagcacgagc

SEQ ID NO: 406156 - DNA, 163 bp, Oryza sativa nipponbare
  unsure (1)..(163): unsure at all n locations
gcgtccggctcgctcatcgcatctctctanctcgacanctcactgcatcaatggccgcggccaccatggcgctctcctccccggtgatggcccgcgcggcgccgtcnacctcctccgcgctcttcggcgaggcgcggatcaccatgcgcaagaccgccgcgaa

SEQ ID NO: 406157 - DNA, 397 bp, Oryza sativa nipponbare
  unsure (1)..(397): unsure at all n locations
ctcctcctccgccccgacgcctcgctgnnggttttgcctctccctccgccgccgccgctgccgcgaggagaggagggggggagagcacccagccggcgagccagccatgtcgctgcgcccgagcgagcgggtggaggtgcggcggaaccgctacaaggtggctgtggacgccgaggaggggaggcggcngcncnaggacaacgtggtgganatccncaagagccggcgcgaggagagcctcctcaagaagcgccgcgaggggctccaggcccaggcccccgtccccgcctccgccgcaaccggcgtggataagaagctcgaaagccttcctgctatgattggtggagtttattcggacgataacaaccttcagcttgaggggacaacacagttccgc

SEQ ID NO: 406158 - DNA, 617 bp, Oryza sativa nipponbare
  unsure (1)..(617): unsure at all n locations
cggacgcgtgggctgagaaaatgttgacacgcggaacacagattactctgtttttaagagatgatgataagtacgagtttgctgaccctggacgtattcaaggtttagttaagaactattcccagtttgtttcattccccatatatacatggcaggagaaatcaagaacagttgaggtggaagaagaagaaccgaaagaaggtgaagaggcaacagagggtgaaaagaagaagaaaaagaaaacaatcactgagaagtactgggattgggaattggctaatgaaacaaagcccatatggatgagaaatccaaaggaagttgagaaaactgagtacaatgaattctacaagaaggcattcaatgagtttttggatcctcttgcttacacccactttacaacagagggtgaggtggaattcaggagcgtcctctacattccaggaatggcacctcttagcaatgaggagataatgaaccctaagaccaagaatatccggctgtatgttaagagagtcttcatatcagatgacttcgatggcgagttgttccctagatacttaagctttgtanagggtgtagtggactcaaatgatcttcctctcaatgtttcccgtgag

SEQ ID NO: 406159 - DNA, 288 bp, Oryza sativa nipponbare
cccatttttccggacacattgcgggggggggggggccacgcatccaatagctatggcgagttccgttttctctcggttttctatatacttttgtgttcttctattatgccatggttctatggcccagctatttaatcccagcacaaacccatggcatatttttttttaggaaggggggtgggagagcacatttgatagactacaagcatttgaaccacttgggggggggaggtcagaagctgttgtgagtgagtacttctatgagaagaatgaattatttcagtgtac

SEQ ID NO: 406160 - DNA, 303 bp, Oryza sativa nipponbare
cccacgcgtccgcggacgcgtgggcgcgggtgggggcacaaggttgaagactacaggaacacatttgcaaaccttgcaatccccctcttctctatggctgagccggtccctcccaagaccatcaagcaccaggacatggcctggactgtttgggaccgctggaccataactggcaagggggggctgagggagcttctggactggctcaaggagaagggcctgaatgcatacagcatatcttgcggcacctcgctgctgtacaactcaatgttcccgaggcacaaggagcgtctagacaagaag

SEQ ID NO: 406161 - DNA, 442 bp, Oryza sativa nipponbare
gttcattagtactacaacaacatggcatccatggatcgccccatagttttcttcacagtttgcttgttcctcttgtgcaatggctctctagcccagcagctattaggccagagcactagtcaatggcagagttctcgtcgtggaagtccaagagaatgcaggttcgataggttgcaagcatttgagccaattcggagtgtgaggtctcaagctggcacaactgagttcttcgatgtctctaatgagcaatttcaatgtaccggagtatctgttgtccgtcgagttattgaacctagaggccttctactaccccattacactaatggtgcatctctagtatatatcatccaagggagaggtataacagggccaactttcccaggctgtcctgagtcctaccaacaacagttccaacaatcaggccaagcccaattgaccgaaa

SEQ ID NO: 406162 - DNA, 223 bp, Oryza sativa nipponbare
  unsure (1)..(223): unsure at all n locations
ccgagctgggcgagcgcctcagggggtggggtgggaagggcttccgcgtcaccggctcagtctgcgacgtctccgtgcgggagcagcgggaacgcatgctccgcgaggtcgccggcctctacggtggcaagctcgacatcctcgtgaacaacgtgggaacaaacttttcaaaacaggggggggggtactctgcanatgattactcgttcataatggccaccaa

SEQ ID NO: 406163 - DNA, 395 bp, Oryza sativa nipponbare
ctgagtccagtttgcgatgtgacattcttgaggcagagtgtgcagtttggaagtggactgtggtgtgtggttgatgtgtctattgataccatccttcctggagagagtaaaacagctcagtccagtgtgcagaccagcagtacagctgccagacgcatggaagtcaggctgttgccatcaggctgtgttattgaagaaatggagaatggctattccaaggtgacctggatggtgcatgccgcttatgatgagagagcagtgccagtgctttatcattcacttctccgctctgcaaaagcccttggtgcgtgccgctgggtagcatcactccagagacaccaacccgtcctttccggcctgcacaaatacattttttgtcctgacagcacaatgac

SEQ ID NO: 406164 - DNA, 556 bp, Oryza sativa nipponbare
  unsure (1)..(556): unsure at all n locations
cccacgcgtccgaaaaaaagggaaggaatttttttctttttttttgttcgcctccgcttcttcctcacgcagctctcgcctcgcctcgccgcccgccactagagaggagagggagaaggaggaggaggcaaatcccagcaaaagaagatgcagatcttcgtgaagaccctgacggggaagaccatcaccctcgaggtggagagcagcgacaccatcgacaacgtcaaggccaaaatccaggacaaggaagggatccctccagatcaacagcgtttgatattcgccggcaagcagctggaagatgggcgcacactggccgactacaacattcagaaggagtcaactcttcacttggtcctcaggctcaggggtggcactatgatcaaggttaagaccctcactggaaaagagattgaaattgacattgagcccaccgacacgatcgataggatcaaggagcgtgttgaggagaaagaaggcattcctcccgtgcagcaaaggcttatctattgctgtaagcagcttgccgacgacaagactgcgaangactataaca

SEQ ID NO: 406165 - DNA, 403 bp, Oryza sativa nipponbare
cccacgcgtccgcccacgcgtccgcgatactccaacactcctggcctagtatatatcatccaagggactggtgtactgggattgacctttcctggttgcccagcaacttaccaaaagcaatttaggcattttggtcttgaaggaggaagccaaaggcaaggaaaaaaattaagagatgaaaaccaaaagatccaccaatttaggcaaggagatgttgttgcacttccttctggtataccacactggttctataatgagggtgacacccctgttgttgctttgtttgtttttgatgtaaacaacaatgctaatcaactcgaaccaagacaaaaggagttcttgttagctggtaacaatatagagcaacaagtgtcccacccctcaatcaacaaacattctgggc

SEQ ID NO: 406166 - DNA, 337 bp, Oryza sativa nipponbare
  unsure (1)..(337): unsure at all n locations
gtcggttgagatgcaccacgaggctctccaggaggctcttcctggtgacaacgtcgggttcaacgtgaagaacgttgcggtgaaggatctgaagcgtgggtacgtggcctccaactccaaggatgaccctgccaaggaggctgccagcttcacctcccaggtgatcatcatgaaccacggtggccagatcggcaacggctacgccccagtgctggactgccacacctcccacattgccggnaagtttgctgagctggngaccaanatccacagacaatctggtnaggggctggagaaggagcccaagttcctcaaaaacggggatgctggtatgggt

SEQ ID NO: 406167 - DNA, 351 bp, Oryza sativa nipponbare
cccacgcgtccggcaaaatagaaagatctagtgtcccgcagcaatgaagatcattttcgtctttgctctccttgctattgctgcatgcagcgcctctgcgcagtttgatgttttaggtcaaagttataggcaatatcagctgcagtcgcctgtcctgctacagcaacatgtgcttagcccatataatgagttcgtaaggcagcagtatggcatagcggcaagccccttcttgcaatcagctgcgtttcaactgagaaacaaccaagtctggcaacagctcgcgctggtggcgccaccatctcactatcaggacattaacattgttcaagccatagcgcagcagctacaact

SEQ ID NO: 406168 - DNA, 205 bp, Oryza sativa nipponbare
tgaagctctgcaggctcagacgccgctgcatgagtagaacagaggaatataagagccggtgttttttttaggaaggtggtttttaaagacaagaagcaggtggattacaagtgcaaaaaaaacagcggcagaaactactgctgcaaggtagggagccgtaatgagcaggcgcaatagccggagagcccttgctacaggctagctc

SEQ ID NO: 406169 - DNA, 475 bp, Oryza sativa nipponbare
cccatgcgtccgatatgattcaagggcgatctcgagttcaagtcgttagtaactttggaaagactgtgtttgatggtgtccttcgcccaggacaattattgatcattccgcaacattatgctgtcttgaagaaagcagagcgtgaaggatgccaatatatcgcaatcaagacaaacgctaacgccttcgtcagccaccttgcagggaaaaactcagtattccgtgccttgccagttgatgtagtcgctaatgcgtatcgcatctcaagggagcaagcccgaagcctcaagaacaacaggggagaagagcacggtgccttcactcctagatttcaacaacaatactacccaggattatcgaatgagtccgaaagcgagacctcagagtaatgtaattgagaactagtatcggcgtagagtaaaataaaacaccacaagtatgacacttggtggtgattctgttcgatatcagtact

SEQ ID NO: 406170 - DNA, 477 bp, Oryza sativa nipponbare
caagagcgaggggatctataaatcgccccatagtatgtgctgtacagcgcgtttgtcacctctgtgtgcactggctctgtagccgagcatctgttcaggccagagcactagtcagataggcagagttctctgcgtggaagttcatgagaatgcaggttcgataggttgcaagcatttgagccaatttggagtgtgaggtctcaagctggcacaactgagttcttcgatgtctctaatgagcaatttcaatgtaccggagtatctgttgtccgtcgagttattgaacctagaggccttctactaccccattacactaatggtgcatctctagtatatatcatccaagggagaggtataacagggccaactttcccaggctgtgctgagtcctaccaacaacagttccaacaatcagggcaagcccaattgaccgaaagtcaaagcccaagtcaaaagttcaaggatgaacatcaaaag

SEQ ID NO: 406171 - DNA, 572 bp, Oryza sativa nipponbare
cccacgcgtccggaggtataacagggccaactttcccaggctgtcctgagtcctaccaacaacagttccaacaatcaggccaagcccaattgaccgaaagtcaaagccaaagtcaaaagttcaaggatgaacatcaaaagatccaccgtttcagacaaggagatgtaattgcattgcctgctggtgtagctcattggtgctacaatgatggtgaagtgccagttgttgccatatatgtcactgatctcaacaacggtgctaatcaacttgaccctaggcaaagggatttcttgttagctggaaataagagaaaccctcaagcatacaggcgtgaggttgaggagcggtcacagaacatatttagtggctttagcactgaactacttagcgaggctcttggcgtaagcagccaagtggcaaggcagctccaatgtcaaaatgaccaaagaggagaaattgtccgtgtcgaacacgggctcagtttgctgcagccatatgcatcattgcaggagcaggaacaaggacaagtgcaatcaagagagcgttatcaagaaggacaatatcagcaaagt

SEQ ID NO: 406172 - DNA, 571 bp, Oryza sativa nipponbare
caccaagtatgacgtcaagctgaacaatgcaattctcgctgaggaaaagcacttgcctatgtatgatgagttggccagcaagggcaatgttgaatatattgccggaggagccacccagaactctatcagggttgctcaatggatgcttcaaactcctggtgcaacaagttacatgggttgcattggaaaggataagtttggtgaggagatgaagaagaatgcccaagctgctggtgttactgctcattactacgaggatgaggctgctcccacgggcacatgtgctgtctgtgttgttggtggtgaaagatcactggttgcaaacttatcagcagcaaactgctacaaatctgagcatctgaagaaaccggagaactgggcactagtggagaaagcaaaatacatctacattgctggctttttccttacggtctccccagattctattcagcttgttgctgagcatgctgccgctaacaacaaggtgttcctgatgaacctctctgcaccctttatctgtgagtttttccgtgatgcccaggaaaaggttcttccgtttgtggactacatc

SEQ ID NO: 406173 - DNA, 453 bp, Oryza sativa nipponbare
cccacgcgtccgcccacgcgtccgcccacgcgtccgcatcgacccacctcaaattaagtatggccatcaagtgtcattgaaggatcagacatgtacatgggtctgggacgaagttaataataatccattgatggcagctaacaataaggtaaaggctttgttgtcacatcaccaattcagcatactaaaaattccagtcactaacccctctgatgacctctctgatggcagtaagcttccatttgaagctatctttgtgtcctgcaaggacagttcgcacaaaccaactattctagtccttcatggtggcccacactcagtatctgtatcaagctattcgaaaacatcggcgttcctcgcatcacttggatttaacctacttattgtaaattatcgagggacaccgggttttggagaggaggctttgcagtcacttcctggaaaggttggatc

SEQ ID NO: 406174 - DNA, 195 bp, Oryza sativa nipponbare
  unsure (1)..(195): unsure at all n locations
cttctagaagcgtcttccgagatgaaggtgtgcagaagaccaggaggcggcggcggatgggcggacggtgttctcnttcgagtacttcccgcccaagacggaggaggggctcgacaacctgttcgagcggatggatcgcatggtggcgcacggccccaacttctncnacatcggggggggcgccnncnnatccac

SEQ ID NO: 406175 - DNA, 454 bp, Oryza sativa nipponbare
  unsure (1)..(454): unsure at all n locations
cccacgcgtccggggaagacgacgacgaggtcgcccgcgcagcaatgccgctctgcagcttctacgcctccacctccctccccgtcgccaagccccactccctcccctcctcctcctcctccaagccctacaccgccacgccggcgccggcgccgacggcggcgtcggcgtcggcgtcggcggcggcgctgtcgctgcacctgcccgagctgccgtcgcgggtgaaggacaagatcctgagccttgagctgatgggggtggactacgggcgcgcgctggcgctgaacccggcgctccgcgacgcggcgccggagtccatccacgccgtggtgacgttcctccagtcgcgggggctccacttcaaggacctcggccgcgtgttcggcatgtgcccggcgctgctcaccggcagcgtncgcgccgacctccgcccggtcttcgcctttctcaccga

SEQ ID NO: 406176 - DNA, 482 bp, Oryza sativa nipponbare
cccacgcgtccgcacagttcaagcattatacagcaaaatagaaagatctagtgtcccgcagcaatgaagatcattttcgtctttgctctccttgctattgctgcatgcagcgcctctgcgcagtttgatgttttaggtcaaagttataggcaatatcagctgcagtcgcctgtcctgctacagcaacaggtgcttagcccatataatgagttcgtaaggcagcagtatggcatagcggcaagccccttcttgcaatcagctgcgtttcaactgagaaacaaccaagtctggcaacagctcgcgctggtggcgcaacaatctcactatcaggacattaacattgttcaggccatagcgcagcagctacaactccagcagtttggtgatctctactttgatcggaatctggctcaagctcaagctcctgttggctttaacgtgccatctagatatggtatctaccctaggtactatggggcacc

SEQ ID NO: 406177 - DNA, 226 bp, Oryza sativa nipponbare
  unsure (1)..(226): unsure at all n locations
cccacgcgtccgctagatcgcgagcgggcgcgctttttttttttttttcgagaagatcagtactactttattcatgccatgaccatgcatacatatgggctttcacagatccatgaagaattcctcgcccgaaaccgaaaaatacataaagcaaactcactcactctggctgcagagggggggggcgaagtgcgtactcacacccaattttattnnatcgatcggg

SEQ ID NO: 406178 - DNA, 397 bp, Oryza sativa nipponbare
ggcatccataaatcgccccatagttttcttcacagtttgcttgttcctcttgtgcaatggctctctagcccagcagctattaggccagagcactagtcaatggcagagttctcgtcgtggaagtccaagagaatgcaggttcgataggttgcaagcatttgagccatttcggagtgtgaggtctcaagctggcacaactgagttcttcgatgtctctaatgagcaatttcaatgtaccggagtatctgttgtccgtcgagttattgaacctagaggccttctactaccccattacactaatggtgcatctctagtatatatcatccaagggagaggtataacagggccaactttcccaggctggcctgagtcctaccaacaacaggtccaacaatca

SEQ ID NO: 406179 - DNA, 395 bp, Oryza sativa nipponbare
  unsure (1)..(395): unsure at all n locations
cccacgcgtccgattacagcaaaagcataagaactagaaacccaccacaatgaagatcattttcttctttgctctccttgctattgctgcatgcagtgcctctgcgcagtttgatgctgttactcaagtttacaggcaatatcagctgcagccgcatctcatgctgcagcaacagatgcttagcccatgcggtgagttcgtaaggcagcagtgcagcacagtggcaacccccttcttccaatcacccgtgtttcaactgagaaactgccaagtcatgcagcagcagtgctgccaacagctcaggatgatcgcacaacagtctcactggcaggccattancagnggtcaggctattgggcaacaactacggctacaacagtttggtagcgtctact

SEQ ID NO: 406180 - DNA, 345 bp, Oryza sativa nipponbare
cggacgcgtgggtttttttttttttaaggcgaaatctgatcaaacattgattactcaagatcgatcacacatcaagagtacacttctacaagttcactagacggccacaattctgatcatagacacgaattgcataatcgaatcaatttgcagtccttttatttccatcacatagttcatagccagctctgatgccatccaagcggcagcctagaactgaacatgatgatcaatggatggcaacttcaacttcagtctgcgtgtctttcattctcagtgctttagcatgtccctgaaccagtaggccgacgccttggggtggcgctcgagcgtgttgaagtcgac

SEQ ID NO: 406181 - DNA, 223 bp, Oryza sativa nipponbare
  unsure (1)..(223): unsure at all n locations
gggagctctttgatcttctctctgagaganaganctcctgatgagggaagatggcaagaaacaagtttgcattgttggtctgcaagaatttgaggtttctgatgttcagattgtcaaggaatatattgagagaggaaatgcagcccggagtacagggtcaactttttccaatgaggagggggggaggccacatgctattctgcagctggctatcaanaaacat

SEQ ID NO: 406182 - DNA, 514 bp, Oryza sativa nipponbare
  unsure (1)..(514): unsure at all n locations
cccacgcgtccgaaccagctgagctgagcgacgcaggaactcgggacgactcaggagtcggaggagacaatctcactctctccctctcccctctcctctcccaaaatccacgccgagcccgccaaatcctccccccggtgcgactcgccacggatcgcgcgccgccggcaatgggggccgccgcctgcgacgccgccgtcgaggagctcactcgcctcctggaccaagtcgaggagccgctgaagcagacgttccagaatgtgcaccagggctatccaacagacacactagtgcgcttcctaaaagctagagagtggcatgtttcaaaggcttgtgatatgcttgtggattccttgaattggaggatacaaaatgaaattgatagtatactggagaaacctataattcctgtagatttatatagatcaatacgtgagacacagcttgttggattatcaggatactcanaggaggttcattactatgtgcaatctcatattcaaatcaatgagta

SEQ ID NO: 406183 - DNA, 411 bp, Oryza sativa nipponbare
cccacgcgtccgattatacagcaaaatagaaagatctagtgtcccgcagcaatgaagatcattttcgtctttgctctccttgctattgctgcatgcagcgcctctgcgcagtttgatgttttaggtcaaagttataggcaatatcagctgcagtcgcctgtcctgctacagcaacaggggcggagcccatataatgagttcggaaggcagcagtatggcatagcggcaagccccttcttgcaatcagctgcgtttcaactgagaaacaaccaagtctggcaacagctcgcgctggtggcgcaacaatctcactatcaggacattaacattggtcaggccatagcgcagcagctacaactccagcagtttggtgatctctactttgatcggaatctggctcaagctcaagct

SEQ ID NO: 406184 - DNA, 431 bp, Oryza sativa nipponbare
  unsure (1)..(431): unsure at all n locations
aaaagaggaaaaaaaacatatacccttctagtgattgtctgattgatcatcaatggctagcaaggtcgtcttcttcgcggcggcgctcatggcggccatggtggccatctccggcgcgcagctgagcgagtcggagatgaggttcagggacaggcagtgccagcgggaggtgcaggacagcccgctggacgcgtgccggcaggtgctcgaccggcagctcaccggccgggagaggttccagccgatgttccgccgcccgggcgcgctcggcctgcggatgcagtgctgccagcagctgcaggacgtgagccgcgagtgccgctgcgccgccatccgccggatggtgaggagctacgaggagagcatgccgatgcccctggagcaaggctggtcgtcgncgtcgtcggagtactacggcggcgaggggtcgt

SEQ ID NO: 406185 - DNA, 380 bp, Oryza sativa nipponbare
ctcctcctcgcccgcatccggcaccctagctaagcttcgatggcgatggcggcggcctggtccccggcgctcgcggcggttttgctggcggcggccgtggcgtcggcgtccaactcggagggggacgcgctgtacgcgctgcggcgcgcgctggcggacccccggggcgtgctccagagctgggacccgaccctcgtcaacccctgcacctggttccacgtcacctgcgaccgcgccggccgcgtcacccgcctagacttgggtaactcaaatttgtcaggccatcttgctcctgaactgggacaccttgagcatctccaatatctagagctgtacaaaaaccatattcagggcactatcccagctgagcttgggagtct

SEQ ID NO: 406186 - DNA, 374 bp, Oryza sativa nipponbare
gttagcgagctccactgccagatcaagaagaagctagagagagagcagaggagcaagcagatcaagaagaagaagacgaggaagatgcacgccaagacggactcggaggtgacgagcctggcgccatcgtcgccgccgcggtccccgacgtcgcgcggcgggcggccggtgtactacgtgcagagcccgtcgagggactcgcatgacggggagaagacggcgacgtcggtgcactcgacgccggcgctgagccccatggggtcgccgcggcactcggtgggcagggactcctcgtccagccgcttctccggccaccccaagcgcaagggcgacaagtccagctccggccggaagggcgccccgggggggaaggg

SEQ ID NO: 406187 - DNA, 401 bp, Oryza sativa nipponbare
  unsure (1)..(401): unsure at all n locations
gggaaacgaataaaatcattattgcaaaaacatcatcttcttcttcatcttcttagtgtacacaacaccaactcgatcatcatctcgtcgcactaaacccatcttccccaacccaaagacaacgaactcgctggccacaaatccatccaaccacaattaaccactgctaagctacggtcccccacttcacttgccggggacgaagttggtggcgtacgcccaggcgttgttgttgacggggtcggcgaggtggtcggcgaggttctcgagggggcccttgccggggacgatggcctggaccaagaagccnaacatggggaacatggggagggggcccttctttatctccttcaccttgagcttcgggaacgcctngggggcaanggggaggccgagcgggg

SEQ ID NO: 406188 - DNA, 203 bp, Oryza sativa nipponbare
gcgacggcaacaaggtgtcggcgctgcggctggcgacccgagggcggggtcgccggggctgtccgggcggctcgaccaggcgctggggcggctgtccgcgctcaccgagctgtcgctcgtgcccgggcgcgtcgaaggcgagctcccggagtcgctcaactcctgccggaaccggggggggggggccttcaccaacaacctca

SEQ ID NO: 406189 - DNA, 424 bp, Oryza sativa nipponbare
aaggtggcttcggaggaggcaagggtggaggcttcggtggtggcttcggaggaggcaaaggcggaggagttggcggcggtgcgggcggaggattcggtggcggcggtggcgctggagcaggaggcggtttcggcggaggcaagggaggtggtttcggtggaggcgtcggcggcggccatcgacttcctcacgctctgctaccgcctcaagacgacgaagagggccgggtgggtgaggcgcggggtgcaggggccggagtccgtcgccgaccacatgtaccggatgggcgtcatggcgctcgtcgccgccgacctgcccagcggcgtgaaccgcgacaggtgtgtcaagatggcgatcgtgcacgacatagccgaagctattgttggtgatatcaccccttcaaatggcgtgccgaaggaagaaa

SEQ ID NO: 406190 - DNA, 494 bp, Oryza sativa nipponbare
cggacgcgtggggcattatacagcaaaatagaaagatctagtgtcccgcagcaatgaagatcattttcgtctttgctctccttgctattgctgcatgcagcgcctctgcgcagtttgatgttttaggtcaaagttataggcaatatcagctgcagtcgcctgtcctgctacagcaacaggtgcttagcccatataatgagttcgtaaggcagcagtatggcatagcggcaagccccttcttgcaatcagctgcgtttcaactgagaaacaaccaagtctggcaacagctcgcgctggtggcgcaacaatctcactatcaggacattaacattgttcaggccatagcgcagcagctacaactccagcagtttggtgatctctactttgatcggaatctggctcaagctcaagctctgttggcttttaacgtgccatctagatatggtatctaccctaggtactatggtgcacccagtaccattaccacccttggc

SEQ ID NO: 406191 - DNA, 416 bp, Oryza sativa nipponbare
  unsure (1)..(416): unsure at all n locations
cccacgcgtccgcggacgcgtgggttcttgtgttggaagaacttgaacacgccaagcaaagaggtgcaaaaatatatgctgaatttctaggtggaagcttcacgtgtgatgcataccacatgactgagccacatcctgaaggaagagggattattctttgtatagaaaaggcactggctgattcaggagtagcaagggaagaaatcaactatgtcaatgctcacgcaacgtctacacagtcaggtgatttgaaggagtatgaagctattgtccgctgctttggccagaaccctcagctaagggtgaactcaacaaaatcaatgactggacatctaataggtgcagctggtggaatagaagctgntgctgctattcaagctataagaactggctgggtccatccgaatctgaatttg

SEQ ID NO: 406192 - DNA, 322 bp, Oryza sativa nipponbare
  unsure (1)..(322): unsure at all n locations
caattaccttgcgtctgggtcggtgcacccgggtctaaggatggcaacctcccttctaagggaggagccaaccggggagttgcaactattgactgcgccactgaaatcaattgatggcctaattttgtttgatcgaccgaaatgtaacctccaagcagaggacatttcttcattggcatgaaattcggaggttgtggattttgatgctggacttgcanaattggatggaaagattagggagcgattgtcagagagttcttgcagttattgcttacagcctttgaccagcttggactatcagtcactaaaggaggcagatatc

SEQ ID NO: 406193 - DNA, 418 bp, Oryza sativa nipponbare
  unsure (1)..(418): unsure at all n locations
cccacgcgtccgaataacatcctcaaatagctatggcgaccatagctttctctcggttatctatctacttttgtgttcttctcctatgccatggctctatggcccagctatttggtccgaacgtaaatccatggcacaaccctcggcaaggaggttttagggagtgtagatttgatagactacaagcatttgaaccacttcggagagtgaggtcagaagccggggttacagagtactttgatgagaagaatgaacaattccagtgcacaggtacatttgtcatccgacgtgtcattgagcctcaaggccttctggtacctcgatacagcaatactcctggcatggtctacatcatccaagggagaggttctatgggattaactntccccggctggccagcaacctaccaacaacaatt

SEQ ID NO: 406194 - DNA, 423 bp, Oryza sativa nipponbare
  unsure (1)..(423): unsure at all n locations
cccggtcgacccgcgtccgcaatgaacatcaagtcgacacggctgaaaaaatgttcgaaggaaactaagggagaaaggcgtgaaaagagggcaatggatttgtaaggaaagatgatgaagcacgtgttaagctggagaatgctgctattgatcgatcaaagattctgctgtccttgggaaatacagcatttggagaaaggagaatgagaatgagaactcagatttgacagttagattgatgagagaccagattattatggcacgtgtttattctgtgcttgctaaatcaaagaacaagaatgatctttatcaagagctgcaaaccaggatcaaggaaagcccgcgggctgttggagaggctactgctgattctgaccttcatcataangcacctgagaaagncaaagtaatgggtcaacttct

SEQ ID NO: 406195 - DNA, 594 bp, Oryza sativa nipponbare
  unsure (1)..(594): unsure at all n locations
cccacgcgtccgcccacgcgtccgaagctcagctcagctactaatcgatgagctcgggaccatcacttcgctggtagctcagctgattcgatcgatcagccatggcgggggagaggaggtggagcacggcggcggcggcggctggatggctgcgagtggccgccgttgtggtggccgccgcctctgccgcctcgtcggcggccggcgagggggtcggccggcagacggtcccggcgatgtacgtgttcggcgactcgctggtggacgtcggcaacaacgacttcctgccgccgccggcgccgaggccgccggagccaccctgcggcatcgacctcccgcccgaggccgccgncgccgacggcggcggcgggggccgcttcaccaacggcttcaacctcgccgacgtcatcgcgcagcatgtgggggtcaagaagagcccgccggcgtacctctccctgacaacgccgggaagagacggcgaactccggggaggcctngtcggggccaactacgcctncagcggatccggcattctngacttaattgggaacggacaatcagncttggagagcaggtaagctcttnacaaaacaa

SEQ ID NO: 406196 - DNA, 335 bp, Oryza sativa nipponbare
aaacagaagaacatctgagttcatcatttattcatcatacatgcttccagataaaaggaaacacaaattatttagtaaccaaatcacacacatgaacagccaataactagctacatacagaaggctagtagccagttcccggtagccagtagcagacaccgcctacgccattggggatgtccacgttgcagaacgccgggaggctcgccgccgcgcgctcgatgtcccctctccggcagccgcggaacacctcggccatggggtgcccagcgtcggcggcgccgctctccctgtagatgatcctcagcatggggttgagcgcatcgcacctgcac

SEQ ID NO: 406197 - DNA, 477 bp, Oryza sativa nipponbare
gaaatgggctaaagacttgaaaggtgtggtgtgggattggaatacactgggtatagtggttcaagaggtcaattacattgaattgatctgtgaccgggattcgtatggttgtagtgttcagaagtgctatcctcagtctattctattcatgcacaatggttggtcttttggtggatggcgggagtggaactctaaacaatacaagaacagtatgctaattgtgaacccattggaactcatgcaagtactgttagtgccattagtgtgggatccagatgctgagatgggtcagattggtagctacgctctacaaccagaaaattgtcaattaactacctgcatgagagcacattgcattaagccaagtgattatgagatcatcactgccaaagaaaaccatgctgctgatgctcctagactgcttattgttgtaatggaggatgaaggcaatacagtttggactttagaattttcagt

SEQ ID NO: 406198 - DNA, 410 bp, Oryza sativa nipponbare
  unsure (1)..(410): unsure at all n locations
gtttcaacgtcacaattttcttctgcaaacgacggtgataaaagatatcaagaatggtgctggagtctattccttcaacctcacatgggatgatattgcgaagaacctgaagcccaagatatcaaacccaatgaccacatttgatgtgtacagaaatcctagaaacaagaatgcaggaggggggatgagactatcggacttcttggcctttgcaaaaggaaaggagttggcaggagtcatgatcagtatagagcatgctgcattcatggcagaaaaacttggatttggtgtagtagatgcggtgatcaaagcccttgatgactccggctatagcaaacagactgcccagaaagtgatgattcantcaaccaacagctcagtactagtgaaggtcaaggggcaaaccaagt

SEQ ID NO: 406199 - DNA, 416 bp, Oryza sativa nipponbare
  unsure (1)..(416): unsure at all n locations
cccacgcgtccgcaagcttcttcttcagcaactcagcagcacttcacctgctgctgctgcgaccgccgtgaccatcaccacctcgtcgccggcgagaaacctgcagagggcgagggcgagtgcggcggagcaggggatggaggagcatggcaaggcggctgtcggctgggcggccagggacgactccggcgtcctctccccgtacaacttctccaggagggctcagaaggacgatgacgtcaccatcaaggtgctctactgcggcatctgccacaccgacctgcacgtcgtcaagaacgattggggcaacgccatgtaccccgtcgtccccggccacgagatcgtcggcgtcgtcaccggcgtnggcgccggcgtgacccanttcaagggcggggacncggggggcgtgggctttt

SEQ ID NO: 406200 - DNA, 362 bp, Oryza sativa nipponbare
  unsure (1)..(362): unsure at all n locations
cccacgcgtccggattgatcatcaatggctagcaaggtcgtcttcttcgcggcggcgctcatggcggccatggtggccatctccggcgcgcagctgagcgagtcggagatgaggttcagggacaggcagtgccagcgggaggtgcaggacagcccgctggacgcgtgccggcaggtgctcgaccggcagctcaccggccgggagaggttccagccgatgttccgccgcccgggcgcgctcggcctgcggatgcagtgctgccagcagctgcaggacgtgagccgcgagtgccgntgcgccgccatccgccggatggggaggagctacnaggagagcatgccgatgcccctggagcaaggctg

SEQ ID NO: 406201 - DNA, 357 bp, Oryza sativa nipponbare
cggacgcgtggggccgcaatgctgtgtctcacctcctcttcctcctccgcgcccgctccgctccttccctctctcgctgatcgaccgagcccgggaatcgcgggcgggggtggcaatgttcgcctgagcgtggtttcttcgccgcgccggtcgtggcctggaaaggtcaagaccaatttctcagttcctgcgactgcgcgaaaaaacaaaaccatggtgactgttgtggaggaggtcgaccaccttcctatatatgatctggaccctaagttggaggaattcaaggatcacttcaactataggataaaaagatacctcgaccagaaatgcctgattgaaaaacatgaggggggcctt

SEQ ID NO: 406202 - DNA, 456 bp, Oryza sativa nipponbare
cggacgcgtgggtgagaatgcacagttcgtacggatatatcgcagtcgtgaagtaggccaatcttatattacttccatcgcaacgacattgcttgctacgtcacatgctatctggataataataagaataagaccacaagtgattttttgcaatggtccagggacatgcattcctctgtgtgtgtcggcttttcttctgaaggtgcttggtttgggatggtcctccattttctacatcgaaagcattgcaagagtgaagaagctttcattaagcggtttactgttgtacaagctacgaatagctgatcagttcttcgtgcagtggccccagctgcagcaaaaataccctcgagcatgctatgccggccgtttaatgtaaagattcacgcatagatgataatattggtttacagcaaaatgctaatggttttatattgcagatgttcttctgattag

SEQ ID NO: 406203 - DNA, 302 bp, Oryza sativa nipponbare
  unsure (1)..(302): unsure at all n locations
cacgcgtccgcccacgcgtccgcctacggcgagagcctgcnagtccaagatcatcaacgacagggagacggggaggtcacgtgggtttggcttcgtcaccttctcctccgagcagtcgatgcgcgacgccatcgagggcatgaacggcaaggagctcgacggccgcaacaccaccgccgtggcgactggggggggcccgcctaagcccactggcggcgctcccgagagtggaggcgggcggatccgcntgctnccngcgctcccgttcctgccaggcccntcccaaggaccaacggccgtgg

SEQ ID NO: 406204 - DNA, 390 bp, Oryza sativa nipponbare
  unsure (1)..(390): unsure at all n locations
gatcgccataaacggttacacaaactcctgcaggtcaagatcagtaggagttcaccaacttgcaaggtctgtggagaaaatcctgttttcaccaaagaggacttcgtgaactttgattacgagagcttcacacaatctccaatgtccaaaaattcgacgacgcggagcctgaatcttctcccggagaacgcccgggtgagctgcagagactacaagaaggtgctcgacagcggcaggccgcacctgctggtggacgtgcggccgtcgcaccattttcagatagcgtccatggctcactccatcaacgtcccgctctcgctgctggaggagaagctgccactgctgcgggactcggcgagggaagtgtcgtcncggcgcgacgggcggcag

SEQ ID NO: 406205 - DNA, 332 bp, Oryza sativa nipponbare
cccacgcgtccgcccacgcgtccgcttcaccagaagcgccatggccggcgcctggactacgaggagcgcaagcgcaagcgggcggcgcgcgaggtgcacaagcgatccagggatgcccggcagttgcttggtgctaagggtaagaggttcgccaagaagcggtatgccgagaaggcacagatgaagaagaccctgaaaatgcacgacgagtcaacttctcggcagaaggttgatgatgttcaagagggtgctcttcctccatatctgctggaccgtgatcagacacaacgtgccaaggttctcagcaacacaattaagcaaaagaggatgga

SEQ ID NO: 406206 - DNA, 423 bp, Oryza sativa nipponbare
gacaagggagagcttgtttctgatgacttggttgttggaattattgatgaagccatgaagaaaccttcatgtcaaaagggtttcattcttgatgggttcccacggacagttgttcaggcacagaagcttgatgaaatgctggaaaagaaaggtacaaaggtcgataaggttcttaactttgccattgatgattcaattttggaagaaagaattactggccggtggatccatccctccagtggcaggagttatcacactaagtttgcacctccaaaggttcctggagttgatgatgtcactggagaaccacttattcaaaggaaagacgaccccagttgaggtttggagtttaaaactggaagccttcaccaaccaaactgaaccagggatggattactactccaagagggccttgggggccaa

SEQ ID NO: 406207 - DNA, 199 bp, Oryza sativa nipponbare
  unsure (1)..(199): unsure at all n locations
gtggtgacatccctgatttcgtcggcgacctggccagcctcgaggtgctgcagctctgggagaacaacttcaccggcggcgtgccgcgccgcctcggccgcaatggccgcctccagctgctcgacctctcgtcgaacaggctcaccggcacgctgccgccggagctctgcgccggtgggggggtgcacacnctcatcgc

SEQ ID NO: 406208 - DNA, 536 bp, Oryza sativa nipponbare
  unsure (1)..(536): unsure at all n locations
gtcagttcccgcgccgtgtgaccaatactcaagacttaaaccgcgcgctttttagccgacccgagcagccggagagtgaggcgaggcgaagcgaagggaagagcgcgaggcagagtaagcagacgagaagaacagcgcgcggcgcggtagctgaggagagtggtgcggagatggatcacgaggcggacgcgtaccggacggacctgatgacgatcacgcggtacgtgctgaacgagcagagccgcaacccggaggcacgcggcgacctcaccatcctcctctcccacatcgtgcttggctgcaagttcgtcgcctccgccggcaacaaggccgggctcgccaagctcatcgggctggccggcgagaccaacgttcagggagaggagcagaagaagctggacgtgctgtccaacgaggtgttcgtcaaggctctcgtcagcagcgggccgacctgcgttcttgtttccgaggggggcgaggaagcgacnttcgtggaccctgcgctgggtggggaagattgcgtgtgctttgatcca

SEQ ID NO: 406209 - DNA, 513 bp, Oryza sativa nipponbare
cggacgcgtgggtgagttcagtcccacaaaaacatggcaaccatcaaattccctatagttttctccgtcgtttgcttgttcctcttgtgtaatggttcgttagcccaacttcttagccaaagtactagtcaatggcaaagttctcgccgtggaagtccaagagagtgcagatttgatcggttgcaagcatttgagccgattcgcactgtaaggtcccaagctggtacaactgagttttttgatgtctctaatgagttgtttcaatgtactggagtatttgttgtccgtcgagttatcgaacctagaggtcttctgttacctcactactccaatggagcaactttggtatatgtcatccaaggcagaggtataacaggaccaactttcccaggatgtcctgagacctatcaacaacagtttcagcaatccgagcaagaccaacaattggaaggccaaagccaaagccataaatttagagatgaacatcaaaagatccaccggtttcaacagggg

SEQ ID NO: 406210 - DNA, 611 bp, Oryza sativa nipponbare
cggacgcgtgggcggacgcgtgggcgagctagcaaaaaggatagcaatggtggaaccggggagagcgcgggagacgaaggtcaccgcctcagcctcaagctctgcaggctcagacgccgctgtcatgaagaagaagaagaagaagaagaagaagctggtggtagcaagcaggaaggtggatgagaaagacaagaagcaggtggattacaagtgcagtagaagcagcggcagagacgagtgctgcaaggtggagagccgtcatcagcagtgcacagagccggagagcccttcctacaggttagctctcaggagcctcttctcgtgcagaaacagcagcagcagcagccacgccggccaccaccaccaccgcgccgccgacggcaagaagctcggctgcaattccgcctccatctgcaaggtcaagcaagacaacccgatgcagcagcacatgcgcagggcggaggatgagctcaaggtgaaggacaagccggcggtcgccgagccgtactgcaagcgcagagcttccgtgagcgcgtgcacatcagcagcgagcggtcgtgaagaagtcagtgaagcagcagcagcaggaggcgagcagcagcttgcagtcg

SEQ ID NO: 406211 - DNA, 153 bp, Oryza sativa nipponbare
cgctctctcatcgccatctctctggggggtcaggcgcactgcatcaatggccgcggccaccatggcgctctcctccccggtgatggcccgcgcggcgccgtcgacctcctccgcgctcttcggcgaggcgcggatcaccatgcgcaagaccgc

SEQ ID NO: 406212 - DNA, 493 bp, Oryza sativa nipponbare
  unsure (1)..(493): unsure at all n locations
ctcctcctccgccccgacgcctgggtggggttgttncctctccctccgccgccgccgctgccgcgaggagaggagggggggagagcacccagccggcgagccagccatgtcgctgcgcccgagcgagcgggtggaggtgcggcggaaccgctacaaggtggctgtggacgccgaggaggggaggcggcggcncgaggacaacatggtggagatccgcaagagccgccgcgaggagagcctcctcaagaagcgccgcgaggggctccaggcccaggcccccgtccccgcctccgccgcaaccggcgtcgataagaagctcgaaagccttcctgctatgattggtggagtttattcggacgataacaaccttcagcttgaggccacaacacagttccgcaagttggtttctatagagaggagccctccaattgaagagggtattcaatcaggcgttggtcctagaatcctgcagtttcttaccagagaggatttc

SEQ ID NO: 406213 - DNA, 352 bp, Oryza sativa nipponbare
cgctactggagatcaagaagtccttccgcaatgtggacaacgtgctgtacgattgggccggcgatggcgcgccgcggcgctactgctcgtggcgcggcgtgctctgcgacaacgtcaccttcgccgtcgcggcgctcaacctctcggggctcaatcttgggggcgaaatctccccggccatcgggaatctgaaaagcgtcgagtcgatcgacttgaagtcgaatgaactttctgggcagatccctgatgagattggcgattgcacgtcgcttaaaactctgcacctgtcctctaacaatctaggaggaggtggagaggttgacgaggctcaaggctggcccgatgaaggagc

SEQ ID NO: 406214 - DNA, 594 bp, Oryza sativa nipponbare
  unsure (1)..(594): unsure at all n locations
cggactcgtgggctgagtaaatgttgacacgcggaacacagattactctgtttttaagagatgatgataagtacgagtttgctgaccctggacgtattcaaggtttagttaagaactattcccagtttgtttcattccccatatatacatggcaggagaaatcaagaacagttgaggttgaagaagaagaaccgaaagaaggtgaagaggcaacagagggtgaaaagaagaagaaaaagaaaacaatcactgagaagtactgggattgggaattggctaatgaaacaaagcccatatggatgagaaatccaaaggaagttgagaaaactgagtacaatgaattctacaagaaggcattcaatgagtttttggatcctcttgcttacacccactttacaacagagggtgaggtggaattcaggagcgtcctctacattccaggaatggcacctcttagcaatgaggagataatgaaccctaagaccaagaatatccggctgtatgttaagagagtcttcatatcagatgacttcgatggcgagttgttccctagatacttaagctttgtaaagggtgtagnggactcaaatgatc

SEQ ID NO: 406215 - DNA, 300 bp, Oryza sativa nipponbare
  unsure (1)..(300): unsure at all n locations
cccatttgtccggaccgacgtcggagggcgggggggtccaancatccgatagctatcactgagttccgttttctctaggctttgtatatacttttgtgttcttcgattatgccatgggtctatggcccagctatttaatcccagcacaaacccatggcatacttttttttatgggggggggggggagcaaacattctatagactacaaacatttaaaccactccggggggtggggtcagaagctgatgtgagtgaagacttcgatgaaaacaatgaattattccacggcaccgttacttt

SEQ ID NO: 406216 - DNA, 350 bp, Oryza sativa nipponbare
  unsure (1)..(350): unsure at all n locations
cccactcgtccgcggactcgtgggggggntggtnngcacaaggttgaagactacaggaacacatttgcaaaccttgcaatccccctcttctctatggctgagccggtccctcccaagaccatcaagcaccaggacatggcctggactgtttgggaccgctggaccataactggcggggggggggctgagggagcttctggactggctcaaggagaagggcctgaatgcatacagcatatcttgcggcacctcgctgctgtacaactcaatgttcccgaggcacaaggagcgtctagacaagaaggtggtcgatgtggcgagggaggtggcaaaggtggaggggcccccat

SEQ ID NO: 406217 - DNA, 381 bp, Oryza sativa nipponbare
gttcattagtactacaacaacatggcatccatggatcgccccatagttttcttcacagtttgcttgttcctcttgtgcaatggctctctagcccagcagctattaggccagagcactagtcaatggcagagttctcgtcgtggaagtccaagagaatgcaggttcgataggttgcaagcatgtgagccaattcggagtgtgaggtctcaagctggcacaactgagttcttcgatgtctctaatgagcaatttcaatgtaccggagtatctgttgtccgtcgagttattgaacctagaggccttctactaccccattacactaatggtgcatctctagtatatatcatccaagggagaggtataacagggccaactttccca

SEQ ID NO: 406218 - DNA, 393 bp, Oryza sativa nipponbare
  unsure (1)..(393): unsure at all n locations
cccacgcgtccgcccacgcgtgcgaggggcttgaancttctctggctgcatgccgacggacactgccagtgccacctctctctgctgctgcgcctcgtcgcttgcctcgcccttgtgctgctgctgccgccgccagcgcctgcccaagcggcgacggtggtcactcacctgccggggggggggggtcctctacccttctacctggagaccgggtacgtgggcgtggaggaggagaccggnacggagctcttctactacttcgtggagtcggagcggagccctcgcagcgacgtcgtgctgctgtggctgtcgggagggccccggtgctcggtcttcagcggcttcntgtacgagataggccctggaatggttggcgcggaaccttacagcggc

SEQ ID NO: 406219 - DNA, 327 bp, Oryza sativa nipponbare
  unsure (1)..(327): unsure at all n locations
ccgagctgggcgagcgcctcagggagtggnaggcgaagggcttccgcgtcaccggctcagtctgcgacgtctccgtgcgggagcagcgggaacgcatgctccgcgaggtcgccggcctctacggtggcaagctcgacatcctcgtgaacaacgtgggaacaaacttttcaaaacaggggggggagtactctgcagatgattactcgttcataatggccaccaatcttgaatctgcgtatcatctgtgccaacttgctcatcctcttctcaaatcatctggggcaggaagcgttgtctttatattggcaggctttgggggggggggtg

SEQ ID NO: 406220 - DNA, 425 bp, Oryza sativa nipponbare
cccacgcgtccgcccacgcgtccgtgagctaggcaaagggattcttgttagctggaaataagagaaaccctcaagcatacaggcgtgaggttgaggagcggtcacagaacatatttagtggctttagcactgaactacttagcgaggctcttggcgtaagcagccaagtggcaaggcgggtgcaatgtcaaaatgaccaaagaggagaaattgtccgtgtcgaacacgggctcagtttgctgcagccatatgcatcattgcaggagcaggaacaaggacaagtgcaatcaagagagcgttatcaagaaggacaatatcagcaaagtcaatatggaagtggctgctctaacggtttggatgagaccttttgcaccctgagggtaaggcaaaacatcgataatcctaaccgggctgatacatacaat

SEQ ID NO: 406221 - DNA, 418 bp, Oryza sativa nipponbare
ctgaagtcccagtttgcgatgtgacattcttgaggcagagtgtgcagtttggaagtggactgtggtgtgtggttgatgtgtctattgataccatccttcctggagagagtaaaacagctcagtccagtgtgcagaccagcagtacagctgccagacgcatggaagtcaggctgttgccatcaggctgtgttattgaagaaatggagaatggctattccaaggtgacctggatggtgcatgcagcttatgatgagagagcagtgccagtgctttatcattcacttctccgctctgcaaaagcccttggtgcgtgccgctgggtagcatcactccagagacacagccagttcctttccggcctgcacaaatacatcttttgtcctgacagcacaatgacaaaaatggtgatgccaagaaa

SEQ ID NO: 406222 - DNA, 555 bp, Oryza sativa nipponbare
cccacgcgtccgaaaaaagggaaggaatttttttctttttttttgttcgcctccgcttcttcctcacgcagctctcgcctcgcctcgccgcccgccactagagaggagagggagaaggaggaggaggcaaatcccagcaaaagaagatgcagatcttcgtgaagaccctgacggggaagaccatcaccctcgaggtggagagcagcgacaccatcgacaacgtcaaggccaaaatccaggacaaggaagggatccctccagatcaacagcgtttgatattcgccggcaagcagctggaagatgggcgcacactggccgactacaacattcagaaggagtcaactcttcacttggtcctcaggctcaggggtggcactatgatcaaggttaagaccctcactggaaaagagattgaaattgacattgagcccaccgacacgatcgataggatcaaggagcgtgttgaggagaaagaaggcattcctcccgtgcagcaaaggcttatctatgctggtaagcagcttgccgacgacaagactgcgaaggactataaca

SEQ ID NO: 406223 - DNA, 451 bp, Oryza sativa nipponbare
  unsure (1)..(451): unsure at all n locations
cccacgcgtccgggaggaggaggaggaggggtgaagaaggaggagggggaggaggaggcgaggggaagaggaggaggaggcggcgtggtgggagggtgggggacgtgggaggagctggtgctgggcagcgccgtcatccgccatgggggcgttgcgtggggcgccgtcgccgccgaggtgcggtcccgctcgccgtgcgccttctcgcctgaggaatgtgaagctaaattttcagagatacaagcacgctactctgcatgcgatgcttggtttgaggagctccgtaagcggagagttgctgaattaagaaatgatctgaanaagtctgaaaattttattggatccctgcagtccatgatcaaaagcctcagcaatagcaagcatgatgatggcaactctgaatgtcacactagtcatactgagtcatgttcaaataatgaaaatacagctg

SEQ ID NO: 406224 - DNA, 441 bp, Oryza sativa nipponbare
cccacgcgtccgcccacgcgtccgcgatactgcaacactcctggcctagtatatatcatccaagggactggtgtactgggattgacctttcctggttgcccagcaacttaccaaaagcaatttaggcattttggtcttgaaggaggaagccaaaggcaaggaaaaaaattaagagatgaaaaccaaaagatccaccaatttaggcaaggagatgttgttgcacttccttctggtataccacactggttctataatgagggtgacacccctgttgttgctttgtttgtttttgatgtaaacaacaatgctaatcaactcgaaccaagacaaaaggagttcttgttagctggtaacaatatagagcaacaagtgtccaacccctcaatcaacaaacattctgggcaaaacatattcaatggattcaacactaagctattaagt

SEQ ID NO: 406225 - DNA, 281 bp, Oryza sativa nipponbare
gtcggttgagatgcaccacgaggctctccaggaggctcttcctggtgacaacgtcgggttcaacgtgaagaacgttgcggtgaaggatctgaagcgtgggtacgtggcctccaactccaaggatgaccctgccaaggaggctgccagcttcacctcccaggtgatcatcatgaaccaccctggccagatcggcaacggctacgccccagtgctggactgccacacctcccacattgccgtcaagtttgctgagctggggaccaagaacgacagacgatctg

SEQ ID NO: 406226 - DNA, 442 bp, Oryza sativa nipponbare
cccacgcgtccggcaaaatagaaagatctagtgtgccgcagcaatgaagatcattttcgtctttgctctccttgctattgctgcatgcagcgcctctgcgcagtttgatgttttaggtcaaagttataggcaatatcagctgcagtcgcctgtcctgctacagcaacatgtgcttagcccatataatgagttcgtaaggcagcagtatggcatagcggcaagccccttcttgcaatcagctgcgtttcaactgagaaacaaccaagtctggcaacagctcgcgctggtggcgcaacaatctcactatcaggacattaacattgttcaggccatagcgcagcagctacaactccagcagtttggtgatctctactttgatcggaatctggctcaagctcaagctctgttggcttttaacgtgccatctagatatggtatctac

SEQ ID NO: 406227 - DNA, 560 bp, Oryza sativa nipponbare
cagactcgcagtccatggcgacctcgccgtgacccccaggatagggcgcgctggtacgcggggagagcgcggctgacgaaggtcaccgcctcatcctgaagctgtgcaggctcagactccgctgtcatgaagaagaagaagaagaagaagaagaagctggtggtagcaagcaggaaggtggatgagaaagacaagaagcaggtggattacaagtgcagtagaagcagcggcagagacgagtgctgcaaggtggagagccgtcatcagcagtgcacagagccggagagcccttcctacaggttagctctcaggagcctcttctcgtgcagaaacagcagcagcagcagccacgccggccaccaccaccaccgcgccgtcgacggcaagaagctcggctgcaattccgcctccatctgcaaggtcaagcaagacaacccgatgcagcagcacatgcgcagggcggaggatgagctcaaggtgaaggacaagccgtcggtcgccgagccgtactgcaagcgcagagcttcggtgagcgcgtgcaacatcagcagcgagcggtc

SEQ ID NO: 406228 - DNA, 237 bp, Oryza sativa nipponbare
  unsure (1)..(237): unsure at all n locations
cggactcgtgggcaaattcagactaaanatgttctncaaacaaaaagccatggcttccaacaaggtagtgttctcggcgttgctcctcatcatcgtctccgtgctcgccgcgacggcgaccatggcggaccaccacaaagaccaggtggtgtacagcctctttgtgctttgtcaggggggggggggctaccctatgtactcgctgccactctaccttnctgtggggggggggggggg

SEQ ID NO: 406229 - DNA, 499 bp, Oryza sativa nipponbare
cccacgtgtccgatatgattcaatggcgatctcgagttcaattcgttagtaactttggaaataatgtgtttgatggtgtccttcgcccaggacaattattgatcattccgcaacattatgctgtcttgaagaaagcagagcgtgaaggatgccaatatatcgcaatcaagacaaacgctaacgccttcgtcagccaccttgcagggaaaaactcagtattccgtgccttgccagttgatgtagtcgctaatgcgtatcgcatctcaagggagcaagcccgaagcctcaagaacaacaggggagaagagcacggtgccttcactcctagatttcaacaacaatactacccaggattatcgaatgagtccgaaagcgagacctcagagtaatgtaattgagaactagtatcggcgtagagtaaaataaaacaccacaagtatgacacttggtggtgattctgttcgatatcagtactaaataaaggttacaaactttttta

SEQ ID NO: 406230 - DNA, 378 bp, Oryza sativa nipponbare
caacgcgaggggatctatacatcgccccatacgactgtgctgtacagcgcgctggctacctcttgtgcactggctctgtagcccagctgatattaggccagagcactagtcaataggcagacgtctcgtcggggaagctcatgagaatgcaggttcgataggctgcaagcatttgagccaatttggagtgtgaggtctaatgctggcacaactgagttcttcgatgactataatgagcaaatcaatgaccggagatctgctgtccgtcgagttattgaacctagaggccttctactacgccattacactaatggtgcatctgtagtatatatcatccaagggagaggtataacagggccaactttgccaggctgtgct

SEQ ID NO: 406231 - DNA, 505 bp, Oryza sativa nipponbare
cccacgcgtccggaggtataacagggccaactttcccaggctgtcctgagtcctaccaacaacagttccaacaatcaggccaagcccaattgaccgaaagtcaaagccaaagtcaaaagttcaaggatgaacatcaaaagatccaccgtttcagacaaggagatgtaattgcattgcctgctggtgtagctcattggtgctacaatgatggtgaagtgccagttgttgccatatatgtcactgatctcaacaacggtgctaatcaacttgaccctaggcaaagggatttcttgttagctggaaataagagaaaccctcaagcatacaggcgtgaggttgaggagcggtcacagaacatatttagtggctttagcactgaactacttagcgaggctcttggcgtaagcagccaagtggcaaggcagctccaatgtcaaaatgaccaaagaggagaaattgtccgtgtcgaacacgggctcagtttgctgcagccatatgcatcatt

SEQ ID NO: 406232 - DNA, 428 bp, Oryza sativa nipponbare
caccaagtatgacgtcaagctgaacaatgcaattctcgctgaggaaaagcacttgcctatgtatgatgagttggccagcaagggcaatgttgaatatattgccggaggagccacccagaactctatcagggttgctcaatggatgcttcaaactcctggtgcaacaagttacatgggttgcattggaaaggataagtttggtgaggagatgaagaagaatgcccaagctgctggtgttactgctcattactacgaggatgaggctgctcccacgggcacatgtgctgtctgtgttgttggtggtgaaagatcactggttgcaaacttatcagcagcaaactgctacaaatctgagcatctgaagaaaccggagaactgggcactagtggagaaagcaaaatacatctacattgctggctttttcctta

SEQ ID NO: 406233 - DNA, 455 bp, Oryza sativa nipponbare
cccacgcgtccgcccacgcgtccgcccacgcgtgcgcatcgacccacctcaaattaagtatggccatcaagtgtcattgaaggatcagacatgtacatgggtctgggacgaagttaataataatccattgatggcagctaacaataaggtaaaggctttgttgtcacatcaccaattcagcatactaaaaattccagtcactaacccctctgatgacctctctgatggcagtaagcttccatttgaagctatctttgtgtcctgcaaggacagttcgcacaaaccaactattctagtccttcatggtggcccacactcagtatctgtatcaagctattcgaaaacatcggcgttcctcgcatcacttggatttaacctacttattgtaaattatcgagggacaccgggttttggagaggaggctttgcagtcacttcctggaaaggttggatctc

SEQ ID NO: 406234 - DNA, 329 bp, Oryza sativa nipponbare
  unsure (1)..(329): unsure at all n locations
cttcttgaagcttcttctctagatgaaggtgagcgagaagatccaggaggcggcggcggatgggcggacggtgttctcgttcgagtacttcccgcccaagacggaggaggggctcgacaacctgttcgagcggatggatcgcatggtggcgcacggccccaacttctgtgacatcaccgggggcgccgggggatccaccgccgacctcaccctcgagatcgccaaccggatgcagaacatggtgtgtgtggaaacaatgatgcacctgacatgcaccaatatgccanttgagaagattgatgattgcctaacaacaataaagtctaatg

SEQ ID NO: 406235 - DNA, 475 bp, Oryza sativa nipponbare
cccacgcgtccggggaagacgacgacgagggggcgccgcgcagcaatgccgctctgcagcttctacgcctccacctccctccccgtcgccaagccccactccctcccctcctcctcctcctccaagccctacaccgccacgccggcgccggcgccgacggcggcgtctgcgtcggcgtcggcggcggcgctgtcgctgcacctgcccgagctgccgtcgcgggtgaaggacaagatcctgagccttgagctgatgggggtggactacgggcgcgcgctggcgctgaacccggcgctccgcgacgcggcgccggagtccatccacgccgtggtgacgttcctccagtcgcgggggctccacttcaaggacctcggccgcgtgttcggcatgtgcccgtcgctgctcaccgccagcgtccgcgccgacctccggccggtcttcgccttcctcaccgacgacctcgggatcccggaca

SEQ ID NO: 406236 - DNA, 465 bp, Oryza sativa nipponbare
cccacgcgtccgcacagttcaagcattatacagcaaaatagaaagatctagtgtcccgcagcaatgaagatcattttcgtctttgctctccttgctattgctgcatgcagcgcctctgcgcagtttgatgttttaggtcaaagttataggcaatatcagctgcagtcgcctgtcctgctacagcaacaggtgcttagcccatataatgagttcgtaaggcagcagtatggcatagcggcaagccccttcttgcaatcagctgcgtttcaactgagaaacaaccaagtctggcaacagctcgcgctggtggcgcaacaatctcactatcaggacattaacattgttcaggccatagcgcagcagctacaactccagcagtttggtgatctctactttgatcggaatctggctcaagctcaagctctgttggcttttaacgggccatctagatattggatctaccct

SEQ ID NO: 406237 - DNA, 185 bp, Oryza sativa nipponbare
  unsure (1)..(185): unsure at all n locations
cccacgtgnccgctagatctagagcggggnccgttgttttttatttttcgagaagatcagtactactttattcatgccatgaccatncatacatatgggctttcacagatccatgaagaattcctcgcccgaaaccgaaaaatacataaagcaaactcactcttttttttctggggggggggggg

SEQ ID NO: 406238 - DNA, 453 bp, Oryza sativa nipponbare
  unsure (1)..(453): unsure at all n locations
ggcatccataaatcgccccatagttttcttcacagtttgcttgttcctcttgtgcaatggctctctagcccagcagctattaggccagagcactagtcaatggcagagttctcgtcgtggaagtccaagagaatgcaggttcgataggttgcaagcatttgagccaattcggagtgtgaggtctcaagctggcacaactgagttcttcgatgtctctaatgagcaatttcaatgtaccggagtatctgttgtccgtcgagttattgaacctagaggccttctactaccccattacactaatggtgcatctctagtatatatcatccaagggagaggtataacagggccaactttcccaggctgtcctgagtcctaccaacaacagnttcaacaatcanggcaagcccaattgaccgaaagtcaaagcccaaagcaaaaggtcaaggatgaaca

SEQ ID NO: 406239 - DNA, 500 bp, Oryza sativa nipponbare; identical to SEQ ID NO: 391808

SEQ ID NO: 406240 - DNA, 348 bp, Oryza sativa nipponbare
  unsure (1)..(348): unsure at all n locations
cccacgcgtccgattacagcaaaagcataaaagctagaaacccaccacaatgaagatcattttcttctttgctctccttgctattgctgcatgcagtgcctctgcgcagtttgatgctgttactcaagtttacaggcaatatcagctgcagccgcatctcatgctgcagcaacagatgcggagcccatgcggtgagttcgtaaggcagcagtgcagcacagtggcaacccccttcttccaatcacccgtgtttcaactgagaaactgccaagtcatgcagcagcagtgctgccaacagctcaggatgatcgcacaacagnntcactgcgaggccattagcagggttca

SEQ ID NO: 406241 - DNA, 436 bp, Oryza sativa nipponbare
cggacgcgtgggtttttttttttttaaggcgagatctgatcaaacattgattactcaagatcgatcacacatcaagagtacacttctacaagttcactagacggccacaattctgatcatagacacgaattgcataatcgaatcaatttgcagtccttttatttccatcacatagttcatagccagctctgatgccatccaagcggcagcctagaactgaacatgatgatcaatggatggcaacttcaacttcagtctgcgtgtctttcattctcagtgctttagcatgtccctgaaccagtaggccgacgccttggggtggcgctcgagcgtgttgaagtcgacgtagacgataccaaacttggacgtgtaacctgacagccactcgaagttgtccaggagagaccaggcgaagtagccagccacattggcgccc

SEQ ID NO: 406242 - DNA, 351 bp, Oryza sativa nipponbare
  unsure (1)..(351): unsure at all n locations
ggaagctctttgatcttctctctgggggaaaganctcctgatgagggaagatggcaagaaacaagtttgcattgttggtctgcaagaatttgaggtttctgatgttcagattgtcaaggaatatattgagagaggaaatgcagcccggagtacagggtcaactatttgccaatgagaggggggggaangtcacatgctattctgcagctggctatcaanaaacatatcatgagtaactgataccaggcgacaaagagatcgagatgctaatgaatctaaaaacacaaaggctgtgggaaaaatttcatttattgatcttgctggaagcgagcgtggagcctatacaacaga

SEQ ID NO: 406243 - DNA, 497 bp, Oryza sativa nipponbare
cccacgcgtccgaaccagctgagctgagcgaccaagaactcgggacgactcaggagtcggaggagacaatctcactctctccctctcccctctcctctcccaaaatccacgccgagcccgccaaatcctccccccggtgcgactcgccacggatcgcgcgccgccggcaatgggggccgccgcctgcgacgccgccgtcgaggagctcactcgcctcctggaccaagtcgaggagccgctgaagcagacgttccagaatgtgcaccagggctatccaacagacacactagtgcgcttcctaaaagctagagagtggcatgtttcaaaggcttgtgatatgcttgtggattccttgaattggaggatacaaaatgaaattgatagtatactggagaaacctataattcctgtagatttatatagatcaatacgtgagacacagcttgttggattatcaggatactcaaaggaggttcattactatgtgccatctcata

SEQ ID NO: 406244 - DNA, 490 bp, Oryza sativa nipponbare
  unsure (1)..(490): unsure at all n locations
cccacgcgtccgattatacagcaaaatagaaagagctagtgtcccgcagcaatgaagatcattttcgtctttgctctccttgctattgctgcatgcagcgcctctgcgcagtttgatgttttaggtcaaagttataggcaatatcagctgcagtcgcctgtcctgctacagcaacaggtgcttagcccatataatgagttcgtaaggcagcagtatggcatagcggcaagccccttcttgcaatcagctgcgtttcaactgagaaacaaccaagtctggcaacagctcgcgctggtggcgcaacaatctcactatcaggacattaacattgttcaggccatagcgcagcagctacaactccagcagtttggtgatctctactttgatcggaatctggctcaagctcaagctctggtggcttttaacgtgccatctaaatatggtatctaccctaagtaccatggngcgcccagtaccattaccacccttg

SEQ ID NO: 406245 - DNA, 450 bp, Oryza sativa nipponbare
aaagtgtgaaaaaaaacatatacacttctagtgattggctgattgatcatcaatggctagcaaggtcgtcttcttcgcggcggcgctcatggcggccatggtggccatctccggcgcgcagctgagcgagtcggagatgaggttcagggacaggcagtgccagcgggaggtgcaggacagcccgctggacgcgtgccggcaggtgctcgaccggcagctcaccggccgggagaggttccagccgatgttccgccgcccgggcgcgctcggcctgcggatgcagtgctgccagcagctgcaggacgtgagccgcgagtgccgctgcgccgccatccgccggatggtgaggagctacgaggagagcatgccgatgcccctggagcaaggctggtcgtcgtcgtcgtcggagtactaccgcggcgaggggtcgtcgtcggagcaggggtacta

SEQ ID NO: 406246 - DNA, 468 bp, Oryza sativa nipponbare
ctcctcctcgcccgcatccggaaccctagctaagcttcgatggcgatggcggcggcctggtccccggcgctcgcggcggttttgctggcggcggccgtggcgtcggcgtccaactcggagggggacgcgctgtacgcgctgcggcgcgcgctggcggacccccggggcgtgctccagagctgggacccgaccctcgtcaacccctgcacctggttccacgtcacctgcgaccgcgccggccgcgtcacccgcctagacttgggtaactcaaatttgtcaggccatcttgctcctgaactgggacaccttgagcatctccaatatctagagctgtacaaaaacaatattcagggcactatcccagctgagctcgggagtctgaagaaccttattagcttggatctggataacaacaacattactggaaccataccgaaagaacttggcaaggtgagttccttaatattc

SEQ ID NO: 406247 - DNA, 393 bp, Oryza sativa nipponbare
gttagcgagctccactgccagatcaagaagaagctagagagagagcagaggagcaagcagatcaagaagaagaagacgaggaagatgcacgccaagacggactcggaggtgacgagcctggcgccatcgtcgccgccgcggtccccgacgtcgcgcggcgggcggccggtgtactacgtgcagagcccgtcgagggactcgcatgacggggagaagacggcgacgtcggtgcactcgacgccggcgctgagccccatggggtcgccgcggcactcggtgggcagggactcctcgtccagccgcttctccggccaccccaagcgcaagggcgacaagtccagctccggccgcaagggcgccccggcggggaaggggtggcaggagatcggcgtg

SEQ ID NO: 406248 - DNA, 404 bp, Oryza sativa nipponbare
  unsure (1)..(404): unsure at all n locations
gggaaacgaataaaatcattattgcaaaaacatcatcttcttcttcatcttcttagcgtacacaacaccaactcgatcatcatctcgtcgcactaaacccatcttccccaacccaaagacaacgaactggctggccacaaatccatccaaccacaattaaccactgctaagctacggtcccccacttcacttgccggggacgaagttggtggcgtacgcccaggcgttgttgttgacggggtcggcgaggtggtcggcgaggttctcgagggggcccttgccggtgacgatggcctggacgaagaagcccaacatggagaacatggcgaggcggccgttcttgatctccttcaccttgagctccgggaacgcctngggggcatcggggaggccgagcgggtcga

SEQ ID NO: 406249 - DNA, 219 bp, Oryza sativa nipponbare
  unsure (1)..(219): unsure at all n locations
gcgacgtcaacaaggtgtctgcgcgtgcnctgggcgacccgagggcggggtcgccggggctgtccgggcggctcgaccaggcgctggggcggctgtccgcgctcaccgagctgtcgctcgtgcccgggcgcgtcgaaggcgagctcccggagtcgctcaactctttccggaaccgggggggggtgnccntcancaanaacctcatctcccaccaaatac

SEQ ID NO: 406250 - DNA, 464 bp, Oryza sativa nipponbare; identical to SEQ ID NO: 391813
  unsure (1)..(464): unsure at all n locations

SEQ ID NO: 406251 - DNA, 537 bp, Oryza sativa nipponbare
  unsure (1)..(537): unsure at all n locations
cggacgcgtggggcattatacagcaaaatagaaagatctagtgtcccgcagcaatgaagatcattttcgtctttgctctccttgctattgctgcatgcagcgcctctgcgcagtttgatgttttaggtcaaagttataggcaatatcagctgcagtcgcctgtcctgctacagcaacaggtgcttagcccatataatgagttcgtaaggcagcagtatggcatagcggcaagccccttcttgcaatcagctgcgtttcaactgagaaacaaccaagtctggcaacagctcgcgctggtggcgcaacaatctcactatcaggacattaacattgttcaggccatagcgcagcagctacaactccagcagtttggtgatctctactttgatcggaatctggctcaagctcaagctctgttggcttttaacgtgccatctagatatggtatctaccctaggtactatggtgcacccagtaccattaccacccttggcggtgtcttgtaatgagtnttaacagtatagtggttcggaagtt

SEQ ID NO: 406252 - DNA, 465 bp, Oryza sativa nipponbare
gtccgcccaagtgtccgcggacgcgtgggttcttgtgttggaatatcttgaacccgccaagcaaagaggtgcaaaaatatatgctgaatttctaggtggaagcttcacgtgtgatgcattccacatgactgagccacatcctgaaggaagagggattattctttgtatagaaaaggcactggctgattcaggagtagcaagggaagaaatcaactatgtcaatgctcacgcaacgtctacacagtcaggtgatttgaaggagtatgaagctattgtccgctgctttggccagaaccctcagctaagggtgaactcaacaaaatcaatgactggacatctaataggtgcagctggtggaatagaagctgttgctgctattcaagctataagaactggctgggtccatccgaatctgaatttggagaacccagagaaaatagtggatgtgggcgtgctggtcgggtc

SEQ ID NO: 406253 - DNA, 428 bp, Oryza sativa nipponbare
caattaccttgcgtctgggtcggtgcaccggggtctaaggatggcaacctcccttctaagggaggagccaaccggggagttgcaactattgactgcgccactgaaatcaattgatggcctaattttgtttgatcgaccgaaatgtaacctccaagcagaggacatttcttcattggcatcaaattcggaggttgtggattttgatgctggacttgcagaattggatggaaagattagggagcgattgtcagagagttcttgcagttattgcttacagcctttgaccagcttgcactatcagtcactaaaggaggcagatatcgctctatgctctgattgcttccatgatgcgagatatattactgggcattcaagcttagattttcagaggattgatggggataacgatagatcaaaaaatgatgggg

SEQ ID NO: 406254 - DNA, 479 bp, Oryza sativa nipponbare
cccacgcgtccgaataacatcctcaaatagctatggcgaccatagctttctctcggttatctatctacttttgtgttcttctcctatgccatggctctatggcccagctatttggtccgaacgtaaatccatggcacaaccctcggcaaggaggttttagggagtgtagatttgatagactacaagcatttgaaccacttcggagagtgaggtcagaagccggggttacagagtactttgatgagaagaatgaacaattccagtgcacaggtacatttgtcatccgacgtgtcattgagcctcaaggccttctggtacctcgatacagcaatactcctggcatggtctacatcatccaagggagaggttctatgggattaactttccccggctgcccagcaacctaccaacaacaattccaacaattcttgcctgaaggccaaagccagagccaaaaatttaaggatgagcaccaaaag

SEQ ID NO: 406255 - DNA, 448 bp, Oryza sativa nipponbare
gttactccagctttcggagggctaaagagttggttgttggggtttgtgggctcgagcccatggcaaatcgccggggtcgaggtcgccgaaacgaaactctccctccctaaatcggacgcgcgccggcgtgccctggaaggggggaagtcgccaggccgccgccgtcagatagttgcatgggaagaaaaggcgtgggggcgctcgcgctcttgttggaccgaggtcacctgctgtgttgcaggccggtcgttgaaaaagaggcccataagagaaaatgggtactcactcactgatggggtcgcgggccaagagagaaggccccccgcgagagaaatttaccagcccaatggcatctacaggaatgcaaaggttgctttctgcatccacaacatcttctaccagggcccggttcgctttcgaggattaccctgagctgaacctcttcgag

SEQ ID NO: 406256 - DNA, 392 bp, Oryza sativa nipponbare
cagatgaacatcaagtcgacacggctgcaaaaaatgttcgaaggaaactaagggagaaaaggcgtgaaaagagggcaatggatttgtaaggaaagatgatgaagcacgtgttaagctggagaatgctgctattgatcgatcaaagattctgctgtccttgggaaatacagcatttggagaaaggagaatgagaatgagaactcagatttgacagttagattgatgagagaccagattattatggcacgtgtttattctgtgcttgctaaatcaaagaacaagaatgatctttatcaagagctgcaaaccaggatcaaggaaagccagcgggctgttggagaggctactgctgattctgaccttcatcatagtgcacctgagaaagtcagagt

SEQ ID NO: 406257 - DNA, 371 bp, Oryza sativa nipponbare
aaacagaagaacatctgagttcatcatttattcatcatacatgcttccagataaaaggaaacacaaattatttagtaaccaaatcacacacatgaacagccaataactagctacatacagaaggctagtagccagttcccggtagccagtagcagacaccgcctacgccattggggatgtccacgttgcagaacgccgggaggctcgccgccgcgcgctcgatgtcccctctccggcagccgcggaacacctcggccatggggtgcccagcgtcggcggcgccgctctccctgtagatgatcctcagcatgtggttgagcgcatcgcacctgcaccagctgctgtcgatggcggcgagctgccggcagcag

SEQ ID NO: 406258 - DNA, 344 bp, Oryza sativa nipponbare
cagaaacatagtacaacttgagctcactccaaactcaaacactcacaccaatggctctccaagttcaggccgcactcctgccctctgctctctctgtccccaagaagggtaacttgagcgcggtggtgaaggagccggggttccttagcgtgagccagaaggccaagaagccgtcgctggtggtgagggcggtggcgacgccggcggcgccggtggcgagccccggcgcgggcacgtcgaaggcggacgggaagaagacgctgcggcagggggtggtggtgatcaccggcgcgtcgtcggggctcgggctcgcggcggcgaaggcgctggcggagacggggaag

SEQ ID NO: 406259 - DNA, 541 bp, Oryza sativa nipponbare
gaaatgggctaaagacttgaaaggtgtgggggttgattggaatacactgggtatagtggttcaagaggtcaattacattgaattgatctgtgaccgggattcgtatggttgtagtgttcagaagtgctatcctcagtctattctattcatgcacaatggttggtcttttggtggattggtggattggaactctaaacaatacaagagcagtatgctaattgtgaacccattggaactcatgcaagtactgttagtgccattagtgtgggatccagatgctgagatgggtcagattggtagctacgctctacaaccagaaaattgtcaattaactacctgcatgagagcacattgcattaagccaagtgattatgagatcatcactgccaaagaaaaccatgctgctgatgctcctagactgcttattgttgtaatggaggatgaaggcaatacagtttggactttagaattttcagtcagtggagtggtacagaagaagcgtgatctttggttgtgtgcatttgctgttaacaaggacatg

SEQ ID NO: 406260 - DNA, 379 bp, Oryza sativa nipponbare
gtttcaacgtcacaattttcttctcagagacggtgataaaagatatcaagaatggtgctggagtctattccttcaacctcacatgggatgatattgcgaagaacctgaagcccaagatatcaaacccaatgaccacatttgatgtgtacagaaatcctagaaacaagaatgcaggagggggggatgagactatcggacttcttggcctttgcaaaaggaaaggagtgggcaggagtcatgatcagtatagagcatgctgcattcatggcagaaaaacttggatttggtgtagtagatgcggtgatcaaagcccttgatgactccggctatagcaaacagactgcccaaaaagtgatgattcagtcaaccaacaactcag

SEQ ID NO: 406261 - DNA, 419 bp, Oryza sativa nipponbare
cccacgcgtccgcaagcttcttcttcagcaactcagcagcacttcacctgctgctgctgcgaccgccgtgaccatcaccacctcgtcgccggcgagaaacctgcagagggcgagggcgagtgcggcggagcaggggatggaggagcatggcaaggcggctgtcggctgggcggccagggacgactccggcgtcctctccccgtacaacttctccaggagggctcagaaggacgatgacgtcaccatcaaggtgctctactgcggcatctgccacaccgacctgcacgtcgtcaagaacgattggggcaacgccatgtaccccgtcgtccccggccacgagatcgtcggcgtcgtcaccggcgtcggcgccggcgtgaccaagttcaaggccggcgacacggggggcgtgggcttcttcg

SEQ ID NO: 406262 - DNA, 348 bp, Oryza sativa nipponbare
cccacgcgtccgcccacgcgtccgtcgcaacccaaactcgcacaagggagaagagaagagaagcttcgagagagaggtggaggaggagacgagcgcgtggtggtggtggtgttggcggcgatggatcgggttcgcggatgcgcgttcctgctcggcgtcctgctcgcaggatccctgtttgcattttctgttgcgaaggaggagaccaagaagctcggtaccgtgatcggtattgatcttggtacaacctactcgtgtgtcggtgtgtacaagaatggtcatgtcgagattatcgccaatgaccagggtaaccgtatcacaccctcatgggttgcattcaccgatagc

SEQ ID NO: 406263 - DNA, 470 bp, Oryza sativa nipponbare
cccacgcgtccggattgatcatcaatggctagcaaggtcgtcttcttcgcggcggcgctcatggcggccatggtggccatctccggcgcgcagctgagcgagtcggagatgaggttcagggacaggcagtgccagcgggaggtgcaggacagcccgctggacgcgtgccggcaggtgctcgaccggcagctcaccggccgggagaggttccagccgatgttccgccgcccgggcgcgctcggcctgcggatgcagtgctgccagcagctgcaggacgtgagccgcgagtgccgctgcgccgccatccgccggatggtgaggagctacgaggagagcatgccgatgcccctggagcaaggctggtcgtcgtcgtcgtcggagtactacggcggcgagggggtcgcgtcggagcaggggtactacggcgaggggtcgtcggaggagggctactacggcgagcagcaacagca

SEQ ID NO: 406264 - DNA, 519 bp, Oryza sativa nipponbare
cggacgcgtggggccgcaatgctgtgtctcacctcctcttcctcctccgcgcccgctccgctccttccctctctcgctgatcgaccgagcccgggaatcgcgggcgggggtggcaatgttcgcctgagcgtggtttcttcgccgcgccggtcgtggcctggaaaggtcaagaccaatttctcagttcctgcgactgcgcgaaaaaacaaaaccatggtgactgttgtggaggaggtcgaccaccttcctatatatgatctggaccctaagttggaggaattcaaggatcacttcaactataggataaaaagatacctcgaccagaaatgcctgattgaaaaacatgaggggggccttgaagaattttctaaaggctatttgaagtttgggattaatacagttgatggtgccacaatatatcgtgaatgggcgcctgctgcacaagaagcacagctcattggtgagttcaatactggaatggggcaaacacaagatggagaaggataaatttggcatttg

SEQ ID NO: 406265 - DNA, 571 bp, Oryza sativa nipponbare
  unsure (1)..(571): unsure at all n locations
cggacgcgtgggtgagaatgcacagggcntcgtatatatcgcagtcgtgaagtaggccaatcttatattacttccatcgcaacgacattgcttgctacgtcacatgctatctggataataataagaataagaccacaagtgattttttgcaatggtccagggacatgcattcctctgtgtgtctcggcttttcttctgaaggtgcttggtttgggatggtcctccattttctacatcgaaagcattgcaagagtgaagaagctttcattaagcggtttactgttgtacaagctacgaatagctgatcagttcttcgtgcagtggccccagctgcagcanaaataccctcgagcatgctatgccggccgtttaatgtaaagattcacgcatagatgataatattgctttacagcaaaatgctaatggttttatattgcagatgttcttctgattagatgtgacgtttgtcaaatatttttcttccttttcaacagactggactggtcattatctaaaaaaaaacagactggactggagtgatagatagatgccctgacccgaggagatattg

SEQ ID NO: 406266 - DNA, 277 bp, Oryza sativa nipponbare
  unsure (1)..(277): unsure at all n locations
cccacgcgtccgcctacggcgagagcctcnagtccaagatcatcaacgacagggagacggggaggtcacgtgggtttggcttcgtcaccttctcctccgagcagtcgatgcgcgacgccatcgagggcatgaacggcaaggagctcgacggccgcaacaccaccgccgtggcgactcggggccgcccgcctaagcccactgccgccgctcccgagagtggaggcgggcggatccgcgtgctgccggcgctcccgttcctgccaggccgctcccaagg

SEQ ID NO: 406267 - DNA, 462 bp, Oryza sativa nipponbare; identical to SEQ ID NO: 391826

SEQ ID NO: 406268 - DNA, 430 bp, Oryza sativa nipponbare
cccacgcgtccgcccacgcgtccgcttcaccagaagcgccatggccggcgcctggactacgaggagcgcaagcgcaagcgggcggcgcgcgaggtgcacaagcgatccagggatgcccggcagttgcttggtgctaagggtaagaggttcgccaagaagcggtatgccgagaaggcacagatgaagaagaccctgaaaatgcacgacgagtcaacttctcggcagaaggttgatgatgttcaagagggtgctcttcctccatatctgctggaccgtgatcagacacaacgtgccaaggttctcagcaacacaattaagcaaaagaggatggaaaaggctggcaaatgggaggttcctttgccaaaggtcagacctgtggctgaagaagaaatgttcaaagttttaccaactggcaagaaaaaaaccaaac

SEQ ID NO: 406269 - DNA, 508 bp, Oryza sativa nipponbare
gacaagggagagcttgtttctgatgacttggttgttggaattattgatgaagccatgaagaaaccttcatgtcaaaagggtttcattcttgatgggttcccacggacagttgttcaggcacagaagcttgatgaaatgctggaaaagaaaggtacaaaggtcgataaggttcttaactttgccattgatgattcaattttggaagaaagaattactggccggtggatccatccctccagtggcaggagttatcacactaagtttgcacctccaaaggttcctggagttgatgatgtcactggagaaccactaattcaaaggaaagacgacacagctgaggttttgaagtctagacttgaagccttccacaaacaaactgaaccagtgattgactactactccaagaaggccttggtggccaatcttcatgccgagaagccaccgaaagaagtaactgctgaagtccagaaagttctttcgtaaatgtaccaccattttgagacgaaaa

SEQ ID NO: 406270 - DNA, 369 bp, Oryza sativa nipponbare
gtggtgacatccctgatttcgtcggggagctgccagcctcgaggtgctgcagctctgggagaacaacttcaccggcggcgtgccgcgccgcctcggccgcaatggccgcctccagctgctcgacctctcgtcgaacaggctcaccggcacgctgccgccggagctctgcgccggtggcgggaggcacacgctcatcgcgcttggcaacttcttgttcggcgccatcccggactcccttggtgaatgcaagtccttgagccgtgttcgtcttggggagaactacttgaacggctcaattccgaagggtctctttgagctgccgaagctgacgcaggttgagctgcaagataacctgctcacaggcaattt

SEQ ID NO: 406271 - DNA, 399 bp, Oryza sativa nipponbare
gtcagttcccgcgccgtgtgagcaatactcacgcttaaaccgcgcgctttttagccgacccgagcagccggagagtgaggcgaggcgaagcgaagggaagagcgcgaggcagagtaagcagacgagaagaacagcgcgcggcgcggtagctgaggagagtggtgcggagatggatcaggaggcggacgcgtaccggacggacctgatgacgatcacgcggtacgtgctgaacgagcagagccgcaacccggaggcacgcggcgacctcaccatcctcctctcccacatcgtgcttggctgcaagttcgtcgcctccgccgtcaacaaggccgggctcgccaagctcatcgggctggccggcgagaccaacgttcagggagaggagcagaagaagctgga

SEQ ID NO: 406272 - DNA, 520 bp, Oryza sativa nipponbare
  unsure (1)..(520): unsure at all n locations
cggacgcgtgggtgagttcagtcccacaaaagcatggcaaccatcaaattccctatagttttctccgtcgtttgcttgttcctcttgtgtaatggttcgttagcccaacttcttagccaaagtactagtcaatggcaaagttctcgccgtggaagtccaagagagtgcagatttgatcggtggcaagcatttgagccgattcgcactgtaaggtcccaagctggtacaactgagttttttgatgtctctaatgagttgtttcaatgtactggagtatttgttgtccgtcgagttatcgaacctagaggtcttctgttacctcactactccaatggagcaactttggtatatgtcatccaaggcagaggtataacaggaccaactttcccaggatgtcctgagacctatcaacaacagtttcagcaatccgagcaagaccaacaattggaaggccaaagccaaagccataaatttagagatgaacatcanaagatccaccgttttcaacagggggatgtag

SEQ ID NO: 406273 - DNA, 486 bp, Oryza sativa nipponbare
aattggtgaagaactccttgcgtgcagtacaggaacgatatatgaattccgataaagatgttcctccagttagaattatcgttgctgatggggcagaggatgtaactatcaaggttagtgatgaaggtggtggaataccaaggagcggccttccaagaattttcacatatctatatagcactgcaaagaatccacctgatatggattgccctagtgaaggagtaactatggctggatatggctatggtcttccaatcagtcgcctgtatgctcgatattttggtggtgacctgcaaatcatctctatggaaggatacggcaccgatgcttacctgcacttgtcacggttgggagattcggaggagcccttgccttgaaggcttccctgtcctgataccatctctgtaattaattaggttgctcttgtctcttgtaattcctgggctggtttggaatattgttttcaagtgccagccacctatagct

SEQ ID NO: 406274 - DNA, 377 bp, Oryza sativa nipponbare
cggacgcgtgggcggacgcgtgggtggccggaaaactggaggactaatagaaggaagcatcactatatctgggtatcctaaaaaccaagagactttcactaggatctctggttattgtgaacaaaatgatgtgcattcaccttgcttgactgtaattgagtcattgctgtactctgcatgcctccgattgccttctcatgttgatgtgaacactcgaagggtttttgttgaagaggtgatggaacttgttgagctaaatgcattaagtggtgctcttgttggcctaccaggagtgaatggtctgtcaactgaacaacgcaagaggttgacgatagctgtggagcttgtggcaaatccttcaatcgtgttcatggatg

SEQ ID NO: 406275 - DNA, 320 bp, Oryza sativa nipponbare
  unsure (1)..(320): unsure at all n locations
cccacgcgtccggttctagatcgcgggcggccgctcgcgatctagaactagcaacaacaaaaaccacttctcgtgggtagaagagagagagagcgaggcgatttcgaccaagaagatggccgggatcgtggtggtgttcgacttcgacaagacgatcatcgacgtcgacagcgacaactgggtcgtggacgggctcggcgcgacggaggagttcgagcggctgctgcccaccatgccgtggaacaccctcatggacaccatgatgggcgagctccacgcgagcgggaagtcgctcgccgacgncncgggcgtgctcaggt

SEQ ID NO: 406276 - DNA, 398 bp, Oryza sativa nipponbare
cccacgcgtccgcccacgcgtccgctttgcgtttgcactcctctcgatctccattcgtttttgagttcctcgtttgctccgcctctctttcactcatgggcaagattaagatcggaatcaatgggttcggccgcatcggcaggctggtggccagggtggcgctgcagagcgaggatgtcgagctcgttgccgtcaacgatcccttcatcaccaccgagtacatgacatacatgttcaagtatgacaccgtccacggccagtggaagcatcatgaggtcaaggtcaaggactccaagaccctcatctttggcacgaaagaggttgcggtgttcggctgcaggaaccctgaggagatcccatgggctgcggctggtgctgaatacgttggtgagtctact

SEQ ID NO: 406277 - DNA, 435 bp, Oryza sativa nipponbare
  unsure (1)..(435): unsure at all n locations
cccacgcgtccgaataacatcctcaaatagctatggcgaccatagctttctctcggttatctatctacttttgtgttcttctcctatgccatggctctatggcccagctatttggtccgaacgtaaatccatggcacaaccctcggcaaggaggttttagggagtgtagatttgatagactacaagcatttgaaccacttcggagagtgaggtcagaagccggggttacagagtactttgatgagaagaatgaacaattccagtgcacaggtacatttgtcatccgacgtgtcattgagcctcaaggccttctggtacctcgatacagcaatactcctggcatggtctacatcatccaagggagaggttctatgggattaactntccccggctgcccagcaacctaccaacaacaattccaacaattcttgcctg

SEQ ID NO: 406278 - DNA, 380 bp, Oryza sativa nipponbare
gtcgaccccgcgtccgcccacgcgtccgcccacgcgtccgccttggcctccttctcttcttccaagtgtccatggcacaattttcatttgggggaagcccacttcagagcccacgtggatttaggggagaccaagatagtcgtcatcaatgtcgttttgagcacctcaccgcccttgaggcaacacaccagcagagatctgaagctggattcactgagtactacaacattgaggcaagaaatgagttccgttgtgccggagtgagcgtgaggcgcttagtcgtcgagagcaagggcttagttttaccaatgtatgctaatgctcacaagcttgtctacatcgtccaaggtcggggagtgtttgggatggcactgcctggt

SEQ ID NO: 406279 - DNA, 306 bp, Oryza sativa nipponbare
cccacgcgtccggcccaatcctctcttcttcctcctcctccttgccgccgccgccgccgccaccgccggcgccggcgaaggcggcgccacgcggaaggacccgtgcgccggccgacggatccacatccgtcgcctcccgcctcgattcaacgcgcacctcctccgccactgcgacgccgggttcccgctcgccgacccgtcgacgccggccacctcgtccccgccctgcgagtcgctcgtcaaccacggcctcggcccgcgcacccactccagcagccgctcctggtaccgcaccgacacgcgcct

SEQ ID NO: 406280 - DNA, 484 bp, Oryza sativa nipponbare
cattgatccaaactcttccatcagttttccgaaggggatttcattttctccgggaatgtctgaaattataaggtttgtagaagagcactgtgatttttgtgtaattgatccattcaaaaatatttatccattgctggatcgcatccaaattcaagaaattctaatccgactggaaggacttagcgccgaaggaaggccaaaactccgagcaccatgctttttaaagattgaaagcttttgtggcagtgaattacagaaacaactagcagaagctaagttatcctttccgctcattgtgaagccacaagtagcatgtggagttgctgatgcccacaatatggcattgattttcaaaatcgaagaatttagcaaccttagtgtgcctcttccagctattctacaggaatatattgaccatggatccaaaatattcaaattttatgcaattggagacaagatttttcatgctattaagaactcaatg

SEQ ID NO: 406281 - DNA, 462 bp, Oryza sativa nipponbare
cccacgcgtccggaaaaggcctgtgtcaaggagagggtagtagcaccttgctctcctttgccttcagagaaaccggaagcaatggcgtctgctactctcctcaagtcatctttccttcccaagaagtctgaatggggtgccacccgccaggctgccgcccccaagccggtgactgtctccatggttgtccgcgctggtgcctacgacgatgagcttgtcaagaccgcgaaaaccattgcatcaccaggaaggggtatccttgccatggatgagtcgaacgcgacctgcggtaagaggcttgcgtcaattggccttgagaacaccgaggccaaccgccaggcttaccggaccctccttgtcaccgcaccgggcttgggacagtacatctccggtgctatcctcttcgaggagactctggaccagtcaactgtagatggcaagaagattgtcgacatcctcact

SEQ ID NO: 406282 - DNA, 339 bp, Oryza sativa nipponbare
  unsure (1)..(339): unsure at all n locations
cccggtcgccccgcgtccgggatttcttcaatgggaaggaactctgcagagcattaaccctgatgaactgggatacggtgctgccgtccaggctgctatccttagtggagaggggaacgagaaggtgcaggatcttcttctccttgatgtgactccactgtctcttggtctcgagacagcgggaggtgtgatgacagtgctcatcccaaggaacaccaccattcctaccaagaaggagcaggtcttctccacctactccnataaccagcctggtgtgttgattcaggtctatgagggtgagaggaccggaccagggacaacaatntncttggaaatttg

SEQ ID NO: 406283 - DNA, 484 bp, Oryza sativa nipponbare
atggcaaatgctgatacccccgaggatgcaacaacagccagacagaatggggcagaaggaattgggctatgccggactgaacatatgttcttcgcttcagacgagaggattaaggctgtcaggcagatgattatggcttcaagtcttgaactgaggcagaaagcactagatcgccttttgccttatcagaggtctgactttgaaggcatcttccgtgcaatggatgggcttccggtaactattagactcttggatcctccacttcatgagttccttccagaaggccatgttgaggatatggtgcgtgagctatgctctgaaactggagcagctcaggatgatgtccttgcaagagtagaaaaactttccgaagtaaatccaatgcttggtttccgtgggtgcaggcttggtatatcataccctgaattgactgaaatgcaagcccgggccatctttgaagctgctataaccatgaccaaccagg

SEQ ID NO: 406284 - DNA, 446 bp, Oryza sativa nipponbare
cccacgcgtccggccaaaatgatcaaagaggagagatcatacatgtgaagaatggccttcaattgttgaaaccgactttgacacaacagcaagaacaagcacaagcacaagatcaatatcaacaagttcaatacagtgaacgacagcaaacatcttctcgatggaacggattggaggagaacttttgcacgatcaaggtgagagtaaacattgaaaatcctagtcgtgctgattcatacaacccacgtgccggaaggataacaagtgtcaatagtcagaagttccccatccttaacctcatccaaatgagcgctaccagagtaaacctataccagaatgctattctctcgccgttctggaacgtcaatgctcatagtttggtctatatgattcaagggcgatctcgagttcaagtcgttagtaactttggaaagactgtgtttgat

SEQ ID NO: 406285 - DNA, 430 bp, Oryza sativa nipponbare
  unsure (1)..(430): unsure at all n locations
cccacgcgtccgcccacgcgtccgataaagttgtgaagcagcttcaagctatagcaacagatgaaatggacaacaagcttctccagctttatttatatgaaaaatcaagatcccctgggaggttctttgatctagtctatcatgaaaatgcacgcgtgctcctccatgaagagagcatataccggtttgaatgttgctcaaatcctacaaaattgtctattcagctgatggaatatggccatgaaaagcctgaagtgactgcagtatcaattgatcccaatttttcctcgtatctttttaacgagtatttgtcgagtatgtcagacagaaaattgtctgagggtgtcttcctggaaaggaataagcggaagcattcaaataacgacgagccttcagatncgttgaaggccatggatggtgtcaaagtcgc

SEQ ID NO: 406286 - DNA, 292 bp, Oryza sativa nipponbare
  unsure (1)..(292): unsure at all n locations
tgnagcaatataatagccgcgcttagcgtaactagacgaacgtactagcagaagaagaagaagaaaatgccggtgagccggatcgcggtgggcgcccccggcgagctgtcccacccggacacggccaaggccgccgtcgccgagttcatctctatgctcatcttcgtcttcgccggatcgggatccggcatggccttcagcaagctgacggacggcggcggcacgacgccgtcngggctgatcgccgcctccctggcgcacgcgctggccctgntcgtggcggnggcggggg

SEQ ID NO: 406287 - DNA, 452 bp, Oryza sativa nipponbare
  unsure (1)..(452): unsure at all n locations
gtccggattcctggtcgaccagcgtccgggaattgtccgtgtcgaacacgggctcagtttgctgcagccatatgcatcattgcaggagcaggaacaaggacaagtgcaatcaagagagcgttatcaagaaggacaatatcagcaaagtcaatatggaagtggctgctctaacggtttggatgagaccttttgcaccctgagggtaaggcaaaacatcgataatcctaaccgtgctgatacatacaatccaagagctggaagggttacaaatctcaacacccagaatttccccattcttagtcttgtacagatgagtgcagtcaaagtaaatctataccagaatgcactcctttcaccattttggaacatcaacgctcacagcgtcgtgtatattactcaaggccgtgcccgggttcaagtngcaacaacaatggaaagacagngttcaacgg

SEQ ID NO: 406288 - DNA, 361 bp, Oryza sativa nipponbare
  unsure (1)..(361): unsure at all n locations
aaaagagaaaaaaacatatacacttctagtgattgtctgattgatcatcaatggctagcaaggtcgtcttcttcgcggcggcgctcatggcggccatggtggccatctccggcgcgcagctgagcgagtcggagatgaggttcagggacaggcagtgccagcgggaggtgcaggacagcccgctggacgcgtgccggcaggtgctcgaccggcagctcaccggccgggagaggttccagccgatgttccgccgcccgggcgcgctcggcctgcggatgcagngctgccagcagctgcaggacgngagccgcgagngcccgtgcgccgccancccgccgaaggggaggagcnncnangagag

SEQ ID NO: 406289 - DNA, 320 bp, Oryza sativa nipponbare
cgtccgcccacgcgtccgcccacgcgtccgcccacgcgtccggacgatgacagagaagatcctggcgagggcgtcggagcgcgccagcttggagcccggggagaacgtgtgggtggacgtcgacgtgctgatgacgcacgacgtctgcggccctggcaccatcgggatcttcaagcgggagttcggggaggacgccaaggtttgggaccgagagaaggtggtcatcatcccggaccactacatcttcaccagcgatgagcgagcaaaccgaaatgttgatatcctcagggatttctgtatggagcaaaacatcaagtact

SEQ ID NO: 406290 - DNA, 465 bp, Oryza sativa nipponbare
gcgtccgcggacgcgtggggccgccgccgcctgctcctcctctcgccttctcccgtcttctccttcgagttagctacctccttattcaaccatgggtaaggagaagacgcacatcaacatcgtggtcattggccacgtcgactccggcaagtcgaccaccacgggccatctgatttacaagcttggaggtatcgacaagcgtgtgatcgagaggttcgagaaggaagccgctgagatgaacaagaggtccttcaagtacgcgtgggtgcttgacaagctcaaggccgagcgtgagagaggtatcaccatcgatattgccctgtggaagttcgagaccaccaagtactactgcacggtcatcgatgcccctggtcaccgggacctcatcaagaacatgtcacggggacttcccaggctgactggtgccggctcattatggacttcaccaatggtgggtttgaggtt

SEQ ID NO: 406291 - DNA, 354 bp, Oryza sativa nipponbare
caaccttgatttttcttttcatcagttcatcaccaacaaacaaaagaggaaaaaaaacatatacacttttagggatggcctgattgatcatcaatggctagcaaggccgtcttcttcggggaggcactcatggcggccatgggggccatctccggcgcgcaattgagcgagtcggagatgaggttcagggacaggcactgccagcgggaggtgcaggacagccccctggacccgtgccggaaggtgctaaaccgggagctaaccggccgggagaggttccagcggatgatccaccccctgggccccctcggcctggggattcaaagctgcaaaaaacggcaggaagggagccac

SEQ ID NO: 406292 - DNA, 481 bp, Oryza sativa nipponbare
  unsure (1)..(481): unsure at all n locations
atgaattatattgtgataactacattagtctgtaagtcaagacataattccaagatatggagcttgttcctggtattttagccaaatacaacagcatggtgatcccacgcgtccgctcgacccccgcatctcatccctcctctcgcttagttcagatcgaaatcgcaaatggcgaagattaagatcgggatcaatgggttcgggaggatcgggaggctcgtggccagggtggccctgcagagcgangacgtcgagctcgtcgccgtcaacgaccccttcatcaccaccgactacatgacatacatgttcaagtatgacactgtgcacggccagtggaagcatcatgaggttaaggtgaaggactccaagacccttctcttcngtgagaaggaggtcaccgtgttcggctgcaggaaccctgaggagatcccatggggtgagactggcgctgagtttgttgtggagtccactggtggtttca

SEQ ID NO: 406293 - DNA, 262 bp, Oryza sativa nipponbare
ctcctctctacccacccaccctctcgccgtggcagatccgatccaggaagagctcgccgccgccgctgccatggcgctctccgtggagaagacctcgtcggggagggagtacaaggtgaaggacctctcccaggcggacttcggccgcctcgagatcgagctcgccgaggtcgagatgcgcggggctcatggcgtgccgcgccgagttcggcccctcccagccgttcaagggcgcccggatctccgggtccctccacatgac

SEQ ID NO: 406294 - DNA, 379 bp, Oryza sativa nipponbare
  unsure (1)..(379): unsure at all n locations
aggaaaaaaaacatatacacttctagtgattgtctgattgatcatcaatggctagcaaggtcgtcttcttcgcggcggcgctcatggcggccatggtggccatctccggcgcgcagctgagcgagtcggagatgaggttcagggacaggcagtgccagcgggaggtgcaggacagcccgctggacgcgtgccggcaggtgctcgaccggcagctcaccggccgggagaggttccagccgatgttccgccgcccgggcgcgctcggcctgcggatgcagtgctgccagcagctgcaggacgtgagccgcgagtgccgctgcgccgccatccgccggatggtgaggagctacnaggagagcatgccgatgcccctggagca

SEQ ID NO: 406295 - DNA, 207 bp, Oryza sativa nipponbare
gagaagagctcggtgccttcactcctagatatcaacaacagacctacccaggcttctcaaatgagtcggagaacgaggccttagagtgatgtactaatgaaatagtataggtgtatcaaaaaaataatgccacaagtatgtgaaactttgtggcggttctgttctaagtttatgaagcactaataaaatgctacaactgttttgttc

SEQ ID NO: 406296 - DNA, 520 bp, Oryza sativa nipponbare
  unsure (1)..(520): unsure at all n locations
caatcctgatgaggctgttgccatgggagctgccattcagggtggcatcttgaggggtgatgtgaaggagctccttttgctggatgtcactcccctctcccttggtattgagactcttggaggcatcttcacaaggctaattaatcggaacacaaccattccaaccaagaagagtcaggtcttctccactgctgcagacaaccagacccaggttggaatcaaggtgctccagggtgagagggagatggccacagacaacaagcttcttggtgagttccagcttgaaggtattccaccagccccaagaggtatgcctcagattgaggtcacattcgacatcgatgccaatggtattgtcaaggtgtcagccaaggacaagtccactggcaaagagcaagaaatcactataaagtcttcaggcggtttgtctgaaagtgatatcgagaagatggtgagggaggctgagctacattctcagaaggatcagganaggaaatcattgattgatctgaagaactct

SEQ ID NO: 406297 - DNA, 309 bp, Oryza sativa nipponbare
tgatgttatcattgtgctggttgggaacaaaactgatcttgttgacaagaggcaagtctccatagaggaaggagagggcaaagcgaaagatctcggtgtgatgttcattgaaaccagtgctaaagctggttttaacattaaggcgttgttccgtaagattgcggctgcacttcctggagtggagaccctctcatcagcaaagcaggaagacatggttgatgtgaacttgaagtcaagcaacgccaacttattccagtcttaagccccgggttggggatgccgttggtaacttcagtcccctaacactta

SEQ ID NO: 406298 - DNA, 476 bp, Oryza sativa nipponbare
agcaattcttgagctcaatcagcaacaacatctatctccttcttgcttagttaagtccttcgccctcccaagaagaagaagatgtcttgctgcggcggcaactgcggctgcggcagcggctgccagtgcggcggcggctgcggcggatgcaagatgttccctgatgtggaggccacagccaccaccaagaccttcgtcctcgctgctccatccaacaaggcgagctctggaggaatggagatggcggtggagagcggcgagaacggcggctgcggctgcaacacctgcaagtgtggcaccagctgcagcggctgctcctgctgctcctgcaactgaatctatcgtcgtcgtcgcccggctgcatgaggatttatcgtatggatgctgctactgtcgatcagagctttgatcgaggccttaatttgcttgcattagtacccagcttatatgtaggcaggccttgccttttgctctga

SEQ ID NO: 406299 - DNA, 323 bp, Oryza sativa nipponbare
  unsure (1)..(323): unsure at all n locations
cccacgcgtccgcccacgcgtccgcggacgcgtgggctcatccccttcccctcccaccacccttcgccatggccgtctccacctccgcctcctccaccctcccgctcctctccctccatcgcgccgcggggaaccccaacccggccgcactctccttcccgcctcccctccgcgcgcccccgctccgctcccgcgccgccgctgccgcggcctccgccgcagcaccgcccgccgagaccatccccgacatgcccgaggagacggaggggacggggattccgatgccggcgtcgattggggatgatggggagcagntacttttt

SEQ ID NO: 406300 - DNA, 445 bp, Oryza sativa nipponbare
ctccccgtcacggccgccgccgccgctgccgccgtttggctgagcacctcgccgccggcgctattccccaccggggcggcctcgccggcgtatctgtggtgatttgtgctgcgagagaaacttctttgtcgactccgccgccgcggttgcggttcaggagcttgccgagctcggcgaggggcggcggcaatgagggaggcggtgacggtgcaggtcggcggcttcgccaactacgtcggctcccacttctggaacttccaggatgagttgctcgggctcgccgacgaccccgacgccgacccagtcttcaagaacgacgcgctggacatggacgtcctctaccgctccggcgagacgcaccagggtatacccacatactgccctcgtctggtgtccgttggttctcgagggtcccttggttctttgagttcatctggtaatctcg

SEQ ID NO: 406301 - DNA, 233 bp, Oryza sativa nipponbare
ggaaaagcagaaagcatgtttattgcatctgtaattagatgtgagtggccctgtaaactatgtttggtctccactagtgttgtaaatgctgctcttatttgtcagagaacccttgtgatagctcaagtgaagctgatcactcaatgggttttgtgtgtcaagttttgtatgtaaatcagaatcttgtgaggaacaagtatattaattggttagcattattcattttcatttac

SEQ ID NO: 406302 - DNA, 376 bp, Oryza sativa nipponbare
cacaattcaaatattatagttgaagcatagtagtagaatccaacaacaatgaagatcattttcgtatttgctctccttgctattgttgcatgcaatgcctctgcgcggtttgatcctcttagtcaaagttataggcaatatcaactacagtcgcatctcctactacagcaacaagtgctgagcccatgcagtgagttcgtaaggcaacagtatagcatagtggcaacccccttctggcaaccagctacgtttcaattgataaacaaccaagtcatgcagcagcagtgttgccaacagctcaggctggtagcacaacaatctcactaccaggccattagtattggtcaagcgattgtgcaacagctacaactggagc

SEQ ID NO: 406303 - DNA, 477 bp, Oryza sativa nipponbare
cggacgcgtgggcggacgcgtgggaaaatctcccgtcccgttccgctccagcgcctgcgcggatctccatctcgcgactcgcgagcagagcagggttggtaggggcgcccatctccatccggcgagcatagcagagctggaggaggtgcgccatcgtcccgctgcatcctgtttggagcctggatcttgccaaacaagtggttgatcttactgctttcggcggccgtgtctcctacacaggaaggaaggcaccgcggatctagaggaggccatgggagaattctacaaggaatctcgcccttctgtgaagaacattttgcttctggattctgaagggaaacgtgttgccgcgaaatacttctcggatgattggtctagtactgcgtcaaagttggcctttgaaaagtctgtctttactaaaactctgaagacaaatgcacgctcagaagctgagataacattgtttgatggctatat

SEQ ID NO: 406304 - DNA, 483 bp, Oryza sativa nipponbare
ggagatatgccaaggagaaaaggggaaagtatagacgggattgcaaggtgcacatttgaagacagaattcttatgagtgacattgtcttcatgcgtgcatgggtcaatgttgaagttcccacctactgtaaccttgtgacaactgctcttcaaccccaagatgagacttggcaaggcatgagaactactgctgagctgcggagggcacataatattcctataccgcacaacacagattcagtttataagcccattgagcggaaagtgcggaagtttaatcctatagagatccctgcaaaactgcagcatctacttccttttaaatctaaaccgaaggatacgcccaagcatagaaaaacaccagtggagaacagggtccctgtccttatgcagcccagtgagaagaagacacatgcagccattcaacagttaaggctgctaaaacatgagaaggccaggaagaagaaattgcaggatgagaag

SEQ ID NO: 406305 - DNA, 626 bp, Oryza sativa nipponbare
gcggccggccatcatcagtgatcctctacaatcatcgactttcagcaaattaagatggctgctgccttctcctccaccgttggagctccggcgtccactccgaccaacttcctggggaagaagctgaagaagcaggtgacatcggcggtgaactaccatggcaagagctccaacatcaacaggttcaaggtgatggccaaggagctggacgagggcaagcagaccgaccaggacaggtggaagggtctcgcctacgacatctccgatgaccagcaggacatcaccagggggaagggtttcgtcgactcccttttccaggctcccacgggtgatggcacccacgaggccgtcctcagctcctacgagtacctcagccagggtctcagaacgtacgacttcgacaacaccatgggaggcttctacatcgcccctgctttcatggacaagctcgtcgtccacatctccaagaacttcatgaccctccccaacatcaaggtcccactcatcctgggtatctggggaggcaagggtcagggaaaatccttccagtgtgagctcgtcttcgccaagatggggatcaaccccatcatgatgagcgccggagagctggagagcggcaacgccgg

SEQ ID NO: 406306 - DNA, 462 bp, Oryza sativa nipponbare
gtcctgttcacgggcaaagtgcacttggaagtgcattaggtctcatctctcgtcatggtagtatggtcagtcagggtaagccccttgtggatcctgttgtcaccctttttggaagtgtccatgagaagatgcctgagataatgggaagcatgcggagcacattgtttcctaactttggcagcatgtttagtgtggcggaacagcagcaagctaaaggtgattgggatgctgagagtcaacgggagggtgaagattatggatcagaccatggtggggatgacattgaagatagcctccaaagcccacttatttctcgtcaagcgacaagcgtggaaggaaaggagatcgctgcacctcatggcagtataatgggtggctggggaagaagtagtagtctcatgcagggcggggaggcagtaagcagcatgggcattggtgggggatgggagttggcttgaaaat

SEQ ID NO: 406307 - DNA, 526 bp, Oryza sativa nipponbare
gcggccgctcgcgatctagaaccggacgcgtgggcggacgcgtgggcgcaattttataatctcgctcgatccaatctgctccccttcttcttctactctccccatctcggctctcgccatcgccatcctcctctcccttcccggagaagacgcctccctccgccgatcaccacccggtagggcgaggagggagccaaatccaaatcagcagccatggcgcagatgctgctccatgggacgctgcacgccaccatcttcgaggcggcgtcgctctccaacccgcaccgcgccagcggaagcgcccccaagttcatccgcaagtttgtggaggggattgaggacactgtgggtgtcggcaaaggcgccaccaaggtgtattctaccattgatctggagaaagctcgtgtagggcgaactaggatgataaccaatgagcccatcaaccctcgctggtatgagtcgttccacatctattgcgctcatatggcttccaatgtgatcttcactgtcaagattgataacccta

SEQ ID NO: 406308 - DNA, 488 bp, Oryza sativa nipponbare
cggacgcgtgggcggacgcgtgggcggacgcgtgggcggacgcgtgggtgcaatcaagagagcgttatcaagaaggacaatatcagcaaagtcaatatggaagtggctgctctaacggtttggatgagaccttttgcaccctgagggtaaggcaaaacatcgataatcctaaccgtgctgatacatacaatccaagagctggaagggttacaaatctcaacacccagaatttccccattcttagtcttgtacagatgagtgcagtcaaagtaaatctataccagaatgcactcctttcaccattttggaacatcaacgctcacagcgtcgtgtatattactcaaggccgtgcccgggttcaagttgtcaacaacaatggaaagacagtgttcaacggcgagcttcgccgcggacagctgcttattataccacaacactatgcagttgtaaagaaggcacaaagagaaggatgtgcttacattgcattc

SEQ ID NO: 406309 - DNA, 136 bp, Oryza sativa nipponbare
  unsure (1)..(136): unsure at all n locations
gcgtccggtggatgggttctgcatgagccggtgcggcgcgcacgcgtcgaacgccaaggcccgcacggcctacgtctgggtcggcaactccgccacgcagtgccccggccagtgcgcgtggccgntccaccagccg

SEQ ID NO: 406310 - DNA, 124 bp, Oryza sativa nipponbare
  unsure (1)..(124): unsure at all n locations
gtccgcattcgcatccacnatagccctcgaacccgacccgcctcgccgncgccggcaccgaattaatcccttaattggtcaaaatgtctcgggaggagaatgcctacatggccaacctggccga

SEQ ID NO: 406311 - DNA, 414 bp, Oryza sativa nipponbare
cttgaccctaggcaaagggatttcttgttagctggaaataagagaaaccctcaagcatacaggcgtgaggttgaggagcggtcacagaacatatttagtggctttagcactgaactacttagcgaggctcttggcgtaagcagccaagtggcaaggcagctccaatgtcaaaatgaccaaagaggagaaattgtccgtgtcgaacacgggctcagtttgctgcagccatatgcatcattgcaggagcaggaacaaggacaagtgcaatcaagagagcgttatcaagaaggacaatatcagcaaagtcaatatggaagtggctgctctaacggtttggatgagaccttttgcaccctgagggtaaggcaaaacatcgataatcctaaccgtgctgatacatacaatccaagagct

SEQ ID NO: 406312 - DNA, 517 bp, Oryza sativa nipponbare
  unsure (1)..(517): unsure at all n locations
cccacgcgtccgcagcctcaaggccttttggtacctcgatacacaaatattcctggcgtggtctacatcatccaagggagaggttctatgggtttaaccttccccggttgccctgcgacttaccagcaacaattccaacaattttcatctcaaggccaaagtcagagccaaaagtttagagatgagcaccaaaagattcatcaatttaggcaaggagacattgttgcactcccagctggtgttgcacattggttctacaatgatggtgatgcacctattgttgccgtatatgtttatgacgtaaacaacaacgccaatcagcttgaacctaggcaaaaggagttcctattagccggcaacaacaatcgggctcaacaacaacaagtatatggtagctcaattgagcaacactctgggcaaaacatattcagcggatttggtgttgagatgctnagtgaggctttaggcatcaacgccatagcagcaaagaggctacagagcccaaatgatccaagag

SEQ ID NO: 406313 - DNA, 517 bp, Oryza sativa nipponbare
cccacgcgtccggcaagtacaaatagctatggcgagttccgttttctctcggttttctatatacttttgtgttcttctattatgccatggttctatggcccagctatttaatcccagcacaaacccatggcatagtcctcggcaaggaagttttagggagtgtagatttgatagactacaagcatttgaaccacttcggaaagtgaggtcagaagctggggtgactgagtacttcgatgagaagaatgaattattccagtgcacgggtacttttgtgatccgacgtgtcattcagcctcaaggccttttggtacctcgatacacaaatattcctggcgtggtctacatcatccaagggagaggttctatgggtttaaccttccccggttgccctgcgacttaccagcaacaattccaacaattttcatctcaaggccaaagtcagagccaaaagtttagagatgagcaccaaaagattcatcaatttaggcaaggagacaattgtgcactcccagct

SEQ ID NO: 406314 - DNA, 336 bp, Oryza sativa nipponbare
  unsure (1)..(336): unsure at all n locations
cccacgcgtccgcccacgcgtccgagaaggtcggctacaaccctgacaagattccctttgttcccatctctgggtttgagggtgacaacatgattgagaggtccaccaaccttgactggtacaagggccccaccttgcttgaggctcttgaccagatcaacgagcccaagaggccatcagacaagcccctacgtcttccccttcaggacgtgtacaagatcggcggtattggtaccgtgcctgtgggtcgtgttgagactggtgtcctcaagcctggtatggtggtgacctttggtcccagcggnctgaccactgaggtcaagtctgttgagatgc

SEQ ID NO: 406315 - DNA, 300 bp, Oryza sativa nipponbare
gtagaatcctacaaaaatgaagatcattttcgtatttgctctccttgctattgttgcatgcaacgcttctgcacggtttgatgctcttagtcaaagttatagacaatatcaactacaatcgcatctcctgctacagcaacaagtgctcagcccatgcagtgagttcgtaaggcaacagcggagcatagtggcaacccccttctggcaaccagctacgtttcaattgataaacaaccaagtcatgcagcaacagtgttgccaacagctcaagctggtagcgcaacaatctcactaccaggc

SEQ ID NO: 406316 - DNA, 298 bp, Oryza sativa nipponbare
  unsure (1)..(298): unsure at all n locations
gatgaaccacgtatgttctcaaggtaaaattaattaatgcagtatagttttaactttgtccatcgatctcaacctgtaactgtgacgacacactggctacagtgccctcgaggtactagcagtatagcagtagctggggggggtagcagcagcagcagcaggttcactgtcttgattggattggatcggattagtagacgtagttcttgacgaacatgccctccttggcctcggcggcctcgccggngctggtgtacttgccgagctgcgccngcgagttggccttggggcggaggag

SEQ ID NO: 406317 - DNA, 490 bp, Oryza sativa nipponbare
  unsure (1)..(490): unsure at all n locations
atggcgaccatagctttctctcggttatctatctacttttgtgttcttctcctatgccatggctctatggcccagctatttggtccgaacgtaaatccatggcacaaccctcggcaaggaggttttagggagtgtagatttgatagactacaagcatttgaaccacttcggagagtgaggtcagaagccggggttacagagtactttgatgagaagaatgaacaattccagtgcacaggtacatttgtcatccgacgtgtcattgagcctcaaggccttctggtacctcgatacagcaatactcctggcatggtctacatcatccaagggagaggttctatgggattaactttccccggctgcccagcaacctaccaacaacaattccaacaattcttgcctgaaggccaaagccagagccaaaaatttagggatgagcaccaaaagatccaccaatttagacaaggagatattcgtgcactgncagctg

SEQ ID NO: 406318 - DNA, 268 bp, Oryza sativa nipponbare
  unsure (1)..(268): unsure at all n locations
agaacctcctcaccgccatcgaccgcgaggccgtgttcagctatgccgacgacccgtgcagcgccaactacccgctcatgcagaagctccgcgccgtgctcgtcgagcacgccctcaccagcggcgacgccgagcccgaggcctccgtgttctccaagatcaccaagttcgaggaggagcgtgggctctgcgctgccccgggagatcgaggccgcccgcgtcgccgtcgccaacggcaccngccccgtcggcaaccggatcggcgaga

SEQ ID NO: 406319 - DNA, 232 bp, Oryza sativa nipponbare
cccacgcgtgcggccacgcgtcacggatataccgctctggcgccgacaagaaggcgacgcagaggatctccggagggcgggctgcattttcccgtcggcaggattgccaggttcctcaaggccggcaagtacgcggagcgcgtcggcgccggcgcccccgtctacctcgccgccgtcctcgagtacctggccggtgaggtcctcgagcttgcgggaaactcctgtgaggcac

SEQ ID NO: 406320 - DNA, 310 bp, Oryza sativa nipponbare
cccacgcgtccgcccacgcgtccggctttggacctgagaccactggccccaacatggtggtcgacatgtgtaagggagttcagtatcttaatgaaatcaaggactctgttgtggctgggttccagtgggcatcaaaagaaggtgcattggctgaggagaacatgcgcggcatctgcttcgaggtatgtgatgtggttctccacgctgatgctattcacaggggcggtggccaggtcattccgacagcgaggagggtcatctatgcttctcagctaactctgaatcctaggctggtggatccagtctacct

SEQ ID NO: 406321 - DNA, 145 bp, Oryza sativa nipponbare
  unsure (1)..(145): unsure at all n locations
ggcgtacctggaggccaagggccgcgtccgccgcggcgaccgcgtgtggcagctcgccttcggctccgggttcaagtgcaacagcgccgtgtggcgcgccgtccgccgcgtgcgccgcccggcgcgcagcccgnggctggactgc

SEQ ID NO: 406322 - DNA, 492 bp, Oryza sativa nipponbare
gcagagcagcggcaaagcaagtgatctctttagctcggatcatctctgcatttgcatttgcagctgctcgtcacggcaatggcatccaccaacagctggacccacgagatcgagtcgccggtggccgcgccgcgcctgttccgcgccgccgtcatggactggcacacccttgcccccaagatcgcctcccacatcgtcgccagcgcccaccccgtcgacggcgacggcagcgtcggcagggtcaggcagttcaacttcacctcagccatgccattcagccacatgaaggagaggctggagttcctggacgtggacaagtgcgagtgcaagtcgacgctggtggagggcggcggcatcggcaaggcgatcgagacggcgacgtcgcacatcaaggtggagccggcggcgaacggcgggagcgtcgtgaaggtggagtccacgtacaagctccttcccggagtggaggtgaaggacaagatcaccaaggctaag

SEQ ID NO: 406323 - DNA, 511 bp, Oryza sativa nipponbare
  unsure (1)..(511): unsure at all n locations
cgagccccatcgatcgtattcgcgtcaagcttcttctcttcctctccaaatttccaacctctccatccatccatcccgcatccgattcttccaaccaatctcatcttcttcctcctcctcggcggctcgccgattccccgacggcgatgaagatcacggcgctgctggtgctcaaatcccccggcgacggcgactcgtcgtcgggtggcggtggcggcgagcaggagcaggagcagcaggcggcggtggtggtggcgaacgcgaccgacgtgagccacttcggctacttccagcgcaaccccgcccgcgagttcatcctcttcgtcgcccgcaccgtcgccgcccgcacccccgccggccgccgccagnctgtccagcacgaagagtacaaggtgcattgctacaaccagaatgggctctgcgccatcgncttcaccgacgaccaataccccggcaggagcgccttctacctnctnaacacggggctggaagaagacccacagacttttgg

SEQ ID NO: 406324 - DNA, 427 bp, Oryza sativa nipponbare
  unsure (1)..(427): unsure at all n locations
accacgcgtacgcctaggcaagggattatttgtatatctggaaataagagaaaccttcaagcttacaggcgtgaggttgaggagcgatcaaagaaaatatttagtggctttagcactagactaatttgcgtggatctatgcgtaagaagttaagtgggaaggaatttgcaatgtgaaaatgaccaaataggataaatatgttcgtgtggaagacttgatcagttgttttctatcctattgttgagctgaattacatttattggtcccatttcaaggatagaattggtatgctagctgcacatttcgtgcttggctgatgttgctgagggtgccttattattagcaacatgattatcgnctgttgttggtncattttgttattaatatttttgtttcananncttatttttnaanattattagtagta

SEQ ID NO: 406325 - DNA, 432 bp, Oryza sativa nipponbare
cggacgcgtgggtaagatacgccaagacaagacgccggatatcgacttcagagataggcatggctagtcccctacggtgcctacggataccgtcaggagagatatagcgctgtctctgatctcaccggatgcggattcgaggaggaaggctaccctgttgtcgactacgagtcagacctggagaccgtcatgtcgacaacagttagataggctatcccaaatattatactggtgtaattatgatgaataagagcaacgaccggcttcggccaacaggatgtagggttattacctgacaattcaggggcccgaacctgtataaaaatcctcgcctctgtctcttttactacaatctcgcatatatattctagtaccaacgatccccatactatgcaaataccggaatcgcgacatcaaacgtcgacacatata

SEQ ID NO: 406326 - DNA, 415 bp, Oryza sativa nipponbare
caagaagaatttctctccttgtagaaacaagcctagagagtactatggagcagaggaaatttttgttgtgcctaattcttggcttacttgcgacttcaggacctgccaagaccgtcaatgctgactcgccctttgatttttattatctcatcctcatgtggcctggagcatactgcactgacagcgagtatggttgttgcgtgcccaagtatggttacccgtcagaagatttcttcgtcaagagcttcatgacctttgactcgtcagagaacacagctgttgtcaggtgcaactccgacaatcctttcgacattaacaagctagactcaatcgagaacaacctgaaccactactggagcaacatcaagtgtcctcgcaccgacggcgtgaactcatggaagagcgagtggaacag

SEQ ID NO: 406327 - DNA, 217 bp, Oryza sativa nipponbare
cgtttatatgtggcggaatcctcttaagttggcaatgcggataaagaataactaaataaataaataaataaattgcaagcaattgcgttgctgctatgtactgtaaaagtttcttataatatcagttctgaatgctaaggacatccctcaagatggtctttctatttttgtgaggcgggggggatgacaatgggcattggcacgcagatttattaat

SEQ ID NO: 406328 - DNA, 529 bp, Oryza sativa nipponbare
  unsure (1)..(529): unsure at all n locations
gtccgnattcccggtcgccccgcgtccgcccgcgtccgcccgcgtccgccacgcgtcgcccacgcgtccgattagtactacaacaacatggcatccataaatcgccccatagttttcttcacagtttgcttgttcctcttgtgcaatggctctctagcccagcagctattaggccagagcactagtcaatggcagagttctcgtcgtggaagtccaagagaatgcaggttcgataggttgcaagcatttgagccaattcggagtgtgaggtctcaagctggcacaactgagttcttcgatgtctctaatgagcaatttcaatgtaccggagtatctgttgtccgtcgagttattgaacctagaggccttctactaccccattacactaatggtgcatctctagtatatatcatccaagggagaggtataacagggccaactttcccaggctgtcctgagtcctaccaacaacagttccaacaatcaggccaagcccaattgaccgaaagtcaaagtcaaagtcaaaagt

SEQ ID NO: 406329 - DNA, 171 bp, Oryza sativa nipponbare
gtccgcccacgcgtccgcccacgcgtccgagtaagtgaggccttaggcgtcaatgcattggtagcaaagaggctacaaggccaaaacgaccaaagaggagagatcatacgggtaaagaatggccttaaactgttgagacctgcttttgcacaacaacaggaacaagttttt

SEQ ID NO: 406330 - DNA, 325 bp, Oryza sativa nipponbare
ccggggccatcccagccgtccggacactgcagttagcaggatcatataggtttacgagttccctagagtgtgagagcgtacatctttggggagtggttcccttagcaagcgaagatgctatcagccttatgtcggggctttgctcatgggacccacgaagaaggccaacagcagtggaggttttgcagcatcccttctttcagcgatgctgctatgttcctccttcactttgcttcaaatccagcggatatgcatcaacgccaccatcatcgggtggctaaacgagctgtggatcaaaccaacattaggagatacttcatgggga

SEQ ID NO: 406331 - DNA, 508 bp, Oryza sativa nipponbare
  unsure (1)..(508): unsure at all n locations
gcaagtacaaatagctatggcgagttccgttttctctcggttttctatatacttttgtgttcttctattatgccatggttctatggcccagctatttaatcccagcacaaacccatggcatagtcctcggcaaggaagttttagggagtgtagatttgatagactacaagcatttgaaccacttcggaaagtgaggtcagaagctggggtgactgagtacttcgatgagaagaatgaattattccagtgcacgggtacttttgtgatccgacgtgtcattcagcctcaaggccttttggtacctcgatacacaaatattcctggcgtggtctacatcatccaagggagaggttctatgggtttaaccttccccggttgccctgcgacttaccagcnacattttccacaattttcatcttaaggccaaagtnaaagccaaaagtttaaagatgagcaccaaaagattcatcaatttaggcaggggacatttgttgccttccaactggtg

SEQ ID NO: 406332 - DNA, 509 bp, Oryza sativa nipponbare
cccacgcgtccgcccacgcgtccgcccacgcgtccgcccacgcgtccgggagctgctaaagccatgtatccagcagcaggttatgcagttccgcaagtccaaccagttctaccagatagtgatccgacaaacaccactatatttataggtaacttggatcagaatgtgacagaagatgaactcaggcagatctgtgtccaatttggggagcttatatatgtaaaaattccagccaataaagcttgtggatttgtacaatatgcatctcgggcatcagctgaagaggcagtacaacgtcttcatggcacaacgatcggccaacaagtagtcaggctttcatggggcaggagtcctgcgagcaagcaggatcaatcagctgtctggagtcaacaagctgatcctaatcaatgggcaagtgcttattatggctatggatatgatgcatatggatatgcccaggacccatcatatgcatacaattcttatgcaggatatacccagtaccccca

SEQ ID NO: 406333 - DNA, 485 bp, Oryza sativa nipponbare
gccaccaagtggctctagtcgtctgcctaccgagggaaagagcttcagcaatggcccttctcgtcggttatcactcggcggagctgataatatgtctaaattgtctccaaatggtttattagcaaggagatctccatcttttcattcaagatcctctctttcttctagcagcagcttggtcctaaagcatgctaaaggcacttcaaagtcgtttgatggtggtacgaggtcattagacaggagcaagattaatgggaatggagctcatttacttaaccgttctactgatgctgtcagagattgtgaaactaatgatagttggaaaggaaatgcagatgagggaaccattgaaaatacaaatagcaacactgacgagagtaataaagaaactgcaaataacaagtcagctgagatggtatctggttttctttatgatatgttgcagaaggaggtaatttctttgagaaaggcatgccatgaaaaag

SEQ ID NO: 406334 - DNA, 288 bp, Oryza sativa nipponbare
ttctagatcgcgagcggccgctcgcgatctagctatgtctctgatgatggtgctgcaatgctgacatttgaagcattatccgaaacatctgaatttgcaaagaaatgggttcctttctgcaaaaagtacagtattgaaccacgtgctccagagtggtacttccaacagaagatagggggggggaaggataaggtggcaccatactttgttagggagaggagagcaatgaagagagagtctgaggaattcaaggtgagaatcaatgcatcggttgccaaagctcataaa

SEQ ID NO: 406335 - DNA, 312 bp, Oryza sativa nipponbare
gtactatgtcaagacatggttcaaccagcccgcccgcaagcagaggcgccgcattgctcgccagaagaaggctgtgaagatcttcccccgcccaacatctggccctcttcgacccattgttcagtgccaaactttgaagtacaacatgaagtcgagggctgggagaggctttaccctggaggagctgaaggctgcgggcatccccaagaagtatgctccaaccattggaatttccgtggatcaccgccgcaagaaccgatcacttgagggactccaggctaatgtccagaggctcaagacatacaaggccaa

SEQ ID NO: 406336 - DNA, 295 bp, Oryza sativa nipponbare
  unsure (1)..(295): unsure at all n locations
aaatatgaaagacaactttttttctatttatatcacccaaagtttcacatgtcacatatgatgatatctgagcttatttttaacttccgaaccactatactggtaaaactcattacaagacaccgccaagggtggggggggggctggntgcaccatagtacctagggtagataccatatctagatggcacgttaaaagccaacagagcttgagcttgagccagattccgatcaaagtanagatcaccaaactgcgggagttggagctgctgggctatggcntgaacaagggtaat

SEQ ID NO: 406337 - DNA, 266 bp, Oryza sativa nipponbare
cgtagtggaaaaaataatgatcacgcaacacacgatattactggcaaacagtatcaattccaggatctagtaatttaagtccacagttaaagctagtatcacaattcgcatcgacaacacaccattaatcaacacaaggaaaaaaaagagtaactagagcatcaaatcacctaaaataaacatcttacgacccaaatcgaccggtgcaataccggactagggaataataacccaagggggcccattcctaatcattatttaacaag

SEQ ID NO: 406338 - DNA, 361 bp, Oryza sativa nipponbare
  unsure (1)..(361): unsure at all n locations
gtagaatcctacaaaaatgaagatcattttcgtatttgctctccttgctattgttgcatgcaacgcttctgcacggtttgatgctcttagtcaaagttatagacaatatcaactacaatcgcatctcctgctacagcaacaagtgctcagcccatgcagtgagttcgtaaggcaacagcatagcatagtggcaacccccttctggcaaccagctacgtttcaattgataaacaaccaagtcatgcagcaacagtgttgccaacagctcaggctggtagcgcaacaatctcactaccaggccattantagcgttcaggcgattgtgcagcaactacaggtgcagnaggtcggtgttgnctac

SEQ ID NO: 406339 - DNA, 546 bp, Oryza sativa nipponbare
  unsure (1)..(546): unsure at all n locations
cgtccgnactcccggtcgcccacgcgtncgccacgcgtcgccacgcgtccgccacgcgtccgcacaaaaacatttctctcgcgagtcgcgagttgcaccgatcgaattaagggtcgaagatgtttgggttcgggcaccaccacaaccaggcaccggcggcgccgtcggacccgaaccagatcttcaagatcttctgccgcgccaacgagaactactgcctcaccgtccgcgacagcgccgtcgtcctcgcccccgtcaaccccaaggacgagcaccagcactggttcaaggacatgaggttcagcaccaaggtgaaggacggggagggcatgccggcgttcgccctcgtcaacaaggccaccggactcgccgtcaagcactccctcggccagtcccaccccgtgaagcttgtgccgttcaacccggagtacgaggacgcgtctgtgctgtggacggagagcaaggacgtnngcaagggctttcgctgcattcgcatggtcaacaacacccgacttaacttggacgccttccacggcgacaaggacc

SEQ ID NO: 406340 - DNA, 410 bp, Oryza sativa nipponbare
gtgttttcgagtgtgacatgttgggggtgggaactgaggctgtggcaaaaaagttggcagagcttaccgccaagggtgtcacaactatcattggaggtggaaactctgttgccgttgttgaaaaggtggaagtggctgacgttatgacccacatttacacgggaggtggcgccatcgtgggggtggtaaaaagaaaagatcttccaagagttggtgcattggatgaagccatccctgtggctgtatgaaggaagctatcattttggatcatcatcatcagcagctgccattgaatacttgctacattcttgcttgctcctcgacagccgttctagaatgaagagatcagtgtgtagatgcagctactggaaattgtttgaacaaccaaacatattatgattgcttaccca

SEQ ID NO: 406341 - DNA, 232 bp, Oryza sativa nipponbare
catgccagtggatgtgatcgctaatgcttaccgcatatcgagggagcaagcacgaagccttaagataataggggagaagagctcggtgccttcactcctagatatcaacaacagacctacctaggcttctcaaatgagtcggagaacgaggcctcagagtgatgtactaatgaaatagtataggtgtatcaaaaaaaaataaaatgccacaagtatgtgaaactttgtggcg

SEQ ID NO: 406342 - DNA, 202 bp, Oryza sativa nipponbare
cggacgcgtgggcggacgcgtgggcggacgcgtgggcggacgcgtgggcggccgagctgcggctagttgtgtgcgtgagagagagagagcgagctgcccatatatatagtgtcaaagccggccggcgacgatgccttccggctccgactccggctcctacgacccgctgctcgcactgggggacggcatggcggacggggat

SEQ ID NO: 406343 - DNA, 353 bp, Oryza sativa nipponbare
ccacgcgtccgcggacgcgtgggggaggttttagggagtgtagatttgatagactacaagcatttgaaccatttatgagagtgaggtcagaagcctgggttacagagtacttttatgaaatgactgaacaattgcagagcacatgttcatataggcatacggcctgtaatggagcctagtggccatatacagtttcacttctcttgtgctgcactgacaacataaatgattatggtgagtgacttggcccaggtgctgtggatgattggtgtacggccagttgctgacaccttcggccgtgtcaaccgtgtggagcctgtcagccttgatgagcttggacgttcaatgattga

SEQ ID NO: 406344 - DNA, 414 bp, Oryza sativa nipponbare
  unsure (1)..(414): unsure at all n locations
ggcatccataaatcgccccatagttttcttcacagtttgcttgttcctcttgtgcaatggctctctagcccagcagctattaggccagagcactagtcaatggcagagttctcgtcgtggaagtccaagagaatgcaggttcgataggttgcaagcatttgagccaattcggagtgtgaggtctcaagctggcacaactgagttcttcgatgtctctaatgagcaatttcaatgtaccggagtatctgttgtccgtcgagttattgaacctagaggccttctactaccccattacactaatggtgcatctctagtatatatcatccaagggagaggtataacagggccaactntcccaggctgtcctgagtcctaccaacaacagttccaacaatcanggccagcccaattgac

SEQ ID NO: 406345 - DNA, 275 bp, Oryza sativa nipponbare
cgcccagcgtccgggacacctgggcaaccggaactggtgcacgctgcagagcatcctgctcatctgggcgtgccaggtcgtgctcatgggcttcgtccagagctaccgccttggcgctgggcgcctgggcctaggcgctcaccaggctgatcaccgccgaccaggactactggcatggctggacgatgttggagatcctgcgatatatgccggagcacaactggtcctgatacgaggaggccctcaaagtctacctggttctagccaagatgatg

SEQ ID NO: 406346 - DNA, 416 bp, Oryza sativa nipponbare
cgaggctcttggcgtaagcagccaagtggcaaggcagctccaatgtcaaaatgaccaaagaggagaaattgtccgtgtcgaacacgggctcagtttgctgcagccatatgcatcattgcaggagcaggaacaaggacaagtgcaatcaagagagcgttatcaagaaggacaatatcagcaaagtcaatatggaagtggctgctctaacggtttggatgagaccttttgcaccctgagggtaaggcaaaacatcgataatcctaaccgtgctgatacatacaatccaagagctggaagggttacaaatctcaacacccagaatttccccattcttagtcttgtacagatgagtgcaggcaaagtaaatctataccagaatgcacttctttcaccattttggaacattaacgcttaca

SEQ ID NO: 406347 - DNA, 476 bp, Oryza sativa nipponbare
  unsure (1)..(476): unsure at all n locations
gttctagatcgcgggcggccgctcgcgatctagaactagcccacgcgtccgcttggttccattgcctgggtccaacaatgaatcttggtgccaaggcctagatggtttggcttcaaggtgtgctgagtactacaagcagggggcacgcttcgctaagtggcggactgttgttagcatcccttgtggtccctcagcattagcagtcaaggaagcggcatggggacttgctcgatatgctgccattgctcaggacaatggcttagtgccaattgttgagccagagatccttcttgatggtgaccatgcgatcgagagaactcttgaagtggcagagaaagtgtggtctgaggtattcttctacctggcccaaaacaatgttctttttgagggtatcctgctgaaacccancatggtgacccctggagctgaacacaaaccnaaaggcactccaaaanccattgaaancacacccttac

SEQ ID NO: 406348 - DNA, 181 bp, Oryza sativa nipponbare
ggtatggaatacatgaatgatggattaatatggcaatgaccttatcttgttccaatatcaatttgcagttccgtcgaactggcatctaggagcttaggagcaaacctagctgggggggggtatacattcaaaagcaaatttggcagttctagaaccaactgaaccccgctttttaaatctt

SEQ ID NO: 406349 - DNA, 194 bp, Oryza sativa nipponbare
ctgccggagcagctccgcaagctgcgcctcctccacgagctggacgtgagcaacagccgcctgagcggcgggtgcccgcatcacatcctgtggctgcccaacatcaagtacgtcgacctccggttcaacagcctctgcggcgccgcccccgccgcgctgttcgacaagccgctcgacgccatcttgctgagcgg

SEQ ID NO: 406350 - DNA, 503 bp, Oryza sativa nipponbare
cccacgcgtccggcccaagtttccaataacatcctcaaatagctatggcgaccatagctttctctcggttatctatctacttttgtgttcttctcctatgccatggctctatggcccagctatttggtccgaacgtaaatccatggcacaaccctcggcaaggaggttttagggagtgtagatttgatagactacaagcatttgaaccacttcggagagtgaggtcagaagccggggttacagagtactttgatgagaagaatgaacaattccagtgcacaggtacatttgtcatccgacgtgtcattgagcctcaaggccttctggtacctcgatacagcaatactcctggcatggtctacatcatccaagggagaggttctatgggattaactttccccggctgcccagcaacctaccaacaacaattccaacaattcttgcctgaaggccaaagccagagccaaaaatttagggatgagcaccaaaagatccaccaattt

SEQ ID NO: 406351 - DNA, 388 bp, Oryza sativa nipponbare
gcaaacagaattagttgaatccttactttttgagatgcaagatttaggtataagaccgagtgctggatcgcacaattgtctcataagtgcctatggtcgccagaagaaaatgagtggaaaggctgaatatgctttcttgaggatgaaaagggaaggtattaagccattatcttcttcatataatgcactactctttgcatatgcagttaatggattgcatgaaaaagctcataccatatatgtggatatgaaaagagaaggacttaaacctaccttagaaacgtatacagctctactcaacactcttaggagagcaggtgacacacagaagctaatggagacatggaaaactatgattgatgaaaaggctggcggaacacgagtcata

SEQ ID NO: 406352 - DNA, 312 bp, Oryza sativa nipponbare
  unsure (1)..(312): unsure at all n locations
cattgagggtggttggcttctcctccccctctttaccttttcctcctcggttcggttccgtggttcgtctagggtttagtgggttgagatggcggcgccggatgtcgagtaccgctgcttcgtcggcggcctcgcctgggccaccgacgaccgctccctcgaggccgccttctccacctgcggcgagatcctcgactccaagatcatcaacgacagggagacggggaggtcacgtgggtttggcttcgtcaccttctcctccnagcagtcgatgcgcgacgccatggacggcatgaacggnnnggagctcga

SEQ ID NO: 406353 - DNA, 312 bp, Oryza sativa nipponbare
ccccgcgtccgatcaatggctagcaaggtcgtcttcttcgcggcggcgctcatggcggccatggtggccatctccggcgcgcagctgagcgagtcggagatgaggttcagggacaggcagtgccagcgggaggtgcaggacagcccgctggacgcgtgccggcaggtgctcgaccggcagctcaccggccgggagaggttccagccgatgttccgccgcccgggcgcgctcggcctgcggatgcagtgctgccagcagctgcaggacgtgagccgcgagtgccgctgcgccgccatccgccggatggtgagg

SEQ ID NO: 406354 - DNA, 487 bp, Oryza sativa nipponbare
  unsure (1)..(487): unsure at all n locations
cggacgcgtgggcggacgcgtggggccagttgttgccatatatgtcactgatctcaacaacggtgctaatcaacttgaccctaggcaaagggatttcttgttagctggaaataagagaaaccctcaagcatacaggcgtgaggttgaggagcggtcacagaacatatttagtggctttagcactgaactacttagcgaggctcttggcgtaagcagccaagtggcaaggcagctccaatgtcaaaatgaccaaagaggagaaattgtccgtgtcgaacacgggctcagtttgctgcagccatatgcatcattgcaggagcaggaacaaggacaagtgcaatcaagagagcgttatcaagaaggacaatatcagcaaagtcaatatggaagtggctgctctaacggtttggatgagaccttntgcaccctgagggtaaggcaaaacatcgattatcctaaccgggctgatacatacaatccaagagct

SEQ ID NO: 406355 - DNA, 361 bp, Oryza sativa nipponbare
acgccgctggggatttacctgatgcggatagggctcctgctcctgagcactcatggcggtggctacggacagagcatgctgtaccggggcttcaacacgggcagggggctcggggccagaagctacgcgctcactaagctgttcatggtcaaccaagactactggcatggatggacgatctgagagatactgcaatatatgggggaacacaactggtacagatactgaggaggctctcatagccaacctggctctagcgaagatgatcatcagacggcgtcttctactccgttggtcagtggattgaacactgctaccaatgcaagccaatctttgatgtacaccgcactgggatgttgcg

SEQ ID NO: 406356 - DNA, 335 bp, Oryza sativa nipponbare
aaataaaaaaaaaaacggaactggttgagcaaaaaccacaaaatgttcaggccctaaaaaacgggaataccgatacatccagcataacaaaaatggggaaaagcacaaagtcagataaagctatagaaaactagggctccaggaaaagggggccaaaagacaaccatggggcttaatcaacctcctccattttgctttcgccggggtggtcctccaagggggggatgtcggggtaagcctaaaaaaactcgtccttgtcgatgctcaggccgagcttgaacatccgggggatcctggggccaaaggggttggggtcccaaaggctgaaaccggag

SEQ ID NO: 406357 - DNA, 437 bp, Oryza sativa nipponbare
  unsure (1)..(437): unsure at all n locations
atatcccgctgtaccatgggtggatagtagatccccaggatactgacactgctacttccattggatcaaagtcttacaatgctcttgcatctgggcttgctgaatttaagtcgggggaatcaacaaaagagaatagacatgtacaggaggaagaaactgttgattttgctgctgcaactactgcagcactaggggttccttctcctagtgtttctcgaggtatatcatttgatgaaaatacactcactgacccagttgagttgcacataagacgaggcgatcgtgaggaagaagaggaactaaggagagtccttagtctatcaaaagctgaaaatgctaatgcctgtgatggatctggttcctttgacacttnacagtctaattcatcctnaaatatggaggagacaggacacactgataagtttccattagaggca

SEQ ID NO: 406358 - DNA, 488 bp, Oryza sativa nipponbare
  unsure (1)..(488): unsure at all n locations
caccaaacggacagacagtgttcaacggacagcttcgtcgtggacagctacttattgtaccacaacactatgtaggtgtaaagaaggcgcaaagagaaggatgtgcttacattgcattcaagacaaaccctaactctatggtaagccacattgcaggaaagagttccatcttccgtgctctcccaactgatgttctagcaaatgcatatcgcatctcaagagaagaggctcagaggctcaagcataacagaggagatgagttcggtgcattcactcccctccaatacaagagctaccaagacgtttataatgtggcggaatcctcttaagttggcaatgcggataaagaataactaaataaataaataaataaattgcaagcaattgcgttgctgctatgtactgtaaaagtttcttataatatcagttctgaatgctaaggacatccctcaagatgggctttctaaaaaaaaaaaaaanaaaagggc

SEQ ID NO: 406359 - DNA, 259 bp, Oryza sativa nipponbare
  unsure (1)..(259): unsure at all n locations
gtccgcccacgcgtccgcccacgcgtccgaacaaacaaaagaggaaaaaaaacatatacatcttctagtgagttgtctgattgatcatcaatgggctagcaaggtngcgtcttcttcgcggcggcgctcatnnggcggccatggtggccatctcnncggcgcgcagctgagcgagtcnggagatgaggttcgggggggggcagtgccancgggaggggcaggacagcccgntggacgcgtgccggnnggggctcgaccg

SEQ ID NO: 406360 - DNA, 101 bp, Oryza sativa nipponbare
  unsure (1)..(101): unsure at all n locations
cccacgcgtccgcccacgcgtccgnggacgcgtgggcggacgcgtgggttcaagcattattcagcaaaatagaaagatctaatgttccnggaagaatgaaa

SEQ ID NO: 406361 - DNA, 391 bp, Oryza sativa nipponbare
  unsure (1)..(391): unsure at all n locations
ncngtccgcacttgatgtgggaacaaacaatgaggatttactgaaggacgagttctacattggattaagacaaaaacgagccactggccaggaatatagtgatcttctggatgaattcatggctgctattaagcagaactatggacagaaggtgctagtccagtttgaagacttcgcaaattacaatgcgttgacccttcttgagaagtaccgtgcaaacaatcttgtcttcaatgatgatattcagggaacggctgctgtagtgcttgcaggcctcattgctgctcagaaatttgtcagtgggactttagctgatcacacattcttattctttggcgcaggagaggctggtacaggcattgctgaactagtggctctcgagatatcaaat

SEQ ID NO: 406362 - DNA, 245 bp, Oryza sativa nipponbare
atgattattccagtgcacgggtacttttgtgatccgacgtgtcattcagcctcaaggccttttggtacctcgatacacaaatattcctggcgtggtctacatcatccaagggagaggttctatgggtttaaccttccccggttgccctgcgacttaccagcaacaattccaacaattgggggggggaaggccaaagtcagaagccaaagtttagagatgagcaccaaaaggattcatcaatttag

SEQ ID NO: 406363 - DNA, 175 bp, Oryza sativa nipponbare
cccacgcgtccgcccacgcgtccgccgcacgcgggcgcccacgcgtccgcacggacacggccacaccacccaccaactgagagctgagcaggcgagcgagcggacatggcagcatcgctccaagccgcggccaccctgatgcagccggccaagctcggcggccgggcctcctccg

SEQ ID NO: 406364 - DNA, 631 bp, Oryza sativa nipponbare
cccacgcgtccgcttcttcatcgtacagttacacatcaatcaaaagtatgaacgagcccaagcttgggctatgggaaactttggcaagaaaagccaagggaattcttgatgaggatggcgtggcacataagtctgacgagtacacaaaagagaagacccctcgcaagtttgattcatccactggagctcaggaatctcaatctcgctggtcattcgaaaaccacagcaagacaggggatactggatcccggacaaggtcggaagctcttgctgcttctgtcaaccaacttggtggaagaatcagagatgccttggaagaaggactcacaattgtggacaataagacatccaatatcattgaggagacaaagaagatacaaattagaaggaagcaagccaattcgaattcttatgtgccgaacctagcatttgatacattaagacctcctaatctttcaaatgatcaagctgaaactgcagcccaggaaacccaattaaaagcttctcgcgatgtaaggtgccacatactgggtctagtagtggaagtttaaagtacagaaactaggacctttttatatggcaaaacctttgctatgccttgacttaaaaatattaatacttattttccttt

SEQ ID NO: 406365 - DNA, 559 bp, Oryza sativa nipponbare
gggccgactttcccaggctgtcctgagacctaccagcagcagttccaacaatcagggcaagcccaattgaccgaaagtcaaagccaaagccataagttcaaggatgaacatcaaaagattcaccgtttcagacaaggagatgttatcgcgttgcctgctggtgtagctcattggtgctacaatgatggtgaagtgccggttgttgccatatatgtcactgatatcaacaacggtgctaatcaacttgaccctcgacagagggatttcttgttagctggaaataagagaaaccctcaagcatacaggcgtgaagttgaggagtggtcacaaaacatatttagtggctttagcactgaactgcttagcgaggcttttggcataagcaaccaagttgcaaggcagctccagtgtcaaaatgaccaaagaggagaaattgtccgcgttgaacgcgggctcagtttgctgcaaccatatgcatcattgcaagagcaggaacaaggacaaatgcaatcaagagagcattatcaagaaagaggatatcagcaaagtcatattggga

SEQ ID NO: 406366 - DNA, 422 bp, Oryza sativa nipponbare
cccacgcgtccgcccacgcgtccgctctcatacagattcagactaaagattttctgcaaacaaaaagccatggcttccaacaaggtagtgttctcggcgttgctcctcatcatcgtctccgtgctcgccgcgacggcgaccatggcggaccaccacaaagaccaggtggtgtacagcctcggcgagcgttgtcagccaggaatgggctacccgatgtactcgctgccacgctgccgggcggtggtgaagcgccagtgcgtgggccacggcgcacccggcggcgccgtggacgagcaactccggcaggactgctgccggcagctcgccgcgggcgacgaccgctggtgcaggtgctcggcgctcaaccacatgggtggaggcctctacagggagcccggcgccaccgatgttgggcaccccat

SEQ ID NO: 406367 - DNA, 371 bp, Oryza sativa nipponbare
cgcctgtccgcagatacctagcaggatgccccgccgccgccgccgccgcccgccgtcgtcatcctccctctcgccctttcaggtccccagcccgccgcgccgcggatcgagtcgccgtgtgaagaaggccagcgtcaccatggcggacgaggagcaggtggagaggaaggaggaggtctccgagcttactccttttgacccaaccaagaaaaagaagaagaagaaggttgtgatccaagatccatctgatgaggtggataagttggcagagaaaactgagagcttgacagtcgctgagactggtgagccaagttttacaggcatgaaaaagaaaaagaagaagcatgtggagcatgatacatctcttactg

SEQ ID NO: 406368 - DNA, 124 bp, Oryza sativa nipponbare
gagtgtcatccatgggagctactccattggactcgggggcaaggagatcgctctgtggttccctcaaggtttagctgagtggtggagcatccttcaccctttggatccatgagtcttagagctt

SEQ ID NO: 406369 - DNA, 355 bp, Oryza sativa nipponbare
cggacgcgtgggttcgaggaggaattttccttcctgtcatcatcaaagcagattgttagcgacatgaacgagaaagataaggttattgtctttgaacgtggagatttggtttttgttttcaattttcatcccaacaaaacttacaagggttacaaagtcggatgtgacttgcccgggaagtacagagtagctctggactctgatgctttggtctttggtggccatggaagagttggccatgatgtggatcacttcacgtctcccgagggaatgccaggagtaccagaaacaaatttcaacaaccgccctaactcattcaaagtcctttccccgccccgtacctgtgtggcttact

SEQ ID NO: 406370 - DNA, 217 bp, Oryza sativa nipponbare
  unsure (1)..(217): unsure at all n locations
ggtgcatcagctcgcaagttaataggagctactaatccccttcaagctgaaccagggaccatacggggcgatcttgcagttcaaacaggaaggaatgttgtccatggaagtgacagtcctgataacggcaagcgtgaaatcgctctatggttcanagaaggcgaactctgcgaatgggaatctgttctgacaccatggcttgtagagtaatgctccc

SEQ ID NO: 406371 - DNA, 314 bp, Oryza sativa nipponbare
cgccgttccggcagcgccgtggacgcagtggactctcgatttcacccagcacaagcgagcagggcgacaggtacccgtgaattgcacacagggttgatgaagcccttggctttatgtctgctgctgggctaacagtggaccacccgttgatgacaagtactgatttctggacctcacatgagtgccttctcctaccctatgaacaatctctgacccgtcaggactccacaactggtcatttctacgactgctctgcccacatgctatgggtgggcgaacgcactcgccagctcgatggtgctcatgttgagttc

SEQ ID NO: 406372 - DNA, 505 bp, Oryza sativa nipponbare
ccacttcagagcccacgtggatttaggggagaccaagatagtcgtcatcaatgtcgttttgagcacctcaccgcccttgaggcaacacaccagcagagatctgaagctggattcactgagtactacaacattgaggcaagaaatgagttccgttgtgccggagtgagcgtgaggcgcttagtcgtcgagagcaagggcttagttttaccaatgtatgctaatgctcacaagcttgtctacatcgtccaaggtcggggagtgtttgggatggcactgcctggttgtccagagacgttccagtcagttaggtctccctttgagcaagaggtggcaacagctggtgaggctcaatcatcaatccaaaaaatgagagacgagcaccagcaacttcaccaattccaccaaggtgatgtaatcgcagtgccagctggagtagcccactggctatataacaatggtgattctcctgtgggtgcttcacctgctcgacaccacaacaatgcca

SEQ ID NO: 406373 - DNA, 518 bp, Oryza sativa nipponbare
  unsure (1)..(518): unsure at all n locations
gcggcggctgcgcggacatggcgggccgcggccgtgaggcggcggcagcggctctcggccgcccctccctcccagatatggagtgacgacgacgggccgtggccgtgcggcggcggcgcggacgacggcgggccgcggccgtgcaacggcggcggacgacggctgggcggcggttccaggagggtggatcctcaatgggcagaagcgatggccggccaacggcagttttgcggatgtgttcgtcgttcttgcctgcaataccagtaataatcagattaacgggttcattgtgaatggtgggtccccagggcttaagatcagcaagatcgagaacaagacgtcgctgagggttgtccagaactgtgacattctgctggaggacgtgttcgtncctgacgatgaccgtcttcccggcgccaactctttccaagacctaatgaaggccctctctttctcttgcgtcatcgttgcctggatcagcattcggcttgcagcaggggtttatgatgcatgcttac

SEQ ID NO: 406374 - DNA, 433 bp, Oryza sativa nipponbare
atccaaggctatggtttaacagaaacactgggacctagcacggtctgttaccctgatgacatgtccctggttggaactgttggcgtggctgctacctatacggaattgcgattggaagaagtgcctgagatgggttacaatccacttggtactccttcccgtggtgaaatatgcgtccgaggaaacttcttcaccggatactataaaaatcctgagctcacgaatgaggtcatggctgatggatggtttcacacaggtgacattggagagatgaactcagatggaatcctgaaggtaattgaccgaaagaaaaatatattcaagttgtcacaaggggagtatgttgcagttgaatacctggagaaagatatgttttcccttcaaccggtgaagatgtctgggtatatggggacagcttcagaacaatggtagg

SEQ ID NO: 406375 - DNA, 398 bp, Oryza sativa nipponbare
  unsure (1)..(398): unsure at all n locations
gccgtccgcccacgccgtccgggaaagaggcaaatgcgcaatttctttggttctctcatggtttctcaaggtgttccgatgttctacatgggcgatgaatatggccatacaaaaggaggcaacaacaacacatactgccatgaccattatgtcaattatttccgctgggacaagaaagaagaatcctctgacttgcaacggttctgctctcttatgaccaaattccgcaaacaatgcgagtcccttggcctcgcagacttcccaacagctcaacggttgcattggcatggccatcagcctgggaaacctgactggtctgagacaagccgtttcgtggccttctccacgaaagatganacgaaaggcgagatctacgtggccttcaacgccagccattt

SEQ ID NO: 406376 - DNA, 269 bp, Oryza sativa nipponbare
cccggtcgcccagcgtccgcccgcgtccggtgagcagctcggcatcggcgcctggtcgtggggggacaccacctactggaacgactccgagtgggacgacaggagactgcaggaggctaaagcagcatttgacacaagcatagataatgggatgaccttatttgatacagcagaagtttatggtacagcgctgatgggagcagtaaattctgaaagtttactcggaggtttcatcaaggaaaggcaggagaaagaacagattgatgttg

SEQ ID NO: 406377 - DNA, 309 bp, Oryza sativa nipponbare
aaaaggcctgtgtcaaagagagggtagtagcaccttgctctcctttgccttcagagaaaccggaagcaatggcgtctgctactctcctcaagtcatctttccttcccaagaagtctgaatggggtgccacccgccaggctgccgcccccaagccggtgactgtctccatggttgtccgcgctggtgcctacgacgatgagcttgtcaagaccgcgaaaaccattgcatcaccaggaaggggtatccttgccatggatgagtcgaacgcgacctgcggtaagaggcttgcgtcaattggccttgagaaca

SEQ ID NO: 406378 - DNA, 434 bp, Oryza sativa nipponbare
  unsure (1)..(434): unsure at all n locations
cgccgtccgtccaaaacatcctcaaaagctatggcgaccatagctttctctcggttatctatctactttttgtgttcttctcctatgccatggctctatggcccagctatttggtccgaacgtaaatccatggcacaaccctcggcaaggaggttttagggagtgtagatttgatagactacaagcatttgaaccacttcggagagtgaggtcagaagccggggttacagagtactttgatgagaagaatgaacaattccagtgcacaggtacatttgtcatccgacgtgtcattgagcctcaaggccttctggtacctcgatacagcaatactcctggcatggtctacatcatccaagggagaggttctatgggattaactntccccggctgcccagcaacctaccaacaacaattccaacaattcttgcctg

SEQ ID NO: 406379 - DNA, 430 bp, Oryza sativa nipponbare
  unsure (1)..(430): unsure at all n locations
cacccatcgccgacgacccacgcacgcagtccaccaacgcgccgccgccgccgaatccgcttcgctccctccgccgcgccgcgcgccacctccgtcgacgctggcccgacgcgcgcggttcgtgaaggaggaggaggaggaggagcttctgccgggtcggaccgtcggtttctctcgttgacctgcaggagggtgcgcagggtttcttcttcgacatgtcttgggctgcaatcgagaatgatcctggcatttttactgaactgttgcaacagatgcaactgaagggtcttcaagttgatgaactctattcactctttttggatgccctcaatgatcttcagccagtttatgggctcattgtgctgnacaaatggcaacctttaaaaaaagatgagcgtcctatcaaggacctaattncaaaccttttctt

SEQ ID NO: 406380 - DNA, 396 bp, Oryza sativa nipponbare
  unsure (1)..(396): unsure at all n locations
cccacgccgtccggccgccgatcgatcaatcgccgccgccgtctcctcgtgtaaccctagcttagtggattagtttaagtgtttgccggagattatggggtcggtggcggcggaggaggtggtggtgttccggtcgaagctgccggacatcgagatcgacaacagcatgacgctgcaggagtactgcttcgcgaggatggcggaggtcggggcgcggccgtgcctgatcgacgggcagaccggggagtcgtacacgtacgcggaggtggagtccgcgtcgcggcgcgccgcggcggggctccggcggatgggggtgggcaagggcgacgtggtgatgagcctcctncgcaactgccccgagttcgccttctccttcctcggcgcggccaggctggg

SEQ ID NO: 406381 - DNA, 479 bp, Oryza sativa nipponbare
cggacgcgtgggtgcccaagtcatgaagactgtaagacaaaaggcagatcttctatccgactctgagaggattaaatataccatcgacacctttacaaagggcatccctgatgcacggacttacttgaatactcttcaggagatcaggataaagagtggccttatagatgatatgggtgctgaggctatgatgatggaagcccttgagaaagttgagaaggagattaagaagccacttctgaggagtgacaagaagaatatgggtctcctcttggcagagtttgagaagataaacaaaaagcttggaatccgcaaggaggatcttcccaagaatgaggaagagcttgaattggaaattgccaaaagtgagctgacggagcttaagaaggaatgtgttgaagcaatggagggtcaactaaagagggaggagttcaaagaccaagagatgcctgatgtcaagaagttggacatcaaaaact

SEQ ID NO: 406382 - DNA, 360 bp, Oryza sativa nipponbare
cccacgccgtccgaccaaatcgaacctaccaactcattcccgatcgatcgatcttaaaaaaaaactaatcgtaacttttctctctctctcctatctttagaactagcaggtagcaactgcttcgagtgtagtctggtgaacgtacgatctttcgttcgttcatcaagatgaccgtgatcgacggcgccgtcgctgccgacgccggcggcgcagccgcggcggtggtgcagccggggaacgggcagaccgtgtgcgtgaccggcgcggccgggtccatcgcgtcgtggctcgtgaagctgctgcttgagaagggctacactggcaagggcaccggcaggaaccccaatgacccgaagaacg

SEQ ID NO: 406383 - DNA, 361 bp, Oryza sativa nipponbare
gcttcggaacttggaacattcgtcttgttggtgagctacttaagcaaaaaatggtccctgagaagatagtacatcacattgttcaggagctattaggttctgaaagcaacagatgccctgctgaggaaaatgtggaggccatctgtcagttcttcaacacaattggtaaacagttggatgagaatccaaagtctcgacgatttaatgacgtatacttcaaccggctgaaggatctaacaactaattctcagttggcatcacgattgaggttcatggcacgcgatgtccttgatcttcgttcaaaccaatgggtgcctcgacgtgaagagatgaaagctaagaaattcagtgaaattcatag

SEQ ID NO: 406384 - DNA, 506 bp, Oryza sativa nipponbare
  unsure (1)..(506): unsure at all n locations
caaagctgcaaccagaaaattccaccaatgcctgttcaccacccccaatgaagactaaatggtgggaaaagaacatgaaatcctgcaacatgaaaaaccattgaatcacaagacgattttgaccaagccagctcctgttggccagcgataagcctcaccgtggtgccaccttcttttcccctagttgtggagcttgcaaggccctacaccctaaggtatgtcaattggctggcatgcatccggaacctgcagtttcttatggtcaactccaatgaacaaaaggagatgtgccgcaggcctcaatgttcatgtattgccaatgttccgcttttaccagaggtgcagaaggccgtatctgtagcttcagctgtacaatttcaactatttataagatcaaagatgcattgaaaaggcatggggttcagctagagaatcttggaccagataagggcttggagaaatcagaacttcagaactctgatattgacgcttcatatanacatgga

SEQ ID NO: 406385 - DNA, 515 bp, Oryza sativa nipponbare
gggggatctgcatctccaggtcttcttgggcgtgttaggcatgcttatgactctctcccaagcagcgtgtttgaagctgaaaggccaggatatagtttttccattcaacaacggataggaacatacttttttaagggtattttatatggtacagttggattcttttgtggtcttgtgggtcaaggaattgcgaacttgataatgactgccaaaaggagtgtaaagaagtcagatgatgatgtacctgtcccacctctgctcaaaacttctgcattgtggggtgcattccttggtgtgtcttccaacacccgttatcagattattaatgggcttgagcgtgtggttgaggcttcacctgttgccaagcgtgtcccagctgtttctctggcattcactgtcggtgtgcgctttgcaaataacatttatggaggaatgcagtttgtggactgggctagaatgaccgggtgtcaatgaagggaaggcattcttattttcatgttatcattcacagcgat

SEQ ID NO: 406386 - DNA, 337 bp, Oryza sativa nipponbare
  unsure (1)..(337): unsure at all n locations
ggaaatggtgacaagatgcattgagttatctgagaatcgactaagcacagcaccaaaagaagaaaatgcaactagggctgaacctcccccatcattcttctcacgtttttcagcttcctcggtctattcgaagatacttacgttaggtgtatctgtttatgaacgagaccgtaggtatactgatgcaataagagttctaaagagactactcagtactgttgcttcggatagaaagcgaggatattgggctttgagactatctgttgattnggagcacatgaatcggtccaatgagagcctggcnatttctgaagcagggggaatngatccctgggtc

SEQ ID NO: 406387 - DNA, 266 bp, Oryza sativa nipponbare
cccacgccgtccgaaaacatggcatccataaatcgccccatagttttcttcacagtttgcttgttcctcttgtgcgatggctccctagcccagcagctattaggccagagcactagtcaatggcagagttctcgtcgtggaagtccgagaggatgtagatttgataggttgcaagcatttgagccaattcggagtgtgaggtctcaagctggcacaactgagttcttcgatgtctctaatgagttgtttcaatgtaccggagtatc

SEQ ID NO: 406388 - DNA, 386 bp, Oryza sativa nipponbare
cccacgctgtccgcccacgctgtccgcccaccgtgtccgcccacgcgtccgggaatgtcatccatgggaagccgcctccgtggacaacgggaagaagggatcctctctggttccctgaaggtttagctgagtggaggagccaaccttcacccttggatctatgagtcttaaagcttcgcgcctataatcgatcacctcttggtggctagttctcgttaaatatttgagttttgtttcagagttgtcatctggctgcctcctgagtcaccattataattctgctgtgatacaatcacagttatatgttgcctgaacttatatggctttttaagtttctggattggatgtgatgggaaaataatactagcagtcagttttttgcttat

SEQ ID NO: 406389 - DNA, 483 bp, Oryza sativa nipponbare
cccacgcgtccgatcccagccgccgccgccgcagcctcctcctctcgccatctcccgtcctctccttcaagtcagctacctgcttaatcaaccatgggtaaggagaagacgcacatcaacattgtggtcattggccacgtcgactctggcaagtcgaccaccacgggccatctgatctacaagcttggaggtatcgacaagcgtgtgattgagaggttcgagaaggaagccgctgagatgaacaagaggtccttcaagtacgcgtgggtgctcgacaagctcaaggccgagcgtgagagaggtatcaccatcgatattgccctgtggaagttcgagaccaccaagtactactgcacggtcatcgatgcccctggtcaccgtgacttcatcaagaacatgatcacgggtacctcccaggctgactgtgccgtgctcatcattgactccaccactggggggtttgaggctggtatctccaaggat

SEQ ID NO: 406390 - DNA, 355 bp, Oryza sativa nipponbare
agccaacaggtgcttagcccatataatgagttcgtaaggcagcagtatggcatagcggcaagccccttcttgcaatcagctgtgtttcaactgagaaacaaccaagtctggcaacagctcgcgcctggtggcgcaacaatctcactatcaggacattaacattgttcaggccatagcgcagcagctacaactccagcagttttggtgatctctactttgatcggaatctggctcaagctcaagctctgttggcttttaacgtgccatctagatatggtatctaccctaggtactatggtgcacccagtaccattaccacccttgggcgggtgtcttgtaatgagttttaacagta

SEQ ID NO: 406391 - DNA, 502 bp, Oryza sativa nipponbare
cccacgcgtccgcccacgcgtccgcggacgcgtgggtttggatgagaccttttgtaccatgagggtaaggcaaaatatcgacaacccaaacctcgcagatacatacaaccccagagcaggaaggatcacatatctaaatggccaaaagttccccattcttaatcttgtacagatgagtgccggtaaagtaaatttatatcagaacgcactcctttcacctttttggaacatcaacgctcatagtgtcgtgtatattactcaaggtcgtgcccgagttcaagtcgtcaacaacaatggaaagacagtgttcgatggagagctccgtcgtgggcagcttctaattataccacaacaccatgtagtcattaaaaaggcacaaagggaaggatgctcatatattgcattgaaaaccaaccctgactccatggttagccacatggcaggaaagaattccatcttccgcgcacttcctgacgatggtgtagcaaatgcatatcgtatc

SEQ ID NO: 406392 - DNA, 333 bp, Oryza sativa nipponbare
tgggcggacgcgtgggcggacgcgtgggtaagcaagtacaaatagctatggcgagttccgttttctctcggttttctatatacttttgtgttcttctattatgccatggttctatggcccagctatttaatcccagcacaaacccatggcatagtcctcggcaaggaagttttagggagtgtagatttgatagactacaagcatttgaaccacttcggaaagtgaggtcagaagctggggtgactgaatacttcgatgagaagaatgaattattccagtgcaccggtacttttgtgatccgacgtgtcattcaaccttaaagcctttttggac

SEQ ID NO: 406393 - DNA, 276 bp, Oryza sativa nipponbare
ccgcgacgactcgtggcggaagcaggagtgcattgaggcagtgcgagtggcgccgcccgagcacaccacacggcggcggcatggcggatccaggccggactgccgtgagcagtgcgagcaccagcaggactggtgggagaagcagcgctgcctcatggactgccgccaccggcgacaggaggtcgacgccgacgacgacaaccaccatggcagagacccctgctacaagcagtgccgccaccaccacgaccagtggaagaagcaacaatgcatgga

SEQ ID NO: 406394 - DNA, 393 bp, Oryza sativa nipponbare
  unsure (1)..(393): unsure at all n locations
cccaccgccgtccgcggacgccgtgggcgccgccgtcgcttctcctcggggcgcagccatggtggccgcaaagaagacgaagaagtccacggacaacatcaacaacaagctgcagctcgtgatgaagagcggcaagtacacgctcggctacaagaccgtcctcaggaccctcaggaactccaaggcgaagctagtgatcatttctaacaactgcccacctcttcggaagtcagaaattgagtactacgctatgttggccaaggtcaccgtccaccatttccacggaaataatgtcgatctggggacagcctgtggtaaatacttccgtgtttgctgcctcagcattattgatcctggtgactcggatatcatcaagaccacnggtgagcagta

SEQ ID NO: 406395 - DNA, 552 bp, Oryza sativa nipponbare
cccacgccgtccgcccacaccctccgcccacgcttgcggcaccagcactacgctgaagcttgagatcaccttagctgaggtatacatggcctgcacgccaccatggccctctcgtccccgcgcgctggccggcgacggctcgctcgcgacgagtgtatacggcgaggggcgcatacaccatgcccaagtcggcggcgaatcccaagccctgccgcattctgggagcccgtggtaccgcgccaaccgcgtggctctacctcagcgccgctctccagcgagccgccgagctacctgaccggcgagttccccatgcgactacgctgtgctacacctgcactgctctacgacaccttataactatccacgagaacctggagctggtcagtcatccacgccaggcggactatgcttctcgccaaccctgaccatgcaagcactctctgcccgcctcatcgatcttctatggtctgctgccaaccgacaatgacagtgctgaaagattgagaccaaatgctctaggccctgtccttgttacgttcgggcctgatcgcg

SEQ ID NO: 406396 - DNA, 330 bp, Oryza sativa nipponbare
  unsure (1)..(330): unsure at all n locations
cgtccgcccacgcgtccgagagatggagcttcgtgagctcctcagtttctacaagttccctggtgatgagattccaatcatccgtggatccgccttgtcagccttacaggggactaatgatgagattggaaagaatgccattttgaaactaatggatgcagttgacgagtatatccctgatcctgtgaggcagcttgataagtctttcttgatgccgatagaagatgttttctctatccagggccgtggaactgttgtgacagggcgtgttgagcaggggacaatcaaaactggtgaagatgntnagatnntangtttgaattttantgg

SEQ ID NO: 406397 - DNA, 399 bp, Oryza sativa nipponbare
  unsure (1)..(399): unsure at all n locations
cgccgtccgcccacgccgtccggcagcttgctatctagagtatatatcaactcaactcaaggaggagaagaagaagaagaagaagaagtgagccatgaaggatggagtagcaggaggaggaggcgagaggccatgcatgtgctacttccacccgcgggaggaggtggtgggcgtgtgctcgcantgcctccgggagcgcctcctcctcctcctcgcctccnagacctcgcctgccgctgcccacctcctcgccgaccgaccgctccaccgcaagaacagcagcatctctctccccaaggtgttcgcgctcggctcctccttcctccagcgcctcgactcctctcgccaccaccttngccccgccccccacgactccgacgccaactccgacgccgacac

SEQ ID NO: 406398 - DNA, 393 bp, Oryza sativa nipponbare
cccacgcgtccgatcgcgttgcctgctggtgtagctcattggtgctacaatgatggtgaagtgccggttgttgccatatatgtcactgatatcaacaacggtgctaatcaacttgaccctcgacagagggatttcttgttagctggaaataagagaaaccctcaagcatacaggcgtgaagttgaggagtggtcacaaaacatatttagtggctttagcactgaactgcttagcgaggcttttggcataagcaaccaagttgcaaggcagctccagtgtcaaaatgaccaaagaggagaaattgtccgcgttgaacgcgggctcagtttgctgcaaccatatgcatcattgcaagagcaggaacaaggacaaatgcaatcaagagagcattat

SEQ ID NO: 406399 - DNA, 320 bp, Oryza sativa nipponbare
gacgacattaacaaacgactagctgaattacatttacaagaaaaggaagctgaatcaaagaacaggaaattagaagaaagagagaaaaaaatagctgaaagggaagaaaaagtcagtgcaagggaaaaagttgggcttcagaagcttcttgaagatcataatgtgaagcttgaatccaaaagacgagattttgatttacaactggagaatgagaagaaatcatttgatgcaatgttggtacagaaggaagctgatttggtgcagagggaaaaagatgtcagatcttcggaggagaagctttcgaaaaaagaacaagtatt

SEQ ID NO: 406400 - DNA, 293 bp, Oryza sativa nipponbare
gtcgaccacgcgtcctgcaaaagaaaaagtagatcagaggagagctcagagctcaaagagttgggaagccatggcgggagggcagctcaacgtgctgagcacgctcgaccaggcgaagacgcaatggtaccacttcatggcgatcgtcatcgccggcatgggcttcttcaccgacgcctacgacctcttctgcatttccctcgtcaccaagctgctcggccgcatctactacaccgacgattccaaggacacccccggcgcgctcccggccaacgtgtcggccgccggcaccg

SEQ ID NO: 406401 - DNA, 554 bp, Oryza sativa nipponbare
  unsure (1)..(554): unsure at all n locations
cgggtgcgaccacgcgtccggatgttttcacaaactaagcaaaatatggcttccaaccaaggtagtgttctcggtattgctcctcgtcgttctctccgtgctcgcggcggcgatggcgaccatggcggaccaccaccaagtctacagccccggtgagcaatgtcggccaggaataagctatccgacatactcactcccgcaatgtcgaacattggtgaggcgccaatgcgttggccgtggcgcggccagcgccgcggacgagcaagtctggcaagactgctgccggcagctcgccgccgtcgacgacggctggtgcaggtgcggggcgctcgatcacatgctgtcaggcatctacagggagctcggcgccaccgaggccgggcaccccatggccgaggtgttccccggctgccggagaggggactnggagcgcgcggcggcaagcctnccggcgntctgcaacgtggacatccccaatgggcctggggggggctggtactggcttgggtatcctaagaacccaagaacccggncctangctactatagttagct

SEQ ID NO: 406402 - DNA, 540 bp, Oryza sativa nipponbare
  unsure (1)..(540): unsure at all n locations
ctgtccgcccacgctgtccgcccacgctgtccgctacaacaacatggcatccataaatcgccccatagttttcttcacagtttgcttgttcctcttgtgcaatggctctctagcccagcagctattaggccagagcactagtcaatggcagagttctcgtcgtggaagtccaagagaatgcaggttcgataggttgcaagcatttgagccaattcggagtgtgaggtctcaagctggcacaactgagttcttcgatgtctctaatgagcaatttcaatgtaccggagtatctgttgtccgtcgagttattgaacctagaggccttctactaccccattacactaatggtgcatctctagtatatatcatccaagggagaggtataacagggccaactttcccaggctgtcctgagtcctaccaacaacagttccaacaatcaggccaagcccaattgaccnaaaggcaaagccaaagtcaaaagttcaaggatgaacatcaaaagaaccaccggttcagacaaggagatgtaattgcatt

SEQ ID NO: 406403 - DNA, 355 bp, Oryza sativa nipponbare
atccgacgtgtcattcagcctcaaggcctttggtacctcgatacacaaatattcctggcgtggtctacatcatccaagggagaggttctatgggtttaaccttccccggttgccctgcgacttaccagcaacaattccaacaattttcatctcaaggccaaagtcagagccaaaagtttagagatgagcaccaaaagattcatcaatttaggcaaggagacattgttgcactcccagctggtgttgcacattggttctacaatgatggtgatgcacctattgttgccgtatatgtttatgacgtaaacaacaacgccaatcagcttgaacctaggcaaaaggagttcctattagc

SEQ ID NO: 406404 - DNA, 518 bp, Oryza sativa nipponbare
  unsure (1)..(518): unsure at all n locations
atccgacgtgtcattcagcctcaaggccttttggtacctcgatacacaaatattcctggcgtggtctacatcatccaagggagaggttctatgggtttaaccttccccggttgccctgcgacttaccagcaacaattccaacaattttcatctcaaggccaaagtcagagccaaaagtttagagatgagcaccaaaagattcatcaatttaggcaaggagacattgttgcactcccagctggtgttgcacattggttctacaatgatggtgatgcacctattgttgccgtatatgtttatgacgtaaacaacaacgccaatcagcttgaacctaggcaaaaggagttcctattagccggcaacaacaatcgggctcaacaacaacaagtatatggtagctcaattgagcaacactctgggcaaaacatattcagcggatttggtgttgagatgctaagtgaggctttaggcatcaacccaatancagcaaagaggcttcagagcccaaatgatcaaag

SEQ ID NO: 406405 - DNA, 209 bp, Oryza sativa nipponbare
  unsure (1)..(209): unsure at all n locations
ggagacggtggagggcggagcggcggcggcgaaggcgccgtactgggacccgccgccggcgccgctgctggacacgagcgagctgggtaagtggtcgctgtaccgtgccctcatcgcggagttcatggcgacgctgatcttcctctacgtgagcatcgccaccgtgatcgggtacaagaaccagagggccaccgtcnacccgtgcaccg

SEQ ID NO: 406406 - DNA, 416 bp, Oryza sativa nipponbare
  unsure (1)..(416): unsure at all n locations
gtcactcttcagttgtgcagtgcggtcagtgagcagctgtacctacagtctactagcctcacctctgctagcggacagagcagagagcagagagagagagagatcggcgctgcggcctgcggttcgagccgcggtcctggtcctggccgtggccctcgccgcggccgcggccggcgcgtcggcgcagctgtgcgacaagtactacgacgggacgtgcccggacgtgcaccggatcgtgcggcgcgtgctgaacagggcgcggcaagacgacccccgcatcttcgccagcctcacccgcctccacttccacgactgcttcgtccagggttgcgacgcgtcnatcctgctggacaacagcacgagcatcgtgtcggaaaagttngcgacgccnaacaacaacttggcgcgggggtacc

SEQ ID NO: 406407 - DNA, 319 bp, Oryza sativa nipponbare
cgccgtccgccgagaagaagatgtaccccggcggcgccttcgaccccctcggcttctccaaggaccccgtcaagttcgaggagtacaagctcaaggagatcaagaacgggcgattggccatgctggcttttgtgggtttctgcgtccaacagtcggcgtacccgggcaccggcccactggagaacctggccagccacctctcggacccgtggcacaacaacatcggcgacatcatcatcccgagaaccatctacccttgagcttggcacgaaccggtgcgtgcgtccgggcgtacgtgaaggctatgggtggtttttat

SEQ ID NO: 406408 - DNA, 531 bp, Oryza sativa nipponbare
caagtacaaatagctatggcgagttccgttttctctcggttttctatatacttttgtgttcttctattatgccatggttctatggcccagctatttaatcccagcacaaacccatggcatagtcctcggcaaggaagttttagggagtgtagatttgatagactacaagcatttgaaccacttcggaaagtgaggtcagaagctggggtgactgagtacttcgatgagaagaatgaattattccagtgcacgggtacttttgtgatccgacgtgtcattcagcctcaaggccttttggtacctcgatacacaaatattcctggcgtggtctacatcatccaagggagaggttctatgggtttaaccttccccggttgccctgcgacttaccagcaacaattccaacaattttcatctcaaggccaaagtcagagccaaaagtttagagatgagcaccaaaagattcatcaatttaggcaaggagacattgttgcactcccagctggtgttgcacattggttctacaatgat

SEQ ID NO: 406409 - DNA, 382 bp, Oryza sativa nipponbare
cccacgcgtccggcggcgaccagcggcactggggcgagttcatcaccccgggcttgctcttcctctacatcgccggctggatcggctgggtcggcaggagctacctcatcgccatcagcggcgagaagaagccggccatgagggagatcatcatcgacgtcgagctcgccgtcaagctgggggggagggggttcatctggcccgtcgccgcctaccgtgagctcatcaccggcaacctcgtcgtcgacgacgctgacatcggctactgatcaccacatggatgcttggctactcaagccccaggtgagttgatttggcagtggaggaagagggctcgtgcatggtgatttgggggggttgggtggagaagctgataggatca

SEQ ID NO: 406410 - DNA, 285 bp, Oryza sativa nipponbare
aggtcgaccacgcgtccgtcacagaccatggcttggattttggatgagtactcgaaattccatggtcattcaccggcagttgtcactgggaagccaatagatcttggtggatcattaggtagagatgctgctacaggaagaggtgtgatgtacgctactgaggctcttttggctgaacatggaaagtccatttctggagcaacctttgttatccagggttttggtaatgttggttcatgggctgcacgaatcatccatgaaaagggtggcaaggggattgcactt

SEQ ID NO: 406411 - DNA, 266 bp, Oryza sativa nipponbare
  unsure (1)..(266): unsure at all n locations
ccacgcgtccggcgactccagaaccttctcttcttccttgttcgttcatcccctaaccctttctttgttcatcttgttcttcctcttgtcgtctcgtcgagatggccgggattggtccgatcaggcaggactgggagccggtggtggtgcggaagaaggcgcccaccgccgccgccaagaaggatgagaaggccgncaacgccgcccgccgctccggcgccgagaacgagaccangaaaaagnanaacgcnggaacaaacaaggcg

SEQ ID NO: 406412 - DNA, 361 bp, Oryza sativa nipponbare
  unsure (1)..(361): unsure at all n locations
cgtccgcccacgcgtccgcaaacatcaaaacgttataagagttctctagcatccatcacatagccatgaagatctttgtcatcctctctctcctcgccctcgcagcgagcagcgcctcggcacagtttgatgcttgcacctatgggcaatgccagcagcagccgtttatgcaaccgatcatgaacccgtgcaatgagttcgtgaggcaacagtgcagcccgatgagcctaccttgggagcagtcacgcaggctacaactgagcagctgccaggtgatgcggnagcaatgctggcagcaaaagagggtganggcncaacaatattattggcaggctatttggcaccatggggcanctatcat

SEQ ID NO: 406413 - DNA, 399 bp, Oryza sativa nipponbare
cccacgcgtccgggccagctccagtgtcaaaatgaccaaagaggagaaattgtccgcgttgaacgcgggctcagtttgctgcaaccatatgcatcattgcaagagcaggaacaaggacaaatgcaatcaagagagcattatcaagaaggaggatatcagcaaagtcaatatgggagtggctgccctaacggtttggatgagaccttttgcaccatgagggtaaggcaaaacatcgataatcctaaccgtgctgatacatacaacccaagagctggaagggttacaaatctcaacagccagaatttccccattcttaatcttgtacagatgagcgcccgtaaagtaaatctataccagaatgcactcctttcaccggtctggacatcaaccctcacagca

SEQ ID NO: 406414 - DNA, 302 bp, Oryza sativa nipponbare
  unsure (1)..(302): unsure at all n locations
aataaattgagcaggagatagatggccatggctctctccgataggagagcttctatatatcntgggggagacttggaagctatatatactagctagtgtctactatgtctatgtatccggttgttgcagtacacttgtgcttggaagaggtgtatgtatgagataaataaagtggcgttcgcgagggaaaaaaaananaaaaaaanaaaaaaaaaaaaaaagggcgggcgnttgagacccacgcgttcgggactgacttgtaggaattttcaagcttaaaggggggagcctcgggaggggga

SEQ ID NO: 406415 - DNA, 261 bp, Oryza sativa nipponbare
caggacagggagggcatccccccggaccagcagcgtctcatctttgctggcaagcagcttgaggatggccgcaccctggccgactacaacatccagaaggagtccaccctccaccttgtgctcaggctcaggggaggcatgcagatcttcgtcaagaccttgactggcaagaccatcacccttgaggtcgagtcgtctgacaccattgacaatgtcaaggccaagatccaggacaaggagggcattcccccggaccagcag

SEQ ID NO: 406416 - DNA, 389 bp, Oryza sativa nipponbare
  unsure (1)..(389): unsure at all n locations
ccggtcgacccagcgtccgacaggaccaactttcccaggatgtgctgagacctatcaacaacagtttcagcaatccgagcaagaccaacaattggaaggccaaagccaaagccataaatttagagatgaacatcaaaagatccaccgttttcaacagggggatgtagttgcattgcctgctggtgttgctcattggtgggggggtgatggtgatgcaccaattgttgccatatatgtcactgatatatacaatagtgctaaccaacttgatcctagacacagggatttctttttagctggcaacaataagataggtcaacaattgtatagatatgagggaagggacaattcnaanaaacgggtttggtggatttagtggtgaactactt

SEQ ID NO: 406417 - DNA, 273 bp, Oryza sativa nipponbare
cccacgcgtccgcccacgcgtccgcccgagtcttcttcccttccccaatctcgcccttcctcctcctccgatcgatccagcccccgcccctccccgcccctcgccgccgcggcgtgggatccggaggtggtgtagcgaggatgtcgtctgattcgtcgtcgtgggcgcgcgcgctcgtgcagatctcgccctacaccttctccgccatcggcatagccgtctccatcggggtgtccggcctcggggccgcctgggggagttttattacgggga

SEQ ID NO: 406418 - DNA, 328 bp, Oryza sativa nipponbare
cagaagcagtgtccaagatagatatcatgtaccatcatgctcttttgaacaatatatttacgatgtctatctggtacttgaacagcgatacaagggatgctcttttgtcattaatcaccagattggctgcagtggcagatcagttcttaagagagtgtttgcagatgcttgtgaacaacttcactccacctggatcacttactgctttcatcggccaaccgagatggcttgcaaggaagaaggaaatctattctcagttgcatgagagtttgagaatgatctctgatactgtacccttagcaccaaggatgttaaaggatataataga

SEQ ID NO: 406419 - DNA, 542 bp, Oryza sativa nipponbare
  unsure (1)..(542): unsure at all n locations
gtttaacactagtattgtagaatcagcgatggcggcatacaccagcaagatctttgccctgtttgccttaattgctctttctgcaagtgccactactgcaatcaccactatgcagtatttcccaccaacattagccatgggcaccatggatccgtgtaggcagtacatgatgcaaacgttgggcatgggtagctccacagccatgttcatgtcgcagccaatggcgctcctgcagcagcaatgttgcatgcagctacaaggcatgatgcctcagtgccactgtggcaccagttgccagatgatgcagagcatgcaacaagttatttgtgctggactcgggcagcagcagatgatgaagatggcgatgcagatgccatacatgtgcaacatggcccctgtcaacttccaactctcttcnctgtgggtggtgttgatcaaacgttggttacatgtactctagtaataaggtgttgcatactatcgtgtgcaaacactagaaataagaaccattgaataaaatatcaatcattttcagacttgcg

SEQ ID NO: 406420 - DNA, 495 bp, Oryza sativa nipponbare
gtggaagtccaagagaatgccaggttcgataggttgcaagcatttgagccaattcggagtgtgaggtctcaagctggcacaactgagttcttcgatgtctctaatgagcaatttcaatgtaccggagtatctgttgtccgtcgagttattgaacctagaggccttctactaccccattacactaatggtgcatctctagtatatatcatccaagggagaggtataacagggccaactttcccaggctgtcctgagtcctaccaacaacagttccaacaatcaggccaagcccaattgaccgaaagtcaaagccaaagtcaaaagttcaaggatgaacatcaaaagatccaccgtttcagacaaggagatgtaattgcattgcctgctggtgtagctcattggtgctacaatgatggtgaagtgccagttgttgccatatatgtcactgatctcaacaacggtgctaatcaacttgaccctaagcaaagggatttc

SEQ ID NO: 406421 - DNA, 390 bp, Oryza sativa nipponbare
ggacgaccgagctgaggctgagctagggctagggcacccacctcctccccttccgtatcctggatggctgctggtcggggcattaaccagctcctacggagaacactccataatcagtcctcaggctcatctctgctatcctcgttccggataaagcatgaagaatcctccgctggactgagagcattggctcttcttggagttggtgcttctggtcttttaagctttgctacaatagcttctgcagatgaagctgagcatggtttggcagcagctgaatatccctggccacatgctggcattcttagctcttatgaccatgcatctattcggcgtggacatcaagtttatacacaagtgtgtgcctcttgccattccatgtcattaatt

SEQ ID NO: 406422 - DNA, 182 bp, Oryza sativa nipponbare
cccggtcgaccccgcgtccgcccacgcgtccgcccacgcgtccggggcattagggctacaacaacatggcatccataaatcgccccatagttttcttcacagtttgcttgttcctcttgtgcgatggctccctagcccagcagctattaggccagagcactagtcaatggcagagttctcgt

SEQ ID NO: 406423 - DNA, 253 bp, Oryza sativa nipponbare
cccacgcgtccgcccacgcgtccgctcgcgccgccgccgccgtcgccgtcactctcctcaggtaaggaggaggaagatgtcgcacaggaagttcgagcacccgaggcatggatccctcggcttcctcccgaggaagcgctcctcccgccaccgcggcaaggtgaagtccttccccaaggatgacgtatcaaagccctgccaccttacttccttggatggctacaaggctggaatgacacacattgtgcgtgag

SEQ ID NO: 406424 - DNA, 328 bp, Oryza sativa nipponbare
gtccgcccaccgccgtccgatcaagggagaggttctatgggattaactttccccggctgcccagcaacctaccaacaacaattccaacaattcttgcctgaaggccaaagccagagccaaaaatttagggatgagcaccaaaagatccaccaatttagacaaggagatatcgttgcactggcagctggtgttgcgcattggttctacaatgaaggcgatgcaccagttggtgctctatatggcttcgacttaaacaacaacgctaatcaacttgaaccaagggagaaggagttcttattggcgggtaacaacaaccgggagcaacaaa

SEQ ID NO: 406425 - DNA, 494 bp, Oryza sativa nipponbare
cccaccgccgtccgcccacgcgtccgcccggttgccctgcgacttaccagcaacaattccaacaattttcatctcaaggccaaagtcagagccaaaagtttagagatgagcaccaaaagattcatcaatttaggcaaggagacattgttgcactcccagctggtgttgcacattggttctacaatgatggtgatgcacctattgttgccgtatatgtttatgacgtaaacaacaacgccaatcagcttgaacctaggcaaaaggagttcctattagccggcaacaacaatcgggctcaacaacaacaagtatatggtagctcaattgagcaacactctgggcaaaacatattcagcggatttggtgttgagatgctaagtgaggctttaggcatcaacgcagtagcagcaaagaggctacagagccaaaatgatcaaagaggagagatcatacatgtgaagaatggcccttaattggtgaaaccgactttgaca

SEQ ID NO: 406426 - DNA, 349 bp, Oryza sativa nipponbare
gtataagcgacagctgctaaatatccttggaattgtctaccgctacaagaagatgaaagaaatgagtgcaaaagacagaataaatagctttgttccaagggtatgcatatttggtgggaaagcatttgccacttacgtacaggcaaataggatagtgaagtttattacagatgttgcagctactgtaaatcatgatccagaaattggagatctattgaaggttgtatttattccagattataatgttagtgttgctgaggcgctaatccctgccagtgaattgtctcagcatatcagtactgctggaatggaagctagtggaaccagcaacatgaagtttgcaatgaat

SEQ ID NO: 406427 - DNA, 207 bp, Oryza sativa nipponbare
cccacgcgtccgcccacgcgtccgcccacgcgtccgcccacgcgtccgcccacgcgtccgcccacgcgtccgcaccaactgagagctgagcaggcgagcgagcggacatggcagcatcgctccaagccgcggccaccctgatgcagccggccaagctcggcggccgggcctcctccgccgcgctgccatcgcgcccgtcttcgcacg

SEQ ID NO: 406428 - DNA, 253 bp, Oryza sativa nipponbare
  unsure (1)..(253): unsure at all n locations
gcaagtacaaatagctatggcgagttccgttttctctcggttttctatatacttttgtgttcttctattatgccatggttctatggcccagctatttaatcccagcacaaacccatggcatagtcctcggcaaggaagttttagggagtgtagatttgatagactacaagcatttgaaccggtggggaaagtgaggtcagaagctggggtgactgagtacttngatgagaagaatgaattattccagtgcacg

SEQ ID NO: 406429 - DNA, 269 bp, Oryza sativa nipponbare
gtggtcgctaatgcttaccgcatctcacgggagcaagcccgaagcatcaagaacaataggggagaagagcacggtgccttcactcctagatttcaacaacaatactacccaggattctcgaatgagtccgaaagtgagacttcagagtaatgtaactgagaactagttctggcatatagcaaaataaaacaccacaagtatgaatcttggtggtgattctattctatatcaacattaaataaaggtgacatatttcttactttacctaa

SEQ ID NO: 406430 - DNA, 219 bp, Oryza sativa nipponbare
  unsure (1)..(219): unsure at all n locations
cccacgcgtccgcccacgcgtccgcccacgcgtccgggctgcttccctgttaaaatcacagttgtggaataagaaggagggcatttttcagaaatacatgaatagtcaacaactatatgtcaagggtttaaggatatcatcatggtctataaaaaatgagatgcatgcccttgaaatggagttgagagatgagatgtncaattttgggtttggtttaaa

SEQ ID NO: 406431 - DNA, 255 bp, Oryza sativa nipponbare
  unsure (1)..(255): unsure at all n locations
caccccaccagcagcagcagcagtagctgagcttgaagcagcagagcgaggtagacatggccgccgccaccatggccctctcgtccccggcgctggccggcaaggccgccgcgaaggtgttcggcgaggggcgcatcaccatgcgcaagtcggcggcgaagcccaagcccgccgcgtcggggagcccgtggtacggcgccgaccgcgtgctctacctcggcccgctctccggngagccgcccgactacctgaccg

SEQ ID NO: 406432 - DNA, 289 bp, Oryza sativa nipponbare
  unsure (1)..(289): unsure at all n locations
cccacgcgtccgcccacgcgtccgccaggcgctgtagctgatgcaaaaaggccatcagatgaagcggcatcacttatgaagaacatttactggaaggagtttggccttcttgcatttgtgtggatggcattccttgttcttcaggtcacaaagaactacacagctacttgctccagttggtactggatcttaaaccttctccagatcccagtatcagttggagtgactatgtatgaagcgctgggcctggtgagcgggaagagagntctatttgnaaagggaaatgaac

SEQ ID NO: 406433 - DNA, 270 bp, Oryza sativa nipponbare
cctaattgtcatcactagcttctagctagcttaattaattaattagccatggcggaggagaagcaccaccaccacctgttccaccacaagaaggacgacgagccggccaccggagtagactcctacggcgagggcgtctacacgtcggagacggtgaccaccgaggtggtcgccggcggccaggacgagtacgagaggtacaagaaggaggagaagcagcacaagcacaagcagcacctcggcgaggccggcgccctcgccggcggcgcc

SEQ ID NO: 406434 - DNA, 334 bp, Oryza sativa nipponbare
ccacagcatagcactcaatatcctacgctagcgagtatcgttggaccaatacagctcgcgtagatatgcatacatgccactctctgactcaggtcagaatgctctcatgctacgttatagacaatatcaactacaatcgcatctcctagctacagcaacaagtgctcagcccatgcagtgagttcgtaaggcaacagcatagcatagtggcaacccccttctggcaaccagctacgtttcaattgataaacaaccaagtcatgcagcaacagtgttgccaacagctcaggctggtggcgcaacaatctcactaccaggccattagtagcggtca

SEQ ID NO: 406435 - DNA, 108 bp, Oryza sativa nipponbare
  unsure (1)..(108): unsure at all n locations
ttgatcatatcatcaattcagctgccaagtcaaactacatgtcagcgggtcantatctgtccctattgtttagaggacctaatggagctgctgctggagttggcgctc

SEQ ID NO: 406436 - DNA, 485 bp, Oryza sativa nipponbare
  unsure (1)..(485): unsure at all n locations
gttcattagtactacaacaaccatggcatccataaatcgccccatagttttcttcacagtttgcttgttcctcttgtgcaatggctctctagcccagcagctattaggccagagcactagtcaatggcagagttctcgtcgtggaagtccaagagaatgcaggttcgataggttgcaagcatttgagccaattcggagtgtgaggtctcaagctggcacaactgagttcttcgatgtctctaatgagcaatttcaatgtaccggagtatctgttgtccgtcgagttattgaacctagaggccttctactaccccattacactaatggtgcatctctagtatatatcatccaagggagaggtataacagggccaactttcccaggctgtcctgagtcctaccaacaacagntccaacaatcaggccaagcccaattgaccgaaagtcaaagccaaagtcaaaagttcaaggatgaacatcaaaaga

SEQ ID NO: 406437 - DNA, 323 bp, Oryza sativa nipponbare
cggacgcgtggggcccgatgttgcttgatttcggctggcttcagcgatgctccaaaggtctggatgtaagatctttggaggaaaatctaggacaggccctactaaccctcccactcaagcagcagcagtgtctatttgaggagtggtttcagtgttttgcatccaaaggatcagagtgcgcgggccttactagagctttccaggtatggtggagaaggtccttcgttagatcatcggtagaagggcagtgattatgtttttactacttgtatatgctggctggaccacttggaaaattgcgaattgtggaaataccaataggg

SEQ ID NO: 406438 - DNA, 422 bp, Oryza sativa nipponbare
gtcgaccacgcgtccgcggacgcgtgggcggacgcgtgggcttcactagataactattctatactgggaagacttgttggagaagatgcctttgtccgaattgcccctgctgtggcaggtgtagctgatgtttcaacggctcattatctcttcagggcccttgtcggttctgaaaaggggctttctttagatatagggacaacataccttggtgaacttctgaaagttcatcatgggaggcaaacacataaaagtggagatcattttttgtccgatgagcaagtcctatgcataggctctagtagaaaaagacctgttctgaaatgggaagaaaacactgcgtggcctggacacttaaccttgaccaacaaagcactctattttgaggccattggactggcaagtaccaataaaccatttga

SEQ ID NO: 406439 - DNA, 485 bp, Oryza sativa nipponbare
  unsure (1)..(485): unsure at all n locations
ctgtccgccgccgccgcatcgccctcgttagaacgatggccgcgtcggcgctgcaccagaccaccagcttcctcggcaccgcccctcgccgggatgagctcgtccgccgcgtcggcgactccggtggccgcatcaccatgcgccgcaccgtcaagagcgcgccccagagcatctggtatggacctgaccgtcccaagtacctgggcccgttctcggagcagacgccatcgtacctgaccggagagttcccgggagactacgggtgggacacggcggggctatcggccgacccggagacgttcgcgaggaacagggagctggaggtgatccactcgcggtgggcgatgctgggggcgctgggctgcgtcttcccggagatcctgtccaagaacggggtgaagttcggggaggcggngtggttcaaggccggcgcgcaaatcttctccgagggggggctcgactgcctggggaaccccaacctggtg

SEQ ID NO: 406440 - DNA, 240 bp, Oryza sativa nipponbare
cgtccgcctcaactagctatggcgaccatagctttctctcggttatctatctacttttgtgttcttctcctatgccatggctctatggcccagctatttggtccgaacgtaaatccatggcacaaccctcggcaaggaggttttagggagtgtagatttgatagactacaagcatttgaaccacttcggagagtgaggtcagaagccggggttacagagtactttgatgagaagaatgaa

SEQ ID NO: 406441 - DNA, 149 bp, Oryza sativa nipponbare
  unsure (1)..(149): unsure at all n locations
ncatctttgcctcgttcgtcctccggttttctccgcagtttcttgatccatccgcctttcctctcgcagccgtcggcggggggagtggntagnnggnnactggctngcanagnnnnnanagagannnangcaanggcggaancaggcca

SEQ ID NO: 406442 - DNA, 332 bp, Oryza sativa nipponbare
  unsure (1)..(332): unsure at all n locations
cccacgcgtccgaagcaagtacaaatagctatggcgagttccgttttctctcggttttctatatacttttgtgttcttctattatgccatggttctatggcccagctatttaatcccagcacaaacccatggcatagtcctcggcaaggaagttttagggagtgtagatttgatagactacgagcatttgaaccacttcggaaagtgaggtcagaagctggggtgactgagtacttcgatgagaagaatgaattattccagtgcacgggtacttttgggatccgacgtggcattcaacctnaagggcttttggnacccccatacacaaaaat

SEQ ID NO: 406443 - DNA, 274 bp, Oryza sativa nipponbare
  unsure (1)..(274): unsure at all n locations
cccggtcgcnccgcgtccgacgccatgatgaggtgatcggctgtcgagatcaagtgggcggggctcaccctgctcgactggtggcgcaacgagcagttctacatgatcggcgccacgggggtgtacctggcggcggtgctgcacatcgtgctcaagaggctcctcggactgaagggcgtgcggttcaagctgacggcgaagcagctggccggcggcgcgagggagaggttcgcggagctgtacgacgtgcactggtcnccgctgttggcgccga

SEQ ID NO: 406444 - DNA, 376 bp, Oryza sativa nipponbare
  unsure (1)..(376): unsure at all n locations
ctcctataacaacatgacatccatagggggcgcgaaagttttcttcacagtttgcttcttcctcttgtgcaatggctccctagcccaacagctattaggccatatcactactcaatggcaaagttctcactctagaaatccgagacgatatagatttgatacgtttcaagcattcgaggggggggggagtctaacgtctcaacctancacaactgacttcttcaatgtctctaatgagccgattcaatgtaccggaatatctcaagtcccccgagccatagaacctacaggcctactactaccccatcacactaacggtgcatccctactatatatcatcccaccgacacgaataacaagggcgactcacaaaggc

SEQ ID NO: 406445 - DNA, 353 bp, Oryza sativa nipponbare
  unsure (1)..(353): unsure at all n locations
ccggtcgaccagcgtccgacagtacaatagctatggcgagtgtccggtttctctcggttttctatatactttggttcttctattatgccatggttctatggcccagctatttaatcccagcacaaacccatggcatagtcctcggcaaggaagttttagggagtgtagatttgatagactacaagcatttgagcggggggggaaagtgaggtcagaagctggggtgactgagtacttcgatgagaagaatgaattattccagtgcacgggtacttttgtgatccgacgtgtcattcancctcaaggccttttggtacctcnatacacaaatattcctggcgtggnccacatca

SEQ ID NO: 406446 - DNA, 457 bp, Oryza sativa nipponbare
  unsure (1)..(457): unsure at all n locations
cgtccctgcccacgcgtccgcccacgcgtccgcccacgcgtccgcggacgcgtgggaagcagccgcaccctcactctcctctcctgccccccacggcggcggcgggatggcggattcgacggcgaggacggtgaaggacgtgaaccctcatgagttcgtcaaggcctactccgcccacctcaagcgctccggcaagatggagctccctgagtgggttgacatcgtgaagactgcgaggttcaaggagctccctccttatgatccggactggtactacacgagggctgcctcgattgcaaggaagatctacctgaggcagggtattggngtaggtggcttccanaagatctatggtggccgncagaggaacggctcacgccccccgcacttntggaagagcagcggcgctatctcacgcaacatncttcancagctgcanaagatgggcattattgat

SEQ ID NO: 406447 - DNA, 496 bp, Oryza sativa nipponbare
  unsure (1)..(496): unsure at all n locations
cccgcgtccgcccacgcgtccgcccacgcgtccgcccacgcgtccgcccacgcgtccgcacaattcaaacattatagttgaagcatagtagtagaatcctacaaaaatgaagatcattttcgtatttgctctccttgctattgttgcatgcaacgcttctgcacggtttgatgctcttagtcaaagttatagacaatatcaactacaatcgcatctcctgctacagcaacaagtgctcagcccatgcagtgagttcgtaaggcaacagcatagcatagtggcaacccccttctggcaaccagctacgttntaattgataaacaaccaagtcatgcagcaacagtgttgccaacagattaagctggtagcggatccatnttatttacaggncattagttagattaaagggaattgtgaaaaatttaggtgttnaatggatgggtgtgaatattataaaagaattggggttaggataaatattggtnttataaaaatt

SEQ ID NO: 406448 - DNA, 167 bp, Oryza sativa nipponbare
ttctcaatacggccaagatcacgttttatcattttccattcaggatcaatgtccatagctacattgatgaagtttttgtcaaggaacggaaaatgataaaacgtgatcttggccgtattgagaaatgggttctcatgaatggacgcgtggatcaacccggggggggg

SEQ ID NO: 406449 - DNA, 367 bp, Oryza sativa nipponbare
caccagcagcagcagcagtagctgagcttgaagcagcagagcgaggtagacatggccgccgccaccatggccctctcgtccccggcgctggccggcaaggccgccgcgaaggtgttcggcgaggggcgcatcaccatgcgcaagtcggcggcgaagcccaagcccgccgcgtcggggagcccgtggtacggcgccgaccgcgtgctctacctcggcccgctctccggcgagccgccgagctacctgaccggcgagttccccggcgactacgggtgggacaccgcggggctctccgccgacccggagacgttcgccaagaaccgggagctggaggtgatccacttcaagtgggcgatgctcggcgcgc

SEQ ID NO: 406450 - DNA, 421 bp, Oryza sativa nipponbare
  unsure (1)..(421): unsure at all n locations
gtccgcggacgcgtgggcggacgcgtgggttcgttttggtattcccatacactttgtttctcttccccgtctcgtggtcgagagaaaccgagaggagagagagggagaggagcgctgccgattttccggagggggagatctttttcttctccctgaaggttcgagatcgatctgcgacgaggaggagcggggaatcgtaactttatttccgaggaaatttcaacaaattgatgcactaatggagtccaagggtggcaaaaagaagtctagcagtagtcgttcctccctgatgtacgaagctcccctcggctacagcattgaggacctccgacctgccggcggnatcaagaagttcccgtctgctgcttacttcaactgcgcgaggaagccctcttgatagcccccttgggtaccttgacct

SEQ ID NO: 406451 - DNA, 513 bp, Oryza sativa nipponbare
ggctttggaaaaatgaatatcacagcgagcaatgacctaaatgaggaaacaattgatgccttgaacaagcagggtcacgaggtagatgcatttggcattggtacctaccttgttacatgctatgcacaagcagcgcttggttgtgtgttcaaattagttgagattaacaaacaacctggggttaaactgtctgaagatgtgacaaaggtatccataccatgtaaaaaacgatgctacaggttgtttggaaaagaaggttatcctttggttgacataatgactggagaagatgagccagccccaaaggttggtgagaggctcctgtgtcggcatcctttcaatgaatcaaagagggcatatgttgttccacagcatgttgaggagttattgaagtgctactggcctggaactacatccgaaccacgggaagagctaccatccatcaacgaaataaggagtcggtgcatgggctatctggaccgtatgaggccagaccacatgaggaggctgaat

SEQ ID NO: 406452 - DNA, 368 bp, Oryza sativa nipponbare
  unsure (1)..(368): unsure at all n locations
gtccgccccgcgtccgccacactggtgttacatttgatgatgttgctggtgtcgatgaagcaaagcaagacttcatggaagtggttgagttcttgaagaaaccagaaaggttcaccgctgttggtgctcgcatccctaagggtgttctgcttgttggtcctcctggaactggtaagactttgcttgccaaggctattgcaggggaagctggtgtgccgtttttctcgatatcaggatctgagtttgtggagatgtttgtcggagttggtgccttccgggttcgtgatctcttnanganggcnnaggagaatgctccttgcatagtatttgttgattaaattgatccttttgggaggcaaagagggaca

SEQ ID NO: 406453 - DNA, 365 bp, Oryza sativa nipponbare
  unsure (1)..(365): unsure at all n locations
gaggaattgacatccaagctgtgaatgtggtgattaattttgacttccctaagacttctgaaacatacttgcannnagggttggtcgttcagggagatttggacaccttggtttggcggtgaacttaatcacttatgaggaccgtttcaacttgtatcggattgagtttgaacttgggagggagataaaaacgatacccccacaaatcgatctggcagtgtattgtcaatgatcaatgtaacattgtaacggtgtttttatcatttacttattgttaggcaagtacatnagatgtacatagcacctcatcagggttatatttgggtgccttgatgacacatctaagcttatattccgatatgtga

SEQ ID NO: 406454 - DNA, 273 bp, Oryza sativa nipponbare
  unsure (1)..(273): unsure at all n locations
cccacgcgtccgttctcttcttcctcctccctttcccatcttcgacgaggcgacccggcgcgagagaagaagagatcgatcgatcgatcaaccgatctcgccggagaaggaagaggagcaaagatgtcgtcggtgttcagcggcgatgagacggcgcccttcttcggcttcctcggcgccgcctccgccctcatcttctcatgcatgggtgcggcgtacgggacggcgaagagcggcgtcngcgtggcgtccatgggcgggaagcgcccggag

SEQ ID NO: 406455 - DNA, 581 bp, Oryza sativa nipponbare
  unsure (1)..(581): unsure at all n locations
cggacgcgtgggggaaagaaactcatagctctcaaagatatagtagatgtgtcgctggctgacagtgcgaagaatggagtcgatgtaggcatttctttgacatacgaaaatcagtcggcaatgaagagagaagacacaaaatggacgtcaggcagagacgtttggtggcaggatgttgtgcccaattttccaacaaaatgtgatgtggaatgggtagatgcagaggatccattgtttcttctatatacaagtggtagcacaggaaagccaaagggtgtattgcatacaacgggaggctatatggtgtactctgcaacaacatttaagcacgcatttgattacaagccatcagatatatactggtgcactgcagactgtgggtggattactgggcatagttatgtgacatatggtcctctcctgaatggagccacagttcttgtttacaaaggggctccaaactatcctgatcctagtcgttgttgggaccgttgtgaaaataccggggtgcatattttatactgaccaacacttttcgnccctcatgcctgatggaccgaggattgtactggtttttcgta

SEQ ID NO: 406456 - DNA, 141 bp, Oryza sativa nipponbare
  unsure (1)..(141): unsure at all n locations
caatcgtagagctcaagcctggtgttctctcggtacacgagggaaacgatatcaccaagtactttgtgagcagtggctttgcatttgtccatgcaaactccatcgctgatatcgnggctggtgaggctgnccccctggacc

SEQ ID NO: 406457 - DNA, 325 bp, Oryza sativa nipponbare
  unsure (1)..(325): unsure at all n locations
ccgactggactacaagatcagatgtctgggggtggtggctgaagatccgattggacatcctccgtatgcatatttagggttctgagtgtggtttggctatcaagcgtccaatcttacgggtatcaaaaacttttgtcgcaataatctgaacctgtgctttttaataattaatggggggtgtgggtagtanttttttggtattcctgttatcaaatgctgcgtatggtaaattggagcagcggctttaattccatgctatctttttattgctatcgtctgctgtactccgatgctaattaaaccgttgacctaaaacaaaataaag

SEQ ID NO: 406458 - DNA, 211 bp, Oryza sativa nipponbare
cccacgctgtccgcccacgcgtccgcccacgcgtccgcggacgcgtgggttaaaatcctataacttgtactttatagtaactacatgtggagaagttaaatcgggtagaaatacttggaaaggaaattggtgccttggttctttggttgcttcataccttacggtcataatggccatggggggggtgcataccttgttgtttggacaccat

SEQ ID NO: 406459 - DNA, 364 bp, Oryza sativa nipponbare
cccacgcgtccgcccacgcgtccgcccacgcgtccggcgccgaggttgatatgacgcaaggcagtggactgaccaaccctagggctgtcccgttggaggccatgtgcaaaccacgcgaagctatgtctgatgtttttcgggaactcttgtgaagcatcatggaagctggggcggatccaccaggtaggcttcatcaggctctagcctacccttcaatttttgcaaaaaaatatcaactacataggatatctttcataactgctgttggaggaagacaagaagaggtcgggcgtcaggaggaagatgaacaggagccccatgggagcgatctgattgtggagagggtgaagcggtatgcattaaa

SEQ ID NO: 406460 - DNA, 325 bp, Oryza sativa nipponbare
caaatattatagttggaagcatagtagtgaggaatccaacaacaatgaagatcattttcgtatttgctctccttgctattgttgcatgcaatgcctctgcgcggtttgatcctcttagtcaaagttataggcaatatcaactacagtcgaatctcctactacagcaacgagtgctcagcccatgcagtgagttcgtagggcaacagtatatcatagtggcaaccctcttttgacaaccatctacgtttcaattgatcaacaaccatgtcatgcagcagtattgctgccaacagctcaggcaggtagcacaacaatctcactacca

SEQ ID NO: 406461 - DNA, 422 bp, Oryza sativa nipponbare
ggagagcaacacaacatcataaagttcttatcagacatgtgtcatagtaacccaacataatcacacaatggacaacctttcagctcaccacaccataatgatacattatgggagtagcattttatatgtacatgtctagaagttcatcctacaaaggggggcagcagaagaagaaatagacaagatgaaaatgagaaatggtgttcgccattggacgtgatgagatgaaccaagtcggcgtatgatacacctctttctttagatcggcgggatgttcgaaaacgagaagcccttgtaccctttgtaagcatagtaggcaattcttgtgtagtagaacccagggatgaacatcacaatacccagaatcatgaagaagattccgtgcgcgcggtcgccgccgaccttgttggcggccatgagga

SEQ ID NO: 406462 - DNA, 300 bp, Oryza sativa nipponbare
  unsure (1)..(300): unsure at all n locations
gtccgcggacgcgtgggcggacgcgtgggagaagattgtccccagcagctgccgtgccatgatcggtcaggttgctggtggtggcaggactgagaagccgatgctcaaggctggaaacgcctaccacaagtaccgcgtgaagaggaactgctggcctaaggtgcgtggtgtggccatgaaccccgttgagcatccccacggaggaggtaaccaccagcacattggtcacgcctccaccgtccgccgngatgcacctcctggccagaaggttggtcttatcgcttganggaggactggtcg

SEQ ID NO: 406463 - DNA, 442 bp, Oryza sativa nipponbare
cgacgacgaggtttgttcagcttgccgcgtgcgcggcggcgtcgctgctcgccgtggcggcgagtggcgcggcggcgcagggcgtcgggtcggtcatcacgcaggcggtgttcaacagcatgctgcccaaccgcgacaactcgcagtgcccggcgaggggcttctacacgtacgacgccttcatcgccgccgccaactccttcccggcgttcggcacctccggcggcagcgccgagctcatccggcgggagctcgccgccttcttcggccagacctcccacgagaccaccggtggaacgaggggtagttctgaccagttccagtggggttactgcttcaaagaggagataaacaaggcgacttctccaccctactatggacgtgggccaattcaattgacagggcaatcgaactaccaagcagcccggaacgcgctggggct

SEQ ID NO: 406464 - DNA, 223 bp, Oryza sativa nipponbare
gtccgcggacgcgtgggcggacgcgtggggtttaacactagtattgtagaatcagcaatggcagcatacaccagcaagatctttgccctgtttgccttaattgctctttctgcaagtgccactactgcaatcaccactatgcagtatttcccaccaacattagccatgggcaccatggatccgggttggcagtacatgatgcaaacgtttggcatggatagct

SEQ ID NO: 406465 - DNA, 519 bp, Oryza sativa nipponbare
cccacgcgtccgcccacgcgtccggactcctcgaatcatccgaatcgaatcgcccacttctcctctcgatccgtcctccaaaccctagaagcgaagcagcgagacgccgccattagggttagggtttgctcctcctcctcttccctctacacgaggcggcgctggcgtccatggcgcacggcggcggcgggagggcgaaggtgacgccgaacctggcgatggacgaggaggggacgcgggtgctcaacatcaccgtgctccagcgcctcgaccccgccgtcgaggacatcctcatcaccgccggccacgtcacgctctacgacttcgacaccaacctcaaccagtggagccggaaggatgtggaggggtcgctcttcgttgtcaagaggaatgcgcagcccagattccagtttgttgtcatgaatcgtcgtaatacagataatttagttgaagatctcctgggagattttgaatatcagcttcaggttccctatataatgtatcgcaatgctgcacaag

SEQ ID NO: 406466 - DNA, 574 bp, Oryza sativa nipponbare
gccatctctctcagctctcacagctcactgcatcaatggccgcggccaccatggcgctctcctccccggtgatggcccgcgcggcgccgtcgacctcctccgcgctcttcggcgaggcgcggatcaccatgcgcaagaccgccgcgaagcccaagccggcggcgtcgtcggggagcccgtggtacggcgccgaccgcgtcctctacctcggcccgctctccggcgagccgccgagctacctcaccggcgagttcccgggcgactacgggtgggacaccgcggggctctccgccgacccggagacgttcgccaagaaccgggagctggaggtgatccactcccggtgggcgatgctgggcgcgctcggctgcgtcttcccggagctcctcgcccggaacggcgtcaagttcggcgaggccgtgtggttcaaggcgggctcgcagatcttcagcgagggcgggctcgactacctcggcaacccgagcctgatccacgcgcagagcatcctcgccatctgggcggtgcaggtggtgctcatgggcgccgtcgaggggtaccgcatcgccggcgggcc

SEQ ID NO: 406467 - DNA, 416 bp, Oryza sativa nipponbare
  unsure (1)..(416): unsure at all n locations
gtcaccgacaatctccagaggtgggtcatcgaggtcgcgggggctgcgggcacgctctatgccggagagacataccaattgcaggtggacttccctgagcattaccccatggaggctccccaggtcatatttcttcatccagcgccaatgcatccgcacatttacagcaatgggcatatctgtttagatatattgtatgactcgtggtcaccggcgatgaccgttagttctgtttgtatcagtatcttgtccatgttgtcaagctcaccagcaaagcaacgtcctgccgacaatgatcgctatgtcaggaactgccgcaatgggaggtcgccgaaggaaaccaggnggtgggttcatgatgacaaaatgtgattggttccaacttccgggtggctttttctcaaaacccttttacc

SEQ ID NO: 406468 - DNA, 454 bp, Oryza sativa nipponbare
cccacgcgtccgcgctcatggcggccatggtggccatctccggcgcgcagctgagcgagtcggagatgaggttcagggacaggcagtgccagcgggaggtgcaggacagcccgctggacgcgtgccggcaggtgctcgaccggcagctcaccggccgggagaggttccagccgatgttccgccgcccgggcgcgctcggcctgcggatgcagtgctgccagcagctgcaggacgtgagccgcgagtgccgctgcgccgccatccgccggatggtgaggagctacgaggagagcatgccgatgcccctggagcaaggctggtcgtcgtcgtcgtcggagtactacggcggcgaggggtcgtcgtcggagcaggggtactacggcgaggggtcgtcggaggagggctactacggcgagcagcagcagcagccggggatgacccgcgtgaggctgac

SEQ ID NO: 406469 - DNA, 469 bp, Oryza sativa nipponbare
ccagtacatgcgcgtactgcctaactgcggagacgactgcatctggcgcgcctccctcgttgtcagcttcggtgtctggtgcatccgccgggtgctagacctgtctctggtggaaagcaggccagaactttggggcaagtatacctatgttctcaaccgtcttcagggcatcctggatcctgcattcaccaagcctcggagtgctctcagcgcgtgtgcgtgccttcacagagatatccgggtgctcaacagcctgcgccacagtagcctggtagcaacaaactccattccaaggcaaatccgaggttccttcaccaccgcatctgtggtcctggagatgatcaaggatgtggagaccgcagtctcagggcgcaagggcaggagtggcaccgcagctggggatgtcgccttccccaaggggaaggagaacctggcctccgtgctgaagcgatacaagcggaggctctcg

SEQ ID NO: 406470 - DNA, 312 bp, Oryza sativa nipponbare
  unsure (1)..(312): unsure at all n locations
cccacgcgtccgcccacgcgtccgaaacattatagttgaagcatagtagtagaatcctacaaaaatgaagatcattttcgtatttgctctccttgctattgttgcatgcaacgcttctgcacggtttgatgctcttagtcaaagttatagacaatatcaactacaatcgcatctcctgctacagcaacaagtgctcagcccatgcagtgagttcgtaaggcaacagcatagcatagtggcaacccccttctggcaaccanctacntttnaattgataaacaaccaanncatgcannaacantgttgccaaca

SEQ ID NO: 406471 - DNA, 454 bp, Oryza sativa nipponbare
agcaagtgcaacggcaaagccatgatacttttatttatcttacagcactggctgtacatcttgtgctgagaagctggttacacaaagcttgaagaagagcacacatagaacaatactagttttacacatagtagtacatcttgtgctgagttagctggtttcgtcacagtgcttggagaacatcacataactccttcgtgcatgaccaacatcataaccattatttgccatatctttgggtgaaacatggcagcttagtcctcgttatcccagacctcagatgcactcttgtatggcccatgggtcttgttcacgaagagctcctctcctgtcaggactcgcttctcatctttgatgccgcacaagacctggaagtcctcttcagggatctcccatccaaacacctgcatattctccttaatcctttcatctttagttgattttggaataacgc

SEQ ID NO: 406472 - DNA, 482 bp, Oryza sativa nipponbare
  unsure (1)..(482): unsure at all n locations
cccacgcgtccgcgccatctctctcagctctcacagctcactgcatcaatggccgcggccaccatggcgctctcctccccggtgatggcccgcgcggcgccgtcgacctcctccgcgctcttcggcgaggcgcggatcaccatgcgcaagaccgccgcgaagcccaagccggcggcgtcgtcggggagcccgtggtacggcgccgaccgcgtcctctacctcggcccgctctccggcgagccgccgagctacctcaccggcgagttcccgggcgactacgggtgggacaccgcggggctctccgccgacccggagacgttcgccaagaaccgggagctggaggtgatccactcccggtgggcgatgctgggcgcgctcggctgcgtcttcccggagctcctcgcccggaacggcgtcaagttcggcgagggccggtggntcaaggcgggctcgcagatcttcagcgagggcgggctcgacta

SEQ ID NO: 406473 - DNA, 235 bp, Oryza sativa nipponbare
ccgccccgcgtccgcggacgcgtgggcggacgcgtgggcggacgcgtgggcgccgccacgtctcccgcaccctatccagctggctctacttgcgcccatgttacatcatcaatagtgagcggtgcggcaggcggcagacactagctgcgcccatcgttcgctctaccaccgggagctggacgtcattatcataccagtggatgcagttatccttagaccaataactgtgacttgc

SEQ ID NO: 406474 - DNA, 531 bp, Oryza sativa nipponbare
gtcacagcgcaggaggcatccaacgtgcgcgccacgtatcactactatcgccccgcgcagaacaactgggacttaggagccccagccgtgagcgcgtattgtgctacgtgggacgctaacaagccactgtcgtggcgtcagaagtatggctggactgccttttgcgggcccgttggtcctaggggtcaggctgcatgtggcaagtgccttctggtgacgaacacggcgacgggggcgcagatcacggcgaggatcgtggaccagtgcgccaatggcggccttgacctggactgggacaccgtcttcaccaagatcgacaccgacggccagggctaccagaagggccacctcatcgtcaactacaagttcgtcgactgcggcgacaactgattaagctatagctgccttagctaattaattactctccattattacatgctaataaggttgctgctgcatatacattattgtcgacagggcagagtagagtggtaaactctgcctgatgaataaattaagcagctgataaat

SEQ ID NO: 406475 - DNA, 245 bp, Oryza sativa nipponbare
  unsure (1)..(245): unsure at all n locations
accaacatacaaaagaggaaaaaaaacatatacacttctagtgattgtctgattgatcatcaatggctagcaaggtcgtcttcttcgcggcggcgctcatggcggccatggtggccatctccggcgcgcagctgagcgagtcggagatgaggttcagggacaggcagtgccagcgggaggtgcaggacagcccgctggacgcgtgccggcnggtgctcnaccggnngntnnccggccgggagagg

SEQ ID NO: 406476 - DNA, 546 bp, Oryza sativa nipponbare
caatgactcacagaggacagcaacaaaagatgctggacgtattgcaggattggaagttctccgcattataaatgagccgactgctgcatcccttgcttatggttttgagaagaaaaacaacgaaacgattcttgtgtttgacttgggaggcggtacctttgatgtctctgtattggaggttggagatggtgtgtttgaggtgctttccacatctggtgacacacaccttggtggcgatgacttcgataagaaagttgtggattggcttgctagcaactttaagaaagatgaaggcattgatcttctgaaagacaaacaagccctgcagcgactcactgaggcagcagagaaagcgaagatggaactgtctacgctgtctcagacaaacattagcttgcctttcataactgctactgctgatgggcctaaacacatcgagacaactctctccagagccaaatttgaggagctatgttcggacctcattgataggcttaaaactcctgtcactaatgccttgagagatgccaactgtctgttgataac

SEQ ID NO: 406477 - DNA, 128 bp, Oryza sativa nipponbare
  unsure (1)..(128): unsure at all n locations
gtggaaanataaatagaaatggaagnatatgccttgacattnttaaggagcaatggagncctgctttgacaatttctaaggtgttgctttcgatctgctcgctgctcactgaccccaacccggacgac

SEQ ID NO: 406478 - DNA, 475 bp, Oryza sativa nipponbare
gttcatatcaggcctacaacaacatggcatccatagatcgccccatagttttcttcacagcttgcttgttcctcttgtgcgatggctccctagcccaggcagctattaagcacagagcactagtcaatggcagagttctcgtcgaggaagtccgagaggatgtagatttgataggttgcaagcatatgagccaattcggagtgtgaggtctcaagctggcacaactgattccttcgatgtctataatgagttgcttcaatgtaccggagtatgtgacgtccgccaaggtattgaacctagaggcctactactaccccattacactaatggcgcatctctagtatatatcattcaggggagagcgataacagggccgactttgcgaggctgacctgagacctaccagcagcaggaccaatcttcagggcctgcgcaattgaccgaaagaaaagccgataccgtaagtggaaggaag

SEQ ID NO: 406479 - DNA, 465 bp, Oryza sativa nipponbare
cccacgcgtccgattctgggtagcaatccattgcaggcgcagcatatacgcccgaatggtcagtcgcaatgtcaggctgaggaagttcttgctcagcctcccaatccctgccaagtaccactacctgatgcagatcggcggcaagctccacgctctgatcatcaagtacaaccccgaaggcgaggtgcttgacatcttggaggataccacagggcaggtggtaagagccgttagtgaagttgaggagaaggatgggaagctctggataggatccgttctgatgcccttcattgccgtcttcgattacgccaatgcatcttagcaaactttatgcctggatacaagggttaaaatgtggaatcccagaatgacgtttgcacaccatttaccactatcccgggtgacatttcataaatgccgctttcaagtaacaacctaagttgtttcatgtttcagttttttcga

SEQ ID NO: 406480 - DNA, 353 bp, Oryza sativa nipponbare
cggacgcgtgggcggacgcgtgggcggacgcgtgggtgaacctagaggccttctactaccccattacactaatggtgcatctctagtatatatcatccaagggagaggtataacagggccaactttcccaggctgtcctgagtcctaccaacaacagttccaacaatcaggccaagcccaattgaccgaaagtcaaagccaaagtcaaaagttcaaggatgaacatcaaaagatccaccgtttcagacaaggagatgtaattgcattgcctgctggtgtagctcattggtgctacaatgatggtgaagtgccacttgccgccatatatgttactgatctcaacaacggcgcta

SEQ ID NO: 406481 - DNA, 375 bp, Oryza sativa nipponbare
  unsure (1)..(375): unsure at all n locations
cccacgcgtccgcttttcaccgtttcgatagtgtggctttacgcgtacattctcacaattagcggtgcttacaagaatgctccaccaaagacacaggtgcattgccgtgttgatcgctcaggccttatttcaggagctccttggattagagttccttatccctttcagtggggagctccaacttttgatgctggtgaagcctttgcaatgatgatgacttcatttattgctcttgtggagacaactggagctttcattgctgcttcaaggtatgcaagcgcaactatgatacctccatcaatcattagtcggggcatcggttggcagggaatcancatcttgattgattctttttttgggacggccaatggaacc

SEQ ID NO: 406482 - DNA, 586 bp, Oryza sativa nipponbare
  unsure (1)..(586): unsure at all n locations
gctgatgggcctaaacacatcgagacaactctctccagagccaaatttgaggagctatgttcggacctcattgataggcttaaaactcctgtcactaatgccttgagagatgccaaactgtctgttgataacctggacgaagtgattcttgttggtggatccactcgtatcccttccgtgcaagagcttgtgaagaagatcactggcaaggatcccaatgtcacagtcaaccctgatgaggttgtttctcttggggcagctgtacagggtggagttttggccggagatgtgaaagatgtcgttcttcttgatgttactccattgtctcttggtctggagacgttgggtggagtgatgaccaagattattcccagaaacacaacactgcccacctcaaaatcagaggtattctccacagctgcagatggacagacaagtgttgagataaatggtcttcagggagagagagagtttgtccgggacaacaagtctcttggaagcttncgcttggatggaatccctcctgcaccacntggtggtccacaattggaagcaaggttggtattgatgcccatggattctcttt

SEQ ID NO: 406483 - DNA, 249 bp, Oryza sativa nipponbare
cgtccgatggtgcatctatcgtggctaccatacttaaggacagtgcaatgttcaatgaatggactgtggagctgaagggcatggctgataggattattagcatgaggcaacagctttttgatgctctgaaaacgagagaaactcctggagactggagtcacatcattaagcagatcggaatggggactttcactgggctcaacagtgatcaagtggctttcatgaggcaggaatcctacatgtacttga

SEQ ID NO: 406484 - DNA, 150 bp, Oryza sativa nipponbare
  unsure (1)..(150): unsure at all n locations
cccacgcgtccgctttcgcttcgcgagattggttgattcatctcgcgattgatcgagctcgagcggcggtgaggtgaggtggaggaggaggaggaggaggagatcgggatggggagagggagggtggagctgaagaggatngagaacaag

SEQ ID NO: 406485 - DNA, 233 bp, Oryza sativa nipponbare
  unsure (1)..(233): unsure at all n locations
cccattcgtccgcccacgcgtccgggcacagctaccggcggcgcagccacacagcagcagcaggtgaggaggagaggagacccgccgccgccgccgccatgggtatctcgcgtgattccatgcacaagcgccgcgccacgggcggcaagcagaaggcatggcgcatgaagcgaaagtatgagctcggaaggcancctgccaacaccaanctgnnaancaacaaganggggagg

SEQ ID NO: 406486 - DNA, 451 bp, Oryza sativa nipponbare
aacagctatgacgtactacgcgttcggtcttaaatctctatgctactctgtcgtgttcttctcttgtgcaatggatctatggcccaactatttgatccagccacaaaccaatggcaaactcatcgacaaggaagctttagggagtgtagatttgagagactacaagcatttgagcctcttcagaatgtgaggtcggaagctggtgtgaccgagtactttgatgagacgaatgaattgtttcagtgcacaggtacatttgtcatccgacgtgttattcaacctcaaggccttctaatacctcgatacgccaatactcctggcatggtctacatcatccaaggaagaggttctatgggtctaaccttccctggatgccccgcaacttaccagcagcaatcccaacagtttttgtttcaaggcgaaagtcagagccaaaagtttatagatgagc

SEQ ID NO: 406487 - DNA, 401 bp, Oryza sativa nipponbare
  unsure (1)..(401): unsure at all n locations
agcgtccggaagatggtatttgggctgttctagcatgggtatctattcttgctttcaagaacaaggacaaccttggaggcgataagcttgttactgttgaagatattgttcgccagcactggggtacttatggtcgccattattatacacgatatgactatgagaatgttgatgctggagctgctggggaacttatggcaaaccttgtcagcatgcagtcgtccctttctgatgttaacaaattgatcaaggagattcggtcagatgtttctgatgtggttgccgcagatgagtttgagtataaggatcctgttgattggttctgctccaagcatcanggtgtccgggacctcttcngagaaggttccccgcttgtgttccccccttttttgactggctct

SEQ ID NO: 406488 - DNA, 487 bp, Oryza sativa nipponbare
ggagcaacagatctatccatccatcccatcctcgatccttcattcctgcccggcggcgagcgagagagaggcggaggagatccgagatggcggggagcgggtggaggaggatcccggcggtgaggaggccgcccatgtcgcgcccggcctcggtctgcctctggatcgtgctcgtcgccgccaccctggcgctcgcccaggcgaagaaatcgaaggcggatttgactgaggtcacccacaaggtctacttcgacgtcgagattgatggcaagcccgcaggacgggttgtcatgggacttttcgggaagactgttcctaaaacggcagagaacttccgagcactttgcacaggagagaaaggaactggaaagagtggcaaagcactccacttcaagggaagtgcattccacagaattatacccagctttatgatccaaggaggtgacttcacacttggtgatggaaggggtggtgaatctatctatgg

SEQ ID NO: 406489 - DNA, 477 bp, Oryza sativa nipponbare
  unsure (1)..(477): unsure at all n locations
ngcccacgcgtccggaaaaaaaacatatacancttctagntgattggtctgattgatcantcaatggctagcaaggtncgtcttcttcgcggcggcgctcatggcggccatggtggccatctccggcgcgcagctgagcgagtcggagatgaggttcagggacaggcagtgccagcgggaggtgcaggacagcccgctggacgcgtgccggcaggtgctcgaccggcagctcaccggccgggagaggttccagccgatgttccgccgcccgggcgcgctcggcctgcggatgcagtgctgccagcagctgcaggacgtgagccgcgagtgccgctgcgccgccatccgccggatggtgaggagctacgaggagagcatgccgatgcccctggagcaaggctggtcgtcgncgncgncggagtactacggcggggaggggtcgtcgncggagcaagggtactacggcgaggggtcgtc

SEQ ID NO: 406490 - DNA, 488 bp, Oryza sativa nipponbare
  unsure (1)..(488): unsure at all n locations
tagatcgcgagcggccgctcgcgatctagactccaactacgggtttagcacgaatttgagggcgtgctgcggggcgggaggagggaagtacaactaccagaacggcgcgaggtgcggcatgtcgggagcctacgcgtgctccaacccgtcgtcgtcgttgagctgggacggcatccatctcacggaggcggcgtacaagcagatcgccgacgggtgggtcaacgggccctactgccacccgccgatcatgccctagatcatcgccggcggcggcgacggcggccggaggatggccggctagctgctgctgatttgatttgtttagcagaagaagagaagaaaaatggatagcaagaggaagaagaagacatcttgcgatcgactgggaaatgaataagatggtgattagttgattttcgttgtgggtggttaatttgtttttgttttaaggaatgcacatttgggtagnatgtatgaaattgggagga

SEQ ID NO: 406491 - DNA, 377 bp, Oryza sativa nipponbare
ctgtgtgtagtgtgtgcaactaggaggcttgttccatactagtttgctaggtcatggaaaagagcgagattttcgtaggagcacactcatatgcagctatatgtgcttttacactcatcataggatggttagctcactgggtatacagatggatttatcctccatgcggtgggaggcttcctccgggctcaatgggcttccctattgttggtgagaccttccaatttttcagatcaagtccatcaatagacatgccaatttactacaagcgaagactggagaggtatggacctatattcaaaactaacataagaggccagcacgtggtcatattccttgatcccgacgagaaccaatttatattttatcaagagggg

SEQ ID NO: 406492 - DNA, 360 bp, Oryza sativa nipponbare
  unsure (1)..(360): unsure at all n locations
cacaatcaaggcaaggttgaacatcgaaaatcctagccatgctgatacttacaacccacgtgctggaaggatcacacgtctcaacagtcagaagttccccattcttaaccttgtacaattgagtgctactagagtaaatctataccagaatgctattctctctccgttttggaacggtggtgccatagcctggtgtatatcgttcaagggcatgctcgagttcaggtcgttagtaaccttggaaagacggtattcaatggcgttctacgtccaggtcaattgctgatcattccacaacactacgttgncttgaagaaagcagaagctgaagggtgccaatacattttattcaagaacaat

SEQ ID NO: 406493 - DNA, 488 bp, Oryza sativa nipponbare
cccacgcgtccgcccacgcgtccggcaaaatagaaagatctagtgtcccgcagcaatgaagatcattttcgtctttgctctccttgctattgctgcatgcagcgcctctgcgcagtttgatgttttaggtcaaagttataggcaatatcagctgcagtcgcctgtcctgctacagcaacaggtgcttagcccatataatgagttcgtaaggcagcagtatggcatagcggcaagccccttcttgcaatcagctgcgtttcaactgagaaacaaccaagtctggcaacagctcgcgctggtggcgcaacaatctcactatcaggacattaacattgttcaggccatagcgcagcagctacaactccagcagtttggtgatctctactttgatcggaatctggctcaagctcaagctctgttggcttttaacgtgccatctaaatatggtatctaccctaggtactatggggcacccagtaccattacca

SEQ ID NO: 406494 - DNA, 359 bp, Oryza sativa nipponbare
acaggcatctgattagagaaatctaatggcttcttcttccttttccttcctgcttgttgctgctcttcttgggttggcctcatggaaagccattgcctcagaccctagccctctccaagacttttgtgtcgctgatctgaattcgccagtgcgagtaaatggatttgtttgcaagaacccaatgaacgcgagtgccgacgacttcttcaaggcagccatgctcgataagcctagagacacaaacaataaggttgggtccaatgtcactttggtcaatgtcttgcagcttcctggtctcaatacccttggcatctcgatagcacgtcttgactttgcacccttgggtttgaacccaccac

SEQ ID NO: 406495 - DNA, 398 bp, Oryza sativa nipponbare
gacagggagagcttgtttctgatgacttggttgttggaattattgatgaagccatgaagaaaccttcatgtcaaaagggtttcattcttgatgggttcccacggacagttgttcaggcacagaagcttgatgaaatgctggaaaagaaaggtacaaaggtcgataaggttcttaactttgccattgatgattcaattttggaagaaagaattactggccggtggatccatccctccagtggcaggagttatcacactaagtttgcacctccaaaggttcctggagttgatgatgtcactggagaaccactaattcaaaggaaagacgacacagctgaggttttgaagtctagacttgaagccttccacaaacaaactgaaccagtgattgactactac

SEQ ID NO: 406496 - DNA, 466 bp, Oryza sativa nipponbare
cccacgcgtccgactgctaatagctatggcaactaccattttctctcgtttttctatatacttttgtgctatgctattatgccagggttctatggcccaactatttaatccaagcacaaacccatggcatagtcctcggcaaggaagttttagggagtgtaggtttgatagactacaagcatttgagccacttcgaaaagtaaggtcagaagctggggtgactgagtacttcgatgagaagaatgaattattccaatgcacaggtacttttgtcatccgacgtgtcattcaacctcaaggccttttggtacctcgatatagcaatactcctggcctggtctacatcattcaagggaggggttctatgggtttaaccttccccggttgcccagcgacttatcagcaacaattccaacaattttcgtctcaaggccaaagtcaaagccaaaagtttaggggatgagca

SEQ ID NO: 406497 - DNA, 325 bp, Oryza sativa nipponbare
  unsure (1)..(325): unsure at all n locations
gntttcttcacaggnngcttgttcctcttgtgcaatggctctctagcccagcagctattaggccagagcactagtcaatggcagagttctcgtcgtggaagtccaagagaatgcaggttcgataggttgcaagcatttgagccaattcggagtgtgaggtctcaagctggcacaactgagttcttcgatgtctctaatgagcaatatcaatgtaccggagtatctgntgtccgtcnagttattgaacctaaangccttctactaccccattacactaatggtgcatctctagtatatatcagccaagggagaggnntaacagggc

SEQ ID NO: 406498 - DNA, 510 bp, Oryza sativa nipponbare
  unsure (1)..(510): unsure at all n locations
cggacgcgtgggactcgatcggaggagaccatggcgacggcgaggctccgatccgcctcctccctccgcggggtcctcctccgccactgctccgtgggaaccacctcgccgccgcaagttttctcccgcgtctcagatcttcaggctcctggatgtattgcatggaagcatttctcaacattcaagcctaatcctcttccaaaacttgatggccttggttcagtcacttgtttgtacagtcaggcaagatgggcttctcaagctgctgctgttaaagaaactgaaaatagtggcagcaagataagcattgggccaaaatccaagcagatcaaggaagatgacaaagatgacaggctagtttaccagggacctatatcatcgaccataanaaaagtgaagcttctttctctttccacctgctgnctttntnngtcgtttggccctnnnataacatttatgacattcnanatatgaatgtaattctaatggnncttttnnattnantgtatt

SEQ ID NO: 406499 - DNA, 147 bp, Oryza sativa nipponbare
  unsure (1)..(147): unsure at all n locations
aaaaggacctgatcgcaagctttggaggaagatctgcaagaacgattatcgtagatgtgcagtgattgaggtatatgatagtgcaaagtacttactgnttaagataatnaaggatgatactgaggatcatgggattgtgananaatt

SEQ ID NO: 406500 - DNA, 236 bp, Oryza sativa nipponbare
  unsure (1)..(236): unsure at all n locations
gcattatacagcaaaatagaaagatctagtgtcccgcagcaatgaagatcattttcgtctttgctctccttgctattgctgcatgcagcgcctctgcgcagtttgatgttttaggtcaaagttataggcaatatcagctgcagtcgcctgtcctgctacagcaacaggtgcttagcccatataatgagttcgnaaggcannannatggnataacggcaagccccttcttgcaatca

SEQ ID NO: 406501 - DNA, 148 bp, Oryza sativa nipponbare
  unsure (1)..(148): unsure at all n locations
ggatgtgaccttttgtaccatgagggggagggggaatatcgacaacccaaacctngcagatacatacaaccccagagcaggaaggatcacatatctaaatggccaaaagttccccattcttaatcttgtacagatgagtgcccgtaaa

SEQ ID NO: 406502 - DNA, 408 bp, Oryza sativa nipponbare
tgcagaatgaggcaactgttgcatattatttactcttggacaatcgattccgagctaccagtggctatttgggagcagactatcaagaatctttggagaggaattttaatcgctttgcttcatcggaatcagcaagttcaaatacaaggcattatcttccaggaagcagtgatcctcatgccagtggtttgcgcccacattatcctgttgaaagaaaatgggctcttggacttcagtcacgagctcaacctcgcgagataatgattgaggtcctaaaggcacttcaagacttaaatgtctcctggaagaagaatggacagtacaacatgaaatgcagatggagcgttgggactcaggccactgatatgttagatggtaacaacagctttgttgatgactcaatcataa

SEQ ID NO: 406503 - DNA, 221 bp, Oryza sativa nipponbare
cccacgcgtccgactccccgttcgtgccgggtctcctctcctcccccgccgacgcgcactcgatcccccccgcctccgcctccgcctccgcctccgcgtggcccatctcgagatcccccgcatggcgacgctcaccgtcccctccgccgtcccgcccgtcgccgacgactgcgaccagctccgcgaggccttccaagggtggggcacgaacgacgcgctca

SEQ ID NO: 406504 - DNA, 280 bp, Oryza sativa nipponbare
  unsure (1)..(280): unsure at all n locations
cccacgcgtccngcaacttcaccaattccaccaaggtgatgtaatcgcagtgccagctggagtagcccactggctatataacaatggtgattctcctgtggttgctttcactgtcatcgacaccagcaacaatgccaaccagctcgatcctaaaagaagggagtttttcttggctggaaagcctagaagtagctggcagcancaatcgnactcataccanacagaacaactgagcagaaatcagaacatctttgctgggttcagcccatatgtactcttt

SEQ ID NO: 406505 - DNA, 165 bp, Oryza sativa nipponbare
  unsure (1)..(165): unsure at all n locations
ngacgagcaccagcaacttcaccaatgtgccaccaaggtgatgtaatcgcagtgccagctggagtagcccactggctatataacaatggtgattctcctgtggttgctttcactgtcatcgacaccagcaacaatgccaaccagctnnatcctaaaagaagggag

SEQ ID NO: 406506 - DNA, 413 bp, Oryza sativa nipponbare
cacggcgcccaatgcccaccacctgttcgaccacctgacacgcctgccatgcctcccgccctcacctccaaccccccctccttccgccccctctccacccctctaacccgccgccgtgccgccacaaccttcctctgccgtgtcggccctggcaagccttccaaggacaccggcgcggatgacgagccgaagaagaggtcgttcttcgccgatttcggtaagctctcggatggaaggtcgctgataccggccttcccgccggccgcggctgggtctctgttcgccggcgggagggggaggaaggacccgcagacagtgttcgtcgcgggcgccacggggcaggcgggagttcgcatcgcgcagacgctgctgcggcaggggttcgccgtgcgcgccggggtgccggacctcgc

SEQ ID NO: 406507 - DNA, 309 bp, Oryza sativa nipponbare
  unsure (1)..(309): unsure at all n locations
ctttgacacaacaacaagaacaagcacaagctcaataccaagaagttcaatatagtgaacaacaacaaacatcttcccgatggaacggattggaggagaacttctgcacaatcaaggcaagagtaaacattgaaaatcctagtcgtgctgattcatacaacccacgtgctggaaggatttcaagtgtcaacagccagaagttccccatccttaacctcatccaaatgagtgctaccagagtaaacctataccanantgctattctctcaccattctggaatggcantgctcatagttnggtntatatga

SEQ ID NO: 406508 - DNA, 305 bp, Oryza sativa nipponbare
cccgcgtccgagattttctgcaaacaaaaagcgcacggctgacaacacggtaacaggtggaggggtctcgcctacgacatctccgatgaccagcaggacatcaccagggggaagggtttcgtcgactcccttttccaggctcccacgggtgatggcacccacgaggccgtcctcagctcctacgagtgcggggggcggggtctaaaaacgtacgacttcgacaacaccttgggaggtctttacatcgcccttgtttttatggacaatctcgttgttcacatttacgaaaactttatgactctccc

SEQ ID NO: 406509 - DNA, 276 bp, Oryza sativa nipponbare
  unsure (1)..(276): unsure at all n locations
ggcagatctccggcgaggtgacagtgcgggggagcatggcgtacgtgccgcagacggcgtggatccagaacgggacgatcgaggagaacatcctgttcgggcgggggatgcagcgggagcggtacagggaggcgatccgggtgtgctccctggacaaggacctggagatgatggagttgggggaccagacggagatcggggagcgcggcatcaacctgagcggcgggcagaagcagcgcattcagctcgcccgcgccgnctaccangacnccgacg

SEQ ID NO: 406510 - DNA, 402 bp, Oryza sativa nipponbare
cccacgcgtccgagcttacatggctctgcctcccctcatggtgggctgtttgctagcgtcggtctcaaagtgtccacagctgcaccagcagtggcacccagtcctgccgagcatgacttcaagattccgttcgctgatcattgcataaagtatgtctcctcagcagtggggtaccaagttcctgggactgaggctgaatctgtcaatgaggaagaggtggtggatggcaaggctgtgaagaaagccaagaaacgtgggctgaagctgaaaattaatattgggaacccacatttgaggcggctggttagcggagccgatgcgggagctgactcgaggacttgtgtggcacctatggagacgattaggacccatttgatggctgggagcaatggggactctatg

SEQ ID NO: 406511 - DNA, 369 bp, Oryza sativa nipponbare
  unsure (1)..(369): unsure at all n locations
gttctagatcgcgagcggccgctcgccgctatttgccgaggaggaatcgactgctttatcaacatgggnctgtggcatccatttgtggatgcctcaggttggagcatgtaatgacactttttgctgcagcactgctggagaaacagattattattgtttgttctaatttgggaatgctttctgcttcagttttgtccatcatacctctgatacgcccatatcagtggcagagtctactcataccggtcttgccaaacgacatgatggactttcttgatgcacctgttccatacatagttggtgtgcagaacaagacatccgatgtacattccaggctagtgaacgccgtggttattgatgccaacaaga

SEQ ID NO: 406512 - DNA, 185 bp, Oryza sativa nipponbare
  unsure (1)..(185): unsure at all n locations
acacaccccaccagcagcagcagcggtggctgagcttgaagcagcagagcgaggtagacatggccgccgccaccatggccctctcgtccccggcgctggccggcaaggccgccgcgaaggtgttcggcgaggggcgcatcaccatgcgcaagtnggnggcgaancccaacccggggggggggggg

SEQ ID NO: 406513 - DNA, 305 bp, Oryza sativa nipponbare
  unsure (1)..(305): unsure at all n locations
gttttctccgtcgtttgcttgttcctcttgtgtaatggttcgttagcccaacttcttagccaaagtactagtcaatggcaaagttctcgccgtggaagtccaagagagtgcagatttgatcggttgcaagcatttgagccgattcgcactgtaaggtcccaagctggtacaactgaggggggggatgtctctaatgagttgtttcaatgtactggagtatttgttgtncgnngagttatnnaacctanagggnttntgttanntnaatattacaatggagcaacgttggtatatgtaataaaagg

SEQ ID NO: 406514 - DNA, 452 bp, Oryza sativa nipponbare
  unsure (1)..(452): unsure at all n locations
gggcacgattgctttcacgagttgggaatccgttgctgtcgtacgtctcgtctatggcgtgctgtatgtcctctccttctttcttcctttccaaataagcactcctcttcttcctcctcctcctcctccgcctcctcttctcattcccaactcatcgatccatcagtagctagctagctagctagctagctgcattgtccggcgagagagatagctgctgcagggggcggccatggggaggggcaagatcgagatcaagcggatcgagaacgcgaccaacaggcaggtgacctactcgaagcgccgcacggggatcatgaagaaggccagggagctcaccgtgctctgcgacgcccaggtcgccatcatcatgttctcctccaccggcaagtaccacgagttctgcagcccttccaccgacattaaggggatctttgaccgctaccancaag

SEQ ID NO: 406515 - DNA, 367 bp, Oryza sativa nipponbare
cagaatatatgtcaggtgggagtgtttatgattacctgcataaacataaaggtgtattcaagctccctgctttacttggagttgtgatggatgtttcaaaaggcatgagctacttgcaccaaaacaatattattcatcgagatttgaaaactgctaatctccttatggatgaaaatgggacagttaaggttgctgattttggtgttgcacgtgttaaagctcaatctggaataatgactgctgaaacagggacatatcgttggatggctccagaggttatagaacacaagccctatgatcacaaggccgatgtttttagttttggaactttgatgggggagctgctcacaaggaaaattcctttatg

SEQ ID NO: 406516 - DNA, 459 bp, Oryza sativa nipponbare
  unsure (1)..(459): unsure at all n locations
cggacgcgtgggcggacgcgtgggcttccccgtcttcttcatccgcgacggcatcaagttccccgacgtcatccacgccttcaagcccaacccgcgctcccatgtccaggagtactggagggtcttcgacttcttgtcccaccaccccgagagcctccacaccttcttcttcctcttcgacgacgtcggcatccccaccgattaccgccacatggacggcttcggcgtcaacacctacaccttcgtcacccgcgacgccaaggccaggtacgtcaagttccactggaagcccacctgcggcgtcagctgcttgatggacgacgaggccacgctcgtcggcggcaagaaccacagccacgccacccaggacctntacgactccatcgccgccggcaacttccccgagtggaagctgntcgtccaggtgatcgacccggaggaggaggagaggntcgactt

SEQ ID NO: 406517 - DNA, 488 bp, Oryza sativa nipponbare
cccacgcgtccgtttcgtatttgctctccttgctattgttgcatgcaacgcttctgcacggtttgatgctcttagtcaaagttatagacaatatcaactacaatcgcatctcctgctacagcaacaagtgctcagcccatgcagtgagttcgtaaggcaacagcatagcatagtggcaacccccttctggcaaccagctacgtttcaattgataaacaaccaagtcatgcagcaacagtgttgccaacagctcaggctggtagcgcaacaatctcactaccaggccattagtagcgttcaggcgattgtgcagcaactacagctgcagcaggtcggtgttgtctactttgatcagactcaagctcaagctcaagctttgctggccttaaacttgccatccatatgtggtatctatcctaactactacattgctccgaggagcattcccaccgttggtggtgtctggtactgaattgtaatagtataat

SEQ ID NO: 406518 - DNA, 210 bp, Oryza sativa nipponbare
cggggcgaataaccggggggcccaccccgcgtgcgaacttttgactgcgactatatggcggcggggctgggtaggatccagcatactggctgcttctgggcatcattctggcctttggagaccagctgaacttgagtcatgggatgacgatctgaaagttggccaggttgttctccaagatgaccgcagctctgcttttttttccagggg

SEQ ID NO: 406519 - DNA, 307 bp, Oryza sativa nipponbare
  unsure (1)..(307): unsure at all n locations
atagcctatataggagactgcgttcagacattgatcagtatgaaggaggactggaaacattttctcgcggttatgagaagtttggatttaatcacagtgctgaaggtgtcacttatcgagaatgggctcccggggcacattctgcagcattagtaggtgacttcaacaattggaatccaaatgcagaccgnatgagcaaagtgcgaatggaaactncatctggtataaaggattctattcctgcctggatcaagtactctgngcaggccgnaggagaaatcccatacaagggaanatattatgatcc

SEQ ID NO: 406520 - DNA, 175 bp, Oryza sativa nipponbare
  unsure (1)..(175): unsure at all n locations
cccacgcgtccgcccacgcgtccggttctagatcgcgagcggccgctcgcgatctanaactagatnagncctacaacaacatggcatncataaatcgccccatagntttcttcacagnttgcttgttcctnttgngcgatggctccctagcccannanntattatgtcaaaacac

SEQ ID NO: 406521 - DNA, 386 bp, Oryza sativa nipponbare
cggacgcgtgggatatgaatgaggtgaatggctctgatgctgttacaacttatgaagacaaggatggtgactggatgcttgttggagatgtcccgtggcagatgtttgtcgagtcatgcaaacgcttgaggatcatgaagggttccgaagccattggtcttgcaccaagagcaaaggacaagtacaagaacaagagctgaaaatgttgcagtattaagatgctgagcatggtgccataagaatggtgttcttgcagtgtgttatggtttccttagaaatataaggttttacttgtttagctggattaaaagaaggaagagttgtcatgtttaatttgtttatggaccagaagcaataatctatttgtgtgtagctggattggtgtt

SEQ ID NO: 406522 - DNA, 411 bp, Oryza sativa nipponbare
cggaggccgagcctgccaggaggcggcggcggctcgggttctgagtgggaaatcaagccatcgcctgcggcagcctcgccttcagcgggtgctcgtcctcgtatatctttgcgatggaccggaagacgtatgagcttgtgggacaagactatccaggtaatccgatggaagacataagagatccttctcttggttggaataacgggtttatgttcctaatcgctctcatcggtccatttagcattgtaatgctgcgaaaggtaatggtaattgattataagctcgcattccctggtgggactgcaacagctctaatgattaatagcttgcatggaaaaacagaagccgatcttgcaggaagaaaagttcattgtctagtcaagtacatgagtcttagttttggctggagct

SEQ ID NO: 406523 - DNA, 276 bp, Oryza sativa nipponbare
  unsure (1)..(276): unsure at all n locations
catatcacacaggcatctgattagagaaatctaatggcttcttcttccttttccttcctgcttgttgctgctcttcttgggttggcctcatggaaagccattgcctcagaccctagccctctccaagacttttgtgtcgctgatctgaattcgccagtgcgagtaaatggatttgttggcgggaacccaatgaacgcgagtgccgacgacttnttcaaggcagccatgctcgataagcctaaaaacacaaacaataaggttgggtccaatgtcact

SEQ ID NO: 406524 - DNA, 580 bp, Oryza sativa nipponbare
gctttctctttctgtgtgtagtgtgtgcaactaggaggcttgttccatactagtttgctaggtcatggaaaagagcgagattttcgtaggagcacactcatatgcagctatatgtgcttttacactcatcataggatggttagctcactgggtatacagatggataaatcctccatgcaatgggaggcttcctccgggctcaatgggcttccctattgttggtgagaccttccaatttttcagaacaagtccatcaatagacatgccaatttactacaagcgaagactggagaggtatggacctatattcaaaactaacataggaggccagcacgtggtcatatcccttgatcccgaggtgaaccagttcatatttcaacaagaggggaagttgttccaatcctggtttccagaaaccacactaaacatctttggaaagaagacactcaccacgtataatagaactgctcacaagttgatccggagcttcgtatgcaagctctatggccctgaaaacgtgaaaaaatcactcctgccagaactagagaactccatgagggaaagcttggcgtcatggata

SEQ ID NO: 406525 - DNA, 507 bp, Oryza sativa nipponbare
cccacgccgtgcggtgtgcatcagtcctacgacatcatggcatgcataaatcgccccatagttttcttcacagattgcttgtatcctcttgtgcgatggcatccctagcccagcagctattatgccagagcactagtcaatggcagagttctcgtcgtggaagtccgagaggatgtagatttgataggttgcaagcatttgagccaattcggagtgtgaggtctcaagctggcacaactgagttcttcgatgtctctaatgagttgtttcaatgtaccggagtatctgttgtccgccgagttattgaacctagaggcctactactaccccattacactaatggtgcatctctagtatatatcatccaagggagaggtataacagggccgactttcccaggctgtcctgagacctaccagcagcagttccaacaatcagggcaagcccaattgaccgaaagtcaaagtcaaagccataagttcaaggatgaacatcaaaagattcacc

SEQ ID NO: 406526 - DNA, 248 bp, Oryza sativa nipponbare
  unsure (1)..(248): unsure at all n locations
gtcgaccccgcgtcncggnaagccattggtgttctcactgtggccagataagctcatgttcttccagaagcaggttgccaaaagaagagaaaagctgttgaattacatgctttttctcagggtcaccccaacattgccaaacaccttcattaacttagcttcacccatagtagatgtgccctaccatatattcttactggcaactctcatcggtctcatccnagcttcctatgttactgtcagggctg

SEQ ID NO: 406527 - DNA, 487 bp, Oryza sativa nipponbare
  unsure (1)..(487): unsure at all n locations
cccacgcgtccgcccgaccaccacaatccctacccttttcaaaaagaggagagaggggatcggaggagaatttctccacttcacccccaacaagcatcccgaccaccaccaccccccgctaccccaggagagattcacccgcaatgtccgacgaggccaccaggcgcttggccgggggcggcgggggcggcgcggcgctgagggcctcctccgacgtcgaccgcaagccggccgccgcgggctccccgcctcctggcgccgccgccgccgcggggcncangatccagctcangagcgccgacatgaaggaggagatgcgccaggaggccttcgacatcgcccgcgtcgcgttcgagaagcacaccatggagaaggacatcgcggagtacatcaagaaggagttcgacaagaaccacggcccttacctggacttgattcgttggcgnaacttggggtnctacgaacacacgagacgaactattttgtg

SEQ ID NO: 406528 - DNA, 474 bp, Oryza sativa nipponbare
gttgctacctgcctccatatcttcctttcaacaaccgaaattgtatatccagtgcttgtgattcttaagtgtgattctgcagttttgtctggctttttgttgatatttattgcctgtattgtttggctgaagcttgtatcttttgcacatacaaaccatgatataaggcaactgaccatgggcggcaagaaggttgataatgaactaagcacagttgacatggataatttacaacctccaactttagggaatctaatatacttcatgatggctcctacactctgttatcagccaagctatccccgaacttcatgtgttagaaaaggttggctgattcgtcaaattattctgtacttgatctttactggtcttcaaggcttcattattgagcaatacataaatccaattgttgggaattctcagcatccattgaaaggaggactcctaaatgcctgaaagaacgttttgaaactc

SEQ ID NO: 406529 - DNA, 440 bp, Oryza sativa nipponbare
gttttcttcacagtttgcttgttcctcttgtgcaatggctctctagcccagcagctattaggccagagcactagtcaatggcagagttctcgtcgtggaagtccaagagaatgcaggttcgataggttgcaagcatttgagccaattcggagtgtgaggtctcaagctggcacaactgagttcttcgatgtctctaatgagcaatttcaatgtaccggagtatctgttgtccgtcgagttattgaacctagaggccttctactaccccattacactaatggtgcatctctagtatatatcatccaagggagaggtataacagggccaactttcccaggctgtcctgagtcctaccaacaacagttccaacaatcaggccaagcccaattgaccgaaagtcaaagccaaagtcaaaagttcaaggatgaacatcaaaagat

SEQ ID NO: 406530 - DNA, 147 bp, Oryza sativa nipponbare
gaaactggtatttgggctgtgcgggggtgggggtctattcttgctttcaagaacaaggacagccttggaggcgataagcttgttactgctgaagatattgccccgcaacgctggagtacttatggttgccattattatacacgaggt

SEQ ID NO: 406531 - DNA, 185 bp, Oryza sativa nipponbare
cgtccggtctgatatgcgtgcgagtcgacggggggtgaagcctgggatgcacaaggaagctgacgagcgggaggccctaacgcgccttagcgatagatggatttctgaccccaccatatgttttgcatttctatatattcctttaaaagaccttttcatagtccttacagttttttttttttttc

SEQ ID NO: 406532 - DNA, 355 bp, Oryza sativa nipponbare
cccacgcgtcccggaaaaaaaacatatacaccttctagtgatatgtctgattgatcatcaatggctagcaaggtcgtcttcttcgcggcggcgctcatggcggccatggtggccatctccggcgcgcagctgagcgagtcggagatgaggttcagggacaggcagtgccagcgggaggtgcaggacagcccgctggacgcgtgccggcaggtgctcgaccggcagctcaccggccgggagaggttccagccgatgttccgccgcccgggcgcgctcggcctgcggatgcagtgctgccagcacctgcaggacgtgagccgcgagtgccgctaccccaccatcgcgccggatggag

SEQ ID NO: 406533 - DNA, 602 bp, Oryza sativa nipponbare
cgatgccaagcggacactgagagaaatcaagctgcttcgccacatggaccacgagaatattattgccataaaggacataattcgccccccaagaagagacaactttaatgatgtttacattgtttctgagttgatggatactgatctccatcagatcatacgctcaaatcaaccattgactgatgaccactgccagtacttcctgtaccagttgctacgagggctaaaatatgtgcactcggcaaatgtcttgcaccgtgatctgaagccaagcaatttgttccttaatgcaaattgtgatctcaagattgctgattttgggcttgcaagaaccactacggagactgacctcatgacagagtatgtggtcactcgttggtatcgagcaccagagctgctgttgaactgctcgcagtatactgctgctattgatgtctggtcagttggatgcatacttggtgaaattgtgactcgtcaacccctgtttcctggaagggattacattcagcaactaaaattgatcactgagctgatagggtcgccagatgactcaagcctagggtttcttcggagtgataatgcaagaagatacatgaaacagc

SEQ ID NO: 406534 - DNA, 476 bp, Oryza sativa nipponbare
  unsure (1)..(476): unsure at all n locations
tgttgagatccaggacagaagcaagattggtggttcttacttgcattctgatgcaatatgctgcactcctgagctcgataaagagaagtcctgcaaagttggtgaagtaattatacagccaaatcctgataatcctgactggccaaaaagggttcagacattttttagtggtagagatgaagaagctagcatggtcacacaagttgtatctataaacaaaacagggatgtactacctctattttatgttctgtgatccacagctcaagggattgaagattacaggcaggactgtttggcgaaacccacaaggttatctccctggtaaaatggccccaatgatgacattttatggtttcatgtcgcttgcatatcttgtacttggacttctgngggttcttcagattgggcgaagctggaaggatattttgagctgcctaccatataacagctgctaatggtctttgcatgcgccac

SEQ ID NO: 406535 - DNA, 464 bp, Oryza sativa nipponbare
cccacgcgtccggtccacgggagctgctgatgtattggagagagaaggcttccaaaatctggcatgcatcaaatcagggcttcagacactgaagccaggaacatttgaatctgttggcaaaagtgagctgcaaaacgcagggaaagcaggacttgtgacggtgcaagggaagatttccgctgttcttggaactgtgttgataagtaagatgactggaactatttttatctgagataagtacgtcatgatcataaacttgtcttatgcgagtttcatctacaggtgcctaccttttcatcacattgttccctgaccaggctgaaaagctttttgacttggctggaatcaaattgtgatcagaattgtatctcttttcatgcattttggttctcctcttggggatgcatgttcccattgcaaggttaacttaagcggacttggggagatcttttcatgatgaaaag

SEQ ID NO: 406536 - DNA, 273 bp, Oryza sativa nipponbare
  unsure (1)..(273): unsure at all n locations
cgtccggtggtgctgcttctagttctcgccgtgctgccgtcccgggcggccggggtgacgtgacggccgcgctcgcggctttccccagcttcgccgacttcgcgcggctactggagtagagccaggtggacggagagctggcgagagcggcatctgctactacagcaacaagtgctcagccgatggagtgagtacgtaaggcaacagtatagcataatgacaaccccattatggcaaccatctacatttcaattgataaacaaccaanacatg

SEQ ID NO: 406537 - DNA, 414 bp, Oryza sativa nipponbare
  unsure (1)..(414): unsure at all n locations
cgctctcagacttgagtaacatgttgggagagctgaagggtatggcattggatatgggcacagaaattgaaaggcaaaataaatcactggatgctttcggtgatgatgttgatgaactgaacttcagagttaaaggggcaaaccaacggggacgccggttattgggcaaatgatgccatcaggttgtcgaaccacagcaactctgtttctagcagttttctccatcccatgggattcaggacttgtgagtgcgattagcagatgcgcctacttcatctggatattctgtcgtgtctgaattctgagcaaatattcagattcccgtgttggggtgttgtatgagaaatcgtcttatacacttggtgtntgataaagtgatagcttnaattacttggggtangacataaccaccat

SEQ ID NO: 406538 - DNA, 300 bp, Oryza sativa nipponbare
  unsure (1)..(300): unsure at all n locations
accaggctttcaataaagaaatgtatggggtccttcttccttttccttcctgcttgttgctgctcttcttgggttggcctcatggaaagccattgcctcataccctagccctctccaagacttttgtgtcgctgatctgaattcgccagtgcgagtaaatggatttgtttgcaagaaccgggtgaacgcgagtgccgacgacttcttcaaggcagncatgctnaataagcctagacacacaaacaataaggttgggtccaatgtcactttggtaaatgtcttgcagattcctggtctaat

SEQ ID NO: 406539 - DNA, 472 bp, Oryza sativa nipponbare
  unsure (1)..(472): unsure at all n locations
cccacgcgtccgcccacgcgtccgcaagtttccaataacatcctcaaatagctatggcgaccatagctttctctcggttatctatctacttttgtgttcttctcctatgccatggctctatggcccagctatttggtccgaacgtaaatccatggcacaaccctcggcaaggaggttttagggagtgtagatttgatagactacaagcatttgaaccacttcggagagtgaggtcagaagccggggttacagagtactttgatgagaagaatgaacaattccagtgcacaggtacatttgtcatccgacgtgtcattgagcctcaaggccttctggtacctcgatacagcaatactcctggcatggtctacatcatccaagggagaggttctatgggattaacttttcccggctggccagcnacctaccaacaacaatttcaaacattcttggctgaaggccaagccagagc

SEQ ID NO: 406540 - DNA, 311 bp, Oryza sativa nipponbare
cgtccgcccacgcgtccgcggacgcgtgggagcccaggttcaagttgtcaacaacaatggaaagacggtgttcaacggagagcttcgtcgtggacagctacttattgtaccacaacactatgtagttgtaaagaaggcacaaagagaaggatgtgcttacattgcattcaagacaaaccctaactctatggtaagccacattgcaggaaagagttccatcttccgtgctctcccaactgatgttctagcaaatgcatatcgcatctcaagagaagaggctcagaggctcaagcataatataggagatgagt

SEQ ID NO: 406541 - DNA, 369 bp, Oryza sativa nipponbare
  unsure (1)..(369): unsure at all n locations
ccggtcgacccgcgtccgggcgcgtggggtaccggagtatctgttgtccgtcgagttattgaacctagaggccttctactaccccanacactaatggtgcatctctagtatatatcatccaagggagaggtataacagggccaactttcccaggctgtcctgagtcctaccaacaacagttccaacaatcaggccaagcccaattgaccgaaagtcaaagccaaagtcaaaagttcaaggatgaacatcaaaagatccaccgtttcagacaaggagatgtaattgcattgcctgctggtgtagctcattggtgctacaatgatggggaagtgccagntggtgccatatatgtcactgatctcaacaacg

SEQ ID NO: 406542 - DNA, 294 bp, Oryza sativa nipponbare
cccacgcgtccgggcttcctccttcccctccgagcaccgccgccgccgccgccaccgccaccgcagcctgaccgctcggtctccggcaaccagacaaaatggtgagagtcagtgtcctcaacgatgctctgaaaacaatgtacaatgctgagaagcgtgggaagctgcaagtgatgatccgaccctcatcaaaggttatcatcaagtttctcatcgtgatgcagaagcacggctacattggtgaatttgagtttgttgatgaccaccgctctggcaaaattgttgttgtgctga

SEQ ID NO: 406543 - DNA, 409 bp, Oryza sativa nipponbare
cgtccgcccacgctgtccgcccacgcgtccgcccacgcgtccgcccacgcgtccgcttcattatggagagtccatcagctccacggagatcacctggacctagccctctggggggttcgccgacaatgggcgacaggacaatgaaggcgcctactccatctgttctccacagagacggtgagcccgagttgtagtaccgggaaatgcaatgaagcattagttatcctgagtctattttgtatatttgatgtaaagaaaactaccatacaccttttttttttcatctgcagcttccatgcaactgccattgcttatgaaatgtatagactagaccatcatttcagttcagttctgtactactctgtaagatttctttttgaggtgaagtgaatggtaagcgagagttgtc

SEQ ID NO: 406544 - DNA, 514 bp, Oryza sativa nipponbare
cccacgcgtccgcccacgcgtccgcaaaaacatggcaaccatcaaattccctatagttttctccgtcgtttgcttgttcctcttgtgtaatggttcgttagcccaacttcttagccaaagtactagtcaatggcaaagttctcgccgtggaagtccaagagagtgcagatttgatcggttgcaagcatttgagccgattcgcactgtaaggtcccaagctggtacaactgagttttttgatgtctctaatgagttgtttcaatgtactggagtatttgttgtccgtcgagttatcgaacctagaggtcttctgttacctcactactccaatggagcaactttggtatatgtcatccaaggcagaggtataacaggaccaactttcccaggatgtcctgagacctatcaacaacagtttcagcaatccgagcaagaccaacaattggaaggccaaagccaaagccataaatttagagatgaacatcaaaagatccacccgtttcaacagggggat

SEQ ID NO: 406545 - DNA, 385 bp, Oryza sativa nipponbare
ccccgcgtccgactccccgttcgtccgggtctcctctcctcccccgccgacgcgcactcgatcccccccgcctccgcctccgcctccgcctccgcgtcgcccatctcgagatcccccgcatggcgacgctcaccgtcccctccgccgtcccgcccgtcgccgacgactgcgaccagctccgcaaggccttccaagggtggggcacgaacgaggcgctcatcatctccatcctggcccaccgcgacgcggcgcagcggcgcgccatccgccgcgcctacgccgacacctacggcgaggagctcctccgcagcatcaccgacgagatctccggcgacttcgagagggccgggatcctgtggaccctggacccggcggagcgcgacgc

SEQ ID NO: 406546 - DNA, 362 bp, Oryza sativa nipponbare
aatcgatcttcagaagagctgagaaaggagcgatttgtaaattaggttaatggaacaaaatattccacgttttgcccaatttctataaatttgagtacctgaattcactcacaccaaatggattgccacatcttttaaaggacaaagttattgtcttgtcatattgctgcgcaatctcgacctgcacaacgggttgtgcaatggaactaggcttatgattagagcatttcagaattattccattagtgctgagattgtcggtggtgcacatgctgggaagagggtcttcataccacggattccattgcacccctcggaggatcttcaattgccttttaagttcaagcggaagcagtttccca

SEQ ID NO: 406547 - DNA, 567 bp, Oryza sativa nipponbare
cccacgcgtccgcccacgcgtccgcccacgcgtccggcattatacagcaaaatagaaagatctagtgtcccgcagcaatgaagatcattttcgtctttgctctccttgctattgctgcatgcagcgcctctgcacagtttgatgttttaggtcaaagttataggcaatatcagctgcagtcgcctgtcctgctacagcaaccggtgcttagcccatataatgagttcgtaaggcagcagtatggcatagcggcaagccccttcttgcaatcagctgcgtttcaactgagaaacaaccaagtctggcaacagctcgcgctggtggcgcaacaatctcactatcaggacattaacattgttcaggccatagcgcagcagctacaactccagcagtttggtgatctttactttgatcggaatctggctcaagctcaagctctgttggcttttaacgtgccatctagatatggtatctaccctaggtacaatggtgcacccagtaccattaccacccttgggcggggtcttgtaatgagttttaacagaatagtggttcggaagtaaaaat

SEQ ID NO: 406548 - DNA, 334 bp, Oryza sativa nipponbare
  unsure (1)..(334): unsure at all n locations
ngctcagtctctgtctcgtcgtcctcgcatctccactcgccatgggcaagattaagatcggaatcaacggtttcggaaggatcgggaggctcgtggccagggtggccctccagagcgaggatgtcgagctcgtcgccgtcaacgaccccttcatcaccaccgactacatgacctacatgttcaagtacgataccgtgcacggccaatggaagcacagcgacatcaagatcaaggactccaagactctgctcttgggcgagaagccggtcaccgttttcggcatcaggaaccctgacgagattccgtgggctgaggctggtgctgagtatgtcgt

SEQ ID NO: 406549 - DNA, 394 bp, Oryza sativa nipponbare
agccatgacaactagataatgtgacatttctctccgacaaatatttctctagaggaattactcaagaagttcagaaagtactggaatccattcacatgcccatccttttacctcaatttatttacggaataacgactcaaaacatggaaagagaaacacgcaaatcttagcacaggcagaacaactcaaaacactcgtcagaggaggtcatcagaccatcgctctcagctcccgagcagagacgtcaagaaggccagccctccgatcaagagcatgatgttgaggaagtagttggactgcagaggcttgtccgggctgcctccgaatccctcgtactccgccctgatcttctgcttcatcgagtccgacagctccttctttccgtaggagtatt

SEQ ID NO: 406550 - DNA, 403 bp, Oryza sativa nipponbare
attttcgtctttgctctccttgctattgctgcatgcagcgccactgcgcagtttgatgttttaggtcaaaatattaggcaatatcaggtgcagtcgcctctcctgctacagcaacaggtgcttagcccatataatgagttcgtaaggcagcagtatagcattgcggcaagcaccttcttgcaatcagctgcgtttcaactgagaaacaaccaagtcttgcaacagctcaggctggtggcgcaacaatctcactaccaggacattaacgttgtccaggccatagcgcaccagctacacctccagcagtttggcaatctctacattgaccggaatctggctcaagctcaagcactggtggcttttaacttgccatctacatatgggatctacccttgggcctata

SEQ ID NO: 406551 - DNA, 139 bp, Oryza sativa nipponbare
aaccaaactgtaaaataaaaatatatagcatattatatattgatatatcatcaacatagcccaaaacaaagctgcatactattattataggcagcaatccaccagcgcgatgcttgatcttagcttcatcgccgggggg

SEQ ID NO: 406552 - DNA, 519 bp, Oryza sativa nipponbare
gcattagagcctctccaggtttatccaattatagaggaaaaggttaatgccttgaatatgaatgcagagatccttaaccgtgctgtcaatgaagggtttagtggtggtgaaaggaagcgcaatgagattctgcaactctctgtcttaccgtgggcggcggcgtgaaactgtggtccaaaatgcaattcactgatatatttatgaccaataaatataggcaaaagtttcctgaaaaaagtgctagaagataatattttatgagacagtgcttccttgaacatttttacctgtcagaagaatttgtttgactatctagttatgtacttcgataaatttgtgcctcttatttgttttctcattatcaattataggtccttggggctgatttagctcttcttgacgagattgattcgggattagatgttgatgcactcgaatatgtagctaaagcagtgaatgggatcttgacacccaacagctctctaatgatgattacacactaccaacgtctcttggatc

SEQ ID NO: 406553 - DNA, 359 bp, Oryza sativa nipponbare
  unsure (1)..(359): unsure at all n locations
cccacgcgtccgcccacgcgtccggcgtcgcgcacacactctccctttgcctcgcgcagaggcggccgcgccttctccgccgcgaggcatggccggcgccgccgccgccgtggaggacgccgggatggacgaggnccagaagcggctcatgttcgacgacgaatgcattttggtggatgaacaagacaatgttgttggccatgaatcaaaatataactgccatctgatggaaaaaatcgaatctgaaaatctacttnatagggctttcagtgtattcctgttcaactcaaaatatgaactcctaatccagcaacnaanttgaacaaaggttacatttnctntaaatgggaccaacactt

SEQ ID NO: 406554 - DNA, 519 bp, Oryza sativa nipponbare
ggagaagatatcaatgaatggctggctgtgaatactgtggatttctttaaccaagttaacctgctgtacggcacactcgctgagttctgcacacctgagagctgcccaacaatgactgctggcccaaagtatgagtacagatgggctgatggtgtacagataaagaagccgatagaagtatcagcaccaaaatatgtggagtacctaatggactggattgaaggccaacttgatgatgaatctatatttccccaaaagcttggcacaccattcccgccaaacttcaaggaggttgtaaagacaattttcaagcgcttgtttcgtgtttatgcccacatatatcactcccattttcagaagattgtcagcctcaaggaggaggcccatcttaacacgtgcttcaagcacttcatcctgtttacaactgaatttggcctgattgacaagaaggagctggctccactccaggagctcatcgaatcgattattccatactgagaagaatacagggacggaacg

SEQ ID NO: 406555 - DNA, 411 bp, Oryza sativa nipponbare
cccacgcgtccggctggacgagggcaagcagaccgaccaggacaggtggaagggtctcgcctacgacatctccgatgaccagcaggacatcaccagggggaagggtttcgtcgactcccttttccaggctcccacgggtgatggcacccacgaggccgtcctcagctcctacgagtacctcagccagggtctcagaacgtacgacttcgacaacaccatgggaggcttctacatcgcccctgctttcatggacaagctcgtcgtccacatctccaagaacttcatgaccctccccaacatcaaggtcccactcatcctgggtatctggggaggcaagggtcagggaaaatccttccagtgtgagctcgtcttcgccaagatggggaataaccccatcatgattagcgccgg

SEQ ID NO: 406556 - DNA, 263 bp, Oryza sativa nipponbare
  unsure (1)..(263): unsure at all n locations
ccagcacctcctcctccgccgccgacgccgactcctccctccaagctttccccaccatggcgtcgtcgtccgtcttcgctggcctcgcgcaggcgccggaggaccccatcctcggggtgacggtcgcgtacaacaaggatcccagccccgtgaaggtcaatctcggcgtcngcgcctacggggccgaggaagggaagcccctggtgctgaatgtggncaggcgcgctgagcanatgctgatcaacaaccnnntacgtgttaag

SEQ ID NO: 406557 - DNA, 504 bp, Oryza sativa nipponbare
gctatggcattggcatcagacaagttcgtcctctccgccatcgtgctcgccgtcctcaccgtcgcggcagcggcggcgggctacggcggctacggcgacgtcggcgagtactgccgcgtggggaaggcggtgtcccggaacccggtcccatcgtgccggaactacatcgcgcggtggtgcgccgtcgccgggggccgcctggactccggcaagcagccgccgcggcagctcctggagccgtgctgccgggagctcgccgcagtgccgatgcagtgccggtgcgacgcgttgagcgtgctggtgcgtggcgtggtcacggaggagggcgaccgcgtcgccgggatgatctcgcagcacgcggcgcccgggtgcgacgccgcgacgatcgccgggatggcgagcgcgctgacggactacggccggtgcaacctgcagcacactggtttttttggctgcccatgtttgggggtggcatggattaacttccttagtaattaattaatt

SEQ ID NO: 406558 - DNA, 526 bp, Oryza sativa nipponbare
tccagcaccagcagcaagcttcttcttcagcaactcagcagcacttcacctgctgctgctgcgaccgccgtgaccatcaccacctcgtcgccggcgagaaacctgcagagggcgagggcgagtgcggcggagcaggggatggaggagcatggcaaggcggctgtcggctgggcggccagggacgactccggcgtcctctccccgtacaacttctccaggagggctcagaaggacgatgacgtcaccatcaaggtgctctactgcggcatctgccacactgacctgcacatcgtcaagaatgattggggcaacgccatgtaccccgtcgtccccggccacgagatcgtcggcgtcgtcaccggcgtcggcgccggcgtgaccaagttcaaggccggcgacacggtgggcgtgggctacttcgtcgcgtcgtgccgcggctgcgagtgctgcgggaatgggtacgagaactactgcgccaagatggtaaccacctggaacggcgtcgaccacgaccacggcgggctcg

SEQ ID NO: 406559 - DNA, 604 bp, Oryza sativa nipponbare
cccacgcgtccgcccacgcgtccgcccacgcgtccgcccacgcgtccggtgaataactatggcttccatgtctaccattcttccattgtgccttggcctccttctcttcttccaagtgtccatggcacaattttcatttgggggaagcccacttcagagcccacgtggatttaggggagaccaagatagtcgtcatcaatgtcgttttgagcacctcaccgcccttgaggcaacacaccagcagagatctgaagctggattcactgagtactacaacattgaggcaagaaatgagttccgttgtgccggagtgagcgtgaggcgcttagtcgtcgagagcaagggcttagttttaccaatgtatgctaatgctcacaagcttgtctacatcgtccaaggtcggggagtgtttgggatggcactgcctggttgtccagagacgttccagtcagttaggtctccctttgagcaagaggtggcaacagctggtgaggctcaatcatcaatccaaaaaatgagagacgagcaccagcaacttcaccaattccaccaaggtgatgtaaatccagtgccagctggagtagcccactggctatataacaat

SEQ ID NO: 406560 - DNA, 343 bp, Oryza sativa nipponbare
  unsure (1)..(343): unsure at all n locations
ctcccgcaccaagccgcctgagccctagccgccgccgccgccgcgcgccaccaccgccgcaaccatggccgccgcgctcacccgcccgccgccaggcacggtccagtgcttcgggcgcaagaagacggcggtggccgtctcctactgcaagccggggcgcgggctgatcaaggtgaacggcgtcccgatcgagctgatcaggccggagatgctccgcctcaaggcgttcgagcccatcctgctcgcggggaggtcacgcttcaaggacatcgacatgaggatccgcgtncggggcggagggaagacgtnnganatctacgcgatccggcaggncattggcaag

SEQ ID NO: 406561 - DNA, 399 bp, Oryza sativa nipponbare
gtcctacaacaacatggcatccataaatcgccccatagttttcttcacagtttgcttgttcctcttgtgcgatggctccctagcccagcagctattaggccagagcactagtcaatggcagagttctcgtcgtggaagtccgagaggatgtagatttgataggttgcaagcatttgagccaattcggagtgtgaggtctcaagctggcacaactgagttcttcgatgtctctaatgagttgtttcaatgtaccggagtatctgttgtccgccgagttattgaacctagaggcctactactaccccattacactaatggtgcatctctagtatatatcatccaagggagaggtataacagggccgactttcccaggctggcctgagacctaccagcagca

SEQ ID NO: 406562 - DNA, 435 bp, Oryza sativa nipponbare
  unsure (1)..(435): unsure at all n locations
ctacggtgaacacaagatatgaggcctttttgccagagaactttaaaaagcccagacatgattgcacaacagaggagcgttgcaatttcattaggaaaaagtacgagtttcaacagtttgtgactgatccacagttttcatgccctttacgattgaataccaaacacgcaccagacaagagtgagcagcagcaaaactgcagtgcgcgacatggttttggccatgcttttaggaatagctggaagagaaaggacacagataacaaaggactaaagaaaatgacggatgtgggtatggtggaatttgttggattaattaaggttgatattagacggggcacaaatnttgctgttngtgatgtgatgtnaagtgatccatatgttatgcttaacctangacaccaaaccatgaaaacgaagggggtaaagaacaccc

SEQ ID NO: 406563 - DNA, 447 bp, Oryza sativa nipponbare
  unsure (1)..(447): unsure at all n locations
tccaagaacaaaaatcttgaccgcagtgtcgatgagagtgtgcttggaatcattcttggaggtggtgcagggactagattgtatcccctcaccaagaagcgtgccaagcctgccgtgcctctgggtgccaactacaggcttattgatatccctgtcagcaactgtttgaacagcaacatatgcgagatctatgtgctgacacaattcaactctgcctctctgaaccgtcacctgtcaagagcctatgggaacaacattggcgggtacaagaatgaagggttcgttgaagtcctcgctgcacagcagagcccagataatcctaactggtttcagggtactgcagatgctgtaagacagtacttatggctatttgaggagcataatgttatgggagttntaattntggctggagatcacctttacccgatggactatgaaaagtttatt

SEQ ID NO: 406564 - DNA, 151 bp, Oryza sativa nipponbare
  unsure (1)..(151): unsure at all n locations
atgaaggcgatgcaccagttgttgctctatatgtcttcgacttaaacaacaacgctaatcagcttgaaccaaggcagaaggagttcttattggcgggtaacaacaacaggggagcacanatgtatggtcgctcaatcgagccacactctgg

SEQ ID NO: 406565 - DNA, 535 bp, Oryza sativa nipponbare
cagaatatatgtcaggtgggagtgtttatgattacctgcataaacataaaggtgtattcaagctccctgctttacttggagttgtgatggatgtttcaaaaggcatgagctacttgcaccaaaacaatattattcatcgagatttgaaaactgctaatctccttatggatgaaaatgggacagttaaggttgctgattttggtgttgcacgtgttaaagctcaatctggagtaatgactgctgaaacagggacatatcgttggatggctccagaggttatagaacacaagccctatgatcacaaggccgatgtttttagttttggaattttgatgtgggagctgctcacagggaagattccttatgagtacctgacaccattacaagcagctgtaggtgtggttcagaagggattacggcctacaataccaaaaaatgctcatgcaaaactttctgagctttttcagaaatgttggcaacaggagcctgctgaaagaccagatttctctgaaatattagaaactcttcaaagaat

SEQ ID NO: 406566 - DNA, 613 bp, Oryza sativa nipponbare
cgtgatggggagctcgcgggccagctccgccgcggcggcgcggggcatagtcgacgccgccggggaccccatatgggaggccgtcaagtcggaggccaagtctgaggcagagaaggaacctattttaagtagcttcttgtacgccagcgtactatctcatgactgtctcgagagggcgttgagtttcgtccttgcaaacaggctcgaagatccaacattgcttgcaactcagttaatagacattttcaatgatgttatgatgaacaacaaagatatacgccgttctattcgccttgatgctcaggcctttaaagacagagatcctgcctgtgcacaatacagttgggcattgttgtacctcaagggttaccattccgtgcaatcctataggatagctcatgtattatggaatcaaggtcgtaaagttctggcattggcactgcagagccgtatcagtgaggtttttgcagtggatatacacccagcggccagaattggagagggaatattgttggatcatggaacgggtctagttattggtgaaactgccattgttggaaactgggttttattaatgcaaggtgttacacttggttgtactggcaaggaaaat

SEQ ID NO: 406567 - DNA, 436 bp, Oryza sativa nipponbare
  unsure (1)..(436): unsure at all n locations
ccacaattcaaatattatagttgaagcatagtagtagaatccaacaacaatgaagatcattttcgtatttgctctccttgctattgttgcatgcaatgcctctgcgcggtttgatcctcttagtcaaagttataggcaatatcaactacagtcgcatctcctactacagcaacaagtgctcagcccatgcagtgagttcgtaaggcaacagtatagcatagtggcaacccccttctggcaaccagctacgtttcaattgataaacaaccaagtcatgcagcagcagtgttgccaacagctcaggctggtagcacaacaatctcactaccaggccattagtattgttcaagcgattgtgcaacagctacaactgcagcaatttagtggtgtctacttngatcagactcaagctcaagcccaaactntggtgaccttt

SEQ ID NO: 406568 - DNA, 519 bp, Oryza sativa nipponbare
aagcaattcactccgactagatggcagcagtccttggtaggatccagcatactggctgcttctgggcatcattctggcctttggagacgagctgaacttgagtcatgggatgacgatctgaaagttggccaggttgtttttcaagatgacgggagctctgcaaggcttcccagtgattctctttcaatctcagaatatgctgatgagagcgatgaagatggtgaaggaagctcaagtgatgaaggatctgattttagtgaggatggagatcaagaggatgaatctgttcatcagggtctaggccttttggaatccaaaaatttaagtggtgttcagacagagactgcgatctttgcaaagtgggagcaccataccaggggcgttgcctccaaaatgatggcaaaaatggggtaccgagagggaatgggtctaggtgtttctggacaaggcatgcttgatccaatcccagttaaggtactacccccaaagcaatctcttgatcacgctggggctgcaagt

SEQ ID NO: 406569 - DNA, 410 bp, Oryza sativa nipponbare
cccacgcgtccggcaccatggttctacaatgctggtgctgcacctcttgttgccgtatatgtttatgacgtaaacaacaacgccaatcagcttgaacctaggcaaaaggagttcctattagccggcaacaacaatcgggctcaacaacaacaagtatatggtagctcaattgagcaacactctgggcaaaacatattcagcggatttggtgttgagatgctaagtgaggctttaggcatcaacgcagtagcagcaaagaggctacagagccaaaatgatcaaagaggagagatcatacatgtgaagaatggccttcaattgttgaaaccgactttgacacaacagcaagaacaagcacaagcacaagatcaatatcaacaagttcaatacagtgaacgacagcaaacatc

SEQ ID NO: 406570 - DNA, 527 bp, Oryza sativa nipponbare
catcaatcggcgcctccctctctctcgctcaccgcctccttctcctcgcgatctatccaaacaaggggctcgctaagatcggcatgtcggactctgaggagcaccatttcgagtcgaaggccgacgctggggcgtccaagacctatccccagcaggccggaaccatccgcaagaatgggtatattgttatcaagaaccgcccctgcaaggtggtggaggtttctacctcgaagactggtaagcacggtcatgccaagtgtcactttgttgccatagatatattcaatggtaaaaagcttgaggatattgttccttcgtcccacaactgtgatgttccacatgtgaaccgcacagagtaccagctgattgacatatcagaggatggattcgtgagccttcttactgagagtggtaacactaaggatgatcttagactcccaactgatgacagtctcctgggtcagatcaagactggatttggtgaaggcaaggatcttgttgtgactgtcatgtccgccatgggggag

SEQ ID NO: 406571 - DNA, 355 bp, Oryza sativa nipponbare
cccacgcgtccgggtctatatgattcaagggcaatctcgagttcaagtcgttagtaactttggaaagactgtgttcgatggtgtccttcgccctggacaactattgatcattccacaacattatgctgtcttgaagaaagcagagcgtgaaggatgccaatatattgcaatcaagacaaacgctaacgccttcgtcagccaccttgcaggaaaaaactcagtattccgcgccttaccagttgatgtggtcgctaatgcttaccgcatctcacgggagcaagcccgaagcatcaagaacaataggggagaagagcacggtgccttcactcctagatttcaacaacaatactaccca

SEQ ID NO: 406572 - DNA, 450 bp, Oryza sativa nipponbare
  unsure (1)..(450): unsure at all n locations
gtcgcgccgctccggaggcggaggcggaggcggctacggccagcgcggcggaggcggaggctacggtggcggcggcggctacggtggtggcggcggcggtggctacggccagcgccgtgaaggcggctacggcggtggcggcggctacggtggcggccgtggcggcggcggcggctacggcggtggctacggcagccgcggcggcggcaactccgacgggaactggaggaactgagcggtggggccctcatggccaagttatctatctatctaatcgagctaccatcatcatcatccgatcgttatcatcgttagttttgtgtggaactactatctagtttgtgttactgtgtggttgcccatctgtgtttttgatcgcaagaagaaagctcgtctcgtgtttgctttgatcaaatgaaatgaatgaatgaatcttantgtgctccgctc

SEQ ID NO: 406573 - DNA, 494 bp, Oryza sativa nipponbare
cccacgcgtccgcccacgcgtccgcgcacgcgtgcgcccacgcgtccgcaggccaagcccaattgaccgaaagtcaaagccaaagtcaaaagttcaaggatgaacatcaaaagatccaccgtttcagacaaggagatgtaattgcattgcctgctggtgtagctcattggtgctacaatgatggtgaagtgccagttgttgccatatatgtcactgatctcaacaacggtgctaatcaacttgaccctaggcaaagggatttcttgttagctggaaataagagaaaccctcaagcatacaggcgtgaggttgaggagcggtcacagaacatatttagtggctttagcactgaactacttagcgaggctcttggcgtaagcagccaagtggcaaggcagctccaatgtcaaaatgaccaaagaggagaaattgtccgtgtcgaacacgggctcagtttgctgcagccatatgcatcattgcaggagcaggaacaa

SEQ ID NO: 406574 - DNA, 435 bp, Oryza sativa nipponbare
  unsure (1)..(435): unsure at all n locations
aggtaagatgattttatttagatttatatgaccctaagtttcaacagtcacacatgatgatgtatgactttatttttaacatacgaactattatattgttacaattcagtaccagacaccaccaacagtggcaatgctcctgggagcactatagtagttagggtagataccacatatggatggcaagttgaaggtcaacagagtttgggcttgagcttgagtctgatcaaagtagacaccactaaattgctgcagttgtagctgttgcacaatcgcttgaacaatactaatggcctggtagtgagattgttgtgctaccagcctgagctgttggcaacactgctgctgcatgacttggttgtttatcaattgaaacgtanctggttgccagaagggggttgccactatgctatactgttgccttacgaactcact

SEQ ID NO: 406575 - DNA, 355 bp, Oryza sativa nipponbare
  unsure (1)..(355): unsure at all n locations
ctttgatgagagaaatgagcagtttcgatgcgctggtgtctttgtcattcggcgcgtgattgagccacaaggccttgtggtgcctcgatactcgaacactcctgctctagcctacataatccaaggaaaaggttacgtaggattgacttttcctggttgcccacttcacaccaacaacaattccaactatttgaacaaagacagagcgaccaagctcataagtttagagatgagcaccagaagattcacgaatttaggcaaggggatgttgttgcacttccggctagtgttgcacattggttctacaatggtggtgatacaccggctggtgntgtctatgtttatgacctaaaaa

SEQ ID NO: 406576 - DNA, 220 bp, Oryza sativa nipponbare
  unsure (1)..(220): unsure at all n locations
cggactcttgggcggactcgtgggctggcgcngcttcttcatacgcgacggcatcaagttccccgacgtcatccacgcctggaagcccaacccgctgctcccatgtccaggagtactggagggtctgcgacttcttgtcccaccacccggagagcctgcacatcttttttttccggtggggggggggcggcatcctcaccgatcacggtcggatggactg

SEQ ID NO: 406577 - DNA, 389 bp, Oryza sativa nipponbare
agcacaaggcccatctaacgtggtagccattgaagcacagaacaatacgattagagcgcccgttacacacacttgagtacttgacgcgatacttacatccccaggttacgtacacacactagtagtagtctagtacgtaaaaacattacgcagaaaaacacgggacggcatgtacagcaccacgtacactaccgtacacatcccatatatctggatcatggcacgcgcagccgtagctagtgaagtctgatccttatcaagcggtggcgatgggcgccgcgtggacgacctcggcggcggacttcatggcctcgaagcgtggctccttggcctcgaacttgtggcgcacgtacaggttcatgtagtcctcgaacacgaacctcgggtag

SEQ ID NO: 406578 - DNA, 324 bp, Oryza sativa nipponbare
  unsure (1)..(324): unsure at all n locations
cgcgccgacgaggggtactgcgtcgccgtgcgcgaggggaacgtcgtcctcgccccgaccaacccgcgcgacgagcaccagcactggtacaaggacatgcgcttcagcgccaagatcaaggacgaggagggcaacccggcgttcgcgctcgtcaacaaggccaccggcctcgccatcaagcactccctcggccagggccacccggtgaagctggcgccgttcaacccggagtacccggacgagtcggtgctgtggacggagagcggcgacgtgggcaagagcttncgctgcattcggatgctgaacaacattcgccttaacttc

SEQ ID NO: 406579 - DNA, 314 bp, Oryza sativa nipponbare
cacgtcaaggactacaagtactgatctgcttctggtggtggctgaagatccgattggacatcctccgtatgcatatttagggttctgagtgtggtttggctatcaagcgtccaatcttacgggtatcaaaaacttttgtcgcaataatctgaacctgtgctttttaataattaatacctgggatcggtagtagttttttggtattcctgtaatcaaatgctgcgtatggtaaattggagcagcggctttaattccatgctatctttttattgttattttctgctgtactcctatgttaattaaaccttttacct

SEQ ID NO: 406580 - DNA, 246 bp, Oryza sativa nipponbare
  unsure (1)..(246): unsure at all n locations
gtcgaccagcgtccgagctaatgcatatcgcatctcaagcaggaagctcgtagcttgaagaataataggggagaagagattggtgctttcactcctagatatcaacacaaaaaatccaccaagagtactcaaatccaaacgaaagtgagactcaagaggtgatttaaacccaaggcattatatactaaaaaatgggggcacatgcataaagctttgtggagttttgtattttgtcntatgtgtaag

SEQ ID NO: 406581 - DNA, 360 bp, Oryza sativa nipponbare
  unsure (1)..(360): unsure at all n locations
ccgcggtttattactctctgccaatgcggcgctgtggatcgaccccacctatctacagcatgatatttctgatgacaggcgtctcacgtggataagaagatcatagatttgctccaagctcagttctagaagaacaactactgattgtcctgttggttgcaccatcaaggacagtatactacatgcacctgatgctatgtaactatcatatatgatacgtagaataagtggggttttatgtgctgaaaaaaaaaaaaaaagatactacatgaatgaacatactgacagnanacatnaaaaaatccttatcctcctgccaaatggggggggcccgtactaaaggatcaaatcttacgaacc

SEQ ID NO: 406582 - DNA, 305 bp, Oryza sativa nipponbare
  unsure (1)..(305): unsure at all n locations
ctgactttgggagggagatttgtccaagaagaattccgttggaggaggagttcgagaagtcaggcaaggtccccgacccggagtccaccgacaacgccgagttcaagatcgtgctcaccatcatccgcgacggcctcaagtccgaccccagcaagtaccgcaagatgaaggagaggctcgtcggagtctccgaggagaccaccaccggtgtcaagaggctctaccagatgcaggagaccggcgccctcctcttccccgccatcnaacgnaacgactccgncaccaagagcaaggtngacaacctg

SEQ ID NO: 406583 - DNA, 303 bp, Oryza sativa nipponbare
  unsure (1)..(303): unsure at all n locations
cccacgcgtccgcccacgcgtccgcccacgcgtccgcggacgcgtgggttaaaatcctataacttgtactttatagtaactacatgtggagaagttaaatcgggtagaaatacttggaaaggaaattggtgccttggttctttggttgcttcatacctcacggacaaaatggccatgggtgggtacatagctagntctttggacacatggggatgctactaatactatcaatctatcataggcactactggaagctactgtcttttttggtcttgctcataaaaagcatatggtggtatacat

SEQ ID NO: 406584 - DNA, 447 bp, Oryza sativa nipponbare
cccacgcgtccgagatgatgaattaatgcatccacttgggtgttcttatattacaaatcaccaccatgcaagtcgccattaaccaccaacccagctttcctaatttaagtagtaatcaacaaaaggatgacctctcctctctccataccctcccagctcgctcgtcatcacaaaactaaacagcgcgcgcgaacgcacaccaacgcatcgatcccgtttgaattgcgcgcgaaagagcttaaattaagaggatgaggagaaggtgtcgaagatggtggtgtggagcgggtcgctgaggtgggtggcccagttgttgaggggccccttgccggtggcggcggcctgcacggcgaagccgaggaaggcgaccatggcgaggcgggcgtgcttgatcttcgccagctgcagccgctcccttttcttcgggtccgacgcccacccgagcgg

SEQ ID NO: 406585 - DNA, 495 bp, Oryza sativa nipponbare
caaatattatagttgaagcatagtagtagaatccaacaacaatgaagatcattttcgtatttgctctccttgctattgttgcatgcaatgcctctgcgcggtttgatcctcttagtcaaagttataggcaatatcaactacagtcgcatctcctactacagcaacaagtgctcagcccatgcagtgagttcgtaaggcaacagtatagcatagtggcaacccccttctggcaaccagctacgtttcaattgataaacaaccaagtcatgcagcagcagtgttgccaacagctcaggctggtagcacaacaatctcactaccaggccattagtattgttcaagcgattgtgcaacagctacaactgcagcaatttagtggtgtctactttgatcagactcaagctcaagcccaaactctgttgaccttcaacttgccatccatatgtggtatctaccctaactactatagggctcccaggagcattgccactggtg

SEQ ID NO: 406586 - DNA, 421 bp, Oryza sativa nipponbare
cccacgcgtccgaaaggcttgaagggaagaagagcaactccagcaggtagaaaggccagaagcaaagatggcgatctccagcctacatgccaccacctccctgcactccccatgcaccaccaacacaagcttcaggcagaatcaggtcatcttcttcaccaccagaagcaacaggaggggtagcacaaggtacggaggagcaagaacctttcaggtttcatgctcagtcgacaagccagtggtgattggccttgcagcagactcaggatgcgggaagagcacctttatgcgccggctcaccagtgtgtttggtggtgctgcagagccacccaagggtggcaacccagactcaaacacactcatcagtgacacgacaacggtgatatgcctcgatgactaccattccttggacaggactggc

SEQ ID NO: 406587 - DNA, 203 bp, Oryza sativa nipponbare
cccgcgtccgcggacgcgtgggcggacgcgtgggtagaaatcaagagaaatcaaagtgtgatagctagccttaactctgctcatggctcttctgaagtgcaatggctcaagggcttcgtccctagtgaccctcctgctgattgcagctctgctctttccagctgtttgctacacacatgttgagggggggggggggtgccata

SEQ ID NO: 406588 - DNA, 434 bp, Oryza sativa nipponbare
aataaatcaagagccacaaaaagcggagttattgacgtggtgctgaaggcgatcagcgatgagtcactcactgatgagtcgctgactatccttgctctgctatcaagcgaccatgagacggtggaggagatcggcgagactggtggcgtgccttgcatgctccacatcataaaggatgaccaatgcaaacgtaacaaagagaatgcggtggcagtgctcttctctatctgtatgtacgaccgcacgaaacttagggaggtcgtcgaggatgagaacctgaatggctctctggcctggctcgcacagaatggcacttcgagggcgcggaggaaggctgctggtatccttgacaagctaaagaggacaattcacaaaacgcactactcctgttagtccggggctgggtgcgtcggatatgtaactagaccaataag

SEQ ID NO: 406589 - DNA, 322 bp, Oryza sativa nipponbare
ctatccatatgcctttcgttactgcctgacagaggataagaagaagtgtatagaaataccagttgcttgtgagctgctgaatctagtattggggttgcagtttcgcccccaggttgacaaacttgttaactacctcaagcaccaaagtgaatacaaggtgataaacatggaccagtggatgggctttcttcgtttctgcaatgagataaacttcccatcacttgacaattatgattcagaccttgcttggcctcttattttggacaattttgttgaatggttacgagaaaataaaagttagctctcttttattcaagtgctg

SEQ ID NO: 406590 - DNA, 362 bp, Oryza sativa nipponbare
  unsure (1)..(362): unsure at all n locations
cgtccgccacgcgtccgatagataagtattttttggactctgacacggtctccgagatattattttgaccaataatatctataaaagtaagatgtttcaaataaaaaaaatttacatattatgatagtttctttaatgataaatctagtaacatcaattttacattattgatcttttttatttttttgctattaatagtcaaaattaaaaatgtttaatttgcaactatgctaaaaatgctaacattttgggacggagggagtactaattatagggtacatgtatttcatattattccatactattatattattttaagcataatttttttnttggccttcagtttatnnnnnnaattaatg

SEQ ID NO: 406591 - DNA, 286 bp, Oryza sativa nipponbare
cccggtcgaccacgctcgggaccgtgggggaaagaaactcatagctctcaagatatagtagatgtgcgctggctgacagtgtgaagaatggagtcgatgtaggcatttctttgacatacgaaatcatgcggcaatgaatagagatgaccaaaatggacgtcaggcagagacctttggcggcatagagttgcgcccgagttttcaacaaaatgtgatgttgaatgggtagatgcataggatccactgtttcttctatatacatgtggtcgattatgaattccaattg

SEQ ID NO: 406592 - DNA, 266 bp, Oryza sativa nipponbare
  unsure (1)..(266): unsure at all n locations
cccacgcgtccgcccacgcgtccgccgcacgcgtccgattggatgatcttgaaagagctgttgatgatggtgtgaatacttacaagtcaatgtgcagggatagtcggattattcctggagctgctgcaacagaaatagaattggcaaggagattgaaggaattttctctgaaggaagggggggggaccantatgccattgcaaaatttgctgaaagttttgaaatggttccaataaccctgnntgaaaatgctgggcttaatgcta

SEQ ID NO: 406593 - DNA, 303 bp, Oryza sativa nipponbare
  unsure (1)..(303): unsure at all n locations
gtccgnatcccggtcgaccacgcgtccggccgctgattcgattcgatccgatccgatccaaggggaggggaagcaatggcgacgaagaggagcgtggggacgctgggggaggcggatctgagggggaagaaggtgttcgtgcgggccgacctcaacgtgccgctcgacgacgcccagaagatcaccgacgacacccgcatccgcgcgtccgtgcccactgtcaagttcctcctcgagaagggcgccaaggtcatcctcgccagccatctgggcccgccgaagggtgtcacccccaagtacagc

SEQ ID NO: 406594 - DNA, 459 bp, Oryza sativa nipponbare
tttgcactcctctcgatctccattcgtttttgagttcctcgtttgctccgcctctctttcactcatgggcaagattaagatcggaatcaatgggttcggccgcatcggcaggctggtggccagggtggcgctgcagagcgaggatgtcgagctcgttgccgtcaacgatcccttcatcaccaccgagtacatgacatacatgttcaagtatgacaccgtccacggccagtggaagcatcatgaggtcaaggtcaaggactccaagaccctcatctttggcacgaaagaggttgcggtgttcggctgcaggaaccctgaggagatcccatgggctgcggctggtgctgaatacgttgttgagtctactggtgttttcaccgacaaggacaaggcagcagctcacttgaagggtggggccaagaaggtcgtcatttctgctcccagcaaagacgcccccat

SEQ ID NO: 406595 - DNA, 411 bp, Oryza sativa nipponbare
cccacgcgtccggtcctacaacaacatggcatccataaatcgccccatagttttcttcacagtttgcttgttcctcttgtgcgatggctccctagcccagcagctattaggccagagcactagtcaatggcagagttctcgtcgtggaagtccgagaggatgtagatttgataggttgcaagcatttgagccaattcggagtgtgaggtctcaagctggcacaactgagttcttcgatgtctctaatgagttgtttcaatgtaccggagtatctgttgtccgccgagttattgaacctagaggcctactactaccccattacactaatggtgcatctctagtatatatcatccaagggagaggtataacagggccgactttcccaggctgtcctgagacctaccagcagca

SEQ ID NO: 406596 - DNA, 222 bp, Oryza sativa nipponbare
  unsure (1)..(222): unsure at all n locations
cccacgcgtccgcgctcaccacatggttggaggcatctacagggagctcggcgccaccgatgttgggcaccccatggccgaggtgttccccggctgccggagaggggacttggagcgcgcggcggcgagcctcccgngcgttctgcacgtggacatccccaatgggacaggtggtgggggggagtggctaggttatnctaggacccnnagaactgtttacta

SEQ ID NO: 406597 - DNA, 369 bp, Oryza sativa nipponbare
gtcgaccacgcgtccgctgagttgctgaccaaagttgcaaagaaatggaaagtaaacagtgagaggatcataggaacgtcttaatacagttcgaacttacagaaagatgaacgcccttggattggcagagcttccggagcttgccttgctgccaaaccggatggcactccacctggttgaccgctggaggcacgcgagcaacattgagcaagtcctccagcttcttgcatgaaaaattgctcacgccaatggcacgagctttgcctgaatcatacaacttctccattgcttgccatgtagctgggatatcaggcttgagtcaatatgacgatatccaacctgcaccagtacaagaagataacatttaca

SEQ ID NO: 406598 - DNA, 316 bp, Oryza sativa nipponbare
  unsure (1)..(316): unsure at all n locations
cgtccgcccacgcgtccggttcattagtactacaacaacatggcatccataaatcgccccatagttttcttcacagtttgcttgttcctcttgtgcaatggctctctagcccagcagctattaggccagagcactagtcaatggcagagttctcgtcgtggaagtccaagagaatgcaggttcgataggttgcaagcatttgagccaattcggagtgtgaggtctcaagctggcacaactgagttcttcgatgtctctaatgagcaatttcaatgtaccgnagtatctggtggcccnnnagttattgaacctagag

SEQ ID NO: 406599 - DNA, 236 bp, Oryza sativa nipponbare
  unsure (1)..(236): unsure at all n locations
cccacgcgtccgcaagaagttcaatatagtgaacaacaacaaacatcttcccgatggaacggattggaggagaacttctgcacaatcaaggcaagagtaaacattgaaaatcctagtcgtgctgattcatacaacccacgtgctggaaggatttcaagtgtcaacagccagaagttccccgtgcttaacctcatncaaatgagtgctaccagagtaaacctataccanaatgctat

SEQ ID NO: 406600 - DNA, 407 bp, Oryza sativa nipponbare
  unsure (1)..(407): unsure at all n locations
gttcattagtactacaacaacatggcatccataaatcgccccatagttttcttcacagtttgcttgttcctcttgtgcaatggctctctagcccagcagctattaggccagagcactagtcaatggcagagttctcgtcgtggaagtccaagagaatgcaggttcgataggttgcaagcatttgagccaattcggagtgtgaggtctcaagctggcacaactgagttcttcgatgtctctaatgagcaatttcaatgtaccggagtatctgttgtccgtcgagttattgaacctagaggccttctactaccccattacactaatggtgcatctctagtatatatcatccaagggagaggtataacagggccaactntcccaggctggcctgagtcctaccaacaaca

SEQ ID NO: 406601 - DNA, 287 bp, Oryza sativa nipponbare
gcgatctagaactagcccagaagccctagcgccgccgcagcagcagcagccatgggtatcgacctcgttgccggcgggaggaacaagaagacgaagcgcaccgcgccgaggtcggacgatgtctacctcaagctcctcgtcaagctgtaccgtttcctggtgaggagaaccaagagtaacttcaatgccgtgatcctcaagaggctcttcatgagcaagaccaaccgcccgccgctctccctgggccggcttgccaagttcatggaaggcaaggaagaaaacaacat

SEQ ID NO: 406602 - DNA, 389 bp, Oryza sativa nipponbare
cccacgcgtccgcccacgcgtccggtaaagaaggcacaaagagaaggatgtgcttacattgcattcaagacaaaccctaactctatggtaagccacattgcaggaaagagttccatcttccgtgctctcccaactgatgttctagcaaatgcatatcgcatctcaagagaagaggctcagaggctcaagcataacagaggagatgagttcggtgcattcactcccctccaatacaagagctaccaagacgtttataatgtggcggaatcctcttaagttggcaatgcggataaagaataactaaataaataaataaataaattgcaagcaattgcgttgctgctatgtactgtaaaagtttcttataatatcaggtctgaatggcaagg

SEQ ID NO: 406603 - DNA, 284 bp, Oryza sativa nipponbare
  unsure (1)..(284): unsure at all n locations
cccacgcgtccggggaaactaagtgaataactatggcttccatgtctaccattcttccattgtgccttggcctccttctcttcttccaagtgtccatggcacaattttcatttgggggaagcccacttcagagcccacgtggatttaggggagaccaagatagtcgtcatcaatgtcgttttgagcacctcaccgcccttgaggcaacacaccancagagatctgaagctggattcactgaatactacaacattgaggcaagaaatgagtttccgtgggccgga

SEQ ID NO: 406604 - DNA, 52 bp, Oryza sativa nipponbare
tccgcccatgcgtccgcccacgcgtccgcccacgcgtccgcccacgcgtccg

SEQ ID NO: 406605 - DNA, 285 bp, Oryza sativa nipponbare
  unsure (1)..(285): unsure at all n locations
cccacgcgtccgcccacgcgtccgcctgatccataaccagaacgagtactgtatggaggttactcctaaaacattggctgatgttaaaggtggtaccctcatctcttacgaagggagagttcagctgttggagattgctcaagtccctgatgagcatgtgaatgaattcaagtcaatgtgagaagttcaagatcttcaataccaacaacctgtgggtgaacttgaaggccatcaagaggctggnagaagctgaaacacttaaaatggaaatcattcctaaancta

SEQ ID NO: 406606 - DNA, 376 bp, Oryza sativa nipponbare
  unsure (1)..(376): unsure at all n locations
cccacgcgtccgcccacgcgtccgcccacgcgtccgatgcaaaggatttgccctgctcactgctcggtcactcactcactcaccatgaagtccatgaggctttcctacatccctcctgctgcttctgctgctccacagagccccagctatggcaggaagaagaacgcctccgccgctccgccatcggctgccgcctccaccaccgttctcacctccccgctggtgaccaccacccgcactccgaagcagaccgagcaagaggacgagcagttggtagccaagaccaagactacgagaactgttattgctacgacgaatggcagggcggggccgagccagnctcgggctcgccgccggcctgcccccggcgccgcgg

SEQ ID NO: 406607 - DNA, 323 bp, Oryza sativa nipponbare
  unsure (1)..(323): unsure at all n locations
gccgcgtaccgtccgaatcccggtcgccccgcgtccgcccgcgtcgggaccgtgggtgggcatatatgtactgatctaacaacgggctaatcaattgacctagcaaagggattcttgttagctggaaataagagaaaccctcaagntacaggcgtgaggttgaggagcggcacagaacatatttagtggctttagcgggggggggttaacgaggctcttggcgtaagcagncaagtggcaaggcaggtncaatgtcaaaatgaccaaagaggagaaattgtnctngtnnaacacgggtttttatatataaaaaaatattaata

SEQ ID NO: 406608 - DNA, 360 bp, Oryza sativa nipponbare
gtacaaatagctatggcgagttccgttttctctcggttttctatatacttttgtgttcttctattatgccatggttctatggcccagctatttaatcccagcacaaacccatggcatagtcctcggcaaggaagttttagggagtgtagatttgatagactacaagcatttgaaccacttcggaaagtgaggtcagaagctggggtgactgagtacttcgatgagaagaatgaattattccagtgcacgggtacttttgtgatccgacgtgtcattcagcctcaaggccttttggtacctcgatacacaaatattcctggcggggtctacatcatccaagggagagggtctatgggttta

SEQ ID NO: 406609 - DNA, 344 bp, Oryza sativa nipponbare
cccacgcgtccgcccacgcgtccgcttccatccaaacatcaatagcaatggaagcatatgccttgacattcttaaggagcaatggagccctgctttgacaatttctaaggtgttgctttcgatctgctcgctgctcactgaccccaacccggacgaccctcttgtccctgagattgcccacatgtacaagacggatcgtccaaagtatgagacgacagcccgcagctggacccagaagtatgccatgggatgatgaaacccacaagccctgaattcaaacctgctgcttaaatgcagacagtcgtggtaattggcccaagaaactgtttatgggccattatttc

SEQ ID NO: 406610 - DNA, 293 bp, Oryza sativa nipponbare
  unsure (1)..(293): unsure at all n locations
gtccgtatattgcgttaatgcggttatatttcaaaggttggcgttgcaattgctgtgagatatgctttgtcaaggagagccttttcagttacaccggatggtcctgaaatgctgttacttgattatcccagtcaccagcgacgccttctaccactgctagcaaaagcatgtctgatgagcagtgctggtaattttatgaaaaggatgtatgtgaagaggactcctgaacttaacaaatctatacacatttactctantgctnttaaagctacacttacctgncagaatatgac

SEQ ID NO: 406611 - DNA, 381 bp, Oryza sativa nipponbare
  unsure (1)..(381): unsure at all n locations
cggacgcgtgggaaaactttaaaagaactagtgtcctgcaacaatgaagatcattttcgtctttgctctccttgctattgctgcatgcagcgccactgcgcagtttgatgttttaggtcaaaatattaggcaatatcaggtgcagtcgcctctcctgctacagcaacaggtgcttagcccatataatgagttcgtaaggcagcagtatagcattgcggcaagcaccttcttgcaatcagctgcgtttcaactgagaaacaaccaagtcttgcaacagctcaggctggtggcgcaacaatctcactaccaggacattaacgttggccaggccatagcgcaccanctacacctncngnnngttgggnatttctacattgaccg

SEQ ID NO: 406612 - DNA, 315 bp, Oryza sativa nipponbare
cccacgcgtccgtactccaatggagcaactttggtatatgtcatccaaggcagaggtataacaggaccaactttcccaggatgtcctgagacctatcaacaacagtttcagcaatccgagcaagaccaacaattggaaggccaaagccaaagccataaatttagagatgaacatcaaaagatccaccgttttcaacagggggatgtagttgcattgcctgctggtgttgctcattggtgctacaatgatggtgatgcaccaattgttgccatatatgtcactgatatatacaatagtgctaaccaaattgatcct

SEQ ID NO: 406613 - DNA, 237 bp, Oryza sativa nipponbare
  unsure (1)..(237): unsure at all n locations
gttggtaaagtatttattttggagccaaaatcactcctgctgaatgagcaagaacaaaagcttaatgacagtgaaagtgcaatagcatcgatgcagacttccaaggaatatcttgagaagcagttggcagaagtggagaacaacataagagagctacttcagcaggaccctgggctggggcgccagatcctatcaatgacagntnagngaaaagtagnntttttttatttttgngag

SEQ ID NO: 406614 - DNA, 321 bp, Oryza sativa nipponbare
cccacgcgtccgcgctcatggcggccatgggggccatctccggcgcgcagctgagcgagtcggagatgaggttcagggacaggcagtgccagcgggaggtgcaggacagcccgctggacgcgtgccggcaggtgctcgaccggcagctcaccggccgggagaggttccagccgatgttccgccgcccgggcgcgctcggcctgcggatgcagtgctgccagcagctgcaggacgtgagccgcgagtgccgctgcgccgccatccgccggatggtgaggagctacgaggagagcatgccgatgcccctggagcaaggctggt

SEQ ID NO: 406615 - DNA, 183 bp, Oryza sativa nipponbare
  unsure (1)..(183): unsure at all n locations
cccacgcgtccgctggtgtacaccgtgtacgccaccgccgccgaccccaagaaggggtcgctcggcaccatcgcgcccatcgccatcggcttcatcgtcggcgccaacatcctcgtcgccggccccttctccggcggctccatgaacccggcgcgctccttcggccccgccgngggggggggg

SEQ ID NO: 406616 - DNA, 500 bp, Oryza sativa nipponbare
gcggaacctgccgttcaacatctcgagcgaggagatgtacgacatcttcggcaagtacggcgcgatccggcagatccggctggggaacgccaaggacaccaggggcacggccttcgtcgtctacgaggacatctacgacgccaagaacgccgtcgaccacctctccggcttcaacgtcgccaaccgctacctcatcgtgctctactaccagccggccaagatgtccaagaagtcggacgtcaagaagaaggaggaggagatcaccaggctgcaggagaagtatggcctcggctccaagacgccttcatccgcccccgacgcgtaggattctcatcagaaatcagttcttcagctagtacatgtatttaagaatcgggaattgcttattcaatcttgcagtttgtgctcgtgtgttgtctgtgcaatagtttcctatcaatgaaaatcacacagcgggatgtactttgactgaaagaacatatgcaatggtgactttgact

SEQ ID NO: 406617 - DNA, 481 bp, Oryza sativa nipponbare
gtttatgacgtaaacaacaacgccaatcagcttgaacctaggcaaaaggagttcctattagccggcaacaacaatcgggctcaacaacaacaagtatatggtagctcaattgagcaacactctgggcaaaacatattcagcggatttggtgttgagatgctaagtgaggctttaggcatcaacgcagtagcagcaaagaggctacagagccaaaatgatcaaagaggagagatcatacatgtgaagaatggccttcaattgttgaaaccgactttgacacaacagcaagaacaagcacaagcacaagatcaatatcaacaagttcaatacagtgaacgacagcaaacatcttctcgatggaacggattggaggagaacttttgcacgatcaaggtgagagtaaacattgaaaatcctagtcgtgctgattcatacaacccacgtgccggaagggatacaagggtcaatagtcagaagttcc

SEQ ID NO: 406618 - DNA, 547 bp, Oryza sativa nipponbare
  unsure (1)..(547): unsure at all n locations
cgcctgcgcataccgtccgaattcccggtcgccccgcgtccgggaatgaggtggccgcgataggccatacccgtttgaggagggcaagctgtttgctttaactgtaacagctggtttggatggctaccatgtcaatgttgatgggagacatgttgcgtcgttcccttaccgcactggttacagtctcgaggatgcaacaggcttgtctttgaagggagaccttgatatcgagtcgattttagcgggacatttgcccaattcacatcctagtttcgctcctcagagatacctggaaatgtctgaacagtggaaggcaccaccactgccaactgaacctgttgagcttttcattggcattctttcagcagccaatcattttgctgagcgtatggctgttcggaagtcatggatgattgacacgagaaaatcatctaatgtcgttgccaggttctttgtcgctctgaatggggaaaaagagatcaatgaagaactgaaaaaggaggcanaattctttagtgacattgttataatgcctttcatgggatag

SEQ ID NO: 406619 - DNA, 528 bp, Oryza sativa nipponbare
  unsure (1)..(528): unsure at all n locations
ctcgtctcctgcacacagtttcctcctcctcttcctccgcggcggcgccgccgccgccgagttctccattgatccggcgatggccggcaaatccaatcccgtctccaacaatcaggaataattaagaccctgtcgttgtcgggtctgatcgatttggagaggagatggacgccggtgtgggtctccgggcgaagcccggcgcctgggccggactcggaaacccacgccgctcttccacggcgagggttccggtgaggttcgcggtggagaagttcgctcagccgttggttttgggctctgatcgccggagctgcggtgccaaactgaaggtttcgtgttccaggaaaccggcaggtattgacaaaacctattactctgctgatgaagctcttgttctaaagcaaaaagcagaggacgtggtcccttatttgaatgaccggngtatttacttagttggaatgatgggttctggcaaaactacagttgggaagatattagctggagtattagggtattctttctttgaca

SEQ ID NO: 406620 - DNA, 300 bp, Oryza sativa nipponbare
  unsure (1)..(300): unsure at all n locations
cccacgcgtccgcccacgcgtccggtagctcaattgagcaacactctgggcaaaacatattcagcggatttggtgttgagatgctaagtgaggctttaggcatcaacgcagtagcagcaaagaggctacagagccaaaatgatcaaagaggagagatcatacatgtgaagaatggccttgaattgttgaaaccgactttgacacaacagcaagaacaagcacaagcgcaagatcaatatcaacaagttcaatacagggaacgacagnaaatatcttttttatggaaaggattgggggaaa

SEQ ID NO: 406621 - DNA, 285 bp, Oryza sativa nipponbare
  unsure (1)..(285): unsure at all n locations
cccacgcgtccnggtttccaataacatcctcaaatagctatggcgaccatagctttctctcggttatctatctacttttgtgttcttctcctatgccatggctctatggcccagctatttggtccgaacgtaaatccatggcacaaccctcggcaaggaggttttagggagtgtagatttgatagactacaagcatttgaaccacttcggagagtgaggtcagaagccggggttacagagtactttgatgagaagaatgaacaattccagtgcacaggtacattt

SEQ ID NO: 406622 - DNA, 259 bp, Oryza sativa nipponbare
  unsure (1)..(259): unsure at all n locations
cgccgtttcacaagcttgctctcctctcccccccaatccttccctcccgagtggcagggtgctcgacgggatggcgcagaaggaggccaatggcagcagcaacggggagcacaccacccgcccgccgccgacgccctcgccgctccggttctccaagttcttccaggcgaacctgaggatcctcgtcaccggcggagctggcttcatcgggtcgcacctcgnngacaagctnatggaaaacganaagcacgaggtcatt

SEQ ID NO: 406623 - DNA, 184 bp, Oryza sativa nipponbare
  unsure (1)..(184): unsure at all n locations
cccacgcgtccggaggccgtgtggtggaaggcgggctcgcagatcttcagcgagggcgggctcgactacctcggcaacccgagcctgatccacgcgcagagcattctcngcatctgggcggagcaagtggcgctgatggacaactatggctggactgccttttgcggtcccgnggggggggggg

SEQ ID NO: 406624 - DNA, 158 bp, Oryza sativa nipponbare
aagaaatatgtcacctttatttaatgttgatatagaatagaatcaccaccaagattcatacttgtggtgttttattttgctatatgccagaactagttctcagttacattactctgaagtctcactgggggactcattcgagaatcctgggtagtatt

SEQ ID NO: 406625 - DNA, 440 bp, Oryza sativa nipponbare
  unsure (1)..(440): unsure at all n locations
gtcatcanctagttatcactgcaaaggacattcctaccggtggagaaaatattggatcatgcttcccaatgcttggagatgaagcgcttttcgttcatcctgtttctgaatttgccggccagaatattggtgttgtgattgctgaaacacaaaagtatgcctatatggcggcgaagcaagctgtgatcgaatatagtaccgaaaatcttcagccaccaattctgacaatagaagatgctgtccagcataacagctacttcccagttcccccatttttagctcctacgccaattggtgacttcaaccaagctatgtctgaagctgatcacaagatcatagatggggaggtgaaacttgaatcccagtactatttctacatggagacacagacggccttagctatccctgatgaagataactgtataaccctctatgtgtcg

SEQ ID NO: 406626 - DNA, 308 bp, Oryza sativa nipponbare
gttcatccatagagtttcctcctcttctcctttagtgcaaggcttgaggatccatctagaagatagcaatgggggaaactactggagaacgtgccctgacccgtctccacagcatgagggagcgcatcggcgattccctctccgcgcacaccaatgagcttgtggctgtcttctcaaggcttgtgaaccaaggaaagggaatgctacagccccaccagatcattgctgagtacaacgccgcaatccctgagggcgagcgtgagaagctgaaggactctgccttagaggatgtcctgaggggagcacag

SEQ ID NO: 406627 - DNA, 404 bp, Oryza sativa nipponbare
gttccgctgctattgttgctctctatcaaatgcactgtgttccctctggtgaagaatcaggagtttgacgacgctgcgaaagttattgataaagcattaacaacagcaggcatctcgcatattattgacactactgccatttctattgggaggaggtatgcaaggacagatgagatcggtgttccattcgcggtaacagttgactatgcgacaagcgtgacaatccgggagagggacagctaggagcagatccgagttggcatcgatgaggtggcatcagtggtgaaacagctgacagatgggcaaagcacctgggccgatgtttcatttaagtatcccagccctattgggccccagggtgataaggagtgaaaatcctgaacccttgtccaaaagagcacccc

SEQ ID NO: 406628 - DNA, 182 bp, Oryza sativa nipponbare
  unsure (1)..(182): unsure at all n locations
aataacttcctcaaatagctatggcgaccatagctttctctcggttatctatctacttttgtgttcttctgctatgccatggctgtatgggccaactatttggnccgaagcgagatccatggcacagccgctagacgggggcgagctccacgctctgatcatcaagtacaacccgggggggg

SEQ ID NO: 406629 - DNA, 134 bp, Oryza sativa nipponbare
  unsure (1)..(134): unsure at all n locations
atgatgttggtggcatgcatgcagctgttggaattcttacagcaagaggtggtatgacctctcacgctgctgttgttgcgcgcggatggggcaaatgtngtgtgnnaggatgctcaagcgtncgtgtaaatgat

SEQ ID NO: 406630 - DNA, 328 bp, Oryza sativa nipponbare
aacttattcaggacactgactaccccgcccagagagaataagattgaagccttcgatgtggatgatgaggagcctgtgatggatcctgcatggtcacacttgcagattgtttatgagctgttcttgaggttcattcagtctccagagaccgatgccaagttggcaaaaagatacatcgatcattcatttgtcctgagattacttgacctctttgactcggaggaccctagggagagggagtacctcaagacgatacttcaccgtgtctacggaaagttcatggtacatcgaccatttataaggaaggcaatcaacaacatcttttacc

SEQ ID NO: 406631 - DNA, 274 bp, Oryza sativa nipponbare
gctgatgggcctaaacacatcgagacaactctctccagagccaaatttgaggagctatgttcggacctcattgataggcttaaaactcctgtcactaatgccttgagagatgccaaactgtctgttgataacctggacgaagtgattcttgttggtggatccactcgtatcccttccgtgcaagagcttgtgaagaagatcactggcagggatcccaatgtcacagtcaaccctgatgaggttgtttctcttggggcagctgaacagggtggag

SEQ ID NO: 406632 - DNA, 283 bp, Oryza sativa nipponbare
  unsure (1)..(283): unsure at all n locations
ccagcgtccggcagcagctacaactccagcgtttggtgatctttactttgatcggaatctggctcaagctcaagctctgttggcttttaacgtgccatctagatatggtatctaccctaggtacaatggtgcacccagtaccattaccacccttggcggtgtcttgtaatgagttttaacagtgtagggggtgggaagttaaaaataagctcagatatcatcatatgtgacatgtgaaactntgggtgntgtanatngaaaaaaagttgtctttcatatttaa

SEQ ID NO: 406633 - DNA, 482 bp, Oryza sativa nipponbare
ccagcgtccgcgtcttcttcgcggcggcgctcatggcggccatggtggccatctccggcgcgcagctgagcgagtcggagatgaggttcagggacaggcagtgccagcgggaggtgcaggacagcccgctggacgcgtgccggcaggtgctcgaccggcagctcaccggccgggagaggttccagccgatgttccgccgcccgggcgcgctcggcctgcggatgcagtgctgccagcagctgcaggacgtgagccgcgagtgccgctgcgccgccatccgccggatggtgaggagctacgaggagagcatgccgatgcccctggagcaaggctggtcgtcgtcgtcgtcggagtactacggcggcgaggggtcgtcgtcggagcaggggtactacggcgaggggtcgtcggaggagggctactacggcgagcagcagcagcagccggggatgacccgcgtgaggctgaccagggcgagggca

SEQ ID NO: 406634 - DNA, 490 bp, Oryza sativa nipponbare
  unsure (1)..(490): unsure at all n locations
ccagcgtccgccccgcgtccgccccgcgtccgngngtggctagtggtcattggcgtctgcacccaccttggttgcattcctctccccatgctggagatttcggaggttggttctgatcgtgccatggctcccactacgacatctctggcaggattcgcaagggccccgctccattcaacctgggggtgcgtacctctagtttcttggaggagaacaagctcctcataggctaagagcctgagaccactctctatatctatctaccttctgcactggggtgagagtccctattgtgctgtctattttgttacagtttggctagaaaattttttgttcctcaacgattattgccatgttggctgttactttccgaggtgcattttggagcgcgaaataatttgcatctatgatgctactgaaatgtaatctgtatgtctcctgggacgtctatttctgggggttcaaacaatttgaagcactctgagcacct

SEQ ID NO: 406635 - DNA, 585 bp, Oryza sativa nipponbare
  unsure (1)..(585): unsure at all n locations
cccggngtcgacccactgcgtccgcccacgcgtccggccgtggntcgtgaactcggaggtctacccgctgcggcaccgcggcgtgtgcggcggcgcggcggcgacggcgaactgggtgtcgaacctggcggtggcgcagtcgttcctgtcgctgacggacgccatcggggcggcgtggacgttcctcatcttcggcgggctgtccgtggcggcactcgcgttcgtgctcgtctgcgtgccggagaccaagggcctccccatcgaggaggtggagaagatgctcgagggaagggagctccgcctcaggttctgggccaagcgccgccaccaccacggcggcgacggcgacggcggctgagaaaagaccggcggcgtgtgacacgacacgaggcctgtttatttagcgttttgatgactgattcgttgcaaatgaacgaaggagtgtggatttggtccgatcacgcacaaactttgtttcttttatttttaagtttattaaggtaaaatttagtttaactttttgaactttgttctctggtttcatatgcattcattttttttaaatcgtttgttttctgcttttgg

SEQ ID NO: 406636 - DNA, 636 bp, Oryza sativa nipponbare
ccagcgtccgcggccgcgtgggcggacgcgtgggctcggcgcatccacgcaacccacccgtcgcgagtcgcgagcagatcaaaaaccccatcgccgcggcgatcaccggagggaccaggccgggcggccatccgtactccgccgcgatgatgaacgacggcgatgtggcgcggcagctgaagcaggtgacggacttcatccgccaggaggccgtcgagaaggccgccgagatcgaggccgccgccgccgaggaatttcaaatcgagaaactacagctggtggaagctgaaaagaagaggatcaggttggaatttgaacggaacgagaagcaaggtgatatcaagaagaaaattgaatactcaaagcagctcaatgcttcccgacttgaagttctgcaagctcaagatgatttagcgatgtctatgttggaggcagcagggaaagagctactgtacataacccgagatcaccatgtatacaagaatcttcttaggatatttattgttcagagcttgctgcgtttgaaggagccagctgtgattctgcgctgcaggaaggaggatcgtgagcttgttgaatcagttttggagtctgcaaagaatgaatttgcagacaaagcaaatatttatcctcctg

SEQ ID NO: 406637 - DNA, 453 bp, Oryza sativa nipponbare
  unsure (1)..(453): unsure at all n locations
ccagcgtccgccccgcgtccggtggtgtctggtactgaattgtaatagtataatggttcaaatgttaaaaataaagtcatgcatcatcatgcgtgacagttgaaacttgatgtcatataaatctaaataaaatcacctatttaaatagcanaaaaaaaaaaaaaaaaaaaaaaaaaaaaaaaagagggggggggggggaaaaaaaaaaaaaataaatttaaattaaaattaaaaaaaaaaaaaaaaaaaaagggggggcccgtttttgaggttccacgtttccgtccccgggcttgcaacgtttttttttttttttggggtccccaaattcaattgaccgggccgtcgttttccaacgcctgggctgggaaacccttggccttccccaatttattggccttgctgcacttcccctttttcccggtgggggggttagggggggggcccgcccct

SEQ ID NO: 406638 - DNA, 577 bp, Oryza sativa nipponbare
  unsure (1)..(577): unsure at all n locations
ccagcgtccgcgnacctgactgcttgagtgggaaaggtgggatgtctgaagctgagtaccggtcacacttcagtatctgggcactagcaaaggctcctcttttgatcggatgcgatgtgcgctcaatgagccagcnagacgaagaacatactncnnagcaactcggnaggggtgatcgctnnngtcaaccaaggatagtgcgtaggtgnntccaaggaaagaaagtacaatctgacaacggattggaggtttgggccgggccactcagcaacaacaggaaggctgtggtgctctggaacaggcagtcataccaggcaaccatcactgcacattggtcgaacatcgggctcgctggatcggtcgcggtcactgctcgtgatctatgggcgcactcttcgttcgcggctcagggacagatatcagcatcggtggcgcctcatgactgcaagatgtatgtcttgacaccaaactagtcagcaaagaaaagcagcacaggttagtacgtgtccggcgaatacagctaaattgatcaggattcaggaagaaggtgtgcaatttgcaaggattggtagagctg

SEQ ID NO: 406639 - DNA, 577 bp, Oryza sativa nipponbare
ccagcgtccgcattttcgtatttgctctccttgctattgttgcatgcaacgcttctgcacggtttgatgctcttagtcaaagttatagacaatatcaactacaatcgcatctcctgctacagcaacaagtgctcagcccatgcagtgagttcgtaaggcaacagcatagcatagtggcaacccccttctggcaaccagctacgtttcaattgataaacaaccaagtcatgcagcaacagtgttgccaacagctcaggctggtagcgcaacaatctcactaccaggccattagtagcgttcaggcgattgtgcagcaactacagctgcagcaggtcggtgttgtctactttgatcagactcaagctcaagctcaagctttgctggccttaaacttgccatccatatgtggtatctatcctaactactacattgctccgaggagcattcccaccgttggtggtgtctggtactgaattgtaatagtataatggttcaaatgttaaaaataaagtcatgcatcatcatgcgtgacagttgaaacttgatgtcatataaatctaaataaaatcacctattt

SEQ ID NO: 406640 - DNA, 639 bp, Oryza sativa nipponbare
ccagcgtccgccccgcgtccgcccagcgtccgcccacgcgtccgggttgaggagcggtcacagaacatatttagtggctttagcactgaactacttagcgaggctcttggcgtaagcagccaagtggcaaggcagctccaatgtcaaaatgaccaaagaggagaaattgtccgtgtcgaacacgggctcagtttgctgcagccatatgcatcattgcaggagcaggaacaaggacaagtgcaatcaagagagcgttatcaagaaggacaatatcagcaaagtcaatatggaagtggctgctctaacggtttggatgagaccttttgcaccctgagggtaaggcaaaacatcgataatcctaaccgtgctgatacatacaatccaagagctggaagggttacaaatctcaacacccagaatttccccattcttagtcttgtacagatgagtgcagtcaaagtaaatctataccagaatgcattcctttcaccattttggaacatcaacgctcacagcgtcgtgtatattactcaaggccgtgcccgggttcaagttgtcaacaacaatggaaagacagtgttcaacggcgagcttcgccgcggacagctgcttattataccacaacactatgcagttgta

SEQ ID NO: 406641 - DNA, 646 bp, Oryza sativa nipponbare
  unsure (1)..(646): unsure at all n locations
ccagcgtccgaaccanaaggtgcatatgagnacttcaaggaatccgaaacgtgggctaaaggtttctgttgctgggattcccaagacaatagataatgacatagcgatcattgacaagtcatttggttttgatacggccgtagaagaggcccagcgtgccattgattcagctcatgtggaagcttgcagtgctgagaatggaataggcttagtaaaactgatgggccgttatagtgggttcattgcaatgtatgctactcttgcaagtcgagatgtggactgctgcttaattccagagtccccattttatatggatggtgaaggtgggttgcttcaatatgtagagagaaggctgaaagagaacaagcacatggttattgttgttgctgagggagcagggcaggatcttatagccaaaagtttatctacttctgagcagcaagatgcatcaggaaataagctactgcttgatattggtctttggctgactcacaagataaaggaccacttcaagagcaaaaagatggagatgactattaaatatatagatcctacctacatgatccgagctattccaagcaatgcatcagacaatgtctactgcacgctgctggcccacagtgctattcatggtgcaatggccggc

SEQ ID NO: 406642 - DNA, 628 bp, Oryza sativa nipponbare
  unsure (1)..(628): unsure at all n locations
ccagcgtccgcccacgcgtccggnaaaaggctttcatcaaggtagtgttctcggtgttgctcccggtagttgtctccatgctcgtggcaacgacgacaatggcggatcaccgtggccaggtggtttatacccccgggcagctatgcgctgccggacggggctacccgatgtacccgctgccccgctgccgggcgctggcgaagcgccagtgcgccggcggtgccgtggacgagcaagtccggcaagactgctgccggcagctcgccgccatcgacgacagcttctgtaggtgccccgcgctgagccacatgttggttggaatgtacaaggagctcggtgcacccgctaaagggcaacccatggacgaggtgttccctggctgccggagaggcgacatgaaacgcgtggcggcgagcctcccggcgttttgcaatgtagacattcccattggcattggtggtgtttgctactggctgagttatcctatgaaccccgcgactggccactaagaaatagctaccttgtgtgtcttgtgtggtacctatataattagtgtttccttttgcttggaaacatatatatgtggtgaataaatgatgaactctgatagtcttaatcntcctttttt

SEQ ID NO: 406643 - DNA, 343 bp, Oryza sativa nipponbare
ccagcgtccgccccgcgtccgccccgcgtccgcccacgcgtccgcccacgcgtccgcaacaatctcactatcaggacattaacattgttcaggccatagcgcagcagctacaactccagcagtttggtgatctctactttgatcggaatctggctcaagctcaagctctgttggcttttaacgtgccatctagatatggtatctaccctaggtactatggtgcacccagtaccattaccacccttggcggtgtcttgtaatgagttttaacagtatagtggttcggaagttaaaaataagctcagatatcatcatatgtgacatgtgaaactttgggtgatat

SEQ ID NO: 406644 - DNA, 631 bp, Oryza sativa nipponbare
ccagcgtccgcccagcgtccggcatgaccaggggcgacctcttcaacatcaacgccggcatcgttaagaacctctgcaccgccattgccaagtactgcccgaatgctcttgtcaacatgatcagcaacccagtgaattcaacggtcccaattgctgccgaggttttcaagaaggctgggacttacgagtgagaagaagttgtttggtgtgactactcttgatgttgttcgtgctaagactttctatgctggaaaggccaatgtaccagttactgatgtgaatgtcccagttgttggtggtcatgcgggtatcaccatcctgccactgttctcacaggcaactcctgcaactaatgcgttgtctgatgaagacatcaaggctcttaccaagagaacacaggatggtgggactgaagttgttgaagcaaaggctggaaagggctctgcaaccttgtccatggcgtatgctggtgctgttttcgcaaatgcttgcttaaagggtctgaatggagtgccggacgttgttgaatgctcttttgtgcaatcaactgtaacagagctgccattctttgcctccaaggtgaagcttgggaagaatggagttgaggaagttcttgggttggggccgctgt

SEQ ID NO: 406645 - DNA, 233 bp, Oryza sativa nipponbare
ccagcgtccgcggccgcgtgggttatagttgaagcatagtagtagaatcctacaaaatgaagacattttcgtatttgctctccttgctattgttgcatgcaacgcttctgcacggtttgatgctcttagtcaaagttatagacaatatcaactacaatcgcatctcctgctacagcaacaagtgctcagcccatgcagtgagttcgtaaggcaacagcatagcatagtggcaa

SEQ ID NO: 406646 - DNA, 400 bp, Oryza sativa nipponbare
  unsure (1)..(400): unsure at all n locations
ccagcgtccgccccgcgtccgcatgccgatgcccctggagcaggctggtcgtcgtcgtcgtcggagtactacggcggcgaggggtcgtcgtcggagcaggggtactacggcgaggggtcgtcggaggagggctactacggcgagcagcagcagcagccggggatgacccgcgtgaggctgaccagggcgaggcagtacgcggcgcagctgccgtcgatgtgccgggttgagccccagcagtgcagcatcttcgccgccggccagtactaggcttagctggcttgcctcatagctagtaggatcacaccgttgctgtgttgcatgcaacgagatagtgatcaaaacaaataatgaataatgaaatgtttngaaaacaaaatagctggtgataaagtacttt

SEQ ID NO: 406647 - DNA, 661 bp, Oryza sativa nipponbare
  unsure (1)..(661): unsure at all n locations
cccgcgtccgcggccgcgtgggcggncgcgtgggcggacgcgtgggcggacgcgtggggggttttgttggcccccattcctcccccaccccggtgtcctcccctccgccgctcgcgtcgccgcctttttcccctatggcgctgccgaatcaggggaccgtggattaccccagcttcaagctggtcatcgtcggcgatggcgggactggtaaaactacatttgtgaagaggcatctcactggagagtttgaaaagaaatatgagccaaccattggtgtcgaagttcaccctctagattttaccaccaactgtggtaagatccgcttctactgctgggacactgctggacaagagaagtttggtggacttagggatggatactatatccatggtcaatgtgcgataattatgtttgatgtcacttcaaggctgacttacaagaatgttccaacatggcatagggacttgtgcagggtgtgtgaaaacatccccattgtcctgtgtggtaacagggttgatgtgaagaacaggcaggttaaagccaagcatgtcacattccacaggaagaagaatctccagtactatgaaatttctgccaggagcaactaccactttgagaagcccttcctttatccttgcagggaagcttgctggttgaccct

SEQ ID NO: 406648 - DNA, 661 bp, Oryza sativa nipponbare
  unsure (1)..(661): unsure at all n locations
ccagcgtccgccccgcgtccgccccgcgtccggnagngggagagcaccaagnacacgcgactagcagaagccgagcgaccgcctcctcgatccatatcttccggtcgagttcttggtcgatctcttccctcctccacctcctcctcacaggttcttggtgtagcttgccactttcaccagcaaagtttcatgtctgatctcgacattcagatcccaactgccttcgatccctttgctgaggccaatgctggagactctggtgcggctgcaggatcaaaggactacgttcatgtacgcatccagcagcgtaatggccgtaagagcctgaccactgtccagggattgaagaaggaattcagctacaacaagatcctcaaagatctcaagaaagagttttgctgcaatggtactgttgtccaggacccagagcttggccaggtcattcaacttcagggtgatcagaggaaaaacgtatcaaattttcttgttcaggccggcattgtgaagaaggaacacatcaagattcatggtttctgagcaactgccaaaaccattgcaaagactatagtttggggtggagtatacttggttgtgtacatgcctgcgtgttccattgtacacacaaaacctagccacctcttgactcttgagtgtatgcttg

SEQ ID NO: 406649 - DNA, 669 bp, Oryza sativa nipponbare
  unsure (1)..(669): unsure at all n locations
cccggngtcgacccacgcgtccgtcctctcgtcgccggnggcgggaggccatcgacgctgaagtgaaggggatcgcgatctccggcgagcgtgcgggggaagatggctgacccagagttggaagctatcaggcagaggagaatgcaagagctaatggcacagcatggtgcggcaaatccgcaaaatgctgggcaacaaaaagctcaagaagatgcaaagcaggaagctgaggaacggcggcagatgatgcttgctcagattttatcttctgaagctagagaaaggctctcccgcatagctttggtcaaacctgataaagcaagaggggtggaggatgttcttctgagagctgctcagtccggtggaatatctgaaaaggtgtctgaagaaaggcttatctcacttctggagcaaatcaatacccacactagcaaacagacgaaagttacgattcagaggcgccggagcgtccttgacgatgatgactagctgcatgtgtgttgtgtgtacgatgagctggtggaggagtctgctgtagcgcaaaactacttagaaatgatgattatcaaacgctatatcaacaaccatcaaaacttgagcgactatttgatggatatttggccgtatatgaattaattcgagtttggtttggcttgttcctttgatgac

SEQ ID NO: 406650 - DNA, 638 bp, Oryza sativa nipponbare
ccagcgtccgcccagcgtccgccccgcgtccggtcgcggcagcggcggcgggctacggcggctacggcgacgtcggcgagtactgccgcgtggggaaggcggtgtcccggaacccggtcccatcgtgccggaactacatcgcgcggtggtgcgccgtcgccgggggccgcctggactccggcaggcaggcgccgcggcagctcctggagccgtgctgccgggagctcgccgcagtgccgatgcagtgccggtgcgacgcgttgagcgtgctggtgcgtggcgtggtcacggaggagggcgaccgcgtcgccgggatgatctcgcagcacgcggcgcccgggtgcgacgccgcgacgatcgccgggatggcgagcgcgctgacggactacggccggtgcaacctgcagcacactggtttctttggctgccccatgtttgggggtggcatggattaacttccttagtaattaattaattaggcctttgcttaattaattatttaattagttatccgggttactggataattaattatcgatatttgctagtagcatctatcatgtttggatgctgctttctccgtgaatgtgatgattataattatcaggagaaataaataaggaagagttggattcaaa

SEQ ID NO: 406651 - DNA, 667 bp, Oryza sativa nipponbare
  unsure (1)..(667): unsure at all n locations
ccagcgtccngagtgttaagacttgactcatcagttatcggtttgtccaagtttttggacaagtaactctattagcttggagtgtggcatacaacaagtacttcaaaacaacacctgcacagaaggttttatcagttctgcagtttcttacagcactcgtaatgctgtcagatgtactatttgttgagggaatatacagaaacttcggaataccggattccatgtacacaattgttttctcagggttgttggagggtcttatgttgttcaaggtgctgcccttcagtgttcttgttgcaaaactttgcccttctgggtgtgagggatcacttatggcttttgtcatgtctgcacttgccctcgcaactatcatcagcggttatcttggggttgcacttgctgaattcatgggagtatctggaggtgatttctcagcgctgccgacttgtctgttgattgaggctgcatgcacaatgctaccactctttttctcctcattgataaaagagaggagagaaaaggagaagaaagaagaatagaattcacctataggattcgatgaggttgtactggtgctcgttatactttacagtcatctttgggatcatatggatttgccgatagttcggtttcataatcagaacatagctggtggacacaatttaaa

SEQ ID NO: 406652 - DNA, 434 bp, Oryza sativa nipponbare
  unsure (1)..(434): unsure at all n locations
ccagcgtccgctttggaaggctgtgtttgatggtgtccttcgcccagnacaattattgatcattccgcaacattatgctgtcttgaagaaagcagagcgtgaaggatgccaatatatcgcaatcaagacaaacgctaacgccttcgtcagccaccttgncagggaaaaactcagtattccgtgccttgccagttgatgtagtcgctaatgcgtatcgcatctcaagggagcaagcccgaagcctcaagaacaacagggngagaagagcacggtgccttcactcctagatttcaacaacaatactacccaggattatcgaatgagtccgaaagcgagacctcagagtaatgtaattgagaactagtatcggcgtagagtaaaataaaacaccacaagtatgacacttggtggtgattctgttcgatatcagtact

SEQ ID NO: 406653 - DNA, 660 bp, Oryza sativa nipponbare
ccagcgtccgcaaccagcagctgcggcggcgcgagcacacgaagaggaggcggagcagccggagccacctccgccgccgccgccaccatgggtatctcgcgtgactccatgcacaagcgccgggccaccggtgggaagcagaaagcgtggaggaagaagcgaaagtatgagcttggtcgccagccggcaaacaccaagttgtcgagcaacaagacagtgaggagggtccgtgttcgtggaggaaatctgaagtggagggctcttcgcctggatactggtaactattcttggggaagtgaggctgtcactcgcaagacccgtatccttgatgtggtctacaatgcgtcaaacaatgagcttgtgaggacccagacccttgtgaagagtgccattgtgcaagttgatgctgccccattcaagcagtggtatctcactcactatggtgtcgatatcggtaggaagaagaaagctcctgctgctaagaaggatgctgctgagggacaagagggtgaggctgccacggaggaagcaaaaaagagcaaccatgttgtgaggaagcttgaaaagcgtcagcaaactcgcactctggactcgcacattgaagagcaatttggcagcggaaggctcttggcctgcatctcctcccggcctgggcaatgt

SEQ ID NO: 406654 - DNA, 578 bp, Oryza sativa nipponbare
ccagcgtccgcccagcgtccgccccgcgtccggcccggcagctcaccggccgggagaggttccagccgatgttccgccgcccgggcgcgctcggcctgcggatgcagtgctgccagcagctgcaggacgtgagccgcgagtgccgctgcgccgccatccgccggatggtgaggagctacgaggagagcatgccgatgcccctggagcaaggctggtcgtcgtcgtcgtcggagtactacggcggcgaggggtcgtcgtcggagcaggggtactacggcgaggggtcgtcggaggagggctactacggcgagcagcagcagcagccggggatgacccgcgtgaggctgaccagggcgaggcagtacgcggcgcagctgccgtcgatgtgccgggttgagccccagcagtgcagcatcttcgccgccggccagtactaggcttagctggcttgcctcatagctagtaggatcacaccgttgctgtgttgcatgcaacgagatagtgatcaaaacaaataatgaataatgaaatgttttgaaaacaaaaaaaaaaaaaatattttttattaaggggggccg

SEQ ID NO: 406655 - DNA, 542 bp, Oryza sativa nipponbare
  unsure (1)..(542): unsure at all n locations
ccagcgtccgggcggnccaccaccaanaacggtggtctacactcccggccagctatgtcagccaggaatcggctacccgacgtacccgctgccgcgatgccgggcgttcgtgaagcgccagtgcgtcgcccccggcacggtggacgagcaggtccggcgaggctgctgccggcagctcgccgccatcgacagcagctggtgcaggtgcgatgcgctcaaccacatgctgaggatcatctacagggagagcggcgccgccgacgctgggcaccccatggccgaggtgttccgcggctgccggagaggggacatcgagcgcgcggcggcgagcctcccggcgttctgcaacgtggacatccccaatggcgtaggcggtgtctgctactggctaccgggaactggctactagccttctgtatgtagctagttattggctgttcatgtgtgtgatttgggtactaaataatttgtgtttccttttatctggaagcatgtatgatgaataaatgatgaactcagatgttcttctgtttatatctcaa

SEQ ID NO: 406656 - DNA, 352 bp, Oryza sativa nipponbare
ccagcgtccgttttattttgacaatcactctaagacgtatgcaattgcgtcttacgaaagcaagtgaccctgagagcactgatctttgtaaagatgcacacagcttactgcaggagaggataacaaaatagaagtctataaaaatctatagaagggatcaaatatgcttgactgaatgatagagatggaaaaatgaagaagtgatgactgttgtttcacaatgtattcatttcatctatcctataattgtagtggtgtgtcaatgtgtgatacttctagatttttccaattccattttgccagctccgtgtgtgttaatgattcagaaatcgtggaattgcttggaacatgt

SEQ ID NO: 406657 - DNA, 561 bp, Oryza sativa nipponbare
  unsure (1)..(561): unsure at all n locations
ccagcgtccggtcccttacaatttcccgttcagcagtggtagtgaaggacatcaagnagaagcttgcatatgtggcccttgactatgagcaggagctggaggctgcaaagagcagctcatctgtggagaagagctatgagctgcctgatggacaggtgatcaccattggggcagagaggttccgatgccctgaggtcctcttccagccctctttcatcggtatggaagctcctggaatccatgagaccacttacaattccatcatgaagtgtgatgtggatatcaggaaggacttgtatggtaacattgttctcagtggtggatcaaccatgttccctggtattgctgaccgtatgagcaaggagatcactgccctcgcaccaagcagcatgaagatcaaggtggtggcaccgcctgagaggaaatacagtgtctggataggagggtccatccttgcctcccttagcaccttccaacagatgtggatctcaaaaggggagagtatngatgagtcgggtccagcaattgttcaccggaagtgcttctaagctctgccttgtt

SEQ ID NO: 406658 - DNA, 430 bp, Oryza sativa nipponbare
ccagcgtccgatcggcgccgccatcgccgccgcctaccaccagtacgtgctgagggccagcgccgccaagctcgggtcctaccggagcaacgcctgagatcggcggcggcggcgcgcgcgaggtggcgctgaagtgtagatacgcgtacaagatggccgcctctgtccagcactagatcaacgaatgcaggcttcgcatcctgcatttcgcctcgtggatagattctactgcactattatgtactatgtatccatgcatatggtctccattcctttgaactatgtccgccatatgttgcttcccgctggtgcttccaagtttggttaattttccttcacattctgcatgtatgtaatattcatatggagaatttgtgaatttgaagatcatagttactattatgtgcgatttattaagtactttctgcaa

SEQ ID NO: 406659 - DNA, 644 bp, Oryza sativa nipponbare
ccagcgtccgccccgcgtccgccccgcgtccgccccgcgtccgcagcaaatagaaagactagtgtcccgcagcaatgaagatcattttcgtctttgctctccttgctattgctgcatgcagcgcctctgcgcagtttgatgttttaggtcaaagttataggcaatatcagctgcaggggcgggggctgctacagcaacatgtgcttagcccatataatgagttcgtaaggcagcagtatggcatagcggcaagccccttcttgcaatcagctgcgtttcaactgagaaacaaccaagtctggcaacagctcgcgctggtggcgcaacaatctcactatcaggacattaacattgttcaggccatagcgcagcagctacaactccagcagtttggtgatctctactttgatcggaatctggctcaagctcaagctctgttggcttttaacgtgccatctagatatggtatctaccctaggtactatggtgcacccagtaccattaccacccttggcggtgtcttgtaatgagttttaacagtatagtggttcggaagataaaaataagctcagatatcatcatatgtgacatgtgaaactttgggtgatataaatagaaaaaaagttgtctttcatatttaaaaa

SEQ ID NO: 406660 - DNA, 562 bp, Oryza sativa nipponbare
  unsure (1)..(562): unsure at all n locations
ccagcgtccgctagtgtcctgtcgcaatgaagacattttcatctttgctcttcttgctattgctgcatgcagcgcctctgcgcagtttgatgttttaggtcaaagttataggcaatatcagctgcagtcacctctcctgctacagcaacatgtgcttagcccatataatgagttcgtaaggcagcggtatggcatagcagcaagccccttattgcaatcagctgcgtttcagctgaaaaacaaccaagtttggcaacagctcaggctggtggcgcaacagtctcactatcaagatattaacattgttcaggccatagcgcagcagctacaactccagcagtttgatgatctctactttgatcggaatctgggtcaagctcaagctcaagctctgttggctttgaacttgccatctagatatggtatctaccctaggtactatagtgcacctagtagcattaccacccttggcggtgtattgtactgagttttaacattacagtggttcggaagttaaaaataaactcagatatcatcatatttgnnnnnnaaaaannnnnaa

SEQ ID NO: 406661 - DNA, 539 bp, Oryza sativa nipponbare
cccgcgtccgccccgcgtccgccccgcgtccggcaattcttgagctcaatcagcaacaacatctatctccttcttgcttagttaagtccttcgccctcccaagaagaagaagagtcttgctgcggcggcaactgcggctgcggcagcggctgccagtgcggcggcggctgcggcggatgcaggagggtccctgatgtggaggccacagccaccaccaagaccttcgtcctcgctgctccatccaacaaggcgagctctggaggaatggagatggcggtggagagcggcgagaacggcggctgcggctgcaacacctgcaagtgtggcaccagctgcagcggctgctcctgctgctcctgcaactgaatctatcgtcgtcgtcgcccggctgcatgaggatttatcgtatggatgctgctactgtcgatcagagctttgatcgaggccttaatttgcttgcattagtacccagcttatatgtaggcaggccttgccttttgctctgacgcctaaataaaaccgtcgtcgtcgttgtcagt

SEQ ID NO: 406662 - DNA, 644 bp, Oryza sativa nipponbare
  unsure (1)..(644): unsure at all n locations
nacccacgcccgtccgcccacgccgtccggcaaaatagnaaggatctagnntgtcccgcagcaatgaanatcatttgtgcgtctttgcttctccttgnctatnntgctgcatgcagcnngcctctgcgccagtttggatttgttttaggtcaaagttattaggccaatatcagctgcnnagtcgcctgtcctgctacagcaacatgtgcgttagcccatataatgagttcgtaaggcagcagtatggcatagcggcaagccccttcttgcaatcagctgcgtttcaactgagaaacaaccaagtctggcaacagctcgcgctggtggcgcaacaatctcactatcaggacattaacattgttcaggccatagcgcagcagctacaactccagcagtttggtgatctctactttgatcggaatctggctcaagctcaagctctgttggcttttaacgtgccatctagatatggtatctaccctaggtactatggtgcacccagtaccattaccacccttggcggtgtcttgtaatgagttttaacagtatagtggttcggaagataaaaataagctcagatatcatcatatgtgacatgtgaaactttgggtgatataaatagaaaaaaagtgtctttcattttt

SEQ ID NO: 406663 - DNA, 486 bp, Oryza sativa nipponbare
ccagcgtccggaccttcgtcctcgctgctccatccaacaggcgagctctggaggaatggagatggcggtggagagcggcgagaacggcggctgcggctgcaacacctgcaagtgtggcaccagctgcagcggctgctcctgctgctcctgcaactgaatctatcgtcgtcgtcgcccggctgcatgaggatttatcgtatggatgctgctactgtcgatcagagctttgatcgaggccttaatttgcttgcattagtacccagcttatatgtaggcaggccttgccttttgctctgacgcctaaataaaaccgtcgtcgtcgttgtcagtgtgtgcgtgtgtcgatcaatgttggatggatccctagctagcttggatggatcatctatcatcatggtgatctcatcatgtactcctgctccatctcctcatgcgtgccaggcttcttaatataatctacctctgctttcatcccatttctcttaa

SEQ ID NO: 406664 - DNA, 672 bp, Oryza sativa nipponbare
ccagcgtccgccccgcgtccgatcaccaacaaacaaaggaggaaaaaaacatatacacttctagtgattgtctgattgatcatcaatggctagcaaggtcgtcttcttcgcggcggcgctcatggcggccatggtggccatctccggcgcgcagctgagcgagtcggagatgaggttcagggacaggcagtgccagcgggaggtgcaggacagcccgctggacgcgtgccggcaggtgctcgaccggcagctcaccggccgggagaggttccagccgatgttccgccgcccgggcgcgctcggcctgcggatgcagtgctgccagcagctgcaggacgtgagccgcgagtgccgctgcgccgccatccgccggatggtgaggagctacgaggagagcatgccgatgcccctggagcaaggctggtcgtcgtcgtcgtcggagtactacggcggcgaggggtcgtcgtcggagcaggggtactacggcgaggggtcgtcggaggagggctactacggcgagcagcagcagcagccggggatgacccgcgtgaggctgaccagggcgaggcagtacgcggcgcagctgccgtcgatgtgccgggttgagccccacagtgcagcatcttcgccgccggccagtactaggcttagctggcttgcctcatagctagt

SEQ ID NO: 406665 - DNA, 673 bp, Oryza sativa nipponbare
ccagcgtccgcggccgcgtgggcccaccggtgttgttaacgtggtatctggttttggacctactgctggtgctgctcttgctagtcacatggatgtcgataagattgcattcactggatcgaccgatctggaaaatcgtccttgagttggctgcaaggagcaaccttaagtcagtgacactggggcggggaggcaagtctcctttcatcatcatggatgatgctgatgttgaccatgctgttgagcttgcgcattttgcactgttctttaaccagggacaatgttgctgtgctgggtctcgtacatttgtgcatgagcgtatctatgatgagttcgtggagaaggccaaggctcgtgctctcaagcgtgtggttggtgatccattcaagaatggtgttgaacagggccctcagattgatgacgagcaattcaacaagatcttgcgctacatcaagtatggtgttgacagtggagccaaccttgtgactggtggcgacagattaggtgacaaaggttactacatccagccaacaattttctcggatgtacaggataacatgaggattgctcaagaagagatatttggccctgtgcagtccattctgaagttcaatgatctgaacgaggtcatcaagagggcaaatgcaagccagtacgggcttgctgctggggt

SEQ ID NO: 406666 - DNA, 631 bp, Oryza sativa nipponbare
  unsure (1)..(631): unsure at all n locations
ccagcgtccgccccgcgtccgcaagcattatacaacaaaaattaaaagaactagtgtcctgcaacaatgaagatcattttcgtctttgctctccttgctattgctgcatgcagcgccacagcgcagtttgatgttttaggtcaaaatattaggcaatatcaggtgcagtcgcctctcctgctacagcaacaggtgcttagcctatataatgagttcgtaaggcagcagtatagcattgcggcaagccccttcttgcaatcagctgtgtttcaactgagaaacaaccaagtcttgcaacagctcaggctggtggcgcaacaatctcactaccaggacattaacgttgtccaggccatagcgcagcagctacacctccagcagtttggcgatctctacattgaccggaatctggctcaagcgcaagcactgttggcttttaacttgccatctacatatggtatctaccctaggtactatagtgcaccgggtagtattaccacccttggcggtgtcttgtactgaattttcacaatattgtagttcggaagtgaaaaataagctcangtatcatcgtatgtgacatgtgaaaccttaagtgatattaatagaaataaaattatctttcatattt

SEQ ID NO: 406667 - DNA, 589 bp, Oryza sativa nipponbare
  unsure (1)..(589): unsure at all n locations
ccagcgtccggcagcggcgtcgggctacggcgacgtcggcgagtactgccgcgtggggaaggcggtgtcccggaacccggtcccgtcgtgccggaactacatcgcgcggtggtgcgccgccgccgggggccgcatggactcccgcaagcagccgccgcgggagttcctggagccgtgctgccgggagcgtggccgccgtgccgatgcagtgccggtgcgacgcgctgagcgtgctggtgcgcggcgtggtcacggaggagggcgaccgcgtctccgggatgatctcccagcacgcggcaccggggtgcgacgccgcgacgatcgccgggatggcgagcgcgctgacggactacggccggtgcaacctgcagcacacggccggttcctttgcctgcctcatgtttggtggtggcatggattagattaactatttcattagtgattaattaattaattaggcctttgcttaattaattatcgatgtttgctagtactagctagcagtatcatgtttggatcctgcttctctatgtttgtgatantggtnataaaaagaaatacaatgaggaacggatgttcctctttgttg

SEQ ID NO: 406668 - DNA, 645 bp, Oryza sativa nipponbare
  unsure (1)..(645): unsure at all n locations
ccagcgtccggnaaaaaaaacatatacacttctagtgattgtctgattgatcatcaatggctagcaaggtcgtcttcttcgcggcggcgctcatggcggccatggtggccatctccggcgcgcagctgagcgagtcggagatgaggttcagggacaggcagtgccagcgggaggtgcaggacagcccgctggacgcgtgccggcaggtgctcgaccggcagctcaccggccgggagaggttccagccgatgttccgccgcccgggcgcgctcggcctgcggatgcagtgctgccagcagctgcaggacgtgagccgcgagtgccgctgcgccgccatccgccggatggtgaggagctacgaggagagcatgccgatgcccctggagcaaggctggtcgtcgtcgtcgtcggagtactacggcggcgaggggtcgtcgtcggagcaggggtactacggcgaggggtcgtcggaggagggctactacggcgagcagcagcagcagccggggatgacccgcgtgaggctgaccagggcgaggcagtacgcggcgcagctgccgtcgatgtgccgggttgagccccagcagtgcagcatcttcgccgccggccagtactaggcttagctggcttgcctcatagctagta

SEQ ID NO: 406669 - DNA, 599 bp, Oryza sativa nipponbare
ccagcgtccgcccagcgtccgggcgttgctcgtcgtcgtcgtctccgtgctcgcagcaacgacgacaatggcggaccaccaccaagaacaggtggtctacactcccggccagctatgtcagccaggaatcggctacccgacgtacccgctgccgcgatgccgggcgttcgtgaagcgccagtgcggggcgcgcggcacggtggacgagcaggtccggcgaggctgctgccggcagctcgccgccatcgacagcagctggtgcaggtgcgatgcgctcaaccacatgctgaggatcatctacagggagagcggcgccgccgacgctgggcaccccatggccgaggtgttccgcggctgccggagaggggacatcgagcgcgcggcggcgagcctcccggcgttctgcaacgtggacatccccaatggcgtaggcggtgtctgctactggctaccgggaactggctactagccttctgtatgtagctagttattggctgttcatgtgtgtgatttggttactaaataatttgtgtctccttttatctggagcctgtatgttgaattaatgatgaactcagatgttcttcttgttatatctc

SEQ ID NO: 406670 - DNA, 396 bp, Oryza sativa nipponbare
  unsure (1)..(396): unsure at all n locations
ccagcgtccgcccttcttgcaatcagctgcgtttcaactgganaaacaaccaagtctggcaacagctcgcgctggtggcgcaacaatctcactatcaggacattaacattgttcaggccatagcgcagcagctacaactccagcagtttggtgatctctactttgatcggaatctggctcaagctcaagctgtgttggcttttaacgtgccatctagatatggtatctaccctaggtactatggtgcacccagtaccattaccacccttggcggtgtcttgtaatgagttttaacagtatagtggttcggaagttaaaaataagctcagatatcatcatatgtgacatgtgaaactttgggtgatataaatagaaaaaaagttgtctttcatattt

SEQ ID NO: 406671 - DNA, 633 bp, Oryza sativa nipponbare
ccagcgtccgccccgcgtccgcccagcgtccgccccgcgtccgagagtgatgcgtacagagtccatgtatgcgagaagtgtgggcttattgctattgctaatctcaagaagaattcctttgagtgcagagggtgcaagaacaaaaccgacattgtccaagtgcatataccctacgcgtgtaagcttctgttccaggagcttatggcgatggccatcgctcccaggatgctcactcaggataacaaaactgggaaggatcagaagaaacgttgagaccaaatattacatggggcactcgcttgtcgtactatgtcttcgttcatagtcaatacttaaatctaacttgggcttagcggtctgaccccctgaggcagaaagcagtcagtaggccacatcctcgagttatatatatccctggtgtgctgtgcccttggattatgccaaattgacgccatgggcgaagtggtgcaaagaaattttgtttcttgtatactagggatacggattaagggactgtactgaacaatcttttaccgggactaaaatgttgttgtttgtactgtttcttttttatttttttttggcttttggggatactagatcccaactcgaatattgcctgtattggctcta

SEQ ID NO: 406672 - DNA, 503 bp, Oryza sativa nipponbare
ccagcgtccgccccgcgtccgccccgcgtccgcgtggcaccccgtgggggctgtcatgtaacaaattcgatggaaaagttgccactcttgccttttcaaatttcagtgaggagatggtggtgcacaactctggtcctgccaatggagaagtaattcgtcttactgttgattacagcaagaagccattgtcggttgatacaacctttaggaagcagtttggtcagcgactggctgcgattggccagtatctggagcagaagttcgggagtgcacaggatgtggaaggttgcctggttgggaaagatatttttatagtgcaaagcaggccacagccatagcatggatgtgcgccaatatcagtatggttaggtaaataaagtttgccgcatggatcgactgttgtaatgcgaatagccttcacgcaaaactcgaagggttgtcattagtgtttctttactattttttttggaagcaaggggaaaaaataatgcctaaattctaaa

SEQ ID NO: 406673 - DNA, 645 bp, Oryza sativa nipponbare
  unsure (1)..(645): unsure at all n locations
ccagcgtccggnaagtcgcaactgaaagcccgaantgtggaccctgatgattatgagaaacttgaggaagggataatgcagtatgggtgtgcacattatcgaagaagtgccgcattcgagctccatgttgcaacgagatttttgattgtcggcattgccacaatgaaacaaagaattcaattaaaattgatgctgtgaagaggcatgaactcccacgccatgaagtgcagcaggttatatgctcgttgtgtggcacggaacaagaggtacggcaagtatgtatcagttgtggtgtatgcatggggaagtacttctgtgaagtgtgcaagctctttgatgatgatgtttcaaaacagcaatatcattgcaatggttgtggaatatgcagaattggtggcaaggagaatttctttcactgctcaaaatgcggatgctgttattctatagtattgaagaacagtcatgcatgtgttgaaggagcgatgcatcatgactgtccaatctgctttgagtacctttttgaatcaaccaatgatgtttccgtcttgccctgtggtcataccattcatgtcaagtgcttgcgagaaatggaggagcactgccaatttgcttgcccgctttgctctaaatctgtctgcgacatgt

SEQ ID NO: 406674 - DNA, 346 bp, Oryza sativa nipponbare
  unsure (1)..(346): unsure at all n locations
ccagcgtccgcgnacgacgagttctcagggaagaagaggacgcgactgcccaggagctgtcggaggagaagacgctcgcttactcatgcctcaactaaaactaagcaatacccagagggacagatagtgagcgattgcccgctcccgtgtttttgaataaaagagacttttaagttccatcacatagaaactgtttatctcagaccgctgcacatcgcgagatgtggagcgcagatgccgttgctggttttactccagtgtgtattgaggctttgtactagctcccttttttttgcctggtgattcgcaggacatttgctgaaaacattgaacccatttgacatct

SEQ ID NO: 406675 - DNA, 659 bp, Oryza sativa nipponbare
ccacgctccggtctgttgatctcaaggctagcaggtcgtcttcttcgcggcggcgctcatggcggccatggtggccatctccggcgcgcagctgagcgagtcggagatgaggttcagggacaggcagtgccagcgggaggtgcaggacagcccgctggacgcgtgccggcaggtgctcgaccggcaggtcaccggccgggagaggttccagccgatgttccgccgcccgggcgcgctcggcctgcggatgcagtgctgccagcagctgcaggacgtgagccgcgagtgccgctgcgccgccatccgccggatggtgaggagctacgaggagagcatgccgatgcccctggagcaaggctggtcgtcgtcgtcgtcggagtactacggcggcgaggggtcgtcgtcggagcaggggtactacggcgaggggtcgtcggaggagggctactacggcgagcagcagcagcagccggggatgacccgcgtgaggctgaccagggcgaggcagtacgcggcgcagctgccgtcgatgtgccgggttgagccccagcagtgcagcatcttcgccgccggccagtactaggcttagctggcttgcctcatagctagtaggatcacaccgttgctgtgttgcatgcaacgagatagtgatcaaaaca

SEQ ID NO: 406676 - DNA, 82 bp, Oryza sativa nipponbare
  unsure (1)..(82): unsure at all n locations
tccgnaaataaaacaccacaagtatgaatcttggtggtgattctattctatatcaacattaaataaaggtgacatatttctt

SEQ ID NO: 406677 - DNA, 463 bp, Oryza sativa nipponbare
  unsure (1)..(463): unsure at all n locations
ccagcgtccgctacatccggntgcagcgcgactccggctacgacggcggcctctgcggcatcgccatggaagcctcctaccccgtcaagttctcgccaaatcgtgtcacgccaaggcgcgcccttggcgccaaggaaacccagtgatcgagccggcgccatctccgccgtacacgtgcccgcctacgagcctggatcaacggctctggtcgcgtctcctcctccagcttgcaaaatggtgctattattgttgctgctctttgttaattgccttgtgtttatgtaattcgtgtgaggcgatcaggngaaaagaattacctgaaatcgtctaagttactagtgttatttcgtgtgtgctaaataagttttagatgtgaggtgaggtcgatctatcatgtaatgtactgaacttatatgtggtgttcttcgtggcaccgggaaatatatataagaaggttgttgtt

SEQ ID NO: 406678 - DNA, 457 bp, Oryza sativa nipponbare
ccacgcgtccgcccacatcattcgctgcatcactggccgggtgagaatacttaggcgtggattcgaactaggcatttgtgcatctcattgtacgagaggcataatgtaaggagccacctgcaaactccccagccaaagcgccaggactgctgtggtcaccgacagcaacaaagagatctgcctgcaggtgtgccggcagctgatcaccgacggcatcacggttgttctcacggccagggacgagacgagcggcgtaaaggccaccgagaggctcatagggatgggcctctccagtgacgtcttgcatcagctcaaggtcacggacagttccagcgttgctcggttggctgctctcttgaagactctttacgtacagctagacatactcgtgaataatgccacgggttgtcgccctgggagtcgctcacagcgtggatcacaacgaggaactgttcgt

SEQ ID NO: 406679 - DNA, 394 bp, Oryza sativa nipponbare
  unsure (1)..(394): unsure at all n locations
cccggngtcgacccacgccgtccgcgngnacgccgtggggnaggaaacaaccaagtctggcaacagctcgcgctggtggcgcaacaatctcactatcaggacattaacattgttcaggccatagcgcagcagctacaactccagcagtttggtgatctctactttgatcggaatctggctcaagctcaagctctgttggcttgtgagggggccatctagatatggtatctaccctaggtactatggtgcacccagtaccattaccacccttggcggtgtcttgtaatgagttttaacagtatagtggttcggaagttaaaaataagctcagatatcatcatatgtgacatgtgaaactttgggtgatataaatagaaaaaagttgtctttcaaa

SEQ ID NO: 406680 - DNA, 346 bp, Oryza sativa nipponbare
  unsure (1)..(346): unsure at all n locations
ccagcgtccgtgcaactccaggtgagccaccttgcagggnaanaactcaatattccgtgccatgccagtggatgtgatcgctaatgcttaccgcatatcgagggagcaagcacgaagccttaagaataataggggagaagagctcggtgccttcactcctagatatcaacaacagacctacctaggcttctcaaatgagtcggagaacgaggcctcagagtgatgtactaatgaaatagtataggtgtattcaaaaaaaaataaaatgccacaagtatgtgaaactttgtggcggttctgttctaagtttatgaagcactaataaaatgctacaactgttttattc

SEQ ID NO: 406681 - DNA, 588 bp, Oryza sativa nipponbare
ccagcgtccgctttgaccgaccttgttatttatctacagatgctatgcgcgcctgcaccctagggctgtcaactgccgcaagaagaagtgtggtcacagcaaccaggtgagcttgatgattgatagtggggcttactattattttacagtagtcatgcaattcagtccatcttctggttaccctttaggaattgttatgatgattggatggaagtagggttttcatatgttctagatttgttatttgtgcctttaagcttgtaaataatggccatggcatttgctagcatgatttcaataacatataccataacatatcaacataccctttttattttggctgtttgatctaacgaaaatttctggtccttccactttcagctgaggcccaagaagaagatcaagaactagagcgtcactcgccgggttcatggactggttaaatcaatcgtcatattagacttttatgcttccgttgttatctccctggatgttgttgaaccgtgttttactgtgctggatgcttcagcttcttgttttgacggtcgtggtatatggtaattggcagcaaactatattggtcaaaaa

SEQ ID NO: 406682 - DNA, 644 bp, Oryza sativa nipponbare
  unsure (1)..(644): unsure at all n locations
ccagcgtccgcggccgcgtgggcggncgcgtgggcacgtgccgngaggataacaagtgtcaatagtcagaagttccccatccttaacctcatccaaatgagcgctaccagagtaaacctataccagaatgctattctctcgccgttctggaacgtcaatgctcatagtttggtctatatgattcaagggcgatctcgagttcaagtcgttagtaactttggaaagactgtgtttgatggtgtccttcgcccaggacaattattgatcattccgcaacattatgctgtcttgaagaaagcagagcgtgaaggatgccaatatatcgcaatcaagacaaacgctaacgccttcgtcagccaccttgcnagggaaaaactcagtattccgtgccttgccagttgatgtagtcgctaatgcgtatcgcatctcaagggagcaagcccgaagcctcaagaacaacaggnggagaagagcacggtgccttcactcctagatttcaacaacaatactacccaggattatcgaatgagtccgaaagcgagacctcagagtaatgtaattgagaactagtatcggcgtagagtaaaataaaacaccacaagtatgacacttggtggtgattctgttcgatatcaggtctaatt

SEQ ID NO: 406683 - DNA, 616 bp, Oryza sativa nipponbare
ccagcgtccggcattatacagcaaaaagaaagactagtgtcccgcagcaatgaagatcattttcgtctttgctctccttgctattgctgcatgcagcgcctctgcgcagtttgatgttttaggtcaaagttataggcaatatcagctgcagtcgcctgtcctgctacagcaacaggtgcttagcccatataatgagttcgtaaggcagcagtatggcatagcggcaagccccttcttgcaatcagctgcgtttcaactgagaaacaaccaagtctggcaacagctcgcgctggtggcgcaacaatctcactatcaggacattaacattgttcaggccatagcgcagcagctacaactccagcagtttggtgatctctactttgatcggaatctggctcaagctcaagctctgttggcttttaacgtgccatctagatatggtatctaccctaggtactatggtgcacccagtaccattaccacccttggcggtgtcttgtaatgagttttaacagtatagtggttcggaagttaaaaataagctcatatatcatcatatgtgacatgtgaaactttgggtgatataaatagaaaaaagttgtctttcatattttaa

SEQ ID NO: 406684 - DNA, 668 bp, Oryza sativa nipponbare
ccagcgtccgccccgcgtccgccccgcgtccgtggcacaacaacaagaacaagcacaagctcaataccaagaagttcaatatagtgaacaacaacaaacatcttcccgatggaacggattggaggagaacttctgcacaatcaaggcaaggagtaaacattgaaaatcctagtcgtgctgattcatacaacccacgtgctggaaggatttcaagtgtcaacagccagaagttccccatccttaacctcatccaaatgagtgctaccagagtaaacctataccagaatgctattctctcaccattctggaatgtcaatgctcatagtttggtctatatgattcaagggcaatctcgagttcaagtcgttagtaactttggaaagactgtgttcgatggtgtccttcgccctggacaactattgatcattccacaacattatgctgtcttgaagaaagcagagcgtgaaggatgccaatatattgcaatcaagacaaacgctaacgccttcgtcagccaccttgcaggaaaaaactcagtattccgcgccttaccagttgatgtggtcgcttatgcttaccgcatctcacgggagcaagccccgagcatcaagaacaataggggagaagagcacggtgccttcactcctagatttcaacaacaatactta

SEQ ID NO: 406685 - DNA, 646 bp, Oryza sativa nipponbare
  unsure (1)..(646): unsure at all n locations
ccagcgtccgttttgattccacctgttgggcggcagcttgcgtacattctccgtggtngaaaccaagttcaagaatatcaagaagaacaagactactggaggattttcagtgactttcttgggcgacattgtggcgactgggctgaaggttgaggaccagctctctcttgggaagaggttggcactggtggcgagcacaggtgcaatgcgagctcaaggcgacaccgcttatggagctaacttggaggcacgcctgaaagacaaagattatccgattggccagtccctgtcaaccctgggtctttctttgatgaagtggcgccgagaccttgctctcggtgcgaatttgcagtcccagttctcgattggaaggggctcgaagatggtggttcgtcttggattgaataacaaactaagtggccagatcactgtcaggacaagcacctcggagcaggtccagatcgcgctgttgggtcttatcccagttgcagcctccatttacaggagcttcaggcccagcgaaccctccttcgcctattagcttcgcatcaagatgaacaatttactcatgtcggctgcgcctcctttcgttttagcaattttcctatcttatatgaaccataattttctggtctgttttttgctt

SEQ ID NO: 406686 - DNA, 612 bp, Oryza sativa nipponbare
  unsure (1)..(612): unsure at all n locations
ccagcgtccgctagtgtcccgcagcaatgaanacattttcgtctttgctctccttgctattgctgcatgcagcgcctctgcgcagtttgatgttttaggtcaaagttataggcaatatcagctgcagtcgcctgtcctgctacagcaacaggtgcttagcccatataatgagttcgtaaggcagcagtatggcatagcggcaagccccttcttgcaatcagctgcgtttcaactgagaaacaaccaagtctggcaacagctcgcgctggtggcgcaacaatctcactatcaggacattaacattgttcaggccatagcgcagcagctacaactccagcagtttggtgatctctactttgatcggaatctggctcaagctcaagctctgttggcttttaacgtgccatctagatatggtatctaccctaggtactatggtgcacccagtaccattaccacccttggcggtgtcttgtaatgagttttaacagtatagtggttcggaagttaaaaataagctcagatatcatcatatgtgacatgtgaaactttgggtgatataaatacaaaaaagttgtctttcatatttaaataccatgcctctataaggat

SEQ ID NO: 406687 - DNA, 485 bp, Oryza sativa nipponbare
  unsure (1)..(485): unsure at all n locations
ccagcgtccggttgntagnaattgcatcgtcgtgctcggggttgtaccatatagttggtgagacctactgggtctctactagatgcgacagcattgcatttcaggggaggcgtcttgaagggacaagaattaccactcaaaacatgggcaagacaggattcgactttgcaatacgaacaccttgtacaccatcaaggtgggaggaatatgatgaagaaatgtctgcagcttgggaggccatttgcgaggcatattgtagtgacacgaacccgacgcgtgacccacatatgcttgatgctgtgaaggcagcaatattgcgtatgacatattactggtacaacttcatgccgctttcaagaggttcagctgtcgttggttacgtggtgttgcttggcttatttctggcagcaaacatggatgtcactgctagcatncctcatggggttcaggtagattgggaggccattctgtctcaagatcctgac

SEQ ID NO: 406688 - DNA, 665 bp, Oryza sativa nipponbare
ccagcgtccgaggatctccagggcagtgagggcagcaagaagaatccgtcgatcccttttccaagaaggattggtacgacatcaaggcgccgaccgtgttctccgtccgcaacatcggcaagaccctcgtctccaggacccaggggaccaagattgcatctgagggtctcaagcatcgtgtctttgaagtctccttggcggatcttcagaatgacgaggatcaggcttacaggaaggttagacttcgtgctgaggatgttcaggggaggaatgtcctcacgaatttctggggcatgagttttaccacggacaaacttaggtccttggtcaagaaatggcaaacattgattgaagcccatgtggatgttaagaccacagataactacatgctccgcctgttttgcattggtttcaccaagcgccgcccaaatcaggtgaagcgtacctgttacgctcaggctagccagatccggcagatccgccggaagatggttgagatcatggccaaccaggcatcaacatgtgacttgaaagaactggtttcaaaattcatccctgaagtcattggaaaggagatcgagaagtcaacttcaagtatattccctctccaaaatgtgttcatccgcagggtgaagatcttgaatgcacccgaatttgatcttggg

SEQ ID NO: 406689 - DNA, 675 bp, Oryza sativa nipponbare
  unsure (1)..(675): unsure at all n locations
cccggngtcgnacccacgccgtccnngcgtcaactccannncgttggcgaggagggtgcgctgannntgtcagcgcnncttccagtccgaggggtgctcaggccgatgatgtgttcntcgcaccagggnncaggcttcaccttgaacatnntattgacactcctnngggctcattgaagggtggatacatcanatnngagcaggctgnnttgagatcataagaaaggggtggtgtggtgggcaagnnactattgatnngtcctcctttattgtggnnatcgattggatgcatacccagaatggacacgttggatgatcaagttattagagctgtcaccaattcatttggaaaggccatttggcgaagaacattggttgtattaacacatgctcagctctcaccacctgatggacttgactataacgatttctttacaaaaagatctgagtcacttttgcgatacattcgtgctggtgcaggagtcagcaaacgagaacttggggattttcccttgccaattgcattggtggagaacagtggaaggtgcaaaactaatgagaatggagagaaggttctccctgatggaactncatggattccgaacttgatgaaagagattactactggtgtctcaaacgggagcaaattcattcatgtttgatcaaaagctaata

SEQ ID NO: 406690 - DNA, 659 bp, Oryza sativa nipponbare
  unsure (1)..(659): unsure at all n locations
ccagcgtccgcggccgcgtgggttcatcgacaaccatgacaccggctcgacgcacactgtggccgttcccctccngacaggtcatgcagggctacgcctacatcctcacccaccccggcaacccatgcatcttctacgaccatttcttcgactggggccacaaggaggagatcgagcgcctgggatggatcagaaaccggcaggggatccacccggcgagcgagctgcgtatcatggaggctgacagcgatctctacctcgccgagatcgacggaaaggtcatcacgaaggtcggaccaagatacgacgtcgagcacctcatccccgaaggcttccaggtcgtcgcgcacggtgacggctacgcagtctgggagaaaatctgagcggtggagaggcacaattagcagattttatttacctgcaattttttccaccctcgacgtataacatatacatgtgatggcaacgagttgtatgctgtatctgatctgaactatgtacgcgattgtccacaaagtactacctccgtaaataaagtgaggatatggaacatgcgtttgcatgcatggttttacaaataatggtatgcaataaaattttcactgcttatgcatttttaaaaaaaaaaaaaaaaaaggcgggcggtctaaaggaccaaa

SEQ ID NO: 406691 - DNA, 554 bp, Oryza sativa nipponbare
ttaattcattattcattatttgttttgatcactatctcgttgcatgcaacacagcaacggtgtgatcctactagctatgaggcaagccagctaagcctagtactggccggcggcgaagatgctgcactgctggggctcaacccggcacatcgacggcagctgcgccgcgtactgcctcgccctggtcagcctcacgcgggtcatccccggctgctgctgctgctcgccgtagtagccctcctccgacgacccctcgccgtagtacccctgctccgacgacgacccctcgccgccgtagtactccgacgacgacgacgaccagccttgctccaggggcatcggcatgctctcctcgtagctcctcaccatccggcggatggcggcgcagcggcactcgcggctcacgtcctgcagctgctggcagcactgcatccgcaggccgagcgcgcccgggcggcggaacatcggctggaacctctcccggccggtgagctgccggtcgagcacctgccggcacgcgtccagcgggctgtcctgcacctcccgctggcact

SEQ ID NO: 406692 - DNA, 467 bp, Oryza sativa nipponbare
tgatgaatccaactcttcttatttatttcttctgattattattatcatcacattcacggagaaagcagcatccaaacatgatagatgctactagcaaatatcgataattaattatccagtaacccggataactaattaaataattaattaagcaaaggcctaattaattaattactaaggaagttaatccatgccacccccaaacatggggcagccaaagaaaccagtgtgctgcaggttgcaccggccgtagtccgtcagcgcgctcgccatcccggcgatcgtcgcggcgtcgcacccgggcgccgcgtgctgcgagatcatcccggcgacgcggtcgccctcctccgtgaccacgccacgcaccagcacgctcaacgcgtcgcaccggcactgcatcggcactgcggcgagctcccggcagcacggctccaggagctgccgcggcggctgcttgccggagtcca

SEQ ID NO: 406693 - DNA, 469 bp, Oryza sativa nipponbare
ggcaggaaagccttctttttgtatttttattgctgcaactttcgttgcaaacttcaaaaatacactcgccagcatttgacggctgattacatatacccttacaggcttacagcttatttctacatacataaccaaatggcatcccatttccagctctaccaatccttgcaaattgcaaaccttcttcctgaatcctgatcaatttagctgtattcgccggacacgtactaacctgtgctgcttttctttgctgactagtttggtgtcaagacatacatcttgcagtcatgaggcgccaccgatgctgatatctgtccctgagccgcgaacgaagagtgcgcccatagatcacgagcagtgaccgcgaccgatccagcgagcccgatgttcgaccaatgtgcagtgatggttgcctggtatgactgcctgttccagagcaccacagccttcctgttgttgctgagtggcc

SEQ ID NO: 406694 - DNA, 578 bp, Oryza sativa nipponbare
aaataggtgattttatttagatttatatgacatcaagtttcaactgtcacgcatgatgatgcatgactttatttttaacatttgaaccattatactattacaattcagtaccagacaccaccaacggtgggaatgctcctcggagcaatgtagtagttaggatagataccacatatggatggcaagtttaaggccagcaaagcttgagcttgagcttgagtctgatcaaagtagacaacaccgacctgctgcagctgtagttgctgcacaatcgcctgaacgctactaatggcctggtagtgagattgttgcgctaccagcctgagctgttggcaacactgttgctgcatgacttggttgtttatcaattgaaacgtagctggttgccagaagggggttgccactatgctatgctgttgccttacgaactcactgcatgggctgagcacttgttgctgtagcaggagatgcgattgtagttgatattgtctataactttgactaagagcatcaaaccgtgcagaagcgttgcatgcaacaatagcaaggagagcaaatacgaaaatgcggacgcgtgg

SEQ ID NO: 406695 - DNA, 390 bp, Oryza sativa nipponbare
aaggataaagagaggctttatcatcattagtcgaaagactggacagtacatagcagcaaaacaattgcttgcaatttatttatttagttattctttatccgcaagccgacctaagaggattctgccgcattataaacgtcttggtagctcttgtattggattggagtgaatgcaccgaactcatctcctctattatgcttgagcctctgagcctcttctcttgagatgcgatatgcatttgctagaacatcatttgggagagcacggaagatggaactctttcctgcaatgtggcttaccatagagttaggattggtcttgaatgcaatgtaagcacatccttctctttgtgccttctttacaactgcatagtgttgtggtataataagc

SEQ ID NO: 406696 - DNA, 591 bp, Oryza sativa nipponbare
  unsure (1)..(591): unsure at all n locations
ttcatcaatagcgcttttcttattacgcttgtagttaccagcaatccaggagaggatccgtggattcatacaggtgatattatgcatattaaatcaaaactgcgtagcgtggcccaggtttctcaacgggaatagcaacagcttctatatagaactacagattggattcatctcgctgttcgaggacgatgacgcagactggtcgaaagggtttgccacatgatggagttcatatctggctgttcgacgaagatgatgcagactggtcgaaagagtttgccacatgatggctgaggccggtgggaagtggtggcttgttggccgtcctatcgttctctttggcttcgtcgatgtccttctggcttaggaagcttggctggttggttgatgatagcagcctcgcccacatcctatcagtgatcttgaccttgttccgtggggatgtcaccctatagaaaggtatgtaggcatgtctgccgttgacatttccaacagtgaagctatagccggccattgcaccatgaatagcactgngggccagcagcgtgcagtagacattgtctgatgcattgcttggaatagctcggatca

SEQ ID NO: 406697 - DNA, 346 bp, Oryza sativa nipponbare
atatcacccaaagtttcacatgtcacatatgatgatatctgagcttatttttaacttccgaaccactatactgttaaaactcattacaagacaccgccaagggtggtaatggtactgggtgcaccatagtacctagggtagataccatatctagatggcacgttaaaagccaacagagcttgagcttgagccagattccgatcaaagtagagatcaccaaactgctggagttgtagctgctgcgctatggcctgaacaatgttaatgtcctgatagtgagattgttgcggacgcgtgggcggacgcgtgggcggacgcgtgggcggacgcgtgggcggacgcgtgg

SEQ ID NO: 406698 - DNA, 500 bp, Oryza sativa nipponbare
aaaggcaaaaggggcataatccaatgtttgtccaatgtaacaactcaaaacttgacacaaatagttcctctcgtacaagttttgttctgtttggcattaggccgccggattcttattgtaaagctcaaatcctcggtatcccaacacaaggggtagaaaaaagcataaatcaaatcaagagaagcctcatctacaggtatgagttgctagtctgcaaaatggcctaactacccatttgcaaatttgatacccttctcaattgaagccttgagctcgcccttaagattctccagtccttccttctcaaagtctgacagctggcccaacccaagaacttcctcaactccattcttcccaagcttcaccttggaggcaaagaatggcagctctgttacagttgattgcacaaaagagcattcaacaacgtccggcactccattcagaccctttaagcaagcatttgcgaaaacagcaccagcatacgccatggacaaggttgc

SEQ ID NO: 406699 - DNA, 539 bp, Oryza sativa nipponbare
caactgtcacgcatgatgatgcatgactttatttttaacatttgaaccattatactattacaattcagtaccagacaccaccaacggtgggaatgctcctcggagcaatgtagtagttaggatagataccacatatggatggcaagtttaaggccagcaaagcttgagcttgagcttgagtctgatcaaagtagacaacaccgacctgctgcagctgtagttgctgcacaatcgcctgaacgctactaatggcctggtagtgagattgttgcgctaccagcctgagctgttggcaacactgttgctgcatgacttggttgtttatcaattgaaacgtagctggttgccagaagggggttgccactatgctatgctgttgccttacgaactcactgcatgggctgagcacttgttgctgtagcaggagatgcgattgtagttgatattggctataactttgactaagagcatcaaaccgtgcagaagcgttgcatgcaacaatagcaaggagagcaaataccaaaatgatcttcattttt

SEQ ID NO: 406700 - DNA, 449 bp, Oryza sativa nipponbare
gcgaacaaaactttcgaactcttttttttctccttgttttctatttcatttcattccgatagatagcaacaagcagttcaaacaccataaccaaagcgaactcaattcatggtaacatcacggacgaagaacacctaacactggatggatggatagagggcttctcgactcgagagagccactggacacgataacgactcgactcgatgataagatgattctgacacggatagctaaggataactggccacgatgggccccaccaatcagttcctccagttcccgacggagtcgccggcgtagccgtcttcacagctgccaccgtagccgtcgccgcctactatattgtttttgtaccaggcgaagcatttgccttctgcgggaacaaaaaaactaaacaggaagaattttaaaccgacccttgggcggacccctgggcggacccctgg

SEQ ID NO: 406701 - DNA, 505 bp, Oryza sativa nipponbare
agcgctctcaaagtagcatatattattcaatcttgatgaaagagggacacaagccatcatctatagtgatggtgcctcttacaaacttcaacacacgggtaacaagcatacactcaagagtcaagaggtggctaggttttgtgtgtacaatggaacacgcaggcatgtacacaaccaagtatactccaccccaaactatagtctttgcaatggttttggcagttgctcagaaaccatgaatcttgatgtgttccttcttcacaatgccggcctgaacaagaaaatttgatacgtttttcctctgatcaccctgaagttgaatgacctggccaagctctgggtcctggacaacagtaccattgcagcaaaactctttcttgagatctttgaggatcttgttgtagctgaattccttcttcaatccctggacagtggtcaggctcttacggccattacgctgctggatgcgtacatgaacgtagtcctttgatcctgcagccgcacc

SEQ ID NO: 406702 - DNA, 521 bp, Oryza sativa nipponbare
gtcatcaatggaacaagccaaaccaaactcgaattaattcatatacggccaaatatccatcaaatagtcgctcaagttttgatggttgttgatatagcgtttgataatcatcatttctaagtagttttgcgctacagcagactcctccaccagctcatcgtacacacaacacacatgcagctagtcatcatcgtcaaggacgctccggcgcctctgaatcgtaactttcgtctgtttgctagtgtgggtattgatttgctccagaagtgagataagcctttcttcagacaccttttcagatattccaccggactgagcagctctcagaagaacatcctccacccctcttgctttatcaggtttgaccaaagctatgcgggagagcctttctctagcttcagaagataaaatctgagcaagcatcatctgccgcccttcctcagcttcctgctttgcatcttcttgagctttttgttgcccagcattttgcggatttgccgcaccatgctgtgcccttagct

SEQ ID NO: 406703 - DNA, 519 bp, Oryza sativa nipponbare
gcacaaaacatttatattgtttcatctacaaaaaacagattagcatacacaaaaagaatactagttacatgaaacaagacttgatctatagaagaatggtaacacaaatataggtacaaatatgccatctacactgaacatgattctcgacaaacactgaaaacctctcgaggaacctagtcttttaaattgtgtccaccagctatgttctgattatgaaaccgaactatcggcaaatccatatgatcccaaagatgactgtaaagtataacgagcaccagtacaacctcatcgaatcctataggtgaattctattcttctttcttctccttttctctcctctcttttatcaatgaggagaaaaagagtggtagcattgtgcatgcagcctcaatcaacagacaagtcggcagcgctgagaaatcacctccagatactcccatgaattcagcaagtgcaaccccaagataaccgctgatgatagttgcgagggcaagtgcagacatgacaaaagcctaa

SEQ ID NO: 406704 - DNA, 416 bp, Oryza sativa nipponbare
agtactgatatcgaacagaatcaccaccaagtgtcatacttgtggtgttttattttactctacgccgatactagttctcaattacattactctgaggtctcgctttcggactcattcgataatcctgggtagtattgttgttgaaatctaggagtgaaggcaccgtgctcttctcccctgttgttcttgaggcttcgggcttgctcccttgagatgcgatacgcattagcgactacatcaactggcaaggcacggaatactgagtttttccctgcaaggtggctgacgaaggcgttagcgtttgtcttgattgcgatatattggcatccttcacgctctgctttcttcaagacagcataatgttgcggaatgatcaataattgtcctgggcgaaggacaccatcaaacacagtctt

SEQ ID NO: 406705 - DNA, 497 bp, Oryza sativa nipponbare
ggaagggcataaaacataacaaaatgctgtagctgagtacacatggaacctaaataccacgagaatacaaccatagcatgtgaaaattctcacaatcagttcttccaagctaagagttgattcatcattctttcagaaaattggtgttcagtagggtctgtaggcacgacatagacgcaaacatgactaacaaaatccactgaataaaataggcgggccttccagcgtaaaacacactcgagagaacgctctaagctgcagcacccttgcccttcttcctctggagcttcttcatgtagaactcaagctctttgccctccaggatgtacccatcagctctgccacattgcccaggccgggaggagatgcaggccaagagccttccgctgccaaattgctcttcaatgtgcgagtccagagtgcgagtttgctgacgcttttcaagcttcctcacaacatggttgctcttttttgcttcctccgtggcagcctcaccc

SEQ ID NO: 406706 - DNA, 544 bp, Oryza sativa nipponbare
cattattcattatttgttttgatcactatctcgttgcatgcaacacagcaacggtgtgatcctactagctatgaggcaagccagctaagcctagtactggccggcggcgaagatgctgcactgctggggctcaacccggcacatcgacggcagctgcgccgcgtactgcctcgccctggtcagcctcacgcgggtcatccccggctgctgctgctgctcgccgtagtagccctcctccgacgacccctcgccgtagtacccctgctccgacgacgacccctcgccgccgtagtactccgacgacgacgacgaccagccttgctccaggggcatcggcatgctctcctcgtagctcctcaccatccggcggatggcggcgcagcggcactcgcggctcacgtcctgcagctgctggcagcactgcatccgcaggccgagcgcgcccgggcggcggaacatcggctggaacctctcccggccggtgagctgccggtccggacgcgtgggcggacgcgtgggccgacgcgtgggttgacccgggaat

SEQ ID NO: 406707 - DNA, 494 bp, Oryza sativa nipponbare
  unsure (1)..(494): unsure at all n locations
ttttgagatataaacagaagaacatctgagttcatcatttattcatcatacatgcttccagataaaaggaaacacaaattatttagtaaccaaatcacacacatgaacagccaataactagctacatacagaaggctagtagccagttcccggtagccagtagcagacaccgcctacgccattggggatgtccacgttgcagaacgccgggaggctcgccgccgcgcgctcgatgtcccctctccggcagccgcggaacacctcggccatggggtgcccagcgtcggcggcgccgctctccctgtagatgatcctcagcatgtggttgagcgcatcgcacctgcaccagctgctgtcgatggcggcgagctgccggcagcagcctcgccggacctgctcgtncaccgtgccgggggcgacgcactggcgcttcacgaacgcccggcatcgcggcagcgggtacgtcgggtagccgattcctggctgacatagct

SEQ ID NO: 406708 - DNA, 353 bp, Oryza sativa nipponbare
acatgttccaagcaattccacgatttctgaatcattaacacacacggagctggcaaaatggagctggaaaaatctagaagtatcacacattgacacaccactacaattataggatagatgaaatgaatacattgtgaaacaacagtcatcacttcttcatttttccatctctatcattcagtcaagcatatttgatcccttctatagatttttatagacttctattttgttatcctctcctgcagtaagctgtgtgcatctttacaaagatcagtgctctcagggtcacttgctttcgtaagacgcaattgcatacgtcttagagtgattgtcaaaataaaacggacgcgtgg

SEQ ID NO: 406709 - DNA, 431 bp, Oryza sativa nipponbare
  unsure (1)..(431): unsure at all n locations
ttgcagaaagtacttaataaatcgcacataatagtaactatgatcttcaaattcacaaattctccatatgaatattacatacatgcagaatgtgaaggaaaattaaccaaacttggaagcaccagcgggaagcaacatatggcggacatagttcaaaggaatggagaccatatgcatggatacatagtacataatagtgcagtagaatctatccacgaggcgaaatgcaggatgcgaaggctgaattcgttgatctagtgctggacagaggcggccatcttgtacgcgtatctacacttnagcgccacctcgcgcgcgccgccgccgncgatctcaggcgttgctccggtaggacccgagcttggcggcgctggccctcagcacgtactggtggtaggcggcggcgatggcggcgccgatcggacgcgtgg

SEQ ID NO: 406710 - DNA, 405 bp, Oryza sativa nipponbare
aaatatgaaagacaactttttttctatttatatcacccaaagtttcacatgtcacatatgatgatatctgagcttatttttatcttccgaaccactatactgttaaaactcattacaagacaccgccaagggtggtaatggtactgggtgcaccatagtacctagggtagataccatatctagatggcacgttaaaagccaacagagcttgagcttgagccagattccgatcaaagtagagatcaccaaactgctggagttgtagctgctgcgctatggcctgaacaatgttaatgtcctgatagtgagattgttgcgccaccagcgcgagctgttgccagacttggttgtttctcagttgaaacgcagctgattgcaagaaggggcttgccgctatgccatact

SEQ ID NO: 406711 - DNA, 522 bp, Oryza sativa nipponbare
actgacaacgacgacgacggttttatttaggcgtcagagcaaaaggcaaggcctgcctacatataagctgggtactaatgcaagcaaattaaggcctcgatcaaagctctgatcgacagtagcagcatccatacgataaatcctcatgcagccgggcgacgacgacgatagattcagttgcaggagcagcaggagcagccgctgcagctggtgccacacttgcaggtgttgcagccgcagccgccgttctcgccgctctccaccgccatctccattcctccagagctcgccttgttggatggagcagcgaggacgaaggtcttggtggtggctgtggcctccacatcagggaacatcttgcatccgccgcagccgccgccgcactggcagccgctgccgcagccgcagttgccgccgcagcaagacatcttctttttcttgggagggcgaaggacttaactaagcaagaaggagatagatgttgttgctgattgagctcaagaattgccggacgcgtgggcg

SEQ ID NO: 406712 - DNA, 386 bp, Oryza sativa nipponbare
aagaaatatggcacctttatttaatggtggtttagaatagaatcacccccaagattcatacttgggggggtttattttgctatatgccagaactaggtctcagttacattactctgaagtctcactttcggactcattcgagaatcctgggtaggattggtggtgaaatctaggagtgaaggccccgggctcttctcccctattggtcttgatgcttcgggcttgctgttgtgtcaaagtcggtttcaacaattgaaggccattcttcacatgtatgatctctcctctttgatcattttggctctggagcccctttgctgctactgcgttgatgcctaaagccttacttagcattttaacaccaaatccgctgaatatgttttgcc

SEQ ID NO: 406713 - DNA, 77 bp, Oryza sativa nipponbare
aaaaaatgaaagacaactttttttctatttatatcacccaaagtttcacatgtcacatatgatgatatctgagctta

SEQ ID NO: 406714 - DNA, 486 bp, Oryza sativa nipponbare
aagagaaatgggatgaaagcagaggtagattatattaagaagcctggcacgcatgaggagatggagcaggagtacatgatgagatcaccatgatgatagatgatccatccaagctagctagggatccatccaacattgatcgacacacgcacacactgacaacgacgacgacggttttatttaggcgtcagagcaaaaggcaaggcctgcctacatataagctgggtactaatgcaagcaaattaaggcctcgatcaaagctctgatcgacagtagcagcatccatacgataaatcctcatgcagccgggcgacgacgacgatagattcagttgcaggagcagcaggagcagccgctgcagctggtgccacacttgcaggtgttgcagccgcagccgccgttctcgccgctctccaccgccatctccattcctccagagctcgccttgttggatggagcagcgaggacgaaggtccggacgcgtgg

SEQ ID NO: 406715 - DNA, 473 bp, Oryza sativa nipponbare
atcccaaacaagcgatatatatttcataatgaacataaatctgcttctacaatatactccatcagtaacatgagcaccaaccacaaggtttattagagacaatgccagccccatgctaggacaagcttatttcagctgttcttcctcctcctcttcttcttcttcatcatcatcatcataatcttatcgccataatttatcgccattttcgcatccgtccataagattatacctatttcttccccagttctgaaatgtccaaacatctatgtgtttacaaccacgcggcgttcttgatcggcgtgacgacggccttgacctgcaggtagttcttcaggctgtcgatgcccttctccctcccgatgccgctctgcttgtatccgccgaacgggatcgcggcgtcgaagacgtcgaagcagttcacccacacggtcccgaccctgagcgcgcgggtcagggtgttggccgtgttc

SEQ ID NO: 406716 - DNA, 561 bp, Oryza sativa nipponbare
aaatatgaaagataattttatttctatttatatcaccttaagtttcacatgtcacatacgatgatacctgagcttatattttcacttccgaactacaatattgtgaaaattcagtacaagacaccgccaagggtggtaatactacccggtgcactatagtacctagggtagataccatatgtagatggcaagttaaaagccaacagtgcttgcgcttgagccagattccggtcaatgtagagatcgccaaactgctggaggtgtagctgctgcgctatggcctggacaacgttaatgtcctggtagtgagattgttgcgccaccagcctgagctgttgcaagacttggttgtttctcagttgaaacacagctgattgcaagaaggggcttgccgcaatgctatactgctgccttacgaactcattatataggctaagcacctgttgctgtagcaggagaggcgactgcacctgatattgcctaatattttgacctaaaacatcaaactgcgctgtggcgctgcatgcagcaatagcaaggagagcaaagacgaaaatgatc

SEQ ID NO: 406717 - DNA, 530 bp, Oryza sativa nipponbare
ttttgttttcaaaacatttcattattcattatttgttttgatcactatctcgttgcatgcaacacagcaacggtgtgatcctactagctatgaggcaagccagctaagcctagtactggccggcggcgaagatgctgcactgctggggctcaacccggcacatcgacggcagctgcgccgcgtactgcctcgccctggtcagcctcacgcgggtcatccccggctgctgctgctgctcgccgtagtagccctcctccgacgacccctcgccgtagtacccctgctccgacgacgacccctcgccgccgtagtactccgacgacgacgacgaccagccttgctccaggggcatcggcatgctctcctcgtagctcctcaccatccggcggatggcggcgcagcggcactcgcggctcacgtcctgcagctgctggcagcactgcatccgcaggccgagcgcgcccgggcggcggaacatcggctggaacctttcccggccggtgagctgccggtcgagcacctgccggcac

SEQ ID NO: 406718 - DNA, 588 bp, Oryza sativa nipponbare
tttagagatataaacagaagaacatctgagttcatcatttattcatcatacatgcttccagataaaaggaaacacaaattatttagtaaccaaatcacacacatgaacagccaataactagctacatacagaaggctagtagccagttcccggtagccagtagcagacaccgcctacgccattggggatgtccacgttgcagaacgccgggaggctcgccgccgcgcgctcgatgtcccctctccggcagccgcggaacacctcggccatggggtgcccagcgtcggcggcgccgctctccctgtagatgatcctcagcatgtggttgagcgcatcgcacctgcaccagctgctgtcgatggcggcgagctgccggcagcagcctcgccggacctgctcgtccaccgtgccgggggcgacgcactggcgcttcacgaacgcccggcatcgcggcagcgggtacgtcgggtagccgattcctggctgacatagctggccgggagtgtagaccacctgttcttggtggtggtcccgcattgtcgtcgttgctgcgagcacggagacgacgacgacgagcaacgcccggac

SEQ ID NO: 406719 - DNA, 396 bp, Oryza sativa nipponbare
aaatatgaaagacaactttttttctatttatatcacccaaagtttcacatgtcacatatgatgatatctgagcttatttttaacttccgaaccactatactgttaaaactcattacaagacaccgccaagggtggtaatggtactgggtgcaccatagtacctagggtagataccatatctagatggcacgttaaaagccaacagagcttgagcttgagccagattccgatcaaagtagagatcaccaaactgctggagttgtagctgctgcgctatggcctgaacaatgttaatgtcctgatagtgagattgttgcgccaccagcgcgagctgttgccagacttggttgtttctcagttgaaacgcagctgattgcaagaagggcggacgcgtgg

SEQ ID NO: 406720 - DNA, 555 bp, Oryza sativa nipponbare
aacactaaattattactattttcttacaagatctctcatcaaacaattttgatatcgtgctggtagagccaatacaggcaatattcgagttgggatctagtatccccaaaagccaaaaaaaaataaaaaagaaacagtacaaacaacaacattttagtcccggtaaaagattgttcagtacagtcccttaatccgtatccctagtatacaagaaacaaaatttctttgcaccacttcgcccatggcgtcaatttggcataatccaagggcacagcacaccagggatatatataactcgaggatgtggcctactgactgctttctgcctcagggggtcagaccgctaagcccaagttagatttaagtattgactatgaacgaagacatagtacgacaagcgagtgccccatgtaatatttggtctcaacgtttcttctgatccttcccagttttgttatcctgagtgagcatcctgggagcgatggccatcgccataagctcctggaacagaagcttacacgccgtagggatatgcacttggacaatgtcggtttt

SEQ ID NO: 406721 - DNA, 349 bp, Oryza sativa nipponbare
agatgtcaaatgggttcaatgttttcagcaaatgtcctgcgaatcaccaggcaaaaaaaagggagctagtacaaagcctcaatacacacttggagtaaaaccagcaacggcatctgcgctccacatctcgcgatgtgcagcggtctgagataaacagtttctatgtgatggaacttaaaagtctcttttattcaaaaacacgggagcgggcaatcgctcactatctgtccctctgggtattgcttagttttagttgaggcatgagtaagcgagcgtcttctcctccgacagctcctgggcagtcgcgtccatcttcttccttgagaactcgtcgatcgcggacgcgtgg

SEQ ID NO: 406722 - DNA, 478 bp, Oryza sativa nipponbare
atcaccagctattttgttttcaaaacatttcattattcattatttgttttgatcactatctcgttgcatgcaacacagcaacggtgtgatcctactagctatgaggcaagccagctaagcctagtactggccggcggcgaagatgctgcactgctggggctcaacccggcacatcgacggcagctgcgccgcgtactgcctcgccctggtcagcctcacgcgggtcatccccggctgctgctgctgctcgccgtagtagccctcctccgacgacccctcgccgtagtacccctgctccgacgacgacccctcgccgccgtagtactccgacgacgacgacgaccagccttgctccaggggcatcggcatgctctcctcgtagctcctcaccatccggcggatggcggcgcagcggcactcgcggctcacgtcctgcagctgctggcagcactgcatccgcaggccgagcgcgcccggg

SEQ ID NO: 406723 - DNA, 88 bp, Oryza sativa nipponbare
aagaaatatgtcacctttatttaatgttgatatagaatagaatcaccaccaagattcatacttgtggtgttttatttcggacgcgtgg

SEQ ID NO: 406724 - DNA, 544 bp, Oryza sativa nipponbare
caatcagaagtaaaatagacttattcccagaatgaacaagttcataatttagcaacacctggattcagggcttcaggcccgaacttcactgcgctaacgctggcccaagatcaagcaccatgttcttcaatttcttgggcctcgccgtcatcacacgaacgacgcctccttgccctcgtcgaagaacgcgccggttggcccgccgtccggcagcagggccaccgtcacgacgttcctcgcgccctcctcgggcgtcaggaaccccgagttgatggtcaggtccgtcttgacgtagcctgggtgcgcgcagttgatgcgcagcgctgggtgcttcctcgccgagatcctcgtgtacgcgttcatggccaccttggccaccttgtacgccgccgaccccatcggccatccgtgcgcctccagctcgccggcctcgaagtctttcaggaagctggccagcacctcgtccagccgttcctcggtgaggttgtcaatgtcgtccagctccttcctcagatcctggttgccgaggaactacttcttagca

SEQ ID NO: 406725 - DNA, 518 bp, Oryza sativa nipponbare
aatctaacatacgcaaactgatattatcacaatgttagccgatgacaatggaaagagtaatctaggtacaagcggatcattgacggtggagacaagacattggctgcaccacaacacccaccagtggcgccaacaaggagcgctatccgttataggacgagagaaaaagtaaaacatcacgatgtgaagtgaaactgaataattctagtagacgatgatgatgatggataggctccttaggacgcccgccgcccttagcgtcttgctgctcccatcttgtccactggaaggctcactcgtcatcgtcttcatcctcttcgctgccctcgtcgtcatcctcatcattgacctcggacttggacttgtcagattcctcctcgtcgtcctcctcttcctccttggcgggtgccttcttggcagtgctctcgcccttgttgtaggcagcaatggccttgttgtactcggccttgagcttgttggccttggctacatagggagccttgtccggttcggtcagg

SEQ ID NO: 406726 - DNA, 497 bp, Oryza sativa nipponbare
gaccaatatagtttgctgccaattaccatataccacgaccgtcaaaacaagaagctgaagcatccagcacagtaaaacacggttcaacaacatccagggagataacaacggaagcataaaagtctaatatgacgattgatttaaccagtccatgaacccggcgagtgacgctctagttcttgatcttcttcttgggcctcagctgaaagtggaaggaccagaaattttcgttagatcaaacagccaaaataaaaagggtatgttgatatgttatggtatatgttattgaaatcatgctagcaaatgccatggccattatttacaagcttaaaggcacaaataacaaatctagaacatatgaaaaccctacttccatccaatcatcataacaattcctaaagggtaaccagaagatggactgaattgcatgactactgtaaaataatagtaagccccactatcaatcatcaagctcacctggttgctgtgaccacact

SEQ ID NO: 406727 - DNA, 590 bp, Oryza sativa nipponbare
agtactgatatcgaacagaatcaccaccaagtgtcatacttgtggtgttttattttactctacgccgatactagttctcaattacattactctgaggtctcgctttcggactcattcgataatcctgggtagtattgttgttgaaatctaggagtgaaggcaccgtgctcttctcccctgttgttcttgaggcttcgggcttgctcccttgagatgcgatacgcattagcgactacatcaactggcaaggcacggaatactgagtttttccctgcaaggtggctgacgaaggcgttagcgtttgtcttgattgcgatatattggcatccttcacgctctgctttcttcaagacagcataatgttgcggaatgatcaataattgtcctgggcgaaggacaccatcaaacacagtctttccaaagttactaacgacttgaactcgagatcgcccttgaatcatatagaccaaactatgagcattgacgttccagaacggcgagagaatagcattctggtataggtttactctggtagcgctcatttggatgaggttaaggatggggaacttctgactattgacacttgttat

SEQ ID NO: 406728 - DNA, 592 bp, Oryza sativa nipponbare
ttttaaatatgaaagacaactttttttctatttatatcacccaaagtttcacatgtcacatatgatgatatatgagcttatttttaacttccgaaccactatactgttaaaactcattacaagacaccgccaagggtggtaatggtactgggtgcaccatagtacctagggtagataccatatctagatggcacgttaaaagccaacagagcttgagcttgagccagattccgatcaaagtagagatcaccaaactgctggagttgtagctgctgcgctatggcctgaacaatgttaatgtcctgatagtgagattgttgcgccaccagcgcgagctgttgccagacttggttgtttctcagttgaaacgcagctgattgcaagaaggggcttgccgctatgccatactgctgccttacgaactcattatatgggctaagcacctgttgctgtagcaggacaggcgactgcagctgatattgcctataactttgacctaaaacatcaaactgcgcagaggcgctgcatgcagcaatagcaaggagagcaaagacgaaaatgatcttcattgctgcgggacactagatctttc

SEQ ID NO: 406729 - DNA, 551 bp, Oryza sativa nipponbare
gaagtaggtaaagtaagaaatatgtcacctttatttaatgttgatatagaatagaatcaccaccaagattcatacttgtggtgttttattttgctatatgccagaactagttctcagttacattactctgaagtctcactttcggactcattcgagaatcctgggtagtattgttgttgaaatctaggagtgaaggcaccgtgctcttctcccctattgttcttgatgcttcgggcttgctcccgtgagatgcggtaagcattagcgaccacatcaactggtaaggcgcggaatactgagttttttcctgcaaggtggctgacgaaggcgttagcgtttgtcttgattgcaatatattggcatccttcacgctctgctttcttcaagacagcataatgttgtggaatgatcaatagttgtccagggcgaaggacaccatcgaacacagtctttccaaagttactaacgacttgaactcgagattgcccttgaatcatatagaccaaactatgagcattgacattccagaatggtgagagaatagcattctg

SEQ ID NO: 406730 - DNA, 540 bp, Oryza sativa nipponbare
atagatctaacaacattattcagttgaagttccacattaaatttcacaacccttttcagccaaaattatgataggaacgatcttcggagtacactggtaaaagcaaaaacagacagaaaattatggttcatataagataggaaaattgctaagacgaaaggaggcgcagccgacatgagtaaattgttcatcttgatgcgaagctaataggcgaaggagggttcgctgggcctgaagctcctgtaaatggaggctgcaactgggataagacccaacagcgcgatctggacctgctccgaggtgcttgtcctgacagtgatctggccacttagtttgttattcaatccaagacgaaccaccatcttcgagccccttccaatcgagaactgggactgcaaattcgcaccgagagcaaggtctcggcgccacttcatcaaagaaagacccagggttgacagggactggccaatcggataatctttgtctttcaggcgtgcctccaagttagctccataagcggtgtccccttgagctcgcatt

SEQ ID NO: 406731 - DNA, 605 bp, Oryza sativa nipponbare
atccttatagaggcatggtatttaaatatgaaagacaactttttttgtatttatatcacccaaagtttcacatgtcacatatgatgatatctgagcttatttttaacttccgaaccactatactgttaaaactcattacaagacaccgccaagggtggtaatggtactgggtgcaccatagtacctagggtagataccatatctagatggcacgttaaaagccaacagagcttgagcttgagccagattccgatcaaagtagagatcaccaaactgctggagttgtagctgctgcgctatggcctgaacaatgttaatgtcctgatagtgagattgttgcgccaccagcgcgagctgttgccagacttggttgtttctcagttgaaacgcagctgattgcaagaaggggcttgccgctatgccatactgctgccttacgaactcattatatgggctaagcacctgttgctgtagcaggacaggcgactgcagctgatattgcctataactttgacctaaaacatcaaactgcgcagaggcgctgcatgcagcaatagcaaggagagcaaagacgaaaatgatcttcattgctgcgggacactagc

SEQ ID NO: 406732 - DNA, 480 bp, Oryza sativa nipponbare
ggccatgaaatcagtctcacaattttccatggttttaatcagagaaaccaactcggcagacaaaaaagggtatcggaactgacattaagttttgatcatccataatttagtaacagcccaaatctcctaaaaggtaaagcaactagcaacaccatctctactcagctgctgcaacctcccctgccaccgcctcgtcagtctcagcaggcctgtccagcttcataccgacatcttccttgtagtcaccgtgtacctccatcaacttcccaagatcaaacttcggtgccttcaagatcttcaccttgcggatgaacacattttggagagggaatatacttgaagttgacttctcgatctcctttccaatgacttcagggatgaattttgaaaccagttctttcaagtcacatgttgatgcctggttggccatgatctcaaccatcttccggcggatctgccggatctggctagcctgagcgt

SEQ ID NO: 406733 - DNA, 542 bp, Oryza sativa nipponbare
tgaagtttcgatcaacaacatttgcaaaattgcgacagcacaaaaaaattcagtacagtttttttagcaactaaaaacaagagcaaatttgctcaaattgtcccagataactctataaagcttcccaaatagatcactggaatagagcgcaaaaagaaaagcacagagaattgaatgggtcacgatgcatgcggtatcattcttcagctcaagccttgcggttgccggatgatgaacctttctggtctaccgggtccttgcttccaaccaagtctctgtaacgctgttcccagtcatctagcttcccgtttgatatgtcagcatgaatggcccttcggatgccttttacaaccaaaaagtactccaccataaggatgagcggtatgaacatcttccagcgattgttgggatttggaccatctattagcttttgatcaacatgaatggatttgctcccgtttgagacaacagtagtaatctcttttatcaagttcggaatccatggagttccatcagggagaaccttctctccattcttatta

SEQ ID NO: 406734 - DNA, 511 bp, Oryza sativa nipponbare
ttttaaaaatgcataagcagtgaaaattttattgcataccattatttgtaaaaccatgcatgcaaacgcatgttccatatcctcactttatttacggaggtagtactttgtggacaatcgcgtacatagttcagatcagatacagcatacaactcgttgccatcacatgtatatgttatacgtcgagggtggaaaaaattgcaggtaaataaaatctgctaattgtgcctctccaccgctcagattttctcccagactgcgtagccgtcaccgtgcgcgacgacctggaagccttcggggatgaggtgctcgacgtcgtatcttggtccgaccttcgtgatgacctttccgtcgatctcggcgaggtagagatcgctgtcagcctccatgatacgcagctcgctcgccgggtggatcccctgccggtttctgatcgataccaggcgctcgatctcctccttgtggccccagtcgaagaaatggtcgtagaagatgcatgggttgccggggt

SEQ ID NO: 406735 - DNA, 276 bp, Oryza sativa nipponbare
  unsure (1)..(276): unsure at all n locations
aaagacagcggtttttntatnnatatnacccaaagtttnacatgtnacatatgatgatatntgagcttatttttattttnngaaccactatactgttaaaacttattacaagacaccggcatgtttggaatggtactgggtgcaccataatacctagggtagataccatatctagatggcacgttaaaagccaacagagcttgagcttgagccagattccgatcaaagtagagatcaccaaactgctggagtgggagctgctgctctaaggcctga

SEQ ID NO: 406736 - DNA, 403 bp, Oryza sativa nipponbare
agctgtttttgggtttttatttttttatttttttttttgggtgttttttttttttttttttttttttttttttttttttttaggaaaaaaagaggctttatcatcattagtcgaaagactggaccgtacataacatcaaaacaatttcttgcaatttgttggtttaattattctttatccccaagcccacctaaaaggattctgccccattataaacctcttggtagctcttgtattggattggagtgaatgcccccaactcatctcctctattatgcttgagcctctgagcctcttcttttgaaaagccatatgcccttgctagaacatcatttgggagagcaccgaaaatggaaccctttcctgcaatggggcttaccataaaattaggattggtcttgaa

SEQ ID NO: 406737 - DNA, 478 bp, Oryza sativa nipponbare
ttatttttttttttttttttttggtttttaaacagaagaacatctgagttcatcatttattcatcatacatgcttccagataaaaggaaacacaaattatttagtaaccaaatcacacacatgaacagccaataactgggggcatacagaaggctagtagccagttcccggtagccagtagcagacaccgcctacgccattggggatgtccacgttgcagaacgccgggaggctcgccgccgcgcgctcgatgtcccctctccggcagccgcggaacacctcggccatggggtgcccagcgtcggcggcgccgctctccctgtagatgatcctcaacatgtggttgagcgcatcgcacctgcaccagctgctgtcgatggcggcgagctgccggcagcagcctctccggacctgctcgtccaccgtgccgggggcgacgcactggcgctttacgaacgcccgggattgcggcagcggg

SEQ ID NO: 406738 - DNA, 413 bp, Oryza sativa nipponbare
  unsure (1)..(413): unsure at all n locations
aaaccacgcatgggccacacacttttattcattcatagggcagctaggatccgatcgatcgacacgatgacacatgcgcgaggtggcggcacaagctgctgcgctagctgctggttcatcgaggatgtcggggcttggtgcacatgcancggcggcggacgccgtggcagtagccgtcggggaagccctccgtgttgcatacgctggcgcagttcgccttgcgggcgcacgggcccttgaaccggtggctctgcgactcgcacgtccgagcctccgccaccatcaccggcccgcccatctcaccagtggctgcaagcagcagcaccatgagaagcatggccgagaacaccttgcgtgaagcctccatttcttctttcccttggaactaaccggacgcgtgggcggacgcttgg

SEQ ID NO: 406739 - DNA, 271 bp, Oryza sativa nipponbare
aaggacagattgtatcactgcgtaataatcagatctggcaaacagcaaaccacagttcctacagaatcaaacagattcataccaataggttgaaacaaactccatacacaagtcagtgcaattatcaggctttcagggggggggtcagatgacacatcaagcaacacaaccagtcaaacacaggtagcacacatatcaaacattgctaaaacaccacagcataggtcttcattacaagaacctgaatacttccccatcctcggacgcgtgg

SEQ ID NO: 406740 - DNA, 410 bp, Oryza sativa nipponbare
aaaccacgcataagccacacacttttattcattcatagggcagctaggatccgatcgatcgacacgatgacacatgcgcgaggtggcggcacaagctgctgcgctagctgctgggtggtgtgtcaggggcagggcttggtgcacatgcagcggcggcggacgccgtggcagtagccgtcggggaagccctccgtgttgcatacgctggcgcagttcgccttgcgggcgcacgggcccttgaaccggtggctctgcgactcgcacgtccgagcctccgccaccatcaccggcccgcccatctcaccagtggctgcaagcagcagcaccatgagaagcatggccgagaacaccttgcgtgaagcctccatttcttctttcccttggaactaaccgtcagatcggacgcgtgg

SEQ ID NO: 406741 - DNA, 397 bp, Oryza sativa nipponbare
  unsure (1)..(397): unsure at all n locations
gaaaggaaattaaagggatttattacttgttccattaaaaccatcacactcgggtacgtggtgaaaccgtgaaagttaaaaaacaaaaacagtagtagtagagtgaggccctgctcgctgttacaggggagtntggcgaagaaccagcacacgagcagagcatccagcccacacgcagcaaggaaacggtagggatgccgccgccgccgccggccgatccgccgcccggcgatgatgcgtcgtcgtcgtcgttcaggtgcacgcggaggcggagcggcgtgcggcgcggcgcggtcgagaggtgatgagtagttgacgcggagcagatatatatggatggatggcgtcntngncggacggacgacggcaaggtcgcgcgcattaatcgcgggcgtag

SEQ ID NO: 406742 - DNA, 276 bp, Oryza sativa nipponbare
  unsure (1)..(276): unsure at all n locations
atcaccaggggtgttgttttcaaaacatttcattattcattatttgttttgatcactatctcgttgcatgcaacacagcaacggtgtgatcctactagctatgaggcaagccagctaagcgggatgctggccggcngcnaaaatgctgcactgctggggctcaacccggcacatcgacggcagctgcgccgcgtactgcctcgccctggtcagcctcacgcgggtcatccccggctgctgctgctgctcgccgtagtagccctgctccgacgaccc

SEQ ID NO: 406743 - DNA, 313 bp, Oryza sativa nipponbare
  unsure (1)..(313): unsure at all n locations
caactgtcacgcatgaggatgcatgactttatttttaacatttgaaccattatactattacaattcagtaccagacatcaccaactgtgggaaggctcgtttgggcaatgtantanttaggatagataccacatatggatggcaagtttaaggccagcaaagcttgagcttgagcttgagtctgatcaaagaagacaacaccgacctgctgcagatgtagttgctgcacaaacgcctgaacgctactaatggcctgggagggagattgttgcgctaccagcctgagctggtggcaacactggtgctgcaagac

SEQ ID NO: 406744 - DNA, 368 bp, Oryza sativa nipponbare
  unsure (1)..(368): unsure at all n locations
accctggtttgttttttttttttttaggcaatcttcttcaggtatttattacagtaagatcgttacacatttagtttacttctcgttgatctgccactcagcatactgttgcggcccacgcctcggagcaaatacagcctttttttcgccgggattgtacgttacatgcctagagtcctcccttgaaagcctataancattggcgaccacgtcaacgggtagagcacgaagaatggaggccttccctgcgatctgactgtcgacagcattgtgattggtctggaaggatacccatgcaaatgcttcacgtcgagccttgaccaccactgcaaaggacgtggggatcaacaagatcggtggggggtgga

SEQ ID NO: 406745 - DNA, 517 bp, Oryza sativa nipponbare
gtgaaactgattcagaaaaccgtaaaaactatcaacagatacattatcaaagttccatatctgttgcatatcaccagacagcaaaatatatagttccacagcacaacactaccaacaccgatactgggttgtgacaaacacatcatatttctgacttgtcttataactctttaacaatagtagaacagctattagaacaggtaaattaatggcaaaaacatatgcgagaccaaaagggttttttcttagagcttgtcctcgaaatccgagagaggggtcatctgctccttgagacccttcctcttgcggatgtccagcaccagctggttcgcctgcgagctcacctccagaggatcagaagtcatcatgtcccagtgatcaaagacacactgagggaaggcctggcccgatgttgcggcacggagctggctcgagaacccaaacgactcgatgacggggaggtaagccttgatgttgtacagcggggtaccgggcctctgcatctcctcgaacacat

SEQ ID NO: 406746 - DNA, 584 bp, Oryza sativa nipponbare
atgtaaacatatcacatcttcatagcaccatcaatatgatttgcctgaatccaagtaacatatagcaatatgtagaagtatattattacacaagaaccttctaacaaatcacccagcaacaccatccaggcggggggcaccgcgttaatatactcgcggtgaatccatccatgcgaaagcctctcggggtgggataaatacagtagtccacgagagaccactaggcagacgcattgaccaaaagcctccgcgaggtatacagaaggacactaaagtgcagatatctcctttatgacctgctctttgtctgcctcgaactgttcatcctctttgtcaatcttgaatccggcaaaaaatcggagaagcttgcttcggtttgtgactagtatgtttacaacctcagttggcttgtttttatttgccgcaaataacttgaacacatgaaatgcttcaatttgaatatttttgcttgaatctctcaagagattcatgagaatcataagattatcttttgaactaacataacgcatcatgactgtagagttggatctatcaagcagcatgtcttccaagaacttgatagc

SEQ ID NO: 406747 - DNA, 444 bp, Oryza sativa nipponbare
aaatatgaaagacaactttttttctatttatatcacccaaagtttcacatgtcacatatgatgatatctgagcttatttttatcttccgaaccactatactgttaaggcggaggacaagacacccccaagggtggtaatggtactgggtgcaccatagtacctagggtagataccatatctagatggcacgttaaaagccaacagagcttgagcttgagccagattccgatcaaagtagagatcaccaaactgctggagttgtagctgctgcgctatggcctgaacaatgttaatgtcctgatagtgagattgttgcgccaccagcgcgagctgttgccagacttggttgtttctcagttgaaacgcagctgattgcaagaaggggcttgccgctatgccatactgctgccttacgaactcattatatgggctcggacgcgtgg

SEQ ID NO: 406748 - DNA, 224 bp, Oryza sativa nipponbare
  unsure (1)..(224): unsure at all n locations
aaangaaacacnccancaaggggggagttatggagcaaaattcagtgtgtttagggacagtacgactggtagctatctccagaaaggagtaacagcgcaatctgactcgaagaatgttcattttttttaacgggaatgttagagtcaaaactcaatacanataaaatataaacatctaatanctactaatncnaaccnnatcaatcaatcctccttctacaaac

SEQ ID NO: 406749 - DNA, 395 bp, Oryza sativa nipponbare
aacccgcaaaaaaagccccctttgggtttgggccattgggggccccccttttaaagggggggggggcccccccggaaaaaaaaaattttttaaaaaggggttttcctattaagcagtttcttccctgggcccccctctttaacccccccccttttttgcccgggcaatattttcaacctggggggccgccctcccctcaagattggccccatagggcctggggccctcaacccccgcaattttttcaacgggggcctcaagaaatttaaaggttttcttaacaacagacatgctttttttaacccccaacccctggtggggggaggtttccccaaggggcccccaactatttttttttttaaccaaggccttgttgggggcccttttaagggggc

SEQ ID NO: 406750 - DNA, 328 bp, Oryza sativa nipponbare
  unsure (1)..(328): unsure at all n locations
ttttaattgagagcaaggtaaaattaaaaaaaaaatgcgcatagagcaatacaatatgacaccgacatgatacgatgatagtaacagagggaaccatccaaataccaaaggtcgtttccatatctctaaaaatgcaggggggcgattatatatantgttctagatatatatatatagccagcatccagcgaagagaagattactagattggcaaataacaaaggtagaaaaggagaggttcaggtaaggcttcatctactatatgtataagggggtggaggggtcatcatcatcctccttggtcatacagaggcaggcaggcaatggt

SEQ ID NO: 406751 - DNA, 286 bp, Oryza sativa nipponbare
ttctaaatacaagcacaccaattaagttatatatcagtatactccatatatatgacagcacaggtacatcatcacatcacaggacacgtacatacatatagacacacaaaggtgcaggtgatgactcacatgatagcaggggacatggcacacatacgcaacacgaaacattatttagcatgcatgcatgcatatgcatatatatgcacgcatgggcgcataacggatgacacactggattgtggggccaggttgcagaggatagctttgttcatcggacgcgtgg

SEQ ID NO: 406752 - DNA, 407 bp, Oryza sativa nipponbare
gagggatgtccttagcattcagaactgatattataagaaacttttacagtacatagcagcaacgcaattgcttgcaatttatttatttatttatttagttattctttatccgcattgccaacttaggaggattccgccacattataaacgtcttggtagctcttgtattggaggggagtgaatgcaccgaactcatctcctctgttatgcttgagcctctgagcctcttctcttgagatgcgatatgcatttgctagaacatcagttgggagagcacggaagatggaactctttcctgcaatgtggcttaccatagagttagggtttgtcttgaatgcaatgtaagcacatccttctctttgtgccttctttacaactacatagtgttgtggtacaataagtagctg

SEQ ID NO: 406753 - DNA, 446 bp, Oryza sativa nipponbare
  unsure (1)..(446): unsure at all n locations
gaataaaacagttgtagcattttattagtgcttcataaacttagaacagaaccgccacaaagtttcacatacttgtggcattttatttttttttgatacggctgttgtatttcattagtacatcactctgaggcctcnttctccgactcatttgagaagcctaggtaggtctgttgttgatatctaggagtgaaggcaccgagctcttctcccctattattcttaaggcttcgtgcttgctccctcgatatgcggtaagcattagcgatcacatccactggcatggcacggaatattgagttcttccctgcaaggtggctcaccatggagtttgcattggtcttgaatgaaatgtattggcatccttcatgctctgctttcttcaagacaacgtantgttgcggaatgatcagcaattgacctggacgtaaaacgccattgaatac

SEQ ID NO: 406754 - DNA, 339 bp, Oryza sativa nipponbare
  unsure (1)..(339): unsure at all n locations
ggaaagcacaaaatcatttttagtcctttatcaccagctattttgttttcaaaacatttcattattcattatgggtggtgggcactatctcnttgcatgcaacacaaaaacggtgtgatcctactagctatgaggcaagccagctaagcctagtactggccggcggcaaaaatgctgcactgttggggctcaacccggcacattgacggcagctgcgccgcgtactgcctcgccctggtcagcctaacacgggtcatccccggctgttgctgctgctcgccgaaatagccctttttcgacgaccccttgccgaaatacccctgtttcgacaacaacccc

SEQ ID NO: 406755 - DNA, 560 bp, Oryza sativa nipponbare
  unsure (1)..(560): unsure at all n locations
accacgagaatacaaccatagcatgtgaaaattctcacaatcagttcttccaagctaagagttgattcatcattctttcagaaaattggtgttcagtagggtctgtaggcacgacatagacgcggagatggctaacaaaatccactgaataaaataggcgggccttccagcgtaaaacacactcgagagaacgctctaagctgcagcacccttgcccttcttcctctggagcttcttcatgtagaactcaagctctttgccctccaggatgtacccatcagctctgccacattgcccaggccgggaggagatgcaggccaagagccttccgctgccaaattgctcttcaatgtgcgagtccagagtgcgagtttgctgacgcttttcaagcttcctcacaacatggttgctcttttttgcttcctccgtggcagcctcaccctcttgtccctcagcagcatccttcttagcagcagcccaagcgtccgcccacgcgttcgcccacgcgtncgcccacgcgttcgcccacgcgttcggggacgcgtgggtcgacccgggaa

SEQ ID NO: 406756 - DNA, 478 bp, Oryza sativa nipponbare
aaggataaagagaggctttatcatcattagtcgaaagactggacagtacatagcagcaaaacaattgcttgcaatttatttatttagttattctttatccgcaagccgacctaagaggatgggggcgcattataaacgtcttggtagctcttgtattggattggagtgaatgcaccgaactcatctcctctattatgcttgagcctctgagcctcttctcttgagatgcgatatgcatttgctagaacatcatttgggagagcacggaagatggaactctttcctgcaatgtggcttaccatagagttaggattggtcttgaatgcaatgtaagcacatccttctctttgtgccttctttacaactgcatagtgttgtggtataataagcagctgtccgcggcgaagctcgccgttgaacactggctttccattgttgttgacaacttgaacccgggcacggccttgagtaatataca

SEQ ID NO: 406757 - DNA, 131 bp, Oryza sativa nipponbare
agtactgatttcgaacagaatcaccaccaaggggcatacttggggggttttattttactgggggcgggtactagttctcaattacattactctgagggctcgctttcggactcattcgatcggacgcgtgg

SEQ ID NO: 406758 - DNA, 482 bp, Oryza sativa nipponbare
  unsure (1)..(482): unsure at all n locations
ttcttttttttttttttttttgggatttttttttttttttttttttttttttttttttttttttttttttttttttttttttgccccaaacccccaaaatcattttttgtcctttatcacccccttttttgtttgggagcatttcattattcattttttgttttgaacactatttccttncatgcaacacaacaaccgggtgatcctactacctatgaggcaagccacctaaaccttatactggcccgcggcaaaaattcttcacttctggggctcaacccggcacattaacggcaatttccccccgtactgcctccccctggtcagcctcacccgggtcatccccggttttttctttttctccccaaaataaccctccttcaacaaccccttgccgtaatacccctttttcgacaacaaccccttgccggcgtaatacttcaacaacaacaacaaccaaccttttttcaagggcattggca

SEQ ID NO: 406759 - DNA, 508 bp, Oryza sativa nipponbare
gaacaaaacagttgtagcatttgattagtgcttcataaacttagaacagaaccgccacaaagtttcacatacttgtggcattattttttgatacacctatactatttcattagtacatcactctaaggcctcgttgtgggagtcatttgagaagcctgggtaggtctgttgttgatatctaggagtgaaggcaccgagctcttctcccctattattcttaaggcttcgtgcttgctccctcgatatgcggtaagcattagcgatcacatccactggcatggcacggaatattgagttcttccctgcaaggtggctcaccatggagtttgcattggtcttgaatgaaatgtattggcatccttcatgctctgctttgttcaagacaacgtagtgttgtggaatgatcagcaattgacctggacgtagaacgccattgaataccgtctttccaaggttactaacgacctgaactcgagcatgcccttgaacgatcggacgcgtgggtcga

SEQ ID NO: 406760 - DNA, 583 bp, Oryza sativa nipponbare
aaatatgaaagacagctttttttctatttatatcacccaaagtttcacatgtcacatatgatgatatatgagcttatttttaacttccgaaccactatactgttaaaactcattacaagacaccggcggggtgggtaatggtactgggtgcaccatagtacctagggtagataccatatctagatggcacgttaaaagccaacagagcttgagcttgagccagattccgatcaaagtagagatcaccaaactgctggagttgtagctgctgcgctatggcctgaacaatgttaatgtcctgatagtgagattgttgcgccaccagcgcgagctgttgccagacttggttgtttctcagttgaaacgcagctgattgcaagaaggggcttgccgctatgccatactgctgccttacgaactcattatatgggctaagcacctgttgctgtagcaggacaggcgactgcagctgatattgcctataactttgacctaaaacatcaaactgcgcagaggcgctgcatgcagcaatagcaaggagagcaaagacgaaaatgatcttcattgctgcgggacactagat

SEQ ID NO: 406761 - DNA, 488 bp, Oryza sativa nipponbare
aaaaaataaaaaacaactttttttttttttatttcacccaaagtttcacatgtcacatttgatgatttctgagctggtgtgtaacttcccaaccacttttctgttaaaactcattacaagacccccccaaggggggtaatggtcctgggggccccattgtccctaggggagataccatttttagatggcccgttaaaagccaacaaagcttgagcttgagccaaattcccatcaaagtaaaaatccccaaactgctggagttgtaacttctgccctttggcctgaacaatgttaatgtcccgatagggagattgttgccccaccagcgcgagctgttgccaaacttggttgtttttcaagtgaaacccaccttattacaagaaggggcttgcccgtttgccatactggtgccttacaaactcattatatgggctaaacccccgttgctgtaacaggacaggccacttcagcttattttgcctataact

SEQ ID NO: 406762 - DNA, 485 bp, Oryza sativa nipponbare
aagttatatatcagggtactccatatatatgacagcacaggtacatcatcacatcacaggacacgtacatacatatagacacacaaaggtgcaggtgatgactcacatgatagcaagtcacatggcacgcgtgggcaacacgaaacattatttagcatgcatgcatgcatatgcatatatatgcacgcatgggcgcataacggatgacacactggattgtggggccaggttgcagaggatagctttgttcatcacttgccgcagttgcagccggcgcaggagcagccggtggtgcacttgcacttgccgtcgttctcctcgtagccgacctcctcagccatctcgaagtggctcttctcggcgtcaactatgacgacgccatagctggttcctttcttcacgcactggctcttgtcagcgcagtcgcagttgccgcacttgtccgacatgttgatcgatcgatcgatctgcgatgaactgagctt

SEQ ID NO: 406763 - DNA, 515 bp, Oryza sativa nipponbare
agcaaaggaagaaatgcatatttagatgcacaactctacgagtctcacggtgcaagcatagccatctgaccacaaaaaatgttgagccactgcacacggtgcagtgtcagttgtagcattcacaacggggcgagtttctttttaggaggtaaaactctacgagtctcacagcatagtaaaacgtagccagctattactagatacgagtagcattttttaagtcgcaaacaaaagggatacagtcccggcttaaggggtgtaaaatcagcttcactatcttcatgttcgccgcaacgggaaacagagcacaatcatctttgggtccaaaaatttacggcaaacctttgcgacgacgttgatttgtgaaccaatgacgagtttcctagatgacatactctgcttactgttgcgcgcactgaactctctgggcacctccaggcatctcatcgtcctcatcatacgcctcctgagcagcttgggctttcctgcgcatctcttcctcaatgttgttgaca

SEQ ID NO: 406764 - DNA, 510 bp, Oryza sativa nipponbare
tttgggttcaactgaacttattggagggtaaaacaatgaagcaaaatatcaacaaatatatggttatcccacaaagtctaacaagaaagctcaaatgaacaaggcgaaaagggcaacaatgccagcgttgtcatgggttgttgcctgatcagaatgaaggagaaaatgggggggaaaagagcataggcaaaaacagtacacggtacatcacaaagggcatcgctcctctggagagttatatacaggaaggcgcatcatgctaagttgctactccggtgctctcctatgccagacagacccaagtttttctggtcgttaccaagtcaaggcaacaggagtttatgaagattgcggagtttcttgaaggcggtacattgtgatctcttgctgcttgaagtacctccggtcttcctcgtcaacaagaaccaggttcaggtagtacttgacattgaacttgttgtttatgttgcggtaagtcggggtcaacttatatggtgtcaagaagagtct

SEQ ID NO: 406765 - DNA, 523 bp, Oryza sativa nipponbare
tttttggcagcacgtaggaaacgctttgctggtaacagaagggagttcaataacagcctacaaaattctgaaacgtaacaagcaactccgatatacaaattcgactgacatatcggggactcttgaccaaatgcgagacgatgtatttgtttgatcagatcagcacttgcacagtgatttacggatagacaaaattcaaagttgaccgcaaacataacttgatactgcaggcagtacatgcatttcacttccgaccaagagtggggaattgggattggtctttgatttctggagctggtggagctgcagagcgatggccctcaccatatccacccctgaaaccgccacgatccccgcggcccctgccacgaccacggccgccatagtacctttctccttcagctggttttaggaactcgttgatgctcacagacttcttagcacgctcatcacgttcaagattttctttcttcttcaaagcatccttgtcagatcccagtttgatgaaaacttcatcattttc

SEQ ID NO: 406766 - DNA, 524 bp, Oryza sativa nipponbare
aaatatgaaagataattttatttctatttatatcacctcaagtttcacatgtcacatacgatgatacctgagcttatattttcacttccgaactacaatattgtgaaaattcagtacagggggcgcgccaagggtggtaatgctatcgggtgcactataggaccaagggtagataccatatgtagatggcaagttaaaagccaacagtgcttgagcttgagccagattccggtcaatgtagagattgccaaactgctggaggtgtagctggtgcgctatggcctggacaacgttaatgtcctggtagtgagattgttgcgccaccagcctgagctgttgcaagacttggttgtttctcagttgaaacgcagctgattgcaagaaggtgcttgccgcaatgctatactgctgccttacgaactcattatatgggctaagcacctgttgctgtagcaggagaggcgactgcacctgatattgcctaatattttgacctaaaacatcaaactgcgcagtggcgctgc

SEQ ID NO: 406767 - DNA, 364 bp, Oryza sativa nipponbare
ttttaggcaatcttcttcacatggggcattacagtaagatcgttacacatttagtttacttctcgttgatctgccactcagcatactgttgcggcccacgcctcggagcaaagacagccatctcatctccgcggggtagctgtcatgcctagagtcctcccttgaaagcctataagcattggcgaccacgtcaacgggtagagcacgaagaatggaggccttccctgcgatctgactgtcgacagcattgtgattggtcttgaaggatacccatgcaaatccttcacgtcgagccttcaccaccactgcaaagttctgtgggatcaacaagatctgctgttggtgaagctcaccggacgcgtgg

SEQ ID NO: 406768 - DNA, 658 bp, Oryza sativa nipponbare
aaattcctatacgctaggacacgccacaatctatatatcgtgtacgtcccatgaacaatttcatacagattacagaccacacgaatagtttgcaggcgatgccatcactcggcggcggcggcgtggagggtgttcccgacgtcgatgacgaagcgatacctgacatccgccttggcgaggcgctccatggccgtgttcacgtcgtcggcgccgatcacctcgatgtccgccgtcacgccgtgcttcgccgccagctcgatcatctcctgcgtgtccgccatgccgccgatgttgctccctgccagagtcctgttcccgtggacgagagagaagggagggacctccaggggattctccgggaggccgacgaggatcatcttcccgttgggcttcagcaacgccaggtacggcgccatgggggtgttggcggagaccgtgttgatgacgccgtccatggtggacctcgcggcctccatctcctcggcgctgctgctcacgacgaacgcgtcggcgccgagccgttccagcgccttccggtttttccccggcgacgagctgatcaccgtcaccttcaacccgaacgccctggcgaacttcaaccggacgtggccgagcccgcccaagccgagcacgccgacgtgctttcccggcgcgttca

SEQ ID NO: 406769 - DNA, 647 bp, Oryza sativa nipponbare
ggcataaccatcattttgatgcaggagccagcagcgaagttctgccgggcaaaagtagtacaccattttggaacccacggttgcatacaaagttactccagaaaatacattgcaatgcagttaatattgctcaaatcagctacaacagaaagaaaacacatgatgcatgcgtgttctcttctgctcacagcgcactagcgcagtgccactctccttcctactgtacaagttacaagaagcaagcggcctcatcagcttcagccaaatgatatccccaatgctgatcgattatcatcacatcatgatggccacagcaacttcagccatagctcagcctggaatcgaaggaccgggcttgtgtgtgccgtcttggtattccgatctcgcaagcatttacccttgaagcgaacctcagtgaacaaatcgtctccccaacggatgatgcctccggagaaatgttgacaaacatcagcgttttggaatcacctccaaggcaaggctgcaaaaggtatgtaagttttgagttcctgaagggcacatgatcgtctcctttcgcaattgcaaagataacatcgctaagagctgacaagcttttattgattgcctgagtttccttcaaacgatcacccgtggagccacttttagca

SEQ ID NO: 406770 - DNA, 481 bp, Oryza sativa nipponbare
ataattaatccataacattttatcccatggctcaggtcaagaacctgcatatacaggatgtctaccataactgtacttaccatatctcaaatactctcacatcgatccacccggtccacacgaatacgtacatctatacggtacacgtacgtacatctactgcaccgcgtacacacacgcacactctcctgcagagacgcgcatgggcgacaacctagcttgcttagctgaaggcgaagcgtcgccatggcagcacggaggcggcggcgctcacttgccggggactaaattggtggcatatgcccatgcgttgctgttgtctgggtctgctaaacggtcggaaaggttctcgagggggcccttgccggtgacgatggcctggactaggaagccgttcatggtgaacatggccaggcggtccgacttgatctccttcaccctgagccccgcgaaggcctgcgggtcgtcggcgaggccgagc

SEQ ID NO: 406771 - DNA, 750 bp, Oryza sativa nipponbare
  unsure (1)..(750): unsure at all n locations
ttgacgccgctgcctacgctgtaagcttgtatactgtacacccttcgttttttttttttagtaaaaaaattacattttgatacaacttgtcatatttacaaggtaacaatctggacatacaacttacatatacatattgataagccatttaaaactggcttaggctattaatagaggcaaaaaaaaacaaaacaaaaaaaagaacagtgtgggaaacaagaatatcagttgaaatttccagtattttctattctacagcacccctcttattgctgctttcgtcgatgaacacgctgcccataccaagaaagccatgtttttgtgacagcttcctcgagaaaacttatagagcaatgtttgaggtaaatttattcgtcaggaatttctgcactttgttaatatctgggtatatttgcaaaagaatcatgtcccaaattttctttcttttgtgttgagtatcagtgctggggaagggatgtatcctacactcgaattcctgaagcagaagcaggcattgggggtatcaaacttttaggaggcatcgggggccttatgcgaactggtttgccttctttcgcctcaacaatcaccacgtcagatgtgagaaaagacttggcgaccacagcagcatgttctatgcaacatctcacaacctttgatggatctaatattccagcggccattaagttctcatagcggntcttggcagcattgtagccatatctactgtccttatttaataacaccttt

SEQ ID NO: 406772 - DNA, 630 bp, Oryza sativa nipponbare
tgtttcagacaacctactttttttaaccatagtaaggcacaactgaacacagagggccgaataccgacactgaggagctttaacgtaaaggaggcacgaggataggacacaagaaaggcaggggataaaagtgacaagcgtagaatgacactatgatcaccatgttattttccatccgacaacataacagtcacgatccacagtatgctgatgtgtgcagagctgtggactaaacatcaccctctggatagaagatcttgatggtgcgatcctcagtcttggaatcagtctccggaagtggtgtgcttaatatcccttgctattgaaaagaaaacctgctcgacattcaggtttgtctttgcactcatttcaaagaacttgatgccatattcatcagcaagtgcttggccctttgaagttggtacggcccgtttgctttcatgcatgagagctttgatgcctaccaaaatcttgttcacattatcggaagcatggtgctctatgttgctaatccagttgcttatattattaaatgatgactcgtcggtgacattataaacaagcaaaatacccattgcttccctgtagtaggcagttgtaataggtcggaaacgttcttgaccagctgga

SEQ ID NO: 406773 - DNA, 523 bp, Oryza sativa nipponbare
aaccaggaatcagctggtgtttcctcctcctttgatttgtatatactatatatacagttatgctaagttgctaactatgcagaaatatatctgaatgaaaagcactgcatcttttaacactctgcagtatatatgaactactacacagtgacagccggagttgaaagctcaggcaacccactttggccattcagtacaatcaccttcccctcggaatccacatcgacaatggcagaatcaccctccttcacctccccagctagcatcttctccgcgaggctgtcctccaggagcctcatgatggccctccttagcggcctcgcaccatagctcgggttgaagccttcgtcaacgatacgctccttgaacttctcggtgacctggaggtcaatgtccttggccttgagcctgtcaaagacctccttgagcatgatctcggcgatctccttgacctccagcttggtgagttgcctgaagacgatcatctcgtcgagacggttgaggaactcggggcggaagtact

SEQ ID NO: 406774 - DNA, 615 bp, Oryza sativa nipponbare
gaagaacccggcaatcaccaggataaaattcttcaggtctcttccacaagacacatcctgaagagtgcccaagaacttgttcacttgggtgccaattgcagaaccaatgtttgcgaacagctcatccggcaattcgacgcgaggaactttcgaaggtgacccatttagcatgcctgcaaaagtggaccatgcaaactggacaaccatgccaagaacaagaacaaagcaagcaatcgtcaggaagtggtagtcgagccactcgaagaaaacccagacagccgttgcaactgcaagaacacttgaagatatcttcttgttcctccacaacaacacgtcggcggattttccaccacccaaaacatgatggacagacttctgaccaccgaagagtctcttagcttgatcagagattgagccatcttcaaatctgactgacttctgcttgggaagattgtcggcaatggcgtccactatgctgtccacaatgttcgcagccgcattctcagagtgctccggcatctctttgcacgcgagcaagaccagcagaacaacaaaaaggcctgataagatcacagcaagctggtgatgaggaagggagatagctgctgattggag

SEQ ID NO: 406775 - DNA, 602 bp, Oryza sativa nipponbare
gacaaaagtaatccaatggaagaataggccacgaacaaaatttctgacaacaatgctcttataaagtttacatttccaaagctaaaaggtcatatgaaacctcgccacatttggcgatgtatggaatacagaaaacctaccagcatatttacatggcatatatagaccacaaaaatgtgaggataaaagaagatattatctgtggggaaaggacaaaagaagatttggttcaaaaccaaaaaaaagtttccaaccagattttgcctgttgtttcaatgcccctatcgatgttggaagttcaacttcttgatgcaaatggcatacatgaacgcgaaaaacacagcgaagagcacgagcaccggcgcaacaactggcataaatttcctgtgatatccaaaatgatgagtaacatagtagctgattgtctggttggattggccagggactgagatgatttgttctaggtctccatactgtgtcactatgagcccatacactgtccatgccaatgggcaaagccagtagtaccagatccaccatttgggaatccttggtctcggaatgaagaatcctgagaataggttgaacaaggaatagaacgc

SEQ ID NO: 406776 - DNA, 596 bp, Oryza sativa nipponbare
acaaccaacaggcaacagatatattcatacataaaaggagacccactgagtggcaactgacacgatgagcatcgcagcagtgttgtgcaacatcacaaagcatatagcatgaggatttactccaggtaggctgatcagcaaatagccatatccacttcagttgaaccaaacagttctgcgttcctctcaaacaagaacagaaaagaaacaacacatgctaagagagattatgctttgctgaatcatgatgatcaggtcaggtttctttcggggcgcccttcttcgcggcctcggcggcagccttctctgcttcaatctcagccacgtactcgtcgatctcagcctcctccagctcgcggaggccatccttgtgtgtcatcaccgcaatctcgatgttcttgccaccgctctcgacaacctcaaggagggctcggatggcaagcttgatggtctccttgccggaggtgtccttgtaattcttctcgaggaactcgcgcatggagttggagttgcggccggtggcgttggccttccaagcggagaaggtgccggatgggtcggtctggtagagggcgggcttctcggtgtaggggtcg

SEQ ID NO: 406777 - DNA, 655 bp, Oryza sativa nipponbare
ccagcagggctggctggttcattgacaaatgaaagtgtgaagtccataatattacagagtattgctgcatgtttagaactaccataacattaccgaggactcaccatcccagaaagcacgccgctactacttgcatcaacactagtaaaagtttgagatgaggccaagtaattcccatttgttgaatttgatgtagatttactcatagggtccttgctcatagcacgtcctgagtatgtctgtggagtttccagctggataagatcaccctctggcattatcttcaagatgagctcaagttctctaacaatctctgtcatggatggccgagcgtcagtctcatcccgagagcacttcattgcaagttggaggaagctatccacacactctggagaacacaagcccatccgggtatccatgatttcagatatattgcctgatcggtaagctttttttacctctctcactatgtttttaccatgctcaataggcttcatcccggtcaacaattcaagaaaaacaaccccaaggctgtacacatcacttttatccgtcaatttatgagttaggaagtattctggatcaagatacccaggggtgcccttaacaacggtggagacatgagctggtaaagccccttcaacatctggtactg

SEQ ID NO: 406778 - DNA, 661 bp, Oryza sativa nipponbare
aatgaaagcttcagactattccattctgctcttctgattgtaatgccacagaagagcatcagtgtttaagtcatgtgcaaaattatgacaaacaaatttgccgtccaccttttgatctaacaaaagggctggtcactcccaaaactccagatggatatatacacatcatttcgtttattaactatcacacgagattcctaaaacacattcatatgcgaacatccgcaaaactttttaccagttgataagcttgttgcatgaattctgcatcttcagagtgaagttgacgctgtcattgtcctttgagcatttccaaggatgataacaatgatggtaacatcatcgtggtactttctcctgctcccaacaggtatcctcatcaattcttcagctgttaaagctgcttccttcgctgctttaagtaaaagttgctcaatgagatactttgcaggatcaccaattggattatcatgcataaattgataaaccaactgaacaacttcgtcattgctgaagaaatcaaataagccatcactaccaagcacaacaaacaaatcatcctctgtgactttatgactaactgtgtgaggatttgtgtacacataaggcgggctgcacaaattacgaactcggagaattcccatgagtgcatcgttcaact

SEQ ID NO: 406779 - DNA, 705 bp, Oryza sativa nipponbare
atcagtgccagaacgctgaccacagttcaattaaaatttttcagggcgcaccctgttaagaaggcccagtaactttacaatattaatattccctcaaggccagctaagttcaatcccggatttaaatatttctacgcatcgcttgaactacaaagagctagtagtacaatccagacttgttaccacactgacagccaagctgtgtaacgagccaaaggaatatatgaataaggacgcaccactgtttcatgtgcaagcaaaatgacggagatttaacccaaaaaacaatgtcggacagggaaagggcaaatgaccctggaagacttaaacctaggccacgtacatgaaatctcggaacggtgtttggttgttgcaaatgtttaccgcgcggaatgattagcaccatttgacaatagctgaaccccatgtaagtccagcaccaaaacctgatgctgcaataacatcgcctgccttcaccttgccagctcgaacagcctcatctaatgctaatggaattgaggccgcactggtgtttccgtaattagcaagatttgaaataactttgtcagatgggatatccaacctactggcagcagcatcaataatccgctgattagcttgatgcagcaacaaccaatcaatactggaagcaggtaaaccagcctcttccaatgccttctcaatagattgtggcacacatcgcac

SEQ ID NO: 406780 - DNA, 609 bp, Oryza sativa nipponbare
gctcagcaaatgaattagtcttggggttatgtatgcatgcaggtacacccacgacaacaaaattaaaaactataccaacaagaagaatttgcttgagcatatctgctcaaaaattacaacgcatatgccagtggtcagactagtatgtatgtcatgaatttgtcacctctgactaattaataactagatatacaatttaagatgatcttattacttatgagtcaccatgtcttcttttgatttgattagcgagtacgtcaggtatacatttttttctgccctttaccttttacgctttgatttaagggttgatgtctgtgagttgttgtgccagttacgctttctctgattgatgaaccagttgttgatttgcttgagctgcaggccagtctcttcaacaagctttgccttatcatcctccgtggggtatggccacttggagtgttgctgccaccattgcttgagtatggtggtggtgtccccaggcaactttcctgcccttcttttcctcaatatttcttttctcacatccttaatccttgacttgaagccctgcttgagctcaatcttgagctcttgcctgacccgctccatgagggatcgctcgga

SEQ ID NO: 406781 - DNA, 452 bp, Oryza sativa nipponbare
aagcttcaacattgggtgtttgtttcgtaatccattccggggacaatgtacacattgcttagcaggtgtaaattactaaactaatacctatatttacctaaacgtgcctccgaatgttgggtgccaaaacttcggcaccgttttgctcgccaccgtataagtgcttgccaccggcacaaggcacaggccttggctgcgcaaatccggcttcggctgctctgcgtccttcgtgctctcagaacccttttgctggaagtgctgcaatgggttcccattcttcaagtacggagagctcaaagacccaacttgttcgtgaaggaacttgatgtattcgatggcctcgtgaagaaccgatgcggtatcagtctttccaaaaggcgaaactagttgctggagcgcaatgattctgtcccctagcttctttttcctcaccttgaacgttggcaacgggg

SEQ ID NO: 406782 - DNA, 699 bp, Oryza sativa nipponbare; identical to SEQ ID NO: 385444

SEQ ID NO: 406783 - DNA, 595 bp, Oryza sativa nipponbare
gatgaaaaccacttcgagacaatttactcaggtagcaaatatttctcagccacaaatccaaacacttggtccttcctatcagaagatcagaatgaacaggttttcaaattcatctcccaactcgacgataatttacacgtacatttaacacattcttccacccttctcaaactcctcccttcttcttcccgggtaagattaaaattaacttgaggccagccagcgtcgccggcggcgagatgtttacaggctgggcgtcctctcggcggcgccggagatgacggtgagcaggttgttgccgaaggggtcgctgaggtgcttggagaggttctcgacggggccctcgccggtgacgtaggcctggatgaagaaccccagcatggagaacatggccagccgcccgttcttgatctccttcaccttcagcagcgccgcctggtccgggtcgctcgccagccccagcgggtcgaatgggccacctgggtggagcttgtcctccagatccaggccgttgatgatccggtagtactcggcgccgccgacgaggacgaccttggcggcgacggcgacgatgaggttgatggggatgctgttg

SEQ ID NO: 406784 - DNA, 738 bp, Oryza sativa nipponbare
aaatacggtaggttatgtttagtagacttacggagcagtgtggggtctactatatagtctctgctgtacatggtcctcaccaaaatacaggaaaacagagacatcacgtatgacacgtctctactgaggcggttacaccagaagcatgaatgacaaggaaataagccaaattggattttctctttttgccagaaaatttacaagcatgaattatgtacagcgaattccgtggtaggggaaaatgctaatttcttgtatatattccatttctgcatctatgtggacatacaaacagtagagtggatcctatggaggtggcttactattatgattcatctggctttggttcaagaatcacgggtatcttttccttttgatctccacgcaatacttccacagtcaccttctttccaactttacactgatccagaatcctatacaagtcgcttccatttgttacctttgttccattcacagaagtaattatgtcccctaggataagccgaccataggaatcccgcttggtcgattgcagacccgctttgcctgctgggccatttggaggagcatccaagacaagcactccacttaatccaagctgctctacagattgatcttgagcaaattttatccctaaaataggtcttgttactttaccaaactttataagctggtccacaataccaccaactgtatcaactggaatgggaaaagccaaccccggatgatgcttcttga

SEQ ID NO: 406785 - DNA, 669 bp, Oryza sativa nipponbare
  unsure (1)..(669): unsure at all n locations
aaacactgaaatgaaatttacttttcttccttattcattaaacaaaactctggaaggatgaatagaatagcaatccaatctcaccttaaccttgctcccaagtgaaataaaaaataatctagtgcactcttcgatacatacagaagcatacaggtactcatttgcggatgaacaggagcatatgcagagcagaaatgcagcatttgtctctgaattgagagagaggagtgtggctggcctggcctggcctggcctcgattgtttcattctatacgaaggcgtgcttctcgagcagcttgaggacttcctcctggttgttgagtttcgccacgtcgatggccgtcttcccgtccaggttctgcaccgtcacggcggcgccgtggtcgagcaggagggcgacgcagtccttgcggccgtagccggcggcgtagtgcagcgccgtgttcttgttcttgtccaccgcgtccacggccgcgccggcctccaggagaacctgcgcgcatttcagctcgccatagccgcaagcgaaatgcaggcctttcctccctttcgaatcctcctcgtccttggccacgcctttcttcaatgctttcttcaggccctcgacatcgccgaccctggcagtgtgggggatgacggacttcgcctngaacttggccttcttcccgc

SEQ ID NO: 406786 - DNA, 589 bp, Oryza sativa nipponbare
gggaaacgaataaaatcttttttgcaaaaacatcattttttttttcatttttttaggggacacaacaccaacttgatcattattttgtggcactaaacccatttttcccaacccaaaaacaacgaacttgttggccccaaatccatccaaccccaattaaccactggtaagctacggtcccccactttatttgccggggaccaaattggtggcgtacccccaggcctttttttttacggggtccgcgaggtggtcggcaaggtttttgagggggcccttgccggtgaccatggcctggaccaaaaaacccaacatggaaaacatggcgagggggccgtttttgatctcctttaccttgagctccgggaaccccttggggtcatcggcgaggcccaccgggtcaaaggcccccccggggtaaagcgggttaacaacctccccgagcggccccccggggatgcggtaccccttgacggggcccatgagcaccacctggaccgcccaaatggcgaggatgctttgcgcgtggattaagctcgggttgcccaggtaatccaaccccccctcccttaaaaattgtgagcccccc

SEQ ID NO: 406787 - DNA, 659 bp, Oryza sativa nipponbare
acatcttacaacaatcccatattcccatcccatgatccaccagtgaacaacacaactttcactctgcaccatcatatcgtacacatcaagctgatcattaacagctaagtaattcgtgagaaacgcgtcctacaaattctcctccatcgatctttcttggtagagaggagaagaagaagaagagcacagcaaaatcctagacgaaaatcaatagcacatcactctcactcactgatcgtgatcggccaagccgacgagcttctcgctgagctcccagaccttcttggccttctccggatcggaggcctcctcggagagctggttctcgaacgaggccgagttgttgttccagctccagtacaccccggacttggtgaggctggggtcactgacgacctgggccagccgcttgccggcctcctcctcggagacgtagcccttggtgatgtacttctggaagggcgggaagaggaggcggaacagcgggacgtgctcccggaagaggcccgtggtggcgatgcacccggggtagagcgacgcgaacgtcaccccggtctcgccgtggtaccggcggtggaactcctgcatcgtcagcatgttgcacaccttgctgtccttgtaggccttggcgccggcgaactcgccgccgtcgattcatg

SEQ ID NO: 406788 - DNA, 623 bp, Oryza sativa nipponbare
cggagagcatgcatattattttactacaagttaaaaaaacactgtaccatatacattttaatgtaacactggagtaaaaggctatcggccataaagttacagttttgtggcatccgaagccaacatttattactccgattgccatagcaacccagttcggaaaaccggaaaggccaaaatatccaaaagagattacatggtgaacactgctctgacctcctttttcaggtcccagatatgagggtcaactagggtgccgatgcacatcaagcaattattctgccatcagctgaaatagcatctcacatgcgtgacctcgacgaagcctgctgggttgcgtttggtgcgctcaatggtaggcttcttttagctctatcttccaaataggatgatggtttgaagaaatcgccataaatttcagtccacttgctaagctttgaatgtatataaggtgctccaatagtgtcagcccaaaagacaagaccacccctgaacttgggaaaacccatcccaaggatagaagcaatatcaagatcagaagctcggatcacaacattttcatccatgaccctgcatgcctcattaacaactgggaagaaaatcatctccaatatatcttgatc

SEQ ID NO: 406789 - DNA, 652 bp, Oryza sativa nipponbare
acccaaatgaaatatactcatgtatagtatagcccatatctttatattatattattattaacaaaaacttgtcatgcccagctatggcttgggcgcgatctgatacacagaacaaagagaaaacataaaaaggagaaataattaatagcaagcgtcaagccggcctgcttaaaaggtgtaaaggcagctgccgtcgtcgctcctcgccgttgggtcgaagttcttggcaacagggtcggtgcaaccttccggcacaggcaggttacctgcttgctgtgctccttgccctcctcctcctatgcaggccgcctacgatgcatcgatgggatgcgaatagctagagatcttttattcagctggatggcgcagaaccgtagaaggaaccagtcttcatggcgtcggagttagcgtcaccaagagcagcctcgctcaagtactgctcagccagctgcacacgcttgacgttctcctgctccttcacaagcatgtatccgtactccatgagcttttcgatcgtcatcttgggctgctcgaactccggtgggccctccctcgagttcaccagcctcttgccaatgttctccacacccgtgtccgacacccacttgcgcaccttggcgtcgtaaacacgggcaccaaaaaggcccaaaaa

SEQ ID NO: 406790 - DNA, 427 bp, Oryza sativa nipponbare
gcagcaaaagatttccaaattggcataacaggaggggaaatctgagtaatttacagtacattgtgtttttccacttgattttttttgtttgttttgacggtaaaaatacattacaaatcaagttatatttgatttccactgaaataacctacgacacaacataatttatatgatacaacagtacattttgcccgattgtgctccggccatggctaatccctgcagctgctcccgaactatacataatctaacgatctagaatacgaccctgattgaaatcggggaagatctcattgctccccatttatcatcagagaagggtaaggaactttgtttatctcgataatggttgactgctcctgtaggagtggttgtttccatggctctccatccatctgaacatacgcacgattccattggccacccc

SEQ ID NO: 406791 - DNA, 656 bp, Oryza sativa nipponbare
atatcaaacgctctagaaaagattcatgtgatgaaatacatgatgaaccacgtatgttctcaaggtaaaattaattaatgcagtatagttttaactttgtccatcgatctcaacctgtaactgtgacgacacactggctacagtgccctcgaggtactagcagtatagcagtagctgtagtacgtagcagcagcagcagcaggttcactgtcttgattggattggatcggattagtagacgtagttcttgacgaacatgccctccttggcctcggcggcctcgccgtcgctggtgtacttgccgagctgcgccagcgagttggccttggcgcggaggagcagcgcgtcctgcgccgccttcacgttctccggctgcccgccccacgtcttgaggcacgtgttctgcagcgccctcgcgtacgagaacgacacgtgccacgggttgggcccctggttcatcgcgttcaggttctgcgtcgcctccacctccgactgcccacccgacaagaacatgatgccggggacggcaggggggatccttctgtggaggagcttgagggtgtagtcagatacttgctcaggggtggccctgtccttgcactcggcaccgggtgtcaccatgcttggcttgaggaggatgccctcgaacatcacat

SEQ ID NO: 406792 - DNA, 604 bp, Oryza sativa nipponbare
  unsure (1)..(604): unsure at all n locations
gaactctgaagatcagcttcaagtatacatacatacagtacatctaaataaaattgtaaatgtatagtaattctagttcatggtattttgagcacttatacaggttacatctacacaaccattttttcttttcagacaacacgcattagagtgtagtgacatctacacaaagcaagacctgaacacaccgtaaacagctgaacacagtaaaagtaccatctaactgaaagttcagacttgggagagccactaactagcctgaaactacaggcttgccttgctcctgcgacagctgctgcttggagttggattgagatggtgggttgaacttggtgaagaccctgaaggcggagatgagggagagcgccatgaagcaaaggagggcggcggcgttgagcgccacggacacggtggcggcgccgcagaagcggccgaagtaggagcacaccttcccccacgacacctcccggtcgccctcccgcgccaggtacaccacctccgccgncgncgacgccgacgtnagcagcaggtacgccgacgcctgatccaggaggaaaatgagccaatcaaagcgagtgatgaacctgcaggatgacagcaggat

SEQ ID NO: 406793 - DNA, 602 bp, Oryza sativa nipponbare
agccagaaatggttatattttgggatcgagggagtatttgtttccgatctaatagagatgagaaatccgctaatcagaataacaccacggataagtacctagaccattagttgggaaacgaataaaatcattattgcaaaaacatcatcttcttcttcatcttcttagtgtacacaacaccaactcgatcatcatctcgtcgcactaaacccatcttccccaacccaaagacaacgaactcgctggccacaaatccatccaaccacaattaaccactgctaagctacggtcccccacttcacttgccggggacgaagttggtggcgtacgcccaggcgttgttgttgacggggtcggcgaggtggtcggcgaggttctcgagggggcccttgccggtgacgatggcctggacgaagaagccgaacatggagaacatggcgaggcggccgttcttgatctccttcaccttgagctccgcgaacgcctcggggtcatcggcgaggccgagcgggtcgaaggcgccgcccgggtagagcgggtcgacgacctcgccgagcgggcccgcggcgatgcggtacccctcgacggcgcccatgagcacc

SEQ ID NO: 406794 - DNA, 619 bp, Oryza sativa nipponbare
ccacggatcccaattgttttaattgatggatagcgatatcataaaagcagcgacacgaattaagatttaaaaccaaccccaagaaggatcgcagatccaactccaccgaatcgatccaagaactccgcctaatccaaccaaaccatgggcgatctcatctcaccaacacgacacgaactcataaaaagactaacaccaccaccacctcctccttatttagggactcgacgactcaagacgactgatactggcgaaaggcgaaggggaacagcacagatctaggagagctggccgcagtcggcgatgacgaccggcttggcggtgctcccgccgcgggatcccaccttctcgatggccttgacgacgtccatgccctcgacgacgcggccgaacacgacgtgcttcccgtccagccagctgcagggcacggtgcagatgaagaactgggacccgttagtgttgggcccggcgttcgccatggacaggatgccggggctgtcgtgcttgaacttgaacacctcgtcggcgaacttctcgccgtagatcgactcccctcccgtgccgttgccgcgggtgaagtcgccgccctggcacatgaactccgggatcacgcggggga

SEQ ID NO: 406795 - DNA, 682 bp, Oryza sativa nipponbare
acgctacatacaatttcaacttgtcgatattacacgttgataataatgtcttaggtttctaaacaaattttcaagccaagccatataaaaccagtatagacaaaacagtgcctacccaaccagccaacctctacttacaatataataatatataaagacaacaaatacactacacaaaagaaggaatatattgcaaaaattcactattgagcatcccataggtctagatattacaaccagatactttgcctacttctgcaaatgaaggatgggggagggtacgagatctaatcctcgagcgccttcaggatgtctttctcaaaagacaagggactggtcgcagtcgagtatctgttaatgactttgccattcttatcaataagaaatttggtaaagttccacttgattctagatccaaacaagccaggcttgctagctttcaaaaatttgtaaagtggtgcagcatcaggaccatttacacgcaccttctgaaaaacgggatattcagctttaaatcttgtgcaagcaaaatcctttatttgctggtcagatcctggctcttgtcgcaagaactgattgcagggaaatgctagaatctcaaaatctttgtccctgtgtttctgatagagctccgtcagctgcgtgtagttggtctccgtgaacccacattttggaggcgacg

SEQ ID NO: 406796 - DNA, 471 bp, Oryza sativa nipponbare
ggaggatacaaacaaataaatagaggagtaatatccacgtacattgaacctagggaaacgatccagtctcccgtagcaatacaacacgaccattaaatccagggtcaaaagcaacgaactatggtgatcggtcaccagcaaacttattgttaacctaaggcatactcacccttcagcttacttcagccatcaaaatacacgtatcctactccgagtttctctccatttaaccccgtgagatttgaattaaaacatgtatacatggtggtacacaactacattgggtaacttttaccagttgttttttaagcatatccactactcccttgcccatgcaagaagcgcacgacaacacaagttatgttgtcactgctctcccttttgtaggcctcttgcaagagcttttttgcagcttcttctgggtcatgaatcgatctggtcatgtcgacagcctcctcattggttactaca

SEQ ID NO: 406797 - DNA, 620 bp, Oryza sativa nipponbare
caatcaccagcaaatattattgacatcaagcagtatctaacggagtttcttttccaatgttgcaaattagtacactacatttatgtacaaaaggatcgcacaacacaactgctgactctgacagtgtttgggcatgtcctaatcctgttttttcctaccgttttacacagctgctggtgcaatctgctctgactgctgcaggtaaactatgataccataccagggagggcctgagaccaaacaatctaaagttagatacaaaattgtccaaaaaccgatggcgcctacacagatttggccgagaaagctattggcagagtggttagtacggtgaaggtgtcgcccggaggcgtcaaattcaaacgactttcacccatgtcccaccgcacattgggcaagcatgggtccatcggctgatccaccatgcctcaagctcattcgacgtgttcggagctagagcaccaggctgagcaaatgcacaggtttgcctcaaacatcgtatgcacttgtaccattcaccttcgaggcctgttttccacacagctgtaataacatctctccgagaacccatcacacctagaaaagatcccagccccacggatgttttcagaccaaatgct

SEQ ID NO: 406798 - DNA, 493 bp, Oryza sativa nipponbare
aacaaaagcatcaataccttataaattcatcaaataggtggccactacattgggaaaacaagtaggggaaggcaggggatcaagctcaggaattacaacaactgaagattttttatgtttttagggggggatacaaaccgggaaagccaaaattgcttttttttaggaaaagcttggtgcaaaaactgcaactaaatcatgtccttgggttaaacggccgtccaactttgttccacaattttggggactttggggttgtactcgcgcttgttctccctgaacagtttggctgtttcggagtttgcaggggagtttgggtttggatcacaaagcagggactggatagaggtcaatattggagcaacatcatatattgggctccattgattttgtgggatatccaagcagatacttccctttggataaatattggggggaaacattcttgagacaaaccgaacaactggggggttggtgggataatcttttgtaa

SEQ ID NO: 406799 - DNA, 545 bp, Oryza sativa nipponbare
aggttcaaatccaacttattcataaagcatactgctgtcccacaggaaactgtttcataaaactaacatatcatacggactcgatggtccattaaaccagacacaagtagacatcagcaccacaaatacttgacgaacagaggctcgggacgaccaggcacatcggcagctccaccaaactggctgattactgaccaccacggaggcggagcaccaggtggagggtggactccttctggatgttgtagtcggcgagggtgcgtccatcctccagctgcttgccagcgaagatcagacgctgctggtctgggggaatcccctccttgtcctggatcttggccttcacattatcaatggtgtcggagctctcaacctccaaagtgatggtcttcccagtcaaggtcttcacgaagatctgcataccaccacggagacgaagcaccaggtggagggtagactccttctggatgttgtagtcggcgagggtgcggccatcctcgagctgcttgccggcgaagatgagacgctgctggtcttgggggatg

SEQ ID NO: 406800 - DNA, 549 bp, Oryza sativa nipponbare
ggaacaataaaacttttttggcactataatgtcacagagaagtcccgagggccgagtaaaataatctacgggaagaggggagaagggacccccgagcaagctaattgagctagcttgcccgtaattcagagagaccaaatgaatgatcaaaccaataagtttacaacactttatttagctagctacgtcgtcgtacgtacaattttcaatttaatctcattacaatcccaactcacacaagcctgccacgagctatacattatgcttagggcgatcgatcagctggccaccctgcagtttgtcctgatggtgccggcgttgccggtgagcaccccgatggagcccattttgaccatggcgggggcgaagtcggtctggaaccagtccgggttgttggtgtaaccgacaacctgcccggcggtggtctggtcggcgaggagcgcctggtcggagcttaacaatccccggttagcgacaatggcggcgtaatagttggtgtcaaaggcgttgggcgggacggcgttcatgggcaccattcccgccgggggc

SEQ ID NO: 406801 - DNA, 619 bp, Oryza sativa nipponbare
ggaggatacaaacaaataaatggaggagtaatatccacgtacattgaacctagggaaacgatccagtctcccgtagcaatacaacacgaccatcaaatccagggtcaaaagcaacgaactatggtgatcggtcaccagcaaacttattgttaacctaaggcatactcacccttcagcttacttaagccatcaaaatacacgtatcctactccgagtttctctccatttaaccccgtgagatttgaattaaaacatgtatacatggtggtacacaactacattgggtaacttttaccagttgttttttaagcatatccactactcccttgcccatgcaagaagcgcacgacaacacaagttatgttgtcactgctctccctcttgtaggccttttgcaagagcttctttgcagcttcttctgggtcatgaatcgatctggacatgtcgacagcctcctcattggttactacatcccacagcccattacttgcaagaatgaggaactcgagagagtgatcaataacttcctcccgaatctcaggatccacaactacatactgctttaagagtttgtcacccaaacggcgagaaacagcaagcacaccaccaacacgccatg

SEQ ID NO: 406802 - DNA, 712 bp, Oryza sativa nipponbare
  unsure (1)..(712): unsure at all n locations
ggcgttggtcggcggcggcggcgggtgcggtgggtgcggccagctcatgccgccggcgttgccccacccctgctgctgctggggaggccagtgcccggccatgcctgcgccgatcgtcagtgacaggcctcccgctgtccccggatcaccattgctcaagaattggtgatgatgcctgggactgaatggcaggtgggtgacctgcaggaccggaggcatctggggatggttcgagttctggtcgaacttagctttggtgctcctcgccgccgccgtttgccagtcaaggtcgaacgccatagggacgcgctggtcggagcccgcgccaccgccaccgccgccggtgatctcgtcgtccccgccaccgtcaacgttgcccctcttggagcccgccgagctcccaagcgagaggtccaggttgtgctcggcggcatcacccgtggccgctgccggcggctcgaactccccggcgtaaatgcttggatcgaagttcgtcaccgcatccttgccattgcacttgatggcagcgcggtcgtacgccctggcagcttcctcctcggtgtcgaacagccccaagtagacgtacttcttgccgaggaattggcccattccgagcctccatcntccgcacttgtggagcgtcacgcccctgtacttggagcttcccnggggaaccccgtgctcttgccgcgagcacgtgacgaactcttct

SEQ ID NO: 406803 - DNA, 559 bp, Oryza sativa nipponbare
ggtcaattgttcatatcggggattagatgcgaaagaactacagagcgtggaaaaaatgtattaaaaaagagggttttctacagttaattaagctgtataccttgactaaatttgtactgtcacttcccaacttagaaagcactaatcaagaagagtagtattgtcaacgacaattacctgcatgttcatttgttccagtcagcatctcatctatggtacagacaacagcaagtgttggctctaaactaacacattgcaattaaacaattaatctttccaatctcctaccgccccagtttcttcatactgcaaaagaacaaatcatcacaagaacaagagaactaatcagaacaaaacatgcaactaatcaaatcacaaagcgcgaacagcttcttctcggaaaatcaatcacctgcaattcctaggcacactccaggtgacagaatgccggtcactcccgggcgtcgccatgaacctcctccagtcctggagcatgagcccgaggtcgtcgacctttcggcggaggccgacgcaacagttggcgtgcatggtgcacacc

SEQ ID NO: 406804 - DNA, 561 bp, Oryza sativa nipponbare
cagctgaaactttaaaccagaagtatctttgcatgtccagacataggagtgagtgattacaggcccagctgttctgaaaccaatagaactactgaagagcaaatcgaacacactgagcaaaaactggggcagcagttgagcatattgatatgggaggtctaagaatgaaacaaatgaagaagtaggttgtgcttacattacgcttaacacgacgatgggttcgacaaaaactaggatagggtagagctagagagagacaagaaaaagcatgacataataactgataagcgtgctcgttgagcctctcagacttgggccgtgccttgcgtgaacaagggatcctcacaccggtacttcccgtcagggccaattccaaagcccttgggatctgagaacacgttttccagaagctggctccggggagggagcgggcttgcgtcagcgaactccacggcctcttcaacaacatcatcgatctttttctcgatgctcttcagctcggattcagttgcaaggttctgttcgatgatgtacttcttcaaggctgtaatggggtccctt

SEQ ID NO: 406805 - DNA, 540 bp, Oryza sativa nipponbare
ggttcaaccgcggcgaacccgctggcgcggttctcggtggagccggcggtgagccggcggcagcagcagctgccggcgaggcagttcgtgggcgggaaggtgccgctggggctgaagcggaaggggctccgggtgctggtgaccggcggcgccgggttcgtggggagccacctggtggaccggctggtggagcgcggcgacagcgtgatcgtggtggacaacctgttcacggggcggaaggagaacgtggtgcaccacttcggcaacccaaacttcgagatgatccgccacgacgtcgtcgagcccatcctcctcgaggtcgaccagatctaccacctggcctgccccgcttgccccgttcactacaagtacaaccccgtcaagacaatcaagaccaatgtggttgtgactctcaacatgctcggattggccaaaaggatcaatgccaggttccttctcaccagcaccagtgaggtctacggtgatcccctgcagcatcctcaagtggagacttactggggcaatgtcaaccccattggt

SEQ ID NO: 406806 - DNA, 558 bp, Oryza sativa nipponbare
acccaaatgaaatatactcatgtatagtatagcccatatctttatattatattattattaacaaaaacttgtcatgcccagctatggcttgggcgcgatctgatacacagaacaaagagaaaacataaaaaggagaaataattaatagcaagcgtcaagccggcctgcttaaaaggtgtaaaggcagctgccgtcgtcgctcctcgccgttgggtcgaagttcttggcaacagggtcggtgcaaccttccggcacaggcaggttacctgcttgctgtgctccttgccctcctcctcctatgcaggccgcctacgatgcatcgatgggatgcgaatagctagagatcttttattcagctggatggcgcagaaccgtagaaggaaccagtcttcatggcgtcggagttagcgtcaccaagagcagcctcgctcaagtactgctcagccagctgcacacgcttgacgttctcctgctccttcacaagcatgtatccgtactccatgagcttttcgatcgtcatcttgggctgctcgaactccggtgggccctccctcgagt

SEQ ID NO: 406807 - DNA, 408 bp, Oryza sativa nipponbare
gctgagtccattacccacttgaatgtggttgaggcaaaactggggagttacacacgtgttacatgagaccagatccatactcctccgtgcacatataaatgacccagatgcactaaaccagttggatgtccgttacactcatggcattcgtgaccggaattctattgcgcagagaaacaagacaggttggtctaagggagggctctgttggcaccattacacattgaggatcgtgaccttgacctagacaccaagatcgatggtgaaggaggtgatactgttcacaacatcagtggagcctataacagcggctacccttttgaggaagcggagctcgaatcgatcccatgtggatgctccttgaccggacggacaattgtagttggttatgtggaacaccttgggggg

SEQ ID NO: 406808 - DNA, 583 bp, Oryza sativa nipponbare
gaagagaacttttcttttaaaagagtatcaacttgttttttacatcggttacatcatagtacaggtacacaatcaacaaggcatgcagtgctccatccacaattacatcccaatacaccaccaccattcacagcctactccgatcccaaaaaagagaggtaagtcgcgtcgacgaacagtcttttcatcttcctccattggcagccattgctaacactccaacacctgaagaactcctcatttgggggtgaaggcctggaaaaagggggcggggccggggtccgcgaaaatggccaaaaagttggcgatggggcccgtgcccgtgtactctgcctggaaccaaactcccatgacggcgagcatggcgagcccccccgttcttgaactcccttggtgcgcaactccttgatcttctccggggagccggtgccccagccgagcgggtcaaaccacagaccaccagggtacccgacgtcggtgccggtgagcttgttgttggggaagatggggtcggtgttgacgcagcccggcttgatgatgtcagcccaccggcggccctcggccccaccgatgaggatgagct

SEQ ID NO: 406809 - DNA, 651 bp, Oryza sativa nipponbare
gagagaaacacccaattgaacatgctattacatacatggtcttttcaatcaccagcaaatattattgacatcaagcagtatctaacggagtttcttttccaatgttgcaaattagtacactacatttatgtacaaaaggatcgcacaacacaactgctgactctgacagtgtttgggcatgtcctaatcctgttttttcctaccgttttacacagctgctggtgcaatctgctctgactgctgcaggtaaactatgataccataccagggagggcctgagaccaaacaatctaaagttagatacaaaattgtccaaaaaccgatggcgcctacacagatttggccgagaaagctattggcagagtggttagtacggtgaaggtgtcgcccggaggcgtcaaattcaaacgactttcacccatgtcccaccgcacattgggcaagcatgggtccatcggctgatccaccatgcctcaagctcattcgacgtgttcggagctagagcaccacgctgagcaaatgcacaggtttgcctcaaacatcgtatgcacttgtaccattcaccttcgaggcctgttttccacacagctgtaataacatctctccgagaacccatcacacctagaaaagatcccagccccacggatgttt

SEQ ID NO: 406810 - DNA, 527 bp, Oryza sativa nipponbare
aatggcactgaatcatttttatttcctcatcctttttattcattcctcccagagagacggatccatggaagttttcttgccctcatcaggcaagcagagcacacacacacggtggcagtggaagtgctatgaacaagacgctaatcaacatccagagctaaaacaaacaaggggatcaatgcaaatcccgaaaaaaaaacacaggggaaagtccacatcttcttctcgtccccaactcctccgtgtcaccaccacgtcttgcggatttttttttaccctgttctattcgctcaggcgtccacgatctcgccgtcgtccttcgacgccaggatcagctccgggtgcgccgccgccgccgccgccttcttgatcgtgccgtcgatggcgttcggccggccgagcgccttcagcgccaggtgcgccgccttctggccggagatcatcatggctccgaacgtcgggcccattctcggggcgccgtcgatctcggcgacctccatgccggtgacgatcatgccggggacgac

SEQ ID NO: 406811 - DNA, 619 bp, Oryza sativa nipponbare
aagaaagaattgcattacttttggggtctgcgatactataagcaacagagttttgtaccagtctaaaagcagccttcttttactcttgccacataaacatattcagtttaactacacttttagcaccctgtgtggatgtcatgtgatgagaggcaggaccgactgacttgttcactcacgggattattcaagctgccaggctctttgaagctatctcgtacacattctctgatagcccattggctgacacgatcatctccagctgagccttagcaagagcttgtctgctctcatcatatcgcctccaccgagagaaagctgacaccatgcgggaggccacctgaggatttatcttgtctagctgtaaaacaacttcacccaagaacttgtaaccagagccatcttttgcatggaaattcacaggggacccacaaaatcctccaattagcgaatacaccttgttcggattcctcatgtcaaaagcagggtgaccaagtaacttttgaacgttagcaacatttccagggatgtctgatgtagcttgaagagcaaaccacttgcttacaaccaaataatcatgctgccatttgttatagaagtccaagagggtgtcatcacg

SEQ ID NO: 406812 - DNA, 334 bp, Oryza sativa nipponbare
aggggatagcgatgctataagcgacagaggtttcataaaactaacaatatatacggactcgatggtgcattaaaccagacacaagttgacatacgctccacaaaccctggacgaacaaaaggtcgggacgaccaggcacatcggccgctccaccaaactgggtgattaccgcccacccccgaggcggagcaccagggggagggtggactgattctggatggtgtgaccggagaaggtgcatctatccctcagctggaggtcggcggagatcataagctgccgggcaccgggagaaagctgactccatgcgaaaggccacctgatgatttaaatg

SEQ ID NO: 406813 - DNA, 536 bp, Oryza sativa nipponbare
gatgtacaagtggatgcattaattcatcatcttgggtgttcttatattacaaatcaccaccatgcaagtcgccattaaccaccaacccagctttcctaatttaagtagtaatcaacaaaaggatgacctctcctctctccataccctcccagctcgctcgtcatcacaaaactaaacagcgcgcgcgaacgcacaccaacgcatcgatcccgtttgaattgcgcgcgaaagagcttaaattaagaggatgaggagaaggtgtcgaagatggtggtgtggagcgggtcgctgaggtgggtggcccagttgttgaggggccccttgccggtggcggcggcctgcacggcgaagccgaggaaggcgaccatggcgaggcgggcgtgcttgatctccgccagctgcagccgctccttcttctccgggtccgacgccaacccgagcgggtcgaagtaggacccccccgggtacagccttttctccgggtccagctccgcgttgcgctggaactcgatgtaaccgatgacgagcaccttgat

SEQ ID NO: 406814 - DNA, 510 bp, Oryza sativa nipponbare
caaaaatatgtgatatattactaggagggcatagaccaaaagtataagcttactccttttggaaggtttgattgggattagatatagagacagaatattacatggtggtataaaagcaagagtacttcggataattcttggctcaaatatactaactattattaagctgcgaggcctgaagatgaatatatatatgttcatggagtttaccatggtgcaaggttttaattaggtcttgctgttgaaggacaggatagcgtagacagtttggatgacagtagcaatgagcaggacagtagcagcgacgagggagatgaacacccaagggttactgaagtaggtgtgtaggaggatggccctccacctgttccgccgcatcttgcagtaggcatccacttccgacatcacgtcgttgaggctgctgtcttcgtccatcaccgagcctttcgtcagcgtgttgttgatcagattcgccaccgcctcgtcgctttccaaggcgctctcgatgat

SEQ ID NO: 406815 - DNA, 540 bp, Oryza sativa nipponbare
agaatgataatatcatcgattggtaccgatgcacagtgaagcaaattgtactagtatggataatagtatcaacacaacttagggactctaaaccagaacacaacacaaccatgacacgatgatatgacagacgagcggcataggtataatgaagtccaatgctgcaccacagcacacgctcagagaccaccacggaggcgcaggacaaggtgcagggtggactccttctggatgttatagtcggcaagggtgcggccatcctcgagctgcttgccggcgaagatgaggcgctgctggtctggagggatgccctccttatcctggatcttggccttcacgttgtcgatggtgtcagaggactcaacctccagagtgatggtcttgccagtgagggtcttcacgaagatctgcatacctccacgaaggcgcaggacaaggtgcagggtggactccttctggatgttgtaatctgcaagggtgcgaccatcctcaagctgcttgccagcgaagatgaggcgctgctggtctggtggaataccc

SEQ ID NO: 406816 - DNA, 469 bp, Oryza sativa nipponbare
gatcacagaaaatcaatccttgcatgcaggggaaatcgatggatcgacctctctccttaacttgttcttaattctcatgtacaatcaaagaaacacacacgcacacacacatgcgtgcactgcatctctctgagcaacgaactcgattgatttgattttgattcgctagggattaaagagaagctgagatagagatttcgacgatcatgcgacgctgaaggagctggctgcgctctcgacgaacttcctggcgcccttgaaccacctcttgtcgccggcctgcgccttgcagatgtacagcttgccgtcgttgacggtggccgtgatcagctggtgcttgccgccctcgtcgccgtccgccgtcctcgtcagcaccgttacgcttgagtacttgtttccttccaccaccggggccgagcttttcaggatgtttgccgtcgccaccgggttcgacttaaacccacccttg

SEQ ID NO: 406817 - DNA, 402 bp, Oryza sativa nipponbare
gcagtaaccaaatcgattcacaggccacacatacaggtagtatacagattcgtctacacacaaggttattgcagaggcaaaacacgaggtatgtatatcaaacgctctagaaaagattcatgtgatgaaatacatgatgaaccacgtatgttctcaaggtaaaattaattaatgcagtatagttttaactttgtccatcgatctcaacctgtaactgtgacgacacactggctacagtgccctcgaggtactagcagtatagcagtagctgtagtacgtagcagcagcagcagcaggttcactgtcttgattggattggatcggattagtagacgtagttcttgacgaacatgccctccttggcctcggcggcctcgccgtcgctggtgtacttgccgagct

SEQ ID NO: 406818 - DNA, 475 bp, Oryza sativa nipponbare
cgtctttttttttttttttttaaagctagataatcactgattccacgcacaatttacatgatcattacatcgtccattacacaggcacttatgcatcgattacacataggagtattgattcgtgtgactagcttaatgaatttgattagccgatgatctggtccaggacgccgatgttcttgaggccgaggacgacgccgacgcccatgatgtggccgacggcgccgcaggccagcgtgtcggcgagcgtgaacccggcggggtcgccggtctgcaggccggagtcgcgcgccttcagcttcagccccgccgtcgacttcctgttcgccgacggagccagcccgaaccttcccgcgaacagcatcagcgtcgtcgtcgtcaccatgataacgttggtggctgacccgatgtagtcccaccggatgccctgggacctctttttgcttatccttaacgatggcagcgtcaccatgga

SEQ ID NO: 406819 - DNA, 701 bp, Oryza sativa nipponbare
gcgtaaatcttttaaatttattcaacagtcagaatcacatgcatcagttgtaagtacattcatagcaatttaaaaccactgttgacagcaaaagatatgtcatcattctgaattggtgtctactccttcaagtctatggttatgcggcttcaaaggcaccgtgaggacttattactttctcaatggtcacttggacgtaagtacatgcatcggctgcaagcatactcatagctacttaaaaactattgttgacctgacacaggcaactattactactgtgttgaagaaaggataaaagcttgcacctcagtatctccgtgacctatcttcctcagggcaactacctttaattctattcaccagaactatgttcaagattcacgattcccaactgcaggtatagattcttgaattgcctgagcaaatgttgcaatcttgtaggtgaaaaacccaacaagcatgggtatcaattccaggtgcatgaagccataatctggaactaaaatctcattccatcggttatacatcatcacaagtgccactggaataagcagtcttggttgggcagcagcactcctgtaagcatgcaaaataaaataagatgcatgtgagcatattttaaaagttggctagcatttgctgaacatcggtcacattccggtgtaaaatttttaaagaaaagatagaggtgacccacataa

SEQ ID NO: 406820 - DNA, 532 bp, Oryza sativa nipponbare
ggggacctcagaactttatttattattcgcacacgtcctgggcacaaactaataaaaccacactttacaacaccactagctaggttttagacacaaacaagcataagcgatggtttaacaagagcgagcaacgcgtctgatacaatgaacacttatacaaaatctggtgtgtgctctgccatttgagctaaatttgaaccgggattttgtatttgaacatatgaaaacgtttactctgctttccaagacgacaatggaggggtctcagaatccttccaagtgccggccgtctgagcatagcggtcaccttgaacaacatctgtgctggcataggactcaagttcagtcatttccccaggggtgagcttcacagatagagctgctacattttgattgaaattctcgatttttgttgtcccaggtatggggcatacgtcgcttccctgatgatggacccaggccaatgcgagttgtgacggtgtgcatccttttctggctgccattgcgttaacacgctcaaatatttcagcat

SEQ ID NO: 406821 - DNA, 554 bp, Oryza sativa nipponbare
aactacacatgacacaaatatattttattcagcgctgatgcggctgctaccccaaaattacaaaatttattacacaaaagacattgcggaaagctttgtacagtttcactacatgctctcgatcatctggatagggtaagacttttgctaccaagcgtctaagctaagtaattaagcgatacctttcttccaaaatatggcgactcccaaaaagagatctaccgggacctttagctgacagaagtgcaaattgactgctgggaatagagaccatgtatgggatgcacaaagtgctgcttgcttcttctacgttttgaaactactgtaaatccttctgtatccttctcactcttaggtaccacggtggccttctgctgtttgtcaagctctttgcgacctgacggactcttgtttatgttgttgctgctctgggcattaccagattcgtctggtccacttggttttctgtccgattcaactccagtggaacctaagctatcatgtactgacttgacgatgaaactgaacaaaatctggcttggcagctttggttt

SEQ ID NO: 406822 - DNA, 508 bp, Oryza sativa nipponbare
ataattaattcacaacaccatatttcattgatcaggttcagaacctgcacagaaatacacactaccggtacagatctcaccctctctccaatactcgtacatccatccacgcggtccacacgaatacgtacatctatacggtacacgtacgtacatctactgcaccgcgtacacacacgcacactctcctgcagagacgcgcatcgtcgtcaacctagctagcttagctgaaggcgatgcgtcgccatggcagcacggcggcggcggcgctcacttgccggggacgaagttggtggcgtaggcccaggcgttgttgttgacggggtcggcgaggtggtcggcgaggttctcgagggggcccttgccggtgacgatggcctggacgaagaagccgaacatggagaacatggcgaggcggccgttcttgatctccttcaccttgagctccgcgaaagcctccgggtcgtcggcgaggccgagcgggtcgaagctgccgccggggtagagc

SEQ ID NO: 406823 - DNA, 545 bp, Oryza sativa
  unsure (1)..(545): unsure at all n locations
aaatanaatgcattctacttcaataattcaagacggggttatacttagttggcacacatgtactccaccccctatcactagagttgttttcttttttgtacaagatcatcctaacattcccacaaggacataaagaaacagcagaaccttcccgggaaaatttcactgagacaggtgcattccgtgcacgtacaataatcatcaccatcatcgtatcatccaacctacaggaaaacgcaaattcaaggtactcttgtccaaacctgtaggtggccagtgatttgctcccatcggctacaactaccagactcaaaaaaactagacacaggtatgatgctaataagcttagcatgatcgactgatggacagacagtaataacaaataggaaacggagggaactatatgtgtcaactcgatgaactctataattatggatgatttccagcgccctcctggcaaaattaacgtccttgtaaatttatcgtcaccatctaaaaccacttgaagaggatgccctcatgggtggcgaagaacggggaaaaca

SEQ ID NO: 406824 - DNA, 428 bp, Oryza sativa
cccccccaaaaggtttggcctaataattaaaaaattattttggttttccccggcactttattacaagaaatttttttattcctacaaaatttgggatgtggtttttacaaaaaaaagggtaataaaaaggggttttttttatgggcaggcccatatgggttttttttaaaaaaaaaacaaattatttaaaattttaagataagttggaaacctaaaatttttccaaggtttccctcggctaaaaattttatatggtttaggttttttggggggaaaactgggccttaatcttggccacccccttgtcgtaaatctggaaggccttgggaaggacggctttagccaccgtcggaaagggggaaaaaagggtgggggaaatggactgttggccgggaagcttctttttgaagggggaaaccacggggggg

SEQ ID NO: 406825 - DNA, 592 bp, Oryza sativa
  unsure (1)..(592): unsure at all n locations
ttnaatgacatcttcagagattattattcatttgggacgaacaacacatgacatcttcagagattattattctggacagaccgtcttgcggcaaaagttagaagacgtcaggattgaagtgcccggggatggagttgttctgctgagcctgcttcagatgcatcgtcagcgcatagttgtttatctctagggtcctcagttgctcctggtactgcacaacaagttgcttcaaactctgaacctcctggctcctctcgtcgaactccttttggcgctcatgttgaatggcgaccgctcgcttgaggacagcgttctctcgcagcacgacggtcaattgctccttaagcatcatattttccttttgcaagttttgtgctgcatcagctcctgtacgctccacgattgacttctccaaaacttctaaagctcttgaggcgcgagcacgcgcatcgcccatgtcagatgcatttgtcatctctctgacaaatagctcaacccattcagaaccattattacctgtctggaactatctgcagcagctgggtgttcattagctgtactcacaccaccatattaacaatcccttaacaga

SEQ ID NO: 406826 - DNA, 448 bp, Oryza sativa
  unsure (1)..(448): unsure at all n locations
tntaaataatattcacaacaccatatttcattgatgggggtcagaacctgcacagaaatacacactaccggtacagatctcaccttctctccaatactcgtacatccatccacgcggtccacacgaatacgtacatctatacggtacacgtacgtacatctactgcaccgngtacacacacgcacactctcctgcagagacgcgcatcgtcgtcaacctagctagcttagctgaaggcgatgcgtcgccatggcagcacggcggcggcggcgctcacttgccggggacgaagttggtggcgtaggcccaggcgttgttgttgacggggtcggcgaggtggtcggcgaggttctcgagggggcccttgccggtgacgattgcctggacgaagaagccgaacatggagaacatggcgaggcggcccgtcttgatctccttcaccttgagc

SEQ ID NO: 406827 - DNA, 444 bp, Oryza sativa
  unsure (1)..(444): unsure at all n locations
ttaaatanatttttttttttttttttttttttttgggttggacgtaacaaaacgctttgcccaagacaagtcaatactacaacatttggggggagtacagaggtacaaaagtcaggcaccgtaagcctttcgattaaaaaccaaactgaaacacgcacgattttttaacaccccacgaaaaacaatttgatagctagctcctttggggggggaacctaaagagctttatttttccaaaacatccacattattatttggcatgactatatagtttcgatacctaaaaagggagcgttcactcagggatatccgccatggcttcctttcatttaagcccggccaagatgcttcaagccttgttggcaatgttgttggaaaggcagtcaagccccttatacaaccccttaccagagggagcacatgtgctttggatgtaccaatgcc

SEQ ID NO: 406828 - DNA, 473 bp, Oryza sativa
tttttaaataaatttagacacttgtacaaaatttgatgcggggatatcaagaatcgcttggaaaatgacctctgtcaatttgataactgcatgtgcatgatacaacaaagaattgcctacctaaaacaaatggtcaatgtggtacttacagatttcacattcaatgtggtacttacagatttcacattcaatgtggtacttacagatttcacatactttcagccagcaagctcacttatcggtacccggtccatgatgttgcaagcaatttgtgcgttcttttggagaaccggatctatatctggcaattttggaatctgggctagtaaatcaatcgtgcgtctgagcagacgggctaaatctccatcatccattgccgagtccatcattatctccctccaggtcaaccctgatgcccaggctttaaccattccagcaaactgggcatctatttcgcaaggaatctttacact

SEQ ID NO: 406829 - DNA, 445 bp, Oryza sativa
aaatgacaagcaagaagtatatatattcatccgtttgtcaaactactacaagaggtcgagaggaacacataatcaggagggattgcgacaatttacagcaacaggagtctggagatcgaggcaagaacaagacaggcagcagcagagctaccctcttcatttccactgaatttttacacatttggaatccatggaaaccgagccttccctcccgtcgtcgtggtgtcaccggagtccgatgagaaaaatggtcatggcgtgctcataatccggatcgctcgccggcgtcggtgaaggaggcggggcgattgttcgggcggctgttgaggagtgggttcagagccttgacgacgatgctcatgttgggcctgaagtccgcctcgtactgcacgcacagcgcagctacggcagccatcttggcaacagccttgggaggataatcccc

SEQ ID NO: 406830 - DNA, 435 bp, Oryza sativa
tttttgaataagaaaacttctttattcaaatctcagcaggtatagcaagtgcccatatttaagaggagtacagagtacagacgcatcacaatcagaaaaccaatagggggagtaccatgtggaaatgtacatcaaaactacaaaaatctcatattttgctggcgaactggaggccttccttcttgagctcctctatgttggcaacgggcggctgagttttcgcgaccttggcaatggccttgttctcatcaggtgacccaccctccaggaaggcacccaacaccttgccgtccttgatccagtaggacccgaacttgggcttggcagaggtcgggtcactgtctccgaacggatggtgtcgcaacgttgtcgccgtagaattgccatcccaggtcgaatgaccgggagtagaaatatggcagatagtcatacttc

SEQ ID NO: 406831 - DNA, 363 bp, Oryza sativa
  unsure (1)..(363): unsure at all n locations
ttnaatanagtatataaaccggttccgtaaatatgttaaggcgagatatacagatgccaaataggtgtacagtactcgaaattacaaagattataccagtataattaatcgttgggattaagagcatgaacgacccagttacgaggggtgcacggagtacgtgtgttgcttgcgcgcgtgtggatcgacgagattcttttgcaaaaattacctaattaattaatcggcgtgctctctggcgtcgncgatattgtttattgtttggctagagttcgccggcggcggcggcgcccaggtcctcacaacctggggaaggggcgggcgaggcggtcggcgtccgtgtagaatgtggcgcggttgatg

SEQ ID NO: 406832 - DNA, 540 bp, Oryza sativa
  unsure (1)..(540): unsure at all n locations
ttaaatgatatccaggatccagcttccatttcctgggtgcagattgcactgtatattacaacatacataatacagctaccaataaaaaaacagtcttctacagaagacatacgagtatgaagcgctgccacattagcaaaacatcaggaaaaaaaataaacataatacccaccagattaaccagacatggttcctattgtagtttgtgcagatgtaagatatacattacaagatgtgtttattttgcttcagttctccttccgctttgtggtgcttcgggaccgagatgatctgtcggttcttgacaaccgcctaccctcctgatcttgtttggaatctactaattcagccgaaagctcagcggtagtttcaggccatggggtgcgcttggcgggaacaactatgtccaaaggtggctcaattacccacccctgaggaaatttgctgtcagctcgcgcttaacacggggccaccacagaggattttttcccacagttncccaatggctcaacgaggatggatcatccaacaaaatagggg

SEQ ID NO: 406833 - DNA, 514 bp, Oryza sativa; identical to SEQ ID NO: 393985

SEQ ID NO: 406834 - DNA, 444 bp, Oryza sativa
agatgagaaagacaatcggaatcacataaaaagaggggccaatgcacactaatttttattacaaccgccacgacagtcttgatcgtactgactctaaggcgcaaaatacaaatcggcattaatcttttgcggatatcccgctctctaaaggcttcttattcctcagcaaatcccagttcagagagcttgaggtgggcctcggcgtaatccgcaaagaaggcgtcctcatccgcagcatatttctccaccagtggacggaaggctgggtcagccatgagggctttgtcacttggcagctgaagaaggccttccttctcgccactcacaagctcggtgaagtaagagttgtcaaagatcaaagggttggacgtccaggctccctcaaagccagatctctccttgtggcatcttcccaggggtgtgaccaccagaaagagcaactat

SEQ ID NO: 406835 - DNA, 411 bp, Oryza sativa
cttcttaaataactctccttttttttttttttttttttggttgtttttttttaaattggagaaaggataaaccccggcacccataaaaagggctgaaacccccaacctttgaagaacaagctgcaaggccaaacgccttcgaaaaagttaacggaaacgacacctttcctttcacccccattttggcacaaaagcaggactcgggaaaacgactaaaagcattacccacgggcccagacccaagaccattaccactgatcattggacacgaattttattttaacaacaaaggcagagggcagcaggccacgggggcaaacttttccaactccacaaaaaacggggacaaccaatggagttccagcacaccgcatttaccaggggacgaacttccagcgctgggtggggccc

SEQ ID NO: 406836 - DNA, 448 bp, Oryza sativa
accaccggcatcgactaagactccggcgacggcgtcagccacacggtgggcatctacgagggctacgccctcccccacgccatcctccgcctcgacctcgccggccgcgacctcaccgactacctcatgaagatcctcaccgagcgcggctactccttcaccaccaccgccgagcgcgagatcgtccgcgacgtcaaggagaagctctcctacatcgccctcgacttcgaccaggagatggccaccgccgccacggggtcgtccgtcgagaagagctacgagctgcccgacggccaggtcatcaccatcggcgccgagaggttccgctgccccgaggtgctgttccagccctccttcgtggggatggaggctgcgggggatccacgagaccacctacaactccatcatgaagtgcgacgtcgacatccgcaaggacctttacggcaac

SEQ ID NO: 406837 - DNA, 507 bp, Oryza sativa
  unsure (1)..(507): unsure at all n locations
ttnaatagattttttttttaaaaattattttacacaatggggtccattgtacttctttcatcaaccaaccagataacattgttttacacaatctgaacgaacgaagcaaatattcgggtacgcggaaagaggagaacgtcgcgcgtctcaccgcagcctgcatgaaagcaatggacctcaccgccgttgctcgccggagatccacactcacttgccggggacgaagttggtggcgtaggcccatgcgttgttgttgacggggtcggcgaggtggtcggccaggttctccagtggccccttgccggtgacgatggcctggacgaagaacccgaacatggagaacatggcgaggcggccgttcttgatctccttcaccttgagctcggcgaacgcttcggggtcgtcggcgaggccgagcgggtcgaagctgccgccggggtagagcgggtcgacgacctcgcgagcgggccgccggcgacccggtaacccctgaggcgcccatgagca

SEQ ID NO: 406838 - DNA, 327 bp, Oryza sativa
ttaaatagaaaggaacttaaactgatttattacttgttggattaaaaccatcacactcgggtacgtggtgaaaccgtgaaagttaaaaaacaaaaacagtagtagtagagtgaggccctgctcgctgttacatgagaggtgcacgaagaaccagcacacgagcagagcatccagcccacacgcagcaaggaaacggtagggatgccgccgccgccgccggccgatccgccgcccggcgatgatgcgtcgtcgtcgtcgttcaggtgcacgcggaggcggagcggcgtgcggcgcggcgcggtcgagaggtgatgagtagttgacgcg

SEQ ID NO: 406839 - DNA, 473 bp, Oryza sativa
  unsure (1)..(473): unsure at all n locations
aatatggatcacttattcattatagttcttgcatgctgctctaccacagcaaaacgtttcagacaccatcaaaccagacttaaggatacacattacaggtaaatagtacacaatgaaacgggacacgaccaaggaccagaccagacaaccatagctccattggggaagacaaataggcagacttgtgaaccctagaacagcagcagctccatggctgaggacttactggccaccacggaggcggagcaccaggtggagtgtggactccttctggatgttgtaatccgcaagggtgcggccatcctcaagctgcttaccagcaaagatcagacgctgctggtccggngnggatgccctccttgtcctggatcttcgccttcacgttgtcaatagtgtcggacgactcaacctcaagggtaatggtcttgccagtcagggtctttacgaagaactgaattcacccctgagcctga

SEQ ID NO: 406840 - DNA, 508 bp, Oryza sativa
tttttaaataaaataggcgctgcaagcaccacaataatgaagtttctcacgcaattcatagttgtcatagagctcccaacgcagttcttcaattcaaaaagactgcccaaacagaccaagggtatcatcatagcagcaaagttttttaacacgcaacatcaaagagacactaatgcaataagataacttgaagcgcggatcactagcaaatttcgcgcttagtcgacctcctcgatcttggggccagcaccgctgccgcctgccgggggagcatcgtcctcgtccatgccgccggccatgtccgcgccagcgccctggtacatcttggcgatgaggggtttgcagatgccctccagctccttcatcttgtcatcgaactcatcagcctcggcgagctggttgccgtccagccactggatggcctgatcgatggcatcctcgatctttttcttgttcgctgtcgggagcttcggggcgatcttctcatcttgatggggttgcgcatgtt

SEQ ID NO: 406841 - DNA, 473 bp, Oryza sativa
  unsure (1)..(473): unsure at all n locations
tttaaatanttttttttttttttttttttatttcccagggttacattctagctcagcggggtatataaaggggaaagcacaaataattacactcagcgtttgagtcatcaaaaacatgcaccctatatagcctaaaggtctggttatttgggacaattttcaagcaacaatcactatgaacttcgatagcatttccggctttccttggagcaattctctggtttgccaagctttccaattcatcacataaatcatttattaggatgtttgggcacaataaattggcagatgtggccaaaactcatagcaaaagcaaagaacgggggcctcgatgtgatacaaacctatgtcttctggaacgttcacgagcctatccagggtcaggtattcactctttccagtctgatatgtttgtcagatgattgagcctgcatttggcgcaagtggaccacgttatgtccgttgggcagctg

SEQ ID NO: 406842 - DNA, 530 bp, Oryza sativa
ttaaataactcaaaacagagctgtgtgtggctacagtagtcacacttaccacaaacagctgatttcaacttgtattgaaattgttgtgtatcagaggcatgctacccacaccaccttctgtctttacaagcagcaaaattatggagtagaaagaattcgagatctttacatacaagggtcgcattcttcctgtactcagaccgactagctggtaacttcacaaaccagtatattccaggccgattttagatggcgagcattctgtcaagtatagtttgctatgtccacatggaaaagaatcacccagtgagaagatatgttacagtttagggtttctttgtctgtacttttttcaggtatttcttatgaagcttcaaagcaccagcacaagcttttttggcatctaaatttccatttacatcattcagaatcctaataagatcatccagtcctctagcttcctgtaatagcttttctcttttttcttgagaacacttgcaaccatgaaaactgaaaatggaactggacca

SEQ ID NO: 406843 - DNA, 497 bp, Oryza sativa
cttttaaaataaattttccttttttttttttttttttgggggtttttttttattttttttggtggttttccccttttaacccacacaccaaaaggtttaattggaaataccttggtaaaaaaaaaaacctgaaccaaaaaccccgcaaaatgggggcatggaaaccaaaaaaaaagggggccccccgggacaaaccccaaatggggggaaaaatttttgaaaaaaataacccttgggttgacgggcccggggtttttggcgttggacctgaacccaccctttatggccccgaagggggggccaaacccctgaaaaaaaacctgggggacgttggtaaaccaaaaacaaaaggcccttttaaaagaaaacggggggtcctggccccccctggtcggggtccttaaaccgataaacaccatattttgccccccaggcccctaattggagttccaaaaaaaattgaggggcccccgcccccaaaaaattttttccccggg

SEQ ID NO: 406844 - DNA, 473 bp, Oryza sativa
gctgtgagcaccagctaaagcagcacgccgagggagtagatgtcggaggtgacgcccagcttccccgtctgctggtactccgggtcgatgtagcagaaggtccccgccgtcgccgtcagccggtactgcgtcacgctgtccgccaccgccggcggcacgaggcgcgccagcccgacgtcgctgatcttgctgacgtagttgcggtcgagcaggatgttggccggcttcaggtcgcggtgcaccagcggctccggcttggtctggtggaggaacagcagcgcggtggcgatctccgccgagatcctgaaccgctggctccacgggatccgcggcgggccgccgcggcggaacaggcggtcctcgaggctgccgttgtccatgtactcgtagacgaggcaatccgtagtccgggcaggcgccgaggaggagcaccatgcttgggtggcgggatgcagttgacaccttcacctcct

SEQ ID NO: 406845 - DNA, 540 bp, Oryza sativa
ttaaataaacatcattggcagtatcttatatatcatatgagaattacatgaagatatatatatttttgtcgtaacacaacacgatgtttgcagtaatgtacacccctccaggagtcatctcttcttatacgtgcttcttgagatgaatgctccatgaaaaccatagggtactctgtgtttcaatactatcttagcaactggtccattctcaaatctttgtgcatcgatgatatgtgcctgtgaattgttgatttcctcgtcatgtacaaaagagattatccatccgtcatcctcatttgctccattgaccttcggaacaaaagttgctcctgagcaaaatttgtttctaccaagatgatggtactctacatttattagatcttgacagggcttaattttgtcttcaagatatagttttgcaaaaccttccaaatttggtcgcactattccacaaccacctgcccagcttccttggaaatccaccccttgtgcatatgctacttgtgattcaagccacatatttgccattgatgactggga

SEQ ID NO: 406846 - DNA, 478 bp, Oryza sativa
aataagtgaagctaatttcattcaacaaaatggcggagcaccgggcaaatcagacagttacaaagtgattgataaaaacaaaaactccgggccagctgatgttcatcagcaaatattttacaagaaaaaaacaaggttctggattattaagacaaggcttttagataaccacagatatattgtgccccagggttcgatctatcggaaagggaaaaaattctgaaattccgatccgaaattgtgaatcctgttagagcctctagatatcaaaaccgaattaagtaacggccccagaatgggcaatcgatcaggtagccaagccatagcaggccagcgcctgatgcagaacagtacttgtagtccttgacgtgcaggctttcagcagcgccctcgccgaggacagcatcacccttgtaaggacccagggtaggcttggagttggccttgcacctgacgaggaagggccgcctggcctttt

SEQ ID NO: 406847 - DNA, 388 bp, Oryza sativa
aaggccaggaaggtggatgccgatttcccggccacgcccaaggccgagcacgtcgttgacatggagaaggaggtgtgggcgagcttctacggcggcggcttctggaggagcccctcacaacgagaggacaggaggtgatcgccgccggcgacggcgccgccgccgccgccctcttcttcttctccttcaccacggttgttggtttcttggcttttctcctcccttttcttgggaaaagagaagacagataactcgatcttgtgattaatttagccgcaattgaccaattttttttggcaattggctgtgttcttctctctttccaaaaattttgtcgattgggaggaaagaaaagaaattgatagggaaaaaacaaaattgtggagtc

SEQ ID NO: 406848 - DNA, 446 bp, Oryza sativa
tttttaaataaatttttttttttttttttttttggaaaggggtgcatttttttattatcattaacattctcatatacaaccactacaacttattgggacctcaggtttctgactgtagatatacacaaaaatttgtacttatcataggtttgggatccttattttgactgcagaaactaggcaagagcgctctttgattcaaatagaacacaagtatgcgcttccacatgataagaggataatcctggcacttgttgcaccttgggattagattcggttgcaaagaaacctggaaatgcaagggatgtgtcaaccaagcgcaaccacacggatccttctgcaagagcaggcaaggcagcactcactgattcctcgtttgcattgaaacagatgtacaggtcgcctttgaccgaatctgccgccatttcatctacctttgcatttat

SEQ ID NO: 406849 - DNA, 525 bp, Oryza sativa
aattagctcataaggcggcgagcaggaacctggtggtttcacacgattagataggagttcaatcatatcggacaggtgtacacatctgacaacgccttgcactacaattaacagtacactacatgaacgattacacgaactacaaaaacatttactactgtacaagctcttctataattaagaacgatagccattaaatatcttcacgacagcacgatagtcagggtacgctaagtcgcattcagaacttgccagcatcacataagccgctgcactctgagcagagaccaatgctagaagcctagaactcgaaatggcttcaactagatggccagatttctaggatacagtacgtccatagcatactgatgcaaggtagagattcttggaccatttctccttgacatgttgactagggaaagcagatgttctcagcgtctctttgagtttcatctgtaggcttcctttttgggacgcttaaacgaatgcagcctgatcccaggttgcagcagttgcagttatccg

SEQ ID NO: 406850 - DNA, 445 bp, Oryza sativa
ttttaatattttttctcgataactttacgagattgatggattcgttcattcacaaggcaattaacacctcaaattttacaacaacaacatcatgagcaatagctgaaactttgaaagcagaactccagtctgtctgtataaccagcagcagcaggcagcaaagcaaactgttcgatcacatctcgacagggaacctcttgtacaggtccgggttgtcgagcctgggcttggcgatgacctgcagcgacgtgctcatgaacgtgacgacgccgttggactccatcatgttgacgtcctccggcctggtgccctcggggagagaccactcgaactggtggagggaggtgcccgatcatggaggcgaccaggttgatgccgagctgggcgccggggcacacgcggcggccggcgccgaaggggagcaccctgaagtcgctgcccttga

SEQ ID NO: 406851 - DNA, 456 bp, Oryza sativa
  unsure (1)..(456): unsure at all n locations
aaatagaagatcagnactactttattcatgccgggaggatgcatacatatgggctttcacagatccatgaagaattcctcgcccgaaaccgaaaaatacataaagcaaactcactcactctggctgcagagcgaccgtgcgaagtgcgtactcacacgcaattttattcgatcgatcggggccggcacggcggcgcacacgtctacttcgccgcagacgccgacatgatgtcgccgtcgaacggcgcctggccgaagcagtccaggttgggcccgtagccgacgccgagcacgtcgcagtagcgcttgtagaacgcgaccgggtcggcgccgccgttgccgccggcgcactggagcccgccgggagggatgttcgtggtgagcccgtaacctggcgcgcggccggccgcgctgtccgcgggagtcggagtccactgccccgtgacgaccgcttgcg

SEQ ID NO: 406852 - DNA, 453 bp, Oryza sativa
tttttaagtaccataaaactttttgttatttattaccacataggttttgcttgactctgtttgggcgagcgatacttcttattctctatcggtaacttttttttttccaatccctgtattacaatacaacaaccaaaacacaaaccaaccctccaagcattattagccacagcctcgataccatagcaacgaagcatagtgactcaatacagaaagtaccataagagatacttcctccgttttacaggtcattctagcatttctcacgttcatgagaaatgctagaataacttacattgtgaaacggagggagtactacttatcttctcctaggcactaaacctctctctgtcgtgtggagcgttgtaatcgatgttagggcctgcgggatgatcccgagggatctatggaccgatggcttccatagcagtgcttccctatgtgctccatgtt

SEQ ID NO: 406853 - DNA, 498 bp, Oryza sativa
ttaaataatgcgactctgtctaaaaagactgaatgcatgcgaatgtttacagtaaggtaaagcactgaccaagaagtgcttagtacagagtagaaaaaaataaaacatagagaagggagaacatcagggcaaaacagatgttccgtccacaaaagagcatagttcatgtgaaacaaatgtctgtttgacatgtccaattattagccaagatttcatcaacacaacaaatgcacagcgagtgctttaagagtgagttcctcgtagcaattttttttgggtattctggttcaaaagccttatgcatgcccaaaagacatgatggcatctttggtaggctgcggcaagccccttggatttcatcaatcttcacgacgcaattcgccggtggcaggaggcatccatttcccggaattatagacactttggccgaacttccattcagggacatttttcataattattttctcccacataagagactttgtccactctttgaca

SEQ ID NO: 406854 - DNA, 540 bp, Oryza sativa
ttttaataccaaaaatttgaatcgttttattttgtgacggaagattccatccagtacatctcacaagtaccttgttccagaccaaatacatatatattagcataaagcaaaagagggttgcgttttccagcgcacttcaaagtgccagcttcactcgttgctgggttctccgcgctccagcttacaacggaagcaagtgttattcaccgtggatcgttatctaatccttattattgcataatatagcgtccatcttgatgagcttcgtcttggtgcatatcgtatttaggagacagggctagcagtaatgccccatatttcctttgcatactgagcgatagtacggtcgctgctgaatttgccacttccagctgtgttcagtatagacatcttgatccattttttcttatccttgtaggcttcatcaacctgggcctgtgcatcaatatagcttgggaaatcatagccaacgaggaaataatcaccacgaccaaatccagaatttccttcaagagaatccaagaggggagcatagtcata

SEQ ID NO: 406855 - DNA, 415 bp, Oryza sativa
aaattatagaacagaatgaacaggttttcaaaggggtgtcccaactcgacgataatttacacgtacatttaacacattcttgcacccttctcaaactcctcccttcttcttcccgggtaagattaaaattaacttgaggccagccagcgtcgccggcggcgagatgtttacaggctgggcgtcctctcggcggcgccggagatgacggtgagcaggttgttgccgaaggggtcgctgaggtgcttggagaggttctcgacggggccctcgccggtgacgtaggcctggatgaagaaccccagcatggagaacatggccagccgcccgttcttgatctccttcaccttcagcagcgccgcctggtccgggtcgctcgccagccccagcgggtcgaatgggccacctgggtggagct

SEQ ID NO: 406856 - DNA, 470 bp, Oryza sativa
  unsure (1)..(470): unsure at all n locations
ttttntaattaattctcccgggcgttcacattgccaatgcaggaaacaatattctccacgcaggaaggtaacaagcaatccaactcaaccgttgacttgtctttgtacttcggtgcagtttttattacaaaaagcaagaataacattcattggtatgcttacagcgccggctgtcactggaaaagaaaaccattatggagtgtccgagcatttcaaaatgccttgagagatttatggcctacaggaagtttctgatgtccaacttcttgacatcaggcatctcctcgtctttgaactcctccctctttagttgaacctccattgcttcaacacattccttcttaagctccgtcagctcacttttggcaatttccaattcaagctcttcctcaatcttgggaagatcctccttgcggattccaagctttttgtttatcttctcaaactcttgcagaggagacccatatttt

SEQ ID NO: 406857 - DNA, 379 bp, Oryza sativa
  unsure (1)..(379): unsure at all n locations
ctaaatanattttccagccaacataatttgatagagagggactttataagtatgaataagaagctcccatatacttcggctagtagcattgcaacgcaaacagtatgacaaggtaccacgcattgtttaagagctaagacaaagacaaaactgatgcatccaacgtaccaaaaagaaagcgaacagcagcagtcagatagctatgagaagagaactaggagagggataactagaagggacagaatggcatccatgggtccatgacgtttagtcgacctcctccatcttgctctcgccggcgtcgtcctccagcggcggcatgtcggcgccagccttggcggactcgtccttgtcgatgcctaggccgagcttgagcatg

SEQ ID NO: 406858 - DNA, 533 bp, Oryza sativa
  unsure (1)..(533): unsure at all n locations
ttaaaagatatataattattctgtttttatttggagacgcataaacgatcaaactgtgaaacggtacaggatctgagataattaggaaactacagagcagcagctacaatattaaccatagcagctgcaggataaacacggtgctaaataggcaggctttgttcttctttcacagcctggatatctggaaggggaccatgacttcagtcatctcctccctcatgataatcttcccaacctggaaaaggtcggagatgcctagctgcgtcgacagatgccttcggcaatcctctgcagcaacaatgcctgaagaataagctccatgcacggacccagagtgatcgatgcaggcggcctccccagcgaaaaacaggttgcccaccggagcacagaatctttcatacaagtcagctggcttcccaacaaggtcgcaggaataagaaccaagcgaattgngtcggttcccaccttgaaaccaaatactggaccggttcagtagcttctgttagcattttcttgagctgagacatgac

SEQ ID NO: 406859 - DNA, 339 bp, Oryza sativa
gaacgaacgctcatattataagtgacgaagcggtctcacataaaacagggcacacaggttacaacaacgagggttgtaagcccattaagccccaaacatcagatcaccacaagcaaatgtttggaagacacacgcacacgggaacaggataactccacactggcagatcatgggatagcagcagttatcaatcaggccttgacacacagaacatcaagcccccagacgacgacgactcctctagtactcgtgaccatcatcgccatcctcattctcgtcggactcagcgccaacctcctcgtagtccttctccaacgcggcgagatcctcacgggcctc

SEQ ID NO: 406860 - DNA, 300 bp, Oryza sativa
aagttagatctttataacatttacacaaaatatatggatatatatttatattacaaattaatggagcgaccgagcgaaggatgaattagcaacgccccaggccggacacacatttcgggggttaattaattatcacaaatcggcgaggtttccatactcgtaaaggaagtcgttttggacagcgacacggtctttaaaacataactttgatatcttatttctataaaattatttattaaaaagggatatatgcatgcttttataaaagtatttttcaagacaaatttattcatataatta

SEQ ID NO: 406861 - DNA, 322 bp, Oryza sativa
gttaatccagcagccaagaaccatcacataacctattccatcagtacaatacaaatacatcaatggcacatttcttttgcctccctcgtttcataactaggaaacaagagggaattcagctcagggacaggggaactgaattttctaaggtcagacattttgttcagctgctactggctcatccttgagattcttgctgagccactcctgagcagctaccaggtcagggagcacagttgctccagacttcctccagctttcagcatcggcggtcttgaatcggtccagaagcagcgcgtgcattccgatgctccgtgcaggg

SEQ ID NO: 406862 - DNA, 330 bp, Oryza sativa
atatgaagattatttaattatatataaatccgtgatactgtactttgtttcagtaaggtcaaatggaactggaatagcaagaagtagtttaattgaacagatccatctatgaaagaataaaaggaattggaagaagtagctatcgctcaggccgcttcagattcagcagcactagcagcattcagatccacagaaagatcaagttccttcccagtgatcttgctgtacaatgcaagcacatccttcaccgttgtctcaaaatgagtagttgcatcgtaactatttgtcacgaagcagttgtcctcgtcagcggtattagtaggttcgtat

SEQ ID NO: 406863 - DNA, 328 bp, Oryza sativa
agcaaatcgatccatgcgaccatgcgtgcaaatcagttggagcacaaatttacatgttacacccacaccctacacccatgcataataatacatcgtatatatgtacgtacatacatacccctttcgatcacacgcaccatcgatcgtacaaagttgcgtacatacatacgtacacacatatacgcatacgcacgtacatacatacataattaaaaactcgtaattaattaaatacgtagttgatggcatttctaatggaacttgaggctggtgaggatgttgttgtggacgggatcagcgaggtgatcaagcaggttctgcacggggc

SEQ ID NO: 406864 - DNA, 325 bp, Oryza sativa
gaagtgataatttaaatacttaatagtaatagactctttgatggagtattacaacatgcagcagtggcattaatacgccagtacattaattaagttacacatatgcaggctccattttggtttcttttaatttatcgtattacagaatttctgtagccttgctgatgatcacttggatatcatgtactagtaattaacaataggatgcatacaaaagatggcccaacgacaacagaagatgcgtgcatctgacattgtctggccttatttggttggtagtactccaattaattaacaagagatgatgcattcttgtgccttagtt

SEQ ID NO: 406865 - DNA, 328 bp, Oryza sativa
gtacgaacagaactgcacctgcttttatattccaagctatatactgctgcaaataaacagacttgtgagtatggcacaaagcacacacaccacttgtggagggtaccttgaggacagtgctactcgctcttcgggcatacaagaactaagctacacgggcatgattaaatcatcaaagcacttatcagaacaagtctgactaataagagctaaaactttttattttgagcaaaagattcttcttcacctccattgcaggatggggactgcatccaatctttaccagattttatcagagcaccgggggtgatggctgatcataccaatg

SEQ ID NO: 406866 - DNA, 334 bp, Oryza sativa
gaagcgagaactcattttttattgatatatgttggatgaatccaataaaaccgatacaagtcacgaaaaatcagactagatgaatccttcgagatcacatgagcaaaagctttcgacgaaagctgtcctatagtcgtggaagcaataacacttgataaagataggaattcagacacgagaggttgcagactataagatgtcatcaaatctccttgaacgccgcgaagagatcaccgttgatgtagtcgttgtccacaagactaaccaagaagtagctcttctggaccttgtctagtatctccctagatgagtcgccctcagggaacaggcaagc

SEQ ID NO: 406867 - DNA, 328 bp, Oryza sativa
aagcagataaaaattattttacacaatcaggtccattgtacttctttcatcaaccaaccagataacattgttttacacaatctgaacgaacgaagcaaatattcgggtacgcggaaagaggagaacgtcgcgcgtctcaccgcagcctgcatgaaagcaatggacctcaccgccgttgctcgccggagatccacactcacttgccggggacgaagttggtggcgtaggcccatgcgttgttgttgacggggtcggcgaggtggtcggccaggttctccagtggccccttgccggtgacgatggcctggacgaagaacccgaacatgga

SEQ ID NO: 406868 - DNA, 329 bp, Oryza sativa
aattgaaatacttaatagtaatagactctttgatggagtattacaacatgcagcagtggcattaatacgccagtacattaattaagttacacatatgcaggctccattttggtttcttttaatttatcgtattacagaatttctgtagccttgctgatgatcacttggatatcatgtactagtaattaacaataggatgcatacaaaagatggcccaacgacagctgaagatgcgtgcatctgacattggctggccttatttggttggtagtactccaattaattaacaagagatgatgcattcttgtgccttagtttcttcacatgct

SEQ ID NO: 406869 - DNA, 323 bp, Oryza sativa
ggtctcgacggcgtgcaacggcgcgggcggcggtttacacaatcaggcccattgtacttctttcatcaaccaaccagataacattgttttacacaatctgaacgaacgaagcaaatattcgggtacgcggaaagaggagaacgttgcgcgttttaccgcagcctgcatgaaagcaatggacctcaccgccgttgcttgccggagatccacactcacttgccggggacgaagttggtggcgtaggcccatgcgttgttgttgaccgggtcggcgaggtggtcggccaggttcttcagtggccccttgccggtgacgatggcctg

SEQ ID NO: 406870 - DNA, 325 bp, Oryza sativa
acggggtggtggaagaaaacttctatattcaaattgaaccagttgtagaaagagcccatattaaggaggggtacagagttcagtcgcatcacataaagaaaaccaatagggggagaaccatgtgaaaactgatcataagaactacaaaaatagcatatttggttgacaaactggaagcctcccttcttgagctcttctatggtggcaaccggcaggatggtttttgagacctgggcaagggaactagatctcatcaggcgacccaccctccaggaaggcacccaacacacttgcacgggcatgagccagcgggacccgaacttgg

SEQ ID NO: 406871 - DNA, 331 bp, Oryza sativa
  unsure (1)..(331): unsure at all n locations
gcccttnntttttttttttgggggcatttaaaaatggccggctgtccactccctcttcaaaagtaaaaaccatttctgggtcccaaaatattacagaagaacatagcacgaactcaacacgagcaatacaaaactttgacaaatcgatcttcttgctgcccccctatgcacaaatcttcagaaagggatgacgccctcaatcagcagttgatgccgcactgcctgacgtcagggcccctggccttgatggtgaagggatcaatcctgtcccagagcaaggaaaagatggaggcgagcagtacggaccaggtggcaacaatggtgggcgttc

SEQ ID NO: 406872 - DNA, 340 bp, Oryza sativa
gcacagcgtttcgaggagcgcgacgccgaaggagtagacgtcggacttgtccgtcagctgctggcaccggaagtactccgggtcgaggtagccgaagctgcccttgacggcggtgctgacgtgcagctggttcatcccggggccgtccttggacagcccaaagtcggatacctttgcgacgaagttgtcgtcgaggaggatgttggtggtcttgacgtcgcggtggatgatcccctgcgccgtgccggtgtgcaggtagtggaggccgcgggcggcgccgatgcagatctccagccgctgcttccacgtcaacgccggcaggtccttgccgtagatgtgg

SEQ ID NO: 406873 - DNA, 327 bp, Oryza sativa
aaccgaaacataggaggtttcatttcttcttctcaaagtagtgtagcatctttccttctttcaccattacataagcttaagcaataacagataacaaatcctcctcctcctctaggtaaaatattcaaacacaatacccttataagtacttattattaggaaagtagcgtgcatgggcataaatggcagcggggggcaggttaagaatcacaatgctgagcagcgaggaaacaaaacaccataatgggacagagcaaaagcctccgaaagggagcttttaggcagaaggcttctcccacttgaggggcttcaccacctcccaggtga

SEQ ID NO: 406874 - DNA, 341 bp, Oryza sativa
ggaagtgataatttaaatacttaatagtaatagactctttgatggagtattacaacatgcagcagtggcattaatacgccagtacattaattaagttacacatatgcaggctccattttggtttcttttaatttatcgtattacagaatttctgtagccttgctgatgatcacttggatatcatgtactagtaattaacaataggatgcatacaaaagatggcccaacgacaacagaagatgcgtgcatctgacattgtctggccttatttggttggtagtactccaattaattaacaagagatgatgcattcttgtgccttagtttcttcacatgcttgg

SEQ ID NO: 406875 - DNA, 528 bp, Oryza sativa
  unsure (1)..(528): unsure at all n locations
gcggagtgcctcggcgctcaatttgggctctgcctcttccataagtttgttcttctcagccttcttcctttgaagggcttcctgccttagaccctgttgctccctgaaagcctcctgggaagcttttgttcttgcagcttcagttttggaacgagcatggttgctgagcttgtaacgccccaccaaatcaatgtagtatggcacgagagcaactaatcttgtcatctcagccatgttgcttgcatctggcagtacaaacttgaaagaaaggactttcttgtaagagcctgccagttgatctgaaaaatgaagtgagatgaaccatttcccaaatttctcaaaagctttgtcaccaaggacctgcagagaaacaggttgtaaaacattatatatgtatgcccactgtatagcatgctcagtcttactaaagacatgcggatcatatngagccagcccatgacaaaattctgagcaaagctatgtcaatccttaattactaaaccttccatctaattttcttatcatagc

SEQ ID NO: 406876 - DNA, 425 bp, Oryza sativa
aaacaagagggcgctatattagtatatttcacttgcaaaatacaacaacggaatcagaaagctgccagccaaggccatgaacgctgcaggcgccacggcattgcagcagcaatctcacacgattacaacacggataaatacagcaagctcaaaaaggaaaaaaaaaacacggacggagaaacaacgtaatctgctgatgagcgtacgagaagccttcaggatcctgaattcctccctttcttatttcggtgcacgtatcggctcttcctggatctggacgcgttcgcgggtggactggttcgatcagcagatgggcaggggctcgccgttccactccttgaggcactcgagcatcgggtcgatgagcttgcgctcgctgatggccaggaacaccttgttgcactcctcgccgggggacttgagct

SEQ ID NO: 406877 - DNA, 457 bp, Oryza sativa
  unsure (1)..(457): unsure at all n locations
gcgccaccatcatggtcggcgccgtcagcttcttcctcggcggcgccgtcaacgccgccgccgccaacgtcgccatgctcatcgccggccgcctcctcctcggcgtcggcatcggcttcggcaaccaggccgtccccctctacctctccgagatcgccccctacaacatccgcggcgccgtcaaccagctcttccagctcaccacctgcctcggcatcctcgtcgccgacgtcatcaactacttcaccgacaagatccacccggggggggaggctgtcgctggggctcgccatgggccccgccaccgcgatcttcgtcggcgcgctgttcttgccggagacgcccaacagcctcgtcgagatggggcggctggaggaggcgaggcggatgctggagaagtgaggtggacggngaaggtggacgcccagttcgaggatttgagggaggcgagcgaggc

SEQ ID NO: 406878 - DNA, 507 bp, Oryza sativa
tttgttatttttttttttttttttttaggtcaagcagactggtacgagtgaggattaccatgaaacgaatccataaaacagcattgaccacaatcccgaatgcaaaaacatataaaaacaccaaaattaaacatctccagacatatctttaattcgagctacctaacatggtgccaaaaagtgctaacataaaccaacatctgaaggccaacctgcttgaattttgaaatccagataggcaagctacagaatttgggcccagttactcagcacagaaagttttatgatcattaaggaaacaactagttgcaaacttgttttctcattcctcatgtttctactgacgcgaaacgacaccgccgcttgccttcttctggttcttcctcttcaccctaccaggggggcctccaccgaatgggcttgtcagtgagaagtcaatgtgctttttagactcaaccctcaccatgaacgacgggatgttgacaatttgcctgccgaccctgatgt

SEQ ID NO: 406879 - DNA, 380 bp, Oryza sativa
  unsure (1)..(380): unsure at all n locations
ccaataacaaatagaagtacatagatcaaagcacaagccttgaaacaaatttccaaatgagtaatgccgaaatacagactaatacatctctggggggggggggggggcaangatttgntgacattcataacccttattactaggatttgcattagaccttaacagccttgaatagcgaccaaaggattgagctcacgggaagaattcgtaaatcaaaaaattggaatacgctctaccgcttcaagctttgcagaatgtactgggcgtacagattcatagagcactggattgcttcacgagctttcggagcaggcaagaagttattgacagcaaccttcttgttctcaattttcttggagccttcaaagaagcggctgttt

SEQ ID NO: 406880 - DNA, 506 bp, Oryza sativa
  unsure (1)..(506): unsure at all n locations
aaatacttaatagtaatagactctttgatggagtattacaacatgcagcagtggcattaatacgccagtacattaattaagttacacatatgcaggctccattttggtttcttttaatttatcgtattacagaatttctgtagccttgctgatgatcacttggatatcatgtactagtaattaacaataggatgcatacaaaagatggcccaacgacaacagaagatgcgtgcatctgacattgtctggccttatttggttggtagtactccaattaattaacaagagatgatgcattcttgtgccttagtttcttcacatgcttggcttcacgttgagcctattcgcaatcttcacccccaacgactcatcacactgggagaggtnagttgacccagatggcgcggagctcaggggagacttgggggtgcgcgagctcgccggcgaagcggcggatgaacctctcctgtctatccggcgcccacgacctgtacctctncccgggc

SEQ ID NO: 406881 - DNA, 424 bp, Oryza sativa
  unsure (1)..(424): unsure at all n locations
ttntttgttttttttttttttttttttttgtttttggggttttttttttttttttttggggtttttcctttttttttgggggcgtaaacagaacaagaaataaaaaaacggccccccaaaatgtaaaaaacccgcggcattccgtagcaaattacctgggtccccgaacagggacaatttttctgtaaagcggaaactttacggggccccaaaccagcaacgaaatgtagagttgaaaaaggcccctcatgggtagcagcaaaattaacgccgaaacctaattgatttggtgcatcaaccaaaatttgcccaacaacttaatatttctcaacaggggtaaggaaccgctcaagggggtgcagttcccatgaaagaatcttctttcccgggccccaaaggggtgcaaccatacccaatggattcc

SEQ ID NO: 406882 - DNA, 460 bp, Oryza sativa
  unsure (1)..(460): unsure at all n locations
tttntattttaccccaangncaaaagggttcaatgtggggagcattatgactgcgaatcaccaggcacaaaaaagggagctagtacaaagcctcaatacacactggagtaaaaccagcaacggcatctgcgctccacatatcgcgatgtgcagtggtctgagataaacagtttctatgtgatggaacttaaaagtctcttttattcaaaaacacgggagcgggcaatcgctcactatctgtccctctgggtattgcttagttttagttgaggcatgagtaagcgagcgttttattctccgacagctcctgggcagtagcgtccatcttctttcttgagaactcgtcgatcgggagaccctgaacaatcgatcattcgccaccactggatgttactgtgaacgagttgaataaatcagcatgcacaccatactgaccatcagagtacacacccattgagac

SEQ ID NO: 406883 - DNA, 397 bp, Oryza sativa
aacaaatgcaacagggtaacacaatcagcctattacttacgattatctcaaatacagcctacgatacatgcccacgcgaatgcgcgggctaccttcctagttccttgtaattggcaaatattacacacgaggaccaacgcggaaaggtaaaattcatccgaaatatcaacaatcgcagaccagcatcaagtaatacagtacccaaaaaggttcccatagcacagacgaaaaaacaaagcgaagacataggaacgtggcggtggcgtacgaggcggtaatacggtgataatgtaagacggaaacaccaagcacacaaaaccctgccctagaaccaccaagcaaaagccaccttacatggtcgtcagcctcctgctgctactcggcctcgtactcgccc

SEQ ID NO: 406884 - DNA, 451 bp, Oryza sativa
  unsure (1)..(451): unsure at all n locations
gttcgctctgcctgttaataataatcgagggaaacttcacatctatttctacatcgtcatttctttttatcaaaaagactaacactccaataacagggacaggaggcaaatccggattgaactaaaccttgtcgtccttcaatagctctggagcattatccaactgggaacatcatcccggttctctttcctttctttgatcttttgtacaaaaaagaactttactcaacaattcaatcccactaaagcgtggaatttactaaaaatgatgatacaaccgtgacagagtatnggcagttaactgcctcccttctgcttgagggtaatcttgtctcctaagctgagtgcgattccctgggtcttgctccttattctgatgtaaccactgagcttgccatcaaactgcttctcgatgctgatatttaccaaagcatcttcaccgaaaacactc

SEQ ID NO: 406885 - DNA, 422 bp, Oryza sativa
  unsure (1)..(422): unsure at all n locations
acagtagaagaggataaatacgatgctgcttaatttcaaatacgcacgcacgcatggttggaacgataattaaacagatgcatgcatgcatgcttattgagatagatgctatatactactccctccatattttaatatatcacgccgttgactttttatccaacgtttgaccattcgtcttattcaaaaaatttatgtaattatcatttattttattataacttgattcgtcatcaaatgttctttaagcatgacataaatattttcatatttgcaaaaaaaaattgaataaaacgaatggtcaaacgttggtcgaaaaatcaacggtgtcatacattaaaaacggaaggagtataacataggggtacacaaacataatgatacgatatatattantatattttgcagcaagcagatgatgg

SEQ ID NO: 406886 - DNA, 383 bp, Oryza sativa
ggtgaacaacctaaaggggctgtcaatcaattgggggcacttaatgcattttagggggtatcacaatccccataaacggcccttttttattatgtatcgggctactaaatactaaacacatttaagaaatgagagaatttagaatagctaccataaagaccagtccaatccatagtgatttaccggaaaatacaacgcttttattgtttgaccaaccatcaggagaagcatatacaaggggtacactaatgactaagactgaggaagtcacaattaatgcaaaaacagctgattggaaagcaactgtcatatttctaatcctacaaggtaccattaaataaagtagactacatattatatttgatccctcacttaatcaaaat

SEQ ID NO: 406887 - DNA, 484 bp, Oryza sativa
aacggacgattgctgattactattactggttgcaatgtaacacttcggatacaatagtacattacagagctagctaaatgcgaagccacaataccgtcagcgcaagacgatcataaataaagcttacacaacatagccaacatgcaaaccattcggactgaccagagatgagggttcttgaagctgccgtggtgtgccatgcatcacaaatgccgaacaactagattgtagcagccaacatgaaaggaaaaggcatggataatgcagcaaagatggatgatgaagaccgcagattgtgacgcttcgttcaccaaccatatgaaacccctaaattttgtcaagtttctccgccttcaccaccggattagccttggcaatagcatccctagcagcggtccgatagtcaaactggcagtcatgcttatcggaatagcggtgcattgcgcagtacaagttgccacatcggcagttgaatccggtaaga

SEQ ID NO: 406888 - DNA, 456 bp, Oryza sativa
  unsure (1)..(456): unsure at all n locations
aggttcaaatccaacttattcatagagcatactgctgtcccacaggaaactgtttcataaaactaacatatcatacggactcgatggtccattaaaccagacacaagtagacatcagcaccacaaatacttgacgaacagaggctcgggacgaccaggcacatcggcagctccaccaaactggctgattactgaccaccacggaggcggagcaccaggtggagggtggactccttctggatgttgtagtcggcgagggtgcgtccatcctccagctgcttgccagcgaagatcagacgctgctggtctggngggaatcccctccttgtcctggatcttggccttcacattatcaatggtgtcggagctctcaacctccaaagtgatggtctttccagtcaaggtcttacgaagatctgcatacaccacggagacgaagcacaggtgggggtagact

SEQ ID NO: 406889 - DNA, 459 bp, Oryza sativa
  unsure (1)..(459): unsure at all n locations
ttttntttttttttttttttttttttttttncgagaggggcagtactactttattcatgccatgaccatgcatacatatgggctttcacagatccatgaagaattcctcgcccgaaaccgaaaaatacataaagcaaactcactcactctggctgcagagcgaccgtgcgaagtgcgtactcacacgcaattttattcgatcgatcggggccggcacgggggcgcacacgtttacttcgccgaagacgccgacatgatgtcgccgtcgaacggcgcctggccgaagcagtccaggttgggcccgtagccgacgccgagcacgttgcagtagcgcttgtagaacgcacgnggtcgcgcccgccgttgccgccggcgcactggagccgccgtgggggatgttccgtggtgagcccgtaacctggcgcgcggccggcggtgcttgccgggggagttcggagt

SEQ ID NO: 406890 - DNA, 483 bp, Oryza sativa
ttttgttattttccttttttttttttttttttttttgttttttttttttttaaaaaagaagaaagcatccatagctccattggaccatgcatagagggcatacagttttgcaattcagctcaaaatggcatatgtaccaagcttgggggggagtagcaagcaatgcacagcaaaatgggaagatatgaacaattatggccaacggggggctaacaacagtttagcacagtccaaaagggaaacacacataacaggaatttgcaatgcaacggaaccggagtatactgtcaaaccaatcattaaccagggaacttcttattaaccagctactaatagtcttttccattgacggtcttgtcggttggacccttggggccgacttcctcaaaggccttttaaagggcagccaagtcctaacgggtttttgagaattaaacttttttcattccctcaccaacgtaccagtgcacaaacgcacgctta

SEQ ID NO: 406891 - DNA, 410 bp, Oryza sativa
  unsure (1)..(410): unsure at all n locations
gggagaaggttttgatcttataggatctaaagatagcattgcagaccatagtaacatactaattataattacaatcaggatcctagctagatcatccaattcatcatcagaaatactgctagactgagacaatatttgaataatggataatgactcaagagatacaagcagatatgcttcagctaatctaaaatctccaccatgtctggttaagtgcgaaatatagaaattagttggaggacttgggtntttggcgcttctacttcttccgagagctcaagtgaaacgtggcagggatcactttcataaaagacttgtagctctattccacgaccacgaatgtcacatgaaactattgggtcgcttagtttttctgaaacacggaaatagtcaattcgcattctattgcc

SEQ ID NO: 406892 - DNA, 406 bp, Oryza sativa
gataacaaacaagaaaaacttatttgcaacacaactacattcaactgacacagctgggcctgaagttcatttccgcctgaacagcataggatacagatcatacacacacccaaacactgaaaagtgctaaccatgctggcagcactagtctttacggaagatgatgatacagatcagatgcatgccttgcgactatgttacaccaccatttacagactacagagttttcctttcccaacaacagctggagatccaaaaatctcctaatgcagcgctgtgaggattgtagatccttccaccttgaaggttgcaccgcaaatttcttcttctttggcaggaactgcggtcaccttgggctttgggttctcatagcacttcaagcctccaactccaagagcattggaat

SEQ ID NO: 406893 - DNA, 502 bp, Oryza sativa
  unsure (1)..(502): unsure at all n locations
ggccctaaaaaccgtaaaataggattaaattgacctacagaatcctttacaagctacaaattcttcagatattagaatacaccaaaaaatgtggcaacagcaaacagcaaaaaaagtactcctcctatcaggccaaccagcttctcagataggtagttggcaaggaatgctcccccaacaattgcaaggaaagttgcaaccaagtgtccagctatggctccgcttgcgacaccaaaaggagactgagcagcacctaacgcaattgtagccagcatagagcgatctccccattctgcaaagaaaacaaggctgaaagacttccaaaggacctcaagaggactagtcaactttttagccaccttctccttgacaagctcctcagcctcagccagctccccagattcagagtttcctgaaggtttccatttgcattattgganagttgccatgcatcttttattgacttgaaaccaaaaaatgcaggagagcaatcgcagcatac

SEQ ID NO: 406894 - DNA, 565 bp, Oryza sativa
aattcattagcaagtcaaaatttcttggaagaataccatcgactcacttgtgtctacaagccttgagttatacttcttgcaacacagacaacactacagataccatacattcattttacctgtttcactcgcttttaggacgttctataacctcacatctggcgctaccatgctgaccggaccaaaaccttgttttccattggagggaatggaatgaagctctctctctctctctcttctctagctcactagctgctgactgccatagacagggtaggctccatatgcagcagcatacatgttagggtgcgggacgggggaggcataaccgtatccaccgtagaatggcgtcccatagtacatattgtttcttcggctgccagaatcagccctagactgtttatgtgatgggctgcggccccatgaaaggcgaactgcctgctttccaatgactgatccattcaatcgttgcagtgcttcttcgcaatagttctgctgacgaattgaacaagccacattgcttcctagaggaattttacagaggcaacataccatatttgcaaat

SEQ ID NO: 406895 - DNA, 570 bp, Oryza sativa
  unsure (1)..(570): unsure at all n locations
ttntttgagggagaaatatatagcctcgttcaaggtgctggaacaaaattttagaagtttcggtcctatcagaccctcccaatataacattatttcggccagaatttcttaaaaaaaatttcattttattatatgaattcgataatatttttatttaaatttggccaaatttcagtatatcggcatccctccgatacaaacgccaattaaaaaacagaagattaaaccctgatatagctaatctagactagcggcggcaggtagacggaagtggtggagggcggggcggccgtcgaggcccttgccgtcgtagtgcgcgaggaactcggcgacggtggtgctcctgtaccgcggcgggtcgccgccggcggtgagctcggcgatggggccgtacagcctgccgctccggctgctctcgcggcccaggtcgacgttgcagaacgccgtcacggacacccgcgccgcgtncctgctccggttggccaccacccggtgctccacgctcctcatcctnccgttgctgacgagctcgagcaggtcaccgacgttgacgacgagcgcgccggtgac

SEQ ID NO: 406896 - DNA, 435 bp, Oryza sativa
agttatatcatatatattagatgaagtttagtctcccttgtatcacatcttacagtttcccaatcccaatacattgcagcttacgcctgtacgcgtgtatccaactatccatattgtaccaaaccagcgttgataacaaaactgaaaccgtctccgcttgctcctgcccaccggccatggcggcccggccggtcagccgctcgcgtcgcgcagcaagcaatccgtccgctgtccggaaaggacggcggcgagctcagacgctgacgagcttcttgccgaggatcatgtcgtcgggttgaaagtcggccgccttcctgaacgtgccgcggccgaagtcgaggttgtacgagtcggtgaggccctccaccaggtcgtactccggcttccacccgagctccaaggtcgccttctcgattgacgcgaagaaatgctggt

SEQ ID NO: 406897 - DNA, 407 bp, Oryza sativa
ggggttgggggagaaacctcatgaaaggggaggcagttatcatagaatcatacccactaacccataacttaatcactactgaacacccagagtatccaactctctcatagaggctcaccatgacactacgaccacagcagttagcctgcctgcctgctaaatacaatagctactcaccatgtcgctgcacaacacaatgactgaaactatatacaacaaccggcctgcacagctttattatttatccaccgcagcaggttgcgggtgaagccggtcctccgactcttgaccaattgctaacgattctaaaacatgtcaaccgggagcctcccggggtcaatcttggatcacattgctgtaaacaacagggcacttgtactggttgatgtgctctgccttccaggggt

SEQ ID NO: 406898 - DNA, 468 bp, Oryza sativa
tttttgtttttttttttttatatattatattaaggggagttttggctagaaaccatatgaaaggggcggcagttatcatagaatcatacacactaacccataacttaatcactactgaacaccgagagtatccaactttttcatagaggttcacatcacactacgaccacagcagttagcctgcctgcctgctaaatacaatagctacttaccatgtcgggtacaacacaatgactgaaactaatacaacaaccggcctgcacgccgggtctgctgctgcacggcagcaggttgcgggtgaagcggttctccgcctcttcaccaattcctaacgattttaaaacatgttaaccgggagcccctccgtggacattctcggcttctcttgctgctgcagccagggcacttgaactggttgatgtgctctgccttccaggggttgatcccacgcacttgccatggaaccac

SEQ ID NO: 406899 - DNA, 329 bp, Oryza sativa
ccagggagatccttctgggaaacaatatgtaatttaccaactttttgaaaaacaacaataaatcgtaaacaatggatagaagccatgagtgacactagtcggttgggcgaatacggagtactccgatcgataggaggctgggactcgctagttcttttccttctccttgttctgggaagggacgcggccgtcggtcccggcgagtatgctgtacttctccttgcgcgttagggcggtgcactcgaagccgagctggccgttaagcgttttttggatgtagttggccacctcgatgggcgacttgccgccgttgcaagtgagctccttgg

SEQ ID NO: 406900 - DNA, 437 bp, Oryza sativa
  unsure (1)..(437): unsure at all n locations
agaaaaaacatcttggttgagaatggtattatagcgaagcccattttaataatggtatttgagcgaatcctatcttatgcgatagtagatatgtaattttctccatcgtgaccaccatcttcaccatctagctctaaagacgaacaaggaaaaaaaaacaaactcagaactagaccctgaactagaatttgaaaaataaacatgacgcgctccagaacctatggccgaaaacattcaggaaaacaaaagtttacagatttattatctatcactaaactgctaatagcgggatccgagaccaaaaaaaaaatgtagaagaagcggtgggctcatttcagcactatggnagcagagagcgcatttaattttgtacagaattctctaaacgattttaacgctttctcatttgctgcccgtccgcagttttatcacgagct

SEQ ID NO: 406901 - DNA, 449 bp, Oryza sativa
ggaaattatttttgggaagggaccagttaggcactagcattagcatgagtttgtcctttatttttctagcaaattacacaaaataccgagggaaaaaggaggatggaattcaggtcgcactttcagctaggaatgcccagcccctgaattattaacaccacacagaattacggcgctgcgtgaatcccgaactaataaacacgcgccttgggtgggaacgactcaacttcactgtccaatgtgttcatgtggactggcctgtatgccaagcgaaccttctcattctcccagtaccccagcgagtgcttcatccattgctcatcatctcttttcgtgaaatcttcacgagcatgagctcctctgctttccttccgagcctctgctgagtgcatgggtatgcatgcatttatcaagagattttccaactcaatggtctctatcaaatctga

SEQ ID NO: 406902 - DNA, 471 bp, Oryza sativa
gaagtgataatttaaatacttaatagtaatagactctttgatggagtattacaacatgcagcagtggcattaatacgccagtacattaattaagttacacatatgcaggctccattttggtttcttttaatttatcgtattacagaatttctgtagccttgctgatgatcacttggatatcatgtactagtaattaacaataggatgcatacaaaagatggcccaacgacaacagaagatgcgtgcatctgacattgtctggccttatttggttggtagtactccaattaattaacaagagatgatgcattcttgtgccttagtttcttcacatgcttggcttcacgttgagcctattcgcaatcttcacccccaacgactcatcacactgggagaggttagttgacccagtggccgcggagctcacgggagacgttggggtgcgcgagctcgccggcgaagcggcggatg

SEQ ID NO: 406903 - DNA, 524 bp, Oryza sativa
accgaaccaaagagtagacatatatgcaggtcaatatatacaccaaatgaacatccccaaccttattcgtctagttacatatccgacgcacccagccccggactaacaggagtagtgcgttttgtgaattgtcctctttagcttgtcaaggataccagcagccttcctccgcgccctcgaagtgccattctgtgcgagccaggccagagagccattcaggttctcatcctcgacgacctccctaagtttcgtgcggtcgtacatacagatagagaagagcactgccaccgcattctctttgttacgtttgcattggtcatcctttatgatgtggagcatgcaaggcacgccaccagtctcgccgatctcctccaccgtctcatggtcgcttgatagcagagcaaggatagtcagcgactcatcagtgagtgattatcgctgatcgccttagcaccacgtcaataactccgtttttggggctcttgattattctatgcaactgcaagactaaaaagctgagctga

SEQ ID NO: 406904 - DNA, 531 bp, Oryza sativa
gccgcccttttttttttttttgtgaggaagcgcggcaataaaacattgcattgagttctgaacgataaacaccaggaaccggcgtttatttgaggcaagcactgcccaaaatctcgcaaaagtactgaaaccttagacatagtacacatccatggcaaacatggatgccaaatgacaactacagaaaattatcaaattcgaatgcagctgacggcttctcctgctgaagatgcatattttcccctccattacttggatgtgctctctccatcgacagccaatgggacggcgctggccaggctgcggtattttcagagcatagaacatctcaatgtaacggcgagtctcgcgcctctcaaggttgcttacgtacttccagaatccgtatacaccagtcaaggtcatcagcctctcagagtacagcttccaggtgtacttctcgtaaatcctctgcagacctccctgtgaaatattgtcccagtaggttgaatcctgcttgcacttctcaagaagttgaccaagatatcagca

SEQ ID NO: 406905 - DNA, 441 bp, Oryza sativa
ggcggcggcggcagagttaggtggcggcgaggacgagcggcgggcgcgggcgctgtcgtcgtcgtcgtcgtcgctgcggcagcgcgcgatgagcgcgtcgtcgaagctgctccggacgtcgctgagcaggagcagcaagggggcggcggcgcggcagcggagcagcaaggtgatgtcggtgtcgatcgaggacgtgcgcgacgcggaggagatgaagtcggtggacgcgttccggcagacgctggtgctggaggagctcctcccggcgcgccacgacgactaccacatgatgctccgcttcctccgcgcccgcaagttcgacatcgacaagagcaagcagatgtggagcgacatgctgcaatggcgcatggagttacggatctgacaccatactcgacgacttccagctcgaggagacggaccaggtgctcgagcactacc

SEQ ID NO: 406906 - DNA, 450 bp, Oryza sativa
aaatacttaatagtaatagactgggtgatggagtattacaacatgcagcagtggcattaatacgccagtacattaattaagttacacatatgcaggctccattttggtttcttttaatttatcgtattacagaatttctgtagccttgctgatgatcacttggatatcatgtactagtaattaacaataggatgcatacaaaagatggcccaacgacaacagaagatgcgtgcatctgacattgtctggccttatttggttggtagtactccaattaattaacaagagatgatgcattcttgtgccttagtttcttcacatgcttggcttcacgttgagcctattcgcaatcttcacccccaacgactcatcacactgggagaaggtagttgacccagatggcgcggagctcaggggagacctgggggtgcgcgagctcgtccgcgaagc

SEQ ID NO: 406907 - DNA, 411 bp, Oryza sativa
agaacaaactgtgtttatggactgaactgaaacttgattatacagtttgccacgactcctaactcaagcccctatgacgtggatacatatgtacaaaagttttgacacctgagaaaatgatctagtttccctacatggatagctagctagtagctatctcatgtcatggagtgttgccaagaaggcgtccaacttgacattgtcacctcgagacaagaacttgatgcagatgggcgccctggcacccatgagtgtcagcatggacagcaagatcgagccgacgccgtcgccgcagatgagccccgacgccagcgccggcgagagcatccgcccgcggccggcgtccatcttctccacaggtacgccaccaggctgccgatgcacatgccgactggcacgcgcggcggcatg

SEQ ID NO: 406908 - DNA, 214 bp, Oryza sativa
tacatacctaaattctgttcatggattaacgaaaatgtgcaagaactctatttgcctctgccattctatgaaacgctaactcattgcaaatggcacccccaccccctaagacagaatctactaaaacggaactaaattcgaaagccaaatttcaacccggacgctcaagcaatgctttaaataaccaaagaacggcaagtgctctaccttgatt

SEQ ID NO: 406909 - DNA, 498 bp, Oryza sativa
aaaccacgatttataaagtgccggagatgaagtacacaaattaacattacatcgagttttaataaaacatcatgcgaaaagccagcaaaaacaaaaggcagcatacagctaatgaagctctactggagtagctcgcaaaaggtccgacttattttcagtagcactctactccatttcttccgaaagagtgaccatcttctactgggtgttgtacatgtgacggatcaggtcaacaacgcgagagctgtatccccattcgttgtcataccaagacacaagcttaacaaagttgtcattgagagcaataccggcctttgcatcaaagatgcttgacctgttgtcacctgggaagtctgtggaaacaaggtcctcctcaacgtaacccagaatacccttgagtttcccctcagactcctccttgatagctgccttaatctgatcataggatgctggcttctcaagcctgacagtcaaatcaacgacagagacatccacggt

SEQ ID NO: 406910 - DNA, 488 bp, Oryza sativa
  unsure (1)..(488): unsure at all n locations
anncnnnnnnnatcagagatgttctgagcaaacatgttcataatttggcagtatatcagagatgttcgtgctttctttataactttatacagtgacacaatggttttccgtttatacatacatacatacataattacatcactaagtagactataaacaatcccaattcaagccacacacacaacacaaattcttcattcttcacacgcaccgtgtgatcgggccacgaggctcacatgacggggtagctcggcagcagcgcgatgccgcacagcccggacgccaagccggcgacgtcgcgctgcatgaggatgtagccggcgtngccccactccgccccccacgagttcttcacgatccagtacttctcgccgcctttcgccgcgccgccgccgtccgttttcggctcggactcgccgtagccaccacggtgacccgttgttgacgtcgcggtgcacggcccgtgagaccccgtgccgtaagctgga

SEQ ID NO: 406911 - DNA, 478 bp, Oryza sativa
  unsure (1)..(478): unsure at all n locations
ccaaagaagcaatataatcctttggattaatcatcatatcatcaccatttgaaaatgataaattataaaagcgagagtgggcgggagagcgtaaccttgtacgcctacctcctccatttcccacacagctttttttttcttctttcgctcgcccggtttctgcaaatcgcaacacagaccgaccacacaatccccaaccccaacaaactcaaagaacccaaccggtaacacaattacatcatagcagtagtagtattactagcagcagcagcggcggcgatgccggcgccgagggtcgccgccggcgagcggcggttcagctgtactggacgaaggagcggagaatgtgttgggcctccagttggccggatgacctttgttggcgacgagcgtcttgccggactcgttgcggatgcggatggagaaaggggcctggagcctgtggtggttgtccagcctncagatggagccccacgac

SEQ ID NO: 406912 - DNA, 452 bp, Oryza sativa
ctaatcaggtaggatggaatcatgtagtgtacaagatgactgaacagaaagaaggaacaaatccatcttcccaacaactagccaggacaatgtgcaagaccaaacatgaacctgagcccaacctgaaatgcaaatatgcaattggaaagaaaattccattgtatacattacactcgtggtaaatgcacatcatgtttgaaattgtgcacaaaccagccactatacacactaccctgtttcgctatagaactagatctcgcctcttcttctttgggtttgttgcttctgcacagcctgatcctttcctcatcatggccacaaactctgaataatctatccgcccatcattattagagtctgcatctgtgatgacatccttgatctcgttggcgtcgtataacccttgttccttcaaggcttgctcgagctcttcctttgtgatgtacccacta

SEQ ID NO: 406913 - DNA, 273 bp, Oryza sativa
  unsure (1)..(273): unsure at all n locations
gggggtnnaccaggcccaaatgggccttaacaaagtagttaaacttggacaataaaccacgatgtggggcgaagcaatgcaccattttcattagtgctttcagcattttttcgacttttttcacatttattttttccgcagagatggccatcttactggtttgggacttgagagtagggcacggttggatcgctaactcatagtatccctccatttatttagattctagacaacatattgaaaatcaacaaaactttttgatatgcagaaaag

SEQ ID NO: 406914 - DNA, 595 bp, Oryza sativa
  unsure (1)..(595): unsure at all n locations
gtctccttccatgctgttccaccagcgccggcggcctccgnctccgttcccgcccgtctcgcttcccgcagaaggctgcgacgacgaggagcgggcgcgccggcgcgggggcgcgggcggtggtccggtgcatggcggcggcggcggtggcggcgtccgacgcggcgcagctcaagagcgcccgggaggacatcagggagatcctcaagaccacctactgccaccccatcatggtccgtcttgggtggcacgattctggcacgtacgacaagaacatcgaggagtggccgcagaggggcggagccgacgggagcttgagatttgacgccgaattgagccacggagccaatgctggtctgattaatgctttgaagcttatccaaccaatcaaggacaaatacccgggtataacttatgctgatttgttccagttggcaagtgctacagcaattgaggaagnctggtgggccgaaaattccaatgaaatatggacgagttgatgtcacagcagctgagcagtgcccaccagaggggaggcttcctgatgccggtccatgtgtgccccgtgatcatctttagggggattctacaggat

SEQ ID NO: 406915 - DNA, 394 bp, Oryza sativa
  unsure (1)..(394): unsure at all n locations
gncncgagaaagatatcgtccgattgtccttctattgattcttttccgatcgagatgtatggatccatgtgtctacatacctagattctgttcatggattaacgaaaatgtgcaagagctctatttgcctctgccattctatgagtcgcttcctttttgcgtatggcacccccaccccctttggcagcatctactaattcggaacttaatttgaaagccatatttcgacccggacgcttttgggatgcttcttataaccaacgaatggcaaggtgctcttccttggttagatcctatttcaatcggaactttccgcgtcgatccttttttattacgtcttgtttttacctctatatggggagttactctacgtattgcttgacgtaaaaccaat

SEQ ID NO: 406916 - DNA, 554 bp, Oryza sativa
ctcaaatatgttcatatgatattttgccgggacatgacttgtttgcccactcacaaggagaaaatagaacaagaagcaaagtcaagtaggtaaaagacatgtactaattttgttattccttatgccgaagcaatattggatcaaaaatattctccacaatgtcgtggagcttgattgattatatggaatggtgatatgatctctctttgtgaactctgcatcctttcgctcaaaggtcctcggggccattgatatccttgttctcgatcactgctccatctgggatttccagtttgacaccaggttgggctgtgatggtcaccttgcccttcaatgtgatgctagagccaaaccaaacatcaccggaaaccttcaagggtgtcaagctcaacaatgctggggattgacttgaagcgaccaaggaaacacccgaccttcttgaactctggacccagttcaattgagggattcgatgggtttgttctggccgggttgcgtgtaacaaagccatcaaccaaggtatatagatcagactgtactagcttgaaaatctg

SEQ ID NO: 406917 - DNA, 514 bp, Oryza sativa
agaatggagaaagcttggtgtttatttaggtatatttaccaactccgccaataacatcattcagatacaacgacaaacaaacaaagatactcttgtagctaatacgaacttccaagcattattggtactttttttatccaaataacaaagctctaatcaattgctgctgttgtattgcgccctttcaaaactgctcatggaaaagctatcattttttagtccctctaagagttttttcagacatcaaggtacttgctggctgtgtggacatccttgtctcctcttccactgcagttcaccaccaccctcacgccgtcgggcagcgttgggcagagcttctccaggtaggcgagcgcatgggatgtctccagagcagggatgatgccctccagccgagagacgcgcttgaaagcatccagtgcctcctgatctgtcacactgtcatattcagcacgtccaatatccttcaaaaagctatgctcaggcccaacaccagtgtagtccagcccagcac

SEQ ID NO: 406918 - DNA, 516 bp, Oryza sativa
  unsure (1)..(516): unsure at all n locations
cacgtgaaacacattaaggtttgataaataaaaagatctccagctggagtgtgacaccacatagtctctgaggactgtctgggactctgggtttatttattgaccaacattacagataagaaagcgcacagcacaaacaaactcgaagcactcatgacgcgaactggaaatactcatgacgaacgaaatactgaaaagacgataaggcgaagtaggcgatgattgggaggagattcggcgcatcactcttcctcagattcagaatccgcgctctggagccactccacgaacggcttggcattcttcaccacctgggactccttgccaccagcaacagattcattataccactgagttatcacttcttcatcagngacgtccccatcatacagggccttgagaacaatcggcacctccttcacagcttcggggcttgacttggcgccgaaggccaccagcgcttgcagcaggaccatctgggaggcttcatcaggcacagcagcagcgaggaatttc

SEQ ID NO: 406919 - DNA, 452 bp, Oryza sativa
acccaaacggcagcttctcacataaataagggagaccgattgctcaaggttgagaatcaaaaaccgaaagaaataggctctttgagcagagtgcagaacataaacaaaaatgcctgttgcaaattgcaagactacaggtaaacttaaatgccataaggagtttgtttggcagcataagatgaaactactgcgataaggctactctctcactcgtgatgctcttccttgtcatcatcatcagcaccagctgaggagttgagagcattcaatgtttcgacgagactggccttgctctgctagcaggttagcttcttgaggatgtatctcttgtgggcagccggttccttcttggtcgatttggccatggtaggatcagcgcggatggcagcatggaccttcttgtacagtgattccatgccatcagcgtcaattcccttcttgaggtactcact

SEQ ID NO: 406920 - DNA, 520 bp, Oryza sativa
cattatggcaaaaacatcatcttcttcttgaggttcttagtgtacacaacaccagctcgatcatcatctcgtcgcactaaacccatcttccccaacccaaagacaacgaactcgctggccacaaatccatccaaccacaattaaccactgctaagctacggtcccccacttcacttgccggggacgaagttggtggcgtacgcccaggcgttgttgttgacggggtcggcgaggtggtcggcgaggttctcgagggggcccttgccggtgacgatggcctggacgaagaagccgaacatggagaacatggcgaggcggccgttcttgatctccttcaccttgagctccgcgaacgcctcggggtcatcggcgaggccgagcgggccgaaggcgccgccggggtagagcgggtcgacgacctcgccgagcggcccgccggcgatgcggtacccctcgacggcgcccatgagcaccacctgcaccgcccagatggcgaggatgctctgcgcgtggatcaggc

SEQ ID NO: 406921 - DNA, 437 bp, Oryza sativa
  unsure (1)..(437): unsure at all n locations
actccgcctctgcagctttctgcgcatgcctgatggcgtccgcagcctgtcccttgctgccgaggaccatcacccacatgtagcgggagaggtcgtcgacgagcagcaggaaataacgtcgtcctcctggtgtggccggtgtcactgggccacacaagtccccgtgcacgagcccgagccgctccttggctcggaagctcgtctgctggggaaaggggagccgccgctgctttgtcaccacgcagacgtcgcagagctgctccacgtggtcaaggcacggcatgcctcgcaccatctccttggcactgagctgcttcagggcctcgaagggcaggtgcccgaagcgctcgtgccactgccatcgcctcgtcgtcccgacgagcggcgaggcaactgggatgtgcgacctgcgcgctggngatgtagagtcgattagt

SEQ ID NO: 406922 - DNA, 337 bp, Oryza sativa
cccaaaggtccacacttacagtacgttcaacgtacaactgatccaagcaaatgaaacaggtttgatgatgcactgatgcgagaaactaaacggttggatcggagtcggagacgaggcgatcatggacaagcggcggcggcggcgatgagcttagtagtcggtggtggggagctgctcgtgggtgtgggagatgaagaggacctcgtagatgacgccggcgaggccaccgccgatgagtgggccaacccagtacacccactgggactcccaggaccagctgacgagggccgggccgaaggagacggccgggttcatggaggtcgccgtcgaacgcgcc

SEQ ID NO: 406923 - DNA, 508 bp, Oryza sativa
aaatccaacttattcgatcatatatttctgtgcagtgaaccatttgtattggtcgaaaaggtttggtcacaagagtatatgggaagaactgatcgagtttagtaaacaaaaaatggctgaccaaaaactctccagaaaagctaattgctccatctctccctgtacaatatgatgatgtgctccatcatttctcagactgtctgccactctgtgtgtctttagactttacgcagcactcacaggtgagatggctttgccgaaaagcccagcgattgctttgccaggatcctactgcttgatgagagactagccatcgagaacagctttaaccccagcattctgaacgaatgaaatatggtctggggggaacagccctgattcccctacaacaattatgcctttctgagctatagtttgtcctctttcaccctcaagaagatttttagtgtttgaaatatcaacttgaaaagtctcgaggttacggttattgatgccgatgagcttgaca

SEQ ID NO: 406924 - DNA, 462 bp, Oryza sativa
gcaaatcgatccatgcgaccatgcgtgcagatcagttggagcacaaatttacatgttacacccacaccctacacccatgcataataatacatcgtatatacgtacgtacatacatacccctctcgatcacacgcaccatcgatcgtacaaagttgcgtacatacatacgtacacacatatacgcatacgcacgtacatacatacataattaaaaactcgtaattaattaaatacgtagttgatggcatctctaatggaacttgaggctggtggagagcctgcttgtggaccgggatcagcgagtgtgatcaagtcaggttctgcacggggccaacccctgtgaagagcgcctggacggagaagccgaggaaggcgagcatggcgagcctgccattcttgatctccttgagcttgagctccttcatatccgcctcgctcttggtcccgaagccgagcgggttg

SEQ ID NO: 406925 - DNA, 365 bp, Oryza sativa
cgagaaagatatcgtgcgatctgggttctatcgattctttcccgatcgagatgaatggctccatgcgtctacatacctagatgctggtcatggcataacgaagatgtgcaagagctctatttgcctgtgccattctatgagaggttttctttttgcgtatgggaccgccacccactttggcagcatctactaatcctacacttattttgaaagccatatttagagccggacgcttttgagatgcttgtaatgaccaacgaatgggacgtgctcttgcttgtttagatcctatatgaatcggaactttccgcggagatgctttgatattacgtcgggtggctactcctatattgagagtcactata

SEQ ID NO: 406926 - DNA, 413 bp, Oryza sativa
caaattcaaaaaccacgatttataaagtgccggagatgaagtacacaaattaacattacatcgagttttaataaaacatcatgcgaaaagccagcaaaaacaaaaggcagcatacagctaatgaagctctactggagtagctcgcaaaaggtccgacttattttcagtagcactctactccatttcttccgaaagagtgaccatcttctactgggtgttgtacatgtgacggatcaggtcaacaacgcgagagctgtatccccattcgttgtcataccaagacacaagcttaacaaagttgtcattgagagcaataccggcctttgcatcaaagatgcttgacctgttgtcaccctggaagtctgtggaaacaaggtcctcctcaacgtaacccagaatacccttgagtttcc

SEQ ID NO: 406927 - DNA, 526 bp, Oryza sativa
  unsure (1)..(526): unsure at all n locations
attaggtgagaatatttttagatttaactggtttctataccaacagaaaacaattgagtaaaatcaatcagggtgcaatatccatcatcaataaggcctttccatcactggaatggcaaccttcagcaaaaatccaatcgaatactccataatgtagtgactccttgccacttgcagcaagaagaaccagttctggttcaagcacaaaactgcatttatgatcctttcaggcttgtacaaactgtccaatgatgagctcacaaacagccaaccgaaaccacttcatcacagatagcgatctttgcattgatgagaacccctcggcctcaggaccttcacatggtgctccaccaccactagcggacactgtcttgttttncggtgtcagctactgaatctgaatcggttttactactaccgcttaagcagtacttctgcagccatctatcagtctcccacagtacatgcatgatgctcttcctcgcagaatacccatggctttcaaagggagtatcacccaacgaga

SEQ ID NO: 406928 - DNA, 369 bp, Oryza sativa
atggcaaaaacatcatcttcttcttcatgttcttagtgtacacaacaccaactcgatcatcatctcgtcgcactaaacccatcttccccaacccaaagacaacgaactcgctggccacaaatccatccaaccacaattaaccactgctaagctacggtcccccacttcacttgccggggacgaagttggtggcgtacgcccaggcgttgttgttgacggggtcggcgaggtggtcggcgaggttctcgagggggcccttgccggtgacgatggcctggacgaagaagccgaacatggagaacatggcgaggcggccgttcttgatctccttcaccttgagctccgcgaacgcctcggggtcatcggcga

SEQ ID NO: 406929 - DNA, 432 bp, Oryza sativa
  unsure (1)..(432): unsure at all n locations
attaaatgttatgtttactcattttttgaaaggaggtgtgtttactcattcatataaaaaaaaagttacactggtgtacaaaacccatactacagtgacaatgctgctggagtacaagcatccataaatagaagttattagaccagacatttgaccatgtaaggcccctcaagttcataacccagtttacggtagtagtggcgagtcccaactcctgatataacagcgattttctttgaacgatgctccttgcgagcaattctttctggttcttccatcaaaagagtaccataaccctggtgttgtagttttgtctgcatcacgaccatgtacagggactgcagttccatataccatgaagttcacggacaattgaacacctncctactagctcagggcatgtaacattgcggccacattttcgcaatcgca

SEQ ID NO: 406930 - DNA, 537 bp, Oryza sativa
tttttctcctttcctatttttttttttttttttttttggggtctttttttattatttttgggcgaaccaaccccctcccaaaaggcaaaaccaaaagcaacaccactaaccacaaaaaactctaagcccaacaaaaacttaacaaaaaaaaaaatcgtcccaaacgacccaaaccaaacagaagacagccgccaacacttcccagtctaattgaccaaccagatggcctcaagcactaacccagcactcacaggagagatgtctttgccgaaaagcccaccgattgctctgccaggaccctcctgcttgatgagagactccccaacgagaacagctttaaccccagcattctgaacgaatgaaatatggtctggcgtgaacagccctgattcccctacaacaattatgcctttctgagctacagcttgtcctctctcaccctcaagaagatctttagtgctagaaacatcaactcgaaaagtctcgaggttacagccattgatgccgatgagctggacaccatctatccctaacaca

SEQ ID NO: 406931 - DNA, 516 bp, Oryza sativa
  unsure (1)..(516): unsure at all n locations
aaaagggtaaactcttcataataatattagtaagacattatagctgatgtcttttgatcacactgcgatcaaattatgcatcataggcagtacaactccgcgtcaggaaaaagtagaggagatatatttcttgttattacttaatacagcattcacatatatcgaaccatccggtacgtacgtagtagtactccacgcgttcacatcgatgatcggggacgatatcctcaggtagtacttatgcaaaagcgttggcgtaaactgacgaactgaacggacggacggtcggatttagggctcccataagtccaagttgccggagacgaagtcgtagtggccgccgacgagcttgagggtgccgttggcgatcccctccttgacgaacggtaggcttggaggttctcagggattggttcacggcctccttctcaagatggcgcattggtcatcgaaaggcagcgaggcgtgctcggtctgaaccttcttcttggcggngaaaccggtcctgacccagtc

SEQ ID NO: 406932 - DNA, 432 bp, Oryza sativa
aaatcaggtacaacggcattattcattacatgatcatgcaacacttcacgaaagttgtaatcgaattgagatggcagttaagctttcgaacgctaatacaactcggaaagtattcagtgcctacctgcaggcaacactgcatgaggtggtgctacattttctccaaagcacagaagtacattttaagcagaaaacaggggcttagatgcccttctccagcattgcccggactctggtagggagaccatatagcctgatgaacccttcagcatcagcctggttgtagatctccccattctcaaatgaggagatgtcttccctgtacaggctgtatgggctcttccgggacgcgacgtttacggagcccttgtacagcttgagagtcacggagccggctgttgtcgcggtaatgttctccatgaacgcatcaat

SEQ ID NO: 406933 - DNA, 449 bp, Oryza sativa
ggaaggcaaatgttcgtgaagataggcacatatatgtatcgtacaatgtcctctccgcttgtcgaaatgcaaataacatcatcgggggatatgatcatcagttcacgagaacagaggaagaaacaaaagctaaaaattaaaaccatcaacagcccgatcgagtttgcattactagatacacacattgcagccttccttccctctctccatgtatcgatatatcaacccggccacgcacaaaacatttgttcattccctactcgagctgcgcgtaccacaccccttggatcttgacatccttgggcaccttggcgccgaggtctgtgtccgacggctgcacgctctcgaagacgccaatcacctcgccggtctctggcttgctcttggtgacgctcaacgtgatgttgcccgtcgacgacgaggcgttcttgacgttctccttagcgagc

SEQ ID NO: 406934 - DNA, 449 bp, Oryza sativa
gggggggggctgcacaaaacaggattacgtaacaataccctttgcccaaaacaaggcaatactacaacatctgtggcgagtacagaggtacaaaagtcaggccccgtaagcctttcgattaaaaaccaaactgaaacacccacgattttttaacaccccacgaaaaacaatctgatagctagctcctttggggggggaacctaaagagctttatcttcccaaaacatccacatcattatctggcatgactatatagtttcgatacctaaaaaggcagcgttcactcagggatatccgccatgtcttcctttcatttaagcccggccaagatgcttcaagccttgttggcaatgttgttggaaagccagtcaagcccctcatacaacccctaaccagaggtagcacatgtgctctggatgtaccaatgccgcttgcgcaaggagtgcaaa

SEQ ID NO: 406935 - DNA, 498 bp, Oryza sativa
tttttcccgcctcggcagcgtcttcaccgtgcgcatcctcagccgcaagatcaccttcctcatcggccccgaggtgtcggcgcacttcttcaaggggaacgaggccgagatgagccagcaggaggtctacaagttcaacgtgcccaccttcggccccggcgtcgtcttcgacgtcgactactccgtcaggcaggagcagttcaggttcttcaccgaggcgctccgcgccaacaagctccgcagctatgtcgaccagatggttgtcgaggctgaggagtacttctctaagtggggagaaagtggaacggtggatctgaagtatgagctggagcatctcatcattctgactgctagtcggtgcttgctcgggagggaggtgcgagaaaagctctttgatgatgtttcttctctcttccatgatctggacaatgggatgcagccagtcagtgtcatctttccctacctcccaattcctgcacaaccgccgccgtgaccggg

SEQ ID NO: 406936 - DNA, 428 bp, Oryza sativa
ttatttcctcctcggttcggatccgtggttcgtctagggtttagtgggttgagatggcggcgccggatgtcgagtaccgctgcttcgtcggcggcctcgcctgggccaccgacgaccgctccctcgaggccgtcttctccacctacggcgagatcctcgactccaagatcatcaacgacagggagacggggaggtcacgtgggtttggcttcgtcaccttctcctccgagcagtcgatgcgcgacgccatcgagggcatgaacggcaaggagctcgacggccgcaacatcaccgtcaatgaggcccagtcccgccgctccggcggcggaggcggcggctacggcggcggcggtggcggctacggcggcggtcgtggaggcggcggctacggaggaggtggcggcggcggctaccggcgccgtgagggc

SEQ ID NO: 406937 - DNA, 276 bp, Oryza sativa
tctggtgatcaccacctacgccgggctgagccggtaccgtgtcggcgacgtcctccgcgtgacggggttccacaacgcggcgccgcagttcaggttcgtgcgccgcaagaacgtgctcctctccatcgagtccgacaagaccgacgaggccgagctgcagcgcgccgtggagcgcgcgtcggcgctgctccgcccgcacggcgcgtccgtggtggagtacaccagccaagcgtgcaccaagcgcatcccgggccactacgtgatctactgggagct

SEQ ID NO: 406938 - DNA, 476 bp, Oryza sativa
ttgatgaattctaggccatcagtcggttgggatgatatgtgggccaagacaattcttgaaacatatgaagcagaggatgatgatggaagatcatctgggggatcctctcctgagtcaactggttctgtagaaacatccatatcgtcccattttagtggcatgaactatccgtcgttgttcagttcaaaaccatcaggatatggggcttcacaacaaacgatacgtgaagaaccaccatcatattcaacatcagttctacagaaacgtgagtcattcgaaaacccccttgctgggcgtggtggtcggagttttggatcccatgaggacgaagacaggagttcagggaaccctcaatctgggaaagcactgtatgacttcacagcaggtggcgatgatgagttgagtttaactgctggagaagatgtggaaatcgaatatgaggtcgatggttggtactatgtaaagaagaagagacc

SEQ ID NO: 406939 - DNA, 285 bp, Oryza sativa
ttgggaaactaataaagacactgtctggggccttcgctggaaatagtgacatgtctctccaatctgtgtttgaaggatgcactaggttgcaaaagcttgaggtcagagatagtccttttagtgataagggattgctctctggcctgagctatttttacaacatgaggttcttatggatgaattcatgcaggctaaccatgaggggttgtagagatgtagctcaacaaatgcctgacttggtggttgaagtgatgaaagatcatcttgatgatgaaagggagatgg

SEQ ID NO: 406940 - DNA, 301 bp, Oryza sativa
tatcggtattctctacctacccacctgtgtggggttcgtgtacaggtacccgttggttgaaggccgttcgagcttttcctgggagtatggcatggtttacatacttcagcgccgtagcgcctggtatgagcctcgcggagaagcaatggctagtccacggggctcatacttcagcgctgcagcgcttggttctcggacctcggctcgaggcattttctctaccccttcttacccttgaaaagcagggtcaccttgtgctcttaaacccataaccatctttcggctaacctagccttcttcc

SEQ ID NO: 406941 - DNA, 492 bp, Oryza sativa
ttttcatctctctcagctctcacagctcactgcatcaatggccgcggccaccatggcgctctcctccccggtgatggcccgcgcggcgccgtcgacctcctccgcgctcttcggcgaggcgcggatcaccatgcgcaagaccgccgcgaagcccaagccggcggcgtcgtcggggagcccgtggtacggcgccgaccgcgtcctctacctcggcccgctctccggcgagccgccgagctacctcaccggcgagttcccgggcgactacgggtgggacaccgcggggctctccgccgacccggagacgttcgccaagaaccgggagctggaggtgatccactcccggtgggcgatgctgggcgcgctcggctgcgtcttcccggagctcctcgcccggaacggcgtcaagttcggcgaggccgtgtggttcaaggcgggctcgcagatcttcagcgagggcgggctcgactacctcggcaacccgagcctgat

SEQ ID NO: 406942 - DNA, 487 bp, Oryza sativa
ttttaggaggaggagcggtgggattggaggagaggagcgacgcggcggaggactcgctggtgtcggtgctcgccgtgtacgacggcttctgcaatctcaagcagattaatttggagctcaaggtctgtggaggatcatctatccggaaaactctggtgaaagaagcggcttcctacggcgctgcgcatctcatccttggtgttgcgaagaattctctatcttttagtagatcctcctccatttctgttgccaagtactgtgcaaagagggttcctactggatgctcggttcttgcagtgaacaatggcaagattctttttcataaagatgcagtacagcaagaaccataccatagtgctagcacaatgacagagacaccaaggaggagttaccggaagctcctgacttctgtgattggggagaaacttcgggatgagtgtgaacaagataacaggtccattttccgggctgtcaccatgccaccaag

SEQ ID NO: 406943 - DNA, 452 bp, Oryza sativa
tttttctccttgtcaccaacccaaccagggtggcaaaggcaatccaggagaagtcatgcaatgctcttctgctgaaggttaaccaaattggatctgtcactgagagtattgaggccgtgaagatgtcaaagcgtgctggctggggtgtgatgaccagccacaggagtggtgagactgaggataccttcattgctgatttggctgttggtttggccacgggtcagatcaagactggagcaccctgccgatcagagcgccttgccaaatacaaccagcttcttaggattgaggaggagcttggtgcggatgctgactacgctggtgccaagttccgcgcacccgtggagccctactaaacttgatggtgaatatcatgcggttcatgcccactgttgtgtgcatgggttctgtgaagacaggatgctcatttctatccgtaattgactttccgt

SEQ ID NO: 406944 - DNA, 492 bp, Oryza sativa
ttgcttctctccacgactccacctgaagcgcctctcgccgccgccggagaagacgcgcagcggcagcagcggcggaagcggcggggagccatggcgccggagccggaagacgacatcatgaacgagaagaacccccgcccgctcgacgaggacgacatcgctctcctcaagacctacgggcttgggccatactccacaagcattaagaaggtggagaaagaaataaaagaaatggctaagaagatcaatgacctttgtgggattaaggagtctgacactgggctggcaccacccagccaatgggatctagtatcggataagcagatgatgcaagaagagcaaccgctgcaagtggctaggtgtaccaagattataagtcctaatactgatgatgctaaatatgtgattaatgtaaaacaaattgcaaagtttgtggttggcctaggggataaagtttctccaactgacattgaggaagggatgagagtgggt

SEQ ID NO: 406945 - DNA, 488 bp, Oryza sativa
tttcggacgcgtgggtgagtgtctacttcccgtacaccgaggctgacaagaggctcactgctttccaccctgaaattgaggagcttctctacagtgaagtcgagaacgatgaacacaagtttgtattgaaggacaagaacaagccaatcatcttctccatggctcgtcttgaccgagtgaagaacatgacaggtctggttgagatgtatggtaagaatgcacatctcagggatttggcaaaccttgtgattgtttgtggtgaccacggcaatcagtccaaggacagggaggagcaggctgagttcaagaagatgtacggtctcattgaccagtacaagttgaaggggcatatccgctggatctcagctcagatgaaccgtgttcgtaacggggagttgtaccgatacatttgtgacaccaagggagtctttgtccagcctgcattctatgaagcgtttggtctgactgtcatcgaagccatgacatgt

SEQ ID NO: 406946 - DNA, 441 bp, Oryza sativa
tcttgtgcagtagtgtgcgtgtgtgcatttgctggtgcagtgccgagacaaattctccatcgtgtgtgtgtgatcttgtgttctagctaacagtggtatcagagtgtgtgatcttgtgatcttttaagtttggggggagtggcaccaacttaaaaggggaggggtccctcacctcatgagctagcttttggggtgtagaaagactttctcccggttaggccaacgtttcccggttttgggccatcaagtggtatcagagctgggcccacaatctctctaagtgccgtgcacactcgtgtggtgtaagcccgaagcccagtggaccgcgggtgtgaggcccgtatgtgcctatgtgttgggccggtcagtggaccgcgggtgtgaggcctgtatgtgctcgtgtgtggagccccgtcagggctaaggggcaccaatgtgtga

SEQ ID NO: 406947 - DNA, 491 bp, Oryza sativa
tgtggagatcggtgaccttttctgtgaacctttcccaggaacctcgtggttaatgccttcggatttccctctaaactatggtgaatttactcagagtagcccagagagctatggaaacatgctgcagaataaggttgtcggtgacaatacagatcagtctctggctggttctaggcctccctacgtgttcctctaccttgatggtaactatgaattccatgacaagcttttcttctgcgaagacgaccaacagttcctgcaagatgtgccgtggttgatcatgagaaccgacatgtactttataccatcactatttcttattccaagttaccaagatgagctcagcaggctatttcctgagaaagatgctgtttttcatcacttggcacgctatcttttccatccgacgaatagcatatggtattcagttaaagggtactacaggtcctaccttgccaaagctaataaaactgtgggaattcagatcagga

SEQ ID NO: 406948 - DNA, 503 bp, Oryza sativa
tctgcagcagcagcagctgagcttgaagcagcagagcgaggtagacatggccgccgccaccatggccctctcgtccccggcgctggccggcaaggccgccgcgaaggtgttcggcgaggggcgcatcaccatgcgcaagtcggcggcgaagcccaagcccgccgcgtcggggagcccgtggtacggcgccgaccgcgtgctctacctcggcccgctctccggcgagccgccgagctacctgaccggcgagttccccggcgactacgggtgggacaccgcggggctctccgccgacccggagacgttcgccaagaaccgggagctggagggtgatccactccaggtgggcgatgctcggcgcgctgggctgcgtgttcccggagctcctcgcccgcaacggcgtcaagttcggcgaggcggttgtggttcaaggcggggtcgcagatcttcagcgagggcgggctcgactacctcggcaacccgagcctgatccacgcgcagag

SEQ ID NO: 406949 - DNA, 468 bp, Oryza sativa
ttgtcgccgccgccgccgctctccatcccgcgagaagctcgtcgccggcgtcccgctgcatccatcctctccggcgatggcgattactttgtccaatgtcaactctgaggcaggcctccagaagcttgatgagtacctccttactcgcagctacatcagtgggtaccaggcttcaaaggatgacatgactgttttcacctcacttccttctgctcccgcagcaagctatgtcaatgtcacaaggtggtatgatcacatcagtgctctcctaagatccagtggagttaccgcagagggtgaaggtgtgaaggttgagtcaactgcttgttctgtgtctccaactgctgaccaaaaggcaccagcagctgatgaagaagatgatgacgatgttgatctgtttggtgaggagactgaagaggagaagaaagcagcagaagaacgggccgcagctgtcaaggcttctggaaa

SEQ ID NO: 406950 - DNA, 496 bp, Oryza sativa
ttttccccctcccgtttcaccctcaccacaacagcggcagcaaaagcgagcggcagcgagaggccggccacgcacgcacgcacgtcgaagcgcgccgcccgccgccgatggggcccctcctccggtcgtcgccgccaccgcgccacctgcgcctcctcctccgccgcctcctctccaccgccgccggtcggccctcccgcctcctcccgctccccgcctcctcctccgcccgcctcctcgtcaggcccagggttgcggttgcggctgctgcggcgggtgctcctctgcggcggaatggggtcgcggtgagggctttcatggcatccacggcggcttccgaggcgatgcaggagaagcgggtggccggggagtacaccgctgcgaacgtccaggtcttagaagcattggatggagttcgcacaaggcctggtatgtacattggaagcacaggatcacgagggttgcatcatctggtttatgaaatattggataatgc

SEQ ID NO: 406951 - DNA, 379 bp, Oryza sativa
ttgcgaagttcaatccatccccaaatgtcccggccaacccaacaccaccccaccgccgccgccaccgccgtcatcctcctcttacttgcagtatccccggcgccgtccggcgcggatccggacgacgagcggtgcctgtcgagcctccagcaatctttgtccggcctccgcaactggagcaaggcctccttctccgccccctgcgagggcttcatctcccacctccagggcgtcacctgcaacaacggccgtgtctacaagctctccctcccgggcctctccctcgccggcaccatcccgccggacctctccaactgcaccaacctccagtcgctcgacctctcctccaacgcgctctccggtgccatccccccggagc

SEQ ID NO: 406952 - DNA, 499 bp, Oryza sativa
ttatcgcgttgaagatttcccagcttccattggcctctggaaaacaaaagaggattgccgtgattactcaaggtgctgatccagtagttgtcgctgaggatggacaggtgaaaacattccctgtgatcctactgccaaaggagaagcttgttgacaccaatggcgctggtgatgcctttgttggaggcttcctctcacaattggttcaacaaaagagcattgaggactctgtgaaggctggttgctatgccgcaaatgttatcatccagcgttctggctgcacttaccctgagaagcctgatttcaactagggctaacccaaccacatattgaggaacaattattcgcacatccaacctactagtggtttggtgtgttctacctgtaccatctcgaggctttccatatgatccggccaatatttttttgccgtgatttttgtttcactgctgcaaaccttactttattctcggtataaggcacaattgccaatcggtgt

SEQ ID NO: 406953 - DNA, 499 bp, Oryza sativa
tttctaatctcaagtctctgtctcgtcgtcctcgcatctccactcgccatgggcaagattaagatcggaatcaacggtttcggaaggatcgggaggctcgtggccagggtggccctccagagcgaggatgtcgagctcgtcgccgtcaacgaccccttcatcaccaccgactacatgacctacatgttcaagtacgataccgtgcacggccaatggaagcacagcgacatcaagatcaaggactccaagactctgctcttgggcgagaagccggtcaccgttttcggcatcaggaaccctgacgagattccgtgggctgaggctggtgctgagtatgtcgtggagtccaccggtgtcttcactgacaaggagaaggctgctgctcacttgaagggtggtgccaagaaggttgtcatctcagccccgagcaaagatgctccgatgtttgtctgcggtgtcaacgaggacaagtacacttcagatattgatattgtctcaa

SEQ ID NO: 406954 - DNA, 500 bp, Oryza sativa
tctatctgtctcatcagatcagcgtgaagcagcggctagaacacaaaaatggcggacgagaagctcgccaagctgcgtgaagccgtcgccggcctctcgcagatcagtgacaacgagaagtccgggttcatcagcctcgtcgcccgctacctcagtggcgaggaggagcatgtggaatgggcaaagatccacacgccgacggacgaggtggtggtgccgtacgacaccctggcggcgccgccggaggacttggaggagaccaagaagctgctcaacaagctcgccgtgctcaagctcaacggcggcctcggcaccaccatgggatgcaccggaccaaaatcggtcatcgaagtgcgcaacggattcacattcctcgacttgattgtgatccagatcgagtccctcaacaagaagtatggcagcaatgtcccactgcttctgatgaactcattcaacacccatgaagacaccttgaagattgttgagaaatacaccaattc

SEQ ID NO: 406955 - DNA, 498 bp, Oryza sativa
ttggtgcttcagctcaagagggcatataagcgaaatgacaagccacaattgcttgcagcaaccaaattcatagcacacttggttaaccaggttgttgctcatgagctcgtggcgctggagcttcttaccgtgctgcttgagaacccaactgatgatagtgttgaggtagcagtggggtttgttaaagagtgtggggcaatgctacaggacttgtctccacaagggcttcatgctattttcgaaagatttcgaggtattcttcatgaaggtgaaatagacaagcgtgtgcaatttttaattgaaggactgtttgcaattagaaaggctaaatttcagggattccctgctatccgtccagagttggatcttgtggagcaggaagaccaatttactcatgagatatcccttgaagatgagctagacccagagactaatctaaatgttttcagggcaaatcctaattttgctgaagatgagaaggcgtatgagaacctaaaa

SEQ ID NO: 406956 - DNA, 432 bp, Oryza sativa
gcctagggtgggctcaagcacgcggccatggcgatctcgcgccgcctcctcctctccctcttcctcctccgcgcattctcctcgcttcccgctcaggccgcagcgagaggcgcctcccatccctcaggtaccagcggaaattatgggtcatttttgcgcaacctgcttcaggataatcccatgataacggaggaattggtccgtggatatatgagcaactcggaacttgagattgctgcgcatgccattggaagccgctatcctaatatctccaggatatacagcattggaaagagtgtgaatggcgtcacattgtgggtgattgaaatatcagacaagcctgggcaaaaggaagctgaaccagcattcaagtatgttggtaatgtccatggtgatgaacctgctggaagggaggctcttataaagcttgca

SEQ ID NO: 406957 - DNA, 481 bp, Oryza sativa
tctaatcccctcctctcccccaattccgccgccgccccctgctcggatcctcccccgccgccgccggcgagaagggcccgtaggcgcggcctcgtctccttgctgatcccgactccgcgcgcacggccggtgactcgactgcctcgtctcggttcgaatcgagctgggagatattgagcacttggactgaagaactcaattttggagcacttggattagcatcagttttctacctctgagcattggtcaccctgctggactcactggctgttaaaaacggctctggtttaaggagttgtttctcttgtggtcattctttggattatgggagctctctgttcatggctgcaagctgattattccgaccaccatgggcatcatgcttcaccggcattagggggatgcatgtgcctcagatgttttactcagcagctcatcaatgcgtacactgttttattccgagctgggacagtgcacgcag

SEQ ID NO: 406958 - DNA, 449 bp, Oryza sativa
tttctgcttcggcagctgctgctggtgtggtgatacactcgcctagctttggccaccgctcatctctgctctgctttttctcctctgctccactgatcatccaattcttctcctcctgattggccattctgattggctggtgacatgtcgaagaaaattgtggtgaagctggacctgcatgacaacaaggacaagcagaaggccatgaaggccgtctcctcggttgtcggaatcgacgccatttcgatggacatggcgtcgcggaagatgacggtgatcggcacggcggatccggtggacgtggtgagcaagctccgcaaggcgtcgtgggcggcctacatcgagtcggtcggaccggccaaggagccggagaagaaggaggagaagaaggaggaggccaagaagacctcccgcggcggcggcggcgacggcaagaaggaaggaggtga

SEQ ID NO: 406959 - DNA, 497 bp, Oryza sativa
tgttcgcctccggctcctccgaaccgtcgccggcctctccccgttctcgtcctccgcgccgccgcggcacagcccccgcatcctccgcgctatccctgtcggtgcgcctcacccgccgcgcgtctccgcagccgtctcgccgctggtccgtccggtcgccgccgggttcgcgctgttcagcatggccaccgccgcctcctccgccgcatccgtccacgacttcaccgtcaaggatgcaagtggcaaagatgtggacctgagcaccttcaaggggaaagtcctccttatcgtcaatgttgcatctcagtgtggcttgaccaattccaactacacggagctgagccagttgtatgagaagtacaaggaccagggctttgagatccttgctttcccatgcaaccagtttggtggacaggaacctggcactaatgaggagattgtccaatttgcttgcacccgcttcaggccgagtatccaatttttgatcaggttgatgt

SEQ ID NO: 406960 - DNA, 502 bp, Oryza sativa
tggccgcttctcctcgtctcgctcctgctcatcggcttcgtcagcgccagagccatcacaccctcagctgaagcggcggcggtgttcccgaaggaagccctgccgaccaactccggctacctccccatcacgacaaccaacgcctcgctcttcttcgcctactacgaggccacgcacccgctcacgccgccggcctccacgccgctcctcctctggctccagggcggccccggctgctccggcctcgccggcaatttcttcgagctcggcccctacttcgtcaaccgcgacgcgctctccctctcgcccaaccccttctcgtggaatcgccggtttggtctcctcttcatcgacaacccgctcggcacgggcttcagcgccgcgccgtcccccgccgccatccccaccaaccagtccgtcgtcgccgcgcacctcttcgccgcgctgcagtcgttcttcgcgctccagccgggctcccgctcccgccccttcttcctcaccg

SEQ ID NO: 406961 - DNA, 495 bp, Oryza sativa
ttggctagctcatcgtcgataccaatggcgactaccagggccacatcgacgctgctgctgctgctgctgctggtttcggcaacatgggcggcatcggcgccgacgacgagtcgggcgaggaacgtgataacacacgtgaaggggttccaagggaggctgccgttccacctggagacggggtatgtggaggtggacaacaccgataccgttgagctcttctactacttcatccagtcggagcgcagccccgccgatgaccccctcatcctctggatcaccggcggccccggctgctccgccctctccggcctcctcttcgagattggccctctcaagtttgacgtagctgggtacacggaagggttccctcaattgttctacttccaagattcctggaccaaggtgagcaacgtgatatttctggacgcgccggtggggacggggttctcctacgcccgtgaggaacaagggtacaacgtaaccctcacacagacg

SEQ ID NO: 406962 - DNA, 496 bp, Oryza sativa
gttgcccgtcctccggccgccgctccccacccgccgccgccgccgccgcccgcagaagccgcagatggcgtcgtcggcgtccaccctcgagatcgaggcccgcgacgtggtgaagatagtgctgcagttctgcaaggagaactcgctgcagcagacgttccagacgctgcagaacgagtgccaggtctcgctcaacaccgtcgacagcatcgacaccttcatcgccgacatcaatgccgggcgctgggacgctgtgctgccccaggttgcgcagctcaagctgccgcgcaagaagctcgaggacctgtacgagcagattgtgctcgagatggctgagctccgtgagctggacacggtgcgcgccatcctccgccagacccaggtcatgggcgtcatgaagcaggagcagcccgagcggtacctcaggcttgagcatctccttgtccggacatactttgaccccatgaggcctaccaagaatccaccaaggagaaac

SEQ ID NO: 406963 - DNA, 471 bp, Oryza sativa
tagaagaagaagaagagcaacaggaagaagcatgtccgaagaggaagaagaagaaagcaaggagaagaagatgcaggactggggtccggtgctgatatcttgggtgctgttcatcctgctgtcgccggggcttctgttccagataccaggcaagtgcaggttgatcgagttcggcaagttccagaccagcgtcgtctccatcctcgtccacaccatcctcttcttcgccctcgacgccatcttcctcgtcgccatcggcgtccagatcaaccttggctcctctccctgattctctctctttgtttcttctaggtaatctcaattgcatatgtatagcagtatatatgcacctccatccatcatctctactcaccttagctcgttaatttgtactactatttgtgtgttccttccaattcttggcataatattgtgactcaaaggaattgatttcagagttactcattactt

SEQ ID NO: 406964 - DNA, 498 bp, Oryza sativa
ttcttgcgaatccagcagcagaagcagcagcagcagctcagccgccgccgatggcgtccacgatcatggccccaacctcccgcgtcctcgccgccaagacccccttcctcggccatccccgcccctccaatgcccccgtccgcgacatcgccgccgccgccaccggccgcatcaccatgagcaaggagctgtggtacgggccggatagggtgaagtacctggggccattctcggcgcagacgccgtcgtacctgaggggcgagttcccgggcgactacgggtgggacacggcggggctctccgcggacccggaggcgttcgcgaggaacagggcgctggaggtgatccacggccggtgggcgatgctcggcgcgctgggctgcatcacgccggaggtgctcgagaagtgggtgcgcgtcgacttcaaggagcccgtgtggttcatggccggcgcccaaaacttttccgacggcggccttgactacctgggaaccccca

SEQ ID NO: 406965 - DNA, 478 bp, Oryza sativa
tttttccgatccagctgctggggatgagtacttagttagttcggtgcatagctactactgcatgatgtacttatgctaggtagctaaatacatccaataagctagatgctggttgcatatatcatatctccatcggttcatgaagggagagatggctagagtatcaacaagttaatgagcatggtggggcagcaggagcaggagggggggttcgacgcggcggtgctgagcgggcagacggagatcccgtcgcagttcatatggccggcggaggagagccccgggtcggtggcggtggaggagctggaggtggcgctgatcgacgtgggggcgggggcggagaggtcgtcggtggtccggcaggtgggggaggcgtgcgagaggcacggcttcttcctggtggttaaccacggcatcgaggcggcgctgctggaggaggcgcaccggtgcatggacgcctttttacgctgccgctggg

SEQ ID NO: 406966 - DNA, 501 bp, Oryza sativa
  unsure (1)..(501): unsure at all n locations
tttgaacggtgcaacgcgtgcttaccaacacgtaaggtgcatgccatggcaccattcagggcgtgcgcctcgccaccggtactcacgctggccctgctcgtgttgggcggtgccctttttgacacctccatgctcccggcgcgtgcgacggcggtcagttgctagcacgtaaggaacatggtgatgatggacaggctccaggcttggcagggagctcacaaccggtcgtacccgagcgcagaagaggcgctgcatcgatggacgtgtaccgacagaccgcggagttcatcgacgccgtcaacctgcgcggcgacctcacttaccagctcgccgagaacgagttcgcagacctcaccgaggaggagttcctggccacgtacaccgggtactaccccggagatggtcccngggacgactccgttatcacgacgggtgccggagacgtcgacgccagcttttcctaccgcgtggacgttccggccagtgtcgactggagggccc

SEQ ID NO: 406967 - DNA, 499 bp, Oryza sativa
tgtttggaatggcagcaaacatccctctcggggtgtggcgtgagcacaccaagaaattctccccgcagtggtttgcagctgtccatgccgctgttccattcatcggaatgctgaggaaatctgtgaacatgcccaagactgccatggcattcaccatagcagcctccattattggccagacaatcgggtcgagggccgagcgcattcgtctgaaggcattggctgcaaagggcgacgccgattccaccaccgtggctgacatgtatccaaacaagtctggcaattgcagtgacactgagggcaaggcatgggatccgctcgcgatgaagatggctggacgggcttctggtggcgttgctgcaccaacaccaagcatgtgtttctgattgttcattgcttttgaaaatttgtgtctataccagtatctctgtatgtttgagaagtgatattgagtctatttttatctcgcgatgtaattgcctttccttgcccctcagaa

SEQ ID NO: 406968 - DNA, 395 bp, Oryza sativa
ttttcttcaccgtcaaggatgcaagcggaaaagacgtgaacctgagcacctacaaggggaaggttctcctcatcgttaacgtcgcatcccaatgtggcttaactaactccaactacactgagctgagccagctgtatgagaagtacaaggtccaaggctttgagatattggctttcccgtgcaatcagtttggagggcaggaacccggctccaatgaggagattgtccagtttgcttgcactcgcttcaaggctgagtatcccatttttgacaaggttgatgtcaacggtaacaatgctgcacccctgtacaagtatctgaagtctaacaaaggtgggcttttcggtgatagcatcaagtggaacttctccaaattcttggttgcaaggaggcgc

SEQ ID NO: 406969 - DNA, 453 bp, Oryza sativa
tctttttttgagacctccacgagcccctcaggctgggcgtgtgcgcgcccatcccggggagggacattcttatgccgttccaggacaagtccagggcgtgctacgggtggatggtgcaccacggcgcgcgctaccgagacgccgacgccattctcgtcaactcgctcgacgccgtcgagcccgacgcctgcagggtgctccgacacccgaagcccggcgtcccgccggtgttccccatcggcccgctgatacagacacactgcgccggccacgacgacgccgcggcgcctccctcgccgtgcgccgtgtgcctcgactggctcgaccggcactcggacagggtcggtcattttcgttctccttcggcttcggaggtgcgctgcctatggtgcacatgcgccagcttgtgctcgggctggagctcagcgggcagcgattcctgtggatggtgcg

SEQ ID NO: 406970 - DNA, 480 bp, Oryza sativa
tttcgatccagctgctggggatgagtacttagttagctcggagctagctactaatggatgatatacttatgctagttagttaaatacagttattagttagttgtaggttgcatctatcatatctccatcggttaattaattgattgatagctagattatcaacaattaatgagcatggtggtgcagcaggagcaggaggtggtgttcgacgcggcggtgctgagcgggcagacggagatcccgtcgcagttcatatggccggcggaggagagccccgggtcggtggcggtggaggagctggaggtggcgctgatcgacgtgggggcgggggcggagaggtcgtcggtggtccggcaggtgggggaggcgtgcgagaggcacggcttcttcctggtggttaaccacggcatctaggcggcgctgctggaggaggcgcaccggtgcatggacgcctttttacgctgccgctgggggagaagc

SEQ ID NO: 406971 - DNA, 464 bp, Oryza sativa
tttgaacggtggaacgcgtacttacccacaagttaggtgcatgccatggcaccattcatggcgtgcgcctcgccaccggtactcacgctggccctgctcgcgtcgtgcggtgcccttctcgccacctccatgctcccggcgcgtgcgacggcgggcagttgcttggacgtcggcgacatggtgatgatggacaggttccgcgcttggcagggagctcacaaccggtcgtacccgagcgcagaagaggcgctgcagcggttcgatgtgtaccgccgcaacgcggagttcatcgacgccgtcaacctgcgcggcgacctcacttaccagctcgccgagaacgagttcgcagacctcaccgaggaggagttcctggccacgtacaccgggtgctacgccggcgatggccccgtggacgactccgttatcacgacgggtgccggagacgtcgacgccagcttcttcta

SEQ ID NO: 406972 - DNA, 482 bp, Oryza sativa
  unsure (1)..(482): unsure at all n locations
ttgagctcacggccggtcactactcaccatcgagaggagagcaaaaataattgagtgatagctgttagctaagctacctagcatcatgcagggaggcgccaataataagggcttggtatgcttgatcgccgccgccgccgtggtgttggtattcgccggcagcagcggcattgcggcggcgcaggcggccgggctgaagaaggggttctacaagaagagctgccccaaggcggaggagatcgcgcagcgggtggtgtggaaccgcgtcgccggcaacccggagctcgccgccaagttcctccgcatgttcttccacgactgcttcgtcagggggtgtgacgcgtcggtgcttctggactcggctagcaacacggcggagaagaacgcggcgccgaacctgtcgctggcggngttcgaggtgatcgaggaggtgaaggcggcggtggagcggcagtgcgccggggtggtgtcgtgcgcggaca

SEQ ID NO: 406973 - DNA, 485 bp, Oryza sativa
tgttttccgctcgctcgtcgactcctcgtctccgcgagagagagaaagagagtgaggggagggagcggaggtaaacccaaaaccctagcccgcgtcgtcgtcgtcgtcgtcgccggcggcgagatgtcggcggcggtgaacgaggagacctcggtctacgtcggcggcctgccgtacgaggccaacgaggacatgctccgcgacgccttcggccgattcggcaccatcgtctccgtcaaggtgataaatgatcagagagtcagaggcaagtgttacggttttgttactttcactcatgctgatgctgcacagcatgctatctcaggcatggacggcaagagaataaatagacgtgttgttagagtgaatgaagtgcgtactagaggtgcccgagaattcgggcgtgaaggttttcggcgagaacctggaagcgcaagggatgcttattgcgacagaagggatagagaaaggagctatgaccgtga

SEQ ID NO: 406974 - DNA, 302 bp, Oryza sativa
tttcgacctcgacgagcccgtcaggctccccggctgcgtgcccatcccggggaaggacatcctcatgccgctccaggacaagtccagggcgtgctacgggtggatggtgcaccacggcacgcgctaccgcgacgccgacgccatcctcgtcaactcgttcgacgccgtcgagcccgacgccgccagggtgctccgccacccgaagcccggcgtcccgccggtgttccccatcggcccgctgatacagacgcactgcgccggcgacgacgacgccgcggcgccttcctcgtcgcgcgccgtgt

SEQ ID NO: 406975 - DNA, 302 bp, Oryza sativa
ttttattgcgtgcgatcacattcttttgaaatggatccttctcaggttgagaatgtgaagcagcgtggcttgccacatgcactgatcttgcccatgctgcaggagtacgattttagaaacgacacagtgaacccagatatggagatggaattaaagtcccttgctcgcccaaggccatatcaagaaaagagcctcagcaagatgtttgggaatggcagaacaaggtcaggcatgattgagttaacttgtggtgctggaaagttcttggttggtgtatatgctgcatgtacaatcaagaagag

SEQ ID NO: 406976 - DNA, 515 bp, Oryza sativa
tttttgcatctattcagttgcagattgagagccaaagacattatattgattctatcaggagggttgtgctagcgaattcttgttagcaacaaattgacatattgctcggcacatccccaccgagaataccaagatgacgttctctggtacacaggacaagtgcaatgcttgtgacaagaccgtgcatttcattgatctccttaccgcggacagtattccctaccacaagtcttgcttcagatgcagccactgcaaaggcacactttcgatgtgcagctattcgtccatggatggggttctttactgcaagacccattttgagcagctattcaaggaaacaggcacctttaagaagaacttcccctcaggtacaaaggcaaacagtgaacaggctaagattcccagcaagctgtcctctgtgtttctgggaacccaggacaagtgtactgcctgcaagaagactgtgtatccattggagaagatgaccatggagggtgagtgttaccacaggacct

SEQ ID NO: 406977 - DNA, 480 bp, Oryza sativa
ttttataggcgctaggcgccataagcatcgccgcgatgctgtcgttcgtggcgtcgttcgcctcggggctgggccccgtcgcgtgggtgtacacgtcggagatctacccggtgcggctgcgtgcgcaggcggcggccatcgggacggggctgaaccggctgatgagcggtgccaccaccatgtccttcctctcgctctccaacgccatcaccatcgccgggagcttctacctgtacgcgtccatcgccgccgcagggtgggtgttcatgtacttcttcctgccggagaccaagggcaagagcctggaggacaccgtgaagctcttcggcaaggacacagacgacgacgatgacgtcgacactagccgccatgagcgcaagaggtccactgagctgagcgctcagcactgaacagaacacgtccgttccgagtccgagtgtggtcgaagcctattcgttctccgatagaaaaaagcttcga

SEQ ID NO: 406978 - DNA, 486 bp, Oryza sativa
ttctagttccaagaaaattccagttatggaatgggaagtctcgaaagttttggaggagcttgaactcactatggaccaattcattgacttgtgcatcctatctggatgtgactattgtgatagcattaaaggtattggaggtcaaacagctctgaaacttattcgtcaacatgggtccatagaaagcattctggaaaacataaataaagacagatatcagattcctgaggactggccttatcaagaagctcgacgcttgttcaaggaacccaatgttacattggatattcctgagctgaaatggaatgctcccgatgaggaaggtcttgtagagtttctggtgaaagaaaatggtttcaaccaagatagagtgacaaaggccatagagaagattaaatttgccaagaacaaatctttccaaggaaggctcgaatccttcttcaagccagttgttagcacatcagcgcctctgaaaagaaaggacac

SEQ ID NO: 406979 - DNA, 460 bp, Oryza sativa
tttcaaataaacaaaccacttcaaattggtcggagaagaagagggcgttcgcgcatggggaaggcggcgagcatgagggtggcgctggtgtccgtggtgctcgtgggcctgatcctggtttccacggcccacgccgcgcggcccgagaagctgcccgccgtcgtctccccctccatcgcccccgccgtcgccgaggtcgtcgatgccgccatcaacgccgtcgacctcctggcagggtttcaaaaaccggcgggggcccggttaccgccacccggcggtacggcggttaccggcggtaaccgcgcaaaaccgcgacaaatttacaaatcgaaatttggatttcaaaattcgggcaaaccgggcggtttgacgcgggtaccacgcgggttggcgcgattaccggcgatgtgtaatgggtggacagtaccggcccggccatttttttttttttttcattttt

SEQ ID NO: 406980 - DNA, 461 bp, Oryza sativa
ttttggattctgaaaatagcttcttaagagtaaagattataaactttgggtctgatccagtgagcctcacgatctctgcaactgggcttcaggcccgtgttaacgcactgggatcaactgccactgttatcacatccagcaatgtgatggatgagaactcttttagtaacccgaataaggttgttcctgtcaaaagccagctttccaatgcagcagagcagatgcaagtcacgcttgctcctcactctttctcctcattcgatcttgcgcttgcccagtccaaactcgtggcagagatgtgaagcaggaacacaaggttagcgacagaaacacaagatatacacgagatgtgatatgcgaataccagaatgcagtccatatatgtgcatgtatcttgaagcactactgtatagtgtaatacacaggaaatgatgaataaattaactccagcttactttctt

SEQ ID NO: 406981 - DNA, 487 bp, Oryza sativa
ttcgaccaccgcgctcgtcccatcccatgcctgcggccgtgaccgcgaggttgtgaggagaagagagtcccaagagaggaggatcgatgcggcagcggcaggccggcgagcaggaggcggagctgttcgtccagtggaggccctgcgacaagaagcggtcctagtcgcccgccgccgctcgcccactcgccggcgtcgtcgatctgagagggacaggggaagaggaagaagcacaggaggaggaggatgagcgtgtcgggcgggaggacgcgggtgtggaggtacgagctcgggaggacgctcggcgagggcaccttcgccaaggtcaagttcgcccgcaacgcggactccggcgagaatgtcgccatcaagatcctcgacaaggacaaggtcctcaagcacaagatgatcgcccagataaagcgcgagatctccaccatgaagctcatcaggcaccccaacgtcattccgatgcatgaggtgatgg

SEQ ID NO: 406982 - DNA, 288 bp, Oryza sativa
cgagaaaggcgttctcgtactggggtgggtccgagccgccgggcttttcctcctcctctcccctctctcccttctccggcggcgtcgcaagaataacccaaatccggcgccatgagggagtgcatctcgatccacaatggccaggccggtatccagggcgggaacgcgtgctgggagctctactgccccgagcatggcatccaggctgatggtcagatgcccagtgacaggactgttggtggaggtgatgatgctttgaacaccttcttcagtgagactggtgctggg

SEQ ID NO: 406983 - DNA, 216 bp, Oryza sativa
ttgtaggtggacatatgccagaaacccaaacaaaaggtttatgggtctggggtactcccattgagttagatgtgaatggctccaaagcttctggcctttacctggacactgagggatttgagagcatcggaaaattcaaatgatatgatgataggatatttgctctggccactggtttaagttctatccttatctacaaggttccagagacgattt

SEQ ID NO: 406984 - DNA, 496 bp, Oryza sativa
ttttattgcaagcaatttctccatcacagaagtcaccaatgggctccgccaagctcattgctgtagtcctcctcccggcccttctggccttccaagctccaatggccacggcagtaaactccaacctcttccgggactacatcggcgccatcttcaacggcgtgaagttcaccgacgtgccaatcaatccgaaagtccggttcgacttcatcctcgccttcatcatcgactacaccaccgagacgaacccgccgaccccgaccaacggcaagttcaacatcttctggcagaacacggtgctcaccccgtcggccgtcgcgtcgatcaagcagagcaaccccaacgtgagggtggccgtcagcatgggcggcgccaccgtgaacgaccgcccggtcttcttcaacatcacctccgtcgactcgtgggtaaacaacgctgtcgagtccctcaccggcatcatccaggacaacaacctggacggcatcgacatcgacta

SEQ ID NO: 406985 - DNA, 496 bp, Oryza sativa
ttctgtgacctagctagtcgatcggtcatgtggtcgcagcaatggcttggtgacggcacggcgcggaggtggagggagctccatggtgagagcgactgggacggcctcctggacccgttcgacctcgacctccgccgcaccgtcatccgctacggcgagatggcgcaggcgacgtacgacgccttcaaccacgagaagctctcgccgcacgcgggcctctcgaggttcgccgcgcgccgcttcttcgagcgggcgcagctgccgggccactccgcggtgtaccgcgtcgccaggttcgtgtacgcgacgtcgtgcgtcgccgtgccggagccgctcatcctccggtccgcgttgcgcgcgcgcaggtgcagggagagcaactggatcgggtacgtcgcggtggccaccgaccaaaggaaggctgcgctcgggcgccgcgacattcgtcgtcgcgtggcgcggcacggtgcaatcgcttgagtggaatcaaggacat

SEQ ID NO: 406986 - DNA, 494 bp, Oryza sativa
ttattatatgggttcatgacatcagaccaccagtacatatctcgaaagcatgaagaggataagatgattatatttgagaagggagatctggtatttgtgttcaacttccattggagtaacagctattttgactaccgtgttggttgtttaaagccagggaaatataaggtggtcttggactcagatgctggactctttggtggatttggcaggatccatcacactgcagagcacttcactgccgattgttcacatgacaacaggccctactcgttctcagtttattctcctagcagaacctgcgttgtctatgctccagcggaatgagaacaccaagaggcagcatgcaagtgtgtgcggctgctagtgcgaaggagcaagaaaaactacttgccagcaatctgtgaacggctttcctaggttctgcttcgatgaatgccggatagactagacagcttgcttttgtgctttgcgctcccaatttgtagttttag

SEQ ID NO: 406987 - DNA, 219 bp, Oryza sativa
tgttcagagaaaggcgtcttcgtactcgcctgtgtccgcgcctccgcgcttttactcctcctctgccctctcttcctttttcgccggcgtcgcaagaatcaacccaaatccgccgccatgagggagtgcatctcgatccacaacggccaggccggtatccaggtcgggaacgcgtgctgggagctctactgccccgagcatgggatccaagctggaggt

SEQ ID NO: 406988 - DNA, 319 bp, Oryza sativa
ttttagttggacatatgcgagataccaaaacaaaaggtatatgggtctggggtactcccattgagttagatgtgaatggctccaaagtttctgtcctttacctggacactgagggatttgagagcatcggaaaatcaaatgtatatgatgataggatatttgctctggccactggtttaagttctattcttaattaccatctttccaagaccatttggggagcttatttatctagacttttatttggtggtggaaatggtgaagaaattttatgaaaaagggaagggccagaatgttgttttggagccaccaaacctcc

SEQ ID NO: 406989 - DNA, 497 bp, Oryza sativa
tctctccggtctaatccgattcaaacccgcgggttccaagcttgctctcctctcccccccaatccttccctcccgagtggcagggtgctcgacgggatggcgcacaaggaggccaatggcagcagcaacggggagcacaccacccgcccgccgccgacgccctcgccgctccggttctccaagttcttccaggcgaacctgaggatcctcgtcaccggcggagctggcttcatcggctcgcacctcgtcgacaagctcatggagaacgagaagcacgaggtcattgtcgcagacaactttttcactggttcaaaagacaacctgaagaagtggatcggacacccaagatttgagctaatccgtcatgatgtcacccagcccctgcttgtggaggttgaccaaatctatcaccttgcttgccctgcttcaccaatcttctacaagcacaaccctgtcaagaccatcaagacaaacgttatcggaaccctgaacatgct

SEQ ID NO: 406990 - DNA, 440 bp, Oryza sativa
tcgagcatattgagcttcgatcgcagccaggggaactctcgcgcgcgcagccggcaatggcgtcgctgtctgacccgaactcgccgccgcacgcacgtagacgaggactgccgcggtgcgctgcagctgctcagcgacggcacgggtgttcgagccgccgagccgccgccgccgatctacgtacgctcggacattgacgacggccgtgaccagtggaaggacgttgtgtacgacgccgcccacggcctcggcggtcggatgtacaggccggcggcgacggggggagcggaggacaagctgccggtggaggtgcacttccatggcggcgggtactgcatcggatactgcacctggcccaacttccacgccggatggcttcgggtcgacggcgagctacccgccgtggtgatctccttagactaccgcctagcgccggagca

SEQ ID NO: 406991 - DNA, 514 bp, Oryza sativa
gcgtttgcggggtttttagttcggctttgagagctggaggcgcaggctgggatcggcggagccatgtcgtcgcttagcagggagctggttttcctcatcctgcagttcctcgatgaggagaagttcaaggagacggtgcacaagttggagcaggagtcggccttctacttcaacatgaagcactttgaagacctggtgcagggaggggagtgggacgaggtggagaagtacctcagcgggttcaccaaggtggaggacaaccgctactccatgaaaatattcttcgagatccggaagcagaagtacctcgaagcccttgacaggcatgatcgagccaaggcggtggagatactcgtgaaggatctcaaggtgtttgcctcattcaacgaggagctgttcaaggagataacacagctgctgacgttggagaattttaggcaaaatgagcagctgtccaagtatggggacacatagtcagctcggaatatcatgctcatggagctcaagaagctta

SEQ ID NO: 406992 - DNA, 515 bp, Oryza sativa; identical to SEQ ID NO: 393659
  unsure (1)..(515): unsure at all n locations

SEQ ID NO: 406993 - DNA, 527 bp, Oryza sativa
aattgaagcttggtcacagattattgaatgcaggcgggtactcaaatggacatatgcttatggctattatctggacgacaaggtcaagagcgaatttttcgagtacctgcaaggtgaagctgagtctggtctggagcgtcttcaccaatgtgctgagaaagacctgcaatcatttttgactgtgagatctgataatactgaacctgcaccatcaattgctgaattcggtgacttccgggtgaagcttgcggggctgacaagtgtgactcggaattattttgagaaccttgttcaagcactggaggctggcttggaggatgtacactctactgcccagggtaccacatcaagcaatgccaccaacatcccctccaagaaagcagtcactaaaggcaaaacaaagaagcagcttcctagaacatcttcggacaactcagatgaaggctggccttgtgagcgctgcacgtttattaacccttcatcggtggatgcatgcagcgtctgcgataagcatagatactagatga

SEQ ID NO: 406994 - DNA, 458 bp, Oryza sativa
  unsure (1)..(458): unsure at all n locations
agtttttgtcgcgtcgcaccgaagcagagtagagaaggagaggagcggagcgccatcagccgcgccatcgagtgatccgatggctctcgctctctccacctctgctgctgctgccgctgccgccgcggcgcgggcgctcgcggcgagggtgacgacgacgaggggttacgccgcgtcggcagcgtcgtccgcgatgaggcgggcggcggcggcggtggttgggaagggcgctgcggggatgacgcacgccaaggacgggtcgtcgacgccggctgcgagggaggggtcgtgggtgcccgaccccgtgacggtccactacacgccctncaacttcgccggcggagagaacgctgtcgacggttacaccggccacctngnccgtagttacgcccgcgcgtgatgcgcgcgacctccccatcggaacgaccgacgacgacgccatccatccatatatatct

SEQ ID NO: 406995 - DNA, 522 bp, Oryza sativa
ctttgtactcgcctctctccgcgccctcctccgccgccgctcgccgtcgttcgtctccgccgccaccgccgccgccatgagggagtgcatctcgatccacatcgggcaggccggtatccaggtcgggaacgcgtgctgggagctctattgcctcgagcatggcatccagcctgatggacagatgcccggcgacaagaccgttgggggaggtgatgatgcttttaacaccttcttcagtgagactggtgctgggaagcatgtcccccgtgctgtcttcgtcgatcttgagcctaccgtgattgatgaggtgaggactggtgactaccgccagctcttccaccctgagcagttcatgaggggctaggaggatgcagccaacaactctgcccgtggtcactacaccattggcaaggagattgttgatctgtgccttgaccgcatcaggaagcttgacgacatctgtactggtctacagggcttccttgtgttcaacgctgttggaggaggaacgggctccggtct

SEQ ID NO: 406996 - DNA, 495 bp, Oryza sativa; identical to SEQ ID NO: 393660

SEQ ID NO: 406997 - DNA, 525 bp, Oryza sativa
ggccgcccgccgctcgcccgcttcccctccggcgacttcctcctctcgcagagccccatctccttcgacgacctccgccacgccacctcccaggttggggatttcggagcggacaatcgagctggaattagccggacgctgcaccggatcagcgcgattcgcaaccggaagggcgccatcataggcctcacttgccgggttgggcgtgccgtgcctggaagtgctaatttgctgcaggatttggtgaaggatggtgggtcattgctgctcatcggtccaccgggtgtggggaagacgactgtcataagagaaatcgctcgaatgctagctgatgattataggaagagggtgatgattgttgacacatccaatgagataggtggagatggagatattcctcacccaggaataggcaatgcccgcaggttacaagtgcctaaccaagatatgcagcataaggtattgatagaagctgtggaaaaccacatgccccaggcaatagtcatcgatgaaattggaacgaag

SEQ ID NO: 406998 - DNA, 522 bp, Oryza sativa
acgtcctccccagtggcggcgagcgcccccccccccccacccccacccccgaggaagaagaagaggaggaggaaggttttgcgcgccgttcgcggattcctctccgtcctcacgccccggattcggttcgtcccgcggtcccgattagactgaagaatgaggatggacaggaatgaggaagagatggtcacgaatgactcggaccctcttctcaagagggaaaacgaggaggcagagtcatcgtcgcagctgacaccgcctaagccagcaaccttgagcgcgctggagattgaggatgaggagaccgacggttcttctgcagggtgctgccgcatttgtctcgagactgattctgagttaggtgatgaactgatatcaccttgcatgtgcaagggaactcaacaatttgttcaccgctcatgccttgaccactggagatctgttaaggaaggatttgcattttcacattgcacaacatgcaaagctcaattccatctccgagtggaaacttgcgaggacaat

SEQ ID NO: 406999 - DNA, 520 bp, Oryza sativa; identical to SEQ ID NO: 391473

SEQ ID NO: 407000 - DNA, 489 bp, Oryza sativa
cccattttcaacaatggcatcctcttgtctccttctggcctgtgtcgtggcagcggccatggtgtctgcagtgtcatgtgggccgcccaaggtgccgcctggccccaacatcactgcggcctacggcaaacagtggctggaagctaggggtacctggtacggcaagccaaagggtgccggccccgacgacaacggcggcgcttgtgggtacaaggacattgacaaggctcccttcctcggcatgaactcatgtggcaatgaccctatcttcaaggatggcaagggctgcggctcctgctttgaggtcaagtgttccaagccagaggcctgctccgacaagcccgtcatcatgcacatcaccgacatgaacactgagcctatcgccggctaccacttcgacctctgcggacatgcttttggtgccatggctaatgaaggcaaggatgaggaactccgcaaggcgggaattatcgatatgcagtttcgtcg

SEQ ID NO: 407001 - DNA, 490 bp, Oryza sativa
gagttctcgaggtaaaccaaagttctttttccgatggctcgtactaagcaaactgctcgcaagtcaactggaggaaaggctcccaggaagcaacttgccaccaaggctgctcgtaagtctgctcccacaactggaggagtgaagaagcctcaccgttaccgccctggaactgttgctcttcgtgaaatccgcaagtaccagaagagcactgagctgctcataaggaagcttccattccagaggcttgttagggagattgcccaggattttaagactgatcttcgtttccagagccatgcggtgcttgcccttcaggaagctgccgaggcgtacctggtgggtctcttcgaggacaccaacctgtgcgccatccatgccaagcgtgtgaccatcatgcccaaggacattcagctggctaggaggatccgcggtgagagggcttaagctttctcatctctgggaggggctctgggtgttcatctgtgactac

SEQ ID NO: 407002 - DNA, 409 bp, Oryza sativa
  unsure (1)..(409): unsure at all n locations
ggctcagcttgacatcgtcggagcagcagaaaagtttgctcgatcgagctagctaactaggtcgtcggatcagtgataaatcgttcgccgatggatccgtggattagcacccagccttcgctgagcctggacctccgcgtcgggctgccggcgacggcggccgtcgccatggttaagcccaaggtgctcgtcgaggaggacttctttcaccagcagcctctcaagaaagacccagaggttgcggcgctggaggcggagctgaagcggatgggcgcggagaaccggcagctgagcgagatgctggcggcggtggcggccaagtacgaggcgctgcagagccagttcagcgacatggtcaccgccagcgccacagcgggggnngaattaaagatcagctatcacctcacct

SEQ ID NO: 407003 - DNA, 506 bp, Oryza sativa
cactttctctccttcctcttcctctgctcactcagctctcccccgcgcgcgccaccgtcgtcgccatgtcgggcaacatcgccttcggccgcttcgatgactccttcagcgcggcctccctcaaggcctacgtcgccgagttcatctccaccctcgtcttcgtcttcgccggcgtcggctccgccatcgcctacaccaagttgaccggcggcgcgccgcttgacccggccgggctggtcgccgtggcggtgtgccacgggttcgggctgttcgtggcggtggccatcggcgccaacatctccggcggccacgtcaacccggccgtcaccttcggcctcgccctcggcggccagatcaccatcctcaccggcgtcttctactggatcgcccagctcctcggcgccatcgtcggcgccgtcctcgtacagttctgcaccggcgtggcgacaccgacgcacgggctgtccggcgtgggcgcgttcgagggcgtggtgatggagatcatc

SEQ ID NO: 407004 - DNA, 507 bp, Oryza sativa
ggttaggctgccaagaaccaggcagctgtgaacccagagaggaccatcttcgatgtcaaacgtctcattggaagaaagtttgaagacaaggaagttcagagggacatgaaacttgtcccctacaagattgtgaacaaggacggtaagccctacattcaggtcaagatcaaggatggagagaacaaggtcttcagccctgaggaggtcagtgctatgatccttggaaagatgaaggagactgctgaggcataccttggcaagaagatcaacgatgctgtcgtgactgttcctgcgtacttcaatgacgcgcagaggcaggcaaccaaggatgccggtgtcattgctggcctgaatgttgctaggatcatcaatgagccaactgctgctgctattgcgtacggtttggacaagaagggtggtgagaagaacatccttgtctttgaccttggtggtgggacattcgatgtcagtatcttgaccattgacaacggtgtgtttgaggtgttg

SEQ ID NO: 407005 - DNA, 522 bp, Oryza sativa
gcgtaaaatcatcctccctccctttctcgcgtgtcgcgtcgtccccaaatccgctactcgctatcctccttcctccatgattcccttctcgaatcttctcactttcttctgaagtgctccgctccgctccgctccgatccaatccactccgcccgagtcccccacccatcggcacccaccagcgcgagggtgggtggccatcgatcgatcggcccatcgccgattcccgcgggatctgcggcggcgcggggggatttgatcggagggtgaatatgtcgacgccagcaaggaagaggttgatgagggatttcaaacgactgatgcaggatcctccagctggcataagtggggccccacaggacaacaatataatgctttggaatgctgtaatttttggccctgatgatactccttgggatggaggtacgttcaagctgacacttcagtttactgaagattatcctaacaagccacctacagtgcgatttgtttctcggatgtttcatcctaacatttatgctg

SEQ ID NO: 407006 - DNA, 525 bp, Oryza sativa
tttctggattgcgtgcagatgtggtccgatttgtgcaaagttgtgacatctgtcagcgcgccaaatcagaacatgttcagtatccggggtttttacaaccattgccagtccctgatcagtattggcaagtggtttctttggatttcatcgaaggccttcctcgttccgcgtcattcaattgcatcttagttgtggttgacaagttctctaagtattcacactttgtggccttggcacatcctttcacagctcttgaggtggctgaatcttatgtgcaaaatatacatcgactgcatggtttacctcaagttatcatctctgatcgggatcgcattttcactagcacattgtggacaactctttttcgattggcaggttcccaattaaagatgagttatcaccttcagacggatggacaaaccgagcgagtcaatcagtgtttggagacgtttttgcgttgctttgtgcatgcttgcccttccaaatgcagccgctggctggccctcgctgagtactggtataata

SEQ ID NO: 407007 - DNA, 530 bp, Oryza sativa
  unsure (1)..(530): unsure at all n locations
ttttcacggacaagcaagtgaccccacaggtcagccatgatggccaagttctggaattcgctcctcctcgaagactgaaaacagaggagatcccaaacatcgtcgacgactttcgtattgctgccagaaatgccatcgaggccggtttcgacggggttgagatccacggcgccaatggttacctgatcgaccagttcatgaaggacagcgtcaacgaccggaccgacgcgtacggcggcggcatagagaaccggtgccgcttcgccgcggaggtgatcacggcggtggccggcgagatcggcgcgcaccgcctgggggtgcgcctctccccgttcgccgactacatggactgccacgactccgacccggaggtcctcgcgctgcgcgtgatcggtctcatgaacaacctcggcgttctctactgccacatgatcgagccgagaatgtgcgtcggcgccggcgaggacggcaacaagccggtgatcgcgcacgggcgnctgcttacgttcaggagggcgttccgggcacgt

SEQ ID NO: 407008 - DNA, 515 bp, Oryza sativa
cggtctcgtgggcgcaaagttccaatttcttcaagccgaattaatccctataggatgattataattatccggttggtggttttggggttcttcttccactaccgagtgatgcatcctgtgaatgatgcatttgctttgtggctcatctctgtaatatgtgaaatctggtttgctatgtcttggattcttgatcaatttccaaagtggcttcccatagagagggagacgtacctggaccgcttgtcactgaggtttgacaaggaaggtcagccatctcaacttgctccagtcgacttctttgtcagtacagttgatccatcgaaggaacctcccttagtcacagcaaacaccgtcctttccatcctttctgtggattacccagttgaaaaggtttcctgctatgtttctgatgatggtgctgcaatgctcacatttgaagcactgtcagaaacatctgaatttgcaaagaaatgggtccctttctgcaaaaagttcaatatcgagcctcgtgctcc

SEQ ID NO: 407009 - DNA, 506 bp, Oryza sativa
ctcttttcggcaggagtggaggccctcaccgggggacttccatttcctgctcctcgtgttctcccacctccaatctcaggatggagcgcgcacgccgcctcgccaaccgcgccctgctgcgccgcctcctcgcggcggcggcgtccaccacgtccccggccccgtcccgcggcatctcgaccctggccaaggcgcccggggcggggtcgcgcccgcgcgccccgcgcccggcgccccaccagtacaccacggggcggcccgtgtcggcgtcggcgctgcagccgagcgacacgttcccgcggaggcacaactcggccacgccggcggagcaggcggcgatggcgtcggagtgcgggttcaacaccctcgacgcgctcatcgacgccaccgtcccggccgccatccgcgcgccgacgatgcactttttcgggaagttcgacgccgggtttaccgagtcccagatgattgaccacatgcagcgcctggcggccatgaacaaagcctac

SEQ ID NO: 407010 - DNA, 527 bp, Oryza sativa
  unsure (1)..(527): unsure at all n locations
gtttcagcaaatctcctcctccgtctgcggccagaattgcaagagctacctggcgaactcgctgttcgtgttcggggagttcggcggcaacgactacaatgcgatgctgttcggagggtacagcgcggaccaggcgagcacgtacacgtcgcagatcgtggacaccatctccaacggcgtcgagaagctcatcgccatgggcgccgtcgacgtcgtcgtccccggcgtgctccccatcggctgcttccccatctacctcaccatctacggcacctcctgcagctccgactacgacagcctcggctgcctgaagaagttcaacgacctctccaccaaccacaacaatcagctcaagaccaagatctccgcgctccaatccaagtacaagtccgcccgcatcatgtacgccgacttctactccggcgtctacgacatggtccgcaaccccggcaactacggatttagcacggtgttcgagacgtgctgcgggtcaangcgcggcaagttcaactacaacaacaacgcga

SEQ ID NO: 407011 - DNA, 509 bp, Oryza sativa
ttttgtcttcctcgcgtgcagaataaccacttcaccgccggatctcacggcgccccaagtttaggcgtttacctaaccaccccacgaatcccagccgccgccgccgacgagcaggaggagcgatctgactagtaagccggagcacatggagagctcgtcgccgtcggtgccgttcccgctgctgcaggcgccggtggagagcacgtacagggcctgcaccatcccctaccgcttcgcctccgacaacccgcgaaaggccacccccgtcgagatccagtggatcgacctcttcctcaactccgtcccctccttcaggcagcgcgcggagaacgaccccacggtgcccgatgcgcccgccaaggccgagaagtttgcccagaggtacactgcaatgctcgaggagttgaagaagaacccagagagtaatggagggccaccagattgcattcttctttgcaggcttcgtgagctagtccttagagaactgggatttagggatatattcaaga

SEQ ID NO: 407012 - DNA, 506 bp, Oryza sativa
  unsure (1)..(506): unsure at all n locations
tttttgcagcagcagcagcagctgagcttgaagcagcagagcgaggtagacatggccgccgccaccatggccctctcgtccccggcgctggccggcaaggccgccgcgaaggtgttcggcgaggggcgcatcaccatgcgcaagtcggcggcgaagcccaagcccgccgcgtcggggagcccgtggtacggcgccgaccgcgtgctctacctcggcccgctctccggcgagccgccgagctacctgaccggcgagttccccggcgactacgggtgggacaccgcggggctctccgccgacccggagacgttcgccaagaaccgggagctggaggtgatccactccaggtgggcgatgctcggcgcgctgggctgcgtgttcccggagctcctcgcccgcaacggcgtcaagttcggcgaggcggtgtggttcaaggcggngtcgcagatcttcagcgagggcgggctcgactacctcggcaacccgagcctgatccacgcgcagag

SEQ ID NO: 407013 - DNA, 524 bp, Oryza sativa
  unsure (1)..(524): unsure at all n locations
ctttctcgagcctcatttcccccccaatcttcttcccaaaagcagctccatccaaacccaatcaagccccactccccaccaacccccttccctcaattataagcctacaactactgctgattgcttcagactgatccaagaaagggaagtttggttgtggtgcagagaggtgcagaagggggagggagggctctgaattttcaagaaagggaccatctttctgctgctgctgctgtccgggttggtgcttgttgaatttgaggctaaagaagtcggaattggaggttttgtaagagggaaacaatggctggcaaggaaatctaccacaagatgaaggacaaggtgaaagatgcttttagttcgtcaggaccagaaacagggaaaggaaaaacaaaattgtcaggcaagcgtgtcaagcatggttaccatcttgtgaagggaaaatcaaatcatccgatggaggactatctagtggcagagtacaggcaagaaggagagcatgatcttgggctgnttgcaatatt

SEQ ID NO: 407014 - DNA, 506 bp, Oryza sativa
ttttatctttgcttctaattttgtacctttgtggttaaatgctcaacattcaggcttggagcaatttgtcgatgaggcaaaatcagtgagagtcatgagaagcctccagaaatcaggattactgcaacctgcaggaatcgcaacttccttatcaaacacagggcaacaatgggattttccaaacggatgggccccgttgcagcatctgatagtcgagggattgttgaggtctggttcaggagaggcaagggaacttgctgaggacattgccacgaggtgggtgagaacaaactatgatgcctataaggctaccggcgcgatgcatgagaagtacgatgtggtgacctgtggaaaatctggaggtgggggtgaatacaaaccccagactggttttggttggtccaacggtgtgatattatcattcttggatgaatttggatggcctcaagacaagaagatagactgctagtcatcatgatgaattgtaaaccccatcttcgcagatg

SEQ ID NO: 407015 - DNA, 522 bp, Oryza sativa
gcgtattaactaactagctaggccggccatggagacggtggccgcggccagctacacccgcggggcggcgacgcgctcgccagcgtgctgcgccgccatgtccttctcgcagtcctacaggcccaaggccgctagaccgccgagcacgttctacggcgagtcgctgcgggttaacacggcgaggtcgctgccgtctgggaggcagtccaaggcggcgagccgggcggcgctcagcacccggtgcgagatcggggacagcctggaggagttcctgaccaaggcgacgccggataagaacctcatcaggctgctcatctgcatgggggaggcgatgaggacgatctcgttcaaggtcaggacggcgtcgtgcggcggcaccgcctgcgtcaactccttcggtgacgagcagctcgccgtcgatatgctcgccgacaagctcctcttcgaggctctggaatactctcatgtctgcaagtatgcgtgctccgaggaagtccccgagctgcaagacatgggtggacc

SEQ ID NO: 407016 - DNA, 510 bp, Oryza sativa
gtccatggcgttcgcgaagcgggagaagcagtccatcaagaagctccagtcgtcgctcaagaagtacgcgccggactccgcgccggcgctcgccatcaacgccaccatcgagaagacgaagcgccgcttcgagaactacggcaagttcggcctgctctgcggcgccgacggcctcccgcacctcatcgtcagcggcgaccagcggcactggggcgagttcatcaccccgggcttgctcttcctctacatcgccggctggatcggctgggtcggcaggagctacctcatcgccatcagcggcgagaagaagccggccatgagggagatcatcatcgacgtcgagctcgccgtcaagctcctcccgagggggttcatctggcccgtcgccgcctaccgtgagctcatcaccggcaacctcgtcgtcgacgacgctgacatcggctactgatcaccacatggatgcttggctactcaagccccagttgatttggcagtggaggaagagggctc

SEQ ID NO: 407017 - DNA, 501 bp, Oryza sativa
tgcacttgcactgcgccatggcggcctcgaccaccctcgccttatcccaccccaaaaccctagccgccgccgccgccgcggcccccaaggccccgacggcgccggccgccgtctccttcccggtctcacatgccgcctgcgcgccgctcgccgcccgacgccgcgcggtcaccgccatggtcgcggcgccgccggccgtcggggccgccatgccgtcgctcgacttcgacacatccgtcttcaacaaggagaaggtctccctcgccggccacgaggagtatatcgtgaggggtgggaggaacctgttcccgctgcttcccgaggcgttcaagggcatcaagcagatcggagtgattggatggggctctcaggggcctgcacaagcccagaacctgagggattcactagctgaagcgaagtctgacattgttgttaagattggtctccggaaaggctctaagtcatttgatgaagcacgtgctgctggctttactgaagaga

SEQ ID NO: 407018 - DNA, 517 bp, Oryza sativa; identical to SEQ ID NO: 393938

SEQ ID NO: 407019 - DNA, 502 bp, Oryza sativa
accttaacctgctgcttttgctttggttaattagctgagagagaaattaagagagagatgagttgcagcagcagcaacagcagcgtccatggcttcttgtggctgatgctcgtttatgcgttctgtgcagctgttcaagctcagcaagcagcgagaactgatccagcagaagtggctgcactgaacacgatcctggggagatggggcctgcgggcgtcgccggcgtggaacatcagcggcgagccctgcagcggcgtcgccatcgacgagaccggcgtcgacaacaaccccaacatcaacccggccatcaagtgcgactgctccttcaacgccggcaccgtctgccacatcatcagactgagagtgttctcgttgaacgttgttggtcaaatacctgaggagctgcagaatctctcttatctgaataacttggatcttcggcgaaattacttgacgggtcccctgccatcctttattggaaacttttctgccatgcagtact

SEQ ID NO: 407020 - DNA, 521 bp, Oryza sativa
gttttgttgttagcttcgttttcttcttgtttcatcaatccaaggagtgtggaaggccacacgccaagattatatctatgctaatttgattagcagtaggattaattcagtggctagcgtagcttgattagttggtttaattagttggagagtaaagaagatgttgggagtgttcagcggcgacgtggtggaggtgccggcggagctggtggccgccggcagccggacgccgtcgccgaagacgcgggcgtcggagctggtcagccgcttcctcggcggcgccgagccggccgtgtccgtgcagctcggcgacctcggccacctcgcctactcccatgccaaccaagccctcctccgcccaaggtcatttgcagcaaaagatgacatcttctgcctgttcgagggagtcctggacaatcttggcaacctgaaccagcagtatggtctgtccaagggtgccaatgaggtgctccttgtgatcgaggcgtacaagacgctgagagacagagcaccttaccctg

SEQ ID NO: 407021 - DNA, 502 bp, Oryza sativa
  unsure (1)..(502): unsure at all n locations
aacttttacaagaggtacgtgatacacatcaaggccggggcgtacatggagaacgtggaggtggggaagagcaagaagaacctgatgttcatcggcgacggcatcggcaagaccgtcatcaaggccagccgcaacgtcgtcgacggctccaccaccttccgctccgccacagtcgctgtggtgggcaacaacttcctggcccgcgacctgacgatcgagaactcggccggcccgtcgaagcaccaggcggtggcgctgcgcgtgggcgccgacctgtcggcgttctaccggtgcagcttcgtcggctaccaggacaccctctacgtccactccctccgccagttcttccgcgagtgcgacatctacggcaccatcgacttcatcttcggcaactccgccgtcgtcttccagagctgcaacctctacgcgcngccgccgctccccaaccagagcaacgtctacaccgcgcaggggcgggaggaccccaaccagaacaccggca

SEQ ID NO: 407022 - DNA, 527 bp, Oryza sativa
  unsure (1)..(527): unsure at all n locations
gtctttgtactcgcctctctccgcgccctcctccgccgccgctcgccgccgttcgtctccgccgccaccgccgccgccatgagggagtgcatctcgatccacatcgggcaggccggtatccaggtcgggaacgcgtgctgggagctctattgcctcgagcatggcatccagcctgatggacagatgcccggtgacaagaccgttgggggaggtgatgatgcttttaacaccttcttcagtgagactggtgctgggaagcatgtcccccgtgctgtcttcgtcgatcttgagcctaccgtgattgatgaggtgaggactggtgactaccgccagctcttccaccctgagcagctcatcagtggcaaggaggatgcagccaacaactttgcccgtggtcactacaccattggcaaggagattgttgatctgtgccttgaccgcatcaagaagcttgccgacaactgcactggtctccagggcttccttgtgttcaacgctngtggaggaggaacgggctccggtctcgg

SEQ ID NO: 407023 - DNA, 512 bp, Oryza sativa
tgcttgcaaagctggtcgtgtcactcctcccgttaagcttcccgcggcggcgagagcaagctaagctaggtcgggcatggggaaggacgaggtgatggagagcggcggcgccgccggcgagttcgcggccaaggactacacggacccgccgccggcgccgctgatcgacgcggcggagctggggtcgtggtcgctgtaccgcgccgtcatcgccgagttcatcgccacgctgctgttcctgtacatcaccgtggccacggtgatcgggtacaagcaccagacggacgcgtcggcctccggcgccgacgcggcgtgcggcggcgtgggcgtgctcggcatcgcgtgggcgttcggcggcatgatcttcatcctggtctactgcaccgccggcatctccggcgggcacatcaacccggcggtgacgttcgggctcttcctgccgcgcaaggtgttcctggtccgcgccatcctctacatcgtggcgcagtgccttggcgccatctgcggcgtct

SEQ ID NO: 407024 - DNA, 521 bp, Oryza sativa
gagtactcgaactctcgcctaccatttcgcccccctccgcaagcaatccaccactgcatcggcggcgagggctcaccggcggcgagccatgtgcggcggcgccatcatccaccacctgaaggggcacccggaggggtcgcgccgggcgacggaggggctcctgtggcccgagaagaagaagcccaggtggggcggcggcgggaggcgccacttcggggggttcgtggaggaggacgacgaggacttcgaggccgacttcgaggagttcgaggtggactccggggactcggatttggagctcggggaggaggacgacgatgacgtcgtcgagatcaagccggccgccttcaagagggccctctccagagataacttgagcaccattaccactgccggatttgatggtcctgctgcaaagtctgccaaaagaaagagaaagaaccaattcaggggcatccgccagcgcccttggggtaagtgggctgctgaaatcagagatcctcgcaagggtgttcgtgtct

SEQ ID NO: 407025 - DNA, 524 bp, Oryza sativa
gagaaacatctagagtgaataagaaagatggggttcgtccgtgccctgttcctgctggcgatggtgtgcgtggcggcgcacgcgaaggactaccccaaggaggagggcgcgaaggcggaggggccggccgccgcctcggggggcggcggcggtagcacccacgacgtggtgaagctgggcggcaagggcgacggcaagacggacagcaccaaggcggtcaacgaggcgtggacggcggcgtgcgctggcaccggcaagcagacgatcgtcgtccccaagggcgacttcttgacgggtcccctcaacttcaccgggccatgcaagggcgacatcgtcatccagctcgacggaaacctgctcggctccaccgacctcgccttattcaagtcgaactggatcgagatcatgcgcctcgaaagcctcgaaatcagcggcaagggcaagctcgacggccagggcgccgccgtctggagcaagaactcctgcgccaagaaaacgactgcagatcctccccacactttggg

SEQ ID NO: 407026 - DNA, 432 bp, Oryza sativa
cgcttctacgctacacaccactactctcacaacaatggcgaggagcgtagccgtggtggtgttgctggcgatggcggcggtggcggcggcgcaggcgccgggtcccgctgcgacgccggcggcgggcgccacggggccgccgaacgtgacggcggtcctggagaagggagggcagtacacgacgttcatccggctgatgaaggagacgcagcaggacacgcagctgaacagccagctgaacaactccttcaacggcaacggctacaccgtgttcgcgcctaccgacaacgccttcaacaacctcaagccgggcaccctcaacagcctgacgcagcagcagcaggtggcgctcgtccagggccacgtcctcccgcagttctactccatggactccttccagacggccagcaaccccgtccgcacccaggcgtt

SEQ ID NO: 407027 - DNA, 517 bp, Oryza sativa
cttctcacttcacacacaagctcaagctcaagctcaagctaagcttaagcttaagctaagcttcacgtaccacgatctcgcgaacgccatgagcgccaccatggacgcggtcatgccgggcgccgccggcgcgcacaacgcgacggcggcggcggcggcggggcggcgcggcggcggcatcgtcgccgggatgatggcgttaccggaggtgcagacggtggagctgctggtggcggtgtcgatcttcgtggcgatccactcgctgcggcagcggcggtcgcaggggctcccgtcgtggccgctcgtcggcatgctgccgtcgctgctcctcggcctccgcggcgacatgtacgagtggctcaccggcgtcctcgcgtcgcgcggcggcacgttcacgttccatgggccatggctcaccaacctccactgcgtcgtcacctccgacccgaggaacctggagcacatgctcaagaccaagttcgggagcttccccaagggcccctacttccgcgacaca

SEQ ID NO: 407028 - DNA, 532 bp, Oryza sativa
gagatttagaagaagaagaagaagaagaagaagaagacatcaagaacacgtggagcagaagcttctctgccggcttctatcgtagctctcaaggataaagaaaatctgctgcagaggtacaagatctagtggcagaacatgatgagcaatcttaagcttggggtggaggttaccagtgctcatgacctcctaccaaaagagcagggcacatgcaacccctatgtcgagatcgaattcgatgaccagaagttccgcacagccatcaaagagagggatatcaaccctgtctggaacgagcagttctacttcaacatatctgatccatcccgcctcactgagaaagacctcgaggcgtatgtgtaccacgcaaaccgcgccagcaattccaagacttgccttggcaaggttcggatctccggtacatcctttgtcagccactcagatgccacacctcttcactaccccctggagaagcgcacgatcttatcccgtgctcgtggtgagctcggtctcagggtgttccttacagatg

SEQ ID NO: 407029 - DNA, 495 bp, Oryza sativa
ctcatctcacctcacctcccgataaggcacgaggagactatctcctccccctcctcctcctctccccgccgacgaccccgccgagctacatctccgccgtgctgatcgcgtggagccgaggagaggagcggcggccaacgctacgaggagaggagagtgggggaggggaggggagcgagccttatcttacccgctccgccgaagcctatggactcggagcactggatctcgcgcctggccgccgacaagcggttctacgccgcgcagctcggccacgccgatcgagcggtgatggaggaggtggacatggacgaggaggtgaggccggagttcgcgtgcccctactgctacgaggaccacgacgtcgtgttcctctgtgcgcacctggaggaggagcaccccttcgagcccaatgcggagccttggcctatatgttctgataagagtgcgaaagatctgcttaatcatatcactgtgcaacatggggaccttgtc

SEQ ID NO: 407030 - DNA, 483 bp, Oryza sativa
cagttatatagtgaagagtgtagctgggcaccaatttatgtgaggcagtcaaattttaagttgcctgcagatccgaccactccaattatcatgattggtcctggtacagggttagcaccatttagaggcttcttgcaggaaagattagctctaaaacaatctggagttgaactgggcaattcagttctcttctttggatgcaggaaccgtaatatggactacatatatgaagacgagttgcaaaacttcattcaggagggtgcactttctgagctgattgttgccttctctcgtgaaggaccagccaaagaatacgtgcagcataagatgacagagaaggccacagaaatttggaacatcgtctcacaaggtggttacatatatgtgtgcggtgatgccaagggtatggcaagagacgtacacagagctcttcatacaattgttcaagagcagggatctttggatagctccaaaaccgagagc

SEQ ID NO: 407031 - DNA, 453 bp, Oryza sativa
gtcttcgccgcagcggagcagcaacagcaggcgagcgacatgggagggtttgtcaagacccagaagacccatgcctacttcaagcgtttccaagtcaagttcaagagacggaggcagggcaagactgactacagggccaggattaggctcaccaaccaagataagaacaagtacaacacaccgaagtaccgctttgttgtgagatttacaaacaaagatatcacagctcaaattgtctatgctaccattgcgggtgatatcgtgatggctgctgcctactcccatgagctgcctcgttatggtcttgaagttggtctcaccaactatgcggcagcttactgcactggcttgcttctggctcgccgtgtgctcacgctccgtggtttggaccaggagtacgagggcaatgttgaggccactggggaggactactatgttgaaccagctgatgaa

SEQ ID NO: 407032 - DNA, 514 bp, Oryza sativa
gtttgaggacttcgccaatcacaacgcatttgatttgcttgcaaaatacagcaagagtcatcttgttttcaatgatgatatccagggaacagcatctgtggtccttgcaggtcttttatcatcactaaaggtggttggtggaaccctggctgaacacacttatttgttccttggtgctggtgaggctggaactggtattgcagaactcattgctcttgagatttcaaaacagacaaaggctccaattgaggagtgccgcaagaaggtttggctgctggattcaaaggggttgatcgttaactcacgaaaagaatccctccaggcatttaaaaagccttgggcacatgagcatgaacctgtaacgacactgttagatgctgtccagtccatcaaacctactgtgctgattggaacatccggagttggcaaaacttttactaaagaagttattgaggccatggcttcctttaacgagcgacccgtcattttctctctgtcaaaccccacatcacac

SEQ ID NO: 407033 - DNA, 296 bp, Oryza sativa
  unsure (1)..(296): unsure at all n locations
tgtnatagtgacagagcttatgtttgctgattcaactggatcatggggtactcctttggttccagttgagcgttctccaggtatcaatgatattggcattgtcgcttggatcatgaagctctccacaccagaatttccaagtggccgggagattattgttgtttcaaatgatgtgacatttaaagctggatcatttggtcctagggaagatgctttctttgatgcggtcaccaaatcttgcttgtgagaggaaacttcctcttatctacttgtcagcaactgctggtgctaggctc

SEQ ID NO: 407034 - DNA, 527 bp, Oryza sativa
  unsure (1)..(527): unsure at all n locations
cactctagccgccgccgcctcctcctcctctcgccttctcccgtcttctccttcgagttagctacctccttattcaaccatgggtaaggagaagacgcacatcaacatcgtggtcattggccacgtcgactccggcaagtcgaccaccacgggccatctgatttacaagcttggaggtatcgacaagcgtgtgatcgagaggttcgagaaggaagccgctgagatgaacaagaggtccttcaagtacgcgtgggtgcttgacaagctcaaggccgagcgtgagagaggtatcaccatcgatattgccctgtggaagttcgagaccaccaagtactactgcacggtcatcgatgcccctggtcaccgtgacttcatcaagaacatgatcacgggtacctcccaggctgactgtgccgtgctcatcattgactccaccactggtggttntgaggctggtatctccaaggatggccagacccgtgagcacgctcttcttgctttcactcttggagtgaagcagatgatct

SEQ ID NO: 407035 - DNA, 509 bp, Oryza sativa
tgcctatcttcctttcccacatcctcctccgccgccggctgcttcccaccggctcccgatctccgaggcaagcagcgccgcacccggccgctgccgccgccgccatggcgttcgagaagatcaaggtcgccaaccccatcgtcgagatggacggtgatgagatgaccaggatattctggcagtctatcaaggacaagcttatctttccatttttggatctggacattaagtactatgacttgggagttctccaccgtgatgcaactgatgacaaggtcaccgtggaggctgcagaggctactctcaagtacaatgtggctattaagtgtgcgacgattactccagatgaggctcgggttaaggagttcaacctaaagcaaatgtggaagagccccaatggcacaattaggaatattatcaatggcactgtattcagagagccaattatatgcaaaaatgtcccaaggcttgttccaggatggactaagcccatttgcattggaaggcat

SEQ ID NO: 407036 - DNA, 521 bp, Oryza sativa
gttctcttttcacatactagtaacatcttcttaaaaaagggctgcgcggcggcctcactcaccccatcgcaaggatgaatactaccacatcgcgcgcttagatctaagccatggagaaggccatcgatctccagctcgtacttctctaacacctactcccctacttctactacgaccaatcgctcctctccgagttggcgtgcgtcgccgggtacagcgccgtctaccagaggacttccgcctacatggacgacgtcgtcttcgtcggtgcctacaggacacccatatgcaaggccaagcgaggaggtttcaaggatacatacccagaggaccttattactgttgatctaaaggctgttctggacaacactaagatcaaccctggtgaaattggtgacattgaaattggcacggagctaggtccaggctcgcagcgtgcaatcgagtgcagggctgcgagtttctatgctggagttcccgaaaacgtttccgttagaactgtcaaccggcaatgttccttt

SEQ ID NO: 407037 - DNA, 508 bp, Oryza sativa
aattactctggccttctgttgtggttatcctctgtaatctcatctcatgtcgaagggctggacagtgtaaaaaactcctattcttctacagtaattgggtcagcgttggaggtagtgaatgatttgacatcatcaagattaattgcagaatggctccaagaaaccgcccttgagcaactctcaagaatatctaaatacctttatgtccttgttgaagatatgaaattgttgaaaggaaatgttccattgctaacttcagtgctaaatgtgattgcatcaacgatgaggttgtctatgaaaaggaagatttaccaaccacatttctctttatccctccatggcatacataaattgtgccgaactattggtggcatctcaagaagcatagaagttaagcttgcaatgcaacttggcattgatgtcattcttatgaatggtcctctgccagttttgtctgaaatggataagtcgatgacagcaactgttgtttcatgggcaacttctaaca

SEQ ID NO: 407038 - DNA, 523 bp, Oryza sativa
ctcttctctgaccaccattggttcctgaaattgagtcatggctgccaagctagctcgcctccacagtctccgcgaacgcctcggtgccaccttctcgtctcatcccaatgagttgattgcactcttctctaggtatgttaaccagggaaagggaatgctccagcgtcaccagctgcttgcggagttcgatgccttgatcgaagctgacaaagagaaatatgctccctttgaagacattctccgggctgctcaggaagccattgtgctgccgccctgggttgcactggccatcaggccaaggcctggtgtctgggactacattcgggtgaatgtaagtgagttggcagtggaagagctgagtgtttctgagtacttggcattcaaggaacagcttgttgatggacacaccaacagcaactttgttcttgagcttgattttgagcccttcaatgcctccttcccgcgcccgtccatgtccaagtccatcggaaatggggtgcagttccttaaccgtcacctgtcg

SEQ ID NO: 407039 - DNA, 518 bp, Oryza sativa
  unsure (1)..(518): unsure at all n locations
ttttcttacgtagagttagagctgtcaaacggtacagattcttcaattttagagcggagttagcggagctgctccataaatttatactatagaggtgtagctgggtttttgtcgctccacaactccactccatcttaatagacccattaaaataggcacactttgatgccaaatttgctgacttgtcaaatgggaaaaatttgcaggattacacggcgaagctgtcggactttgggctggcgaaggaggggccgcagggggacgcgacgcacgtgacgacgcgggtgatgggcacgcacgggtacgcggcgccggagtacatcctgacgggccacctgacggcgaggagcgacgtgtacagcttcggcgtcgttctgctggagctgctcaccggccgccgctccgtcgacaagcggcggcgcggccgggagcagaacctcgtggactgggcgcgcccctacctccgccgcgccgaccggntgcaccgcatcatggaccccagcctcgagctgcagtac

SEQ ID NO: 407040 - DNA, 321 bp, Oryza sativa
gcctactgtgccctagccgccgccgccgccgcgcgccaccaccgccgcaaccatggccgccgcgctcacccgcccgccgccaggcacggtccagtgcttcgggcgcaagaagacggcggtggccgtctcctactgcaagccggggcgcgggctgatcaaggtgaacggcgtcccgatcgagctgatcaggccggagatgctccgcctcaaggcgttcgagcccatcctgctcgcggggaggtcacgcttcaaggacatcgacatgaggatccgcgtccgcggcggagggaagacgtcgcatatctacgcgatccgccaggc

SEQ ID NO: 407041 - DNA, 503 bp, Oryza sativa
gtcttttccgagggctgcgagatgggacccgccgccgctgacgacgccgccgccggcgaggaccaggctttgtccgaccttcgtgaaaagcatcgaattgacctggagagattaacgctaacatcgcagccactcagaacattggcgttatttgcattagccattggacagagtataaaaagcacatgtttatgtgttctgaaagatagtgctcggttgaagttcttggttcttttggttgcttctgcctgtactccgctcttgttaactaacggtccacatgaaaagcatgttcaggagctgctttggtatatcagatttggattatggtgggtcatactaggggtggcttcatccattgggttaggctctggtttgcacacatttgtattgtatttagggcctcatattgccctttttacaatcaaggcagttcattgcggacggactgatttaaagagtgctccttatgatactattctccttaaaatgagaccttcatg

SEQ ID NO: 407042 - DNA, 493 bp, Oryza sativa
ggcttttgctcgccgtgaccaggggcgcctactacgccgtcacgtttagcgcggcgcgcacctgcgcccaggcggagcagctcaacgtgtcggtgagccccgagtggggggtgctccccatgcagaccatctacggcagcaacgggtgggactcgtacgcgtgggcgttcaaggcgaagatggacgaggtggcgctcgtcatccacaacccgggcgtggaggaggacccggcgtgcggcccgctcatcgacggcgtcgccatcagggcgctgtacccgccgacgctggccaaggggaacatgctcaagaacggcgggttcgaggagggcccctacttcctccccaacgcgtcgtggggggtgctcgtcccgcccaacatcgaggacgaccactcgccgctcccggcgtggatgatcatgtcgtccaaggccgtcaagtacgtcgacgccgcgcacttcgccgtgccgcagggcgcccgcgccgtggagctggt

SEQ ID NO: 407043 - DNA, 478 bp, Oryza sativa
aagcttgcaagaagagacgagacgagggagagaaggagaagagggggccggccgcgggcgtcgacgtgttcctccccccctatctgtcctctcctctcctatcgatctccatccttccttccatccattcctccccgcacccttcgcattgctctcgtcgcctcgattcggtcgaggatctccaggaaaagaggaggaagcgatatgggttgcttttcatgctgcggagcggatgatgccggcccgaagaagaagcgcgacgatccttacgtcccgatccctgatccaggtggtaactatggacgtagcaagcccgggcccccagccccttcgcgttctccccccaccagcagaaatctgccaatggcagtaccggcaattcccctcgatgaaataaagggaataaccaagaacttcagcagcgatgctctcatcggagaaggctcgtacgccagagacttctttggtgagctgagag

SEQ ID NO: 407044 - DNA, 509 bp, Oryza sativa
cgtttcccaacccgtcaacgctgccgctgaatctcactttctctctctgttcttggtgcttccgccgccatggctgctcccagcgtcgccgtcgacaacctcaaccccaaggttttgaattgtgagtatgcagtgcgtggagagattgtgatccatgctcagcgcctgcagcaacagctacagactcaaccagggtctcttccttttgatgagatcctatactgcaacattgggaatccccagtctcttggtcagaagccagttacattcttcagggaggttattgctctttgtgatcatccatgcttgttggaaaaggaggaaaccaaatcattgttcagtgctgatgccatttctcgagcaacaacaattcttgcctcgattcctggaagagcaactggagcatacagccacagccagggcatcaaagggctgcgtgatgcaattgctgctggaattgcatcacgtgacggataccctgcaaatgcagacgacattttccttactga

SEQ ID NO: 407045 - DNA, 359 bp, Oryza sativa
tcttagtcctcaaggcgaacggcctccatcttctccttccagctcctcccatggcgtccctcgtcgccatcgccatcgccatggctctcatggtggttcaacctggccggcagatgactgcctttgctgctcggacgtcgccggcggcggcggcggaggcgttctggcgtgccgccatgcccggcgctcccatgccggacgccatcgtcgagctcctccaccatgagcacggcgttgctagcgccggcggcaaggccaacggcggcggcgacggtccaccgccgccgatgaacttcaactacgacgactacagggccctgcctcggagcgacgccccttccccggatgcattgaaccgc

SEQ ID NO: 407046 - DNA, 530 bp, Oryza sativa
ttgtcgcgtgggttttttttttttttttttttgacacattggacaaccatgtatgtggatatgaacagcagtcttgagtcacttcaagtacatatatgacgctaatcacacattttggatacaaaatttacactggtcaggtcctgtggttgcattagcagagacaggtgtgaagttgaaatggatcggtgttctcgaccggaggatattcacacaatcatacttcttcacttccactgctactgccacttttccggatattgaacttgcacagggggcatgttgcgttgatatgcagccatttatcaatgcaggcacagtggaaatggtgcccacaaggaagttcacgcaggtctgcaccatcatcatatgccgaaaggcaaatgcaacactccgcatcttcaggtgcgagtactttctcaataggttgattggtgccacactctgtcattattccaccaaaaggtcctgtctcatcagcagtttgtttttcaggttcaattgttctccgaaatttgtatcttggaatt

SEQ ID NO: 407047 - DNA, 427 bp, Oryza sativa
tgatccgtgtgccgggcggggggggggcgcccggcccaagaaccgagtgcccccgccgccgccgccgcgatggacatggactcgtgggagcgcctcgccgcggacgccaggctgcagggttcgtgcttcgatgcgttgattgggatggaggaggcggaggggagcgaaggcgaggaggaggcggcggaggtggcctgcccgttctgcgacgaggagttcgacggattcgggctttgctgccacatcgaggacgaacaccaggcggagaacagggccggggtgtgtccaatttgctacgatgcggttgggatggacttggttagacacatcacttcggaacattccagtttctttaagggcaaatggagaaatcggcgagtttcacatggatcacattcttcaacgcgtgccacatttaaaaaggacg

SEQ ID NO: 407048 - DNA, 515 bp, Oryza sativa
acccctcatccccaaaagccccaaacccgaggaggcgagaggaggaggaggaggagctcgtcggcggcgagcgatggcggcggcggtggcggagctgtgggagacgctgaagcaggcgatcgtggcgtacacggggctgtcgccggcggcgttcttcaccgccgtggcggcggcggcggcgctgtaccacgtcgtgtcggggatcttcgcggggccgcccccgccgccgccgcggccgagggacgagcccgaggcggagccgctcccgccgcccgtgcagctcggggaggtctccgaggaggagctccgccagtacgacgggtccgatcccaagaagcccctcctcatggccatcaagggccagatctatgacgtcacgcagagcaggatgttctatggacctggcggaccttatgcgctattcgctggcaaagatgccagcagagcactcgctaagatgtccttcgagccccaggatttgaccggtgacatctctggttttgcccatttgaact

SEQ ID NO: 407049 - DNA, 340 bp, Oryza sativa
gtcttcttaagcgcgaaaccctagcaatggcggcagcggctgcagaagagtgcggcggcggaggtggctgcggtgtacaacccgagctacgtgccggactctgtgaagacgttggtggagcacatgtacaggcacgttagtgacaagaacgtgtacgagatccaccagatgtacgaggtgcggcttccagcggctctacgaccgtcttttacgcgacgcgccgtggacgagagacgaagtcgtcttgcctactgggaccgataccacgtattcctcctcctctaccgggagctgtggtaccggcatgcctacgcgcaggccttctcgtggtcgaatgggt

SEQ ID NO: 407050 - DNA, 269 bp, Oryza sativa
gtcttcttcacctgcgatccatccgcgcccgcgaggaggagggagccggacgccgccgcggggagagcaggggagagaaggagaggaggagatcgccgtcgccgaagacgtcgacggcgccgatctccagcgggagctgagatggggctcacgtctacaaagctgatcagtcgcctgttcgccaacaaggagatgaggatcctcatggtcggtatccatgcggccgggaaagccaccatcgtttacaagttcaggctcggcgagatcgt

SEQ ID NO: 407051 - DNA, 441 bp, Oryza sativa
tctaaccttgactggtacaagggccccaccttgcttgaggctcttgaccagatcaacgagcccaagaggccatcagacaagcccctgcgtcttccccttcaggacgtgtacaagatcggtggtattggcaccgtgcctgtgggtcgtgttgagactggagtcctcaagcctggtatggtggtgacctttggtcccagcggcctgaccactgaggtcaagtcggttgagatgcaccacgaggctctccaggaggctcttcctggtgacaacgtcgggttcaacgtgaagaacgttgcggtgaaggatctgaagcgtgggtacgtggcctccaacttcaaggatgaccctgccaaggaggctgccagcttcacctcccaggtgatcatcatgaaccaccctggccagatctgcaacggctacgccccagtgctggactgccac

SEQ ID NO: 407052 - DNA, 518 bp, Oryza sativa
gctcgcggttgcctgtgcgttcgtctcgcgatttctcctcctcctcctgggatcatggcgatgtggagggcggcggcggggcatcttctcggccgcgcgctcggctccagggccgcgcacacatcagcaggcagcaagaagatcgtgggtgtgttctacaagggcggcgagtacgccgacaagaatcccaacttcgtcggctgcgtggagggcgctctcggcatccgcgaatggcttgagtccaaggggcatcactacattgtcaccgacgacaaggaggggctaaacagcgagctggagaagcacattgaggatatgcatgtcttgatcaccacccctttccacccagcctatgttagcgcagaaaggatcaagaaggcaaagaacctcgagctgcttctcacagctgggattgggtcagatcatattgatctgccagcagctgctgcagcaggtttaactgtggcagaggttaccggaagaacactgtgtcggtggcagaagatgagctcatgcgc

SEQ ID NO: 407053 - DNA, 517 bp, Oryza sativa
gacacgacgcaccaatggcgctcgtctccgcctcctcctccaccaccgccgtcgcggcgctccccggcgccgccagggcctcctccttcctcggcggcgccggcaggagcggcaggctgctgctgaggcaggccgagtcgtcgtccgcgcgggcgtcgttcgccgtgcgcgccgcggcgcccgacaggccaatctggttccccggcagcaccccgccgccgtggctcgacggcagcctccccggcgacttcggcttcgaccccctgggtctcggatcggacccggagagcttgcggtggaacgtgcaggcggagctggtgcactgccggtgggcgatgctgggcgcggcgggcatcttcatcccggagttcctgaccaagatcggcatcctcaacacgccgtcgtggtacaccgccggcgagcagcaatacttcaccgacaccaccaccctcttcatcatcgagctcatcctcatcggctgggccgagggccgccggtgggctgacatcatcaagcc

SEQ ID NO: 407054 - DNA, 512 bp, Oryza sativa
tcgtgttgtcagaaacagaccgcgtctcactcgcagatacgtgttgggggcactaggatacggccagcggtacggacgccggcgagaagaaggactccgtcgacgccgacgtctacgccgcgtgaggtccggattggttgaaaggctgatcgagtttcttgataccaaggcaagtagcttataagaagatttggactttggtggcataaatggatgaactaactggcggcttcaacgtggtgttgattacaggctcttgagctaccaagtatgtcagcttcaaatgagaagtggattgatgggctccagttctcatcactgttctggcccccaccacaggattcacaacaaaaacaggcacaaattctggcctatgttgagtactttggccagtttacagctgacagtgagcaattccctgaagatatagctcagctaattcaaagttgctatccatcaaaagaaaagcgccttgtagatgaagtatagcaactttgttcttatcatctgag

SEQ ID NO: 407055 - DNA, 493 bp, Oryza sativa
gcgttctgcgaggaacacacacgacaaacacaaacagaaaaacacagcacattaagctagctagaagaagagagaaattaaagaagctaggagctaacgatcaggatggctgctggcatggtggcgacaatggtgctactgacgtgccttgctgcaggagggctggtcgtcggagctgaggaagacggtggcggcggcggtcttggccggctggggtcgccggactacggcgacgcgctggcgaaggccatcctgttcttcgagggacagcggtcggggcggctgccggcgaaccagcgagcgacgtggcgcggggactcggcgctcaccgatggccgtgaagaaaacgtgaacctgaccggcggctactacgacgccggcgacaacgtcaagttcgggtacccgatggcgttcacggtgaccctgctgggctggagcgccgtcgagtacggcgccgccgtcgcggcggcgggggagctcggcacctccgggc

SEQ ID NO: 407056 - DNA, 451 bp, Oryza sativa
gtttaggtgcgcattgctcgcattttcaatacatatggccctcgaatgtgtctagatgatggccgtgtggttagcaattttgttgcccaggcattgcgtagacagcctatgacagtttatggtgatggaaaacaaactagaagttttcagtatgtttctgatctggttgctggactgatggctctgatggagggtgatcacattggccctttcaacctgggaaacccaggagaattcaccatgttggaacttgcacaggttgtgaaggaaacaattgacccaatggcaacaattgaattcaaacccaacacagctgatgatcctcacatgagaaagccagatattaccaaggccaagcacctgctacgttgggagccaaaggtctctctaaggaaggtcttcccttaatggtgaaggactttcgtaaaagaaatttgatgagtaatcaaaa

SEQ ID NO: 407057 - DNA, 486 bp, Oryza sativa
ggcggccggcctggtggtcgatatgatccgccagaagaagatggccggccgcgcgctgctcctcgccggcccgcccgccaccggcaagacggccctcgctctcggcatctcccaggagctaggtagtaaggtccccttctgtcctatggtgggatcagaagtgtattcctcagaggtcaagaaaactgaggtgctgatggaaaatttccgtcgagctataggcttgcgtataaaagaaaataaagaggtttatgaaggagaggttactgaactttcgccagaagaagctgagagtacaacaagtggatatggaaaaagcattagccatgtaatcataggtctgaagactgtaaaagggactaagcagctgaagttagatcctacaatttacgatgctttaataaaggaaaaggtggcagtgggtgatggtatatacattgaagctaatagtggtgcagtgaaaagagttggtagatgtgattcttt

SEQ ID NO: 407058 - DNA, 490 bp, Oryza sativa
tatttgccggcatgtacatgttaaagagaaaaggataattggtctgaaaagtcatgacaaccatatcctcttacaacacttgcttccactagcagtacgaaagacattgccagaatatgttagtgcagtattggttcgtgtgagtaacttctttaagaaaatatacttacctgttatttccataagtgatatggaaaagttagatgctgaaattgctgaaacattaagccttctagagactatatttctaccagccttttttgatattatggttcacttaatggctcatcttcctacccaagtaaggatttctggcccagttcagtacagcaacatgtatccaatagaaaggtttctaatgaggttaaagggatatgtacgcaccaagagtcatcctgagggatcaattgctgaaggctatttgtttgatgagagtcttacattttgctctcgttatttagaaggatgggaaactaggttctctcgaaaa

SEQ ID NO: 407059 - DNA, 522 bp, Oryza sativa
  unsure (1)..(522): unsure at all n locations
tctttttcagaaacaaacccctctcactcccagatacctgctgctgccactagcccactaccatggatccttgcaagttccggccgtcgagctcgttcgacacgaagacgacgacgacgaacgcgggagctccggtgtggaacgacaacgaggcgctgacagtggggcccagggggccgatcctcctcgaggactaccacctgatcgagaaggtggcgcacttcgcccgggagcgcatcccggagcgcgtggtccacgcccgcggcgcctccgccaagggcttcttcgagtgcacccacgacgtcaccgacatcacctgcgccgacttcctccggtccccgggcgcccagacccccgtcatcgtccgcttctccaccgtcatccacgagcgcggcagcccggagacgatccgcgacccgcgcgggttcgccgtcaagttctacacccgcgagggcaactgggacctcctcggcaacaacttncccgtcttcttcatccgcgacggcatcaagttccccgacg

SEQ ID NO: 407060 - DNA, 411 bp, Oryza sativa
  unsure (1)..(411): unsure at all n locations
tctggtacgcgtacttacccacaagttaggtgcatgccatggcaccattcatggcgtgcgcctcgccaccggtactcacgctggccctgctcgcgtcgtgcggtgcccttctcgtcaccttcatgctcccggcgcgtgcgactgcgggcagttgcttggacgtacgccacatggtgatgatggacaggttccgcgcttggcagggagctcacaaccggtcgtacccgagcgcagaagaggcgctgcagcggttcgatgtgtaccgccgcaacgcggagttcatcgacgccgtcaacctgcgcggngaccttactttaccagctcgccgagaacgagttcgcagacctcaccgaggaggagttcctggccacgtacaccgggtactacgccggcgatggccccgtggacgac

SEQ ID NO: 407061 - DNA, 517 bp, Oryza sativa
ccgtttgagtacctcggcaactgcctccgcccttgcttcgtggaggtcgacacggccggcctgctcggcagcggcgccgacggcgtggtgacggcggcggtggccatcggcgcggccatcagggggctcgacgacggcgtgctggacggcgccgacgggtggttccagaagatcgcgtcgctgatgccgcaccggccgatgtccatcggcggctcgccgcggtacggcgtgtacgacaccgacttcgggctgggccggccggcgaaggtggagctcctgtccatcgacaagacgcccggcacggtgtccatggcggaggcgcgcgacggccacggcggcatcgagattggcgtggcgctgccggaggccgacatggcgcggttcagctcatgcttcgccgacggactgaagcagctgtgagtgacgaacagcttggtgcatttcttgctttcttgctgctacgaattgttgagagctcagaactcgctcagtttggatgtgattttgaatgctagct

SEQ ID NO: 407062 - DNA, 422 bp, Oryza sativa
ggcggttgcggcggcggctccggctctatccttggccgaggcggcgccggtgacagcagttctggcaccgtgtcccacgccctcgaggacgttccgccgccgcagctgggtcgcggctatctgccggcccgccctgaaatgccaccacagtcgtcccctgaccgccgtggtcgccgcggctgcggctgccgctgcggcgggggactcgacgtcggccggcgtattccacggcgagtgcttcgtcgtgggggataacatcgacaccgaccagatcatcccggccgagcacctgaccctggtcccgtccaagcccgacgagtaccgcaagctcggctcgttcgccttcgtcggcctccccaccgcggcctacccgacgccgttcgtcgcccccggcgaggagaccacccgctacgccgtcatca

SEQ ID NO: 407063 - DNA, 525 bp, Oryza sativa
ctttcactttgctccaggcaaaggattttatgagtcaaatataaatgtgcctgagctgtcggcacttgagcatggtttcaacatcacacacaaaataaataaactgtcttttgggacagaattccctggtgttgttaatccacttgatggtgctcagtggacacaaccagcatcagatgggacataccaatacttcataaaagttgttcctacaatttacactgatctaagagggcgcaagattcattccaaccaattctcagtaacagagcattttagagatgggaatattcgccccaaaccccagcctggagtatttttcttctatgatttctcacccataaaggtaatatttacagaagaaaatagttccctgctccactatctgacgaacctatgtgctatagtgggaggggttttcaccgtctccggcatcattgactcgttcatatatcacgggcagaaggcactcaagaaaaaaatggagctaggcaagtacagatgatttacctgaaacatggactg

SEQ ID NO: 407064 - DNA, 474 bp, Oryza sativa
gcttctcctcttcttttcttggcttgtgctctgttttaatttctttgcaatgatggggaggcagagctcgtcggcggcgaggagggtggtggtggtggtgtgcgcggcgatggtggtggcggcggcggcggcgcagaagtacaatgcggtgtacaacttcggggactcgatcacggacaccggcaacctgtgcaccaatggcaggccgtcgcagatcaccttcacccagcctccctacggcgagacctacttcggctcccctacctgccgctgctgcgacggccgcgtcgtcgtcgacttcctcgcgagtaagttcgggctgccgttcctgccgccgtcgaagtcgacgagcgccgacttcaagaagggagcgaacatggcgatcacccgagccaccgtcatggacgccaactttttccgctccctcggcctcttcgacaagatctggtacaacggccccatcagctttcaaat

SEQ ID NO: 407065 - DNA, 515 bp, Oryza sativa
gttcgctcatcgccatctctctcagctctcacagctcactgcatcaatggccgcggccaccatggcgctctcctccccggtgatggcccgcgcggcgccgtcgacctcctccgcgctcttcggcgaggcgcggatcaccatgcgcaagaccgccgcgaagcccaagccggcggcgtcgtcggggagcccgtggtacggcgccgaccgcgtcctctacctcggcccgctctccggcgagccgccgagctacctcaccggcgagttcccgggcgactacgggtgggacaccgcggggctctccgccgacccggagacgttcgccaagaaccgggagctggaggtgatccactcccggtgggcgatgctgggcgcgctcggctgcgtcttcccggagctcctcgcccggaacggcgtcaagttcggcgaggccgtgtggttcaaggcgggctcgcaaatcttcagcgagggcgggctcgactacctcggcaacccgagcctgatccacgcgcagagca

SEQ ID NO: 407066 - DNA, 420 bp, Oryza sativa
ctgtcgccgtgggtagcgcacgggtggtatgaggtggcgaccaaggggtggcgggaggtggatctcgggtacatcgccatcctcccgtcgttgctgctgcggatgctgcacaaccaagcctggatcaccatctcccgcctccaaaacgcccgtggccgccgccagattgttcgccgcggcatcgagttcgaccaggttgaccgcgagaggaactgggacgaccagatcatcctgagcggtatcctactatacctcggcgcactgtacgtaccgggcgggcaacacttaccgctgtggaggacggatggcgcggggctgatcgccttgctgcatgcggggccagtggagttcctctactactggttccatcgtgcgttgcaccaccactttctttacacccactaccacttgcaccaccac

SEQ ID NO: 407067 - DNA, 513 bp, Oryza sativa
cccatctctctctctctctcgctctcgctctcgccgcggagcttggaggtttgggtgagatcggagcagcgaagcggaggcagccgcagccatggcgttggccgctcgcctcgtctcccgctcccggcagctatactctgctcaagctgccttggcaaatggaggtgccactcaagtccgcttgtatgccaaggaggcagatcgtactcccgtcaatggtgatgacctattgaagggcatattttttgaggtaaagaagaaatttgagactgcccttggtgtacttaagaaggaaaagatcactattgatccagatgatcctgcagcagtttctcgttatgcccaagtcatgaagactgtaagacaaaaggcagatcttctatccgactctgagaggattaaatataccatcgacacctttacaaagggcatccctgatgcacggacttacttgaatactcttcaggagatcaggataaagagtggccttatagatgaaatgggtgctgaggc

SEQ ID NO: 407068 - DNA, 499 bp, Oryza sativa
tgcttcagcagcatcaggggaagggtctagaagcttctagaagcttcttccgagatgaaggtgatcgagaagatccaggaggcggcggcggatgggcggacggtgttctcgttcgagtacttcccgcccaagacggaggaggggctcgacaacctgttcgagcggatggatcgcatggtggcgcacggccccaacttctgcgacatcacctggggcgccgggggatccaccgccgacctcaccctcgagatcgccaaccggatgcagaacatggtgtgtgtggaaacaatgatgcacctgacatgcaccaatatgccagttgagaagattgatgatgccttaacaacaataaagtctaatgggattcaaaatgttctggctcttaggggtgatcctccacatggtcaggacaaatttgttcaagttgctggtggattcgcttgtgctcttgatttggtacaacacattagagccaagatggtgattattttgggattac

SEQ ID NO: 407069 - DNA, 515 bp, Oryza sativa
  unsure (1)..(515): unsure at all n locations
ccgtttcccttccccgaggagccacgccgccgccgccgccgccgccatgccgaagcactaccggcctgcgggcaagaagaaggaggggaacgcggcgaagtacatcaccaggaccaaggcggtgaagtacctgcagattagcctcgcaaccttcaggaagctatgcattctcaagggcgtctttccccgggatccaaagaagaaggtggaagggaaccacaagacctactaccacatgaaggatattgccttcctggcccatgatcccttgattgagaagtttagagaaatcaaggtccacaggaagaaggtcaaaaaggcgtttgctaagaaaaataaagatcttgcagacagattattgaaccgaccaccaacttacaaacttgacaggcttattcttgaaagatatccaacttttgttgatgctcttcgtgactgggatgattgcctaacaatggtgcatctttttgctgcgtngcctgctgttgaaggtgaacgtgtgcaagttcagcgga

SEQ ID NO: 407070 - DNA, 529 bp, Oryza sativa
gttcaatcgctctctctctctctccctccccgattcgattcaattcgcgacgcctccgtgaaattctccaaagccagcttgccctgtagccgcgtgctccggccatggcgttcttcaggggcctgaccgcggtgtcgaggcttcgatcccgcgtggcacaggaggccaccacgcttggtggtgtgcgatggctgcagatgcagagcgcatctgatcttgatctcaagtcccagctgcaggaattgattcctgaacaacaggaccgcttaaagaaacttaaatcggagcatggaaaggtccaacttggaaatataacagtcgatatggtccttggtgggatgagagggatgactggaatgctttgggaaacatcattgcttgacccggatgagggtattcgttttaggggtctctcgattccagagtgtcagaaagtgctgccgacagcaattaaagatggggagcctttgctgagggtctacttgggctcatttgaccggaatggtgccaccaaagagcaagttgatgc

SEQ ID NO: 407071 - DNA, 451 bp, Oryza sativa
ttttccttcctccccacccacccccaaatccacctcgccgtcgccgccgcgaaaccctaggcagccatagccatggctgcggacatcctcctccgccgcgtcccccccgctgcgggcccaggccacggcgctcatcgcggcgcgctcgatctcggactccacggcgccgctcaccatcgagacctcggtccccttcacctcccacatcgtcgacccgccctcgcgcgacgtcaccaccaccccggccgagctcctcacctttttccgcgacatgtccgcgatgcgccggatggagatcgccgcggattccctctataaggccaagctcatccgcgggttctgccacctctacgacggccaggaggccgtcgccgtcgggatggaggccgccatcacccgctccgattccatcatcaccgggtaccgcgaacactgcacctaccttgcacgc

SEQ ID NO: 407072 - DNA, 485 bp, Oryza sativa
gttcaccctttgattgacccgcacccgcatccctttcccgcaaggccgcaacaccgtccgtcgccgcctccgcctcgctccgatccccattccgcggtcgccgcccgagtcaaaaagagggggaagcttctcccaccatagtcctcctcctcctcctcctactcccatcaacgactagtcgcggcgaccaagagccaaaccctacgcctgctcccctccccctccacctcgtcctccccgcgagcggcggcggccatggattcctcctccggcggcgcgggcggcggcggcggcgcgcagatcaaggggatggggacgcacgggggccgctacgtgctgtacaacgtgtacgggaacttcttcgaggtctccttcaagtacgcccctcccattcgacccatcggtcggggcgcctacggcattgtctgcgcggctgttaactcggagaacggcgaggaagttgccatcaagaagattggcaatgc

SEQ ID NO: 407073 - DNA, 515 bp, Oryza sativa
tctgtcgcactcaatggacaatcgtaaccatgggcggtgctcgttgccgcggctcgccgttggcgccgccgtcctcctcctcgccgtctccctagcggccacgccggcggcgagccatgccgggcacgatgacaccggcttgcacagcaactacctcgtcatcgtgcgcaagccgtacgcgtacgacacgaacctgtacaagaacgtgtcgagctggcacgcgtcgctggtggcgtcggtgtgcgacatggcgaaggaggcgctggagagggacccctcctccgtgtcccggctcatctactcctaccgcaacgtcgtcaatggcttcgccgcccgcctgacgccggaggaggtggaggagatgtccaagaacgactggttcatccgcgccgacccggagaagacgtaccagcttcagaccacccacacgccgtagctgctcggcctaatgggcggggccccgcgcggctgcgtgtgaacaccagcaacatgggcgagggcattaatatcgggat

SEQ ID NO: 407074 - DNA, 402 bp, Oryza sativa
ttcatcctctcgcgcatcctcctccgactacctcggttgggttttgggggcggctggagatgtcggactccgaggagcaccacttcgagtcgaaggccgacgccggcgcgtccaagacctacccgcagcaggctggtactattcgcaagaacggtcatattgtcatcaagaaccgcccatgcaaggttgttgaggtctccacctccaagactgggaagcatggacatgcaaaatgccactttgtggccattgacatcttcaatgggaagaagcttgaagatattgtgccctcctcccacaactgtgacgtcccccacgtgaaccgtactgattatcagctgattgacatttctgaagatggatttgtcaaccctctgactgaaagtggaggcactaaggatg

SEQ ID NO: 407075 - DNA, 525 bp, Oryza sativa
ccttctcgtccggtctggtgacaaatttgaatttaaagctccaaggggtggaatgtacaagttctgcttccataatccatatggagcacctgaaaccgtttctttctacattcatgttgggcacatacccaacgagcacaatctggcaaaagatgagcacttggaccctatcaatgtgaaaatagcggagctgaaggaagcattagaatctgtcactgctgagcagaaataccttaaagcccgtgaagctcgtcaccgacacacaaatgagagcacaagaaggcgtgtcatgttctacacaatagcggagtacctagctttcatgggtgcaagcgctttgcaagttgtttacatccgtcgcctattcagcaaaaacgtggcatacaacagggtgtagaacagagtctacttcaaggcagcagaaaatggttggagcaggaaaaaaatatttccaacatattgtgttagcttatgcagccatttttttttgggtttagtctaaaacgtggccctttttaaatttat

SEQ ID NO: 407076 - DNA, 483 bp, Oryza sativa
cactatttctctttctcccacctccaccggcgacgccaccgacgccgtcttctcctcctgcgactctctacggcagcctggccgccgagccgcgcagcgcagcgcatagcaacatggaagcgacgggcgccgccgtatccgccttctccaccgcgtcctcgtcgagaaccgcggcgcctagacacggccgtctactggcgagccccgcggcgtggcgcagcgcacggacgctgccaccacgggccgtcgcctcctcccgcgcgacggttctcgtatcgaaccctactccgtcgacgttgacgacgacacccgatcctgctgcggacgcgccctccaaggtcgaccggtccgggcggttctgtagcccccgcgccgctcgcgagctcgcgctgatgattacctacgcggcttgccttgagggcgccgacgtggtgcggctcttcgaccgcggaatcagcgcgagaagagaacctggctatgttt

SEQ ID NO: 407077 - DNA, 512 bp, Oryza sativa
gtgctggcgcggaggcggaggaggagggacctggagctggtggagggagccgcggcggagaggaagaggaaggtggcggctgggatcgaggacgtggagcacgcgctgtcgaccccgacggcgctgctgcggggcatctcggacgccatggtcaccgagatggagcgaggcctgcgcggggacagccacgccatggttaagatgctcatcacctacgtggacaacctacccaccggaaatgaacaggggttgttttatgcattggatcttggaggaaccaacttccgtgtactgcgagttcaactaggtggcaaggagaaacgtgtcgtccaacaacagtgcgaggaagtctcaattacaccacatctgatggctggaacttccatggaactgattgattttattgcttctgcattgtcaaaatttggtgatactgaaggtgatgattttcacctcccagatgggagacagagagagctgggcttgaccttttccttcccattgagccagac

SEQ ID NO: 407078 - DNA, 502 bp, Oryza sativa
ctgtatggggagttggtggtatagaggcagaagctacaatgcttggccagccaatgagcatggtattgccaggagttgtgggcttcaagttaacagggaagctgaggaacggtgttactgctacagatttggttctaacagtaactcaaatgcttaggaaacatggcgttgtcggaaaatttgttgaattttacgggggaggcatgagtgaattatcactggctgatagggctacaattgcaaacatgtcaccagaatatggtgcaactatgggtttcttcccagctgatggaaagacattggactacttgaagctaactggcagaagtgatgacactgtggccatgatagagtcttacctgcgtgccaataagatgttcgtcgactacaaccagcctgaagctgaaagagtgtactcatcttattctgaacttaacttggaggaggtagagccatgcttgtctggaaaaaaacggcctaatgaccgagtgactttgaagac

SEQ ID NO: 407079 - DNA, 447 bp, Oryza sativa
cttaagcaggctatcactgccatggttcagaaagcaatggagtacattgacttaacgccagacatggacacacgtattgagctaatcaagacgttgagcagtgtatctgctggaaaaatatatgtggagatagagagagcaagattgatcaaaagacttgcaaaaatcaaagaggagcagggacagattgatgaggctgctgatttaatgcaagaagttgctgttgaaacatttggctccatggcaaagacagaaaagattgcattcattctagagcaggttcggctgtgcttggatcgtcaagattatgtacgcgcacagattttatccaggaaaatcagtcctagggtatatgatgcagacccgtcaaggaaaaaaagaaaccgaaagaaggtgataatattgttcaggaaggcccagcagagatacctttccttcttggaactg

SEQ ID NO: 407080 - DNA, 510 bp, Oryza sativa
tttttacctcctccacctcctcctcctccccccgatcggatcggcccggctcctcctcctccgccgccgccaccgccgccgcagataggagaagatggccgcacttgataccttcctctttacctcggagtctgtgaacgagggccaccctgacaagctctgcgaccaagtctcagatgctgtgcttgatgcctgcctcgccgaggaccctgacagcaaggtcgcttgtgagacctgcaccaagacaaacatggtcatggtctttggtgagatcaccaccaaggctaacgttgactatgagaagattgtcagggagacatgccgtaacatcggttttgtgtcagctgatgtcggtctcgatgctgaccactgcaaggtgcttgtgaacatcgagcagcagtcccctgacattgcacagggtgtgcacggtcacttcaccaagcgccctgaggagattggtgctggcgaccagggacacatgtttggatatgcaactgatgagacccctga

SEQ ID NO: 407081 - DNA, 528 bp, Oryza sativa
ttctagcaaagaaggagagagcttggtgagctgcagagatggccccctccgtgatggcgtcgtcggccaccaccgtcgctcccttccaggggctcaagtccaccgccggcatgcccgtcgcccgccgctccggcaactccagcttcggcaacgtcagcaatggcggcaggatcaggtgcatgcaggtgtggccgattgagggcatcaagaagttcgagaccctctcctacctgccaccgctcaccgtggaggacctcctgaagcagatcgagtacctgctccgttccaagtgggtgccctgcctcgagttcagcaaggtcggatttgtctaccgtgagaaccacaggtcccctggatactacgacggcaggtactggaccatgtggaagctgcccatgttcgggtgcaccgacgccacccaggtgctcaaggagctcgaggaggccaagaaggcgtaccctgatgcattcgtccgtatcatcggcttcgacaacgttaggcaggtgcagcttatcagcttcatcgcct

SEQ ID NO: 407082 - DNA, 501 bp, Oryza sativa
tttcgtttcttgctccatccatctatccatccaaggagtgtggaacgccacacgtattttttttttatctatgctaatctgatcattagcagaggagagttttagcagtaggattggattaaattggagtagtttcatagtttgtgtgtagtgatcttaattagctttgattagacagacagtacagtagagtagaggatgttggctgtgttcagcggcgcggtggtggaggtgccggcggagctggtggccgccggcagccggacgccgtcgcccaagacgcgggcgttggagctggtcggccgcttcctcgtcgccgccgagccggccgtgtccctgcagctcggcgaccttggccaccttgcctactcccacgccaaccaatcccttcttccgccaagatcctttgcattaaaagatgacattttctgcctgtttgagggagtcctggacaatctgggcaggctgagccagcagtatggcctgtccaagggcgccaat

SEQ ID NO: 407083 - DNA, 474 bp, Oryza sativa
ggctgttacggctgtgaccctgccgtcctcgccggcccccttccccgtcaccaccaccgcctgctgctgccgtaacgtccgcctcctcctccgctccccgcctcctcgccgagccctccgcgtcgccgcctccgccgcggccgacgcgccacccaagccggcgccgccgccgacctcgccttcgggcatcgtcctcgtcgaccccaccgaggcacagaaggtgcaccgcctcaaggctgtatacgaccagaaggtggtccccctcatcaccgaggagttcggctacaccaatgtccaccaggtgcccaaggttgagaagattgtagtgaattgcgggttgggggctgaagccggtaactccaaggggctcgaatccgccatgaaggacctcgccatgatcaccggccagtggcccgtcaagacgaaggccaagaagtccgtcgccagtttcaagatccgcgaggggaacaccat

SEQ ID NO: 407084 - DNA, 499 bp, Oryza sativa
atcgtcatgtcgggcgatctgccggagcaggcggcccccgcggcgcatgaggcgaccgtgcatatcgtctacctggaccgccccgcggacgccgaccccgaggagttccacatccgcaccctcgcccccgtcctcggcagcgaggagaaggcaaaggaggcggtgctctaccactacaagcacgccgcaagcggtttctctgcaaaacttactccccagcaggtcgaggagctcaagaagcaaccaggtgttcttcaggttgtaccaagccagacataccagctccatggacccggggctggcactggcacaatgaacacctttagtcttgtgtagtgtaccggcctagctgataaggtagtgtaatgcaagtgtttctggcgtgtgcatctcatggcatggctggaatactatatggtagtaacaataagagatgcaacacctgtacatccccagtggatacaatgatcttttagcttgtatcctaagtttgtaatga

SEQ ID NO: 407085 - DNA, 526 bp, Oryza sativa
  unsure (1)..(526): unsure at all n locations
gatgtaaagcctcaccctcgcgggccggagagtgagggatcgacgaaggcgccccgtacgtcgggccagcatatatatactcagaagccggaggaggacggtggaggcgccaccaccaccaccacccttcgccatgcaggaccaggccgcccccgtcccatggtccaccgacctctttgactgcttcgacgacagcagcaactgttttatgacgtggttgtgcccgtgcatcacgttcgggcagatcgcggagatcgtcgaccgggggtcgtcgtcgtgcgggacgagcgggtcgctgtacgcgctggtgtttctcgtcacgggctgcagctgtatctactcctgcatctaccgctccaagctgcggtcccagtacggcctgcaggagacgccctgccccgactgcctcgtccacttgtggtgcgagccctgcgccctctgccaggagtaccgcgagctcaagaagcgcggcttcgacatgagccttcgtaacaggaaagtttacagatggcacgcanacatggag

SEQ ID NO: 407086 - DNA, 471 bp, Oryza sativa
tgtttgagagaaggttgcaagaaaggagccgagggaaaaactatcttctgtaaagcacatggaggtggcagacgctgcgagcaccttggatgcacaaagagcgctgaaggccgcacagatttctgcatagcccatggaggtggccgccgttgtagccgtgatgggtgtagaaaggcagcaagaggaaaatctggcctttgtattaagcatggtggggggaagagatgccaaaaactgaactgcacaaagagtgcagagggccaatcaggcttttgcatcgctcatggtggtggccgtcgctgcaaacatgatggttgcacaaagggagctcagggcagcactaatttctgcaaagctcatggaggtgggaagagatgcacacatccgaattgcagcaagggtgctgagggaagcactgctttttgcaaggcccatggaggaaggaaacgctgttcagttgagggtgcccta

SEQ ID NO: 407087 - DNA, 502 bp, Oryza sativa
  unsure (1)..(502): unsure at all n locations
tgtattcccatacactttgtttctcttccccgtctcgtggtcgagagaaaccgagaggagagagagggagaggagcgctgccgattttccggagggggagatctttttcttctccctgaaggttcgagatcgatctgcgacgaggaggagcggggaatcgtaactttatttccgaggaaatttcaacaaattgatgcactaatggagtccaagggtggcaaaaagaagtctagcagtagtcgttcctccctgatgtacgaagctcccctcggctacagcattgaggacctccgacctgccggcggcatcaagaagttccgctctgctgcttactccaactgcgcgaggaagccctcttgatagcccccttggctaccttgacctagtagtttagttactcctctgaattctcgttttgggctttcttacatctttctggctagctgcttcccagtgaccgggaaggtcatcagacctgcttcctttttnctcatctctggca

SEQ ID NO: 407088 - DNA, 528 bp, Oryza sativa
tttgtaccaacgacattgccaatgcttatggtattgctgaagttggagttatgatggttagcactgcactggttacgttggtgatgcttcttatatggcaaaccaatttgttcctcgttatgtgcttccctgttatttttggttctgtggagtttgtttacttaacagccgttctgtcaaagatacaagaaggaggatggttacctctggctttctcatcattgttcctctgcataatgtacacatggaactacggaagtgtgttgaagtaccagagcgagatgcgtgggaagatttccctggactttatccttgacctgggatccacgcttggcacagtaagagttccagggattggtcttgtgtacaatgagctggtccagggaattccgtcgatctttggccatcttttggtcacactcccagcaatgcactctacgattgtcttcgtttgcataaagtatgttcctgtcccatatgtcccatttgaagaaaggtcttgttccgaaggattggccaaaggactac

SEQ ID NO: 407089 - DNA, 489 bp, Oryza sativa
ctctagtttaataggttcgtacgtataggatatttgatccattgatcgatggccgtcgacatggagctcgacggcggtggcgacggaaagggcaaagccccgccgcagataagcctgtcggggctattccttgcgcgcatggtcgccggtggcgtgcagtacggctgggcgctgcagctctctctcctcaccccgtacgttcagacattgggaatttctcatgcactcactttagttatgtggctctgtggccctaattgctggcttaattgttcaggcatgcgttggcctgtacagtgacaagtgcacattcagccttggaagacgtagaccgttcattcttactggatgcataatcatctgcatatttgtgatcgtcatcgggttcttctcggacatcggatacgctttcggagacacgactgaggactgcaaggtttacaggggttcctcgtaccatgcagcggcggcattcatacccggattctg

SEQ ID NO: 407090 - DNA, 419 bp, Oryza sativa
cgttctttcagagcatccattgcctcgattttctattccaaattcccccacgcgaagaacagccagcgccctcctcctcctcctccttcgccttcctcctggtttcttgccatctttccagggaaggaggaaccgcggcccggccgcattcttggacaagaattgttggcataaaggaacattttgttgatgttctaatggagtcaaaaggtggcaaaaagaagtctagcagtagtagttccatgtacgaagctcccctaggctacaagattgaggacgttcgcccagccggaggaatcaagaagttccagtcttgctgcttactccaactgcgctcgcaagccatcctggatatcctttacatgcctttccccgtagagtaggaatttcctgcattttttcctttgtttggtgcaata

SEQ ID NO: 407091 - DNA, 535 bp, Oryza sativa
  unsure (1)..(535): unsure at all n locations
cgctcttgtagctctcgacccccgcatctcatccctcctctcgcttagttcagatcgaaatcgcaaatggcgaagattaagatcgggatcaatgggttcgggaggatcgggaggctcgtggccagggtggccctgcagagcgacgacgtcgagctcgtcgccgtcaacgaccccttcatcaccaccgactacatgacatacatgttcaagtatgacactgtgcacggccagtggaagcatcatgaggttaaggtgaaggactccaagacccttctcttcggtgagaaggaggtcaccgtgttcggctgcaggaaccctgaggagatcccatggggtgagactggcgctgagtttgttgtggagtccactggtgttttcactgacaaggacaaggccgntgctcacctgaagggtggtgctaagaaggccgtcatctctgctcccagcatggatgcccccatgtctgttgttggtgtcaatgagaaggagtacaagcctgacatcgacattgtgtccaatgctagcttgaccacca

SEQ ID NO: 407092 - DNA, 394 bp, Oryza sativa
gcttgactctcgcctggtcactactgcgcatctttccccgagagctgcttcaccgtataccagcgaaaacccttgaccagtattatagccgtgatgcctcccactgatctgcaaagggtcgtgtgtaataagaaaaaaaaccatcccggactcccacttcttctctttcatttttgccaccaatgcattcattattttttgtgtaaaaaacacgaattatctagtgatgtgggcttccatcattgttgtcccaagcacaccatgtatcatatttatcttcttttttggaagaaaatgtattattttcttgccgtggaaaaatgaataagtgaggacgagtgagctagggatttggttaatgtaagaacacaatgaaataagccatttgcctcaa

SEQ ID NO: 407093 - DNA, 454 bp, Oryza sativa
tagcttggtgagctgcagagatggccccctccgtgatggcgtcgtcggccaccaccgtcgctcccttccaggggctcaagtccaccgccggcatgcccgtcgcccgccgctccggcaactccagcttcggcaacgtcagcaatggcggcaggatcaggtgcatgcaggtgtggccgattgagggcatcaagaagttcgagaccctctcctacctgccaccgctcaccgtggaggacctcctgaagcagatcgagtacctgctccgttccaagtgggtgccctgccttgagttcagcaaggtcggatttgtctaccgtgagaaccacaggtcccctggatactaccacgggaggtactgggccatgtggaagctgcccatgttcgggtgcaccgacgccacccaggtgctcaaggagctcgaggaggccaagaaggcggaccctgatgcattcgt

SEQ ID NO: 407094 - DNA, 469 bp, Oryza sativa
ttttctactgctataaggagcgcgccgtgcaccgcctctcacaatgtcgaccgccgccgccgccgccgctgcccagagctggtgcttcgccactgtcaccccgcgctcccgcgccacagtcgtcgccagcctcgcctccccatcaccgtcctcctcctcctcctcctccaacagcagcaacctcccggccccctttcgcccccgcctcatccggaacacccccgtcttcgccgcccccgtcgcccccgccgtgatggacgccgccgtcgaccgtctcaaggatgggttcgccaagttcaagaccgagttttatgacaagaagccggagctcttcgagccgctcaagggcggccaggcacccaaggacatggtgttctcgtgcgccgactctcgcgtgtgcccgtcggtgaccatgggcctggagcccggcgaggcctttaccgttccgaacattggcaacatggtccca

SEQ ID NO: 407095 - DNA, 477 bp, Oryza sativa
gcgttcttttccagccacacccacacgcgcgcgccggtcagcctacgcttttcccctccccccctcccccgcaacgagccgcggcggaaggaaggatggggagccttggcggggaggagggggcgaggccggctgcggcggcggagggggcgcggaggccgaggttcctgtgcctgcacgggttccggacgagcggggagatcatgcggaagcaggtggtggggaagtggcccgccgacgtcacggcgcgccttgacctcgtcttcgccgacgcgccgttccccgccgaggggaagtccgacgtcgagggcatctttgacccgccctactacgagtggtttcagttctacaagaattttacagagtacaggaatttcgaccaatgcctgaactacatcgaggaattgatgattaaagaaaggccttttgatggactgatgggtttctctcagggctcgattttttctggcgcccttc

SEQ ID NO: 407096 - DNA, 412 bp, Oryza sativa
ctccccaatctcgcgaggctctcgtcgccgaatcgaatcctctcgcgtcctcaagatgcagatctttgcgaagacattgaccggcaagactatcaccctcgaggtggagtcctctgacaccatcgataatgtcaaggctaagatccaagataaggagggcatccccccggaccagcagcgtctcatcttcgctggcaagcagctggaggatggcaggacccttgctgactacaacatccagaaggagtcgacccttcaccttgtcctccgcctccgtggtggcatgcagatctttgtcaagactctgaccggcaagactatcacccttgaggtggagtcttttgacaccatcgacaacgtaaaggccaagatccaggacaaagagggcattccccaaaccagcagcgtttca

SEQ ID NO: 407097 - DNA, 453 bp, Oryza sativa
gttttctcatcgccatctctctcagctctcacagctcactgcatcaatggccgcggccaccatggcgctctcctccccggtgatggcccgcgcggcgccgtcgacctcctccgcgctcttcggcgaggcgcggatcaccatgcgcaagaccgccgcgaagcccaagccggcggcgtcgtcggggagcccgtggtacggcgccgaccgcgtcctctacctcggcccgctctccggcgagccgccgagctacctcaccggcgagttcccgggcgactacgggtgggacaccgcggggctctccgccgacccggagacgttcgccaagaaccgggagctggaggggatccactcccggtgggcgatgctgggcgcgctcggctgcgtcttccccgagcttctcgccccggacggcgttaagttcgggcaggccgtgtggttaaggcgggcttccaa

SEQ ID NO: 407098 - DNA, 495 bp, Oryza sativa
cattagcaaacgagcaccacacaccagcagcagcagcaagtcgatcgatcgtcagcacacacgaccaagatcgagatggcccgtgcacagctggtgttggtcgccctcgtggcagctctgctcctggcgggcccacacaccaccatggccgccatcagctgcggccaggtcaactccgccgtgtcgccctgcctcagctacgcccgcggcggctccggcccgtcggcggtctgctgcagcggcgtcaggagcctcaactccgccgccagcaccaccgccgaccgtcgcaccgtctgcaactgcctcaagaacgtggccggcagcatcagcggcctcaacgccggcaatgccgccagcattcccttcaagtgcggcgtcagcatcccctacaccatcagcccctccatcgactgctccagcgtgaactaatctgatcgatcgatcgctaccggcccgagggtgtgacatcgcaggccgtacatgcacctgtcgtcg

SEQ ID NO: 407099 - DNA, 415 bp, Oryza sativa
ttatttctcgaaaagagatgatcttttgtacaacaattcatctctgaaaaatgcagatggccgacctatctgcccttcaacaggaaaaccatgatcctgcggagatcagaaagacatcaatggtagtgaatcttcattattgacacctacgaaaagctactcaccttgttcatacaatgagattgatggaaatgcgtacagtgagaaagaactcattttccccccagaacttcagttgagaaaagttacgtcacttaaattgaatgggtttaatgggattcggtggtatagacctcttaaactaaagcaagtattgcatttgaaagcatgctacccaaatgccaaactaatcattggtaactctgaagtaggagttgaaacaaagtttaagaatgcccagtttaaggtcttgatc

SEQ ID NO: 407100 - DNA, 496 bp, Oryza sativa
ttgttatgatcatcaaggttcctattgatgtattcaagggaatcacagatgatgatgcagctaaagttgttgatggtctggcaccaaagacaggtgacagacagtcttccatagaacagattaagaagctctatgaactgttctgcaagtctgattgcacactgctcgagattaatactattgctgagacagctgacaacaagctggtcgctgctgatgcaaagttgaactttgatgacaatgctgcctttaggcagaaagagatatttgccatgcgtgacacaacacaggaagatcccagagaggtggctgctgtcaaagctgacttgaactacattgggcttgatggagaaattggctgcatggcgaacggtgcaggattggcaatggctacaatggacatcaattaagttgcatgggggtacgcctgacaattttctttgttgtgggggaagtgcatcatagggacaggttgtggaagatttaaaattttgac

SEQ ID NO: 407101 - DNA, 353 bp, Oryza sativa
cttaggctacttaagcatgttacagggcacacgcttgtctgtatacaaatctccattattactttaaaacttatacaagtcatgtaaaacctgcaagtacacataaatgtcaccatactcatctcacatcaatacaacataagttcactctgttgcatcttacatcagcttttcaccagactcatcgacactgttatcaacttaaaagacaacagattttgtgagggcagatggacaggtaattgcattctaccccagctagataacctagatttttttccatatagagaaccttatttcttagaaccaatatataggatgcagtctcggttgctcactgatcatgatcaaag

SEQ ID NO: 407102 - DNA, 416 bp, Oryza sativa
agcaataatcaaacactaggtctcgtatggatcattacaaagtacacaaatgtacaaattaaaacatcaaaagagttaactaagcttaaagcagcagctgacacataagttgcaaaccccaacttttttcagtttctgaattctggatggatcatatcagattcatcacagcatcgtacaatctgtgcaagcattggtacatcgagcgatggagagagagagtagtctacaatggcggctgggccattcacgagcccggcgtgaacttggtggcgtagacccaggcgttgttggcgacggggtcggcgaggtggtcgagcaggttctccaaggggcccttgccggtgacgatggcctggacgaataagcctaacatggagaacatggctaggcggtcattcttgaacttcttgacc

SEQ ID NO: 407103 - DNA, 440 bp, Oryza sativa
aaaaagccctaattctcatcgtgctcatttgctcattacatctgcattgcaccatccaagatccatatctgcatatccatagctgatacagctccatcgtgaaaacgtttattcctctacaaggttttgcatgctactactaatgcactatacctttagacattcccaggttacaataccgagtaaacaagctgcctaacaaacattacaatacttgatatgttgtatgatcctgaaggccctagccaagcaattcaagcagactcggcgaacccaatcctgtttttgccaaagtcgaagacagtgtggtatgcagccatgaacacgtctccaagaatccagagtgggccccgtggaggtggcacgtcgaacgccatgaacccgctgatgcaaacagtttgaccttgctgctccagcttcactacgtactgctctggtgt

SEQ ID NO: 407104 - DNA, 447 bp, Oryza sativa
aatctaacatacgcaaactgatattatcacaatgttagccgatgacaatggaaagagtaatctaggtacaagcggatcattgacggtggagacaagacattggctgcaccacaacacccaccagtggcgccaacaaggagcgctatccgttataggacgagagaaaaagtaaaacatcacgatgtgaagtgaaactgaataattctagtagacgatgatgatgatgatggataggctccttaggacgcccgccgcccttagcgtcttgctgctcccatcttgtccactggaaggctcactcgtcatcgtcttcatcctcttcgctgccctcgtcgtcatcctcatcattgacctcggacttggacttgtcagattcctcctcgtcgtcctcctcttcctccttggcgggtgccttcttggcagtgctttcgcccttgttgtaggcag

SEQ ID NO: 407105 - DNA, 470 bp, Oryza sativa
atgtatgcaatgctcctcacatagtcaaatgaataatgtaatttacagtttacaatgttgtttacatctacatggttgccgggggcgaaagagaagcagaaaaaccgtcgtgattcctttttttccttccattctactttctagatagatttcatttttggtgtagtctgctattgactttgactcgattcatttggtacagtaggggggctcctcctaaatgcgtgctttctgcaccgttggaaaatgccatcatacagcaaatcaaactgcactccggctctttcacgatttacaatgaaaagaatgtgatcagcctcaattatcttgtaataccatatcccaggctgcaaaggatggcaatcagaatcatccactaccaaacggtttggatgctctgtaggaatgcgagggtgcgtcatggagattgtgttcaaagccccatcattatcttcccaaacttcatccct

SEQ ID NO: 407106 - DNA, 307 bp, Oryza sativa
gcacacctgcatgaacgtcagaagatgtctctgtcgtatacattggtcaacccctcaaccccttgaaatggtacagaagattctcagctctacaaacccagaagccgaaaacggcgggctactcaagcgagagcccagtttgatcaaaatatatatgtacactatgtgataatacatgcaaaatatcgtgccactttttaatggcgacctggtgggcttctatgcgccccgaacaggttgtccatgtacgtctgcttcaggttcgtcatgatgttgggcagcttcatcagccttccgtccttctgtg

SEQ ID NO: 407107 - DNA, 454 bp, Oryza sativa
gggagaccaatatttcagtgttttcagcaagtaacaagttcacggactgccggactggccgcacatcacacaaaaagagaactcaattcttccttgaagggcagtaagccaaacaaataggtcactgcaaatccttatttggaaaaaagtggaggggaaaaacatcgatcagcagggccgggcctcctgcatgtaagtacatgtcctggctaacaaacataaaaggcacaacatgttgacctccaaatgttaaaaattgcatcgcttatgaagcggactccttggcaatcttctctgccttggcaatgacctcatcgattcctccaaccatgtagaatgactgctcaggaaggtcatcatacttcccgtccaatacaccctggaaactttgaacgctctccttcagctcaacatactttccaggtgcacccgtgaaaacttcggcaacgtggaa

SEQ ID NO: 407108 - DNA, 380 bp, Oryza sativa
cgtagaatgattggtccatattttattttggatcgggctgcaaaagccaaataagtccccccttgacatttacatcaagtacacaaccaaaagaaaacgtgcgagcaaaaaaaagtctccagaattcactagcatcggcgaacgtactagttaaacatattcaccatctcatcatggaaggagttattgatgattgattgattgcacctgctggaagcattcttgtggacaatctagcctgtgttctgcatgccggcagcaatgcccttcatcgtcaggatgagggtgtcctccaggccaggtgcgtactcgctcgcagcgttcagttggaccagctcggcaggctggttgctgtcgacgaactcctttcgacagggccg

SEQ ID NO: 407109 - DNA, 422 bp, Oryza sativa
ttttgttttctgaggtggggccagttcatgcccccaggtacccaaagcccaaggaagaaggctggtggctggtaattggtgatagctctaccaatcagttgcttgcaatcaagagggttgcacttcagaagagggctcgagtgaagcttgagttcaccgctgcttcagaagctgggagaaaggagtacatgatctacctgatgtccgattcttatctgggctgcgatcaggagtacgagtttcaccgtcgatgtcatggatgctggaggggattgatcccaaggtcagaaagaggatgaaagctttgcccagcccccaagtgtgtatggagctgggtggttgcttgtaccctcgtagcaaattctaatggtctattccacttttatgggtttggacctcgttttattttttaccattttttt

SEQ ID NO: 407110 - DNA, 474 bp, Oryza sativa
agacaaacatgccaagaatgcttgtattgcaaaaccgtacactttttcttcaatgatttaaagcctcatcatacaatccttggataattttatagcctcatgggacaaaatatcgaatcataacttgtttattgctacagagctaagtgtagaagtttaaagtaaaatgcaccactctgtcggaacgctatcaccttcaaacattgactcacttctttccacctccagacacgttaaatttaaagaagatgatatccccgtcctgtaccacgtaggtcttcccttcctgcctgtattttccagcagccttcacagcagattcactacctagttcttttagatcgtcgaacttcattacctcagcgcatatgaagcctttttcaaaatcagtgtgaattgtaccagcagcttgaggtgctttagtttgacgtttgatctgccaacactttaccttgttagggccagcagtgaaaa

SEQ ID NO: 407111 - DNA, 428 bp, Oryza sativa
gatgtatgaattatttaccacataaacaaagtagacagttggctttattccaacagttagggcgtgtgcacctagtgcaggggctggaaatgggatattttcaatcatctaataattcgaaggggacaattgcagctaactgaagtactttttgaatagtgagctggaaattgccaaagcatcacccgtagccttcacagcatagagctccttcccggactgccattcattcgagtaggcaatccaatctttcgtccattcctccagctgaaaactctggttctctggaaggccttttgttaatcgactgaagtatttcgatgcccttggtagatagtagcttttcagcagtccactccaaaatttattggcatagtcgtgtagtttactctgctcggtctttgtattgtcataccacattgttacct

SEQ ID NO: 407112 - DNA, 470 bp, Oryza sativa
gtagcaaaatttgccaaaaatctttggataaaataaggtaccgacatcacagtacaataaaaaaaaataccgattctacagcaaactgtactgcgctatcaatccgaatcctgatacagccacacataacaagagaaaaatcttattacaattgcaggaaaacgagttaggcagagagattatcaaagaacttcatgtagtcatcaaatgactctccacgccgaatcttagcaatggacccatcatcttctacccaatattcaggtggtcgcaacttcaagttgtaggttgaagccatgctcatgcagtaggctcctgcgtcatgaaccaccaaaccagctcccttatcaggtgttggaagttccctggttttgccaaggaaatctgcagattcacaaactggtccaacaaatatcgaatgttgctacttttgcattttggggaagggagaaacccgtttcgatatgctg

SEQ ID NO: 407113 - DNA, 411 bp, Oryza sativa
ggttcagacagccgattagtttgataaataatgcatggcaaaaaatgttactaatcatgttgaggaaatacagctcgtttcctagcattagcggtctctcggatggcttctcctgtagcacaagctacagatgcatatacaaccatgcatccaatagattaagttgcaaaaagataagaaaaaaaataaggatgcctcaatagtacaagaccttatttctactcaacagtacacaagcgactctttccgaatgttgtgtggtatgtatgtttcttagggagacctgaatgcctccccagcatagcgcacattgcctagctccatttcgatccgcagaagctgattgtactttgccagtctcttgctccggcatggagcccctattttgatctgaccacttgttaaaccaac

SEQ ID NO: 407114 - DNA, 243 bp, Oryza sativa
agtagtatgtatattcaggtcaaatttccaacaaaacatgcctattatttcagtactcccatgaggaaaatcatgattcgtgcaaaagattagcattaaactgatcaaaccaaatttttgactatgaaataggtctggacacccctaattattgggactggaaaattaccattatctagaagctaccaacccatacagtgtgcaagggttttccaaattatgcaactacaatcttgaattttt

SEQ ID NO: 407115 - DNA, 528 bp, Oryza sativa
aaaggaaacacaactcattttttattgatatatgttggatgaatccaataaaaccgatacaagtcacgaaaaatcagactagatgaatccttcgagatcacatgagcaaaagctttcgacgaaagctgtcctatagtcgtggaagcaataacacttgataaagataggaattcagacacgagaggttgcagactataagatgtcatcaaatctccttgaacgccgcgaagagatcaccgttgatgtagtcgttgtccacaagactaaccaagaagtagctcttctggaccttgtctagtatctccctagatgagtcgccctcagggaacaggcaagcccaaccctttgaccaaatttcgaaagcttcgtctttccaaaccataaagctggctgagtcaacgacagttggctggactatttccttgccagggaaaataccccatgtgaccgcattcacagcgtttgtgggaatgtttgagaatgactctccgtccttgttcacggcaatgtatgtaagagaagggaatg

SEQ ID NO: 407116 - DNA, 462 bp, Oryza sativa
attgcaaaaacatcatcttcttcttcatcttcttagggtacacaacaccaactcgatcatcatctcgtcgcactaaacccatcttccccaacccaaagacaacgaactcgctggccacaaatccatccaaccacaattaaccactgctaagctacggtcccccacttcacttgccggggacgaagttggtggcgtacgcccaggcgttgttgttgacggggtcggcgaggtggtcggcgaggttctcgagggggcccttgccggtgacgatggcctggacgaagaagccgaacatggagaacatggcgaggcggccgttcttgatctccttcaccttgagctccgcgaacgcctcggggtcatcggcgaggccgagcggtcgaaggcgcccgcggggtagagcgggtcgacgacctcgccgagcggcccgccggcgatgcggtacccctcgacggcgcccat

SEQ ID NO: 407117 - DNA, 327 bp, Oryza sativa
gagatacaaaatatgagccatgaccaggcccaaccaaccaccatgatacaaccaagtatagttttaggtttcgacggacataaaaccatacagaatttaaaatttattttcggtagaggcttcatctactcttctctggggcaaaacacaactccgctgtatctgcaggccttcatgaggagggctcgtctaggtggtgctgtgcatgtgacggatcaggccgatcacacgggtgctgtattcccattcgttgttgaccaggacacaagttttaggaacgtgtcgtttaaagccaaggcagttcttggctttaaagatgctggatct

SEQ ID NO: 407118 - DNA, 490 bp, Oryza sativa
gccgaggacgacgacgacctctacggccgcctcaagtcgctccagcgccacatggagttcgtcgagatacaggaggagtacgtcaaggacgagcagaagaacctgaagcgcgagctgctgcgcgcgcaggaggaggtgaagcggatccagtccgttcccctcgtgatcggccagttcatggagatggtcgacggcaacaacggaatcgtcggatccaccaccgggagcaactattatgtgcggatcctgagcaccatcaaccgcgagctgctcaagccctcggcgtccgtggcgctgcaccgccactcgaatgcgctcgtcgacgtgctgccgcccgaggcggactccagcatctctctgctcggatcatcggagaagcccaacgtcacttatacggatattggaggatgtgacatccaaaaacaagaaattcgggaggctgttgaattacccgtggcacatcacgagctgtacaaagagattggttttg

SEQ ID NO: 407119 - DNA, 515 bp, Oryza sativa
gcttctcaaatcagcttttctggcattacttggttgcccatatattggcagaaggaaaccatgcacaattataatatacatatggaacacattattactcagcaatcaacaaatgccgcagtaaggaaagttagtaaaaaccacatatttttacacgagcttcagtttcagatgtaagttcaatagaattgccatagcatataatttagccacagggagtgagcttcttgttgcctgcaccacgagggttatcgtccttccagtcatcccatcctctcgctttctcctcttcggcgtcctcgtcctcttgggctgaccgactgccatccttgtgccatgcggagtttgattcttgaatcatcttggcagttcttttcttgccatttctccatcattttcatctcacgtaagccagctttttctatgctcatcgttggcaacttataacttggctgaaaaacttgtgctgccattttttctctttcactgggtagacctccacaacaagaattgca

SEQ ID NO: 407120 - DNA, 359 bp, Oryza sativa
gggcagtatagattaccaataattaagtttgaaccaacaagtataagaaaaaaaaaagttaagtaaacctacaacaacaggtgccttacagaacacacacataactaccaccccccccccccccccaaacaaaaatacaaccttttttaggataacgcagcacatgattgatttgagtaggttgatcgatcgacctaggcgtcgatgggcttgcagacgacggtggcgtgcttgaggatctggttgttgaactggccgggctttttggtggggtccaccttgtccattccgggcggcggaagcaggttgaagttttggacgaggcggtcgagcgtgatcccgatgatgggcagcgcgag

SEQ ID NO: 407121 - DNA, 168 bp, Oryza sativa
ggccgatcaaaagtttcattttttttaactacttgtatattgcacattgtgggcaggttttaacggttcatgaaacgagggccaaggccgcgaacaaaacttaacaagggcgagaactagacatcttaacggcagacatgcaaaaccaacatgggggacgaggcgtac

SEQ ID NO: 407122 - DNA, 461 bp, Oryza sativa
tttttgtttttttcacaaacgaaaccaaagctggcagcacgtaggaaacgctttgttggtaacagaagggagttcaataacagcctacaaaattctgaaacgtaacaagcaactccgatttacaaattccactgacatatcggggactcttgaccaaacgcgacaccattatttgtttgatcagatcagcacttgcacagtgatttacggatagacaaaattcaaagttgaccgaaaacataacttgatactgcaggcagtacatgcatttcacttccgaccaagagtggggaattgggattggtctttgatttctggagctggtggagctgcaaagcgatggccctcaccatatccacccctgaaaccgccacgatccccgcggcccctgccacgaccacggccgccatagtacctctctcctttagctggttttaggaacttgttgatgctcacagact

SEQ ID NO: 407123 - DNA, 370 bp, Oryza sativa
gcattgaattctgaacgataaacaccaggaaccggcgtttatttgaggcaagcactgcccaaaatctcgcaaaagtactgaaaccttagacatagtacacatccatggaaaacatggatgccaaatgacaactacagaaaattatcaaattcgaatgcagctgacggcttctcctgctgaagatgcatattttcccctccattacttggatgtgctttctccatcgacagccaatgggacggcgctggccaggctgcggtatttcagagcatagaacatctcaatgtaacggcgagtctcgcgcctttcaaggttgcttacgtactttcagaatccggatacaccaatcaaggtcatcagcctcttagag

SEQ ID NO: 407124 - DNA, 185 bp, Oryza sativa
atttggtatggaaaccccaacttttttcagtattctgaattctggatggatcatatcagaatcaacacagcatcgtacaaactgggcaagcaattggaacaatcgagcgatggacagagagaagtagcctacaatgggcggctgggcccatttcacgagccccggcgctggaaccttggttggcc

SEQ ID NO: 407125 - DNA, 488 bp, Oryza sativa
aaaagcaatgcataattctccgaaagagtgggcataggtggaaatcggcgggcatcactgagccctttgccctgaggcctgatgggcatcctggtccatatagaagtactgacccaaacaagaagacgcaaagaggtccagatggaaggcctccacctcaggattgcctacattggtgcatgccaggacctgtagatacatggaatgagatgttgctagagaccatacgaagagagttcgagggagtgagaagctgaataaaaacactcattggctgctcgatttctatcatgggatacgacctgcaaaaactaattaagcttctagcattggtgtatacctcattacatatcgtgttgttggtctaccacagatctgatggaaatatagcttaaggagggacaaaaaaacaaattgtaggcatgtatgtcaacagtcgggatagaagtacagaggggtagacagttagagagagaggttatgatgga

SEQ ID NO: 407126 - DNA, 502 bp, Oryza sativa
acgttatttacgaagccctggtgggcaggctgggggcgggggtgttccggctcgaggctgggcaatggcgccgccggtgccacggcgagaggcggctacggcggccaggtcgaccacgcgtcggcgcatgacccagcgatcctggcgttcgacgagctcgtcgccggcgccgtcgggagggtgtcggcggcggccggcaagatcggggcggaggtcgcggaggtgaccagggtgctggagaaggcgttcttggttgggaaggaccttcttgtcaggaccaagcaaactcagaagccaaccgtggattccatcgcagtattcatggggcctctgaatgaaacaatattggaggcaaattcattggcagaggggacaagatcgagccatggcaaccatttgaaagcagccgccggtagcctggccgctctggcgtggattgggtacaccggcaaaggttgcggtatgccccttcctattgctcatgtaaaagagagttggcaaa

SEQ ID NO: 407127 - DNA, 515 bp, Oryza sativa
  unsure (1)..(515): unsure at all n locations
atatatccttcttatatataggggaattgtgaaagcgggaggggtagttaactagctgtgacttggaaggggatttctccagagattatgcatgagacttcacatggcaaattccattatcagttcttgtttctgtgtaaaaagatttttcatattgatgatcggtggtccttttgcataggtgtcagagaagttctcagtgtcctatgtgttggcagcctatcagtttgaaggatcctaccagtcaagagctgctccaggcagtggcgcgtgaaaggaatgtaaggaccaatcaaactcgaaatacaactatatttcatcatcctgctcttggagattttgaggttcagcatttacctgatgttggtaatgatgctgaacttgaagagcgtatattacagcacctagcagcagccgctgcaatgggaaggtcacaccaccttggtagaagagaaggacacaggngtcgttccggctctcatggtcgtccacagttcttagttgtttcttcgcat

SEQ ID NO: 407128 - DNA, 516 bp, Oryza sativa
  unsure (1)..(516): unsure at all n locations
ggcttaaccctaggattgtctccggcggcggcgggggaaggatcatggagcgggcgggaggcggcgtgtcgtaccagcggttcccgcgggtgcggatccgcgagctgaaggacgactacgccaagttcgagctccgcgacaccgacgccagcatgggcaacgccctccgccgcgtcatgatcgccgaggtccccaccgtcgccatcgacctcgtcgagatcgaggtcaactcctccgtcctcaacgacgagttcatcgcccaccgcctcggcctcatccccctcacctccgccgccgccatggccatgcgcttctcccgcgactgcgacgcctgcgacggcgacggctcctgcgagtactgctccgncgagttccacctcgccgnccgcgccaccgactccgaccagaccctcgaggtcacctccaacgacctccgctccaccgaccncaaggtctgccccgtcgaccaggctagggcctaccagcacgccctcggcgggactgaacccttcgaca

SEQ ID NO: 407129 - DNA, 492 bp, Oryza sativa
  unsure (1)..(492): unsure at all n locations
tcgctgccgccgccgccgcagcctcctcaagggtggtgcccatcctctccttcgagttagcttcctccttattcaaccatgggtaaggagaagacgcacatcaacattgtggtcattggccacgtcgactccggcaagtcgaccaccacgggccatctgatctacaagcttggaggtatcgacaagcgtgtgattgagaggttcgagaaggaagccgctgagatgaacaagaggtccttcaagtacgcgtgggtgcttgacaagctcaaggccgagcgtgagagaggtatcaccatcgatatcgccctgtggaagttcgagaccaccaagtactactgcacggtcatcgatgcccctggtcaccgtgacttcatcaagaacatgatcacgggtacctcccaggctgactgtgccgtgctcatcattgactccacactggtggttttgaggctggtatctncaaggatggccagacccgtgagcacgctcttc

SEQ ID NO: 407130 - DNA, 438 bp, Oryza sativa
tttgtactgcacgaagctcactagactttcaggctgggttctgctcactgagcaggggggtgcatacatcgggaactatcggaaactaataaagacactgactgttgccttcgctggagatactgacatgtctctccaatctgtgtttgaaggatgcactagggtgcaaaagcttgaggtcacagatagtccttttagtgataagggattgctctctggcctgagctatttttacaacatgaggttcttatggatgaattcatgcaggctaaccatgaggggttgtagagatgtagctcagcaaatgcctgacttggtggttgaagtgatgaaggatcatcttgatgatgaaggggagatggagactgttgataaactgtacttgtatcgatcactggcaggagcaaggaatgatgcaccttcatttgtcaacatctt

SEQ ID NO: 407131 - DNA, 364 bp, Oryza sativa
ccggcccggaattactttctcgttccactcatccggtctaaattttaagattgactaccacgtgtccgggggagggattatttaaccggcggtgaggctcaataacgaccacctattcccgcgggtgcggattccgcgagcttcacagatgactacgccaagttcgagcttccggacaccgacgccagcatggccaacgccctccgcctcgtcatgatcgccgaggtccccaccgtctccatcgacctcatccatattcgagtatatgttcttcctcctcaactacgagttcatcgcacatcgactcggcctcatccccctcacctacccacacggcatggccatgcgcttctcccgctactgc

SEQ ID NO: 407132 - DNA, 468 bp, Oryza sativa
gtcttcgtactcgcctctctccgcgccctcctccggcggcgctcgccgccgttcgtgtccgccgccaccgccgccgccatgagggagtgcatctcgatccacatcgggcaggccggtatccaggtcgggaacgcgtgctgggagctctattgcctcgagcatggcatccagcctgatggacagatgcccggtgacaagaccgttgggggaggtgatgatgcttttaacaccttcttcagtgagactggtgctgggaagcatgtcccccgtgctgtcttcgtcgatcttgagcctaccgtgattgatgaggtgaggactggtgactaccgccagctcttccaccctgagcagctcatcagtggcaaggaggatgcagccaacaactttgcccgtggtcactacaccattggcaaggagattggtgatctgcgccttgaccgcatcaggaagcttgccgacaactgcact

SEQ ID NO: 407133 - DNA, 500 bp, Oryza sativa
gtctcattagatcagcgtgaagcagcggcaagaacacaaaaatggcggacgagaagctcgccaagctgcgtgaagccgtcgccggcctctcgcagatcagtgacaacgagaagtccgggttcatcagcctcgtcgcccgctacctcagtggcgaggaggagcatgtggaatgggcaaagatccacacgccgacggacgaggtggtggtgccgtacgacaccctggcggcgccgccggaggacttggaggagaccaagaagctgctcaacaagctcgccgtgctcaagctcaacggcggcctcggcaccaccatgggatgcaccggaccaaaatcggtcatcgaagtgcgcaacggattcacattcctcgacttgattgtgatccagatcgagtccctcacaagaagtatggcagcaatgtcccactgcttctgatgaactcattcaacacccatgaagacaccttgaagattgttgagaaatacaccaattcgaacattg

SEQ ID NO: 407134 - DNA, 489 bp, Oryza sativa
cactagctcaaaagacacacattccaaaagcatcgggggccatctcctcctagtcctaggctcgcgtcaatggcggcgtccaccatggcactctcctcccctgccgccctcgccggcaaggcggtcgccaatgccaaggtgttcggcgagggccgcgtcacgatgcgcaagtcggcggccaagcccaagcccgccgcggcgtcggggagcccgtggtacggcgccgaccgcgtgctctacctcggcccgctctccggcgagccgccgtcctacctcaccggcgagttccccggcgactacggctgggacaccgccgggctgtcggccgacccggagacgttcgccaagaaccgggagcctggaggtgatccactgccggtgggccatgctgggcgcgctcggctgcgtcttcccggagctcctcgcccgcacggcgtgaagttcggcgggccgtgtggttaaggcggggtcccagatctcagcgggggg

SEQ ID NO: 407135 - DNA, 511 bp, Oryza sativa
gcttttgagttccagccatggcagcagacaagggagtgaaggtgttcggcatgtgggcgagccccatggcgatccgtgtggagtgggcgctccggctcaagggcgtcgactacgagtacgtcgacgaggacctcgccaacaagagcgaggcgctgctccggcacaacccggtgaccaagaaggtgcccgtgctggtccacgacggcaagcctctcgccgagtccaccgtcatcgtcgagtacatcgacgaggcctggaagcacggctaccccatcatgccctccgaccccttcgaccgtgctcaggcgaggttctgggccaggttcgctgaagagaagtgcaacgctgctctgtacccgatcttcatgacgaccggagaggagcagagaaagctggtgcacgaggcccaacagtgcctgaagacgctggagacggccctggaggggaaagaagttcttcggcggcgacgccttcggctaccttgacatcgtcaccgggtggttcgcctact

SEQ ID NO: 407136 - DNA, 417 bp, Oryza sativa
gtttggtgaaagaaaccacctgatcgagcccgtgtctgtgcagccgcaggagaggaggacgagtcgttcgttgtgcagcaggaggcggcggctaaaatgtcgtggcagacgtacgtcgaccagcacctgatgtgcgagatcgagggccaccacctcaccttcgccgtcatcgttggacacgacggcaccgtctgggcacagagcgccgtcttcccgcagtttaaaccggaggagatgaccaacatcatgaaggactttgacgagccggggttcctcgccccgaccggactgtttcttggaccaaccaagtacatggtcatccaaggtgaacctggcgctgtcattcgtggcaagaagggatcaggaggcatcacggtgaagaagaccgggcaggcgctggtggtcggcatctactac

SEQ ID NO: 407137 - DNA, 495 bp, Oryza sativa
  unsure (1)..(495): unsure at all n locations
aatcgatctcctctctctctctctctctccgtctctatcccattcgcgaggcggcgtctcctcctcctccccgtctctctcgcttcccccccaaatccggcggcgaatccagggccccgcgccgcgccgacgaccaccgccgatcgcgaccaggagggaggatgctgggcgccgcgaggaggcagctcggatccggccccatgctggggcaggtgctgcggaggctccggccggcgacggcggctgcagcggatgcggcgagggcgtactccgcggcggcgaaggagatgactgtccgtgaagcgctgaactctgcactcgatgaagaaatgtctgctgatccttctgtttttctgatgggtgaagaggggnnagagtatcaaggtgcatacaagatttcaaagggcttgcttgacaagtatggtcctgagagggttctggatacaccaatcacagaggctgggtttactggcattgctgttggtgcaacgtatc

SEQ ID NO: 407138 - DNA, 504 bp, Oryza sativa
  unsure (1)..(504): unsure at all n locations
cacacaccttggatcgcggcctcacgcgcgtgaggggccgcaacgcaacgtgcgaccccgacctctcctcctccacctcggcttccccccaaattccatctcctcgcctcggcgaatccgattccgagcactcacaaccggatcggagcgagttccatggcctgaatctcagggggggtgactggccgaggagcgggctctctctctcactgccttaggctgaaatctgctataactttggaggtactaaaacgagtctgagatgggtgtgattagtacggtgcttggtttctctgggtttggctttggattctccgctggtattgtcatcggatactacttcttcatctacttccagccaactgatgtcaaggacgtcaaagttcgcccacttgtcgaatatgactcaatatcgttggacggtatccttcctgaaattcctttgtgggtcaagaatcctgactatgatagaattgatggncttgatagatttttggagatgat

SEQ ID NO: 407139 - DNA, 472 bp, Oryza sativa
gaagggcaaccaatagaattcaaggcattgtgtgccaaatctagaaaggaaatgctcaacataagtccagcggcaaaaccctgtagaagcccaagcatcttaagattaggcacacaatgcattgaattctattggtttcttgaagggcaacctttggttttttgctggagttcttttctttggtttggttgtcaagtttattccagagccaactgttgtgccaacagctgatgcaggcaagaagcagactgacgatgatggttcgggtaaagatatgatgaaaaaacatcgtcggcaagtattattcagtgggatcattactgctgttggaatcagcttgcataactttccggaggggatggcagtatttttgggatccatgaagggccttcgtgtgggactgaacttggctattgctattgctttacacaatataccagagggggttgctgtagctctaccactctatttt

SEQ ID NO: 407140 - DNA, 502 bp, Oryza sativa
gcgactgtggcggtgccgcgggtgaagctgggctgtcaggggatggaggtctcggcgcaggggctcggctgcatgggcatgtgcccggccttcgagccgcccaagccggaggccgacatggtggcgctcatccgccacgccatcgccgccggcgtcacgttcttcgacacctccgacctctacggcccccacaccaacgaggtcctcctcggcaaggcgctgcagggcggcggcgtgcgcgacagggttgagctggccaccaagttcggcaagttcttcgccggcggcaagccggggatccgcggcgacccggcttacgtgcgcgccgcgtgcgagggcagcctccggcggctcggcgtcgattgcatcgacctttactaccagcaccgcgtcgacagaaggtgcccatcgaggtcacgattggtgaactcaagaaactagttgaagaaggaaagataagatatattgccttatgtgaagcatcggcatcaacaatcagaag

SEQ ID NO: 407141 - DNA, 505 bp, Oryza sativa
  unsure (1)..(505): unsure at all n locations
cacaccataagttcagaggcgagggtttcccacccgcgagaagtcggcgctcccctcttcctcctcctccctcctcctcggtgagccagtcatccaagctctgtcaagatgtctgacagccatgaaactgataggaacattgagatctggaagattaagaagctaatcaaggctctggagtcagctagaggaaatggcacaagcatgatctctcttattatgcctccacgtgaccagattgcgcgagtggctaagatgttgggtgatgaatatggtaccgcctcaaacatcaagagtagagtcaatcgtcagtctgttttggctgccattacctcagctcagcagaggctgaagctctataacaaagttcctccaaatggattggttctctacactggaaccattgttactgaagatgggaaggaaaagnaaggttaccattgattttgaacccttcaagcctatcaatgtatcactgtatctttgtgataacaagttccacact

SEQ ID NO: 407142 - DNA, 503 bp, Oryza sativa
ctgtgcgtggtgatcctggtgctccttttcctcgggcagcgattcggcaccagcagggtcagcttcaccttctccccaatcatgctgctgtggtttgcttcgattgcagggatcggtgtttacaacattgtgatgcactacccacctgttctgaaagccgtctcgcctcactacatatattactacttcgcgaagaacaaacgggttgggtgggagcaactcggcgcggttattctctgcataacaggtgctgaagctatgtttgctgatatgggacacttcaacaagtcatcaattcaggtggcattctcaacggcggtgttcccatccctgatcctggcgtactcaggccaggcggcatacctgatcaagaacccgggtgacctgagcacggcgttctacagcagcgtcccggcgccgctgttctgggcgatggtcgtcgtctccaccttggccggcattgttgccagccagtcgctcatctctgcaagctactccatcat

SEQ ID NO: 407143 - DNA, 498 bp, Oryza sativa
cattgatttcaacatggtttcctccacgagaagggcgaggtcgtctctatccgccaccaccgccgccgccatcgcggcggcggcggcggcgctgatggtgtccgtggcgttcgccacagcgcagtacacgccggccacgccggcagcgccgggggctgcagcggcgggtgcggcggcgggggcgacgccggcggcgccgtacacgccggccacgccgggggcggcgggggcggcgccgtcggtgccggcggggccgctggacatcgcgcagctgggggcgaagggcgacgggacgagcgacagcacggcgttcgtgctgcaggcgtggaagaacgcgtgcaacgcgacggggacgcagaagatcgtgatcccgccggggaactacctcaccggcgcgctcaacctcaaggggccgtgcaccagcagcatcatcctccgcctcgacggcaacctcctcggcaccggcgacctcaacgcctacaagaccaactggatcga

SEQ ID NO: 407144 - DNA, 467 bp, Oryza sativa
tttttgttaaaccaatacacaaattttattgccagttcccggactgcagtaagggggctcaaggcagcacattgtactgcaaagggcatggcggtggcaagcggtgtatctttgacggctgcagcaaaggtgctgaggggagcacgcctctgtgcaaagcacacggtggcgggaagcgatgcatgttcgaaggtggcggcgtctgcccaaagagcgtccatggtggcactgagtactgcgtggcgcacggaggagggaagcgctgttcggtggctggctgcaccaagagtgcccgtggccgcacggactgttgcgtgaagcacggtggtggcaagaggtgcaaggtcgacaactgcagcaagagcgcccaggggagcacggacttctgcaaagcccacggcggcggcaagcggtgcacttggggaacgggctgcgagaagttcgccccgcgcaggagcgggctgtgc

SEQ ID NO: 407145 - DNA, 499 bp, Oryza sativa
tgcttagctaccggcggcgcagccacacagcagcagcaggtgaggaggagaggagacccgccgccgccgccgccatgggtatctcgcgtgattccatgcacaagcgccgcgccacgggcggcaagcagaaggcatggcgcaaaaagcgaaagtatgagctcggaaggcagcctgccaacaccaagctgtcaagcaacaagacagtgaggagggtgcgtgtccgtggaggtaatgtgaaatggagggccctccgtttggatactggcaactactcatggggaagtgaggccgtgacccgcaagacccgtatccttgatgtggtctacaatgcatccaacaatgagcttgtcaggactcagacccttgtaaagagtgctattgtgcaagttgatgctgcccccttaagcagtggtacctcactcactatggagtggatattggtagaaagaagaaggctcctgcagccaagaaggatgctgaggggcaggatgctgaagct

SEQ ID NO: 407146 - DNA, 492 bp, Oryza sativa
agatacgagagctagctagccagaggctggaagaagattctgcacccatagatcgtctaccatggccacaaacccaggactcttcacggagtggccatggaagaagcttggcagcttcaagtacgtgttgctggcgccgtgggtagcgcacgggtggtatgaggtggcgaccaaggggtggcgggaggtggatctcgggtacatcgccatcctcccgtcgttgctgctgcggatgctgcacaaccaagcctggatcaccatctcccgcctccaaaacgcccgtggccgccgccagattgttcgccgcggcattcgagttcgaccaggttgaccgcgagaggaactgggacgaccagatcatcctgagcggtatcctactatacctcggcgcactgtacgtaccgggcgggcaacacttaccgctgtggaggacggatggcgcggggctgatcgccttgctgcatgcggggccagtggagttcctctactact

SEQ ID NO: 407147 - DNA, 501 bp, Oryza sativa
tccttaattccaaagagccaaaaaccctagcgcgcggcatcccccgccgccgcctgcggctccgccgcgggtaaatccctcctcgtcgtctcctccgctcctcgtgccatctcgcggctgaacaggggaggggatcctggttgctgttactgccatattttcacatggattcgactaagcaagatttccaaccccggacattctccatcaaactgtggccaccaagtgaaagcactcgtctcatgcttgtggagaggatgaccaagaacctttccacagagtccatattttctcgcaagtacggccttttgggcaaggaagaggctcatgataatgctaaaaggatcgaagaggtatgctttgcctctgcagacgagcatttcaaggaggagcctgatggggatgggagttctgctgtccagctgtacgcaaaggaaactagcaagttgatgctggaagttctgaaaagagggccaaggaccactgtggaaccagagtacc

SEQ ID NO: 407148 - DNA, 503 bp, Oryza sativa
gctgattgtggcttatggatcacgtattctgttggttccaaacggcactgatatttatggaagtaaatacaaaggcatatggatatcacttgctgttctttcaagagctttatgtggaaactatgtcaattttggtgtatttgagctgtatggtgacagagcacttgctgatgcccttgatatatctttaaagatgagcctctcagttccattgtctgacatattggcattcaaaaagctgtcaaaagcattctatggatatattgaagttctgttcagcagccatatcacttttgttctcaatttggatacaaacaccttcgtgcatattgtcagcactcttgaatctggcttaaaaggtctagatacagggatatcaacacagtgtgcctctgccattgatagcttggcggccttttatttcaacaatatcacagctgctgatggccctccttcaccagctgcactaaatcttgctcggcatattggagagttccccactt

SEQ ID NO: 407149 - DNA, 469 bp, Oryza sativa
  unsure (1)..(469): unsure at all n locations
caatccctcgcgccgctccccttcccccactcacgaatggccgccgccgccgccgccgcgtcaacgtcgcgcctcctcctcctccgccaccaccaccacgccgncgccgacgggtcgaagcagcagcagcagctcaggtattcctccaagccgtcttctctcgctctgccccggctgcgccttttgccggcggccggggcgctgctgcccgaccgggtcaccccgttctcctacgaggaggacgacgagtccgacgaccacccgcgcgaggagtgcgggctggttcgggtcgtgggggaccccgacgcgtcgtcgctctgctacctcgggctgcagaagctgcagcaccgcggggaggagggtgccgggattgtcgccgtcgggggtgacgggaagctcaagtcggtcaccgggctcggcctcgtcgccgacgtgttcggtgaccccgcacggtggcatcgctccccgg

SEQ ID NO: 407150 - DNA, 502 bp, Oryza sativa
gcttaatttcggaagagcggcagagcccactccacacgcggagaggagaccacgccgccgccggaagccatggccgccgccaccgccgccgccttcgcggagcccaagaccaagtacgatcgccagctcaggatatggggtgatcaaggacaggctgcactggagaaggctagcatatgcttgcttacctgtggccctacaggaactgaagcgatgaagaaccttgtgcttggaggagtgggagtgttactgttgttgatggttccaaagttgaacaatctgacatgggaaacaatttcctgttggatgcagaatgcttggggcaatcaagagcaaaatctgtatgttcgttcctgcaagagctgaatgatgctgtaaatgccaagtttgtcgaggagtctcctctggctctcatagacacaaacccttcattcttttcccaattaccgtagtcattgctactcagcttcagagagatctttactgaaactagatgatatct

SEQ ID NO: 407151 - DNA, 472 bp, Oryza sativa
  unsure (1)..(472): unsure at all n locations
ggttgctgtgcggttgccgcggcgtgctgctcgagccgcgttacgactgatccgagcggctttttccggcgatcatggcggacgcgcccgccaccggcggcggattccccgcgcaggactaccccaccatcgaccccacctcgttcgacgtggtcctctgcggcaccggcctcccggagtccgtcctcgccgccgcctgcgccgccgccgggaagacggtcctccacgtcgaccccaaccctttctacggctccctcttctcctccctcccttctcccttccctcccctctncctttccccccctcccccttcggacgaccccgncccctccccttccccctcctccgccgccgccgtcgatctccgccgccgcagcccgtacttcgcaggtggagacctcgggggcggtgcccgagccgtccaggcgcttcaccgacgacctggtgggccccaggctgctctactgcgccg

SEQ ID NO: 407152 - DNA, 480 bp, Oryza sativa
  unsure (1)..(480): unsure at all n locations
gcgcttgcaagtttgggttttatgagttctttaagggggactactcagatattgctgggcctgagtatgctcagaagtacaagaccctaatttacctcgctggatcagcttctgctgaggtgattgcagatgtggctctctgcccatttgaagctgtgaaggttcgtgtgcaaacccaacctggattcgctcgtggactgagtgatgggctccccaagttcgtcagatctgaaggcgctcttgggctttacaagggaattgttcctctgtggggtcgccaaatcccttatactatgatgaagtttgcctcctttgagaccattgttgaaatgatctacaagcacgctgttcctgttncgaagtctgagtgcagcaagtctttccaattgggtatcagtttcgctggtggttacattgctggagtcttctgtgccattgtctctcatccagctgacaacttggtctctttcttgaacaacg

SEQ ID NO: 407153 - DNA, 494 bp, Oryza sativa
gtgctcgctcgccggcggcggcaggcaccggagggggctcgccgcgctgtcctgcgtctgcccggtggtgtcctggatgcgtcccagggccgacggcggcagcggcggcaagtcggccggccccgtgctcgatgattcgatcatgtcgtggtatctgtccatggagagtggcaagttctggttcccggctcaggtctacaaccgtgagcatgggcatgttggattcatgatgtcatgctacgatgcagagctcagctatgatttccacagtgataccttccgtgcaaggtatccaccacacggacgacggaccgtagtcttggaggacggggtacactgggagtagggtcagggcacctccagtagacactcacgcacatgatctccatgcctctgactgcttacacgaactccggccaggcgataacattgagatccaatggagaaggaacaaggaattcccctaggctggtggtatggagttgtttggccac

SEQ ID NO: 407154 - DNA, 491 bp, Oryza sativa
  unsure (1)..(491): unsure at all n locations
ctttgttatcccgtcgccacctcgccccatcaccctctccctccaccacactacaccccgctccactctcaggcaggcaatcagcggcgaggcaccagcccaccggccggcaatggcgtccacctcctgcttcctccaccagtccacggcccgcgtcgccgcgcgcgtcgcctccccgtccccggcgacacggacccacctactcgtctgccgcgcccagaagcaggacgacgccgacgtctcccgccgcgcggcgctcgcgctgctggccggagcgacggcggcgctgggggtggaaggtggcgcccgccgacgcggcctacggcgaggcggctaacgtgttcgggaagcccaagacgaacacggagttcatcgcctacagcggcgaggggttcaagctgctgatcccgtccaagtggaaccccagcaaggagggcgagttccccggacagggcctncgctacgaggacaacttcgacgccaacagcaac

SEQ ID NO: 407155 - DNA, 434 bp, Oryza sativa
gagaatgggcggttccataatgaaacaacagtgcggtactttctcagttattagtacagatatcctcaaacaggacgcatatacgcgagtgacactcacacatgaaacctgggaaccagaaaggggtaataactagcagggactacagcaaatgggcctgttatatccatactcacacccatacttgaccagcaacttaacatcctaacaaacgaacgaattaaagaagccaattcctatctgctgctgacgccgatgttcctttctatcataacaagtcacccgcaaggaagttgccaggcagggcaatattgtggcccggcttgaatgctggtagacctatgtatgggcaagtaccacatcgaaatgcatcgtccaacccacaattgccacaagctgactgagggatattgagtctgtctgatgtgagattt

SEQ ID NO: 407156 - DNA, 494 bp, Oryza sativa
  unsure (1)..(494): unsure at all n locations
tctggtgtggcctcggcctcggcccctctagggtggtggtccacctcctcctcctcgagtccctcttatagcccaccgccaccggccgccgcgcgcccatggccgccgtgttcttccaccatgttgtcggcgacctcaccgtcgggaagcccgaggtcgtggagctgcacgacaccgacacgctcgacgccgccgcgcgggccatcgcggccagccccgagggcgccgtgcccgtgtggcggccgggtccggcgcccgacgagccgccgtcgngcgccaggttcctcgggatgatctccgcgctcgacatcgccacgttcgtggccgcttccggcgtcggtgaccgggccatggccgccgtggtcggggaggtcgtgcagcccaaccctggcctgctccgggaggtcgatccacgcacgaggttgatcgacgcacttgatttgatgaagcaaggggtgaagcgctttcttgttcgaaaaaatggcgcctggaga

SEQ ID NO: 407157 - DNA, 500 bp, Oryza sativa
  unsure (1)..(500): unsure at all n locations
gattttgtctcatatatgactttttttctcaccatcaaggtcgttggacatgtggagcctgtggccgttgatgatggaggctctaaatgattgggcaatagacttctttgagaatattcttgttccattggacaactatgtttcccggggatcggaccattttcttgcctgcaaaaacccagattatcagcaaagcttgtggagtgcactatcatctattatgatggatcaaaacatggaagattcagatattgagcctgctcccaagctcattgaggtggtttttcaaaactgcaaaggcaatgtggatcaatgggttgagccttacctcagtcttacaattgatcgattgcgtcgagcacacaaaccatatttgaaatgtctccttgttcaagtgattgctaatgcgttctactacaacccttctttgacacttgcaaccctacataaacttggngctgtgactgaaatttttaacatttggtttggtatgttagaac

SEQ ID NO: 407158 - DNA, 500 bp, Oryza sativa
gattctgttacaatagaacactgcgcatagaacgggggggagagcaagatgtttggtttcgggcaccacgggcaccatgggcacgaccagacaggccagcaccactggtggtggcgcttggcggctcgcaccacgctatctggatgatcttctggcgagagagagagggggactgagagagcgagggcgagaggaacgtcgtcctcgccccgaccaacccgggcgacgagcaccagcactggtacaaggacatgcgcttcagcgccaagatcaaggacgaggagggcaacccggcgttcgcgctcgtcaacaaggccaccggcctcgccatcaagcactccctcggccagggcccccggtgaaagctgggcgccgttcaacccggagtactcggcgaggtcggtgctgtggacggagagcgtctaacgtgagcaagagcttccgctgcatccgcatgctgaacaacatccggctcacttcgacgcgttccacggcgacag

SEQ ID NO: 407159 - DNA, 498 bp, Oryza sativa
cactctttcacaacacaaccctccccaaaacctccgggagagagcaagatgttcgggttcgggcaccacggccaccatggccaagaccagccgccccagcaccacggcggcggcggcggcggcgcgcaccagcccaccttcaagatcttctgccgcgccgacgaggggtactgcgtcgccgtgcgcgaggggaacgtcgtcctcgccccgaccaacccgcgcgacgagcaccagcactggtacaaggacatgcgcttcagcgccaagatcaaggacgaggagggcaacccggcgttcgcgctcgtcaacaaggccaccggcctcgccatcaagcactccctcggccagggccacccggtgaagctggcgccgttcaacccggagtacccggacgagtcggtgctgtggacggagagcggcgacgtgggcaagagcttccgctgcatccgcatgctgaacaacatccgcctcaacttcgacgcgttccacggcgacaag

SEQ ID NO: 407160 - DNA, 499 bp, Oryza sativa
gtgtgcgagcactgagtagcaagggcccggcacaaacaggacgcagccggcaacgtgtacgtcgaaccaaacagagaacagctagctaatcgatcggtcgccatgaccaaggacgacgccgtcccggtggccgtggcgccggcgaagcgcccgcccatcaacaagtacgccttcggctgcgctctcctcgcctccatgaactccgtcctcctcggctatgatatctcggtgatgagcggcgcgcagatattcatgaaggaggatttgaagatcaccgacacgcagatcgagatcctcgccggcgtcatcaacatctactcgctgttcggctcgctggcggcgggcatgacgtccgactggctgggccgggcggtacaccatggtgctcgccgccgccatcttcttcacgggcgcgctcctcatgggcctcgccccgaactacgcgttcttatggccggccgctttgtggccggcatcggcgtcggctacgcgctcatga

SEQ ID NO: 407161 - DNA, 476 bp, Oryza sativa
tctcactagcaaacctagcctcgaagcgattgtgatgagttttagaggtggtgcgggttcgatcacgtggagttctattggtgttcagtgactcttggcaaaagttctcttgtaaaatcgacgacgatggaaaggtacaaagtgataagggagataggcgatggcacctgtgggaatgtttttagggcttataacactgaaacaaatgaaattgttgcagttaaaaaaatgaagaggaagtttttccaatgggaagagtgcattagtctgcgagaggtgaaggcacttcaaaaactgaatcatcccaacattgtgaagttaaaggaggtgactatggaaaatacgagttgttcttcatttttgaaaacatggaatgcaatttgtatgatgtcataagagaaaggcaagctgctttctcagaagaggagatacggaactttatggtgcagatactgcaaggtcttgcatatatgcat

SEQ ID NO: 407162 - DNA, 500 bp, Oryza sativa
ttcttatgcacaccgctgtggatcttgtaaatgggggcattctcgatagcgagggtacgtcatggctcgcttttgccagccagaaggtggttgaggtgaatgccctttgctacgcattggctggacagaacgatgaggctgactttggaccgaacatctagacaggtcaggcctccaggagggcatcacctcgtgtgacaaacgaggaagtccaaaaggctgctgctgctctgaaggggtctgaccaccgccgtgctaccaatgttagcgctagactggacgcacagcagaagaagctcaaccttccagtccttcctacaaccacaattggttcattcccacagactgtggagctcaggagagtccgccgtgagtacaaggcaaaaaagatctctgaggaggagtacatcagtgccatcaaggaggaaatcagcaaggtttgtaagatccaggaagagcttgacatccatgtccttggtcacggcgagcctgagagaaac

SEQ ID NO: 407163 - DNA, 501 bp, Oryza sativa
  unsure (1)..(501): unsure at all n locations
tttgatgcatcaattcaaaatcttaacaactctgattggtgtggcaggcaattgcatgttgctacatttattaagaagagtgaacgatctacaaacaatgatgacaaatatactaacctatacatgaagaaccttgatgatgatataacagaggaacttattaagttaaagttctctcagtatggtttagtaattagtgtaaagataatgaaaagagatgatgggacatctaagggctttgggtttgtaagttttcaaaacccagaaagtgccaaaagagcaaaagaatccatgaacgggatgctacttggatcaaaaaccttgtatgtagcaagagctcaaaagaaagctgaaaggaaacaatatttgcaacgcttacacgnagagaagagaaatgaaataatcaccaagagcaatgggtcgaatgtctatataaaaaatattaatgatgaagttggcgacgatgctctccgtgaaacgttcaatgaattttgaaacatt

SEQ ID NO: 407164 - DNA, 438 bp, Oryza sativa
  unsure (1)..(438): unsure at all n locations
ggttctgtgtggtggatgggaaggcgagctgcatgatgggtgcctacaccctcatcaatggcgtcccggcgtgtgctagttctgacctcctcaccaagaccgtcaggggagaatggaagttagatggttacacggcgtcggactgcgacgcggtcgccatccttcacaaatcggaacacttcacgaggacggcggaggaagccgtggccgtcgccctcaaggccgggttggacataaactgcggcgtgtacatgcagcagaacgcggcgtcggcgctgcagcaggggaagatgacggagaaggacgtggacaaggccctcaagaacctcttcgccatccggatgcggctgggccacttcgacggcgacccaaggggcaacaagctgtacggccgcctcagcgccgncgacgtctgcacgccggtgcacaaggccctcg

SEQ ID NO: 407165 - DNA, 475 bp, Oryza sativa
cttttcctcctctcttccatcgccgctgctcgcttgctccccctctcccacgaaagatggcgtctcacattgttgggtacccccgcatgggccccaagagggagctcaagtttgccctggagtctttctgggatgggaagagcagcgctgaggatttggagaaggttgcgaccgacctcagggccagcatctggaagcaaatggctgacgctgggatcaagtacatccccagcaacaccttctcgtactatgatcaggttcttgacacggctgccatgcttggtgctgtcccagagcgctactcatggactggtggagaggattgggttcagcacctacttctcgatggctaggggcaatgccactgtccctgccatggagataccaagtggtttgacaccaactaccactttatcgtccctgaacttggtcccacaccaagttctcctactcttcccacaggctgtgaatgaat

SEQ ID NO: 407166 - DNA, 428 bp, Oryza sativa
gttttaatctctccaattttacactgggggtttggctggggtactttaacgctgaccttgctatgttatcctgggcttatccttcccttggcggaatggagtatgttcttcaccacttgctgtcaattatttctttagtctatgctatttattctgaagaaggacagttgtacacatacatggttctcatctctgaaacaaccacacctggaatcaacctccgatggtttcttgatactgttggaatgaaaagatcgaaagcctatcttgtcaatggtgttacaatgtttgttgcatggctggttaagcagatgcgcacctttagctgcattctgatattcgctgtgcccacaatactattagtgatgaacacagcgtggtttgtcaaaatcttgagaggtcttaagaagactctagcaattcaccac

SEQ ID NO: 407167 - DNA, 357 bp, Oryza sativa
gatttcttttgcagaagttttgactcagatataccaaactgtcagcaagaagacggttgaggcatcagatgatggatcaaatgctccaatcaaaggagagaagattaatgtgaaagatgacgtgtctgcgctgaagagaattggctgttgctcaaattagagtagagatgcatttcttgttgattttttccactaggtgtacggctgtatgttgcttctattgaaagaggtccattaattttcattttgttgtggtgatattgagagttagattgttccaactttcagttataccatttcttgaaagtcttaactcaagacagctcctttcgtcagattggttactgtgttcgacat

SEQ ID NO: 407168 - DNA, 459 bp, Oryza sativa
gcttttctgggccgcctacgtcgacgacagggtcgggccggcgtggctggccatcctgttcgggagcaagacggaggaggagagggctggcggtggaggcgcatgccgtgtcggcgctggagacgctagagggcgcgttcggggagtgctccaaggggaagccgttcttcggcggcgacggcgtcgggttcgacgacatcgtgctcggcggctacctcgggtggttcacggcgatcgacacgctgatcggtcgcaggctgattgacccggcgaggacgccggcgctggccgcgtgggaggagcggatgcgcgccaccgacgcggtcaagggagtcgtgccggatgacgccgacaagctgctcaagttcaggcagaccctgcttcgctggagcgcatccatagcaaagtgagatgacatgacacgactgtttttcgcatggtgatgctgcatctaagatg

SEQ ID NO: 407169 - DNA, 486 bp, Oryza sativa
tcaatgtcgttgaagggaatgaaccatgcttcttgagaacttacttctcctgggataacacaagatctgtgattcatggaaattcatttcagaagaagctttcacttcttttcggaatgcgctcagagagtggatctaagagttcaggtgatggtggaccaactcagagggcatcagcattggctgctctttcatctgcattcaacccatcttcccaaaagaataagggtaatgataggcctaaaagctctgatggtggacccactcagcgcgcttcagcaatggctgccttaacatcagcgttcaatccatcagcaaaacccaaaagcccaccacaacgtgcaggtcaaggttctcagcgagcagctgctgttgctgcgctgtctaatgttttgactgctgagggttcatctcaaagcccacgcataggtaggtcttccccatggcaggtgatgcagatacagctgaactaactccgtctgctgc

SEQ ID NO: 407170 - DNA, 497 bp, Oryza sativa
ttgcttttctgcgaggcgacatcagcggcgaggggggggctagggtttcgagcaccggcaccgcgcgccatggccgaggccaaccagtaccagatcctggtgcggctcctcgacggccgcacacgctgcctccgcttctcgacgacgaccgtctccggcgcggcgctcctcgacgccgtctcggcgctctcccgcgtccccgccgcgtccctccgcctcgtcaccggccgcctcgacgtctcgccgtcctccgtcctcgcctcctccgccgacggccgattcccctccgcatccgcgctccttcgcctccgcggaggcaagggcgggtttggctcgctcctccgtggcgccgcctccaaggccggccagaagaagaccagcaacttcgacgcctgccgcgatatcaacggccgccggctgcgccacgttaacgccgagcgccgcctcgaggagtggaaggccgaagccgcagatcgccagctcgagaagcttgcgga

SEQ ID NO: 407171 - DNA, 485 bp, Oryza sativa
gtttttgttcttgcatgctgttcttgttgatcgagtgagagagggggaaggaagaaaggagggaggcacatgcttataccgttcgtgctggagttcctgatcgatgtcgcctgtgatcagtgagatcctcctctcggggtttatgatcaactccacactccggcgccgcacccatctcgtccagtctttctccgtcgtcttcctctactggttctatgtcttctcataagctactcgccatccatttccctctcctcctctctctctagcttccttctacaataatcgatctcgtgttcgtcgtcgtcgttcttgtcgatctctgtgtgtgttcttcgtcgtcgtcgtggttcgttttggattttggtttcagtttagtatatgcacttcttgttcttcactgctgctgctgctgctaagcttgtagcattctagtggtgcttggtgttcttcttttccgaaatctttgcgatcgattgattgat

SEQ ID NO: 407172 - DNA, 515 bp, Oryza sativa
agctaattcagcagcagaagcagcagcagcagctcagccgccgccgatggcgtccacgatcatggccccaacctcccgcgtcctcgccgccaagacccccttcctcggccatccccgcccctccaatgcccccgtccgcgacatcgccgccgccgccaccggccgcatcaccatgagcaaggagctgtggtacgggccggatagggtgaagtacctggggccattctcggcgcagacgccgtcgtacctgaggggcgagttcccgggcgactacgggtgggacacggcggggctctccgcggacccggaggcgttcgcgaggaacagggcgctggaggtgatccacggccggtgggcgatgctcggcgcgctgggctgcatcacgccggaagtgctcgagaagtgggtgcgcgtcgacttcaggagcccgtgtggttcaaggccggcgcccagatcttctccgacggcggcctcgactacctcggcaaccccagcctggtgcacgcccagagcat

SEQ ID NO: 407173 - DNA, 498 bp, Oryza sativa
  unsure (1)..(498): unsure at all n locations
cttttcgtcgccgctgccatggcgctctccgtggagaagacctcgtcggggagggagtacaaggtgaaggacctctcccaggcggacttcggccgcctcgagatcgagctcgccgaggtcgagatgccggggctcatggcgtgccgcgccgagttcggcccctcccagccgttcaagggcgcccggatctccgggtccctccacatgaccatccagaccgccgtcctcatcgagaccctcaccgcccttggcgccgaggtccgctggtgctcctgcaacatcttctccacgcaggaccacgccgccgccgccatcgccagggactccgccgccgtgttcgcctggaagggggagaccctcgaggagtactnggtggtgcaccgagcgctgcctcgatggggcgtcggcggcggccccgacctcatcgtcgacgacggcggcgacgccacgctgctcatccacgagggcgtcaaggccgaggaggagttcgagaagtca

SEQ ID NO: 407174 - DNA, 495 bp, Oryza sativa
  unsure (1)..(495): unsure at all n locations
gttttgttggcccccattcctcccccacccgggtgtcctcccctccgccgctcgcgtcgccgcctttttcccctatggcgctgccgaatcaggggaccgtggattaccccagcttcaagctggtcatcgtcggcgatggcgggactggtaaaactacatttgtgaagaggcatctcactggagagtttgaaaagaaatatgagccaaccattggtgtcgaagttcaccctctagattttaccaccaactgtggtaagatccgcttctactgctgggacactgctggacaagagaagtttggtggacttagggatggatactatatccatggtcaatgtgcgataattatgtttgatgtcacttcaaggctgacttacaagaatgttccaacatggcatagggacttgtgcagggtgtgtgaaaacatccncattgtcctgtgtggtaacaaggttgatgtgaagaacaggcaggttaaagccaagcaggtcacat

SEQ ID NO: 407175 - DNA, 493 bp, Oryza sativa
ccgccgccgccgccgccgcagtcgcgggtggggctccccaaccgaggaatccggtgccaccgccgccgctgcgggcgcccgcgcgcgcgacgtcccgctgcctacgacgtcgcccacggctccatgactatgatgactcctccccccatcgagcagcagcaggaggacgaggagatgctcgtgccgcaccaggagctccccgccgccgccgccgctgtcgtcgccgacgccgtgcagccgatggaagttgtggcgcagacagagcctgccaacgcggcagagagccagccgccggaggacccgcagacgtcgcggttcacgtggacgatcgagaacttcaccaggatcaacgggaagaagcactactcggagccgtttgttgttggaggattcaaatggcgtgtgctgattttccctaaggggaacaatgtggaccatttctctatgtatttggatgtcgcggactcggtgaatctcccttatggatggaacc

SEQ ID NO: 407176 - DNA, 488 bp, Oryza sativa
ggtattcccatacactttgtttgtcttccccgtctcgtgggcgagagaaaccgacaggagagagagggagaggagcgctgccgattttccggagggggagatctttttcttctccctgaagggtcgagatcgatctgcgacgaggaggagcggggaatcgtaactttatttccgaggaaatttcaacaaattgatgcactaatggagtccaagggtggcaaaaagaagtctagcagtagtcgttcctccctgatgtacgaagctcccctcggctacagcattgaggacctccgacctgccggcggcatcaagaagttccgctctgctgcttactccaactgcgcgaggaagccctcttgatagcccccttggctaccttgacctagtagtttagttactcctctgaattctcgttttgggctttcttacatctctctggctagctgctgcccagtgaccgggaaggtcatcagtcctgctttctttct

SEQ ID NO: 407177 - DNA, 316 bp, Oryza sativa
ctctagctttagaaggagagagcttggtgagctgcggagagggccccctccgtgatggcgtcgtcggccaccaccgtcgctcccttccaggggctcaagtccaccgccggcatgcccgacgcccgccgctccggcaactccagcttcggcaacgtcagcaatggcggcaggatcaggtgcatgcaggtgtggccgattgagggcatcaagaagttcgagaccctctcctacctgccaccgctcaccgtggaggacctcctgaagcagatcgagtacctgctccgttccaagtgggtgccctgcctcgagttcagca

SEQ ID NO: 407178 - DNA, 501 bp, Oryza sativa
cgatcgcttccacgcacgcccgatcccggccgcgagatgagcttccgcggcgaggagagcggcggcgaggatggggggcggacggcgtcggcgtcggacctgcggaagccgttcctccacacggggagctggtacaagatgtcgtcggcgggcggcggcggcgggatggggtcgcgcctcggctcctccgcctactccctccgcgactcctccgtctccgccgtcctctgcaccctcatcgtcgccctcggccccatccagttcggcttcacctgcggcttctcctcgcccacccaggacgccatcatctccgacctcggcctcaccctctccgagttctcgctgttcgggtcgctgtcgaacgtctgggcaatggtgggcgccatcgccagcggccagatcgccgagtacatcggccgcaaggggtctctcatgatcgcggcaattcctaacattattgggtggctcgcaatatctgttgcaaggactcatcctttttgt

SEQ ID NO: 407179 - DNA, 346 bp, Oryza sativa
cgtcgcggcgcttccgttcttccgggccggcggccatggaggacgcagcagcaaggcggatggagaggctcgcctcccacctccggccgcccgcttctcagatggaggaatcacccctcctgaggggctccaattcccggtcaaaaggtgccgctccgggtttcaaggtcgccatcttgggagcgtctggtgggattggccagcctcttgcattgctcatgaagataaaccctcttgtgtctgtgctccatctgtacgatgttgtcaacactcccggtgtcacagctgacattagccacatgaacactggtgcttgtgtgcgtggtttcttgggccagccacagtt

SEQ ID NO: 407180 - DNA, 337 bp, Oryza sativa
tatttttttttttttttttttttagaaaaccagggggattttgtgccccaggggttggtctatcggaaagggaaaaaattctgaaatttcgatccgaaattgtgaattcctgttagagcctctagatatcaaaaccgaattaagtaacggccccagaatgggcaatcgatcaggtagccaagccatagcaggccagcgcctgatgcagatcagtacttgtagtccttgacgtgcaggctttcagtatcgccctcgccgaggacagcatcacccttgtaagtacccagggtagcctcggagttggccttgcacctgacaaggaaggccgccctggcct

SEQ ID NO: 407181 - DNA, 484 bp, Oryza sativa
  unsure (1)..(484): unsure at all n locations
ctgttggagtggatgtgtctgcaagtgagaaaatgtggagaacttttcagtcacttggtgacattgcctttgcatactcctactccaatgtcctcatagaaattcaggacacgctgcggtcgagcccggcggagaacgaggtgatgaagaaggcgtcgttcatcggagtctcgacgacgacgacgttctacatgctgtgcggcgtgctcggctacgcggcgttcggcaaccgcgcgccggggaacttcctcaccggcttcggcttctacgagcccttctggctcgtcgacgtcggcaacgtctgcatcgtcgtccacctcgtcggcgcctaccaggtcttctgccagcccatctaccagttcgccgaggcctgggcgccgtcgcggtggccggacagcgccttcgtcaacggcaggcgcgtgctccggctgccgctcggcgccggcgacttccccgtcagcgcgctccgnctcgtctggcgcac

SEQ ID NO: 407182 - DNA, 384 bp, Oryza sativa
gtctttttttctgcagcggcggcatcatcttcttcgggggggtagcttcacacacgcgggaggcccctccgcggctgcgcctactaagagagatctgccctttggaacttgataaaagacatagaacctttggatctaagcataatccaaaaagatgttccttctgaaactgtggatgcaatgaagaggactgtttcaggcatgttgggccttcttccatccgatcagttccatgtggtcatagagtccctttggaatcctttcttcaagctggtggcatcttcaataatgacagggtatactttattcaatgctcagtacagactctcccttgaaagaacgctggagttttctgaagaagaaactgaatgcaagaaaagagat

SEQ ID NO: 407183 - DNA, 262 bp, Oryza sativa
gctctattgctttgctctgatctggttgatcgatcggggggtctgcaatggagaaggggctttcctcctccagcgccgccgccgccgtggcgtcacagggccagctcccggactgcttcgtgttcccggccgaccggcgcccaccggcctccaccgcgggcgtgtcgctccccgtcatcgacctctcctgcccccgcgacgccgtccgccgcgccgtgctcgacgccggcaaggagctcggcttcttccacgtggtgaacca

SEQ ID NO: 407184 - DNA, 291 bp, Oryza sativa
cttttcctttggctggctaactaactacgtggctagtggggcctccatgatggacgcgtgggtgctcctctacagtctactgcaagggctcaggtccaccagacgggctccacgatagacgccgttccagcaacattgacttcggccacgccaggactggcggcaggatcatgagcactgcttgtgtgggcaattgagggcatcaagacttcctagaccctatcgtacctggcaccactcaccgttgaggatcttttgaagcaaatcgagtacctgcttcgatccaagtgg

SEQ ID NO: 407185 - DNA, 336 bp, Oryza sativa
cgcgggttgggaagagcgagctcgtgaggggagcataaggaaagcgcgagggggaaggaggaggaaaggtgcacaaggtcagactaagtttgcgttgaagaacaaaggagaggaaaaatgtcgcctgctgtggcatcgcgtgaggagaatgtgtacatggcaaagcttgccgagcatgctgagcgttacgaggaaatggtcgaattcatggagaaggtggcaaagaccactgatgttggtgagctcaccgttgaggagctgaacctgctttctgtggcttacaagatcgttattggtgctctgagggcatcgtggaggatcatctcttctattgag

SEQ ID NO: 407186 - DNA, 472 bp, Oryza sativa
ataatatcacaagagaggaggagaaaaaaaaagggggggagcaaaccctcctcctccgcgatccgccgccttccctcctcccccacgatctccggcggcggcggcggcgatggcccggaagaggaagacggacgcggcgccgcggctggacgaggccgaccggacgctctactccaccttctgcggcgccgccaactccctctcccagctctacacccaggccatggcccagcagaagctctccttccaggccggcgagcgccactccctcgaaaaactccaccagtggatattgagaaagcatgaggaagagtcgaggctcacggcggctgatataatgtctcatatccagcatgagttggattatggagggaatgatccacatgtttcccccagagtacatcagcatagtgcatatccgtttgcaaactcaagcatccaaccctcagctggttcctatggtcaagcaaca

SEQ ID NO: 407187 - DNA, 378 bp, Oryza sativa
tttctttcctcccagtgtctctcaagagcggggcggggttcacaaggcaggagaaagggggggagatcaccaatgtcatggagtaccaggccatcgcgaagcagaagcttccgaagatgatctacgactactacgcctctggagctgaggatgagtggactctcaaggagaacagggaggcattctccaggatcttgtttcgtccccgcatcctgatcgatgtctcaaagatcgacatgtccgcaactgttcttgggttcaagatatcaatgcccataatgattgctcccagtgccatgcagaagatggctcaccctgacggagagtatgcaacagccatggcagcttcagcagcaggaactataatgacactgtcat

SEQ ID NO: 407188 - DNA, 368 bp, Oryza sativa
ttctttgatggagcactcagcgatgtggagctgagggactttcatgacaaatgcgtgagtgctcctctccagcctactgaaattgcaggcgtgaagagagtggttcaagagaagatgcctgaaggcgtgaatgacaatggccttaccttgactggattcctttttcttcatgctctttttattgagaaaggacgactagaaactacatggactgtcctaaggaagtttggttatgataatgaaatcaagcttaaagatgaccttattccaacaattaaacgagcgcccgatcaaaccctggagttgacaggtcaagccattgatttcttgagaagaattttcaatatgtttgacacagatcatgatta

SEQ ID NO: 407189 - DNA, 340 bp, Oryza sativa
tagctaccgaaatcggcgtcgtcggggcgtgtatggcaacccaagcgcgaccactcccctacgtaaggccctactgggcgacataaccactgctcagctggacccaccatggcgacgtgttgcacgcgccgaccggcacaacgtgctccggtctccccacagcatgctgttgaacaacaagcgccagccctacgacgatttccggctggccggccaccaaaactacgtggagtcgtggggcacggggcgcgccgcgtcacgtataccccgtgtccccggcggcgggacgcaccgcgccgttcagggagccttctgcaacatgagccgcggcgggcgcatg

SEQ ID NO: 407190 - DNA, 404 bp, Oryza sativa
ggctctttctccggtttccggcgagcggcggcgcggtcgggggcggcgaaggagggggaggccatgagggagatcctccacatccagggcgggcagtgcgggaaccagatcggggccaagttctgggaggtgatctgcgacgagcatggcgtggacgcgactgggcggtacgcgtaggactccaacctgcagctgtagcggatcaacgtctactacaactaggcgagcggcgggaggtacgtgccccgcgccgtgctcatggacctcgagcccgggaccatggactccgtgcgctccggccccttcggacatatcttccgtcccgacaacttcgtattcgggcagtccggcgccagatacaactgggccaaggggcactacaccgagggcgccgagctcatcga

SEQ ID NO: 407191 - DNA, 470 bp, Oryza sativa
aatctttcatgtacactgctacttggcctaaggaagtccgacgaattgcagaggatcttcttgttcaccctgtccaggtgaccattggaagtgttgatgagcttgttgctaatagtgctattactcagaatgtggagctgatcacaccgtccgaaaagcttcgccgtctggagcaaattttgcgatcccaggattcaggttcgaaggtactaatattctgtaccactaagagaatgtgcgaccaacttgcaaggacacttactaggcaatttggagcttctgccattcatggtgataagtcccaaagtgaaagagagaaggtcctgagccattttagatctgggcgatctcctattttggttgcaacagatgttgctgcacgaggcttagacatcaaagatatcagggttgtgatcaattatgatttccccactggcattgaagattatgttcaccggattggcaagact

SEQ ID NO: 407192 - DNA, 528 bp, Oryza sativa
acaggtatcatagagtgctgcaaatagtttacctacactccatgtatgttctgcagagggttgataatgtgccgatgcttcagctagatatagtttggtgctatttcgtgcttcgtgatgtatcacgcttagaagttgcaggaactcgcttagaaagggctcgctcaggatttgaacgttctcatggtaaagactctgctcgtttcagattactccaagctggccgtcatgcagatcttgcaatatatgtaaggctggagcttttggaaggagtggtagcatatcacaatggaaatactgtaaaggcgcgtgaatcccttacttctgcccaagcaaaatacatgcagcttcaagtaccagatgaagctatatcaatcttaatgagcatgggctatggagcacaagctgcaaaaagagcattaaagatgactggctatgatatccaatcctcagttgatctcttatgtgaagagcgtgaaaagaaattcgagagtacaggaagatattgagatgcaaaaagagatcatg

SEQ ID NO: 407193 - DNA, 344 bp, Oryza sativa
gttgtttaggattcatgctatgtctctgatgatggtgctgctatgctgacatttgaagcattatccgaaacatctgaatttgcaaagaaatgggttcctttctgcaaaaagtacagtattgaaccacgtgctccagagtggtacttccaacagaagatagactacctgaaggataaggtggcaccatactttgttagggagaggagagcaatgaacatagagtttgaagaattcaaggtgagaatcaatgcattggttgctaaagctcagaaagctcccgaggaaggttggacaacgcacgatggaactccctggcctggaaactatgttcgcgatcacccttg

SEQ ID NO: 407194 - DNA, 513 bp, Oryza sativa
ttctttaccaccaccttcatcttggttggctggggtcactcctactacctacctgcgggtgcagttggcttgctgaaccctcctcaagaacccacgcctctcctctcgcggcggctgctaaccgagccatggcgcgcaagaagatccgggagtacgactccaagcgcctcctcaaggagcacctgaagcgcctcgccggtatcgacctccagatcctctccggccatgttacacaatcgacggacttcacagagctggtaaaccagcagccatggctgtcaaccatgaagttggtcgtgaagcccgacatgctgctcgggaagcgtggcaagagcggacttgaggccctcaacctagatattgctcaagtcaggagtttgtgaaggagacgctgggagtctaggtcgagatgggtggctgcaaggctccaatcaccaccttcattggtgagccattttgtaccccatgatcaagaatactacctttctatttgcctcgagaggctgggcagca

SEQ ID NO: 407195 - DNA, 432 bp, Oryza sativa
ctgttcgttatcgcactccacctagggtgaaagcgggggggttttggatcacccctggggtgcgatcgaccgggtctctgctgaggtctccacgccgccgacaggtagcgcgagctagagagatggccgagacagtgttcactccctcgttggagggtatgaagcatgttaagtcagagagcagtgtcatactcaccaagccctttcttgatgtctgcaagcaaatcttgcctgttttggataaatttggagctgctatggcacttgtgaagagtgacattggtggtaatatcacgaggctggaaaataaatattcttcagacccatcaaaatatgagcaattgtacagcatggttcaggaagaggttcaaaacaagactgcaaaaggttcgtcaagctgcacaaatggacttctgtggctcacgagggcta

SEQ ID NO: 407196 - DNA, 441 bp, Oryza sativa
gcggtggctgccatggcgtcgttaggagctaacagcgatggccgagtcctgcacacctgcacactctccccaaagccggttacagctttgagcagaagcatgggggccattcctggacaccatgtttttcagtctccacgagctcggattgcagtgcgagctagcaccgagcgtgcgacctggctgcctgggctcgatccacctcctcacctcgacggcacattacctggcgatttcggatttgatcccctgggtctcggggaggaaccggcaaacttgaaatggtatgttcaagccgaacttgtgcactgccggtttgcgatggcaagggttgctggcatccttgcgactgatttgatacgtgtatcaggaatcaacaacctgccagtgtggtttgaagcaggtgcaacaaaattcgacttcgctaacaccacggcactc

SEQ ID NO: 407197 - DNA, 431 bp, Oryza sativa
gttgtcttctcctccccctctttaccttttcctccgggggtcggttccgtggttcgtgtagggtttagtgggttgagatggcggcgccggatgtcgagtaccgctgcttcgtcggcggactcgcctgggccaccgacgaccgctccctcgaggccgccttctccacctacggcgagatcctcgactccaagatcatcaacgacagggagacggggaggtcacgtgggtttggcttcgtcaccttctcctccgagcagtcgatgcgcgacgccatcgagggcatgaacggcaaggagctcgactgccgcaacatcaccgtcaatgaggcccagtcccgccgctcctgcggcggaggcggtggctaccgcggcagcggtggcggctaccgcggcggtcgtggaggcggcggctaccgaggaggtggcggcggc

SEQ ID NO: 407198 - DNA, 385 bp, Oryza sativa
ggtctgatctaattaatttacctcctccacctcctgggggtccccccgatcggatcgggccgggtcctcctcctccgccgccggcaccgccgccgcagataggagaagatggccgcacttgataccttcctctttacctcggagtctgggaacgagggccaccctgacaagctctgcgaccaagtctcagatgctgtgcttgatgcctacctctccgaggaccctgacagcaagggcgcttgtgagacctgcaccaagacaaacatgggcatgggctttggggagatcaccaccaagggtaacgttgactatgagaagattgtcagggagacatgccgtaacatcggttttgtgtcagctgatgtcggtctcgatgctgaccact

SEQ ID NO: 407199 - DNA, 522 bp, Oryza sativa
  unsure (1)..(522): unsure at all n locations
gcccgtgtcgagcacgttcgtcaacctggtgaacgggtggtacacggtgaagcagcgcggcctgcgcatcaccgaggagcgggtctcccacgagagccccgccgcggaggcgccgctggagtccatccaggtgaggctctcacacgtccagtccaagttcgccggcgccatcagcgacggcggcgacatcgtcctcgaggggagggtcaagtacggcgtgccgcacctcaccgtcgtcgggccctacgaggtggacgtcagcctggagggcaacctgatcctgtgccggcagatcgaccagcccggcatgatcggcaaggtcggcaacatcctcggccagacgaacgtcaacatcagcttcatgagcgtcggccggaccttccgcggcaagcaggccatcatggccatcggcgtcgacgaggagcccgacaaggagaccctcgagcacatctgccacatnccggcgatcgaggagttcgtcttcctcgagctatgatgaacagcagcagcagcagcagcagc

SEQ ID NO: 407200 - DNA, 448 bp, Oryza sativa
gctgctgctcctcccgttttccgatcgcagccatgggaacccgcagcgtggccttggtgctcctcgcggccgtgctgctccaagccctcctccccgcttcggcggcggagggtttggtgcggatcgcgctgaagaagcgcccgatcgacgagaacagccgcgtcgccgcgcgactctccggcgaggaaggggcgcgccggctgggcctccgcggcgccaactcccttggcggcggcgggggtgagggcgacatcgtggcgctgaagaactacatgaacgcgcagtacttcggggagattgggcgtcggcactccgccgcagaaattcaccgtcatcttcgacactggcagctccaacctctgggtgccgtcggccaagtgctacttctcgattgcgtgcttcttccactctcgctacatgttcggacagtcgagcacttatcagaaga

SEQ ID NO: 407201 - DNA, 454 bp, Oryza sativa
gtcttctcctcctcacacctcaccttccccctcggtgctccgatcgcgcgcgcatggcgatgtcacgagccgccgccgctgccgcggggactcccgtggcgcggcggcgattgatgggggccgtggcggcgaggtcgatggcgtcgtggttcggccacgtggaaccggccgccaaggaccccatcctcggcgtcaccgaggcgttcctcgccgacccctccccggacaaagtcaacgtcggcgtcggcgcgtaccgggacgacagcgggaagcccgtggtgctggagtgcgtgcgcgaggcggagcggcggatcgccgggagcatgaacatggagtaccttccaatgggtggaagcataaagatgattgaagaatcacttaaactggcctatggggagaactgtgagttcatcaaggacaagaggatcgcagcagtgcaggctctttcaggaac

SEQ ID NO: 407202 - DNA, 522 bp, Oryza sativa
  unsure (1)..(522): unsure at all n locations
gtttgttcgtgaggagagcagagggaaagcgcgagggggaaggaggaggaaaggtgcacaaggtcagactaagtttgcgttgaagaacaaaggagaggaaaaatgtcgcctgctgaggcatcgcgtgaggagaatgtgtacatggcaaagcttgccgagcaggctgagcgttacgaggaaatggtcgaattcatggagaaggtggcaaagaccactgatgttggtgagctcaccgttgaggagcggaacctgctttctgtggcttacaagaacgtgattggtgctcggagggcatcgtggaggatcatctcttctattgagcagaaggaggagagccgtgggaatgaggcatatgttgcatcaattaaggagtaccgtagcaggattgaaactgagctcagcaagatctgtgatggtatccttaagcttctggattcccaccttgtcccatctgccactgctgcagagtccaangtgttctacctgaaaatgaatggtgactaccacaggtaccttgctgag

SEQ ID NO: 407203 - DNA, 440 bp, Oryza sativa
ttatttcccaaaaacaaaaaataataaaaaaaggagggagagagacatttcgcatgtgctgccctgcctcctctcccatcacctgcccattttttcacattgaggcccctctgaaaatattatatttacaactaggtccctggccgggccggccggccaccggaaggagcacctcgccggagaaggctttgtctcttctttttcttctcctcctcctcctccatcggcggcggcatggggttctcgctgtaccccatgaagacgtcgacgcgcatgctgtggagcaccagcttcttccgccataaggtcgcctcctccttctaagcccacgccctctcgggcggcggcggcgagccggcggctgatcgccgcgttggtaagtgcgcgtgcgtgcgtgaacgggagagcagcttcgagatcgggttttcttgggttcttgg

SEQ ID NO: 407204 - DNA, 481 bp, Oryza sativa
gtcctttgagattgctgagaaagctagagatgctatccttagtggcaagtttgaccaggtccgcgttaacctcccaaatggtgatatggtgggtcacactggtgacattgaggccacagtggttgcttgcaaagctgctgatgaggctgtcaagatgattctggatgccattgagcaagtgggtggcatctatttggtcaccgccgatcatggcaacgccgaggatatggtgaagaggaacaaatccggccagccacagcttgacaagaaaggcgaaatccagattcttacctcacacactcttcagccagtgccagttgccattggaggccctggcctacattctggggtgagattccgcaacgacgtgcagacccctggcctctgcaacgtcgtcgcaccgtgatgaaccttcacgggtttgaggcccctgctgactacgagccaaccctaattgagtagttgacaaataattaaatgt

SEQ ID NO: 407205 - DNA, 485 bp, Oryza sativa
  unsure (1)..(485): unsure at all n locations
gcgtctcttaggccaggtacgtcaagttccactgggggggcacctgcggcgtcagctgggtgatggacgacgaggccacgctcgtctgcggcaagaaccacagccacgccacccaggacctctacgactccatcgccgccggcaacttccccgagtggaagctgttcgtccaggtgatcgacccggaggaggaggagaggttcgacttcgacccgctggatgacaccaagacatggccggaggacgaggtgccgctccggcccgtggggcgcctcgttctcaaccgcaacgtcgacaacttcttcaacgagaacgagcagctggcgttcgggccggagctggtggtgccggggatctactactccgacgacaagatgctgcactgcatggtgttcgcgtacgccgacacgcagcgctacaggctggggccaaactacctgatgctgccngtgaacgcgcccaagtgcgcccaccacaacaaccac

SEQ ID NO: 407206 - DNA, 509 bp, Oryza sativa
gagagattttcccacgcagcagcaagcaatccaatgggagagcgcgcgtttgcgatgattcgctttcgattccgcgaggtttttggagagggaggagaaggaggaggagatgtcgaagggggaagggccggcgatcgggatcgacctggggacgacctactcgtgcgtgggcgtgtggcagcacgaccgcgtggagatcatcgccaacgaccaggggaaccggaccacgccgtcgtacgtcgccttcaccgacaccgagcggctcatcggcgacgccgccaagaaccaggtcgccatgaacccaaccaacaccgtcttcgatgcgaagcggttgattggtaggaggttctccgacccgtccgtgcagagtgacatgaagctatggcccgtcaaggtggtgcctggccccggcgacaagccgatgatcgtcgtccagtacaagggcgaggagaagcagttcgccgcggaggagatctcgtccatggtgctgatcaagatgagggagatcg

SEQ ID NO: 407207 - DNA, 392 bp, Oryza sativa
gtcttctttactcctcatccataacccctacgcttgcggagccttatagaagcttccgttgcgctcgcattccgctacaatggctgagggaacctgatgcgcgtgctagtcatcgcagcctcaggacaaaatggatatgcacttgtccccatgatcgctaggggtgggatgttgggcgctgaccagcctgtgattctacacatgctcgacattccaccagctactgaatctgttaatggccttacaatggagctggttgatgctgcattccctctttagaagggaatagacagaacaactgatgtcgctgaggcccgcactggggtgaatgagaccattatgtgcagggggttccccaggaaggagggaatggaaaggaaggatgttatcgt

SEQ ID NO: 407208 - DNA, 356 bp, Oryza sativa
gttcttcagcagttgatttgcctgaaattgttggaggtgctccacttcagccacctagtttgtcatggagcctatacttgccattgttgaaagtatttgagtatttacctcgtgggagtccatctgaagcatgccttatgagaatttttgtggcaacagttgaagctatactgagaagaacttttccatcagaaacctctgaacaatccaggaaaccaagaagtcaatctaagaaccttgctgttgctgaactccgaacaatgatacattcactctttgtggagtcctgtgcttcaatggaccttgcgtccagattactatttgtagtattaactgtttgcgtcagtcatcaagct

SEQ ID NO: 407209 - DNA, 415 bp, Oryza sativa
tctcatcctacctgaagaaggtcggctacaatggtggcaagattcccttcgttcccatctctgggtttgagggtgacaacatgattgagaggtccaccaaccttgactggtacaagggccccaccttgcttgaggctcttgaccagatcaacgagcccaagaggccatcagacaagcccctgcgtcttccccttcaggacgtgtacaagatcggtggtattggcaccgtgcctgtgggtcgtgttgagactggagtcctcaagcctggtatggtggtgacctttggtcccagtggcctgaccactgaggtcaagtcggttgagatgcaccacgaggctctccaggaggctcttcctggtgacaacgtcgggttcaacgtgaagaacgttgcggtgaaagatctgaagcgtgggta

SEQ ID NO: 407210 - DNA, 446 bp, Oryza sativa
tatctctaggaaaaaatcatcatggtcgtcatggaggggagagacagtatagcctaatctaatcccagattgctagtgattagcacgtagatacatagaagcgatcgatcgaggacacatcgagaaaaaggtaaaagggagatcaattaatcgaagaagagagtttttgaaatatcgatcgatctagctatcatcatgtcgttcatccggaagaagtcgatggagttcttgaagagcttcgaggtgccggcgaagaacccgtcggaggaggcgcagcgccggtggcgggatgccgtcggcacgctcgtcaagaaccgccgccgccgcttccggatggtacccgacctcgacaagcgctcgcaggccgagacccatcgccgcaagatccaggagaagcttcgtgttgcactcttcgttcagaaagctgcacttcagttcatcgatgc

SEQ ID NO: 407211 - DNA, 459 bp, Oryza sativa
gtactaaccgacggtttccccggccatggctggtgggccgccgtggggaaccccgagccccgagcgcggcagcaggaggaagggcgaggacccgtggctcgcggcgagccttcgcccggtgaatttcctcccggggctcgcgattgggttcctcctcggcctactcgtggacttgacctcctcatggaggccccaatcgagtccaccgatggctccggctgcccctgcgccgcggggctccaagcggacgggtggctcgtcgcacgctggcgggggcatctgacgcgaagagcttaagacggtcttggtcgtgcgttaggacctcaagatgcggtctggaaaaataggttctcaatgtgctcatgcagcaactggtctgtatgcatgactgatggctatgctaccgtgtcttttgagacagtgggagcaatttggacaagctaagagctgtttaacatg

SEQ ID NO: 407212 - DNA, 454 bp, Oryza sativa
gcggacttttctctcctcctctaatctcaagtctctggggggtcgtcctcacatctccactggccatgggcaatattaagatcggaatcaacggtttcggaaggatcgggaggctcgtggccagggtggccctccagagcgaggatgtcgagctcgtcgccgtcaacgaccccttcatcaccaccgactacatgacctacatgttcaagtacgataccgtgcacggccaatggaagcacagcgacatcaagatcaaggactccaagactctgctcttgggcgagaagccggtcaccgttttcggcatcaggaaccctgacgagattccgtgggctgaggctggtgctgagtatgtcgtggagtccaccggtgtcttcactgacaaggagaaggctggtgctcacttgaagggtggtgccaagaaggttgtcatctcagccccgagcaaagatgc

SEQ ID NO: 407213 - DNA, 407 bp, Oryza sativa
ccacccgtcgctcgccgctcgcccaccatggccatgggggcggcgctccacaagctctggggcgacaccctccgccgccagccgctctcccgcatcaccccgctctactacatggcgtccctgccggcgacggaggagagatccggagtcacctggccgaagcagctgaacgcgccgctggaggaggtggatcccgagatcgccgacatcatcgagcacgagaaggcccgccaatggaagggtctggagctcatcccgtcggagaacttcacctcggtgtcagtgatgcaggcggggggatccgtcatgaccaacaagtacagcgaggggtaccccggcgcgagatactacggtggaaacgaatacattgatatggccgagtcattgtgccagaaacgtgctttgga

SEQ ID NO: 407214 - DNA, 472 bp, Oryza sativa
ccgtttctcggcgccgccaccccgcaccaggtaagggggggggagtaagaagatgtggggcaggaagttcgagcacccgaggcacggatccctcggcttcctcccgaggaagcgctcctcccgccaccgcggcaaggtgaagtcattccccaaggatgacgtcaacaaaccatgccacctcacctcctttgtcggttacaaggctggaatgacccacattgtgcgtgaggtcgagaagcctgtttccaaactccacaagaaggagacctgtgaggctgttaccattattgagacacctcctattgtcgttgttggacttgtggcctatgtgaagactccacgtggcttacgcagtctcaactctgtctgggctcagcatcttagtgaagaagtaaggagaaggttctacaagaactggtgcaagagcaagaagaaggctttcaccaagtatgctctcaagtatgatagcgat

SEQ ID NO: 407215 - DNA, 319 bp, Oryza sativa
cttgttcagctcctcctcttcatccagtcctcgggagtctctctgatctctctctggggctgaaaattctccgcacactccggtgggcttaagcggtggcggcgtctcgcctgggtgggcgagatccctctcttgctcgtccgcaaggtcgctccccctgcgagtccaatctactgacgagctgggaggagcaaaggagggggcaattggagctccgctcggttccaattcagccccaattttgagccccccggctgcggggttcggccagttgagacgccatgtatcgggtgaagagcgagagcgactgcgagatgat

SEQ ID NO: 407216 - DNA, 388 bp, Oryza sativa
ttttgaaagaaaaaaaaagaaaaaacaaaggaaatggcgtggtcgaggaggagggaggagagagagccgcttccgcttgattcgattcgaagcaaaaccaacccaacccaacccaactcaaccgaatcgatggccggcgacgagcccctccccggcgacgggcagcggcggcgctacctcatcggctacgccctggcgccgaagaagcagcagagcttcatccagccgtcgctggtgtcgcgcgcggcggggcgcggcatggacctcgtccccgtcgacccctcgcggcccctccccgagcaggggcccttccacctcctcatccacaagctctacggcgaggagtggcgcggtcagctggacgccttctccgccgcgcacccagccg

SEQ ID NO: 407217 - DNA, 420 bp, Oryza sativa
gtgtccactgacgccaatgatgttactgtcctcaatgcgctattcaccagcctcaattcgccggggcagctgcgcggttggcaggtgaatggcggtgacccatgtggcgcctcatggcagggcatcacctgctctggatcatcagtcacagcaattaaattgccgagcttggggctttcggggaatctggcctacaatatgaacaccatggagtccctagttgagcttgacatgagccaaaataatcttgggggtggccaaaatattcaatacaatcttccaaataagaagcttgagaggctcaatcttgctgggaaccagtttgctggaaatgtgccatactcaatttccacaatgcctaaacttaagtatctaaaccttaatcataaccaattacaaggaaatatgacagatgtcttt

SEQ ID NO: 407218 - DNA, 450 bp, Oryza sativa
gttgttcatctcaggttcgagatcgatatgggggcggattctatgtgttactttggtggtggaaaagatgaggaagaggaattagagatgtatcgtcaaattcactttccagccttgacagaactaaggaagacgacaaagttgccctcagctgctttcttgcgatctgaaggaaaatgcccccttgcacctgaagaggctgtgcttatgcttgctgctattggtttcaagcacagcacaaatgtatacattgcaggtgctgaaatttatggtgggagacataggatggcagccataagccgtctataccctgctttagtatttaaagaaactcttttgtcttcctcggaactcgaaccattcagaaacttttcatcccaggtaatattttttaagatatatcgtttggccccttgcatgtaatatacgtataaaagatgcatagagaca

SEQ ID NO: 407219 - DNA, 400 bp, Oryza sativa
  unsure (1)..(400): unsure at all n locations
gcgaacggcctaaatcttctccttggagggcctcccatggattccctgggggccttcgccatacccatggctctcatggcggttcaacctggcccgcaaatgactgccttagctgctgcgacgtcaacggcgatggctgcctaagcgccctggcctaccgacatgcccggatcttctataccagacgccatctgaaatctcctacaccatgagcacagtgttgctagcgccaccttcaaagccaacagtggaagagtactgtctccgncgacaatgaacttcaactactacgactacaggaccctgactcgaatcgacgccccttccctggatgcatttaaccgcttgacccccgcacagaacgccctcaaaaacagaatgctctctccgacttcaacgg

SEQ ID NO: 407220 - DNA, 413 bp, Oryza sativa
aatttttctgcacaatgaaaagaatagccctggtaagttgcccttggctattgttttgggcccaacaagagaactcgcgaaacaagttgagagggaattttctgattcttccaatgtggaaacgatctgtgtatatggtggaactccaattagccagcaaataagacaactcaattatggagttgatgttgttattgggacaccaggacgagtaattgacctgcttaaaagaggtgctctgaatctgtcagaggtccggtttgttgttcttgatgaagcataccagatgttgtcagtgggttttgatgaagatgttgagacaattttggatagagtacctccaaaacgtcaaaccttgatgttctctgcgactatgccaacttggattcagagactcacccagaaatacctta

SEQ ID NO: 407221 - DNA, 462 bp, Oryza sativa
cagttcttttctaccacgtacaacagcagaagtgagagagggagaagaagacaagggaagaggaggagcttagctagccagccatggcgaggcgctctccttgcctcgccgtcgccatgctcctgcttggggcgttggcggtggcgagcgccttcattgatgaagcggcggctgctggccgggggctcggccatggcgcccgcttcatgagcaagcagggtcgtgtgacatacgagaagctgccggagccggagccgaagccaaagccaaagcctcatcctaaacccacgccaaaacctgagcccaagccagagccggagccaaaaccagtacctgagcctgagcctaaaccggaaccaaagccagaaccaaaacctgagcctaagcctgaacctaaaccatacccagagccaaaaccggagccgaagccagagccaaaacctgagccggagcctaaacctg

SEQ ID NO: 407222 - DNA, 548 bp, Oryza sativa
  unsure (1)..(548): unsure at all n locations
cggttggttggtgaaacattagatgcatttttccaagtgggcattccaatgcatccagtgcttcttcctgacctgatgtttggacttgatagaagcctacagctttttgtgtctaaagcaaaatctggctgtggaacaaggaattcttttatgccccaactacctccgttgacacgatgcgaggtaggatcgaatatattgttcaagaaaaaggaaaagccacagaatccacagtaccgaggatcacaaaatggaacaaccaatggcgctgatcccttagcccttcctcaactctgtgtacgcttgaatacgcttcaattcgtgcgaggtgaacttgagaacttagagaagaagataaaaacaggcttgcggaatgtcgagtcagctcaggcagatgttaccgatggattggacatcaaatttgagctttgtcagacagcctgtcaagagggcattcagcagttatgtgagacaactgcatataaggtgacattctatgatttcgngcacgttctctgggatatcccttatattggtgacattgcatc

SEQ ID NO: 407223 - DNA, 385 bp, Oryza sativa
ttattccaacccaaccgccgccgcatcgccctcgttagaacgatggccgcgtcggcgctgcaccagaccaccagcttcctcggcaccgcccctcgccgggatgagctcgtccgccgcgtcggcgactccggtggccgcatcaccatgcgccgcaccgtcaagagcgcgccccagagcatctggtatggacctgaccgtcccaagtacctgggcccgttctcggagcagacgccatcgtacctgaccggagagttcccgggagacttcgggtgggacacggcggggctatcggccgacccggagacgttcgcgaggaacaaggagctggagggtgatccactcgcggtgggcgatgctgggggcgctgggctgcgtcttccggaga

SEQ ID NO: 407224 - DNA, 368 bp, Oryza sativa
tttttatataagtccagctctggtctatcttgggggagaaccaatgctcttcagagggctgctgtaatggctgctgttagaggaggttcttacgacagcacagtggctaaaaccagtgcctcgtcattggttactcctgaacagatcagtaatttcatatcgaacttaaatttgatggaccagattggtattgatgagttaaatcatatatttacccacagccaaagattaaacagtgatgccattgttgcttttgtgaaagctctttgcaaggactcaatgactgagttgcagtctccaacggatcctcgtatcttctgccttacaaaaatagtagaaatcgcgcattacaacgtgaaccgcatacg

SEQ ID NO: 407225 - DNA, 401 bp, Oryza sativa
gaattttgcccccaatcgccgggaacgcccgcgccaagtgcggccaaataccatgggcgggggccgcctataccgccgccgttccgacctcccccgtggccggctccctctcctctcctataaaatggaaccccctcgccccgttctctcgttttagccccctcccgcgatctcccgtggtccctagccacctccccgccgtcgcccttctctttcccccgcgccgggcgcttccagccgcctctccctcctcgaccgtgcgccggccggccgtgccgtcgccttccccggcgtcgcagccgcctactctcccccggcctgccctccgtttcgcgcggtgaccgccggaggcgcgttcccgccgtcgtccagtggcgttgccgccactgtaccacctacag

SEQ ID NO: 407226 - DNA, 369 bp, Oryza sativa
cgactttctctctctcctctctgtccctcttccgccggggcgcttggggaaggaaggagaaagcaagccatcggcccccgcctccgcctacgaagggacattgttgctagtcggtgatggctgaacaggctaatcaaccgactgtccttcagaagttcggtggccagttccaccttggctccagcttttctgaaggtgtacgggctcgcaacatctgcccatctgtctcatcctatgacaggcgctttaccacaaggagctacatgacccatggccttgtcaatggtggcatgaacgtcccaatgatgtggtcctgtccaatttttgctaatgctccagctgagaaaggtggcaaaaacttcatgattg

SEQ ID NO: 407227 - DNA, 319 bp, Oryza sativa
atcatttgttgctactcctgacctggctggtgacatgaagcaactttttatcaagcgggggctcccgcctgctaaaaaattagggtgggaccctaaagatggggaaagccacctgaatgcaatgctcagaccaatgcttttgggtggccttggtcagcttgggcatgataagactataaatgagggattcagggcgttccaaatcttctttgatgatccgaacacttcccttcttactccagatactagaaaagggtgcatacctctctgtgatgcataatggtaggagcacaaacagatctgggtatgatgctcttct

SEQ ID NO: 407228 - DNA, 442 bp, Oryza sativa
cttttcatgaaagttgcagaggcttgtgctcgtgttggtgcccttgactatggtttgaaggttttatggaagcataatgtttatggaattacgcctaccattggttctgctcattatctactgaaacatgctaaagagaaaaatgacactaaactaatgggaagtataatgcaagtccttcagagaaattcgatgccattgcaaccaggcactgctgatatagtcttcagcatctgctataatgctgatagatgggatttactctcaaaatatgcgagaagattcgtgaagtctgaagtcaagctgcatggtgcttcatttgacatttggatggacttcgctgcaaagttggagactcccaatctatatggaacatcaatagcctgagaggcaagtcagtcaaacgctataatcttgcaacaggttttgcatgtgtaaaggg

SEQ ID NO: 407229 - DNA, 374 bp, Oryza sativa
ctactttctcctccggctcttcttcagtatcgaatcgtctcttctcctcgtgcccaccaccaccaccgtagcaatggcgggcaacgggccgatcaacaaggaggacccgctcaactggggcgcggcggctgccgagatggccggcagccacctcgacgaggtgaagcgcatggtggcgcagttccgcgagccgctggtcaagatccagggcgccaccctccgcgtcggccaggtggccgccgtcgcccaggccaaggacgccgccggcgtcgccgtcgagctcgacgaggaggcccgcccccgcgtcaaggccagcagcgagtggatcctcaactgcatcgcccacggcggcgacatctacggcgtcaccaccg

SEQ ID NO: 407230 - DNA, 399 bp, Oryza sativa
gtctcttcacgtgccccacccccctccccaccggggcggcttgtcacccacccatgggcaaatccatggcccccctccccgccgccgtcaccgccaccgcctcctccgccgtcacccccgccgacgacgaggcccactccctcctcccttccaccccctccaacgaggaggatgacgacgacctcgaggagcgcgcctacgaggcgaccgagaaggtcatcgcctcgatctcggacttccccgacgccgacgacgacgaggaggagtccgggctcgccacctccaccgccgcctcggggatcccgcccttctcgtggaggaagctgtggctgctcacggggccggggttcctcatgagcatcgcgttcctcgacccggggaacctcgagggggacctgc

SEQ ID NO: 407231 - DNA, 455 bp, Oryza sativa
atctcctcctcccaaatcaacccacacccgtgggatccactccgctgctcttcggagggcgccgcccagctgcttgctccgcgttggctggctaccagcggctctgtgcgcgctcgcgctcgcgctggcgcccgcctcggacgccacgtcggcgtcgctggtgggcatcaactacggccgcgtggggagcaacctcccgccgccgcaggccgtgctgccgctgctcgagggcctcggcattggccgcgtgcggctctacgacgccgaccctgctgtgctgcacgccttcgccaagaccggggtcgagctcttcgtcggcgtgcccgaccagtccctggccgggctcgctgacccgggtggcgcggattcgtggctcatgtccaacgtcatgcccttcctgccggacacaaagatcgccgcgctcaccgtcggcaacgaggtgctcacgggcaaca

SEQ ID NO: 407232 - DNA, 347 bp, Oryza sativa
  unsure (1)..(347): unsure at all n locations
ccctactttttccccctcccctccgtccatgtatcgggtggtccctgggaggagcgggggtttagcctcagatgttgatcggaggcgactgcttgctgcccacgatcgacctcaacttatggagcggagcacactgcaagcagctgctggaccatgaggacgtggacaaggtcccccaggcggacagcgaccggggcatcacgctggaggagttgcgcctcgtcaagatccacatgtgcttccatatctggcgattgggacaacaggtgaaagttagacacagggtgatagctactggttgtacttatttcangcgtgtatacacaagaaagagcatgactgaatat

SEQ ID NO: 407233 - DNA, 353 bp, Oryza sativa
atcgttttttctctcagctctcacagctcactgcatgaagggccgctgtcaccatgggggggggctccccagtgatggcccgcgcggggccgtcgacctcctccgggctcttcagcgaggcgcggatcaccatgcgcaagaccgccgcgaagcccaagccggcggcgtcgtcggggagcccgtggtacggtgccgaccgcgtcctctacctcggcccgctctccggggagccgccgagctacctcaccggcgagttccctggcgactaccggtgggacaccgcggggctctccgccgacccggagacgttcgccaagaaccgggagctggagggtgatccactcccggtgggc

SEQ ID NO: 407234 - DNA, 517 bp, Oryza sativa
  unsure (1)..(517): unsure at all n locations
ctactctcctcttcgcttcctcccctctctaagccggggaggctaagccatggcgtccgggaccgcccgcaccccggtcgcagccctccgctcgtcggcgtcgctcaagtctaccttcctagggcaatcctccacccgcctcgcccgcgcaccgactacgaggcgtaatgttcgggcggaggccaagggagagtggctccccggcctcccttctcccacctacctcaacggcagcttgccaggcgataacgggttcgacccgttgggtctggcggaggacccggagaacctgcggtggttcgtgcaggcggagctggtgaacgggcggtgggcgatgctgggggtggccgggatgctgctgcctgaggtgctgacgaagatcgggttgatcgacgcgccgcagtggtacgacgccggcaaggccacctacttcgcgtcgtcgtcgacgctggtcgtcatcgagttcatcctgttccactacgtggagatcccgcngggcaggacatcaagaccctgg

SEQ ID NO: 407235 - DNA, 418 bp, Oryza sativa
ctactcctagagaatgttatattctagggggaggtagaaaagaatgatggtgagtttgccaagaagcttgcagctgtcgctgacctctatgtaaatgatgcttttggcactgcacacagagctcatgcttcaactgagggagtgaccaaatttttgaagcctgctcgtgctggcttcctgatgcagaaggaacttgactatcttagtagagctgttgcaaacccaaagaagccatttgcgggcatcgttggtggatccaaggtctcaactaagattggggtgatcgagtctctggtggcaaacgttgatgtcctcatacttggtggcgagatgatcttcacattctacaaagaccatggatatgctgctggaaaatcttttgtggaggaagacaaacttgagctttgcacttcactta

SEQ ID NO: 407236 - DNA, 499 bp, Oryza sativa
ctttctggagctgcaggagactgtccaatatcggggggagcatcctgagaaattggagaggtttggcatgtctccgtccaaaggtgttctgttctatggccctcctggctgtggtaagactttgttggccaaggcaattgctaacgagtgccaggctaacttcattagtgtcaagggacctgagctgcttaccatgtggtttggtgagagtgaggccaatgtgcgtgagatttttgacaaggctaggcagtcagctccttgtgtcctcttctttgatgagcttgactcaattgctacccagagaggaagcagtgttggtgatgccggaggtgctgctgatagagtgctgaaccagttgttgactgagatggacggcatgaacgcgaaaaaaccgtgttcattattggtgctactaacaagccagatatcattgaccctgccttgctaaagccagggcgtcttgatcagcttatctacattcctctgcctgatgatcaat

SEQ ID NO: 407237 - DNA, 233 bp, Oryza sativa
ccgtcgagctcgcgcaccccaaggtctcccctgagctccgcgccatctgggtcaactacctctcccagtgtgatgagtcgttgggggtgaagattgcgaataggctcaacgtgaagccaagcatgtgaagaaactaaggcacaagaatgcatcatctcttgtgaattaattggagttctaccaaccaaataaggtcagacaatgtcagatgcacgcattttctgttgtcgctg

SEQ ID NO: 407238 - DNA, 317 bp, Oryza sativa
ctgctaaagcgaagcagaccacttgctgaacaccaactactctccgccgccgccgaggaggaggaggagggagcaagcttgaccccggcgccatggcgggcggggtaggcgttccaccatcagcgcggccatcacccgaggccgcagggaggacacggtggccgcctgccgcgagcagctggagggctgctacctcctcgccgggatccgctacgagggcctcacggtgaagcagctgcagggcatccgcgacaccctcccggagacctgccggctgctggtggcgattaccacgctggtggggaaggcctcttttg

SEQ ID NO: 407239 - DNA, 342 bp, Oryza sativa
ctttcatgttcttgatcctgctactttttcatggagcccatgcggctttgaaagatccagtacagaaatggcagactcttggaggtcagcgtcctcttgccattgctcgtggagggttctccggcttgcttcctgattcaagccagttctcgtaccagtttgcaatgtcgagtagcttgcatgatgtggttctgtactgggaccggcaatagaccagtgctggattgggcttctgcaaaactggtttgtcattagagaactcgacgctgatcggcgaagccttccctaagagggccaagacataccaggcgaatggagaggaaatccatgggttgttagctt

SEQ ID NO: 407240 - DNA, 375 bp, Oryza sativa
ctttatctgtctctgctccgcatcaccaccacgggggtccttgagctccggtcgccgtcggctagaggcgccgcgcgatccgggagatgccgccgttcacggggcccaagtccggggacgctgttttcggcagcgacgagcgcgttaacgcggcgctggtcacgctcacgtatggggccatcgtgaggcaggtgctcacggatctggaggaggtcgaggaggtcaacaagcagcttgatcagatgggctacaacattggaactcggttggttgatgagttcctggccaaatcatatgaatcaaggtgtgttgactccgaggagactgccgatgtcattgtaaagcttggatccaaaatgctcttgggtgtgactg

SEQ ID NO: 407241 - DNA, 383 bp, Oryza sativa
ggatatcgtttgaaacagcaaaaacaagtgtctttgacagtatcctacaagagataaactcagcaatagaggctcaacatgatacgagaagcctggcctattggttatccaacctgtcaacattgtcagttctcctgcaactctcatttaaaaccaccagggcagcaatctcaaccccacatagacggagattttcctacgagaggatttttcaagctagtcaaacttcaaatagcggacttgcttatttcagtgctcaaccggtggatgggcctagtggattgcaacaaattgatgcaaaatatccagctttgctcttcaagcagcagcttgtggatctgattgagaaggtgtatggaatgataagcgacatggtgaagaag

SEQ ID NO: 407242 - DNA, 296 bp, Oryza sativa
acccttccggctgcttccgatcaaatcgatccccaaattcccggatccccgcagccgctcctgcgactcgtaggtctcgtcaagtcggcggcgacgactttgatctctattcaagatgcagatctttgtgaagactctcactggcaagaccataacccttgaggttgagtcctcggataccattgacaatgtaaaggccaagatccaggacaaggagggaatcccaccggaccagcagcgtctcatcttcgctggcaagcagcttgaagatgggcgcacgcttgctgactacaaca

SEQ ID NO: 407243 - DNA, 369 bp, Oryza sativa
  unsure (1)..(369): unsure at all n locations
gatccggttcagataggctcttcttgacaggatcaccatgtctgcctttgtgggaaaatacgcagatgagctgatcaagacggccaagtacatcgcgacgccggggaagggcatcctcgccgccgacgagtcgacgggcaccatcggcaagcgcctggccagcatcaacgtggagaacgtggagcccaaccgccaggcgctccgggagctcctcttcacgacgcccggcgcgttccagtacctctccggcgtcatcctcttcgaggagacgctctaccagagcacggcncgccggcacgccgttcgtcgacgtgctcaaggccggcggcgtcgtgccggggatcaaggtggacatgggcaccggggaca

SEQ ID NO: 407244 - DNA, 509 bp, Oryza sativa
  unsure (1)..(509): unsure at all n locations
catttgttaagccaaaaccccaacttaatgagggaaataatgaatatgccaatgatgcagaatctcatgaataaccctgatttaattcgtaacatgatcatgaacaatcctcaaatgcgtgatatcatcgaccggaatccagatcttgctcatgttctcaatgatccaagtgttctctgccagacccttgaagcagccagaaaccctgaaatcatgagggagatgatgcggaacacagacagagcaatgagcaacattgagtcttctcctgaagggtttaatatgctccgacgcatgtatgaaactgtccaggagcctttcctaaatgcgacaacaatgggtggagaaggcaacacagctccaaacccattctcagctcttcttggaaatcagggttctaaccaaccaaaggatcctgctacaaatgctccaaatactggctcagagtctacaacaggaacccctgctccaacactaatccacttccaaatccttggagctncaatgct

SEQ ID NO: 407245 - DNA, 447 bp, Oryza sativa
gtttccggaaaatcatttccagtgctacctcaactaatggaactatgttggcctattcagattgtgtgaaaccctgcctttttgcactaagacataagggtggaaaaaagtttactctagacaaactagagctgccaaagggattgctgaattctcagtgtatgctgttttctattgactcatccagtttgattctagctggccgtgatggaaagatttatgttgtagacattgccacacgggaaatttcaaatgtctttcaacctatgagaaaaatggatggagcttccaaagaaccacctgttacaaaaatgttcctcagtgcggatggacagtggttggctgcagttaactgttctggggatatttacatatttaacctctaggtgcaaaggcatcactggttcatacctagactgaatgatgggtctgttacattggctggct

SEQ ID NO: 407246 - DNA, 504 bp, Oryza sativa
gtgtgagagagcacaaaggaaaatagtgtaagaagaaaccttgaggatgctgtacaaaagttgtcaagaggtgttagtgccaacagatagacagagtctgttgagaatatggaggctaccacaggcaataaatggccatctttgcgaagaaggaaacacattgtagtgattgctatagattctgtgcaagatgctaacctggttgagattatcaaaaatatttttgtggcttcaagcaatgagagattatctggttctgttggttttgttttgtcaacatcccgagcaatatcagaggtacattctttgctaacatctgggggcatagaagctactgattctgatgccttcatatgcaacagtggtagcgatctttgctatccatcctcaaattctgaagacatgcttagccctgcagagctcccatttatgattgatcttgattatcacactcaaattgagtaccgttggggtgagaggttcaaggaagacactaattcgttg

SEQ ID NO: 407247 - DNA, 486 bp, Oryza sativa
  unsure (1)..(486): unsure at all n locations
gatgtgagagagagagagccacagccaatttcataggatagctctctgttcttgcattggttttgcttccctctgcgccttgggtgataacaaggatctctttctattgccctgtgattctttctttcatcgtcgtttgatattccccacaccactcttttctctctgttcttttctgtttgggtttgatcgcttgctcgttgagaacctctgcacgattcccgtgtcacaagcagttgaatcatgactgctcagccaaagaagaggagtgtaatagaaagtggagagggaggtncttggtcttggccttgctttatttatctcaaatggtgaagatttgggccctatcattcggcatggatttgattctggtaaacctgaagctctcatgcaaaacctcaggagtattgcaaagaaaaaggaagttgagatcgaagagctttgtagacttcattacgaggatttcatcctggccgtcgatgaact

SEQ ID NO: 407248 - DNA, 434 bp, Oryza sativa
gagtgtatagcaacaatagggtgctcctccttgctactcgcctgtatcagtggaaggcggctatggctgacgccgtctcctgcgggccacccaaggagccaccgtgcccagaattctaagctaggcagcttaacattgagatgatcggcaaggccacctgtgaaggagcgcacaacggtgctggccccaaggacaacggcggcgcctgcgggtacaaggatgtcgacaaggctcccttcctcggcatgaactcctgcggcaacgaccccatcttcaaggacggcaagggctgcggctcatgcttcgagatcaagtgctccaagccggaggcctgctccgacaagcccgcccttatccacgtcaccgacatgaacgacgaggccatcgctgcctaccactttgacctcttccggccttgccttccgccccatggc

SEQ ID NO: 407249 - DNA, 320 bp, Oryza sativa
  unsure (1)..(320): unsure at all n locations
gctccatctccctccccctcgcgccccccaaccgcatctcaatctctctcctctctctctctctccagctcgcctccccctcgccggcgacgagctctcccccggctagggttagaccaggtgcccctcttgtctgcggcggaggaggtgggaggaaggatggaggagtcctgtnccccccacgaccacggcaaccattatacgcaagcagggaacgagcaggtcatagcgggcaccccgatcgaccggccccctatgaagtactgctcgcaagaccgccacttgcgtgcttaatgtgcaacagctacggtgtgcacacc

SEQ ID NO: 407250 - DNA, 331 bp, Oryza sativa
cattcgattggcgcacccatgcggagtgagcaaagaggattcgtcccatccatccctgcagcagccactgcccgtcctctcccagcagaaagtccttgtgatggtacttgttcacctcgtccctgattgtatcaacgatatctggtctcagtttcagctgctgcatgcctgcacggtggctcctggcctgccactgtttgtacttctcagggcgctccaccaggtctgcaccctcacaggcgatggcgttgagggcgtaaggccccagaacgttctgctccagcgccagccgcagcccactatcccttggggtggtcgtgttcagcatgtc

SEQ ID NO: 407251 - DNA, 342 bp, Oryza sativa
tataggatggatttgtgagtgtgcgaactgaaaagggaagcactaaggatgacctgaggctgcctactgatgataacctgcttagagagatcaaggatggattcggagaagggcaggactctgtggcgacagctatgcctgccatggcatatatgctcccctgcgatggcgccgacttttctcggaagttaagctaccctgaaccatgggcacagtactcgtactaggacttttgacacctgttaccctgtgaaatcacatatctagcattgctgcatttcttaacggatcatatcttggtggaactgatcataaatattctcaagaggattgcatggtcaa

SEQ ID NO: 407252 - DNA, 526 bp, Oryza sativa
  unsure (1)..(526): unsure at all n locations
ggatcgatggcaaaagcctattctgcggcgtttgcagccgcctccaccagtgaatgatacaaacccttataatgtattcagaccaagagagaaggcacatcgacttcatacaagaaggatgcaaaggcgagaaaataatattcaatcattcgaaaaacttcgcatggtacggcgcaacttggaccaggcaaaggcacttatggatgctttggttaagagggaagagacaaaacgggaggccatggaatgcgaggtcaaccttcgacgcattcagatgaaatataagcatgaagcccagcttgttgatgaagggactgcactgtcaggttttcagcaagcttctagtatatttgcatcgagtgtagattctttcttttacataatttatttattttcttacattcatatattttacattctcttttctatttatcatactttcaatttattcactattcattcttttcttctatttttatatttcttctttatttattttatcttactctatttnatctttttttct

SEQ ID NO: 407253 - DNA, 452 bp, Oryza sativa
gcttagctaaagttcagtttcatatgcattccacctcaagctttgctacatacttccaacagttaatccacctcaagacaataatgttgaacataccattaacccagataaaaatagtccgacaaggcaacatagtatttggaaataataacattaacctagcatctaacaagcacccccaatcaacgatggtaactagtagtagcaaatgtcacaagggatatctatatagctcaaacatgcagagaggtggcttaggcagcaacctcctcgtcctcctcttcctcctcatagtcctcttcctcagcggtggcatcctggtactgctggtattcagctaccaggtcgttcatgttgctctcagcctcggtgaactccatctcgtccattccctcaccagtgtaccagtgcaagaaagccctccttctgaacatggcggtgaactgctcact

SEQ ID NO: 407254 - DNA, 508 bp, Oryza sativa
gttttgagtcgtttgactaatgatagcgtttatgaacgagttacaaaaaactctgtgcgtggaatatgggcacgcaggtcgaaacttgaccttgttggtgcccatataaatgtatttactggtgaatggacacagaaggatgcaggaattggcacaagcattgactcattctatgagtatcttctaaaggcgtatttattatttggagatgaagaatatttgtatatatttcaggaggcttacaaggctgccatgcattatctccatcatgatccctggtatgtggaggtaaatatgaattctggtgctactgattggccactattcaacagtctccaggcattctggccaggacttcaggtgttagctggagatgttgatcctgccattcgaacttatgctgccttcttaagtgtatggaaaaattatgtgctcaccccagaagggattaatcttgctacatccacttgtgatattggcaaaggagctacccattgtggcctgaatt

SEQ ID NO: 407255 - DNA, 321 bp, Oryza sativa
gatcatcttccagaggatgaagaactataccatttatgcagtttccatcaccatccgtatagtgcttggatttttgcttattgctctgatctggaaatacgacttctcacccttcatggtgcttatcattgccatcctgaatgacagtactatcatgactatctctaaggacagagtttagcctacttccttgtcagacagttggaagctaaaagtatatttctctaccggatttgtgctatgaagctaccttgcttcgtttaccttttatcctttgttttttctattctcaactttcttctttcccattctctttttctc

SEQ ID NO: 407256 - DNA, 485 bp, Oryza sativa
gcctaccgcttccgccgccgccgcgccgccgccagcttcctcgttgcggaacagtgtgctcgcaccgctggcgccatgagtaagttgcagagtgatgctcttagggaggcaatctcacaaattactagtgaatcccgcgagaagcagcgcaagttcgtggaaaccattgaactgcagattggactgaagaactatgaccctcaaaaggataagcgtttcagtggatctgttaagttgccttacatcccccgccctaagatgaaggtgtgcatgtttggtgatgcccagcatgttgaagaggcagagataatgggcctagactatattgaagttggaagttttttatgatgttttattatacacctgttactcttatattatttcttaatataatattttatttttcttgtatcttattttctaaattcttactatacactattattttattaatttatgttttaacctctctttcatatttacaa

SEQ ID NO: 407257 - DNA, 142 bp, Oryza sativa
gtgtgctctcctgcgcgtacgagctctccaaggacccctccgtcagcgtcgccgtcatcgagcagtcggtgtcccccggcggcggcgcgtggctcggcgggcagctgtttttcgccatggtggatggtaacctttgtttttc

SEQ ID NO: 407258 - DNA, 321 bp, Oryza sativa
cataccccagcagcagcagcagcagcagctgagcttgaagcagcagagcgaggtagacatggccgccgccaccatggccctctcgtccccggcgctggccggcaaggccgccgcgaaggtgttcggcgaggggcgcatcaccatgcgcaagtcggaggctatgcctcagtctatgaggatcttctaaaggcgtatttattatttggagaagaactatttcttattcctttttcacttttatgatttcagcctcttctcactcttatatcctttcttattctcctgctaagacgaggttaaattctttctataattctctca

SEQ ID NO: 407259 - DNA, 481 bp, Oryza sativa
ctcactgggtatacagatggataaatcctccatgcaatgggaggcttcctccgggctcaatgggcttccctattgttggtgagaccttccaatttttcagaacaagtccatcaatagacatgccaatttactacaagcgaagactggagaggtatggacctatattcaaaactaacataggaggccagcacgtggtcatatcccttgatcccgaggtgaaccagttcatatttaacaagagggaagttgttccaatcctggtttccagaaaccacactaaacatctttggaaagaagacactcaccacgtataatagaactgctcacaagttgatccggagcttcgtatgcaagctctatggccctgaaaacgtgaaaaaatcactcctgccagaactagagaactccatgagggaaagctcggcgtcatggataggaaaacctagtgtcgaggtgaatgatggcgtgtcaaatatgatct

SEQ ID NO: 407260 - DNA, 494 bp, Oryza sativa
catctactaagcaaagcacaaccaaagcttaagcgtcctccaaatcctcacacaagaactcgctcttcttaaccctcccggattttctccgacgagatcgatggctcctccccagcttgccggcaagatgaccgccaaggccgccgcggcggtgaagcccgcgacgagggcgtacgtgacgttcctcgcgggcgacggtgactactggaagggcgttgtcgggctggccaagggccttcgcaaggtgggctcggcctacccgctggtggtcgccgtcctccccgacgtgccggagtcccaccgccgcatcctcatctcccagggctgcatcgtccgggagatcgagccggtgtacccgccggagaaccagacgcagttcgccatggcctactacgtcatcaactactccaagctccgcatctgggagttcgtggagtaccagaggatggtgctccttgacgccgacattcaggtgttcgacaccatcgacgagc

SEQ ID NO: 407261 - DNA, 351 bp, Oryza sativa
ttcataactgcgtagcaggcagatctcgtcggcatcttgttccagtttgacagttacagtacagatcgacgtgtagaataactgggagaaggaagaagacgatggcgactatgaagttgggctccaagccggaaatctttgttctggaaggcctcacatggagatgcatgacggagctggagagtgatgtcgtcgtggaagtaggagaaatgtcattttacctccacaagttcccgctgctgagcctgagcggtgtgctgcagcggatgatcagcgagtaccaagcgccgcaggaggacggcggcggctgcggattgcatgtgcacgctgcagctggacaacattccgggg

SEQ ID NO: 407262 - DNA, 567 bp, Oryza sativa
cgttctgagtctccgactgagcgcctccaatctcaacagccacctcccacctgttccggctccggctagacctcgccgccggcgatccccagcctcagcgcatccaaccgacggaagaacacaaggcgccgcaccgcaccgcagcgatgacgctgatcaccctcatccgcgactacatcgatcgcatgctccacgacatccccgggatgaaggtcctcgtcctcgaccccgataccgtggggatggtaagcgtggtgtacagccagtcagatctcctccggaaggaggtgttcctcgtggagacggtcgacaacgcctccagctccagggagtccatggcgcacctcaaggccgtctacttcctccgcccctcctccgataacgtccagaagctccgccggcatctcgccgccccgcgtttcgccgagtaccacctcttcttctccaatgtattgaagattccacagattcaggtgctcgcagattccgatgagcaggaggttgtgcagcaagttcaggagttctatgctgatttttgtgccatcgacccttaccatttcacgctgg

SEQ ID NO: 407263 - DNA, 408 bp, Oryza sativa
gaattttcctcctcccttcccttcccttcctctcgccgaaccaacgcggaagaaggagctcgcccgccggctagggtttgccgcacacccgccgccgagcagctagcaccggagtgttgggaggggaggctcgcccgacgccagcgacatgcctcagccggtgcttgcggaactgccgacaagcgatgcgctcatcggtcccgactgtgcctttaacctctagatctgcgatatccttaaccacgacccctcccatgccaaagatgtagtgatgtttatcaagatacgcattgagcacaagaactcaaagatccagcttctcgcactaacattgctggagaccctgattaaaaattgtggagacttttgttcatatgcacgttgctgagagggttttactctatgaaa

SEQ ID NO: 407264 - DNA, 419 bp, Oryza sativa
ggctagggccccctcgagaacctcgccgaccatggagccgaccccgtcaacaacaacgcctgggcctacgccaccaacttcgtccccggcaagtgagcgccgccgccgccgtgctgccatggcgacgcatcgccttcagctaagctagctaggttgacgacgatgcgcgtttctgcaggagagtgtgcgtgcgtgtacgcggtgcagtagatgtacgtacgggtaccgcatatatgcacttattcacttggtcccagttcatggttgttctcttccatgttttgtattattacttcctctttcttttcctttttttacatctttctatattttatttatcttaattcctttatttatatcttctctatttcctttcgattttttttttccttactctggcatgattttcatctttttct

SEQ ID NO: 407265 - DNA, 259 bp, Oryza sativa
aagtattcggacgccagtctgatgcaccatctggtgttgttggggcaatggacatggatgtcttcggctttcagtagctatcttctagtacacgaactgtcgtcgcaccatcgcggaggagacgatgatgtacttaaatcacttaagtagttctgggtcacgcttttgttcagactaatcaatgatggctgaaaccagtcttctgtgatccacccttccagcctaattggggctcctcggtccaatatccattagattc

SEQ ID NO: 407266 - DNA, 475 bp, Oryza sativa
aactgccgccgcatcgccctcgttagaacgatggccgcgtcggcgctgcaccagaccaccagcttcctcggcaccgcccctcgccgggatgagctcgtccgccgcgtcggcgactccggtggccgcatcaccatgcgccgcaccgtcaagagcgcgccccagagcatctggtatggacctgaccgtcccaagtacctgggcccgttctcggagcagacgccatcgtacctgaccggagagttcccgggagactacgggtgggacacggcggggctatcggccgacccggagacgttcgcgaggaacagggagctggaggtgatccactcgcggtgggcgatgctgggggcgctgggctgcgtcttcccggagatcctgtccaagaacggtgtgaaggtcggtgaggcggtgtggtataaggtcggtgcgcctattttttccttggtggggccttaatcaccggggacccctcaac

SEQ ID NO: 407267 - DNA, 394 bp, Oryza sativa
cgctggcaagcagctggaggatggcaggaccctggctgactacaacatccagaaggagtcgacccttcaccttgtcctccgcctccgtggtggcatgcagatctttgtcaagactctgaccggcaagactatcacccttgaggtggagtcttctgacaccatcgacaacgtcaaggccaagatccaggacaaagagggcatccgctcagagcaggagcatcttatgttgcaccagctgcgtctcctgcggtggtacgtttcgttccattgatcggtgctgaatgcgttgaggagggggggattgattcgtgaaatgggatgggattgatgctttgatatgattgcgttcgtgaagctcctgattctgaatccaatgcgttgggggatttgggat

SEQ ID NO: 407268 - DNA, 152 bp, Oryza sativa
ccatgctgtgatagaatcaggagtgctcccaaggcttgtggaacttctcatgcatccttcggcttcagtgctcattccagctttgcgcacggtgggtaacatcgtcactggggatgacacgcatactcagagtgtcatttattatcctcgct

SEQ ID NO: 407269 - DNA, 375 bp, Oryza sativa
cgtacaccagtgaggttgtttgcgaggtggccgagggggatataaccaaagtggagtaccagttccaggataagcttggaaattttgttgaggggaatacccaaattcctatcatagacagggagctcccacagcagcttcgacctggccatatttttaacattggttcatgtaagcaagctctgtagaatataaattcacttgctttatttctccaatatagaagtgtattccttccttcatcattctcttcattttttcttcttattctctcttatattatacactttctatctcttatttctcttttctttttctatctattatatttaattcttttatctaaatttcttcttctcactttcattatttctt

SEQ ID NO: 407270 - DNA, 265 bp, Oryza sativa
ccatcagcagcagcagcagcagctgagcttgaagcagcagagcgaggtagacatggccgccgccaccatggccctctcgtccccggcgctggccggcaaggccgccgcgaaggtgttcggcgaggggcgcatcaccatgcgcaagtcggcggcgaagcccaagcccgccgcgtcggggagcccgtggtacggcgccgaccgcgtgctctacctcggcccgttctccggcgagccgccgagctacctgaccggcgagttccccggc

SEQ ID NO: 407271 - DNA, 357 bp, Oryza sativa
aattaagaaggaaacaagattcataccgctccatggcaacttaaggcgacaatgggatcgctccaccaccatagcatcggtgctcgccggcgccgaggtggcagcgctggtctggtgggggaccgtgcttacctccaagggtgacgagggctctagcgaaactggcctggtactcatcaccaagggtcccatctgtgaggcggagatcagggagacggtcggctgcggctgcaccgacattggtggctcgtgcggtatcacgagcgcgaacctgagtggctacaacggcatgggctcctgcggcaacggcctactcttcaaggacggcaggggctgcggctcatgctacgaggtgaa

SEQ ID NO: 407272 - DNA, 309 bp, Oryza sativa
gcgtccggtcatgctaaacagtgatggaggaagatcctcttcggccattgttcctgggaggcgagcactcaatatcttatccagttgttagggctgtgtctgaaaagcttggtggacctgttgtcattcttcaccttgacgcacatccagttatccactttgttttttgaaggaaacaattttttctcatgctcttttcttttgcttgaatttatcttggtgtttttttttctccttcttttattctttcctttttttttttatcttattctctttttcccttttattctcttttttttttttcttttt

SEQ ID NO: 407273 - DNA, 538 bp, Oryza sativa
cttcttcattcccccaaatccatccatcatggagttccctcatcgccaccaccaccacggtcaccgcggcgacgacgacgacgacgatcgccgtcgccatcccgctcccgctcccgcctacggtcacgactcagcccctccgccgggtccctacggccaagcgcctcctccggctgatccctacgctcgccacccgccttcccacgactacgctcatcctcctccggcgtatgggggagggggctacggcaacgtcgtccacgtttcccacgaggtctccgaccaccagaggcccacgccgcactacggtggatccgagtacatcagccccgtccaagagacccgcccttaccacggtggcggaggagccccaccggtgacccacaggatctactgcaagggccgggaggacaactacagcctcgccgtcagagatggcaaggtctgcctcgtccgctccgatcgcgacgaccacacgcagcactgggtgaaggacatgacgtacagcacgagagtggaagacgaggaagggtcccct

SEQ ID NO: 407274 - DNA, 299 bp, Oryza sativa
gtgatggaggaggatgtccggctgggagccaacaagtggtctgagaggcagccgatcggcacggcgaggcatgtctccgactacattggctccagggcgccaccgtcggcgccgttgttcgagccagagtaacctatgtcatggtgtttctaccgcgcagggatcgcctaggtcatggcctactttctgttccttaacatcaacgttttcacggttatgtgagttaacaattaatcaattgagtgctactccgttactcttctttgacttgcactgttccctgaagattttaaaacgtt

SEQ ID NO: 407275 - DNA, 535 bp, Oryza sativa
agccattcttaaagtgctgaaccttgatagctttgctcgggggccaaagttggatgaatgggtcgcaagagctacgttatttgatgcacttcaggatactgcgaggattgctatggctgggaagtatactggtctatctgattcatacctctctgtgttgaaggcactcttgcatgcttctgttgattgccgcaggaagcttcttgttgattgggttgcttctactgatctcgaagactccactgccattgaggcgcctgatgcttataaagcagcatgggatttactgaagggtgccaatggtgttttagtacctggtggctttggagataggaggtattcaagggaagacttttggctgccaagtatgcccgtgaaaacaatgtaccatatcttggcatatgccttggaatgcaacttgctgtggttgaattagctcgaatgtcatgaatctccctgaagctacagcacatacttgatcccaatccaagaccccatgtgttattttatgcctggggttccaaacacatatggt

SEQ ID NO: 407276 - DNA, 383 bp, Oryza sativa
ttttgatagaaattcacgatttggctgtgaggtcggcagagcgcaattgctgaggtcacagggaggatctaggatctctgcattctgaagcagccatggctaaagagtatcctgcctcccccaaagctcagcagctgcaagaatccaagaagcagcggctcacctacatcctcgtggtgagcgcgctctgcgtcgccttctacgtcctcggtgcgtggcagaacaccacagtgcccaagccggcggcgagctcggcgatcaccaaggttggctgcgacccggcggcggcagggcagtcctccgccgtgccgtcgttcgggtcggcctcgcaggagtcactcgacttcgaggcgcaccaccagctcaagctcgacgacacggac

SEQ ID NO: 407277 - DNA, 547 bp, Oryza sativa
cgccgtcgcaagccgtccgccttgctcctcctcgccgagagcttggtcctccgtctcctctccccacgcgcagatctaagcctagggttagggtttgtgtagctcgcagcgatggcgatcaagaggaccaaggcggagaagaaggtggcgtacgacaagaagctctgccagcttctcgacgagtacaccaaggtgctcatcgccgtcgccgacaacgtcgggtccaaccagctgcaggagatccgcacgggcctcaggggcgactccatcgtcctcatggggaagaacaccctcatccgccgctgcatcaaggtgcacgccgacaacaccggcaacaaggagttcctcgagctcatgcccctcctcgtcggaaacgttggcctcatcttcaccaagggtgacctcaaggaggtccgcgaggaggttgccaagtacaaggttggagctcctgctcgtgttggtcttgctgctcctggtgaatgtgggtcccccctggcaacactggtctggatccatcccaaacctctttcttccaggtgcttaacat

SEQ ID NO: 407278 - DNA, 489 bp, Oryza sativa
ccgttccccgcaacgacgccccccccaccagcgaagccatagacaagttggtctcatgaattcaggaagcacattggcatccagagtttcctgttcatcgggaaacaacggcatcttcccaccctgccttctcccaggattcctgggattcccagttgtgtttgtaaacttccacttgttcaaggccattgttcgcagccctgcatcttctgttgtgttgggaatctgtggagggcgccttccatagagaggtgccccataagtcttttgtttagttagtctgggaactggcatagctggaatttgtggtgcaaaacatccttggcatcagtagtctacactgctgaatctcaggttcctgaagatggtttcctctgaaataagctctgttacaacaacccatgcacaaggtcccaagctctttagagggaagatacttctgccaatgggcccctcagatgttgtgccttctgagaacgtgagttcgat

SEQ ID NO: 407279 - DNA, 296 bp, Oryza sativa
tgaagcaggagggaggggaggagagtactcccatggccagccagctactcaagagcagataagcacgctccaagcccagagggccctcctcttctagccttgcacataagctactaacgtgacagtgggcgttgcaacaaggtttctttgtttttccaattcttgatttcctttcgttgcattctggggactctcttgatctaaaggggaataaattttggtttccatcgtccatattgggtgttaattctgtacaaaatttgctaagttctttattgcaatcaattagaattttg

SEQ ID NO: 407280 - DNA, 397 bp, Oryza sativa
gtctctctccactgtcaaccacgccgccgccgccgccgccgccgcagcggggccggggaaatccttctccgcggctgcgcctgcggcgccatcggtgcgcctgccaaggacacgggctcctgctgccgccgcggtgtccgcggcggctgcgggggcggaccgcgcggcggacagggtgtcggcgctgagccaggtctccggggtgctggggtcgcagtggggcgacgaggggaaggggaagctcgtcgtcgtgctagcccctcgcttttacatcgccgagcatagccagagcggagcaaaagctggtcacaccatatacaagtctgaaggaatgaaattggctcctgattgagagccatctggaactgtccatgaaggaacgctgtgtgaaaaaggc

SEQ ID NO: 407281 - DNA, 499 bp, Oryza sativa
ggtgaggaggccggttggccggggcaggaatcgtagggatccttgagaagatggagaatgactccagagggcacattttcggacgaagaacagtggtcgcgatggacggtggtctatatgagaagtaccctcagtacaggaggtacatgaaggaggctgtggctgagctactgggacccgagcgatcgaatcgtatcgccatcgagcacacgaaagacggatcagggatcggcgctgcgctgttggcagctgcaaactcaaagtatgctgctgctcaaatctctacaaggtgatcgcaattgttataattgttgagttactgggccgaattaattctctacaaggtgatctcaattgttatcattgttgagctactgggacctgaacaatccaagcatatcatcatatggtggcctcttatctgaagtatggaggggcttcatatatgctattcttctgtactactagtctactatactatataacgcattttgggaaa

SEQ ID NO: 407282 - DNA, 387 bp, Oryza sativa
cttctcttgtcctccgtgactggtgaagctgtgagcgaggagcatatgtccatgggtggcacgaaggtgtggagaagcacgatgtacacacccaggtgcctcctcttctagccttgcacataatcaattaatggtgcggtgttcgttgcaacaaggtttctttggtggtccaattcttggtttccttccgttgcattctggggactctcttgatcgaaaggggaataaattttggtttccatcgtccatattggtgttaatttggtacaaatttgctaagttcttattgcaatcaattagattttggtgcaatggattaaatggctgggaaaaaaaaactcccctaaaaaaaaaaaaaaacaaaaaaaaaaaaaaaaaaaaaacaac

SEQ ID NO: 407283 - DNA, 534 bp, Oryza sativa
aacagcttgactgcttatggttttgaccttatccgtggagccaagactcttgaccttatcaagagtgctggtttcccctctggaaagtacctctttgccggtgttgtggatggacgcaacatctgggctgatgatctcgctgcatctctcactacccttgagtctcttgaggctattgttggaaaggacaagcttgtggtctcgacttcctgctcactcatgcacaccgctgtggatcttgtaaatgagaccaagctcgatagcgagattaagtcatggctcgcttttgctgcccaaaaggtggttgaggtgaatgcccttgctaaggcattggctggacagaaggatgaggcttactttgcagcaaacgctgctgctcaggcctccaggaggtcatcacctcgtgtgacaaacgaggaagtccaaaaggctgctgctgctctgaaggggtctgaccaccgccgtgctaccaatgttagcgctagactggacgcacagcaaaagaagctcaaccttcagttcttctacaaccac

SEQ ID NO: 407284 - DNA, 514 bp, Oryza sativa
agctgattgagagagagttgggaagaattacacaagaaatttagagaaatagtactagctagctagcaagaatatagatatataatgtcgatcaagcactgcgagcaacacaaggattgcgagcggcagcgcctgtaccggcgttgctgcgcggccatcttcggcatacttctcctcctcctcctcatcgtcctcatcgtctggctcatcctccgccccaccaagcctcgcttctacctcaacgacctcaccgtcgtctgcctcaacgtcaccaccggtggttcctacgccggcgccaccgactcctccggctacttctccttcctcaccgtcaccatgcagaccaccctcgccgcccgcaacggcaacgagcgcgtgggcatctactacgaccgcgccgacgtgtacgccgagtacaagggcctccgcatcaccgttgccacgtcgctgcccgcggtgtaccagggccacccggacctcaccgtctggtcccctttcctctccggcaacaacg

SEQ ID NO: 407285 - DNA, 96 bp, Oryza sativa
gcgtcgccaactcccttggcggcggcgggggtgagggcgacatcgtggcgctgaagaactacatgaacgcacaccactttggtgagattggctgtc

SEQ ID NO: 407286 - DNA, 550 bp, Oryza sativa
tgcctccgccgccgcagcctcctcctctcgccatctcccgtcctctccttcaagtcagctacctgcttaatcaaccatgggtaaggagaagacgcacatcaacattgtggtcattggccacgtcgactctggcaagtcgaccaccacgggccatctgatctacaagcttggaggtatcgacaagcgtgtgattgagaggttcgagaaggaagccgctgagatgaacaagaggtccttcaagtacgcgtgggtgctcgacaagctcaaggccgagcgtgagagaagtatcaccatcgatattgccctgtggaagttcgagaccaccaagtactactgcacggtcatcgatgcccctggtcaccgtgacttcatcaagaacatgatcacgggtacctcccaggctgactgtgccgtgctcatcattgactccaccactggtggttttgaggctggtatctccaaggatggccagacccgtgagcacgctttttttgctttcactcttggtgtgaagcagatgatctgctgctgcaacacgatggatgccacc

SEQ ID NO: 407287 - DNA, 361 bp, Oryza sativa
gctggagcagtagcacaagcagctgagcttgaaggagcatagcgaggtagacatggccgccgccaccatggccctctcgtacccggcgctggccggcaaggccgccgcgaaggtgttcggcgaggggcgcatcaccatgcgcaagtcggcggcgaagcccaagcccgccgcgtcggggagcccgtgttacagacccgaccacgtactctacctctgtcggctctccagcgagccgtctagctacctgaccggtgagtgcctgcgatagttccgattgcacaccggggtaatttgactcattcaagtgccctttcagtactgcttgcttggggcatataagggggggaaattggagaggttg

SEQ ID NO: 407288 - DNA, 367 bp, Oryza sativa
gtccaccaagggggcccatggtgtctgcatcctgggcgagtgggacgagttcaagaccttggactaccagaagatctttgacaacatgcagaagcctgcattcgtctttgatgggcgcaatgtgggcgatgccgagaagctcagggagattgggttcatcgtctactccatcggcaagccgcttgatgcctggctcaaggacatgcccgcgggtgcataataattttccatattccacacctgaacctcatagctctctacactctgctggtgctgaagagagtctgcgtcgaacaggaatttggttgaccatcattttttataggttgttggtcatttttacatacaggaggaggtaccatttttg

SEQ ID NO: 407289 - DNA, 506 bp, Oryza sativa
gcacgtttcgaagcccgacatctccttcgccggccgcttcaccgcaagcgccatcgctgcatgcttcgctgaggtgtgcacgatccccctggatacggccaaggtgaggcttcagctgcagaagaacgtggccgccgatgccgcccccaagtaccgcggtctcctcggcaccgtcgtcaccatcgcgcgcgaggaaggcgccgccgctctctggaagggcatcgtcccgggactccaccggcagtgcatctacggcggcctccgcatcggcctctacgagcccgtgaaatccttctacgttggcaaagaccatgtcggggatgtgcctctcaccaagaagatcgctgccggcttcaccactggtgccattgcgatcagtatcgccaaccccactgaccttgtcaaggttaggcttcaggcggagggcaagctggcgcccggcgccccgcgccgatatgctggggccatggatgcctatgccaagatgttaggcaggaagggtttgc

SEQ ID NO: 407290 - DNA, 359 bp, Oryza sativa
atagtcgttctacacctactacttcttcccccgatcggatcggaccggctcctcctgctgcgccgccgccaccgccgccgcagataggagaagatggccgcacttgataccttcctctttacctcggagtctgtgaacgagggccaccctgacaagctctgcgaccaagtctcagatgctgtgcttgatgcctgcctcgccgaggaccctgacagcaaggtcgcttgtgagacctgcaccaagacaaacatggtcatggtctttggtgagatcaccaccaaggctaacgttgactttgagaagattgtcagggagacatgccgtaacatcggttttgtgtcagctgatgtcggtcttgt

SEQ ID NO: 407291 - DNA, 372 bp, Oryza sativa
ccctgattcaaaagttatcgagcaacaggaagctgcgcgcaatggaactcggaaacctgatgcatcaattgctagtaaagggcatctaagtgtatctgatcttcttgattatataaatcccaatgaagaaagcaaaggaagagattctgaatcaagtaaaaggaggtactcaagcataaaggtcctgtcaaattcgaatggaggctccaatgtagcaagtcctgaggtatctccaagagactctacttctgcaaatgcagacgaggacaagcaactcatatagccatcactcgacaactcatgttaactttgttgctgaagctgaaatttagcaaaacctctgagatctatgagcatgttgatatcatggag

SEQ ID NO: 407292 - DNA, 351 bp, Oryza sativa
tatcagcttcaaggttacctgtatcatcgaatgaactatttagcatgcttgacgaagcaagtgagaatacgtttctctctactaacccaaccgcctgtatacaaaagtttatatttaacggggaggctgacaaagttgcacctgagttgaaaaatgctgttgcatgcactagttatatgcttgaacaaacactggtcgaagcatggtctgctgataaggctgctgaagcattaagatgccagaagttgctcgtggaggaagaggaagctgctcagaaaaggcaagctgaactgatagaaaggatacggatgaagaaactgaggctgaaagaacagagattgactgacttgt

SEQ ID NO: 407293 - DNA, 395 bp, Oryza sativa
ctttgcctgagtcgagtcgcctcccccaccgtcggccaaccatgctgccgccggccgtccgcctcgcggcccgccgcctcctagggctcgcgacctcctccgcctcggaatcggccgcggcgcgacgcttgtcccgttctccgatctcctacgccgccgcgggctgctcctccaggctgttctccacggcgcttaactaccacctcgattcgccggaaaacaaccccgacatgccgtgggagttcacggaggccaacatgaagaaggttaatgagatattgtctcactatccaagcaactacaagcagtctggtattattccaatgctagatcttgcccagcagcagcatggtggatgggtgccagttgcagcaatgaatgctattggtaagatc

SEQ ID NO: 407294 - DNA, 488 bp, Oryza sativa
cagctgtggccgcgggaccgcgtcctgcaggcgtgtcacgcgttcgcccagaacaactaccacacaaagcatctcgcaaagattttgatccatttggtttggtgcttgcaagagtgcatggcagagtcttctcacgcggcgtataggaaggctatcaatgctgcatatatatcatccatatttctcaaattcattattgaaaatgcaaagactgataattggcaagagctaagtcttgaaattgacaaggatgagaaggggctggaaaattttccttctgaacaaagcgtggaatattttctgatgagaggtgttctgaactacattggtagtgaagatggaagtctggagtcatgctacctgcaccatgaacttctaaacttgatgctagtacttatgtcaactcaattgtgttctggaccatctcctgaaccaaaagatgtgcattctttcattgatgcggctatgcttcaggacagttccatagt

SEQ ID NO: 407295 - DNA, 409 bp, Oryza sativa
gtggtctcatcgctagctgccatctcctggtgagatccatcgtgacgcccggcacgacgacgatggtgtcgcggaggttcaagcccgtggaggagtgcagctcggatgggaggtcggagcagacggtggccgtcgacttcgacggcacgctggtcagatcgcggagcgccttcccgtactacctcctcgtcgcgctcgaggccggcagcgtgctccgcgccgtcgtgctgctgctgtccgtgccgttcgtctacgtgacctacattttcttctccgagtcgctggccatcatcacgctggtgtacatctccgtggcggggctcaaggtgaggaacatcgagatggtggcgcggtcggtgctgcccaagttctacgcggaggacgtgcacccggagagctggagggtgtt

SEQ ID NO: 407296 - DNA, 468 bp, Oryza sativa
cattttgctcatgtgttactgatgagacactgcgtgagatagctaattcatgtccgaatctctctgttcttgatgcatctaactgcccaaacatttcatttgagtcggtaaggcttcctatgttggtagacctgagactactaagttgtgaggggatcacgtctgcttccatggctgcaatagcttacagtcgtctgcttgaggcattacaacttgataactgcagtttgttgacatctgtgtctttggatctgccacatctcaagaacataagtcttgttcacctgcgcaagcttgctgagttgactttgcgaagtcctgttctttcttacattaaagtttccagatgctcagtacttcatcgtgttagcataacatcaaatgctcttcagaaattggtgttgcaaaagccagatagcctatcaaggtttgtacttgcatgcaacacctttatcgatgtctatcctt

SEQ ID NO: 407297 - DNA, 406 bp, Oryza sativa
  unsure (1)..(406): unsure at all n locations
gtctggccggtatccaggtcgggaacgcgtgctgggagctctattgcctcgagcatggcatccagcctgatggacagatgcccggtgacaagaccgttgggggaggtgatgatgctnttaacaccttcttcagtgagactggtgctgggaagcatgtcccccgtgctgtcttcgtcgatcttgagcctaccgtgattgatgaggtgaggactggtgactaccgccagctcttccaccctgagcagctcatcagtggcaaggaggatgcagccaacaactttgcccgtggtcactacaccattggcaaggagattgttgatctgtgccttgaaccgattaggaagcttgccgacatctgcactggtctccagggccttccttgtgttcaacgctgttggaggaggaa

SEQ ID NO: 407298 - DNA, 470 bp, Oryza sativa
tattatccttattacctcagcgataacacaaagaatgtgctgttatcatgtgcattcatacacttggaaaagaaggaattcatcaaacaattctcagaaatttcatcaataaaccaacggattctattatctggtccagcaggttcggagatttatcaggaaacattgataaaggcacttgcaaaacatttcggtgctaggctacttgttgttgattcgcttttgttgcctggggcgccttcaaaggacccagagtcgcagaaagatgctgcgaagtctgataagtcaggggataaggctggtagtgagaagttggcaattcttcataagaaccgctcttccttggcagacgctatgcacttcaggaggccagctgtacaaccttctagtgtgcatgccgatatcgggggtacatcgactttgcattctgcatctttgcccaaacaggaattatttacaacttcattcca

SEQ ID NO: 407299 - DNA, 293 bp, Oryza sativa
gagaatgggagctacataaaacaatgtctacaccggggtgggctattactccaaccctgggctgtctcccatgtccggcgccgtcgcagaatcaacccaatccgccgccatgagggagtgcatctagatccacatcggccaggccggtattcaggtcgggaacgccagctggcagctctactgcccaaagcatggcatccacgctgaagcacagatccccactaacaagaccggtgggcaagaggctgccgccgaacgcagtctaaacactcagactgtctccaagaaacatt

SEQ ID NO: 407300 - DNA, 329 bp, Oryza sativa
gcgctgagcaccgtctctcacaatgtcgaccgccgccgccgttctcgctgcccagagctggtgcttcgccactgtcaccccgcgctcccgcgccacagtcgtcgccagcctcgccttcccatcaccgttctcctccttctcctcctccaacagcagcaacctcccggcccccttccgcccccgtctcatccgcaacacccccgttttcgtcgcccccgtcgcccccgccgcgatggacgccgccgtcgaccgtcttcaaggatgggttcgccaagttcaagaccgagttctatgactagaagccgtagcttctttgagccgctcatggc

SEQ ID NO: 407301 - DNA, 211 bp, Oryza sativa
cggtgcgtgggctagggttttatcatgtgcggttttgcactgcaataatgaataaaggacaccatgtaaataggcagctgtgactttcttcccagtccttagacagcgaaggttgttgtttgagtgactagtgttgtgttaagcaccaaaatgttggttgttacagacttacatagtatatagatctttataagttttctgggttggtcga

SEQ ID NO: 407302 - DNA, 493 bp, Oryza sativa
ttttgtgctattcaacgcaacgcagaactttgatggtgcaaatttcagcagtggggagattcttgcaattcattggcaatttcctttatctgttcgccacgagcacctttcttggagttgctgctggacttctcagtgcttatatcataaaaaagctgtacttcagcaggcattccactgatcgtgaagtttctattatgatgctcatggcttacttgtcttacatgcttgctgaattgcttgatttgagtggtattcttacagtgttcttctgtggtattgtaatgtcgcactatacctggcataatggaacagagagttccagggtcacaaccaagcacgccttcgccacattgtcatttatcgccgagacatttctatttctttatgttggtatggatgcattggatatggagaagtggaagattgtcggtgaaacattcaacccaatgaaatctattgctgtgagctccactattttgatcttggtgct

SEQ ID NO: 407303 - DNA, 429 bp, Oryza sativa
gggttttcgagccaatccagccatggcctccacggggctctccaccgcctccaaccctactcagctgtgcaggtctcgcgcctcgctgggcaagcccgtcaagggcctgggcttcggccggtagcgcgtgcccaggacggcgacgaccatcacatgccaggccgcgagcagcatcccggccgaccgcgtcccggacatggacaagcgccagctgatgaacctcctcctgctcggcgccatctcgctccccaccgtcggcatgctcgtcccctacggtgccttcttgatccccgacgggtccggtaacgccggcggcgggcaggtcgccaaggacaagcatcgcaacgacgtgctcgccgaggagtggctcaagacacacgggcccatcgaccgcaccctcagccaggggctcaagggtgacccgacgta

SEQ ID NO: 407304 - DNA, 185 bp, Oryza sativa
ggtggacctcatatgcggtacatcgacaggtggggtgctttctatgactcttggaggcaagcagataactctggatcaatgtgaagaaatatacacaaaacttggcaaacttgtctttgctgaacctgcccccaaggatgaagcttcaacgtggaaggagaagattgatcatctctctaaaagtt

SEQ ID NO: 407305 - DNA, 497 bp, Oryza sativa
gtccctgtctcccctccttcctcctctcctttcccctcctctcttcccccctctcacaagagagagagagcgccagactctccccaggattcagccatgaagggggccaaatccaagggcgccgccaagcccgacgccaagttggctgtgaagagtaagggcgcggagaagcccgccgccaagggcaggaaggggaaggccggcaaggaccccaacaagcccaagagggctccctccgctttcttcgtttttatggaggagttccgtaaggagttcaaggagaagaaccccaagaataaatctgtcgctgctgtaggaaaagcagccggtgataggtggaaatccctgaccgaagcggacaaggctccctatgtagccaaggccaacaagctcaaggccgagtacaacaaggccattgctgcctacaacaagggcgagagcactgccaagaaggcacccgccaaggaggacgaggaggacgactaggaggaatctga

SEQ ID NO: 407306 - DNA, 502 bp, Oryza sativa
ataagattaatacttcacgttgctgagttgagaaaaagatggttgaatcaaaagaattctttttttgaagttcattttttatcaggggacaatatgaatattataccgtgttccattaaaacactcatggggttatacgatatatcgggcgtagaagtaggccaacacttctattggcaaataggaggtttccaaattcatgcccaagtacttatcacttcttgggtcgtaattactatcttgctaggttcagttatcatagctgttcgcaatccacaaaccatcccaaccgatggtcagaatttcttcgaatatgtccttgagtttattcgagacttaagcaaaactcagattggagaagaatacggtccctgggctccctttattggaactatgttcctttatatttttgtttcgaactggtcgggtgctcttttaccttggaaaaatatacagttaccccatgagaaatagcagcgcccacgaatgatataaatctact

SEQ ID NO: 407307 - DNA, 317 bp, Oryza sativa
gtttttacctgctctgccgttgctctctggactagtggacagggatttctacgaccacgtgaggttcgagacatatgaaccaagccagctaaactatattatggttgcggcaattttaagggcactgacaggggaaacacccatacgtgactgcgacacaagcccagcatagacggctgaagtagttgacaaggtgattgttgctgatttgcaactaaaacagggggtaaagatagttacagatgataagggtactagactgtcgtatgcatctgctgatgacgctgctgtcattgaagagcttattgcaaagttag

SEQ ID NO: 407308 - DNA, 513 bp, Oryza sativa
gacggcgatgacttcgccttgtacgacctcgtgaactcctacatggacctcgacgggatggaggctctcaactcctccgaggagcggcacgaggaccgcgacagccgcgccagcggcacgcgcaccgggagcgtggccgacagcagcgagaacgaggccgagagccactcgactccagtggagaggaaggacggaggaggcaaatcccggcattgccgcagcttatcggtggacagcttcatcgagaagctcaacttcgacgagtcaccgaagctgccactgccgtctcccagcggtggcctatccagaagcgggagcgggtccttggatggcggcgctgcatctctgtttggtgctgagtttgccaatggggagttcactgaagctgagaagaagagatcatggcaaatgagcgccttgccgagatcgctttgactgatcctaagagggttaaaagaattttggcaaatcggcagtctgcggcaaggtcaaaggagcgtaagatgaggtaca

SEQ ID NO: 407309 - DNA, 408 bp, Oryza sativa
gcttgccgcaggttactgatccaccgaaggagggaggcgcccgcccgccgccatggccgaggtgacggtggtccgtgcggagcgcgaggaggagtccaccctggagcagggtctcctcgccatcccggaggaatccaaccaacttacatacactggagatggatctgtcgacttttctgggaatcctgttgtgaaggagagaactggtagatggagggcatgcccatttatcttaggtaatgagtgctgcgagcggttggcctattatggaatctgcacaaaccttgttacatacttgacaaagaaactgcatgatggtaatgcttctgctgctagcaatgtgactgcatgggaggcaacttgctacttaactccccttattggagctatactggctgatgcatactg

SEQ ID NO: 407310 - DNA, 391 bp, Oryza sativa
tgtgggccagtcagccattggacaaaggattatgatgcacggaagtacttgaacgtgaaggttcgagcatgtactaaagagtcctgcgagttcaggggggcatacggtcaactgaggagacacgccagggagaaccatcctactgttagaccaactcaggtggatcctgaacggcagcgagactggcacagaatggagcagcagcgtgatcttggggacttgttcagcatgcttcgttcaggcttaagtgccagggaggacgggatcggagtcagtgaaggggaagaggatatcagcgagagggctctacatagcccatctataacaatgggcttcattgtgcgcactggcaggtcgatacttcactacagggaagcattcccaggccacc

SEQ ID NO: 407311 - DNA, 494 bp, Oryza sativa
ggggagcagcctgccattgctgctgttggttcactgaaaagtgtggatccggaccggattattcttaagaaaattgtttcgactggttatcctcaacgggtctcaaaactgaaagcagtagtgcgatacatgttctacaatcctgaagatgtcaagtggtttaagcctgtagagttgtggacgaaacatggtcgacgtggccgaatcaaggagactgatggcactcatggtgctatgaaatgcatattcaatagcagcgtccagcagcatgataccgtgtgcatgagcctttacaaacgcgcttaccccaaatggccagaacagctctaccagatatgatcatatcagggtcatggatatgtgcttgcacgttggcatgtacgtctcaaagttttgacagattgagctcatcgatgtgcttcctgatgcagctcaatatatgtatactagtgctagccgaaaaagaaacctcatgtaacaacgacatgtaggta

SEQ ID NO: 407312 - DNA, 513 bp, Oryza sativa
gcccctccttgcttgaggctcttgaccagatcaacgagcccaagaggccatcagacaagcccctacgtcttccccttcaggacgtgtacaagatcggcggtattggtaccgtgcctgtgggtcgtgttgagactggtgtcctcaagcctggtatggtggtgacctttggtcccagcggtctgaccactgaggtcaagtcggttgagatgcaccacgaggctctccaggaggctcttcctggtgacaacgttgggttcaacgtgaagaacgttgccgtgaaggatctgaagcgtgggtacgtggcctctaactccaaggatgaccctgccaaggaggctgccagcttcacctcccaggtgatcatcatgaaccaccctgggcagatcggcaatggctacgccccagtgctggactgccacacctcacacattgccgtcaagtttgctgagctggtgaccaagatcgacagacgatccggcaaggagctggagaaggagcccagtttctcaagac

SEQ ID NO: 407313 - DNA, 381 bp, Oryza sativa
tgaagttgtgatcattgcttgcaatgcaaagaaggttaggaatactagcacttcggccaatgcttttgtaactccaggaggtgttatatgtgctaaggcatccatgctactgcagagtgtcccacctgcagctttggttcgatttttgagggaacatcgttctgaatgggcggattataacttcgatgcatattcagcttcatctctgaagacaagctcatgttcacttcctgggttgcggcctatgagattttctgggagccagatcattatgccacttgctcacacggtggagaatgaggagattttagaagttgtccctcttgaaagacaaagtggtcacacatgattgatgtacttaagtgttaagatattgaccct

SEQ ID NO: 407314 - DNA, 440 bp, Oryza sativa
gcgatgaccagctctggtgctcctttctggtctgctccaaagcgtttcccacgaccactggagttcttgacatctgatccaagccagcttaactttattttggctgctgcaattttaagggcagagacatttgggatacccatacctgactgggtcaaaaacccagcaaagatggctgaagctgttgacaaggtgattgttcctgatttccaaccaaaacagggggttaagatagttacagatgagaaggctactagtctttcgtctgcatctgttgatgatgctgctgtcattgaagagcttattgcaaagttagaagcaatttccaaaacactgcaaccaggattccagatgaaaccaatccagtttgagaaggatgatgacaccaattaccatatggacgtgatagctggttttgctaacatgcgggcaaggaacta

SEQ ID NO: 407315 - DNA, 276 bp, Oryza sativa
gtggtcccacttggcggctgaggttgagtggtggtggagcatcagtgcgtcagccgtggattcgtaggtggtgagcaacaggtgaaaacccagcccggtcttggccggaccgacaacgatggttaattctccctcctgagggcgttgtcgtgctgtatcatccctaatgggtgggtggcaggtgaaagccaggctaggtttctttgtacccaaacggaccgtgacggtgggtctttataacatttgcttcatgctgaatggcgaatgggactccct

SEQ ID NO: 407316 - DNA, 411 bp, Oryza sativa
ggttttactccagaagctcgtgacatgtttgaaagagagttcgaattttttgacaaggtcacctcgatttctggtgttctttttcctcttcccaaagaagagcggcgagcgggtattaaaagggagctggagaagattactgtgccaggtgatgatctgtacctacctactgcaacaaacaagtttgtacggggcattcaagtagacagtggcattcctctccagtctgctgctaaagttccaataatgattactttcaatgtggttgatcgtgatggggacccaaacgatgtgaagccacaggcttgcatttttaaggttggtgatgattgtagacaggatgtgctggcactccaagttattgctcttctaagggacatatttcaagctgttggattaaacctttatctc

SEQ ID NO: 407317 - DNA, 511 bp, Oryza sativa
cgcgcacctgcgcccaggcggagcagctcaacgtgtcggtgagccccgagtggggggtgctccccatgcagaccatctacggcagcaacgggtgggactcgtacgcgtgggcgttcaaggctatgatggacgaggtgtctctcgtcatgcacaacccgtacttggaggactacccaatggacttgcacgttatggacgtactactacatgatggcactgtgccctgctcgcttggtcgaagtgacacgtgatacatacggcatggattgggtggcttgaacggtaagctgaagaattaattgatggcggaatcatgtctaccgaatgggttttgattgctctgcgtttagagaatagatatttgactttactgaccccaagattaaactcattgatttttttttatgtttatgtacccatttattgaattcttaacagctcgcgcctatagaagaaagcctgccgtgctttctaatatttatctcattttattattttttttctttttttc

SEQ ID NO: 407318 - DNA, 520 bp, Oryza sativa
ggcgttttcgtactcgcctctctccgcgccctcctccgccgccgctcgccgccgttcgtctccgccgccaccgccgccgccatgagggagtgcatgtcgatccacatcgggcaggccggtatccaggtcgggaacgcgtgctgggagctctattgcctcgagcatggcatccagcctgatggacagatgcccggtgacaagaccgccaggagaagtggatatgcttctgctgtcgttttatgctcttgattagttgatgcgcatgttcaatgatttatgatgtttgtctctgtggaaagattacatgtaaagagtatagtagaacccctaaaagctagccagcgattttcgctcttttttttcaggtctccatgatatgattacccctaaaagggggatatttatgtgatagttacaatacatagtggcaccacgaattgattatgcgataattgctgattccgtcagaaaattgttagattccttgtgctttatacctgcttgttgcgctagtagagaa

SEQ ID NO: 407319 - DNA, 522 bp, Oryza sativa
ttgatgcttatcaaacggcttgctgataaacaacatgctagagcagtggttttagtgctagtattatgtctttggctgtcagctcatttgactgtcctgcggccgattcgagtcatccccttggtcttgggagttggaattcttataaatgaacggaaaatggaaaaaacaaattgattggtgccacttcaaagttaaatatgccaagacgaattgatatgtttctgctgttggtttatgctcttgattagttgatgcgcatgttcaatgatttatgatgtttgtctttgtggaaagattacatgtaaagagtatagtagaacccctaaaagctagccagcgatttcgctctttttttccaggtctccatgatatgtctacccctaaaagtggtatatttatgtgatagttacaatacatagtggcaccacgattgattatgcgtttatgctgattccggcagaacattgttagattccttgcgctctatacctgcttgttgcgctcagagagaatattaca

SEQ ID NO: 407320 - DNA, 233 bp, Oryza sativa
gggatccaagtcgcaggcgaagaccaaggccagggaaaagctgctcgccaaggaggctgcccagtggatgacctaaattatagctcctgtagtttcatttttcagtcagattttgacgaggaactcgaattagcactgtacaaccgtgctgtggttttctgagtcttggtttcatatcttctctgttcaccggaccatgttgggatactatgcaattagtacaaccgtgcttc

SEQ ID NO: 407321 - DNA, 412 bp, Oryza sativa
gagagagatgggggaagagaccctcgtggccatgccgctcgcgccgccgcatcaccaccaccaccacgcccacctccccgcgctcccgcacctcgccgcgccgcccccgccgccaccgccgcccgcagagaccgaactcacggaacagcgagaagaggaggtcccggtggacgacgtcgtcgaggcggcggcggacgtgccaaggagggaggagggccttgccgcccctgggggtgaggccacatactaaaggaggaggacgctccacgggggggcaggctcaggggaggcatgcagatgttcatcaagaccttgactgggaagaccatcaccctagagggcgagttcgtgtgacaccattgtcaatgtcgagggcaggatccatgacaaggagggcatcccccccgaccag

SEQ ID NO: 407322 - DNA, 532 bp, Oryza sativa
atccgcaccgcagtcctgtctggggattgattgattgatcacgcttgcgaagaagaagaaccttggatggatgggacgaaggccgcacgctgctgcaagcgactgaatacctgggggccgagggcacggctgattcgcaagctccgcggtcttattgtcgagaagaactgtgctccactcatgctccgccttgcgtggcactctgctgacaccttcaatgtgttgccgaggaccggcgggcccttcggcaccatgaagaaccccgaggagcattgccacgccgccaacgccggccttgacaacgccgtcaggcttctcgaccctatcaaggaccaacttcctatcctctcctacgccgacttctaccagcttgctggcgttgtggccgtcgaggtcaccggcggacctgaggtcccctttcatccgggcaggcaggacaagcctgagcgctctctgaaggccgtctttctgatgccacacaaggttctgaccacctaaagcaggtcttttttgccagatgggtttgagtgac

SEQ ID NO: 407323 - DNA, 404 bp, Oryza sativa
ctgcacgcaccggtgccgtacttcccggacccacccactgcgtgtgagcctgaagatgaacgctttttgcacctttctcaggctgctcttggggaatcaaagaaaggatctgacaatgcacaaatgtatgttaaaactgatgatcaaaagctagtcattggaaccctctcagctgacaagttccatgaaatgcagcttgatttggtctttgacaaagagtttgagctgtcacacacttcatagactgctagtgtggacttttctggctacaaagtttcccagccggctgaggaaaagcaaatagattcagattctgtagacgctgaagatgaccaggagtatggtgagcgcatgacccagtacttggatgaatattgccattctaactgaggcactgtaatcag

SEQ ID NO: 407324 - DNA, 434 bp, Oryza sativa
ctaacacggagcggagttaccatcaatgggaagcgagcggtcgtggttggccgcagcaacattgtcgggctacctgtatccctgcttcttctgaaggcggatgcgaccgtatccattgttcactcccggaccccaaaccctgaaagtattgtccgtgaagcagacattgtcattgcagcggctggccaggctatgatgatcaaaggagactggatcaaaccaggcgctgctgtcatcgacgttgggacgaactccatcagtgacccaaccaggaaatcggggtacagactcgtcggcgatgtggatttcgcagaggtgagcaaggttgctggtcacctgactccagtcccaggtggcgttggccccatgacggaggcgatgttgctgaagaacacggtggatggagcgaaacgtggtatagttcagtaaaggtt

SEQ ID NO: 407325 - DNA, 437 bp, Oryza sativa
ctttaattggacagaaaaaaaaatctgccctgggagcgaagcgtagaatcggcttctcaagatgcagatctttgtgacgaccctcacctgcaagaccatcaccctcgagggggagtgctgctacaccattgactatgtcaaggtcatcatccacgacaaggagggctattccctggaccaggagcgtctcatctttgctggcacgcactttgaggatggccggaccctgtccgagtacaacatccagaaggagtccaccctccaccttgtgctcaggctcaggggaggcatgcagatcttcctctagaccttgactggcaagaccatcacccttgaggtcgagtcctcggacaccattgacaatgtcgaggccaagatccatgacaaggagggcataccaccggaccaggagggtctgatcttcgctggcaagcagc

SEQ ID NO: 407326 - DNA, 472 bp, Oryza sativa
ctctggctcgcctccaccaccgagatgccggggctgaccgcgccggcgagctactccgacgagccggctcgccaccccgccctcaagatcaactacaaggaaccatttaatgctgagcctcatcgatcagcattagtttcatcttatattaccccggtggatttcttctacaagagaaaccatggaccgataccaattgtggatgacctctcaagatacagtgtttccattactggtattgtcaacaagaatgttcagctgtccatggctgacattaggagtctcccaaagtatgatgtaactgcaacgttacagtgtgcaggcaacaggaggactgcaatgagtaaggtacggaaagtgagaggcgttgggtgggacatatctgctcttggaaatgcaacatagggaggagcaaagctatctgatgtccttgaactaggtggaatacctaaacttagtttagatacaattt

SEQ ID NO: 407327 - DNA, 460 bp, Oryza sativa
  unsure (1)..(460): unsure at all n locations
gtgagaataatctctatgttgtggagggaatgcagtttgaacgtggttatatctccccgtattttgtaactgacagcgagaaaatgtctgcagaatatgagaactgcaagcttcttttggtggacaaaaaaatcaccaacgcaagggatcttatcaatgttttggaggaggccataagaggtgcatacccaattctgataattgctgaggatattgagcaggaggctcttgctactcttgttgtcaacaagcttagagggtcattgaaaattgccgctatcaaagcccctggttttggtgagcgcaagacccagtacttggatgatattgccattctaactggagcaactgtaatcagggttgaagttgggctgtcacttgacaaggcagacaaatcagttttagggaacggcttgcaagggtggtccttaacanagagtcaacaacaattgttggtgat

SEQ ID NO: 407328 - DNA, 461 bp, Oryza sativa
ggtactttggccagactgtggatggcaacctggatccctgactgacttgattactgctgctgcggctaaaaaagtatatagaaaggcaacattgtgcatacatcctgacaaggtgcaacaaaagggggcaaatctacagcagaaatatgttgccgagaaggtgtttgatctccttaaggaggcatggaacaaattcaactcagaggaactcttctaaacggcctgcgcaaatgaaacatattgctcaccaatcttcacctgcatgaggcaatcggggtgggacagcacctcatagaacaaccgagctggagcagtcggtcggcggacccatgaaacgatgaagcgaaagttccaccataattacaattgtattggtattaccaatattgcttggtttattatacaccctcatgttctaccttctgtatgtgttgattcagatgacatttcacagccacatg

SEQ ID NO: 407329 - DNA, 389 bp, Oryza sativa
gctataacattatattgcagcaatggcatcctacttccttctactcgcctgtgatgaggaggcggctatggtgtccgccgtctcctgcggaccacccaaggagccaacgggccacaacatcacgacaagctaccgcgacaagaggctgtaagccaaggccacctggtatggtgcgcccaagggtgctgaccccaaggacaacggaggcacctgcggctacaaggatgtcgacaaggctccctatcttggcatgaactcctgcggcaacgaccctatctataaagacggcaagggctgcggctcatgcttcgagatcaagtgctccatagccgaggcctgctgcgacaagccgggccttatccacgtcaccgacatgaacgactagccca

SEQ ID NO: 407330 - DNA, 382 bp, Oryza sativa
cctcgcggtgtccctggcgaagtacacggcggagctgaccgcgaagctcgccgccgagaggggcgccttcaccgtcgtgctctccggcggatccctcatcaagaacatcaggaagctcgcggagccaccgtacctggattcggtggattggagcaagtggcatgtgttctgggcggacgagagggtggtgcccaaggaccatgaggatagcaactacaagctcgccttggatgggtttctctccaaggtcccaattcctactggccaagtttatgctataaatgacgccttgtcagctgagggagcagcggatgactatgaaacttgcttgaagcaacttgtcaagaatggtgtgattgcaatgtcgcaatcgactgggttt

SEQ ID NO: 407331 - DNA, 505 bp, Oryza sativa
gcaccatgatctgaatccacctgtagcgataaccgacatgcgctccgacacaattttcatgacagatgattatgctgccaagattgctgatgttggtatctggaaagaagtcgccataaaagcaaagactgcaaaggaggatagcagcagccgttctgaatgttctcctgatatcgcgagcaacgtctactgctttggcacgcttctgatagagatcatatccggaaagctccctgaagcagacgaccaagaatccatgtgcaactgggccgctgagtatctgaagggcaagagctacagcaagctcgtcgacgcgtcgctgaaggaacacaacgccaacgagctggaggccgtctgcgaggtggttcaggagtgcattgatcccgactcagataagaggccaacgatgagagacgccacccgcaagctgagacaagctctcaacatctcgccggaggcagcgacgccgcggctctcgcctttttgtgggctgagctcgagatac

SEQ ID NO: 407332 - DNA, 386 bp, Oryza sativa
catcgtccaaaatccgaggttggagcttttgctcgggcgattgattttggaatcggaggaggggatgtcaggaccactcgatcgatttgccaggccatgttttgaaggttttacgcataatgatgaaaagaaagagatcagatctgacgcagacaactccgaaggagagaagaagactaaaattggttctttcaagaaaaaggcgattaatgccgggaacaaattcaggcattccctgaggagaagaagcaaaaagaaaaatgaacctcggggttccattgaggacataagggatgttcaagatcttcaagctgttgatgcatttcgacaatgtttagttgatgaggacctgttgccgcaacagcatgatgattatcacacaatgc

SEQ ID NO: 407333 - DNA, 546 bp, Oryza sativa
tgggggctgctgcgcctcgctggtgccgcgcgcggcgtaattgggtggaccaacgacgcctccgctctggtgtgtctctgctcattttcagattatctacagtgtcgtgtgcgttgtattcgaccggtgttcgttctcgcccgctcgctgattcgttgggatttcctgacaatgggtatcagagcaaggtttagggcttggacgcatgatcgtgctcttgaagttgcactcatgcctcgccgtcgctcgtcgtccctgacgaagcgcactctaggaggttccggcagccacgcctcgggcagcggcgggaacgaccgcgggttggtgattcaccgtgtggtcaaggaggcggaaggcgcggtgaactaccccgtgctcacgaagacaaactacaacgagtggtctttactgatgaagatcaagctgcaagctcgatgcttgactgcttgtggggcaccattgatccgggaggggtcgcagtggagctccatgaagatcgaatggcgttggacgccatttgcagcgccgaacccgtagagatgatct

SEQ ID NO: 407334 - DNA, 400 bp, Oryza sativa
atctagcgctccaagccggaggcctggtccgacaagaccgcccttatccacgtcaccgacatgaacgacgagcccatcgctgtctaccactatgacctgtccggacttgccttcggcgccaagggtaaagatggcgaggacgaatagctccccaaggccggcatcatctacacgcaaatccgtcgcgtgaagtgcaaggatgctgccgacaccaggatcaccttccacatcgagaaggccggcaaccacaactaccttgcgctgatagtcaagttcgtcactggtgatggggacgtcgtggaggtggcaatccaggggacgggctactaggagagggaggcgctcaaggagccatgaggtgccattggtaggatagacacttcctgggcggtaagggccc

SEQ ID NO: 407335 - DNA, 482 bp, Oryza sativa
gtcgtccgtagcgggagggagggagagagtacgtgcgggcgtccggaggtctcagcgcacgcccgcggccgggccgtcgcgccgatcgcgatggggtcgtggcggctcaaggcctacggcgccctcaaggactccaccaaggtcggcctcgccaaggtcaacagcgacttcaaggagttggatattgcaattgtgaaggccaccaaccatgtagaatgccctcccaaggacaggcacgttagaaaaatattcttggcgacctccattaaccgccctcgagcggacgttcaatactgcatctatgccttgtcaaggagattgtccaagacaaagaattggacagttgcattgaagacattgatagtggtacataggctcttgagagaaggtgatcctacattcaaagaagagttcctggcctactcatacaagggaagcgttttgcagagagcaaacttcaaggacgattcaagccaattagc

SEQ ID NO: 407336 - DNA, 473 bp, Oryza sativa
gctttttcataatatggcactattggtatcctcatcgcttttactcgcctgtgctgtggaggcggacatagcggtcgtcgtctcctgcgggccacccatggcgccaacgggcccaagcatcacgacacgctacggggacaagtggctgtaatccaaggccacctggtatggcgcgcccaagggtgctgaccccaaggacaactgcggagcctgccgctacaaggatgtcgacaaggctccctttctcggcatgaactcctgcggcaacgaccccatctacaaggacggcaagggctgcgggtgatgcttcgagatcaagtgctccaagccggaggcctgcttcgacaagcccgaccttatccacgtcaccgacatgaacgactagcccatcgctgcctaccactttgacctctccggccttgccttcggcgccatggctaaggatggcaaggacgaagagctccgaaaggccg

SEQ ID NO: 407337 - DNA, 514 bp, Oryza sativa
gctgtcggcaccattcatgacgccaccgtgcactcagtatcatcgtactggatacagctgcgggggcaggcacctctttgcccttaccagactcactcccccagtcagggcatgacagtggagcgcggatccgacatctccagtacgagagaacgatggaagctcaagaattcagaggcctagcgcctcgagaacggcctgaagcacgcgaattccgccgtcaaagcgagcccggtccgaagccgttgaagcatacgaatgggcaggtgtgccagatttgcggcgacgacgtcggtctcacccccgacggcgagcccttcgtcgtctgcaacgagtgcgccttccccgtctgccgtgactgctacgagtacgagcgccgcgagggcacgcagaactgcccccaggtgcaagacccgctttcaaacgcctcaagggttgcgcccgcgttcccggcgatgaaggaggaggaggacgtctactacctggagaactagtctaactggagggacaagac

SEQ ID NO: 407338 - DNA, 289 bp, Oryza sativa
ctcgcgtgcggcgggagggaacccaccgaccttgttgggctcccttcacgtacacgacatgcgaagagcccccctcaagctagggctccccggcggatcctcggcggggtgggtctcgcgccccacttttgccgatttggaggctgggcttgccgcgattgcctcccaccagctgaagaccctcctgacccacaagctgaagcaccaccctgggtcgatcttcttccgtttcattatggagcacatcctcgccgggagcattttttttttttttttcatctatgttaac

SEQ ID NO: 407339 - DNA, 522 bp, Oryza sativa
tgtctaagtcctcaaggcgaacggcctccatcttctccttccagctcctcccatggcgtccctcgtcgccatcgccatcgccatggctctcatggtggttcaacctggccggcagatgactgcctttgctgctcggacgtcgccggcggcggcggcggaggcgttctggcgtgccgccatgcccggcgctcccatgccggacgccatcgtcgagctcctgcaccatgagcacggcgttgctagcgccggcggcaaggccaacggccaggagctgccgcccaccacagctgtcaaagatgagaacccgttgctgaagcccaagcagggaaaggttccatgctccgcacgtcgccggcagtgggctcggcccggcaaattcgagggtcatatcgcgcccgtcaccaagttccatcgagcgccgaggtcaacttccgtgaacgacaaacccgttattcgacgttcaccgcggcaaggcgctccacggcggcaactttccagggcacccccatcggtgtggtcctg

SEQ ID NO: 407340 - DNA, 420 bp, Oryza sativa
gccgaagaatccacagcattctctcttcctctctcttcttcccccattttgctctcgccgccgcccacgccgatgctgctccgtcgttggtagcctctgctgctacgagggcgttgggatctggagatctggtagggaggattgcgggatggaggccagcgccgggctggtcgccggatcccacaaccggaacgagctcgtcgtcatccgccgcgacggggagcccgggccgaagccggtgaagcatacgaatgggcaggtgtgccagatttgcggcgacgacgtcggcctcacccccgacggcgagcccttcgacgcctgcaacgagtgcgccttccccgtctgccgcgactgctacgagtactagcgccgcgagggcacgcagaactgcccccagtgcaagacccgcttcaaacgcct

SEQ ID NO: 407341 - DNA, 454 bp, Oryza sativa
atatggctaaagccctcaaatcattctcggccataacgcttcatgcagaaggttacacgcgtgaggtgcgtgagcagacacaggacgcactggctgcatacttcaatgcggtctcgaccgaggtggagcacgtaccatcaaaggtatccatcggcgccctcctgtccaaacaaggccccaagtatctccccgtcgcaaggagcttcctctcggacgccctaaggcacgagccgacgaaccggatggcatggctctacctagggaaggtccacaagcatgatggcaggctagctgatgctgctgactgcttccaggcagcctcaatgcttgaggaatcagacccaatagaaagcttcagatcactctgatggctcatcatcttactgcagcaccatgaggtttttttttttcgcgggttaatttttcttctctctcttcttctcctcctaccttt

SEQ ID NO: 407342 - DNA, 537 bp, Oryza sativa
  unsure (1)..(537): unsure at all n locations
gtcttctcctccccctctttaccttttcctcctcggttcggttccgtggatcgtctagggtttagtgggttgagatggcacatcccgatgtcaagtacctctgcttttcggtcgcgaacaaggcagaccacggccgatgatagctattgacggatgctccgacgtccaagacacggtacctatgtttgtggcacctaccaagtagctggcctccttgcacgcacctagaagctccagcccgacgagaccgaacggcacgggctctaccatagctagatgtccacaaagcatgatggccgcactagcatgatgcctgctgactgccttccaggcagcactgaactgcttgagggaatcagaccccaatnagaaagctttcagatcacctctgagtggctcatcaatcttactgcagcaacattgaggtttttcttttttcgcgggataattttttcttctctacttttcttctcctcctacctttttttgggacataactgtgtggaatctggataccagctacaatgaacttttgta

SEQ ID NO: 407343 - DNA, 511 bp, Oryza sativa
  unsure (1)..(511): unsure at all n locations
gagggtggcttcttcacgctgaaccccaaggaaggtctcgccatcgtcaatggcacgtccgtggggtcggcgctcgcggccaccgtgatgttcgacgccaacatcctcgccgtcctgtccgaggtgctctcggcggtgttctgcgaggtgatgaacggcaagccggagtacaccgaccacctgacccacaagctgaagcaccaccctgggtcgatcgaggccgccgccatcatggagcacatcctcgccgggagctcgttcatgagccacgccaagaaggtgaacgagatggacccgctgctgaagccgaagcaggacaggtacgcgctccgcacgtcgncgcagtggctcggcccgcagatcgaggtcatccgcgccgccaccaagtccatcgagcgcgaggtcaactccgtgaacgacaacccggtgatcgacgtccaccgcggcaaggcgctccacggcggcaacttccagggcacccccaatcgtgtgtccatggacaacgcccgtc

SEQ ID NO: 407344 - DNA, 449 bp, Oryza sativa
  unsure (1)..(449): unsure at all n locations
gcttgtttgagtaccatgtgaggaagaacttccccttctcagtgacatatgttccattatccgcgaagaaccgggtcttctcgggagtgtcattgtactctccagcatcgtcgggcaattcccattcaggatgcccagcctttgctgcttctgctttgaaatctgcctccaggtatttatcatagcactgcagtattttttttattgtaataactgttagagcagtgaattactaccatttgtcatgcattttgtcccatttcatatctgttcagcatatttagaatttgatttcctcttcttttgttgcttaatttcagtctcaggcttgcttctactgttttttttttctgttagtactgtttttggtccaaacatctttgtgaaccagaaccactttaatatttgtgctcattntccaaagatttttttttcctaaggagatctgc

SEQ ID NO: 407345 - DNA, 522 bp, Oryza sativa
ctcctctcctcctctctctctctctctcgcaccaccgctctcttccgccgctgcggctcacggctacgcagctctcttcccctcctcctcggctccgctctcttcgatcgatctagggtttggtcttctgttgggggattgttgatgctcttccgcgcgatcgatcgacgccgcgtcctgagggtttgaggggtttccgccctcccgccgcacgcccgcacccccgcgatgtccggccggagctcgccgatgtacgaggggctcgcgtcgcgtcccgacgagtgggacgtcgtcctcaaggtgaagtatggtgaaactcttaagaggttcggtgggtatgtgcaaggaccacaattcagcctgaacttatccgctctccggtccaagattgcatctgcttttaagtttggctcggatgtcgacttcattctgacttacactgatgaggatggggatattgtcatgctggatgatgaagatgatctgcatgatgctgctattcatcaaaaactgacccccctc

SEQ ID NO: 407346 - DNA, 486 bp, Oryza sativa
gctgcttatcgaggtcaaggtgcaggggtggagcaacttgctccaggccacaatggatgggggatgcaccctccaccttgcgctaaggctcaagagaggcatgccgacctatatgaggacggtatcgcggaggcggagtacacacgatgtctgtgttctactgcacgatcgaccgggtggaggccaagatccaggtcaaggatgtattcccacaaagccaggagagtgtcatctacactgtctaggtgtttgatgattatctctcaagggaagagtgctcttgctacttgggtctcgggcactacactggactctggctatggaggggacaaaaatatttcgcccacaaagttcgacctttactggttgttaaacctggacaggataaatcaattgctggtattgttactgagagagattacctcaggaaaatcatagtgcagggacgatcttccaagtgaaactaagtggggacattatgactga

SEQ ID NO: 407347 - DNA, 496 bp, Oryza sativa
  unsure (1)..(496): unsure at all n locations
gctaaacaatatacgatgtggaagctaaagtttggtgagggggcaagcaacccactgctccgctccagcaacggcttcctcggccgggagacgtgggagttcgaccccaacggcggctcgccggaggagcacgccgtggtcgagaggctccgccgcgacttcacccgcaaccgcttcacacagagggagtgcagcgacctcctgatgaggatgcagtttgcaaaagagaaccaagtttacagtaaacatgaagtaagcaatcttaaagacagttcagaagtcacagaagaagttctattaacgtctttaagacgtgttcttgatcaatattcctctttgcaagcaccagatgggtattggcctngtggttacagcgggattttgttcattctgccgctcatgatatttgccttacatgtgactaagtcactaaacgatgtcttatcatctgagcatatacgtgagatatgccgctacatctacaacattcaaaatg

SEQ ID NO: 407348 - DNA, 462 bp, Oryza sativa
  unsure (1)..(462): unsure at all n locations
gttgattctgaagaccttcccctcaacatctcacgtgagatgctccagcagaacaagatcctgaaggtgatccgcaagaaccttgtgaagaagtgcgtggagctcttctttgagatcgctgagaacaaggaagactacaacaagttctacgaggccttctccaagaatctcaagcttggcatccatgaggactccaccaacaggaccaagattgctgagctcctgaggtatcactccaccaagagtggtgatgagttgaccagcctcaaggactacgtaacccggatgaaggagggccagagtgagatctattacatcactggtgagagcaagaaggctgttgagaactcccccttccttgagaagctgaagaagaagggatatgaggtcctgtacatggttgatgccattgatgagtacgctgntggtcagcttaaggagtttgagggcaagaagctcgtc

SEQ ID NO: 407349 - DNA, 367 bp, Oryza sativa
acgcgtccgcagttacactatacgtgtacttctcatggcgatctggaaggctaggatactgatgttgctcgcgcttggcggggctgctggctgctgcccggcggcgagggcggaggaggcggcggctgcggaggaggggggcgatgcggcggctgaggccgtgctgactcttgacgcggccgggtgcgatcaggccgtgggcaagcacccgttcatgggcgccgagttctacgccccgtggtgtggacactgcaagaagacacattcagagtatgagaaagctgcacaagagctaaccaagcacgagccaccgattggtgtcgccaaggatgaagccaacaaggagaagaacaagcctcttgctacc

SEQ ID NO: 407350 - DNA, 530 bp, Oryza sativa
gtcctccttcctcctcatcctccccaaccactgcatccgggtcggcgtcctcctcctcctcctcctcctcgcagaatgcaacgggcaattcaagctatcgggtcacatggcagtctcctcaagtctgctgttctgcgacacatcagtgctccaaaaccatctattttacctgctgtatattcacgctccatgtcagtttcatctgctcaaatagaggagagtggatttgagactgccactgtggcagatattttgaagtctaaggggaagagtgctgatggatcttggctctggtgcactactgatgactctgtctatgatgctgtcaaatctatgacgcaacacaatgttggagctctggtggctgttaaacctggacaggataaatcaattgctggtattgttactgagagagattacctcaggaaaatcatagtgcagggacgatcttccaagtcaactaaagttggagacatcatgactgaagagaaccagctgatcacggtgaagcctgataccaagtcctgcag

SEQ ID NO: 407351 - DNA, 521 bp, Oryza sativa
gagaccccaaaccaaagcagcttgcttgcttgcttgattgtttgttgcttcttgagcccctctcctccttgcccaagtctgtgtttttgtggcagacttcagcataagggtgaagcaaagcatagggtctggttttgggttcttgacagaagtcatgtttcatggtggcaggcctttgtccctcaggggctctctcaaggcgcttgaagctgatatccaccatgccaacaccctggcgcatgctatacacagggcctatgggggtgcctgtgtgcagatgaggctgtcttacagctccatggctccaatcatccttaacctcatccagtggatggattgcagctgctccctttcatataccctccctagttacctaggtctccttgaggttcttgtgtacaaggtatatgttgatgaggatgcctctatatccaccaacattgaaaggagagcaagcctcacggaattctatgctgtaatatatccattcttgcaacaactcgaggggaatttgatggaga

SEQ ID NO: 407352 - DNA, 267 bp, Oryza sativa
gccatgttgctctaactgtaaccacgccgctcgacggcgcagccgccatatcggggtagtggaaatagttctacgacgatgtgattgagaacgcttcctacattgggactcgtggcaagggtatccttgctgcagatgagtccactggcaccattggcaagcgctttgccagcatcaatgtcgagaacgttgaggagaaccgccgctctctccgcgagctgctcttcaccacccctggtgccctccagcacctaagtggtgtgatcc

SEQ ID NO: 407353 - DNA, 298 bp, Oryza sativa
aacgaacgctgcttttcgacgaagaaaaggagggttcctcgctctgacgccttgcgcagttgtaccgtacattcgtactaccacacagcttgaagaagaagagggaattcgacgagaaatagtagaagcttggcgttcgtgcgaggaattctcggtggttgatcgatccgtgtttcgcggcggatggggcaggcgttccgcaagctgttcgatgccttcttctgcaccagggagatgagggtcgtgatgcttgggctggatgccgcgggcaaaaccaccatcctgtacaagctgcaca

SEQ ID NO: 407354 - DNA, 292 bp, Oryza sativa
gcagcagcagcagctgagcttgaagcagcagagcgaggtagacatggccgccgccaccatggccctctcgtccccggcgctggccggcaaggccgccgctgaaggtgttcggcgaggggcgcatcaccatgcgcaagtcggcggcgaagcccaagcccgacgcgtcgaggagcccgtggtacggagccgaccgcgtgctctacctctgcccgatctccggggagccgtcgagctacttgaccagcgagaacggcaaggactgcgggtagaagaccacgttgcttgttgacga

SEQ ID NO: 407355 - DNA, 497 bp, Oryza sativa
acccaatcacccaaacatggcggaggcggggcccagccggccggtcgccgccgccgccgtcgccgccggcgacttcccggagctcctcgccttctgcgcccgcgcggaggccctcatcgccgagctcctcctcctctccgaccgcgccccgtcgcagttcgccgaccgccgcttccaccccgtcctcttcgacttccgatacttcgactccccgggcgaattcgaggcgaggatcgaggggaacatggagctggaggccctggaagacgagctccgcgagtcctgcggctcctacatcgggaggttcttcgccttgctggatgccgccgtcgcttaccacgacgagctgggcagctacctcaacgacctgcaggaagggctgtatgtgcattgcacattggatggtgtactggagagtaacctggcttgccaattgcttacagaatcgatgactttgtttgggtgtatggctttgctaatggagcacaagattagcg

SEQ ID NO: 407356 - DNA, 514 bp, Oryza sativa
  unsure (1)..(514): unsure at all n locations
ggagaagacggcggcccctctcctcctcgcggcggccttgttcctcgtcgtcgccggcgacggatcggagccgacgccgacgccgacgccatggccggcccagttccacgcgaagctcctgatggagttccacggcaacctgtcgctggcggacctgtggtacgactggccggggggccgcaacctgcacgtcatccgctaccagctcgccgtcgacgagcccttctacgacaacgagtggaacaacggcacctccttcttgtacaccccggcccgccgcgcctgccgctccgacgccgtcggcgtcggcatcctgcccccaaactggctcgttcctggctacgtctacctcggccggcaccccgtcgacgggttcgactggcacgtctgggccaaggccgacttcatcacctactacgaggacaccctgaccaaacgccccgtcaaatgggtcctctacaccgngaggactagccatgtgatgagctttgaggaaggtgctgagctggaggac

SEQ ID NO: 407357 - DNA, 512 bp, Oryza sativa
gtttcgttttggtattcccatacactttgtttctcttccccgtctcgtggtcgagagaaaccgcgaggagagagagggagaggagcgctgccgattttccggagggggagatctttttcttctccctgaaggttcgagatcgatctgcgacgaggaggagcgtggtattgttactttatttccgtggaaatttcaacacattgatgcactaatggagtccaagggtggcaaaaagaagtctagcagtagtcgttcctccctgatgtacgaagctcccctcggctacagcattgaggacctccgacctgccggcggcatcaagaagttccgctctgctgcttactccaactgcgcgaggaagccctcttgatagcccccttggctaccttgacctagtagtttagttactcctctgaattcttgttttgggctttcttacatctctctggctagcttgcttccagtgaccggaagggtatcaagcctgcttcctttctttcttatctctggca

SEQ ID NO: 407358 - DNA, 506 bp, Oryza sativa
cgcgccgccccccgggcgctggaagccccgcaggcctcgaggccgccaccgcggccgtcgcctcggcgcagcgccgtcgcggaggtcaaggccgtccccgaccccgtcgccgcactcaccaggttcgaggatgtgctgcagacacaggactgcaacataatcctgcgccactacggtgaaaccaggcgctgggatgagctatctaaggtcttcgggtggatgcaggagcacgacatgctcaacattgcgtcttacagcagttacttcaagtaccttgggttgagccgcaaccctgcccgagcgctgcaagtgtacggtgctatccgagaaaacccgacaaggatccatgtctccgtttgtaactcggtcctcgggtgcttggtgaagaacgggaggttcgatagcagcttcaagctttatgatgagatgatacgagaaggtctatcacccgatctgttcacctacagtacccttcttgtagggtgcatgaagttgaagcagggtta

SEQ ID NO: 407359 - DNA, 307 bp, Oryza sativa
gctggacctcgtcgacaggaaggtgaggaagatgaagatgatttcgccgtccaacgtcgccgtcgacatcggcggcacgctcgcgccgcacgagtacatcggcatggtccgccgcgaggtgctcgacgcctacctccgctcccgcgccgagggggccggcgccgaggtcgtcaatggtctcttcctgaggtatgaggcgcccaaggaacccaacgggtcgtacgtggtgcactacaaccactacgacagctccaacggcaaggccggcggcgagaagcggacgttcgaggtggacgatagcgggggc

SEQ ID NO: 407360 - DNA, 382 bp, Oryza sativa
atctagttggtcatcgagctcgagctgaatctaaacctttgcaacaatggcggcgcgtgttgttgtggcgttcgcggttgcgtccgccatgttcgtggccgtctccggccagaagttcaacgccatcttcagcttcggcgactccatgtccgacaccggcaacctctgcgtgaacggcccccccgccggcctgacgctcacccagtctccctacggagagaccttcttcggccgcgccacctgccgctgctccgacggccgcctcgtcgacgacttactcgcggagaagttcgggctgccgttgctgccgccgtcgaagaggggcggctcctacttccggcgaggcgcgaacatggcgaacatcggcgccaccaccatggac

SEQ ID NO: 407361 - DNA, 483 bp, Oryza sativa
ctttcttgcataagaactaccctccctcctcgctgcccgccgccgccgccgttttcttggagaggagaaatccgtaggctcagaggatttttggtagtcttgtttcgtgatattcgtgaagagggggggagctaaggggggattcgtaagatcagaattggatcacgcgggggcgcgctcgggatcgggggttccaaacacagcttgttcgttgaatttaagtggatgtactaatggagtctaagggtggtgaaaagaagtctagcagtagtcggtccttgatgtatgaagctcctcttggctacagcattgaggacgttcgacctgccggaggcgtgaagaagttccagcctgttgcttactccaactgcgcgaagaagccatcctgattgccctttcggcttcttcattctagaagttttagattttttgcaatttccttttgggccttttttctgacctattttttggctgctgcttcct

SEQ ID NO: 407362 - DNA, 582 bp, Oryza sativa
atggggagcggtgcgcgcgctggggcccgcgcggaatctcgccggggcgacccacgcgtgcgggctgagcagtaggctgttcctcgccgccgccctcctgtgcctcgcctcctccgcccaagcattcaagaagccctacatcgtgtatctgggatcacacccgtacggcccagatgcgtcggcggaggagcacgcccgtgcgacgcagtctcaccacgaccttctaggatcagttcttggcagtaagcaattggccaaggacgcgatactctactcctacaccaagaacatcaacggcttcgcggcgcatctggaggaggaggtagcaacccagatcgcgaggcaccctgacgtggtgacggtgatggcgagcacgatgctgaagctgcacacgacgaggtcatgggacttcatggacatggagagggacggccagatcctcccggactccatctggaagcacggcaggttcggccaggacgtcatcatcgccaacctcgacagcggtgtgtggccggagtccaacagcttcaccgacgaggaagtggtcggcgaggtgcccaagcgctggaagggctcctg

SEQ ID NO: 407363 - DNA, 290 bp, Oryza sativa
gttagacagagcaccttaccctgctagcttcatgcgctcgcagctcgccggcagctacgcctttgtgctcttcgacaagtccacctccaccctacttgtggcctctgatccggagggaaaggtgtctctgtattgggggattactgctgatggatctgttgccttctctgacaacattgacctgcttaaaggaatcgtgtggcaggtctcttgcacctttcccacaaggctgcttctattccaatgctcttggaggtggaggcttgaagtgctatgagaacccaaagcac

SEQ ID NO: 407364 - DNA, 464 bp, Oryza sativa
ggttaagcaacttcagttgatacttcagaaccttgcgatgaccaaataaattcatctgatattgatctatgttctgagacacttccagaagaaacaatccagtctgtgaagatagttgattctgaagatttattgaagggtgtctacacatttgaagatgttgtccttcctttgcctggttcgcaagcattatttcctggaaacggaattgctgacatttatcatgaattggctaaaaaggatggcattagcttgacagagaatgcacatggtgtcaaggagttttcaattacaagcatgaaaggaggttatcggcgggtgttccagcggcctattgattttgagtgggaactcatgacttatacagatgacacagcatctttagcagaaactgattgggatgttctgtccagatacaacctacaaaagccaaggaaggtaatgagactatatctagcgcgatt

SEQ ID NO: 407365 - DNA, 527 bp, Oryza sativa
tctcctcctcctctcttccatcgccgctgctcgcttcctccccctctcccacgaaagatggcgtctcacattgttgggtacccccgcatgggccccaagagggagctcaagtttgccctggagtctttctgggatgggaagagcagcgctgaggatttggagaaggttgcgaccgacctcagggccagcatctggaagcaaatggctgacgctgggatcaagtacatccccagcaacaccttctcgtactatgatcaggttcttgacacggctgccatgcttggtgctgtcccagagcgctactcatggactggtggagagattgggttcagcacctacttctcgatggctaggggcaatgccactgtccctgccatggagatgaccaagtggtttgacaccaactaccactttatcgtccctgaacttggtcccaacaccaagttctcctactcttccccacaggctgtgaatgaatacaaggagggctaggcgctcggcgttgacaccgtgccagtactttgtga

SEQ ID NO: 407366 - DNA, 530 bp, Oryza sativa
  unsure (1)..(530): unsure at all n locations
atgatctctcttattatgcctccacgtgaccagattgcgcgagtggctaagatgttgggtgatgaatatggtaccgcctcaaacatcaagagtagagtcaatcgtcagtctgttttggctgccattacctcagctcagcagaggctgaagctctataacaaagttcctccaaatggattggttctctacactggaaccattgttactgaagatgggaaggaaaagaaggttaccattgattttgaacccttcaagcctatcaatgtatcactgtatctttgtgataacaagttccacactgaagctttgaatgagctcttggaatctgatgacaagtttgggttcattgctatggatggtaatggtactctttttggcacactaagtggcaacacacgtgaggtgcttcacanattcactgttgatctcccaaagaagcatggtagaggaggacaatcttgcttgcgttctgctcgtcttcggatggagaaacgccataattatgttcggaaaacagctgagcttgctac

SEQ ID NO: 407367 - DNA, 483 bp, Oryza sativa
  unsure (1)..(483): unsure at all n locations
cgttactcgtaaagagatctcgtctcgcctcgggaatccaaccattgccggcgaagtagagatcgggagggcggcgccatgaacaggggcggcggcgtcggcgtcggcgatgagagcggaagcgactacgagagcggcggcggcatgcggaagccgctgctgatgcacacggggagctggtacaggatggggtcgcggcaggggagcctcaccggcgcggggacctcgtccatggccatcctacgcgagtcccacgtctccgccttcctctgcacgctcatcgtcgcgctcggccccatccagttcggattcacgggggggcttctccttcccgacgcaggacgccatcatccgagacctcgacctcaccctctccgagtctcnggtgttcgggatcgctgtccaacgtcggcgccatggttggnggcgattgccagtggtcagatggccgagtacattgggcgcacagggtcattgatgatt

SEQ ID NO: 407368 - DNA, 445 bp, Oryza sativa
gttgtgtgatacgctcgcctaactttggctaattctgctgatatttgctcttcttctgtcatatcaccttgccgctgcttctgatcatctcccgttcttgcattcttcttcttcttcttcttctccggcgtggtgtgctgctgacggctgacgctggctggtcgtggacatgtcgaagaagattgtggtgaagctggatctccatgacaacaaggacaagcagaaggccatgaaggtcgtctccacgcttgccggcatcgacgccatttccatggacatggcgtcgcgcaagatgacggctgatcggcacggctgacccggtgaacgtggtgagcaagctgcgcaaggcgtcctggccggcctacatcgagtccctcggcccggccaaggagcccgagaagaagaaggagggcggcggcgatgccaagaaggatggcggcgatgg

SEQ ID NO: 407369 - DNA, 430 bp, Oryza sativa
tggtgaggctagggagattctcaagtttgcaagagctcaagctcgaaggcaggctgccaatcttgagcatccgcttgtttgtattgatgtcattgaagaaggtattgtttcgggaccccgagctgggctctggaaggaagcaaatgctttccagggtcttcttttcgcggatacatgtaaaaacttagttcatgtattcttttctcaacgggcaacatcaaaggttcctggtgctacagacttgggattgatgcctaggaaagttactaaagttgccattctaggtggtggacttatgggttcaggaattgcaactgcgatgatactgagtaattatcctgttatactcaaagaagtaaatgagaagtttctaaatgctggaattgacagaattaaagccaatttgcagagtcgtgtgaggaaagggaaa

SEQ ID NO: 407370 - DNA, 456 bp, Oryza sativa
  unsure (1)..(456): unsure at all n locations
aataagcttagcttaaagcagcagctagcactggcaggatcaagggcgtgctcggtgggggcgctcctgctcctgagggctatcttgttgccatgggaagctactacgactacttgtttgcggcggctgcaggtgcggagcctcctcaagcgcctcaacaagcctctcctagcaacctttcagagcctacatggagatatcatagattgtgtgcacatctccaatcaacctgcattcgaccatcctgttctgaaggaccatacaatccagatgcgaccttctatccagccaagtggcctatatggagaagcaacacgtncattcacccaaacatggaatcagaatggcgaaaagtgccctgacaatactataccgatccgaaggaccaaggaggangatgtcatgagggccacctctgttacaacgtttggcaagaagacgcacggcgggagccct

SEQ ID NO: 407371 - DNA, 233 bp, Oryza sativa
tttagaaggagaagaaggagaggagcagccatggcgtcgtcggtggcagcggcggcgagcacgttcctggggacgaggctggcggacccggcgccgcagagcgggaggatcgtggcgaggttcgggttcggcggcgggaagaaggcggcggcgaagaaggcggcgaggccgtcggcaccgacaactgacaggccgctgtggttccccggcgcggcggcgcctgactacctgga

SEQ ID NO: 407372 - DNA, 493 bp, Oryza sativa
tcttttctcaaccctttgttcatcttcttgttcctcctcttgtctcgtctcgatggccgggattggtccgatcaggcaggactgggagccggtggtggtgcggaagaaggcgcccaccgccgccgccaagaaggatgagaaggccgtcaacgccgcccgccgctccggtgccgagatcgagaccatgaagaagtgtaacgctggaacgaacaaggcggcgtcaagtggcacatccctcaacaccaagcggctggatgacgacaccgagagccttgcccatgagcgtgtctcaagtgacctgaagaaaaacctcatgcaagcaaggctgggctagacgatgacccaggcacagcttgcacagatgatccatgagaagccccaggtgatccaggagtacgagtcaggtaaagctattccgaaccagcagatcatcgggaagcttgaaagggctcttggacaaagctgcgcggcaagaaataatgttctactatta

SEQ ID NO: 407373 - DNA, 458 bp, Oryza sativa
  unsure (1)..(458): unsure at all n locations
atggttctcagcaattacatagaggaaattattgtctcggcagtctcgtatcatatgattcacaacaaggatcctgaatacaaaaatgggaagcttgttctatcatctaaaagtttgtcccatgggctaagcattttccaagaaagtggctttggtgggaaagagactctgaaattagaggatgatctgaaaggtgccactggacccaaaaagagcgagacagagaaatcagccacagtgccacttaaagatggtgatggtccattaccaccaccaaaaccggaaattccagataacgagtttgagaagcgcatcaggccagaggttataccagccagtgagaagngagtgacttttgatgacattggagccctggctgacatcaaagagtcgcttcaggagctggtcatgctacctcttcgacggcccgatctttttaaaggaggacttcttaagcc

SEQ ID NO: 407374 - DNA, 404 bp, Oryza sativa
gtttgactttctgactttgggagggagatttgtccaagaagaattccgttggaggaggattcggagagctccattggtctgtgggtcggtcggtccagcttgctggagaataagaagggggtgttgttgcgttgcgggcgagggaaggaggggaggagaggaggcgtcttgccgttggggttctgatccctcttggggctcccgtcgaggaggtggcacgatgaagacgccatcactgcttgttcagtgtttccctggcttgcttcccagcaaggctacgagttgtgtgccaattgtatcagaaagggatctacagctaccatcaccagctgtcgagataatcccatcaaagagtgctcatccttacaaatatgctggcgagaaggttgatgttcaaggtcttg

SEQ ID NO: 407375 - DNA, 521 bp, Oryza sativa
cgtcgccacgccagacccctcgagcccgttgctcgcgagcaggagcgaggagtacaggcttttgtttcgcctgccacccgacgaggttcttgtgcaagattttaattgtgcgctccaagaaaatattcttcttcagggtcatatgtatttatttctacaccatatatgcttctactctaacatttttggatatgagaccaagaaaactattccgttgcaggaagtgactgatgtacgtaaagcaaaaacagctgctatttttcataatgccatcgaaattattgccggtacaaaaaggcacttctttggatctttcttgtcacgcgatgaagcttttcgcattatagtagagggctgggaacagcatgtcagtgatgctagattgctccttgaacgccaggatgcaaagtcaggaaacagcagtgatgaaaatggttatgttttgctggaaggagcataggaaactaaacaagatgatgattcatcaccattagacagatctgttaatggtacagctgtca

SEQ ID NO: 407376 - DNA, 504 bp, Oryza sativa
ctcggcgcggcgcagaactgctcggcgacgctcgccggcaaccaccggatgcgcgacgccgccgctctcccggagaccaaagactggagggaggatgggatcgtgagccccgtgaaagaccagggtcactgtggttcctgttggaccttcagcaccactggttctcttgaggcagcatatactcaggccactgggaagcctgtctctctttctgagcagcagctggttgattgtgctactgcatacaataatttcggatgcagtggaggcctaccatctcaggcctttgagtacatcaaatacaatggtggccttgacactgaagaggcttacccttacacgggtgtcaatggcatctgtcattacaagcctgaaaacgttggagtcaaggttttggactccgttaacatcaccctgggtgctgaggatgagctgaagaatgctgttggacttgttcgtccagttagtgttgcctttcaggtgatcaacgggttcaggatgtac

SEQ ID NO: 407377 - DNA, 487 bp, Oryza sativa
gataagtggccctatgaagctgctgctttagcatttgaagcaattccaagaactttggctcaaaattgtgggttgaatgtcatcaggataatgacacaactccagggaaagcatgcaaatggtgaaaatgcgtgggttggcattgacggaaggagcggtgacattgttgacatgaaagagcggaagatctgggattcttacagtgtcaaggcacaaacgttcaagacagctatcgaggcagcttgcatgcttcttaggatcgacgacatcgtcagcggtatcaagaagaagcaggctcctggagcctcagctcctaaacagcctcagatcgaacaggagggtgacgcggacaatgagcagatgatcccagagtagaacttgtgtgctgttggtgtgaggagcctgcactgccgatgttatgctctaaagccagagtaagcccatgaatggagaacggctagtttgacatgtgaagcttttggcagtt

SEQ ID NO: 407378 - DNA, 337 bp, Oryza sativa
gtacggccctgacaggaggatcttcttgccggagggtctcctggaccgctcagaggtgccggactacctcaacggagaggtccccggagactacggctacgacccttttggcctcagcaagaagccagaggacttctccaagtaccaggcctatgagctgatccatgccaggtgggcgatgctcggcgccgctgggttcatcatccccgaggcctgcaacaagtttggcgcaaactgcggccccgaggccgtctggttcaagaccggcgccctcctcctggacggcaacaccctcaactacttcggcaacagcatccccatcaacctcatcgtcgcc

SEQ ID NO: 407379 - DNA, 464 bp, Oryza sativa
cacagagggaggaatcggatcggattggatcccaacccaccccgcgccgccgctgccgcgtcccgtcccgaatcctccggcgagcctgacgtcggccgatgggcgcatcagtgactactggcttgcagatggcggcggcacgcccttgtatcccagcttgccaacgcctgctagggtcaagagcagcacttccttcatttggaagggcgcttagtacccaaactggcttcgcgagctgcagaaaaacagcatcagcagggccgtttgtttctctgaaccacaagaggtttgccgtgagggcgatgtctgcccagggactccccattgatctcagaggtaaaagagcatttattgctggagttgctgatgataatggctatggctgggcaatagcaaaagctcttgctgcagctggtgccgagattcttgttggtacatgggtacctgcactgaacatatttgag

SEQ ID NO: 407380 - DNA, 484 bp, Oryza sativa
  unsure (1)..(484): unsure at all n locations
tctttctctgtctctctccctctctctctcggccatggaccatctgcatggacgagcctcgacggcgtctaccctactgacccggcggcgacggcgccggaatcccacgtgcctccgcccccgcagacgccggagaaggattcatgtgaggatacaggagacatgaggatcagtgaagaaaagccatgcacagatcaggagttagatgctgatcagatgaatagttctagctttaatagttccagcgagtgtgagaatcaaacacctagcaatgatgaaatgactggatcagagtccaaatctgaggcagctcaaacagagggtggtggatcgagtgaagagaaggtcctgaagaagccagacaagatcctgccttgtnctcggtgcaacagcatggatacaaagtttctgctactacaacaactacaacattaaccagccaagacatttttgcaagagttggcagagatattggacggcaggt

SEQ ID NO: 407381 - DNA, 522 bp, Oryza sativa
  unsure (1)..(522): unsure at all n locations
cttattcttctaatctattgagtttattttttccatgctcttgttgtggatttgaagctgcaagaattaaaggccaatcctcatagaaatgcagagggtacagttattgaagcatgccttgacaaagctaaaggatctcttgccaccctagttgtacagaatggaaccctaaacaagggtgatattgttgtgtgtggtgaggcttttggaaagatccgtgcaatgtatgatgatggtggaaagcttatcgataaggctgggccatccaatgccgtgcaggttttccctttcctttattttcctcgttccttttaccatgatccttcctaacatttcctaatataccatatttcggatgaaaaagttactgaaattacagttggttctcctcatgagatggcccctctggccatgacgactctaaacaaaatactcatcacaggtctgatgcaatttgacatanagagaaagcatctgaaactataaatgnttatgtgcattagaacttgtagttacatgaca

SEQ ID NO: 407382 - DNA, 566 bp, Oryza sativa
ctagcttttggatgcaggctttcacactcacgaagcgatcgttcatcaacatgtcgcgggacttcgggtactactggctgaggcttatcatctacattgttgtgacagtctgcatcgggacaatctacctcaatgttggcaccagatacagctcaattctggcaagaggtgcatgcgcttctttcgtcttcggctttgtcacgttcatgtcgattggaggattcccatcttttgtggaagacatgaaggtgtttcagagagagaggctcaatgggcactatggcgtgctggcattcgtgataagcaacacgatctcggcgatgccattcttgatcttgatcaccttcatctccgggacaatgtgctacttcatggtgcgcctccacccgggcttcacgcactacctcttcttcgtcctctgcctctacgcaagcgtcaccgtcgtcgagagcttgatgatggccattgccagtgtcatccccaacttcctcatgggcatcattcatcgtgcaggaattcaggggatattcatgctggtttcaggatacttcaggcttccccatgac

SEQ ID NO: 407383 - DNA, 440 bp, Oryza sativa
ggagagccatagcctctctctctctctctctctctagatatctctctctttttctctctagatctctcttttttcttgtatctctataggttgttagagcggcgacggcgagaagaggaaggagcaacaaggagtagatcatcagtatagagagcagcagcaatttgggaaggttcattattacagctctgttgtttcatttctttgaggagacgaagttagcaagcagggattgctgtttctgaatttcaaggagaagataacaatagcaaatgatgatgtcatctgggttccgctcggtgtgatcgggtctctgcgctgtcggttgctcatcagttgccattgtcatctgcaacaaagctctcatcagtacccttggtttccctttcgctacaacattgacaagctggcatctcatgatgaccttctgcacccttcat

SEQ ID NO: 407384 - DNA, 474 bp, Oryza sativa
  unsure (1)..(474): unsure at all n locations
ttcggcgcccaatgcagcacaaaccctagccctccctccccttgatctcgcgcgagcatggggaactgctgccgctcgccggccgccgcggcgcgggaggacgtcaagtcgtctcacttccccgcatcggccgggaagaagaagccccaccaagcgcggaacggcggcgtggggggaggcggcggcgggggcggcggcggcggaggaggaggaggagcggggcagaagcggctccccgtgctcggggaggaagggtgcgagctgatcggagggatcgacgacaagtacgcgctggaccgggagctcgggcggngggagttcggggtgacgtacctgtgcatggatcgggacaccaaggagctgctcgcctgcaagtccatctccaagcggaagctgaggacggcggtcgacgtggaggacgtgcgccgggaggtcgccatcatgcgccacctacncagagcgccagcatcgtgt

SEQ ID NO: 407385 - DNA, 516 bp, Oryza sativa
  unsure (1)..(516): unsure at all n locations
ctcactgcgccgccgcggagaggcaaacccgaaggagactaggagaggaagagcttcaccgcctccgcctccggcaaggaaagccaaagccaatcgaggccaagagcgagggggaaggaagaagaggggggaagggagagatgccgacggtgacctgcaacgcgtgcaacgcggggttcgatgacgaggagcagcagcgcctccactaccgctccgagtggcaccgctacaacctcaagcgcaaggtggctggagttcctggagtgactgaggctctgtttttggctagacaaactgctttagcagaggggagcaactctgatagcactccaatgctctacagttgtgctctttgtggaaaggagtacaggagctcanaagctcatgcccaacatcttaattcacgatcacatctcatgaaagcttctcaagagcctaatgcatncattgctggaataccatagtcaagcctcgtcctgagcgaggtcaacgcagggctccatctgcagtagaaga

SEQ ID NO: 407386 - DNA, 456 bp, Oryza sativa
  unsure (1)..(456): unsure at all n locations
cgcatagaaaaaaaaatctcccctcgaagcgaagcgtcgaatcgccttctcaagatgcagatctttgtgaagaccctcaccggcaagaccatcaccctcgaggttgagtcctcggacaccattgacaatgtcaaggccaagatccaggacaaggagggcatccccccggaccagcagcgtctcatctttgctggcaagcagcttgaggatggccgcaccctggccgactacaacatccagaaggagtccaccctccaccttgtgctcaggctcaggggaggcatgcagatcttcgtcaagaccttgactggcaagaccatcacccttgaggtcgagtcgtctgacaccattgacaatgtcaaggccaagatccaggacanggagggcatccncccggaccagcagcgtctcatcttcgctggcaagcagcttgaggatggccgcaccctggccgac

SEQ ID NO: 407387 - DNA, 419 bp, Oryza sativa
gtgtttcctctccctcgccgagcaggtcagggagaagctcggcaagatcgacccctacttcgtcaagcttgccgatgccatggtcacctggatcgaggcctgggatgagctgaacccctcgactgctgctgtcgagaacggcaaggccaagtagattgatcctgggagcttgtgtgtcgcaggatggaaagtaccctttaagtgaaagtgttgctgtggcctaggccccctagatatagctctttttgagatgaagggagagattacttaagcaactttataattctttgttgttatgctggttcttttgtagctggaaaaggatttgttatcatcgtttacataattcaagacaataataattttatcatgtaattttgatagtcgtgctttggttgctaaatggtgttattgtattt

SEQ ID NO: 407388 - DNA, 503 bp, Oryza sativa
cctagcactattgttgagtggatccccaccagatacgagctttcaattgtccagttagttgacatgataagatgcaagctcatggagatgatgtacacacgcagggagtcttctaatgcgtgggctgagttattaacacctgcagctaatcagaaattgcaggaagaagtgagcaaagcccacaccctgaacgtcatcccttctgaaagtaatgaaaatggcaatgtgttcaaggtgtgtgatgattctgttaatgttgtcaatattgatgcatgggagtgtacctgccgaaagtggcatatttctgggttgccatgcatgcatgcaattgcagtaatagagcggattggacactgcccttacgattactgtgtgaagtatttcagaacagaatgctaccgcttgacctacttcatgtcgataaatccaatacccgatgttatgctggctcctgctatattaagtgaacaatcttaaagtccagttacacatgcaaccccaat

SEQ ID NO: 407389 - DNA, 441 bp, Oryza sativa
tgtggaaaggagggagtgaagaacaaatcttgattcgtcctcactgcgcactgcccccccgtccgtgtggttccagctgatcaccagcagcggccggcgtcttctcgtctcgatccctcctgcctctttggccgcggctcgatttgggcggtcaagatgaacaggatgatgttcatggcgtgctgctacaacgatccggacatgctcatcgatccggacacggtctaccccatccgccccgagtgccgcgaagacgccgccaagacgcgattcaagcccaggcctggcctcactctaagtccaaggagatggaagctgcttcacaatgaagaaggtgtcctagacatagctggaatgatcaaaagagtgcagcgtgggggtacccacccaaatatcaaaggagaagtttgggagctcttgctgggttgttatgaccctaaa

SEQ ID NO: 407390 - DNA, 344 bp, Oryza sativa
cgcttttctaaattgggttatagctggtcgagtggcatgggtgcccttgctgaacaatagggagaccgaatggctaacatgcacttgacactactgctataacatggagcgcatgcggatctgaacgaaccagagcagaataggcatactctgggcggacaacaaacggatggcattgttcgtggaggtatattaaaccagctccaagacttatgccagttaacataccagaagatttcagcaaagccattatcgctgagttgtcgactttctgggaatatattggcggatgaattagtccgtgctgctcttgactgtttaggacccttaggagctcctatacc

SEQ ID NO: 407391 - DNA, 432 bp, Oryza sativa
gtgctgaaggtgatattcagattttcagagtgagtgctcgtgtgttgtgcgatcagtgcccgcagttcgatcgatccgtgttgatctttgaaagaaagatgtcgtgctgcggaggaaactgcggctgcggatccggctgccagtgcggcagcggctgcggaggatgcaagatgtacccggagatggctgaggaggtgaccactacccagactgtcatcatgggtgttgcaccttccaagggtcatgccgaggggttggaggccggcgccgccgccggagcaggagcagagaacgggtgcaagtgcggcgacaactgcacctgcaacccctgcaactgcggcaagtgaagcaagccacctcctgacgaaaccaaggagatggaagggcctagtactgctaagcttgttatttgattccagtacatgtgatgag

SEQ ID NO: 407392 - DNA, 482 bp, Oryza sativa
catgtaagagacgagacgagggagagaaggagaagagggggccggccgcgggcgtcgtggtgttcctccccccctctctctcctctcctctcctctcgatctccatccttccttccatccattcctccccgcacccttcgcattgctctcgtcgtctcgattcggtcgaggatctccaggaaaagaggaggaagcgatatgggttgcttttcatgctgcggagcggatgatgtcggcaagaagaagaagcgcgacgatccttacgtcccgatccctgatccaggtggtaactatggacgtagcaagcccgggcccccagccccttcgcgttctccccccaccagcagaaatctgccaattgcagtaccggcaattccccttgatgaaataaagggaataaccaagaacttcagcagtgatgctctcatcggagaaggctcgtacgccagagttttctttggtgtgctgagagatggcaggag

SEQ ID NO: 407393 - DNA, 418 bp, Oryza sativa
gcggttgctagaggcaacaagaagctgcaggagagggtgcccatccggcgcaccgcgtggaggctcgccgacctcgccatcctcttcctcctcctggccctactcctccaccgcgtcctccacgacagcggcgcgccatggcggcgcgccgcgctcgcctgcgaggcgtggctcaccttcatgtggctgctcaacgtgaacgccaagtggagccccgtccgtttcgacacgttcccggagaacctcgccgaaaggatcgacgagctcccggcggtggacatgttcgtgacgacggcggacccggtgctggagccgccgctggtgaccgtgaacacggtgctgtcgctgctcgccctcgactacccggccgccggcgagaagctggcgtgctacgtcttcgacgacgggtgctcgccgc

SEQ ID NO: 407394 - DNA, 518 bp, Oryza sativa
gcccactcaaatcctctcctccttccccaacggcgagcgtccccggcgaatccgccttgacggaggcaccccggcgagctcaccttcccggaggaatcccagctcagcctcatcgtcttcggtgagggaaatatcttggtgattcttgggaaccttcagaaagaccacttaatagttttccttggcccagaaaggcttgaggcttgagagctgaaaagttctgctggagctagtgctataatggccacaaaacttgtggttcttggaatcccatgggatgtggacactgaaggattaagagagtacatgggcaagtttggacccctagatgattgcgtcgtcatgaaggagcgttcgtctggtcgatctcgtgggtttggttatgtaacgttctcatcagctgatgatgccaagaatgttcttgagtgtgagcatgttctcggaaaccgaactctagaagtgaagatagccactcctaaggaagaaatgaaatcacagggatcaaaaaaggctactag

SEQ ID NO: 407395 - DNA, 536 bp, Oryza sativa
  unsure (1)..(536): unsure at all n locations
tgctttgctctgatctggttgatcgatctcgtcgtgggcgatggagaagttgctttcctcctccggcgccgccgccgccgtccgccgcgccgtcctcgacgccggcaaggagctcggcttcttccaggtggtgaaccacggcgtgccgccggagacgatgcgggagatggcggcggtgtgcgaggagttcttccggctgccggcggaggacaaggcggcgttctactccgacgcggaggagaaccccaaccgcctcttctccagcaccatctacgaggtcggcgaccagcgctactggcgcgactgcctccgcctcgcctgcggcttccccgtcgccgacgacaccaacacccactggcccgacaagccccaccatctccgggatgtcacggagaagttcttcgtggcgacgaggggattgtggatcgagctgctgcggctgctgtgcgaggngatggggctcaagccggactacttcgagcgcgaacttaccgccggngatgttatattaacgttaaccactacccttcatgccc

SEQ ID NO: 407396 - DNA, 458 bp, Oryza sativa
aacatccacttgatatctgatgaagtgtttgctggctcaacatatggatctggaaaatttgtaagtgtggcagaggttgttgatgatctagaagactttgacaaaggcagggtgcacataatatatggactctcgaaagacctatctcttgccgggtttcgggttggggtaatatattcctataatgaaagcatcgtgacagcagctgctaagattgctaggttctcgtctgtgtcaactccaacacaacgcttgcttgttgccatgctctcggaccaaaagttcatttcagattacctaaaagttaatagagagagattgcgcaagatgtaccatttgtttgttgatgctttggatcaagtggggattgagtgctacaagagcagtggagggttctactgctgggcagacatgagcaagttcatcaggtcttacagcgagaaaggtgagcgcaagct

SEQ ID NO: 407397 - DNA, 487 bp, Oryza sativa
  unsure (1)..(487): unsure at all n locations
ctttaccgcctcaacccggacgcagcagccgcagcggaagagggaagcgaagcaagcgaagctcgaggggagatggcgcgcggcgtggcggcggcggcggggggcaagggcggcgccgggaagaagaagggctccgtcaccttcgtcatcgactgcgccaagcccgtcgacgacaagatcatggagatcgcgtcgctcgagaagttcctgcaggagcgcatcaaggtcgccggaggcaaggccggcaacctcggcgagtccgtcaccgtctcccgcgacaagaccaaggtcaccgtcacctccgacgggcccttctccaagaggtacctgaagtacttgacaaagaagtacctgaagaagcacaatgtgcgtgactggctccnggtgattgcatccaacaaggaccgcaacgtgtacgagctccggtacttcaacatcgccgagaacgagggcgaggaggaggattagatgcactggctttttctat

SEQ ID NO: 407398 - DNA, 344 bp, Oryza sativa
gttaagatcttcgaggacgagtgtaacgaggtcaacaccggccgcgtggtcggcacctatgggtacatggcgccggagttcgcgctggagggcgtctactcggtgaagtctgacgtgttcagcttcggcgtgctgctgctagagatcctcagcggccagcgcaacggcgcgctctacctcgaggagcaccagcaatccctcatccaagacgcgtggaagctgtggacgggaggggttggcggccggagttcatggacccggcgctggggcgggggtacgcggcggaggaggcgtggcggcgctaccacgtgatgcttctgtgcgtgcaggaggaccctgactct

SEQ ID NO: 407399 - DNA, 350 bp, Oryza sativa
cactctctccgtctcattctccggcgccggccagaaatgctgccctcctcctcctttaggcgttggggggagctagagctctagctagctagctaggtgcgacgcgacgacgtgatggctggtattgctaaggagaggcggctgccgccggcgctgccactcgccactctcatcggccgcgagctccgcgccgggggctccgagcgcccctccctccgctacggccacgccggcttcgccaagcgcggcgaggactacttcctcgtcaagcccgactgcgtacgcgtacccggggacacctccaccgccttctccgtcttcgcggtgttcgacggtcacaacggggtctt

SEQ ID NO: 407400 - DNA, 471 bp, Oryza sativa
cccaaatcccagagaggagtcgcgagcttttcatcaatcctctgattttcccccaggtttccccacccgcaaagagcctcaaaattccccctcctctgtcgcgaccgatcgcgacgacggcgccggacgagcagacaccgccgccacgatgccgccctccaccggctccgtcccacccgccgcatcaacgccggcggctggggacgaggccaccgccgccgggagggtactcctcggcaggtacgagctcggcggcctcctcggccgcggcgcctccgccaaggtgtacctcgcccgcgacctcctcaccggccgcgacgtcgccatcaagtccttccccaacccccgccacggcggcggcctccgcggcggcgaggaggatgtcctcctccgccccgcgcccatcgagcgggaggcggccattcttcccaggctgcgccaccgccacgtgatgcgccttcgcgagattct

SEQ ID NO: 407401 - DNA, 524 bp, Oryza sativa
  unsure (1)..(524): unsure at all n locations
ttatgatctgctgctgcaacaagatggatgccaccactcccaagtactccaaggcccgttacgatgaaatcgtgaaggaagtctcatcctacctgaagaaggtcggctacaaccctgacaagattcccttcgttcccatctctgggtttgagggtgacaacatgattgagaggtccaccaaccttgactggtacaagggccccaccttgcttgaggctcttgaccagatcaacgagcccaagaggccatcagacaagcccctgcgtcttccccttcaggacgtgtacaagatcggtggtattggcaccgtgcctgtgggtcgtgttgagactggagtcctcaagcctggtatggtggtgacctttggtcccagcggcctgaccactgaggtcangtcggttgagatgcaccacgaggctctccaggaggctcttcctggtgacaacgtcgggttcaacgtgaagaacgttgcggtgaatgatctgaagcgtgggtacgtggcctccaacttcaaggatgaccct

SEQ ID NO: 407402 - DNA, 389 bp, Oryza sativa
  unsure (1)..(389): unsure at all n locations
ctctcttcctatctccttcctccccacccacccccaaatccacctcgccgtcgccgccgcgaaaccctaggcagccatagccatggctgcggccatcctcctccgccgcgtcccccccgcgcgggcccaggccacggcgctcatcgcggcgcgctcgatctcggactccacggcgccgctcaccatcgagacctcggtccccttcacctcccacatcgtcgacccgccctcgcgcgacgtcaccaccaccccggccgagctcctcaccttcttccgcgacatgtccgtgatgcgccggatggagatcgncgcggattccctctataaggccaagctcatccgcgggttctgccactctacgacggccaggaggccgncgccgtcgggat

SEQ ID NO: 407403 - DNA, 339 bp, Oryza sativa
ccataattagccccgatccgatcgcttcctagccctgattcgaggtaaaaaaggggaggagaagatgagggagatcttgcacatccagggcgggcagtgcgggaaccagatcgggtccaagttctgggaggtggtgtgcgacgagcatggcatcgacccgacggggaggtacgccggcacgtcggacctgcagctggagcgcgtgaacgtctactacaacgaggcgtcgtgcggccggttcgtgccgcgcgccgtgctcatggacctggagtccgtcaccatggactcctttctgacggtgccctactgtcagatcttcctcccctacaatcttttttt

SEQ ID NO: 407404 - DNA, 405 bp, Oryza sativa
tactatccaggctacaatccaaggctttgaatggggggtattttcaaaagaacggggtgaagacttgctcgcaaagagtgttgagattgcacgtgaagcgcgtgacatgtttctgaaggaacattcaggatcgttccatacaacatcctatcctggttgcagcttccattggaagttatggggcctatcttgctgacggctctgagtacagtggggattatggcgaagctggcacgttagaattcctgaaagattttcataagcgaaggctggaggttcttgcggcagcaggtcctgatttgatcgtctatgaaacaattcccaacaaattggaagctcaggtatgttattcattactacttacgccagggatctcatggctgtcatttaacaatgtgttcttac

SEQ ID NO: 407405 - DNA, 424 bp, Oryza sativa
gtcataccaggctacaattcaaggctttgaatccaagggattttcaaaagaacaaagtgaagacttgctcgcaaagagtgttgagattgcacgtgaagcgcgtgacatgtttctgaaggaacattcagatcgtcccatacaacatcctatcctggttgcagcttccattggaagttatggggcctatcttgctgacggctctgagtacagtggggattatggcgaagctggcacgttagaattcctgaaagattttcataagcgaaggctggaggttcttgcggaagcaggtcctgatttgatcgcctttgaaacaattcccaacaaattggaagctcaggtatgttattcattactacttacaccagggatcttttgcctctcatttacaatgtgttcttacaaaataatctctattggttcg

SEQ ID NO: 407406 - DNA, 423 bp, Oryza sativa
  unsure (1)..(423): unsure at all n locations
ggaaaagaaaaaaaaaagagataaaaaaaaatctcctcctcctcctcctcgccgccgccgccatggacgcctccgccggaggcggggggaactcgctgccgacggtgggggccgacggggccaagcggcgggtgtgctacttctacgacgcggaggtggggaactactactacgggcaggggcacccgatgaagccccaccgcatccggatgacccacgcgctgctcgcccactacggcctcctcgaccagatgcaggtgctcaagccccacccggcgcgcgaccgcgacctctgccgcttccacgccgacgactacgtcgccttcctccgctccgtcacgccggagacccagcaggaccagatccgggcgctcaagcgcttcaacgtcngcgaggactgccccgtcttcgacggcctctaca

SEQ ID NO: 407407 - DNA, 494 bp, Oryza sativa
catgaacagaaaccgccgagagagttcgtagcagtcaacgcgcgaggcagggccgagaagaaaccgccggcgacgcacgcgcgatggacgctcggcggaggcggttgtccccggcggtggccgtggcggcggctcttcttttcttccccatgttcttcgggagccatacgccggcggcggcggcggcgtacggagaggcttcaggcgacgccggcgtgacggcgctgcagaagcacgcggcgttcttcgacaaggacggcgacggcatcgtctccctctccgagacatacgacgggttacgagcactcggactcgggtctggcctctccagcttgagcgccggcttcatcaatggcgtcctttccccaaagaccagacctgacaatggaacagcaccacgcttatctatctacatagagaacatctacaaggggattcatggaagcgattcaagcgcctatgattttgaaggaagggtcgttgctgaaaagttt

SEQ ID NO: 407408 - DNA, 344 bp, Oryza sativa
gtgttttgcaagaaccttgtgaagaagtgcgtggaggtcttatttgagatcgctgtggacatggaagactacaacaagttctacgaggcctgctgcaagaatcctaagcttgggatccatgaggactccaccaacaggaccaagactgctgagctcctgtggtatcactccaccaagagtggtgatgagttgaccagcctcaaggactacttaacccggatgaaggagggccagagtgagatctattacatcactggtgagagcaagaaggctgttgagaactcccccttccttgagaagctgatgaagaagggatatgaggtcctgtacattggtgatgccat

SEQ ID NO: 407409 - DNA, 310 bp, Oryza sativa
cgctttggcgccgcgacatcgacgtcgcgtggcgcggcacagtcgcattcgctggagtggatcaaggacacgcacttcgttatggtgccacccaagggcctcctccgggacaaagcttccgacgccatggtgcatcgagggtggctgtccatgtacacctacagggactctgagtccagccacaacaaggacagtgctcgagatcaggtgttgagcgaggtggcgatgctggtgcgcatgtaccacgaccaggaactgagcatcacggcgacgggacacagactcggtgccgtactcgcgacgctgaacg

SEQ ID NO: 407410 - DNA, 429 bp, Oryza sativa
catttatagaaaaaggaaaaaaaacaaaacacaccaggccaaataaaagcgacattgggatcgctcaccaccaacatcgtcctcgccgtcgccgtggtggcagcgctggtcggcggcggttcgtgcggtccgcccaaggtgccaccctgcccgaacatcacgaccaactacatcgccccgtggctccccagcagggtcacctggtccggccagccctacggctccggttccaccgacactggtggcgcgtgcgggatcaagaacgttaacctgcctccttacgacggtatgatctcctgcggcagcgttcgaatcttcaaggacggcaggggatgcggctcatgctacgaggtgaagtgtgagcagccggcggcgtgctccaagcagcctgtgacggggttcatcacggtcatgaactacgagcccttc

SEQ ID NO: 407411 - DNA, 221 bp, Oryza sativa
tttttcggtccccgccgtcgtcgccgtttttttggagaggagaaatccgtaggcttagaggatttttggtagtcttgtttcgagatattcatgaagagggggggagcttacgggggattcttatgatcactagtgtatcacgcagtgccacgcgttgtatcggacgttccaaacacaggttgctgtatgaatctacgctgatgtactaatggggtgtcagg

SEQ ID NO: 407412 - DNA, 480 bp, Oryza sativa
tcagacccacccggatgccgcgggctctctgggtgatcccgtctgcatcgtccaagcgcacagtggcccggcctacgacgtcaggttctacccggattcgcagcagccgctgctcttcagcggcggggatgacgggcgccttcggggatggagatggcacgagatgcagagctgccttgtgccgctatctctgcaaggggatcatttggagccagtacttgatttggtgaaccctcagcatgagggtccttggggtgctcgctctccaatacctgaaaacaacgccattgcgattaacaaacaggaaggatctgtttatgcagcggccggggatgcatgtgcttattgctgggatgtggagagtggtaaatgtaaaatgaccttcaagggacatactgactatttgcacagcattgcagtccgcgaagcgaaccgccaggtagttacaggatcagaggatggcacagcccgtatctggga

SEQ ID NO: 407413 - DNA, 436 bp, Oryza sativa
ccgttttcggcggcggcggcggaggggaggcgtggggggctgtgcatgagcgggaccgggtggcgcgggtgcccgggcaggacttcgacgtcgggttcgcgcagtacgccgggtacgtcgccgtcagcgaggagcgcggcgcctcgctcttctactggttcttcgaggccgccgacgacccggcgtccaagcccctcgtgctctggctcaacggagggccaggttgctcatcaattgcatatggcgttgcggaagaagtgggaccttttcatgttaatgcagatggacagggtgtacatctgaatccctattcgtggaaccaagtggcaaatatcttgttccttgattcaccagttggtgttgggtattcggactcaaacgcctctggtgatatattaaataatggggatgccaggactgccaatgattctttgac

SEQ ID NO: 407414 - DNA, 491 bp, Oryza sativa
gccctttctcctcctcgtcgccgtcatcttctccttgggctcctcgtcgtgctttgctgtgaccagccatgaggcggcggccatcgcgcggcgccagctgctcaacttcgagaagcacggcgaccacgtccacatcgatatcgacatcgagatcaaggtgagcaacccgcggctggcggcggcgcacagggcgctgcacgcgctgaagcgggcgctctactccgaccccggcaacttcaccggcgactgggccggccccgacgtgtgcgcctacaacggcgtgctctgcgcgccgtcgccggacaacgcgtcggcgagcgccgtcgcgtcgctggacatgaacgccgccgacgtcgcgggctacctgcccagggagatcggcctcctgtccgacctcgccgtgctccacctcaactccaaccgcttctgcggcgtcatccccgaggaggtcgccaacatgacgcggctctacgagctcgacgtcagcaaca

SEQ ID NO: 407415 - DNA, 489 bp, Oryza sativa
atctgtcccaatcacccaaacatggcggaggcgggggccatccggccggccgcggggggcgccgtcgccgccggcgacttcccggagctcctcgccttctgcgcccgcgcggaggccctcatcgccgagctcctcctcctctccgaccgcgccccgtcgcagttcgccgaccgccgcttccaccccgtcctcttcgacttccgatacttcgactccccgggcgaattcgaggcgaggatcgaggggaacatggagctggaggccctggaagacgagctccgcgagtcctgcggctcctacatgcggaggttcttcgccttgctggatgccgccgtcgcttaccacgacgagctgtgcagctacctcaacgacctgcaggaagggctgtatgtgcattgcacattggatggtgtactggagagtaactgggcttgccaattgcttacagaatcgatgactttgtttgggggatggcttgctaatgagcac

SEQ ID NO: 407416 - DNA, 510 bp, Oryza sativa
gtcctctcggttcctccacaaagagggagggaaggggggaagggtgtcgcccggggggcaccccgatctgcctccgccgctccgctcctccgcgcctgcgaaatctaccaacgctaactcagcaagatgggtgccggcggcaggatgacggagaaggagcgggaggagcagcagaagctgctcggccgcgccggcaatggcgcggccgtgcagcggtcgccgacggacaagccgccgttcacgctggggcagatcaagaaggccatcccgcctcactgcttccagcgctcggtgatcaagtccttctcctacgtggtccatgacctcgtgatcgtcgccgcgctgctctacttcgcgctggtcatgatccccgtgctgccgagcgggatggagttcgcggcatggccgctctactggatcgcgcagggctgcgtgctcaccggcgtgtgggtcatcgcgcacgaatgcggccaccatgccttcttcgactactcggtgctcgacgacatc

SEQ ID NO: 407417 - DNA, 476 bp, Oryza sativa
gttgtacgcgccgccgctggagtccgtcccgcgggggccgcttctggtcgccgtggccgagcacgacctcatccgggacaccaacctcgagtactgcgacgcgctgcgcaccgccggcaaggacgtggaggtgctggtcaaccgcggcatgagccactccttctacctcaacaagtacgccgtcgacatggacccggccaccggcgagaggacccgggagctcgtcgacgccatcaagagcttcgtcgaccgccactagacgtggagatcagagaagcgcatcttctccaccgtacgtgtagcaccttccaggttgtgattgtttctcgtctcgtgtcatgactgtccgccatacgttggcctgagcttgaccttgtgtgtggcttgctgtccatgtcaagccgatatcatgtacgcatcagtgtttaagtacgcgtttgagtaggtacaaataaataattggatcattcccgaac

SEQ ID NO: 407418 - DNA, 500 bp, Oryza sativa
ccggtgttcaccatcgtggtatacttgagggctgggggggagctcatctctggaattgacgtgccattgttcttcttgcgacgactcttttcgtgtttgctccattggtgagctttaagcgtctggattcattgagatacacctctgccctatcggttgctcttgctgtggtttttgtcgtcattactgctggaattgctatcatcaaactcttcaatggaactgtagcgatgcccaaactttttccagaactagatggtcttagttccatctggaagctcttcacagctgtccctgttcttgtcactgcctacatctgccattacaatgttcacagcattgacaatgagcttgaagacagaacacaaattaaacctattgtgcgaacatccctgttcctctgctccagggtttacattgctacaagtttctttgcatatctcctcttcggcgagggtaccctagatgatgttctcgctaacttcgatgcaaatcttggg

SEQ ID NO: 407419 - DNA, 527 bp, Oryza sativa
gatcaggctagctacctacagtcggaaaaaaagggggtgtatgatagctagtccaaatgtctctatctgtaagctctgatagcaggaggcaaggagggttaaatttttcactgccaaagaggagttcacatgtcagtgataagagtggtatgtcgccaccagcactaccaacatttaaaatagtatagaaaaatgaagcaacgatataagatggttgaaatgatcataaagttgaacttgagaaaaactatccataattgagggtagaaccacagaagtgaggccctagaggcctatgagcaggttgcctttgcatttcttaacagtgcactgggaccagaacgtaggctctgttcgttatgggaagataggggagattgattctcgttttccgcgtgcacgtttttcaaactactaaacggtgctttttttgcaaaaaatttctataggaaagttgctttaaaaaattatattaatccatttttaaatattaaaataagtaatactcaactaatcatgagctaatg

SEQ ID NO: 407420 - DNA, 535 bp, Oryza sativa
  unsure (1)..(535): unsure at all n locations
ctgtctggaaacccagatcgccttcttcgctgggggtggggcgacgaaacttgcgcgatctcccctctcctctcctccgctcgaatctgcgcaggcttcttctacaatctcaaacatggttgttgcaaatggtaatgtcgacacggaggaaggaactcttgagattgggatggagtacaggacagtctctggagttgctggtcctctagtcattcttgataaagtgaagggtcctaaataccaagaaattgtcaatatacgattaggagatggcacaactaggcgtggtcaagtgcttgaagtcgatggggagaaagctgttgttcaggttttcgaaggaacatctggtattgacaacaaatacacaactgtacaattcaccggtgaggttctaaaaactccagtgtcactggatatgcttggacgtgtcttcaatggttctgggaaacctatagataatggcccaccgattttaccagaggcttacttggatatntctggaagttctatcaatccagtgaacgaacataccctg

SEQ ID NO: 407421 - DNA, 404 bp, Oryza sativa
ggtggcgcctccgcctccacggccactatatgggggcggcggcggcggcggcgggggcggggggccatggcggggaagaaggaggaggaggaggctgttgtgtacaggggcgacaagctgatcctgcgggggctgcggttccatggcacccacggggtgaagccagaggagaagaagctgggccagaagttcgtcatcgacgtcgacgcctggatggatctcgccgccgccggggactccgacgacatctccgacaccgtcagctacaccgaaatctacaggatagccaagaatgtagtcgaaggcccgtcgcacaatctgttggaatcggtggctcagtcgattgcaaactcaaccctgctcaagttccctcagatttctgcagtttgagtgaaggttgagaa

SEQ ID NO: 407422 - DNA, 328 bp, Oryza sativa
tatgtgctggaccgacacctcccgccgtcgctggaggggtttttcgacaaggcttggggggtggcccgcggcgtgcctgacgtggcgagggagctcaccgcggaggtgcagcagtcgggcgtcaccggcgcctcgcgcgtctcgtacgccaaggtcgagcccgtggccatgggcgtgtacagctggatccagccggcggccatggacctctacgtgcgctacgagccggcggcggagcacctcgccgtctccacctggcgctcgctcaacaacctgccgctgttcccgcaggtggcgcagatcgacatgcccaccgacgtctactggg

SEQ ID NO: 407423 - DNA, 546 bp, Oryza sativa
ggcctcgagacctatgttatgttcgctattggcggcgtaatgacgatggaagttacgttgtgctgtttcgatctacagagcatccaaactgtggacgtcaaaaaggatatgtgagggcttttattgaaagtggaggtttcaagatttctcctctcaagtgtcgcaacggaagaccccgcactcaagttcaacacctaatgcagattgatctcaggggatggctcgtcaactactctccttcctttcagtatcattctttgctgcagatacaaaactgtgtagccggcctacgagaatacttctcccaaacagacgaaacacatataactccaaggattcctgtgatggaaaacatggttgacacatctgcagtacagaaagatgacaagaagagtaccgaagaagtagactccaagactaaaacaccagatcgaggacatgcggacagtaaaaacatgggaatcattgatgaagaaacagacgaggatgaggactatcaggttcctgaagctacatagaggagatcctaacaaagatgctagcgtg

SEQ ID NO: 407424 - DNA, 529 bp, Oryza sativa
atcctacctgactagtactaccactactagctaggggggagctactctctctggtcatcaagctttgagtggttggagtggtggcagctatggctttttccatctccaagaaggctgcagttgctgcactcttctccttccttgttgtcacctgcgtcgccggcgccaggccggggaacttcagcgcctccgacttcaccgccgatcccaactgggaagtcgccagggccacctggtacggcgctcccaccggcgccggccctgacgacgatggcggtgcttgcgggttcaagaacaccaaccagtacccgttctcgtcgatgacctcctgcggcaacgagcctatcttcaaggacgggaagggctgtggctcatgctaccagataagatgcgtcaaccaccctgcctgctccggcaacccggagacggtgatcatcaccgacatgaactactaccccgtttccaagtaccacttcgacctgagcggcacggcgttcggcgccatggccaagctcgggcagaacgacca

SEQ ID NO: 407425 - DNA, 473 bp, Oryza sativa
gcatgcgcacgcccacacgctcgggctccgcatcggggcgccgccgcctgcgccggcggggcgccgcgctcgcccgcgccggcgcgcagtccgtgtcgccgcggcggcgtcggcgccgcggcgggagacggacccgaggaagcgggtggtgatcacggggatggggctggtgtccgtgttcgggaacgaggtggacgccttctacgagcggctgctcgccggggagagcggggtcggcgccatcgaccgcttcgacgccggcggcttccccacgaggttcgccggccagatacgcgggttctcctcggaggggtacatcgacggcaagaacgaccggaggctcgacgactgcctccgctactgcatcgtcagcggcaagaaggcgctcgagaacgccggcctcggaagggctccgatggccacaccaagcttgacaaagtccgggctggtgttcttgtgggaactggcatggg

SEQ ID NO: 407426 - DNA, 427 bp, Oryza sativa
gggggatttgtccgaccaggataaagatgggatgctgtctttccgggaattttgtactgctgtgtacttaatggagaggcacagagagcagcgtcctcttcctgatgtactaccagatggtatctgggcagaaggaatttcactaccttctacggggcaatttgcagaaaaccctactggcccagctccccatccaagtgctggatttacaagtagagcaatgccaggacaacatcatgggatgcctccgtcatccatgaaaccaccacctcgaaggccgctttctttggatgctgatgatgcagtgcgaacagaaaaacagaagccaaagatcccagtcttggaggaacatcttactggccagctaagcaaggaggagcaaagtgcattagatgcaagtttaaagaagcttcagatgctgataaaa

SEQ ID NO: 407427 - DNA, 492 bp, Oryza sativa
cgtcggcgaacaccgtccatcgcgagaactcttacgtcgtcggcgtcggcgtcggcgtcggcgaggaggagcaaacatttacggctggcttgcaatcttaatcttttgcagtgttcgtcattcaggaggctcccggccgatccggtggatcggatcggagcgggagcacaaactgcaaattgccacggtccttgcacttgatttccggagccaggaggatgatttgctgcggcggcgaggaggaggagacgtacgctccccgtgcagccagtcgcagtcgcagcaggcgcccgacacctgcgacgcagtacaatgcaggccctcgtaagccaagaggaccaaatgcacccaggagcggcggcccgccaccgaaggtgctctccatcgacgtgccagccatctccatgggcgagctgaacaacatcaccggacactttggacagagtgccttgataggagaaggttcgtacggtccgatctacagggcggtgc

SEQ ID NO: 407428 - DNA, 370 bp, Oryza sativa
  unsure (1)..(370): unsure at all n locations
cttttggtgggttggcttctcctccccctctngggctttttttacaatcttcgggggcttgcctcacctatggtttagtgggttgagatggcggccccggatgtcgagtaccgctgattcgtcggccgactcgcctgggccaccgaccaccgctccctcgagggcagcttctccacctacggcgagatcctcgactccaaggttcgccctcgctctcctacgccgcgtcttgagatgggttttttttggctggattatcacgttgactcgctctgtgttgaataccaatgggtttctttgttgggttgcttggatctgcgaactcggggggttttgctccggctgttctgatcccgttggtgccagatct

SEQ ID NO: 407429 - DNA, 386 bp, Oryza sativa
gccttcgtcgcctgcgacggccgtgagctcatcgggggacgacgtctctagctagcagcgaccgttctttctctcctagggctctcggtgctgagatacggcaaatcaagagagcaaaattttggtggtacatgtggcgattctatgtcgacaaggcgtcatcttgcagtatttaccactgcaagccttccatggatgacaggaacggccatcaacccgttgatccgggcggtctatctcgcacaggatggcgatagggaggtcaccttggtaatcccctggctttttctgaaggaccaagacttggcttacccgaataacattgtgtgcggctcgcctttggagcatgccgcctatgctcgacgatggattgaggagaggaatag

SEQ ID NO: 407430 - DNA, 506 bp, Oryza sativa
gcatgaagcaattcttgagctcaatcagcaacaaggggtatctccttcttgcttaggggagtccttcgccctcccaagaagaagaagatgtcttgctgcggcggcaactgcggctgcggcagcggctgccagtgcggcggcggctgcggcggatgcaagatgttccctgatgtggaggccacagccaccaccaagaccttcgtcctcgctgctccatccaacaaggcgagctctggaggaatggagatggcggtggagagcggcgagaacggcggctgcggctgcaacacctgcaagtgtggcaccagctgccgcggctgctcctgctgctcctgcaactgaatctatcgtcgtcgtcgcccggctgcatgaggatttatcgtatggatgctgctactgtcgatcagagctttgatcgaggccttaatttgcttgcattagtacccagcttatatgtaggcaggccttgccttttgctctgacgcctaaataaaaccgtcgtcgtc

SEQ ID NO: 407431 - DNA, 485 bp, Oryza sativa
gatcagtctatctacctacggttggaaaaaaaaaggcggtatgatagttagcccaaaggtctctatctctcagctctgatagcaagaggcaaggaggtttaaatttttcactgccaaagaggagttcacatgtcagtgataagagtggtatgtcgccaccagcactaccaacatttaaaatagtatagaaaaatgaagcaacgatataagatggttgaaatgatcataaagttgaacttgagaaaaactatccataattgagggtagaaccacagaagtgaggccctagaggcctatgagcaggttgcctttgcatttcttaacagtgcactgggaccagaacgtaggctctgttcgttatgggaagataggggagattgattctcgttttccgcgtgcacgtttttcacactactaaacggtgctttttttgcaaaaaatttctataggaaagttgctttaaaaaattatattaatccattttt

SEQ ID NO: 407432 - DNA, 547 bp, Oryza sativa
gtctttcaacctagccaagcaggagaaggagaaggggacgctgggatgacaccaccacaaagccacaccggccttgagcttcgttctacccagtcagaaacccagtgttgttctagtctaagctcgtagctagtctgcaagaaccccgacagaaaaccggcaggaacgccggccgccgccgccgcacgcacgcacgtcgatcgggcggcgccggtgtgctcgtgatggggaactgcgccggcgtgcaggggaacgccgagatcaacccttcgttcagtgctcccaactcgtcagggacaggttccaagaacagcagcaagaacggggccgattccagcacgttcggcaccaaggcgtcggcgtcgtcgtcggtgccgccgactccccggagcgagacggagatcctgcagtcgtcgaacctccgcaggttcaccttcggcgagctcaagggctccacgaggaacttctcgccggacagcctgcttggggagggcgggttccgctcggtgttcaaggggtggatcgatgagcgaacgctgacgcccgt

SEQ ID NO: 407433 - DNA, 496 bp, Oryza sativa
  unsure (1)..(496): unsure at all n locations
gttgtttattccgaccaccatgggcatcatgcttcgccggcattagggggatgcatgtgcctcagatgttttactcagcagctcatcaatgcgtacactgttttattccgagctgggacagtgcacgcagtttctcagtctatagaagccactcctgttgattcatctgaaagttcatttgacacatatcgttcacccccaagaccacttccatatgatgatcctagattctcccctcctcagcgtgattggttagtgtcaaggcatggaccttcgtgccattccccagaggaatcagaaccactgagggcaaatgacgacgaggaaatggaaacaccaagttcaacaaataagtcaagtaaaacaaactatgacacanaaatgaaaagaagcagctctactcatggagagaagctgccagcaaaggaacctggaaattatttcacatactgttccccatccgctgaagatgagatgtcctgccaacatgtcttga

SEQ ID NO: 407434 - DNA, 502 bp, Oryza sativa
cctattactcctaccactgagagagggccactctgtcccctcgagttcttcaccggcttctttcccctcctctccggaccagggaagcagctaactgtctgcgcaagaaaggtggttcaagcacgatgggacggaaccatctttgcctggtcacttgcttgtggattctgtcatgcgcagttctgcttcatgcttctcctgatggattgctgagaattagcctgaataagaagagattggacaagaagaccttggacggtgcaaaattggcaagggaggaaagccatcgtctgagagccgacggtttaggtgatgacatagttcctttggacaactacctggacacgcagtactttggagagatcggcatcggcactccaccacagaacttcactgtgatattcgacactggaagctccaacttgtgggttccatcagtgaaatgttatttttcgatagcatgctacttacaccacaggtacaagtcaaaagggtcgagcag

SEQ ID NO: 407435 - DNA, 550 bp, Oryza sativa
  unsure (1)..(550): unsure at all n locations
gctccggcggtcaataattaaaaaaaaaaaagggggaaatggctttcagaaaccaggacgctgccatggtcctcttcttcttcctcctcatggtgactacctacgccaacgcgcacggacacagcaagaagcccgaggagatcactcagggcgtttacggggcggcggcggcggtggcggccggccccggcggcacgttcgacatcaccaagctcggcgccgtcggcaacggcagggcggacagcaccggcgcggtgatggcggcgtggaggtcggcgtgcgccggcgccgggaagcagacgatcctgatccccaagggggatttcatgacgggggcgatggagctcaggggcccctgcaatggcgccgtgaccatccagctcgacggcaacctgctgggctccaacgacctcagcaagtacccgggcaagaagatgcccaactgggtcgaggtccgccatgtcgacaacttcgtcatcttccgcaagggcaagctcgacngccagggccctcgcgtctggagcaagaactcctgcgccagaactacact

SEQ ID NO: 407436 - DNA, 561 bp, Oryza sativa
  unsure (1)..(561): unsure at all n locations
gcttctcgcgctcaacgtgcccaccggcgagacgtggctcaccttcggcgaccgcgtcctggagaatgacctctccttcatccgcccggactcgccgctgctgctcacccgcaacagcatcaaccggagctgctccacgccctgcctctgcccggtgtccaaggacttcgagcacaaggatcgcagcggcctggtcgagatgctcggctgctcgatcagctgcgcccgcgtgaagcgcctcgtcgacgacgtggtcaccgccatcaggagcggcgtggatccggtccccattggcagtgggcttggtggctcctactacttcaggaacatctccggcgacagggttgccatcgtgaagccgacggatgaggagccctttgcacccaacaacccgaaggggttcgtcgggagagcgcttgggcagccgggactgaagaaatctgtcagggtgggagagacagggttcagggaggtggcggcgtacctgttggatcatgataacttcgcanatgttcctccacggcgttggtgaagacacacactcaattttcatatcaattg

SEQ ID NO: 407437 - DNA, 524 bp, Oryza sativa
cacacattctcgaagaaggagaagaaggagaggggcagccatggcgtcgtcggtggcagcggcggcgagcacgttcctggggacgaggctggcggacccggcgccgcagagcgggaggatcgtggcgaggttcgggttcggcggcgggaagaaggcggcggcgaagaaggcggcgaggccgtcggcgccgacgacggacaggccgctgtggttccccggcgcggtggcgccggactacctggacgggtcgctcgtcggcgactacggcttcgacccgttcggcctcgggaagccggcggagtacctgcagttcgagctggactcgctggaccagaacctggccaagaacaacgccggcgagatcatcggcacccggttcgagaccggcgaggtgaagtccaccccgttccagccctacaccgaggtgttcggcctccagcgcttccgcgagtgcgagctcatccacggtcgctgggccatgctcgccactcttggagccctcttcgtcgagtggctcaccggcg

SEQ ID NO: 407438 - DNA, 479 bp, Oryza sativa
  unsure (1)..(479): unsure at all n locations
aatggcttgcattcttattggaaatcttggcgcatgggtcactgaagttgtaagtgatgctgttgtcacagagttcagtagaacgcagaaggccggtgtactacaatcttacgcgttcatagttctggcagctggatctctcttaggaaatttgtctggtggttacgttctgttgagaacacaggaaccaaagactatgttctcagcattctccatcctccttggcctccaactagcactttgcttaagtacaaaagagacgcttccaagctctcatagaaactggaacattcgtcatgtcagaacctctctgtctgacaatctccgcaagcaattctcaaacttgaggacagcaatcagcgaggagcagatcttttaccctcttatgtggataatgacatcatttgcagttgtgcctattctctctgggacaatgttttggtttcaaacacagcatctgangcttgatccatcagtca

SEQ ID NO: 407439 - DNA, 405 bp, Oryza sativa
ttcttttgcatctattcagttgcagattgagagcgggggacattatattgattctatggggagggttgtgctagcgaattcttgttagcaacaaattgacatattgctcggcacatccccaccgagaataccaagatgacgttctctggtacacaggacaagtgcaatgcttgtgacaagaccgtgcatttcattgatctccttaccgcggacagtattccctaccacaagtcttgcttcagatgcagccactgcaaaggcacactttcgatgtgcagctattcgtccatggatggggttctttactgcaagacccattttgagcagctattcaaggaaacaggcaccttcaagaagaacttcccctcaagtacaaaggcaaacagtgaacaggctaagattccc

SEQ ID NO: 407440 - DNA, 341 bp, Oryza sativa
gtgttgcgggcatgggcatgggagaggttgcagaggacatatacacctaagatgggaccgtggacctaaagggcggcccgggcaccaggatgaacaccggcacctggcatgcctgccgctacattctatgtaacgagtgctgcaagaggctgggctactatggcatgagcaccaacctggtgatctacatgaagacgcgggtcggtcaggagagcgccattgtcgacaacaatgtcaccaactggtcggtgactagatacatgactcgccttgacagtgccttgttggctgatgcctacatgggcaggttatggaccattgccagctctatgagcatctac

SEQ ID NO: 407441 - DNA, 488 bp, Oryza sativa
gtttggcgtaccacgcccgcggacccatgcaaagggcatacaactacaactatggggcggccggcgaggcgatcggcgcggacctgctgggcaacccggagctggtggcaacggacccgacggtggcgttcaagacggcgctgtggctgtggatgaccgcgcggtcgccgagccagccgtcgacgcacgccgtcgtcacggggcagtggactccgactcccgcggacagcgcggccggccgtgcgccaggctacgggctcaccacgaacatccttaccggcgggctccagtgcgccggcggcaacggcggtgccgaccgggtcgcgttctacaagcgctactgcgacgtgctcggcgtcggctacgggcccaacctggactgcttcggccaggcgccgttcgacggcgacatcatgtcggcgtctgcggcgaagtagacgtgtgcgccgccgtgccggactcgatcgatcgataaaattgcgtgtgag

SEQ ID NO: 407442 - DNA, 500 bp, Oryza sativa
  unsure (1)..(500): unsure at all n locations
attctttctgattgcagcctgccttggatctctgggtcactcctccaatgctgctggcaaccaggagaagctgtctagtgccatggtgaaccacagcaacaccaatggggacactgaaaatgaagaactcaccaagcacctccttgagatagaacaacccaaggattgtgaagaacaagagcctgaagtggcaccggctgcccaggctgtggaaaaactagaggcaggaacagctgatttcctggttgaccttgaggggaagagatctattaaagtgctcggatcgaacaccttcctgggcctcggcatcgtcaccttcgccggcgtgagctactccctcttctcgccggcgttcaacctcgccaccaacgaccagtggcacacgctcggngagggcgtcccccacatggtggtgtacacggcattcttctacttctccctcgcctgcttcgccatcggcatcgccctcaacatctggttcctctaccaccccatggtcg

SEQ ID NO: 407443 - DNA, 453 bp, Oryza sativa
gtcttgtcgagccgagtcgagccaatctctcttcggggttttctcctctcctctccggggtccgatccccacgtatggcggctgctgcggcatctgcggcggcggcaacggccgcggaggacagggcgcggctgctgcggctggaggagcacgcggcgcacggcggcggcggcgcgtgggagtacctctgccttgcccgcaggctccgcgcgcgccgtccggagcccgtcctccgcctcggtctggccctcctgaacaactcctccgcccgctcccgtctcgcctaataacagtggacgctgtatgagcaggtggcatcggctgccatggattgccagcgtctcgatgtggcaaaggattgtattggagtgctttccaagcagttttctggcagcatgcgggttggtcgattggaagccctgatggttgaagcaaagggtgaatggactgatg

SEQ ID NO: 407444 - DNA, 398 bp, Oryza sativa
aaagtttcagagagagcagtagtagtagcgagctcgggggataacggacgatcaccggtgatgggggagagagatgagcggtggtcaggacctgctgctgccgccggggttccggttccacccgacggacgaggagctggtgatgcactacctctgccgacgctgcgccggtctccccatcgccgttcccatcatcgccgagatcgacctctacaagttcgatccatggcagcttccccggatggcgctgtacggagagaaggagtggtacttcttctccccgcgagaccgcaagtacccgaacgggtcgcggtcgaaccgctccgccgggtcggggtactggaaggcgaccggggccgacaaggccgggggctcgccgaagccggtggcgatcaaga

SEQ ID NO: 407445 - DNA, 432 bp, Oryza sativa
ccccttgccgcccccaaaaccaaacggaggcgaggggggcgccgttcaccgccgccggcggtgccatggacgtctcgtcggtgctcccgttcgcgctggcgctggtggcgatcccgatctcgctggcgctgctggaccggctgcggctggggcggatcccgccggggccgtggtcgtggccgatggtggggaacctgtggcagatcaagccggcgcggtgccgcggcttactggagtgggcggagaggtaccggccgatcgtgtcggtgtggatcggctcgtcgctgaacgtggtggtgtccacgtcggagctcggcaaggaggtgctcaaggggaacgaccaggtgttcgccgaccggtcgtgcaaccggtccacgcagagcttcatgcggaacgggatggacctgatctgggcggactacggcccgcact

SEQ ID NO: 407446 - DNA, 426 bp, Oryza sativa
ctctctctctctctcctccaccttgtcgtagagaggaggcggccatggaagctgccgggatccatgcgcccaccaccaccacctcctccgactccggctcgtgcgtcaccaatggcacgcgagagaagcgcgagatctctaagcacaagcagctcaagcggaagaggagcacctctcctgctcctcctcccggctgcggcggcggccaaggacaggaagcggcggtggagactgacgctgacgctggcgccgccggcgaggaggagagcagcagtgtggctgccgctggcgccggcgagggcgagcgcaagaggggtgacgccggcaggcacccgtcgtaccgcggtgtgaggcggcggagctggggcaagtgggtgtcggagatccgcgagccgcgcaagaagtcgcgcatgtggctcggcacct

SEQ ID NO: 407447 - DNA, 358 bp, Oryza sativa
gactggccatttaaccaggcgccttggggggatgggggctggggaccagggacacatgttgggatatgcaactgatgagacccctgagttgatgcccctcagccatgtccttgctaccaagcttggcgctcgtcttacggaggttcgcaagaatgggacctgcgcatggctcaggcctgacgggaagacccaagtgactgttgagtaccgcaatgagagcggtgccagggtccctgtccgtgtccacaccgtcctcatctctacccagcatgatgagacagtcaccaacgatgagattgctgctgacctgaaggagcatgtcatcaagcctgtcattcccgagcagtaccttgatgag

SEQ ID NO: 407448 - DNA, 444 bp, Oryza sativa
  unsure (1)..(444): unsure at all n locations
acttgaagctgttagggatgattttgttttctcagtggaagataaagatgttacagaggtagattccgtattaaccactggtgaagtgttagatttgatacagtccagatctgttgatttcaagaccctagaggagtctcccatggacagattattaaccaatgttgatgatgacggtcaactatatggggtttctggtggctcagggggttatgcagaaacagtctttcgacatgcggcacatgttctcttcgatagaaaaattgaaggatcagttgatttcagaatcttacgaaattcagattttcgtgaggttacactggaggtggagggcaaacctgttcttaagtttgcactttgttatggattcagaaatctgcagaacattattaggaagattaagatgggaaaatgcgaatatcactttattngagttatggcatg

SEQ ID NO: 407449 - DNA, 479 bp, Oryza sativa
  unsure (1)..(479): unsure at all n locations
ctttattgcggttcatttaaaggaaagaagagggggggaggtgaacaaggaattgagcaaattaagagagaccgtgatcgtacccttaagactgatgacactgagcctggaaacctgaaaggagacaatatgaagtctgaaattgcaaagattacagaaaaaggtggacttgcttatgctgaagctggggagaagctagttcatctcatgcaacttgatcgaactgaacggaagttagattttgctggtcgagtaatgcttgcagatgttataacagctacagaaaaccctgattgccttggcagattggtgcaactaaggggccttgctgtatctgatgattggcttcaagaggctcacaaagggaagtctggtgaaagtggtagttctaaagaaactgatgagcctatggaagaacttctgctagcgctgcttcgtgcatggncgacattacctataaatcttaatgccttacaaag

SEQ ID NO: 407450 - DNA, 274 bp, Oryza sativa
ctctgcgtccagcctgctcaagacctccttcgggggggtgcgtctacccgccgacggccgcaaccccaccgtctgcgtcgcgccgcgcaccggcggcgccatctgcaacttcatctcgtcgtcgtcgtccactcccccctacgacctcaacgccatcaggttcagccccatcaaggagtccatcgtgtcccgcgagatgacccggcggcacatgaccgacatgatcacctacgccgacaccgatcgtagtcgtcgtcggagcccgctccgtggg

SEQ ID NO: 407451 - DNA, 411 bp, Oryza sativa
  unsure (1)..(411): unsure at all n locations
cccctctctcgtttagggtttccctccgccgccgcgggctcccgcatccacgcgccgggtgctcctacgccgccggcgccgccaccgcagcatcagccatggccgaagtggagctcccgcagcaggaggtcaagctcttcagccgctggtccttcgaggacgtccaggtgaacgacatctcgctggcggactacctggcggtgaacccgacgaagcacgcgacgtacctgccgcacacggcggggaggtactcggcgaagaggttccggaaggcgcagtgccccatcgtggagcgcctgaccaactcgctcatgatgcacggccgcaacaacgggaagaagatcatgggcgtgcgcatcgtcaagcacgccatggagatcattcacctncttaccgacgccaaccccattc

SEQ ID NO: 407452 - DNA, 417 bp, Oryza sativa
gaatgtgccggggttccttagcgtgagccagaaggccaagaagccgtcgctggtggtgagggcggtggcgacgccggcggcgccggtggcgagcctcggcgcgggcacgtttaaggcggacgggaagaagacgctgcggctgggggtggtggtgatcaccggcgcgtcgtcggggctcgggctcgcggcggcgaatgcgctggcggagacggggaagtggcacgtggtgatggcgtgccgcgacttcctgaaggcggacaccgttgcgaaggctgcggggatggctgccgggagctacaccgtcatgcacctggacctcgcctccctcgacagagttcgccagtttgtggacaactttcggcgctccggcatgcacgtcgacgcgctggtgtgcaacgacgccatttaccggtcgac

SEQ ID NO: 407453 - DNA, 466 bp, Oryza sativa
cacttttactggacatactctactactactagccagggggctagctaactaactacgtggctatggcccccaccgtgatggcctcctcggccacctccgtggctccattccaagggctcaagtccaccgccggcctccccgtcagccgccgctccaccaactcgggcttcggcaacgtcagcaatggcggaaggatcaagtgcatgcaggtgtggccaattgagggcatcaagaagttcgagaccctatcgtacctgccaccactcaccgtggaggatcttttgaagcagatcgagtacctgcttcgatccaagtgggtgccttgtctcgagttcagcaaggttgggttcgtctaccgtgagaaccacaggtctcccggatactacgatggcaggtattggaccatgtggaagctgcccatgttcggctgcaccgatgccacccaggtgctcaaggagctcgagga

SEQ ID NO: 407454 - DNA, 440 bp, Oryza sativa
gtctataatgatcttactgggaaggatttcacggaggcctttgacgcggcatgttttcctcttacactcttctcaaacacctttgaccaaggttgggcatcaggtatctcggcagctgcaatacaaggactcttagagttgttagtagagggtggtgccgataatgtgaaccagtgctttcttgaggctgctcgctatggaagcactgaactcgtgcgcatcttacttcagattgctcgaaggaatagcttggacatcgatgtggatctagcccttggctttgctgctcactatgggaaactggataccatggggtgcttagttgaggagggtaatgcggttgcctttcttggccctttaatgcgggcagctgaacggggatgccttcaagttgttgaatggttcgtcaaccttggttgtcgggatatggagctttgctt

SEQ ID NO: 407455 - DNA, 526 bp, Oryza sativa
aaattaaggaaaaaaagagagtcgtagttcgccgggtcttcctcctctcgttctcgcggcggcggcggagatggcgtcgttctcggaggctcccccgggcaaccccaaggccggcgagaagatcttcaagaccaagtgcgcccagtgccacaccgtcgacaagggcgccggccacaagcaaggtccaaacttgaatggtctgtttggaaggcagtcaggtaccacccctggttattcctactctacggccaacaagaacatggctgtgatctgggaggagaacacactttatgactacctgcttaatcctaagaagtacatccctggaaccaagatggtcttccctgggttgaagaagccacaggagcgtgctgatcttatttcctacctgaaggaagcaacctcttaaaaggagtggagctgtcgtaacatgagacaatcggacaattcattctacagttaaataaaaatatttagacatctgggtcgctctggtttacagagtgcactccacgagacatttatc

SEQ ID NO: 407456 - DNA, 424 bp, Oryza sativa
gctgtagctactgccatatatgtattcttctcccggagaaagaaggataatactgtcatgccatgggctacagggctgagtggacagctaaagaaggcatttgtaacaggtgtgccttctcttgagaggacagaactggaggcggcatgcgagggtttcatcaatgtgatcggcactttacctgaatgcacattgtataagggaactctgtcaagtggagttgaaatagctgttctgtccacttcagttaactcttcacaacaatggtcagctcagtctgaggagcaattcaggaacaagatctcggtgctgtccagagtgaaccataagaacttcatgaacctgattggttactgcgcatgcgaggagccattcaccaggatgatggtgttcgagtatgctccatgtggttccccttttgagc

SEQ ID NO: 407457 - DNA, 516 bp, Oryza sativa
atgcttgcaagaagagacgagacgagggagagaaggagaagagggggccggccgcgggcgtcgtcgtgttcctccccccctctctctcctctcctctcctctcgatctccatccttccttccatccattcctccccgcacccttcgcattgctctcgtcgtctcgattcggtcgaggatctccaggaaaagaggaggaagcgatatgggttgcttttcatgctgcggagcggatgatgtcggcaagaagaagaagcgcgacgatccttacgtcccgatccctgatccaggtggtaactatggacgtagcaagcccgggcccccagccccttcgcgttctccccccaccagcagaaatctgccaattgcagtaccggcaattccccttgatgaaataaagggaataaccaagaacttcagcagtgatgctctcatcggagaaggctcgtacgccagagttttctttggtgtgctgagagatggcaggagatctgcggtgaagaagctcgactccagc

SEQ ID NO: 407458 - DNA, 458 bp, Oryza sativa
gtttattgtgctattattgtggccacaattagaggggttaaattgcatggtgggggcgctgatgttgtggctgggaagcctttggatcatgcatatgtgagtgaaaatgtggctcttgttgaagctggatgcgtcaatcttgctaaacatatcgcaaacacaaagaggtatggagttaatgttggagttgcaatcaacaagtttgcatcagatactgaagcataaatggacgtggtgcgaaatgcgtctttggctgctggtgcttttgatgctgctgtctgcactcaccatgcgcatggtggtaaaggagcggatgatcttggactcgcggttcaacgggcatgtgagagccaggcagaccctctgaaatttttgtatcctttagaatctggcataaaggagacgattgagtcaatagctaagttctatggtgctagcggcgttgaatactctgaaca

SEQ ID NO: 407459 - DNA, 496 bp, Oryza sativa
gcgctgttttttcctgcaatggggtggatatggagttgggggctcttccacggaaggttggatgggaccttccaaggtttgtgaagatagttgaagttggaccacgggacggtctgcaaaatgagaagaatactgtacccacatctgtaaagattgaactgatacacaaattggtggcttctggtctatcagtagttgaagccacaagttttgtgtccccaaaatgggtgccacagctagcagatgcaaaggatgtggttgaagggattaagcatgtgccagatgtgcggtttccagtgttaactcctaacctcagaggatttgaggctgctgttgcagctggtgcaaaagaagttgcagttttcgcatctgcctctgaatccttttctaagtcaaaccttaattgtaccatcaaggaaagccttgttcggtaccatgatgttgtaacttctgccaagaaacatggaatacgaattcgtgggtatggttcatgtgg

SEQ ID NO: 407460 - DNA, 417 bp, Oryza sativa
gcgcttttctcggcgactccctcgccggccgcttggggggcatcgtcgccgcctccgtgggctaccaagtcggcatgctcctcctgacggtgtcggcggcgatgccggtgtttcggccgccgccgtgcagcggcgcctgcggctcgggcgcgtgcgacgaggcggcgccgtggcagctggcggtgctgtacgcggcgctgctgctgaacgcgctgggcgccggcgggtacaggccgtgcgtggtggcgttcggcgccgaccagttcgactagtcggaggcggcggaccgggcgcgcacctggggcttcttcaactggtactacttctgcaacggcgcgtcgcagctggtcgccgtcacggcggtggtgtacgtgcaggacaacgtcggctggggctggggcctcggtgtgcccacct

SEQ ID NO: 407461 - DNA, 468 bp, Oryza sativa
gttttcttctccggtccttgcgcgcaagaccgaggggcggctgccgatctccatgtgccgatcgagcagagcatagcaggggatcctgctcttctgtaggaaatggctgacggtgaggacatccagcctcttgtctgtgacaatggcactggaatggtcaaggctggtttcgctggggatgatgcaccaagggccgtgttccctagtattgttggccgtcctcgccacaccggtgttatggtaggaatggggcagaaggatgcctatgttggtgatgaggcacagtccaagagaggtatcctcacgctcaagtaccccatcgagcacggtatcgtgagcaactgggatgacatggaaaaaatctggcatcacactttctacaatgagcttcgtgtggcgcccgaggagcaccctgtgttgctcactgaggctcctctgaaccctaaagccaacagagagaagatgacc

SEQ ID NO: 407462 - DNA, 465 bp, Oryza sativa
cggttcgatcgcccacggtggaggcctcgtcggggggcgagaggagccgctccgggctcgggtcggggttccggtacctgaccggcgccgcctccgggtggtgggaccggtggatggtcatgggagccagcggctccaagctcgagaaggccctcggcgaccagttcccggaaggcgagcgctacttcggcctcgagaacttcggcaacacctgctactgcaacagtgtcctccaggcactatatttctgcatcccgttcagggagaaattgctggaatattatgcaaataacaaaactcctggagatgcggaggagaaccttttgacttgtttggcggatcttttcatgcaagtaagccagtcaaagaaaaagactggcgttattgctccaaacgctttgttcaaagagtcaagagacagaatgaactatttcgcagctacatgcaccaagatgcacatgagtt

SEQ ID NO: 407463 - DNA, 511 bp, Oryza sativa
atttatgcattccctgaggagaagaagcaaaaagagaaatgaacctcggggttccattgaggacataagggatgttcaagatcttcaagctgttgatgcatttcgacaatgtttagttgatgaggacctgttgccgcaacagcatgatgattatcacacaatgcttaggttcctcaaagcacggaaatttgatgttgagaaagcaaagagtatgtggtcagatatgcttaaatggagaaaggaatttggggctgacaatatagaggagtttgactacaccgaggcggatgaggttatgaaatattatccacaattttaccatggagtggataaagaaggaaggcctatctacatagagttaataggaaaagttgatgcgaataagctaatgcaagtaactactatagagcgatatgtgaaatatcatgtgaaggagtttgagagatgcttccaaatgagatttcctgcctgctcgattgctgcaaaaaggcccatagattcatttactact

SEQ ID NO: 407464 - DNA, 401 bp, Oryza sativa
ggctgaggagcatctttctggtctttcagcagacgggccttactcagaattccaccgcaggttccaggaacttggtctggagaagggttggggtgactgtgccaagcgttcccaggagaccattcacctccttttggaccttcttgaggcccctgatccgtccaccctcgagaagttccttggaacaatcccaatggtgttcaatgttgtcattatgtccccacacggttacttcgcgcaagccaatgtcttgggttaccctgacactggagggcaggttgtctacattttggaccaagtccgtgctatggagaatgagatgcttctgaggatcaagcagcaaggtctcaacattacaccacgcatgcttattgtcaccaggttgctccctgatgcaactg

SEQ ID NO: 407465 - DNA, 493 bp, Oryza sativa
gcctttcggtcacaattcagaacatcctcgactgggggttcattccagtcaacgggctcatcagcacggccattgggtgcattcttgggtacatcgtcgcgctgatctgtcgcccgccgccgcagtttttcaggttcactgtgatcatgaccggatttggcaacacgggtaacctcccaatcgcgatcatcgggtcggtttgccataccacggatcacccctttggtcctggatgccaccgcaagggtgtcgcttatgtttcgtttgctcaatgggtcgctgttattcttgtctacaccttggtttaccatatgatggagccaccgatgcaattctacgagattgtaggcgaagggaacgagattgtggaagagcctgcacagatcagcaactacagtagatctctgcttcatgaagcggaatggccaaggatggctgacaaagaaacggagcactcaaagacgccattcattgcacgggttttcatgagttt

SEQ ID NO: 407466 - DNA, 485 bp, Oryza sativa
atcttattctctccttcctcttgctctgctcactcagctgtcccccgcgcgcgccaccggcgtcgccatgtcgggcaacatcgccttcggccgcttcgatgactccttcagcgcggcctccctcaaggcctacgtcgccgagttcatctacaccctcgtgttcgtcttcgccggcgtcggctccgccatcgcctacaccaagttgaccggcggcgcgccgcttgacccggccgggctggtcgccgtggcggagtgccacgggttcgggctgttcgtggcggcggccatcggcgccaacatctccggcggccacgtcaacccggccggcaccttcggactcgccctcggcggccagatcaccatactcaccggcgtcttctactggatcgcccagctcctcggagccatcgtcggcgccgtcctcgttcagttctgcaccggcgtggcgacaccgacacacgggctgtccggcgtgggcgcgttcg

SEQ ID NO: 407467 - DNA, 498 bp, Oryza sativa
ccctttctttctcaaaagagcagcgtcgcctctccggctgcgctctatcagctacgctgggggaacccaatagaagctcccgctcccccccccttccgctccaatggctaaggaacccatgcaccagctccacaccggagccgcaagacaaaacggatatgctcttgcccccatgattgctaggggagaagacgtctggacgcctgcccaagcctgttcttctacacatgcttgacattccacacacctacatgaagctcttaatggccttaagatggaactgggtgatgctgcatgcccccttttgaagggaatcgtcgcaacaaccgatgctgtggaggccagcactggtggaaacgttgcgggcatcgttggcagggagaccaggaaggagggaaagcaaaggaaggaccacatgacaaaaaacggctccatctacatatcccaagctgatgttcttagacgctcatgcagtctctaaccgcaaggttctggcaa

SEQ ID NO: 407468 - DNA, 515 bp, Oryza sativa
cccattcgtccgcaaaagagcagcgtcgcctctcctcctgctccctaacccctacgctgccagaaccttctcgaagctcccgctcccccccccttccgctccaatggcgaaggaaccgatgcgcgtgctcgtcaccggcgccgcaggacaaattggatatgctcttgtccccatgattgctaggggtgtgatgttgggtgctgaccagcctgttattctacacatgcttgacattccaccagctactgaatctcttaatggccttaagatggagctggttgatgctgcatttcctcttttgaagggaattgtcgcaacaactgatgttgtggaggcctgcactggtgtgaatgttgcggttatggttggtgggttccccaggaaggagggaatggaaaggaaggatgttatgtcaaaaaatgtctccatctacaaatcccaagcttctgttcttgaggctcatgcagcccctaactgcaggttctggtagttgccaatccaggcaacaccaacgc

SEQ ID NO: 407469 - DNA, 473 bp, Oryza sativa
ccattactcccaaaccctcgcgcgcgcgctctctctggtggtcaacgcgcgcgcccccgcccccgccccgacgagagcgatggcctcgccggcagcggcggcccccgcggcgctgatcgtccttctcgccgcggacctggcggcgaccggcgtcgtcgtcgacggctgcgaccaccgctacaaggccaacgagctcgtcccgctctacgccaacaaggtcggccccttccacaacctcagtgagacgtatcggtactttgacctgcctttctgctgtccagagaaagtgaaggagaagagcgaggcactcggcgaggtcctgaatggggaccggttggtcgatggaccttacacgcacgataccggtgtggattatgactccaagccggtttgctcgacgaagctgaccaacgaggaggtggccaagcttctgaatgcggtagcaaaggactactacttgcagatgtactacg

SEQ ID NO: 407470 - DNA, 482 bp, Oryza sativa
  unsure (1)..(482): unsure at all n locations
acgttgtcgaggcagaggcgctcgccgcggaggagccaggaccacccaccgccgccgccgccaccgcaaactctctttcttctctcgcctggacgagccgccggagagctcgggggagagctctgctgcttggggaggggaggcggaggcgatggagtctatggagcccaaggacatcgactggagcagggtggtgtcgcggtacgtgcgcgacgagacctacgagggcatcgaggccccgcactgggccgacctcaccgatcccgaggccggcgtcgccgccgtcgacgacgaggcctgggtctgccgccccgattgccggcatccaaagacggtcgaggacttcctcaagatgagccccaggcccaagggcaagctactgcgatcagtgtcggccatgatgatgccgttcggcgagagggacaccaaccttagagacggcggcaacaatctcaagaggcggggagccgtcgncggcagcg

SEQ ID NO: 407471 - DNA, 504 bp, Oryza sativa
cacttctggtggttttgaggctggtatctccaaggatggccagacccgtgagcacgctcttcttgctttcactcttggagtgaagcagatgatctgctgctgcaacaagatggatgccaccactcccaagtactccaaggcccgttatgatgaaatcgtgaaggaagtctcatcctacctgaagaaggtcggctacaatcctgacaagattcccttcgttcccatctctgggtttgagggtgacaacatgattgagaggtccaccaaccttgactggtacaagggccccaccttgcttgaggctcttgaccagatcaacgagcccaagaggccatcagacaagcccctgcgtcttccccttcaggacgtgtacaagatcggtggtattggcaccgtgcctgtgggtcgtgttgagactggagtcctcaagcctggtatggtggtgacctttggtcccagtggcctgaccactgaggtcaagtcggttgagatgcaccacgaggc

SEQ ID NO: 407472 - DNA, 505 bp, Oryza sativa
tttctttagaaccttctagaagctctcctcctcgggggatggctgtgacgatcgtgggcgtcaaggcgcgccagatcttcgacagcaggggcaaccccaccgccgaggtcgatgtgtgctgctcagatggaacctttgcaagggctgcagttcccagtggtgcatcaactggtgtctatgaagctctcgaattgagggacggtggatctgattacttgggaaagggtgtttccaaggctgtcgacaatgtgaactcggttattgccccagctctgattggcaaggaccctacgtcacaggctgagcttgataacttcatggttcagcagcttgatggaaccaaaaatgagtgggggtggtgcaagcagaagcttggtgctaatgcaattctggctgtgtcactggccatttgcaaagctggagctattatcaagaagattcctctgtaccagcacatttgccaaccttgctggaaacaagcaactggttttggctgtacctgcat

SEQ ID NO: 407473 - DNA, 536 bp, Oryza sativa
  unsure (1)..(536): unsure at all n locations
tgtggtgacgaggtgagcgcacgggcgcacagcggaggcgccgatctctctctccctcccagaacccgccatggggagcaggaagaaggcgaagccgagcaggagcaggaagaaggcgaagccgagccccgaccaggccgtggccctcgactacgtccgcgcctgggcgcatcccgctgcctccgcgccgccgccggagccctcggctgccgatgccgccggggacgacttcctgccgcaccaggccgcgcgcatggcctctggaggcggagggagcgtgctgttcgagctccactcccactccaaccacagcgacgggttcctctccccctccgagctcgtggagcgcgcccaccgcaacggagtgaaagtacttgccctgacagatcatgataccatggctggtatacctgaagctgtgtcagcggctcacagatttggcatgagaataatcccaggagtttgaatcagtgcactatattctncaaaggaaatcgctggtactggtgagcaatgtcatattctngcatactatg

SEQ ID NO: 407474 - DNA, 524 bp, Oryza sativa
gtggtggagaggagaggagatcagggggaggaagggtggccggcgcagcagatcggggcgggcggatttaggggaggagcgcgctagccgggagcggcggcgatggatgaggagtacgacgtgatcgtgctggggacggggctcaaggagtgcatcatcagcggcctcctctccgtcgatggcctcaaggtccttcacatggacaggaacgattactatggaggagaatctacatcccttaatctcactaagctctggaagagattcaaaggcaacgagaccgctcctgaacatctgggtgtcagcaaggagtacaatgttgacatggttcccaagttcatgatggccaacggtgcactggtccgtgtactcatccacacgagtgtgacaaagtatctgaattttcaggctgtcgacggcagcttcgtgtacaacaatggcaagatccacaaagttcctgcaactgatgtcgaggccttgaaatctaatctaatgggccttttttgaaagcgccgtgctaggaa

SEQ ID NO: 407475 - DNA, 515 bp, Oryza sativa
agattggcagtgagaatcgtcagttcggtggcctctatgagagagggagaaagaaacttatggacggtgcccgggtggtgttccctgatgaagttgacccgccttcaatatcagggaaaattgttgagtgctcttggaataaagaagaggactgttggtcctgcatgcgcattcgaacagataaatcaactcctaatgatatcaatacttacagaaaggcacgtcttcctctcctctctcacacatgtactatatcaaattgttgaatactaccgtcagttgcactggttacaaggttaagagttttgtttgcttctgtagaactttacatttatgttctattcttctttcatgaaattgttctgtgatcaagaccagatcctgacagtgttcactgttgatgggctgtaactgcttgctttgaatgcaatatacctttatcttttacaactctgcgtgaagtttgcagctagggagtttatatgtgctgcaaatactgattcctccctattaat

SEQ ID NO: 407476 - DNA, 525 bp, Oryza sativa
ccgtgtgatgaagaagaaaaaggagaggaagatggtgtcgggttcggggctgtgcacgcggcgggtggtggtggacgcgcggcaccacatgctggggcggctggcgtcgctggtggcgaaggagctcctgaacgggcagcgggtggtggtggtgcggtgcgaggagatgtgcatctccggcgggctcgtccggcagaagatgaagtacctccggttcctccgcaagcggatgaacaccaagccctcccatggccccatccacttccgcgccccctcccgcatcttctggcgcaccgtccgcggcatgatcccccacaagaccccccgcggcgaggccgccctcgccaacctcaaggccttcgacggcgtcccccctgcctacgaccgcaccaagcgcatggtcgtccccgacgccctcaaggttcttcgccttcagcccggccacaagtactgccttctcggccagctcttcaggaggtcggctggaactaccacgacaccatcagggaattggaggagaagaga

SEQ ID NO: 407477 - DNA, 492 bp, Oryza sativa
ctagttttctcgctgcttcgcccgccacgtcaccctgctcctcctcccctttttttggggtcgctcgcctcgccatccatggggtcgatggcgaaccagcagtagtaggagtccaccccaacgacgcgcgcgagccagctccggggtacccgccgctcgtgcccgggggggaagggggtgcaccggggagccgtcgcgccgcgcgggtctgattcttcccgttcccggagatttgaaccatggagtctttacgtgacatggtcctcccaccaggatttggattccacccaaaagatactgagctcatttctcactatctgaaaaagaaaatacatggccaaaagattgaatatgagatcattccagagggggatatatacaagcatgaaccatgggatttacctgcaaagtgcgatgttccaactcaggataataagtggcatttcttcgctgctcgtgacagaaagtatcctaacggttctcggtcaaata

SEQ ID NO: 407478 - DNA, 515 bp, Oryza sativa
atattttgttatctttgagtctatgcttcattttggctgatgtatttgtcaagcaattcagacagttgaaagctctgctcgcgagttcttaggaaaggacaagtcaactacacttgtggctagtgcaaactttgttgatctggctggaagtgagcgtgcatctcaggcattgtcagctggcacaagactgaaagaaggttgtcacattaataggagtttgcttgcccttggcactgtcattagaaaactgagcatgggaagtaatgcacacataccgtatagagattcaaagcttacacgcatactacagccatctttgggaggtaatgcaagaactgcaattatttgtacactgagccctgccactagccacattgagcaatcaagaaatactctgctatttgggagttgtgcaaaggaagtagttacaaatgctcaggttaatgtggtcatgtctgataaagcactggttaagcacttgcaaaaggaacttgctagattggagagcgagttgc

SEQ ID NO: 407479 - DNA, 446 bp, Oryza sativa
  unsure (1)..(446): unsure at all n locations
gtcttattcctggccaccacacccacccacccaccaatggcgtactcccgcctactcctcctcgccgcgctgctcgccacggcggcggagctggcggcgtcgcagaagccgaaggccgacacgccgacaaaggccacgccggcgtcgcccggccccgcggcggcggcggccgacggccccgcgccgacgaacgtgacggcagtgctggagaagtccggcaagtacaccaccttcctccggctcctccacgagagccgggtggacacccagatcaacagccagctgatggacagctacaacgggctgaccatgttcgcgcccacggacgccgngttcgcggcgctcaagccgggcacgctcaactcgctgtcgtcgcaagaccagatccagctgatgctctactgcgtgctcccgcggttctacagcctaggcatgctcaccaccct

SEQ ID NO: 407480 - DNA, 531 bp, Oryza sativa
ttcgttcacctccgtggctcccttccaggggcgggagtccactgagggcctccgggggaaccgccgctccagcagctcgagctttggcaacgtcagcaatggcggaaggatcagatgcatgcaggtgtggccgattgagggcattaagaagttcgagactctgtcgtacttgccgccattgacagtggaggaccttttgaagcagatcgagtacctgctccgatctaagtgggtgccttgcttggagttcagcaaggtcggattcgtctaccgtgagaatcacagatcacccggatactatgacggtaggtactggaccatgtggaaactgcccatgtttggatgcaccgatgccacccaagtgctcaaggagctcgaggaggcaaagaaggcataccctgatgccttcgttcgcatcattggctttgacacgttaggcaggtgcagttaatcagcttcaatccgtttaagccaccgggttgcgaggagtcaggcggcaacctagcgcttttcgttccttcgtgcatgttc

SEQ ID NO: 407481 - DNA, 538 bp, Oryza sativa
  unsure (1)..(538): unsure at all n locations
gtcctgttcgacccgccggccgacgaccacatggtgctcatcggcgactggtacaccaaggaccacgccgccatggccaagatgctcgacgccggcaagagcttcggccgcccgcacggggtggtcatcaacggcaagtccggcaaggccgccgccgacccgcccatgttcaccgtcgaggccggcaagacgtaccggctccgcgtctgcaacgtcggcatcaaggcgtcgctcaacttccgcatccagggccacgacatgaagctggtggagatggagggctcccacacggtgcaggacatgtacgactccctcgacgtccacgtcggccactgcctctccgtcctcgtcgacgccgaccagaagcccggcgactactacgcggtggcgtccacgcggttcatccacgaggccaagtcggtgtcagccgtcatccgctacgccggctcgagcacgccgncgtcgncggccgtgccggagccgacggcgggatgggcgtggtcgatcaaccagtggaggtcgttccggtggaacctga

SEQ ID NO: 407482 - DNA, 456 bp, Oryza sativa
tgttctcgtggacccgccgccggagagcttcgggggcgccggtgaggacgacagcgacgactacgtggaggacatcgaggagctggagcgccgcatgtggcgcgaccgcatgaagctgaagcggctcaaggagctgcagctgagccggggcaaggaccccgcgggcggcgtcgtgggcgacccgtccaagccgcggcagtcgcaggagcaggcgcggcggaagaagatgtcgcgcgcgcaggacggcatcctcaagtacatgctcaagatgatggaggtgtgccgcgcgcaggggttcgtgtacgggatcatcccggagaagggcaagccggtgagcggcgccttcgacaacctccgcggctggtggaaggagaaggtccgcttcgaccgcaacggccccgccgacatcgacaagtaccaggccgacaacgccgttccgggcttcgagagcgagct

SEQ ID NO: 407483 - DNA, 481 bp, Oryza sativa
  unsure (1)..(481): unsure at all n locations
gtttgttttaagcccgccgcagtattacacaaatcggcggcctatctcttaccgaagggcgggcaccacagtgtgccatccaatgaggagcatggtggccacaggcgcgcccagcatggtcaatgtcaaggacgagttcgactcgatcctcccgggcaggtcaaggtccatgtgttcgacgagtacctcgataagagcactggcaacattgatctgaatgacaatataaggctggatacaagcgtgcccaattttttgatggcgtacaacgtccagttccgcagcttccagctcccctacaactgcatctgctgtcacgacctngtcaagaacaagaaagtgcaattcatactacatgatctcgagatcctacgcgacgctaaagagaattacaacgtgccaatccaacgtctttagaaatcgtgatgatctgatgatgatcatccatcgattgaccaaccattaaaacatttctgtacct

SEQ ID NO: 407484 - DNA, 490 bp, Oryza sativa
cccttcttagttccgccgggcctacctcggcctccgggcgtcgcgccgcgccttcctgcgggggctcggcgggtccgcccacgaggcgcccgtcctccccaccgacggcctccccgacgacttccactggagagaccacggcgccgtcggccccggcaagaaccagggatcgtgcgggtcgtgctggtcgttcagcgcgcagggggcgctagagggagcgaactacctggcgacgggcaagatggacgtgctctccgagcagcagatggtcgattgcgaccatgagtgtgattcatcagaacctgattcatgtgatgctggatgcaatggtggattgatgactaacgccttcagctatcttttggaatccggtggccttgatagtgagaaggattacccctacactgggagggatggcacctgcaaatttgacacgtcgaagattgttacttcagttgacgacttcagtgttgcctctgtcgatgaggat

SEQ ID NO: 407485 - DNA, 464 bp, Oryza sativa
gcatttttcacgacggccatgatgaggctgctgctggtggcggtggcggtggcgatggcggcggcggttgtggcggcggaggagagggcgacgtacatcgtccacatggcgaagtcggcgatgccggcggagtacggcgacgaccacggcgagtggtacggcgcgtcgctgcgctccgtgtccggcgccgggaagatgctgtacgcgtacgacaccgtgctccacggcttctccgcgcggctcaccgcgcgggaggcgcgcgacatggcggtcatggaccgtgtgctcgccgtcaacccggaggcgaggtacgagctgcacaccacgcggacgccggagttcctggggatcgccgggaacgacgggctgttcccgcagtccggcacggggggacgtcgtcgtcggggtgctcgacacctgggtgtggccggagagcaagagctacgacgacgcgggcctcggcg

SEQ ID NO: 407486 - DNA, 535 bp, Oryza sativa
cgcttcctccgctctcgcactcgaaccaccaccacgggtcgctgcgtgtgagatccagcgccgccgtcgcgccgccgctgccgccgccgctggtggtgccgatgacgacgccgaagccgagcccgacgatccggaggctggacgtggcgtcgccggtgccggcggacatcgacatcgccaacgccgtctcgccgctccccatcgccgacatcgccgcggagctcggcctgcgccccgagcacttcgatctctacggcaagtacaaggccaaggtgttgctgtctgttcttgatgagttgaaagggcagcaggatgggtactactggggtggtcggcggcatcacgccgacgccgctcggggagggcaagtcgaccaccaccgttgggctgtgccaggcgctgggtgcgtttcttgataaaaaggttgtcacttgcctccgtcaaccatcacaagggcctacttttggaatcaaggggggtgctgctggaggtggctacagccaagtcatacccatggatgagttcaatcttcatc

SEQ ID NO: 407487 - DNA, 521 bp, Oryza sativa
cctgaagtagccatggcgaccttctggggattggaggggaagcccggtgaggcctacacccatcactccgcgcccgcccgcctccggattacccaggctgtgctgggcagttgtgatcaaggttggactacactacaatgtgataccaatgacagggagactgtgcgcctctgtgttttaaatcctgggcttgctgtggcatgtcacctagagctggaattacagaaggatgagaatgttctcttatcagttgacggacagaactcgatacacctgtccggatactacacctgttcccatagtggcaatcatgggcgcaatagtcagaagcccactagtaaagctgtaggaagtactggcttcaataaaaagcatcaagatatttctgacaaggcaccagtgatagaggagatactagatgaccagacagtacagcagcaacagcagcaaggtgttaacatcagctcgaaggatgtagaaccttctcataaaaatggtcatggacaaaatagtgaatgggc

SEQ ID NO: 407488 - DNA, 501 bp, Oryza sativa
ttctgtcctgccaggacccgacgtgcgtggtcgccagcgcgtaccgtgctccgacctgcaaggtcaccggcggcggcggcgactgcagcaagaacgtgtgcacggcgtacccgtacaacccggtgaccgggcagtgcgccgccgggaaccttgcccacacgaggttcatcgccaacaccaccgacggcaagaaccctctgatccaggtctccgtcaaggccgtggcggcgtgcgcgcccaagaggctcctggcgcggctgccgcgcggcgccacgggcgtcgccggcctcgccgtctccggcctcgcgctcccggcgcaggtcgcgtcgtcgcagggcgtcgccggcaggttcctcctctgcctcccgaggctcgggtacggccagggcgtggccatcttcggcggcggcccgatatacctcggcgaagggctgccggacttcacgacgacgctggactacaccccgctcgtcgccagagagacaaccccggctactacgt

SEQ ID NO: 407489 - DNA, 507 bp, Oryza sativa
  unsure (1)..(507): unsure at all n locations
gtgtgggcgccgtcggcgcacggctgcgtcggggagatcccggcgccggacgtctcgctcacccgcaagcttggagcggagttcgtggggacgttcatcctcatcttcttcgcgacggcggcgccgatcgtgaaccagaagtacggcggcgcgatctcgccgttcgggaacgcggcgtgcgcggggctcgccgtgacgaccatcatcctgtcgacggggcacatctccggcgcccacctcaacccgtcgctcaccatcgccttcgccgcgctccgccacttcccgtggctgcaggtcccggcgtacgtcgccgtccaggtgctcggctccatctgcgccggcttcgccctaagggcgtcttccaccccttcctctccggcggcgtcaccgtccccgaccccaccatctccaccgcccaggccttcttcaccgagttcatcatcaccttcaaccttctcttcgtcgtcaccggcgtcgncaccgacacccgcgccgtcggcgagctcg

SEQ ID NO: 407490 - DNA, 524 bp, Oryza sativa
gcataagcctccccctccaattcaatttcctctgtgtccatctctctcctccaatcgctgcctcgctcacgcacgcgcgctctacctacctgagggcgaggctggtgccgatggcaatggaggctgcggcggagaggagcgccggagcaggggcggcggcgacggcggcgccggagagcggtggcggtggtgcaggggagaggcggtcgcggttcaggcggatctgcgtgtactgcggcagcgccaaggggaggaaggccagctaccaggacgccgccgtcgagctcggcaaggaactggtcgagaggggcatagacctggtctacggcggtggctccatcggcctcatgggcctcgtctcccacgctgttcacgacggtggtcgccatgtcattggggtcatcccgaaatccttgatgcccagagaggtcactggtgagcctgttggtgaagttagagcggtctctggcatgcacgagaggaaggctgaaatggcccggtttgctgatgcgttcattgcactg

SEQ ID NO: 407491 - DNA, 532 bp, Oryza sativa
ggtttctcggaaaggagtcgtgacaatacccggggcataacacaactcaccacagtgcacctttcctagatcataatcaccccctttaaaacaaggcatggactccccagcgacccccatggacttctcgccacttctcagtctggcgcactataatgaatcatgctatacaaaagataaagccgttgcccacgctggcttgtggttggcacgataaatgtttcacaacagtagctcgcgaaccggtccttaattgccatgagcacgaccttcaaaaccatgtgctcacaacccaccattaatcatattttaattaccaattaattatcataacacgattaaccatcgtgagctaccattaaatataaccataaataataacataaaataattatgtaatttaatttatatttaaccccttttagttagctaatgtttctaagcatggctaagcaaacctatatatagcatttagctgaaccaatccagtatataaggttcatgctaatcaaattataacccataggaaaat

SEQ ID NO: 407492 - DNA, 476 bp, Oryza sativa
ggattctaaaacgaaggccttttccaaggaagggggggggcaacaaccgaaaactgatccaaaagagaaggcaaaagctgaaacaagagattggcttaacaatgtggttagtgatttggaaaaccaaatcgataacttcgaagctgaggttgaaggactttcaattaagaaaggaaagcaaagacctcctcgattggtacatttagagaaatctatcacacggcataaagctcacataaagaaattggagtcaatattaagacttttggataatgatgagttgagtcctgagcaagttaatgatgtgaaagatttcctggatgactatgttgaacgtaaccaggaagattttgatgaatttagtgatgtggaagagctctatagcacattacctatcgagaaggttgaagcactagaagacatggtttcacttgccccttccagtcttgtaagggtgttgcttctgtttctactac

SEQ ID NO: 407493 - DNA, 528 bp, Oryza sativa
ctatccctaaatcgccgcagccgccgcaagcgccggagggacgaggccgagcccgacctctcgcgccccgtccacttccagtccgccggcaagttcatgcccagcaaggagcccgagcccgagctcgaggagaggcccggccttggcgccgctgcctccgcctccgcctccgcctccgcggcgggtgaggatgatgcggcggaggaggaggaggatctcgacctgcccacggcgttcgggcagcggatcgcggagggcgcgagggcgaggcgggaggagagggcgcgggagcgggagacggccgcgcggcgcaggcaggcgtcgggggtggcctccgggaagccggcgccggctctggggagcctggggtccaacacgaaggtggccaagatgatggccatgatggggtacaaggatgggatggggctcggcaagaacgagcaaggtatagtcgcgcccgtggagaccactctgcgcccccagaacgccggtctcggaagcgtcgaggggttcaaggagcccaagcca

SEQ ID NO: 407494 - DNA, 522 bp, Oryza sativa
tgatttatcgaggcgaggaggaggaggagctagggtttctgatgggaggaggaggagggttgtagaagcgcgggggcaggctgcggtggatcgtcgatgggggagcagccggcgcggggggcggcgtcgtcggcgtcggagtcgtcgccgctgatcccaccgccgtcggagatcgacatcgaggccggggccggggaccagttccagtgccggatctgcctcgagaccgacgggagggatttcatcgcgccgtgcaagtgcaaggggacgtccaagtacgtccaccgcgactgcctcgaccactggagagccgtgaaggaaggatttgccttttcgcattgcaccacttgtaaagctccttactatttgagggttcatgttcacactgataggaaatggcgaacattgaaatttcgtttcttcgttactagagatatattattcatctttgctctagtgcagtttgtcatatctgcattagcgtatttggtgcattttattgatggattacagaattactgg

SEQ ID NO: 407495 - DNA, 502 bp, Oryza sativa
  unsure (1)..(502): unsure at all n locations
ccctatatctaaccggagaaaaccccaatctctcgccggcgccgccgtgatgtctcgccggtacgacagccgcacgacgatcttctcgccggaggggcgtctctaccaggtggagtacgcgatggaggcgatcgggaacgccgggtcggccctcggcgtcctggcggccgacggcgtggtcctcgtcggcgagaagaaggtcacctccaagctcctccagacctcgcgctccgccgagaagatgtacaagatcgactcccacctcgcctgcgccgtccccgggatcatgtccgacgccaacatcctcctcaacacggcgcgcctccacgcccagcgctacgccctctcctaccaggagcccatccccgtcgagcagctcgtccaatccctctgcgacaccaagcaggggtacacccagttcggcggcctccgccccttcggcgtctccttcctcttcgccggctgggacaagcaccatggcttncagctctacatgagcgat

SEQ ID NO: 407496 - DNA, 525 bp, Oryza sativa
  unsure (1)..(525): unsure at all n locations
caaatggttcaccagaaacatagtacacttgagctcactcgaaactcaaacactcacaccaatggctctccaagttcaggccgcactcctgccctctgctctctctgtccccaagaagggtaacttgagcgcggtggtgaaggagccggggttccttagcgtgagccagaaggccaagaagccgtcgctggtggtgagggcggtggcgacgccggcggcgccggtggcgagccccggcgcgggcacgtcgaaggcggacgggaagaagacgctgcggcagggggtggtggtgatcaccggcgcgtcgtcggggctcgggctcgcggcggcgaaggcgctggcggagacgaggaagtggcacgtggtgatggcgtgccgcgacttcctgaaggcggcgacggcggcgaaggcggcggggatggcggcggtgagctacaccgtcatgcacctggacctcgcctccctcgacagcgtacgccagttcgtggacaacttccggcgctcncgcatgccgctcgacgcgct

SEQ ID NO: 407497 - DNA, 397 bp, Oryza sativa
catggcaccaaatccccccaccatggatcaccgcctcctcctcctcggcctcctcctcctctccccggcggtggccgccgcctcagtccccggcgaggaggagccgctgatccggcaggtggtcggcggcggcgacgacaacgagctggagctgaacgcggagcgccacttcgccagcttcgtccagaggttcgggaagtcctaccgtgacgccgacgagcacgcgtaccggctctccgtgttcaaggccaacctccgccgcgcgcgccgccaccagctgctcgacccctccgcggagcacggcgtcaccaagttctccgacctcaccccggccgagttccgccgggcctacctcggccttcgcacgtcgcgccgcgccttcctgcgggggcttggc

SEQ ID NO: 407498 - DNA, 438 bp, Oryza sativa
ttatttcccaactccccaccgatccacctgcccgactgcaggctgcagctcacacccgaacgcctcacgccccgccgccatgcgcatcttcgtgctctccggccagagcaacatggccgaccgcggcggcgtccaccaccggcgctgggacggcgtcatgccgtcggagtgcgcgccgtgcccctccgtcctccgtctgaccgacgcgctcgactgggtggaggcgcgggagccggtacacgccgacattgacacggccaagacctgcggcgtacgccccgggatgggcttagcccgcgccggactaccgcgcctggacccgcccggctccggcgtcggcctcgtcccctgcgccgtcggcggcaccgccatgcgggagtgggcccgcggggagcgcctctacgaccagatggtgcgccgagcgcgcgacgaggagga

SEQ ID NO: 407499 - DNA, 456 bp, Oryza sativa
ttgttcacaaggtcagactaagtttgcgttggggagcaaaggagaggaaaaatgtcgcctgctgaggcatcgcgtgaggagaatgtgtacatggcaaagcttgccgagcaggctgagcgttacgaggaaatggtcgaattcatggagaaggtggcaaagaccactgatgttggtgagctcaccgttgaggagcggaacctgctttctgtggcttacaagaacgtgattggtgctcggagggcatcgtggaggatcatctcttctattgagcagaaggaggagagccgtgggaatgaggcatatgttgcatcaattaaggagtaccgtagcaggattgaaactgagctcagcaagatctgtgatggtatccttaagcttctggattcccaccttgtcccatctgccactgctgcagagtccaaggtgttctacctgaaaatgaagggtgactaccac

SEQ ID NO: 407500 - DNA, 499 bp, Oryza sativa
tgcttagcctgctgcactcctcaccggctgctgattgtgactgtgagtcatgttggcctccacttgcttctccgccccgccgccctcctcctcctccccgtcaatcccgacccacctcgccactctctgctgctgcttcaggcctcccgctcgcccaccttggcctcgctctcttcttcttcttggtgccttcccaccgccgacccgccccctcccccgcgcctccgtctcgtcatcgaccgccccagcgaaagattacgagtttactgatggtggcggagaggtggagctgaggctggacataggaaagctcggcattgagaattcaagagatgtatttgttgacgtcgatgatacgtctctgttggtcagagccaagtcggatgggacactgcggactttgatcaatgttaaacaactctttgataggattaagtcttctgagactatatggttcattgatgaggatcaattggtagtgaatctaaagaaagttgag

SEQ ID NO: 407501 - DNA, 522 bp, Oryza sativa
gactcgaccaagcgccgccgtcgccgacgcttccccgccgtcggagatggacttccaggtcgtcgtcctcgccgggggcacctccgagaagctctcgcccctcgtctccaaggatgtccccaaggcgctcctccccgtcgccaaccgccccgtgctctcctacgtgctcgacctcctcgaggccagcgacctcaaggacatcatcgtggtggtggaggggcaggaggccgcgcgactcgtcggagcttgggcctcgagcgcctacctagaccgccttctcgtggaggttgtggcagttccagaggacattggaacagctggtgcactacgagctatttcaaagcgactgactgcaaatgatgttttggtgattagcggcgacctagtaactgatgtacttcctggggctgttgctgctactcatagaagaaatggtgccgctgttactgctttactatgttctgttcctatcagtggtccttcagatgctgcttcttctggagggaaagataaagctaaaaa

SEQ ID NO: 407502 - DNA, 507 bp, Oryza sativa
aagatattagaaagaacaacacataccaggatgtctcagctcaagtcttctagcctggctgcactgctgatcttcctcctggcagtgttcaccactgcagcagcagcggcaggtacagaatgccagaacgatgtcgaggtgctgaagacaacctgctacaagttcgttgagaaggacgggccgaagctgcagccatcacctgactgctgcacctccatgaagggcgtcaacgtgccctgcgtctgcacctacctgggcagcccaggcgtcagggacaacatcaacatggataaggtgttctatgtcaccaagcagtgtggcatcgccatccccgggaactgcggaggtgagcaggcttcacttgattggccacactgatcacctgggtaagaactgacaataacacgccggctcctctggattgcgacttccagtggggcccaagtgtcggtgtcagctgggatccaaggtctaaaacaagaactgattgacttgtgaagttggctg

SEQ ID NO: 407503 - DNA, 363 bp, Oryza sativa
ctttttcttaagaaggaaagagcttgcatagcttcagggattgccccctacatcatgggggggtcatccaccaccggggctcccttccatgggctcaagtgcaccgacgacatgccctgcggccgccgatccaggaactacagcttcggcaacttcagcaaacgcggcaggatcatgtgcatgcaagtgtggcctattgctggcatcaatgaaaatcgagaccctctcctacctgccaccggtcacaccctatgacctcctgaatcagatcgagtacctgctccgttgcaagggggtgccctgacttgagttcaacacgggctgatttgtctaccttgagaaccacaggacccctggatacta

SEQ ID NO: 407504 - DNA, 526 bp, Oryza sativa
gtgttggtcaaggagctggacgagggcaagcagaccgaccaggacaggtggaagggtctcgcctacgacatctccgatgaccagcaggacatcaccagggggaagggtttcgtcgactcccttttccaggctcccacgggtgatggcacccacgaggccgtcctcagctcctacgagtacctcagccagggtctcagaacgtacgacttcgacaacaccatgggaggcttctacatcgcccctgctttcatggacaagctcgtcgtccacatctccaagaacttcatgaccctccccaacatcaaggtcccactcatcctgggtatctggggaggcaagggtcagggaaaatccttccagtgtgagctcgtcttcgccaagatggggatcaaccccatcatgatgagcgccggagagctggagagcggcaacgccggagagccggcgaagctgatcaggcagcggtaccgtgaggcggcagacatcatcaagaaggggaagatgtgctgcctcttcatcaacgatc

SEQ ID NO: 407505 - DNA, 461 bp, Oryza sativa
gcttatcgccatctctctcagctctcacagctcactgcatcaatggccgcggccaccatggcgctctcctccccggtgatggcccgcgcggcgccgtcgacctcctccgcgctcttcggcgaggcgcggatcaccatgcgcaagaccgccgcgaagcccaagccggcggcgtcgtcggggagcccgtggtacggcgccgaccgcgtcctctacctcggcccgctctccggcgagccgccgagctacctcaccggcgagttcccgggcgactacgggtgggacaccgcggggctctccgccgacccggagacgttcgccaagaaccgggagctggaagtgatccacttccggtgggcgatgctgggcgcgctcggctgcgtcttcccggagctcctcgcccggaacggcgtcaagttcggcgaggccgtgtggttcaaggcgggctcgcagatcttcagcga

SEQ ID NO: 407506 - DNA, 337 bp, Oryza sativa
tacttatccctgagaactttatttctggaagagtgccatattactgataagggtggtgaatggcttcatgaacttgctgtcaacaattctgttctggtgacactgaacttctacatgactgaactcaaagtggcgccagctgatctagagcttcttgcaaagaattgcaagtcattgatttcattgaagatgagtgagtgtgatctttcagatctgattagttttttccaaacagccaatgcgctgcaagactttgctggaggagcattctacgaggtaggagagctcaccaagtatgaaaaaagtaagttcccacccagattatgcttcttggggc

SEQ ID NO: 407507 - DNA, 489 bp, Oryza sativa
  unsure (1)..(489): unsure at all n locations
ttctcggccggtcactactcaccatcgagaggagagcaaaaataattgagtgatagctgttagctaagctacctagcatcatgcagggaggcgccaataataagggcttggtatgcttgatcgccgccgccgccgtggtgttggtattcgccggcagcagcggcattgcggcggcgcaggcggccgggctgaagaaggggttctacaagaagagctgccccaaggcggaggagatcgcgcagcgggtggtgtggaaccgcgtcgccggcaacccggagctcgccgccaagttcctccgcatgttcttccacgactgcttcgtcagggggtgtgacgcgtcggtgcttctggactcggctagcaacacggcggagaagaacgcggcgccgaacctgtcgctggcggggttcgaggtgatcgaagaggtgaaagcggcggtggagcgggagttgcccngggtggtgtcgtgcgcggacatcgtggcgctgg

SEQ ID NO: 407508 - DNA, 449 bp, Oryza sativa
aaatgttctctgcggaccgagttgccaactgttgggctgggcaaccaagtgataaacgatctcgaaacactgaaagctagagatgtaaactggcagggaaaatgctctggcacagtttatattgctgggagtgaatccgaaggtcattttgcattgataaacaaggcttactctatgttttcacacaccaacccacttcaccaggacgtattcaagagtgtggcacaattagaggctgaagtagttgcaatgacagctgctttgcttggcatcaaagaaaaatcatccggtggacagatttgtggtaatatgacatcgggcggaactgaaagcatattattagcagtaaaaacatcacgcgactatatgcgaacaaagaaaggcattacaaagcctgaaatgataattgccgaatcagcacattctgcatacgataaagctgctcaata

SEQ ID NO: 407509 - DNA, 513 bp, Oryza sativa
ctcttttcagctccagccacacgagcctagttcagggggatacaatggcgtccaccgcctctttcatgctcgccgtcttgctggcggtggccgtcgcggcggcgccggcgagggcggtgcgatgcccgccgagcgacaagcaggcgctgatgagagtgaagcagtcgctgggaaacccggcgacgctgtcgacgtggtccctggcgtcggcggactgctgcgagtgggaccacgtccggtgcgacgaggccgggcgcgtgaacaacgtcttcatcgacggcgccaacgacgtccgcggccagatcccgtccgccgtggcggggctgacggcgctcatgtcgctgtcgctgttccgcctcccgggcctctccggccccatcccggcgtgcctcaccgcgctctccaacctccagtttctcaccatctaccacaccaacgtctccggcgtcatcccggactcgctcgcgcggatccgcagcctcgactccgtcgacctctcccacaacagcctga

SEQ ID NO: 407510 - DNA, 509 bp, Oryza sativa
cccacgcgtccgtgttcatctgcgccacgacacgacacgacacgacacgagacgagagaggagtcggcaatggcggaggggtcgcggtcgccgctgaggtcgttcgtggaggtggcgccggggtcgcacttccccatccagaacctccccttcggggtcttccgccgcaggggctcgccggagccggagccgccgcgcccggccgtcgccatcggggacttcgcgctcgacctcgccgccgtctccgacgcgggcctcttccacgggcccctcctctccgcctccccctgcttccgccaggaaacgctcaacatgttcctggggatggggcgtccggcctggaaggaggcgcgcgccacgctgcagaagatcctctcagctgatgagccggttttgcgtgacaacgaggccttgaagaagaagtgccttgttcccatgagcgacacagagatgcttctgccaatcacggtaggagactacaccgactttttttggtctgtgcaccatgc

SEQ ID NO: 407511 - DNA, 522 bp, Oryza sativa
gctgtcttttcccttcccagatctccagccccaggagctgcggttggttcccaatggcggtgaatgactatgtcgtgtactactctatgtatggacatgttgctaaactagctgaagagatcaagaagggtgcttcatctattgaaggtgttgaggctaaaatatggcaggttcctgaaactctccatgaggaagtacttggaaagatgggcgcgcctcctaagccagatgtgccaacgatcacaccacaagaacttactgaggctgatggaatcctgtttgggttccctacaaggtttggcatgatggctgcgcacatgaaagcattctttgatgcaaccggtggcctgtggagtgagcagagccttgcatgcaagcccgccggcatcttcttcagcactggtacccagtgcggtggttaggagaatacaccgttgacagcaataacttaattgactcaccacggcatggggcccgtcccggtcggtacaccttccgtgccaagatgtttaacatgggaga

SEQ ID NO: 407512 - DNA, 503 bp, Oryza sativa
  unsure (1)..(503): unsure at all n locations
cgattatctcctcctccctaccaacaaccaccaccatcctcttcttggcacttggcatcaagagacacatccagacgcctcgagttgtagctagcaccagtggctcagcttgcccagtgctgctgcatcgatcagtggcagtagctagctcagctctagccttttgccaccgaccgctccgatcgaatccggtgctaggctagccagcctcctcgctctttataaccccagccgccattggagagggagggagggagctagagctttgttcttgttcttgcatgctgttcttgttgatcgagtgagagagggggaaggaagaaaggagggaggcacatgcttataccgttcgtgctggagttcctgatcgatgtcgcctgtgatcagtgagatcctcctctcggngtttatgatcaactccacactccggcgccgcacccatctcgtccagtctttctccgtcgtcttcctctactggttctatgtcttctcataagctactc

SEQ ID NO: 407513 - DNA, 509 bp, Oryza sativa
ttctaatcgcggcatcgcgcccatcccttcccctaggctgcatatccgcttccccgagatggaatcctgtcctgaggggaagaacattcttgtgctggattccgaagggaagcgcgtggcggtgaactactacagcgatgactggccctctttgtcctcgaagcaagctttcgagacgtaggtctttgctaaaacccagaaaacgagcgctagaacagaagctgagatagtaatgtttgacagttacttcgttgtatacaagttcatccaagatctacacttttttgtaactggaggtgatgaagagaatgagctcattttagcatctgttcttcagggcttctctgaagctattgattaccttctcagaaacaaagtgcacagaagggctgcgcttgaaaacttggatcttatcttcttatgccttgacgaaattgttgatggagggattgttctggaaacagatgcaaaggcgattcttgaaaagtataagtcatggattggaagat

SEQ ID NO: 407514 - DNA, 441 bp, Oryza sativa
gtgtgagagagctcaaaaaccctaggaggaggtttgaggggccagatcgatggagagccccgcgaaggaggaggcgggaggggagctggcgatggagatcgagtccaccgtcacggcggaggactggcgccgggcgctggcactcgtggtgccctccgtcgtcgtcctccgcaccaccgcgccgcgggccttcgacaccgaggtcgccggcgccagctacgccaccggcttcgtcgtcgacaagtccaggggcatcatcctcaccaaccgacacgtcgtcaagccagggcctgtcgtcgcggaggcgatgttcgtgaacagggaggagatccccgtgtatcccctgtacagagatcctgtacatgattttggtttttttcgctatgatccaggtgctatcaagttccttaagtatgatgagatccccctagcacctgaagc

SEQ ID NO: 407515 - DNA, 464 bp, Oryza sativa
cgttgccgactcggacagagactcatgtctcccttttgtatatccatgtgagatttctgcaccattgctgcattctgttcgatctcgatcttccaagaaggaacttggagcgatggccaccggcgggaactcgctgccgtcgccgtcgtgcgccgacgacaagaagcggcgggtgtgctactactacgaccccggcatcgcccacatcaaattcagcgacgaccatgtcatggtgcccgcccgcgtcgccatggcgcacagcctcgtcggcgtctacggcatgctcggcgacatgcgccgcctccgtacgagacccgccacggaggcggagatccgccgcttccactcgccggagtacgtcgacctcctccgcgacctcaccccggagagctacgccaacgacgccgcgcttcggcagaaggcgaaggatgaccacggcatcggcggcgacgacgattgccccc

SEQ ID NO: 407516 - DNA, 515 bp, Oryza sativa
ttctttacctagcagtccaaaatcgctaaggtgtttggcggagccaaaggttgtaaggaggatcagggttgtagctgagaagactccaattcagcatgttctccagccaccaaccatcgcctccttgctcgccattgtcatcggcatggttcctttgttcaaagattttgtgtttgtgcctgatgcaccactgtcgttctttacagacagtttggagattctagctcaagccgttgtaccctcggtgatgttaattctagggggcatgcttgcagaaggacccaaggataatgccttgggtatccggactatcactggtataattgttgcaaggctcctgattctcccatgcattggcatcggtgtcgtcctgctggcagatcggttgcatctgcttgtcgaggaagaccacatgtaccgctttgtgctgtcgctacagtactccacccctagtgccatcctgcttggagcgattgcgagcctcagaggttatgctgtcaaggagcatcggcact

SEQ ID NO: 407517 - DNA, 335 bp, Oryza sativa
cgcttctgcttgcgtgctcttttttctcgttgatcggtttgctcgatcagatcggttctttggagagatggagcagctcttcatcatgatcaagcctgacggcgttcagagaggctctgattggagacatcatcagccggatcgagaagaaaggattctacctgagggggatgaagttcatgaatgtcgagaggacctttgcacagcagcactatgacgaccttaccgacaaggcctttttacctgggatagaggagtacatcatctatggccccctcgatacgatggtttgggaagggaaagatgctgttgacactggccggaggatcattggg

SEQ ID NO: 407518 - DNA, 507 bp, Oryza sativa
ctcctcctctcctctctcccgtcacgggcgcatctctctgtctctctctctctctctctctctctccccgcacagccgcgccgcgccgccgtcgccttctcgggcgagggcgaagagcgagggctcctgctcgccgacgcccctccccctcgtccgcggcgcgccggaggtcaggtagaagatggagggagctggcagagatgggaaccctcttggcggttaccggattggcaaaaccctagggattgggtcatttggcaaagtgaagatcgcggagcatatattgactggtcacaaggtggcaatcaagatcctcaatcgccgtaagatcaagagcatggagatggaagagaaagttaaaagagaaatcaagatacttagattatttatgcacccacatatcattcgcctctatgaggtgatagacaccccagctgatatttatgccgatatggagtatgtcaaatctggagagttgtctgattacatcgttgagaagggaagact

SEQ ID NO: 407519 - DNA, 429 bp, Oryza sativa
ctctttgtcctgatgcgctccctcggcgggaaccccacccaggcgcagctccgcgacatcgccgcgcaggagaagctcaccgcgcccttcgacttcccgcgcttcctcgacctcatgcgcgcccacctgcgccccgagcccttcgaccgcccgctccgcgacgccttccgcgtcctcgacaaggacgcctccggcaccgtctccgtcgccgatctccgccacgtgctcacctacatcggcgagaagctcgagccccacgagttcgacgagtggatccgggaggtcgacgtcgcccccgacggcaccatccgctacgacgacttcatccgccgcatcgtcgccaaataatttgtcatttctggttttctcccctctctccctctctctgcacctgtcaggatccacagtttgacacataataactctctc

SEQ ID NO: 407520 - DNA, 455 bp, Oryza sativa
tatttacctcctccacctcctcctcctccccccggggggatcggtccggctcctcctgctccgccgccgccaccgccggcgcagataggagaagatggccgcacttgataccttcctctatacctcggagtctgtgaacgagggccaccctgacaagctctgcgaccaagtctcagatgctgtgcttgatgcctgcctcgccgaggaccctgacagcaaggtcgcttgtgagacctgcaccaagacaaacatggtcatggtctttggtgagatcaccaccaaggctaacgttgactatgagaagattgtcagggagacatgccggaacatcggttttgtgtcagctgatgtcggtctcgatgctgaccactgcaaggtgcttgtgaacatcgagcagcagtcccctgacatttgacaaggtgtgcacggccacttcaccaagcgccctgaggaga

SEQ ID NO: 407521 - DNA, 416 bp, Oryza sativa
gttcttactaggattcaaccgcgactacaagcgcaccggcattacctacatcgacggcaatggcgactggcacaagctgagcaagggcgcgccagagcagatcatcgagctctgctacatggccgtcgacgcagtgaatgaaggttcacgccctgatctacaggtacgctagatcgggggctccggtcgctcggattgtcctaccagacaggtgccggagaagagcaaggacagcagcagcgacaccgaggcagaatcatcgggctggtgccgttgttcgacccgtcgaggcacgacagcacggagaccatccggccgacgctacacatgaggatcaacgtcaagatgatcaccgaggaccagctcgccatcgtcaaggagacgatgcggctgctcaggatgggcaccaacatgta

SEQ ID NO: 407522 - DNA, 54 bp, Oryza sativa
aaattaattgaacctgctctgaagaagcagctcatgatcttcactgcttcgatg

SEQ ID NO: 407523 - DNA, 294 bp, Oryza sativa
ttttcttacccaagtttaaaattattattggcgggggtgtgacggatcggtgttgctgaacgcgacggcggcgagcgggccggcggagaaggacgcgatgccgaaccagagcctggacgggttctacgtcatcgacgccgccaaggcggcgctggagaaggagtgccccggcgtcttctcctgcgccgacatcctggcgctggcggccagagacgctgcctccatggctgccgggaacatcaatggcgcgagcctttggcaagtcccgacggggcggcttgacgggcgcgagtt

SEQ ID NO: 407524 - DNA, 130 bp, Oryza sativa
tgtggtttttcagatgtcacaaagaatttcttggctgtttttgccaacaatgggggactgaagcacattgatcgcattgctgagagatatgttgatttgcccatggcacataaggggctgtttttgattt

SEQ ID NO: 407525 - DNA, 95 bp, Oryza sativa
catgggaatattgatgccaacactggtgatccccggatcggttgggacaccgatcggttccttacagatatttcagaggctactttgggtatgtc

SEQ ID NO: 407526 - DNA, 426 bp, Oryza sativa
cttaagcgcacagaaaaaaaaatctcccctggaggggaatcgtcaaatcggcttgtcaagatgcagatctttgtggagaccctcaccggcaggaccatcaccctcgaggttgagtgctgggacaccattgacaatgtcaaggccaagatccaggacaaggagggcatcctcccggaccagcagcgtctcatctttgctggcaagcagctggaggatggccgcaccctggccgactacaacatccagaaggaggccacccttcaccttgggctcaggcttaggggaggcatgcagatcttcgtcaagaccttggctggcaagaccatcacccttgaggtcgagtcgtctgacaccattgacaatgtcaaggccaagatccaggacaaggagggcattcccccggaccagcagttgtttatcttcgct

SEQ ID NO: 407527 - DNA, 195 bp, Oryza sativa
atatcctcctcctctcgtcttctccttcgaggtgttagctccctccttattcagaccatggctaaggagaagacccacatcaacattgtggacatttcctacttataatttcttttcgtctttcactccctcctcatcttcatccacaatatttgcaattttcttcattttaaacttacttcttctcttattcta

SEQ ID NO: 407528 - DNA, 198 bp, Oryza sativa
gtatggcctgtgtcaaggagagggtagtagcgccttgctctcctttgccttcagagaaaccggaagcaatggcgtctgctactctcctcaagtcatctttccttcccaagaagtctgaatggggtgccacccgccaggctgccgcccccaagccggtgactgtcttcatggatgtcctctcctgtgccaccactcttt

SEQ ID NO: 407529 - DNA, 406 bp, Oryza sativa
ctttacgccgccgccgcctcctcctcttgttgggggaccgccgccgccgcctggggggaagaagaaagaagaggaaggagaagatgagggagatcctccacatccagggtgggcaatgcgggaaccagatcggcgccaagttctgggaggtggtgtgcgcggagcacgggatcgacgccaccgggcgctacgacggcgactccgacctgcagctggagcgcgtcaacgtgtactacaatgaggcctcctgcgggcgcttcgtcccgcgcgccgtgctcatggacctggagccgggcaccatggactccgtccggtccggcccctacggccacatcttccgcccggacaacttcgtcttcggccagtccggcgccggcaacaactgggccaagggacactacaccga

SEQ ID NO: 407530 - DNA, 405 bp, Oryza sativa
cattagtcgctaatcagaaagagcttgaatttgggtggggaggaactccagaggggggtttccaataactataatgtgatactgaaagagcggaagcttccactgtcactactgcaggatcatcaaaagcaagctagggcgcatcttcttgacactgaaccttttgagcatgcatttggaccaaagggcaagaggaaacgcccaaaactaatggctcttgattaccaatctctattgaagaaagctgatgattctcaaggtgcatatgaggataagcatgctacatcgaagttgctgaaagaggaagaggaagatggcttacgagacctagtacggcacacaatgttcgagaagggacagagctaaacaatttggggtgaactctataaagttattgactcttca

SEQ ID NO: 407531 - DNA, 402 bp, Oryza sativa
gttttgaacctcgagctgcttctcacagctgggatggggtcagatcatattgagctgccagcagctgctgcagcaggtttaactgtggcagaggttaccggaagtaacactgtgtcggtggcagaagatgagctcatgcgcattttgattttgctcaggaacttcttgcccgggtatcagcaggttgttcatggtgaatggaatgttgctggcattgcctatagggcttatgatcttgaaggaaaaactgtggggactgttggggctggtcgtattggcaggctcttacttcagcgtcttaagccctttaactgcaacctgctgtaccatgacagacttaaaattgacccagaacttgagaaagaaattggggccaaatatgaagaggatctcgatgctatg

SEQ ID NO: 407532 - DNA, 385 bp, Oryza sativa
ctgtccgccttcgccatggccgccacgccgcggggggccaggaaggtgccgggggaactcgcccagcacggcgacgtccgcgtggacaactactactggctccgcgacgactcccgctcccaccccgacgtcctcgcccacctccgtgccgagaatctctacaccgccaccatcatgtctgatgtcaagaacctcgaggatgaaatatatgctgaaattagagcaagaatcaaggaagatgatataggagcgcctcttcgcaaaggccagtattactactataacagaacactgactggcaggagtatgtgcaacactgcaggcgtctcgtgtcaactgatgctcctgttacagtctatgatgtcatgcccacaggacccaatgc

SEQ ID NO: 407533 - DNA, 424 bp, Oryza sativa
tggactcgtgggctcctcccgccgccgccgcgggggccgccggcgcctctcggcgggagagacccagccgccgccgccgccgccgccgccatgtcgctgatcgccggggaggacttccagcacatcctgcgtctgctgaacaccaacgtcgatgggaagcagaagatcatgttcgcgctcacctccatcaagggtgtcggccgcaggttctccaacatcgcctggaagaaggccgacatcgacatgaacaagagggccggtgagcttactccggaggagctggagcggctgatgaccgtgggggcgaacccgcggcagttcaaggtgcccgactggttccttaacaggaagaaggactacaaggacgggaggttctcccaggatgtcttcaacgcgctcgacatgaggctcagggatgatcttg

SEQ ID NO: 407534 - DNA, 368 bp, Oryza sativa
tgtttccgctacgccctcaaggtgttcgacggggggtccgccgcggcgaccaggcacgacgccgagcgccgcgcgcggtgggagctgtccgtgctctcccgcctcgcgcacccgcacctcccgtgcctcctcggctccgccgagacgcccggcctcctcgcgtgggccgtcccctactgccccggcggcgacctcaacgagctccgctacgcgctccccgaccgcgtcttctccccggcggcgatacgcttctacgtcgccgagatcgtgtccgcgctgtgcgagctcacgcgtcgggcgtggcgtaccgcgacctcaagcccgagaacgtgctcctccgcgccgacgggcatgtcacccttaccgac

SEQ ID NO: 407535 - DNA, 383 bp, Oryza sativa
ttatgaaggttaatgagatattgtctcactgtgaggcaactacaagcagtgtggtattattccaatgcttgatcttgcccagcagcagcatggtggatgggtgccagttgcagcaatgaatgctattgctaagatcgttgaagttgcaccaatcagagtatatgaagttgctacattttacacaatgtttaaccggactaaggtgggtaaatatcaccttttggtgtgtggaaccacaccttgcatgattcgtggttcacgtgaaattgaagaagccttgttagaacatcttggagttaaacggaatgaggtgaccagtgatggtttattttctgttggagaaatggagtgcatgggctgctgtgtgaatgcctccatgattg

SEQ ID NO: 407536 - DNA, 450 bp, Oryza sativa
ttttaatgtgcctctgggagcaaatggggcggggggagaaagtcaatctgagtgagcttggtccagggcgcggaactctcttggcagatttacttcgtgggtcatcaaaatttgttaatttcaccaaagcactcaacattaacttggtagaatgtagccccacgttacaaaaggtgcaatacaatactctgaaatgtgaagatgagcccattggcgataaaacaaggacagttagcaagctttgtggagcccctgtacactggcatgcttcccttgaacaggttccttcaagattgccaactataattattgcacatgaattctatgatgccttggcaattcatcaatttcagaaagcatcacgtggctggtgcgagaagaatgtggatcttgcagaagactcatcggttcgctatggtctatcttcacagcctacagcctctttacttt

SEQ ID NO: 407537 - DNA, 504 bp, Oryza sativa
ttttcaaggccgccaagtctctcctctccgggagcgccgccgactcctccccgggcacctccctcctagccgaggggaggaacgcggcgctggccaccctcaccaacctggggaggaagaccctccccacagcttacgcctactcctaccaccacaactcctccgccgccgccgccggatggctcgctgccatccccgccgctgtttacatgctacaggatcaggaggcgcatgctgcagagatggagcgcacctttatcgccatcaagcctgacggcgtccaaaggggcctgatttctgagatactgtcccgatttgaaagaaaaggattcaagcttgttgccatcaagctggtggttccatccaaagaatatgctcagaagcactatcatgatttgaaagacagacctttcttcaatggattgtgtgacttccttagctctggccctgggcttgccatgggttgggaaggagagggtgttattaagtactggagaaaactga

SEQ ID NO: 407538 - DNA, 332 bp, Oryza sativa
gttttataggtcctccattgttcaaggtggggtcggggcatgcgttcgtgaagaagaggggcagctgcgaggacatgggacctcgtgcgttcccggtgcacgaagttcacaagatctgcgtgctggacatcaggctggccaacgccgacaggcacgccggcaacattctcacctgtagagacgaacaagggcatggcctcaccctggttccgatcgaccatggatactgtcttcctgagagttttgaggattgcacattcgagggcctctactggccgcagtgtcgggagccattcagcgaggagaccgtggagtacataaggtcactggac

SEQ ID NO: 407539 - DNA, 477 bp, Oryza sativa
atacggtcttgctgtggtggaagtcaaggatgcgtacccaactgtaatggaagatttgcaggcactgaaggcagcaggtgaagtttggctgttatcgaacatggattcccaggaggacattgtgtatcctaacgacccaaaggcaaagatcaaggtcgacgatgacctgaagcagctcttccgggagatggagttaccgcgggacatggtggatatcgagaaggagctccagaagaatggcatcaagcccatgaccaacacagctaaacggcgggctgcagcacagatcaatggggtgcagcccaaggctaagcctaagaagaagcagcgtgagatcacacgccggaccaagctcacgaacgcccatctgcctgagctgttccagaacctcaacacttgattgctctacgcttattcgacgtcaagtggagatatttatttctgtcctcactctacctactgcaatgctttatatac

SEQ ID NO: 407540 - DNA, 396 bp, Oryza sativa
gtccaaaaccctcctcccctcctctcctctccgtgtccgccgccatggccgccgccgccgccgccgccaccacccccaactccctcctcctccgccgcccggcggcacccaagccggcctccgcggcggcctcgccgctccgtctccccacgcgggcagccaggatctcctgcgcggccgtggccacgcccgcgcagtcctcctcctcccccgccgccgccgccgccgaccgcggggtctacaacttcgccgcgggcccggccacgctgccgctctccgtgctccagagggcgcaggcggagctcgtcgactaccgcggctccggcatgagcatcatggagatgagccaccgcgggaaggagttcgacgccgcgatcaagaaggcggaggccgacc

SEQ ID NO: 407541 - DNA, 373 bp, Oryza sativa
ttctcctcgctccccgccgccgccgccgttgggttggagaggagaaatccgtaggctcagaggatttttggtagtcttgtttcgtgatattcgtgaagagggggggagctaaggggggattcgtaagatcagaattggatcacgcgggggcgcgctcgggatcgggggttccaaacacagcttcttcgttgaatttaagtggatgtactaatggagtcaaagggtggcaaaaagaagtctagcagtagtcgttccttgatgtatgaagctccccttggctacagcattgaggacgttcgacctgccggaggcgtgaagaagttccagtctgctgcttactccaactgcgcgaagaagccatccctgatagccc

SEQ ID NO: 407542 - DNA, 456 bp, Oryza sativa
tgtataaaggacaccagaaacatagtacacttgagctcactccaaactcaaacactcacaccaatggctctccaagttcaggccgcactcctgccctctgctctctctgtccccaagaagggtaacttgagcgcggtggtgaaggagccggggttccttagcgtgagccagaaggccaagaagccgtcgctggtggtgagggcggtggcgacgccggcggcgccggtggcgagccccggcgcgggcacgtcgaaggcggacgggaagaagacgctgcggcagggggtggtgggtgatcaccggcgcgtcgtcggggctcgggctcgcggcggcgaaagcgctggcggagacggggaagtggcacgtggtgatggcgtgccgcgacttcctgaaagcggcgaccgccgccaaggcggcggggatggcggccgggagctacaccgacatgcacctgga

SEQ ID NO: 407543 - DNA, 391 bp, Oryza sativa
tgttagagagagagagagagggagggagagggaggcaatggtggcgacgaacctgaaggcggagacggtggggctgatggaccggcgggcggcggtggaggcggagatggacgccatcatcgccgccctctccgtgcccgtcgggccggggatcaccggcggcctcgtggacgcggagggtttccccaggtccgacatcgacatcccggccgtcctcgcccagcgccgcaagctcgccgaattgcggaatgatcacaaggatattacgaacaaaattgagaagaatctggaagttttgcactcaacaaaattgtcaagaaatgaagcgtcaatccctgcaagttctggcacacctgcttcattgcacagtgggttatctcaaaatgatcct

SEQ ID NO: 407544 - DNA, 329 bp, Oryza sativa
atttcttctctcaccgatctcgtcaacctcagggggtccgacaccacggagaagatcatcgccaagtacatatggatcggtggatctggcatggatctcatgagcaaggctaggactctctccggccctgtgactgatcccagcaagctgcccaagtggaactacgatggctccagcaccggccaggcccccggcgaggacagtgaggtcatcctgtacccacaggctatcttcaaggacccattcaggaagggaaacaacatccttgtcatgtgcgattgctacacgccagccggagaaccgatccccaccaacaagaagcacaatgc

SEQ ID NO: 407545 - DNA, 244 bp, Oryza sativa
tattctcatgggcggacgcgtaggcaccagccggcgcctccgactacggctggggcgccaacaacaagctcctcccgcgcgctccgagcccatcatggcagacgtcaaaatcgagactgatgtcaccttcggcgcacagccaaagaagaggacattccgcaagaacagctaccgcggcgtcgacctacacacgctcctcgacatgaccaccaatgaccttgaacagctctttcccgcgcgcgcc

SEQ ID NO: 407546 - DNA, 490 bp, Oryza sativa
gttttgttgcacaacagcagacagttggacctgtgcaacttcctctcgcagatgtggctgtgattgcacagacatatactgacttgacaggtggtgcctgtgccattggagaacaaccagcaaaaggtttacttaatcccaaggccatggcaagacttgctgttggggaggccttgactaatctggtctgggctaaagtttcatcactttctgatgtcaaagcaagtggtaactggatgtatgctgcaaagcttgatggagaaggtgcagatatgtatgatgctgctgttgcattggctgactgcatgattcaacttggtattgcaatcgatgggggaaaggacagtctttccatggcagctcaatgtgatggtgaaggtttgcaaggctcctggaaatcttgtcatcagtgcttatgtgacatgtcctgatataacattgacagtaacttctgatttgaagcttggcaatgatggagttttgctgcaca

SEQ ID NO: 407547 - DNA, 389 bp, Oryza sativa
tttagatcgcgagcgccgccctttttttttgtgtttttttttagcgacacgagagtcatctgatatatatttcagataaagatgttcaacacaagatagcttcagaccaggcaatatagcaccagacacttggtgattcagggttcaacaaagtgatatatgatcgagtctacaaacaaacaaaaaggtccgatatttcgtttcccacagatgataaggatagatatatctaagcggctgagaggaaggccttcccgggggcacgagcagagaggcgaccatggcaaccaagtagcttagcattgacaccatcaggcatgattctaccctcgctcttaagcctgacgtattcatcgcggctgaccttggggaaaccccactttctactc

SEQ ID NO: 407548 - DNA, 376 bp, Oryza sativa
tgttgttcacggatgtcacacataaactggaagggaaggatttctcaacacttgagagaggcccatgcctgtactgctgggttgaaggctgtgacaacatctgcgacagctgatggaattgaagaatgccgaaaactctgtggtggacatggttacctgaacagcagcgggcttcctgaattgtttgctatctatgttcctgcttgcacttatgaaggagacaatgttgttttgctattgcaggttgcaaggtttctaatgaagactgtatcccagttagcttctggaaaacagcctgttggtacaacggcttacatgggcaacatacagtacttgatgcaatgcaaatgtggtgtaaatacagctgaagattggc

SEQ ID NO: 407549 - DNA, 475 bp, Oryza sativa
ttttataacgaggcgacagttgcctactatttgcggttggacaataggctgcgcgcaaccagtggctaccttggagctgagttccatgaatctatggaatcttctctcgctcaagtaactccagctgagacaccaaactcagccactgatcatcggcagcatgggcatatggaatctcctgggtttggcttgaggcatcatttcgcagctgacaggaaatgggcccttggtcttcagtctcgagcacatccacgagaaataataactgaagttcttaaagctctgcaagagctaaatgtttgctggaagaagattggacattataacatgaaatgcagatggagtcctagttttcccagtcatgagagtatgatgcataacaaccatggctttggtgcagaatctgctataattgaaactgatgacagtgagaaatcaaccacactgtgaaatttgaaattcagctttacaaaac

SEQ ID NO: 407550 - DNA, 373 bp, Oryza sativa
gttttcggcgcgtgcgacggcgggcagttgctgggacgtcggcgacatggtgaggatggacaggttccgcgcttggcagggagctcacaaccggtcgtacccgagcgcagaagaggcgctgcagcggttcgatgtgtaccgccgcaacgcggagttcatcgacgccgtcaacctgcgcggcgacctcacttaccagctcgccgagaacgagttcgcagacctcaccgaggaggagttcctggccacgtacaccgggtactacgccggcgatggccccgtggacgactccgatatcacgacgggtgccggagacgtcgacgccagcttctctaccgcgtggacgttccgggcagtgtcgactggagggcccaag

SEQ ID NO: 407551 - DNA, 358 bp, Oryza sativa
cttgccgccgccgccgccgcagcctcctcaagggtgctcccatcctctccttcgagttagcttcctccttattcaaccatgggtaaggagaagacgcacatcaacattgtggtcattggccacgtcgactccggcaagtcgaccaccacgggccatctgatctacaagcttggaggtatcgacaagcgtgtgattgagaggttcgagaaggaagccgctgagatgaacaagaggtccttcaagtacgcgtgggtgcttgacaagctcaaggccgagcgtgagagaagtatcaccatcgatatcgccctgtggaaagttcgagaccaccaagtactactgcacggtcatcgatgcccct

SEQ ID NO: 407552 - DNA, 353 bp, Oryza sativa
tttacgcgtccggtcttttctcaattgtgttattgcagtttcatgtgagggtgctcctcctgtccaaatgggagaaagataccctcacatgttcttgatcctcctactttttcatggagcccatgcggctttgaaagatccagtacagaaatggcagactcttggaggtcagcgtcctcttgtcattgctcgtggagggttctccggcttgtttcctgattcaagccagttctcgtaccagtttgcaatgtcgagtagcttgcatgatgtggttctgtactgtgatctgcaattgtccagtgatggtttgggcttttgcaaaactggattgacattagagaactcgacgctta

SEQ ID NO: 407553 - DNA, 356 bp, Oryza sativa
acgcgcgcttgtctctctttatatagtgtcacagtgtattgaggcagaaattgatccaaaccgaaaccaaaagtgaaaaaagacagtcccaagacgaatataattaacacaagagtacagggctgtagtaatggctgcggcggtggccggcggcaagatcaagacggtggtggtgctggtgatggagaaccgctccttcgaccacatgctgggctggatgaagtctctcaacccggagatcgacggcgtcaccggcgacgagatcaaccaccttgacgcctgcgacccgacctccaaggccatccgcttcggcgacggcgccgagtacgtcgaccctgacccgggccactccatgc

SEQ ID NO: 407554 - DNA, 301 bp, Oryza sativa
ttcgaaacgacggatttcaccaacacatccgtgtgctcaagcccttcttgctcttcccgttcattgtccagctcgattgatctccatggaaatggtcatgttattgaaaagtcgatatctagggttggctccttcaatctcaggcagatcaaaggcttatcaggtagcatgccattgccacctgaggaactaaggtgcccgatctccttgcaactcatgcatgaccctgttattatcgcatctggtcagacatatgagcgggcttgcattgagaaatgggttagcagcggcaacacaacct

SEQ ID NO: 407555 - DNA, 362 bp, Oryza sativa
  unsure (1)..(362): unsure at all n locations
tatcagcatgaacctggctgacgccatgacgggggctcgggtgctggacatggacctgcacaagcagctccggcatcacatggagtgcatggtgcccctccccggcgtctacaaccctgacttcatcggcgacaaccagggctcccgcgccaacaatgtcatcaagggcaccaagaaggagcaggtcgaacaggtcaagaaggacatcagggagttcaaggagaagagcaaggtggcacggtggtggtgctgtggacggccaacacggagcggtacagcaaccaggtgggcgggatgaacgacaccatggacaacctgctggcgtcgctggacaaggacgagccggagatgtcgncgtcgac

SEQ ID NO: 407556 - DNA, 101 bp, Oryza sativa
ctaagctggtcgtgtcactcctcccgttaaggttcccgcggcggcgagagcaagctaagctaggtcgggcatggggaaggacgaggtgatggagagcggcg

SEQ ID NO: 407557 - DNA, 127 bp, Oryza sativa
gtattcccgaggaagaagaagaagaagaaaagagtgtctactacggccagcaacctcccgtcggcgtcccgccgcagcaaggttacccggggaaggacggctacccgccgccggggtacccaccggc

SEQ ID NO: 407558 - DNA, 128 bp, Oryza sativa
tgcctcccttttgttccacacgagatttctgtggggggtgttcttatcttagggcgacctgcgttatcttttaacagatgtgccgccccagccaaactccccacctgacaatgttttccccccggatc

SEQ ID NO: 407559 - DNA, 218 bp, Oryza sativa
tagccgcgggtctcctctcaacaacctgggctgggctgttgagcttccgggacgcttactccggctaccaccaaatcagcatggtgagagaggacgaagagaagacagcattcatcatgccgttcagggtattttgctatgttaagatgccgttcggactaataaccgccgggaatactttccagcgcacgggctagggcgcacttagcgaccagatt

SEQ ID NO: 407560 - DNA, 267 bp, Oryza sativa
tggtaccaccttgctggtttcaatgccttttggtgggcccatcacctactggtgattgcatatatcctcttggtgctgcactcctacttcatatttctcaccaagcagtggtacaatcgaacgacgtggatgttcttggcagttccagtcctcttttactcctgcgagagaactatcagaagagttcgcgagagcagttatggggtgaccgtcatcaaggcagcaatttaccctggaaatgtgctctctattcacaatgaataaacc

SEQ ID NO: 407561 - DNA, 221 bp, Oryza sativa
ttgttaagagcagcgcttgagcaatttcagaaccgggtcagaccgtccagagccggggtggttgcatcatcaaatgatcagctggtaactgacgaagacgattgcgcagctcggcggcgaaccctgcgcactaagtatatctgcttttataatagatttctcgtgtacataaaatctaaaaaaacgggttcagttggttacagaacttgcaaatttgcttc

SEQ ID NO: 407562 - DNA, 330 bp, Oryza sativa
tcgatattttttggccgggagagagagcatctagctagggagagaaaggaagagacgagaggagagagatggccactgcttatgctcccatggcgagccagctgatgaagagcagcttggtgtgctccaagccgagggggctgtctggtgcttcgctgacaaggaggccccgcttcacagtcaaggccatccagtctgagaagccaacgtaccaggtggtgcagcccatcaatggcgaccccttcattggcagcctggagacgccggtgaccctcagcccgctggtcgcctggtaccttcttcaaccttccggcgtacccgcacccgtct

SEQ ID NO: 407563 - DNA, 276 bp, Oryza sativa
tcggtgaatattcccaacctttttaagaaaatgagagggtggcatatatacccttggcagtcatttgtcacctttggcaagggatttgattcccagaatgcttgttgttgatcccatgaagaggatcaccatacgtgaaatccgtgaacatcagtggttcacagttggtcttccgcgttatttagctgtgccacctcctgacactgcacaacaggttaaaaagctcgactatgaaactctgaatgatgttatcaatatgggggctcgacaagaatt

SEQ ID NO: 407564 - DNA, 352 bp, Oryza sativa
ttttcggcatcaatatgacattcctggctacgtggactttgttgtctctaacgcagttaactttactctgacaatgaatgagatgggtgctaagatgattgggttcgttggtgttccaccacttggttgttgtccctcacagagaactggtccatcaagagaatgcgaaccattacgaaatcaagcatcagaattatttaatactagaatgaagcaggaaatcgatcgactaaatgtcgaacataatattgatggtttaaggggttgtttattttgacattatcattcaatttgcttcatcctgatttcacaaaaccttgttattaatgctcttacaggatacattctgatt

SEQ ID NO: 407565 - DNA, 147 bp, Oryza sativa
ctcctgcactctgatcaggagctcttcaatggcggagctactgatgctctgggtcagtcttacattagtagccagagcacattctttgctgattctgcgacgggcatgatcaagatgggggacatcacactcgtgacgggatcaaat

SEQ ID NO: 407566 - DNA, 421 bp, Oryza sativa
ttccttttccactctctcctctccccttcgtggcggcggcggcggcggcggcggcgtgacgaggaggagcaatggcgatggcctcctccgcctacgccccagcgggcggcgttggcacccactccgcgccgggcaggatcaggccgccgcgcggcctcggcttctccaccaccaccaccaagtcgaggcccctcgtgctcaccaggcgtgggggaggcggcggcaacatctccgtggctcggctgaggtgcgcggcgtcgtcgtcgtcggcggcggcgaggccgatgtcgcagccgcggttcatccagcacaagaaggaggcgttctggttctaccgcttcctctccatcgtctacgaccacgtcatcaaccccggccactggacggaggacatgcgggacgacgccctcgagcccgccga

SEQ ID NO: 407567 - DNA, 405 bp, Oryza sativa
ttcttttcctgtcttgcaatagaacattcagctgcgcaagagcaaaagatcagctgggttatgaacccattgtgtcactcaaggatggacttaagagaacaatagagtcatatccccatctgcaagcacaaaatcaaaggagcatatcaaaagcctcaattttccttggcaatggaaatcttgcgaagacagttctctgggaagacatgaagcaaacaatgactgtactactgctactggctgttatctactatcatttatttacatgtggttacaccttcattacagcaatggcaaagcttttctcactaaccacactgtttttattcattcatgggattctgcctgcaaatgtggttggacacaaggttgagaagctcgagcctttaaattttcacatcacac

SEQ ID NO: 407568 - DNA, 474 bp, Oryza sativa
tttgttcaatcaagaaatcgttctagctagaagggggtgttcgatggcggcgatggcggtggtaatggcggtgatggcggcggcggcggcgtcgccggcggagggcgcgagggcgttcttcgtgttcggcgactcgctggtggacaacggcaataacaactacctcctgacgagcgcgcgcgccgacatgccgccgtacggcatcgaccacccgagccaccgccccacgggaggttctccaatggcctcaacatcccggacatcatcagcgagcacctcggcgccgagcccaccctcccttacctcagcccggacctccgcggcgccaagctcctcgtcggcgccaacttcgcctccgccggcgtcggcatcctcaacgacaccggcatccaattcgtgaacatcgtgaggatgagcaggcagctgccgtacttcccggagtaccagagaggctgccccgcttgtcggcgcggc

SEQ ID NO: 407569 - DNA, 467 bp, Oryza sativa
ttccttcgaaaaatttctccccaatctcgcgaggcggtcgtcgtcgaatcgggtgctctcgcgtcctcaagatgcagatctttgtgaagacattgaccggcaagactatcaccctcgagggggagtcctctgacaccatcgataatgtcaaggctaagatccaagataaggagggcatccccccggaccagcagcgtctcatcttcgctggcaagcagctggaggatggcaggacccttgctgactacaacatccagaaggagtcgacccttcaccttgtcctccgcctccgtggtggcatgcagatctttgtcaagactctgaccggcaagactatcacccttgaggtggagtcttctgacaccatcgacaacgtcaagggccaagatccaggacaaagagggcatccccccagaccagcagcgtcttatctttcccggcagcagctggaggatggcaggaccctt

SEQ ID NO: 407570 - DNA, 459 bp, Oryza sativa
tcgtgttccaagacgccagcttcacctgcaagggtcgtgcaatatgaagcttctgatgttggtgcggacgatgcattgggcatttggaaaatagatgatgccgataacagcttctacacgcagccatttcgaatcaaatatgctagacaagacatttatctatcagttatggtgtcttttaacatattcaacagtgaagaagagggcccagcagcttcatctgttatattgaaatttgagctgatatatgccccaacgctggagaatgggtctgatattcaagcttctagtgccacttcttcggctgctgttcatgaatttagagtcccacgtcgagcactccttggttcacactcatattgtccagttcactttgacgcattccactccgtgcttgttgatctgactttactatcgtgtacctcaaagctggtgcaactaaatcatcattgaagatac

SEQ ID NO: 407571 - DNA, 428 bp, Oryza sativa
tcgtcgatctccccaatccgagagctccggaggaggggcgcggaggcggagatggcgctgctgcgagcgctgctcagatctgccgagatctcccccgatcgcaaggctgcacttgagtacctccattatctatcgagagcacagcctactcgttctctaacaggggctggcctttattctgctggcaaatcattcagcactcaggctgctactacatcaagcacaccacaacctccaccaccacctgcacctccggagaagactcactttggtgacctcaaagatgaggaccgcatttttaccaacctctatgggcagcatgaccctttcctgaaaggtgcaatgaagaggggtgactggcatagaaccaaggatttggtgcttaaaggggcagactggatagtgaatgaaatgaagaaatcgggact

SEQ ID NO: 407572 - DNA, 426 bp, Oryza sativa
tctttactgtgtcaccgacctcctccccttcggggggaaggtttacgtgttggggggcaacaacctccacatgaacatgcacatcattatcaacatggaccaggtcgcgatccatgtcaccaacccctgctgcgagctctataccatctaccatacgatccacgctgagggccagatgatccccaacatcatcgacgagctagaccatcatcatcttatctacatcctcatcatgactggcattaactagcatgtgcctcgggttgacaaggggaaggggctctacttcctgatcgataaggcggagactaatacctaccgagggctgtctgacagtgccgagctgaccagctactacaagagcgaccacttcaagaaccggccgggcgactagaaccacaactacacgagccctactgtgggcat

SEQ ID NO: 407573 - DNA, 341 bp, Oryza sativa
tttattaatctcccctcgaagcgaagcgtcgggtcggcttctcaagatgcagatctttgtgaagaccctcaccggcaagaccatcaccctcgaggttgagtcctcggacaccattgacaatgtcaaggccaagatccaggacaaggagggcatccccccggaccagcagcgtctcatctttgctggcaagcagcttgaggatggccgcaccctggccgactacaacatccagaaggagtccaccctccaccttgtgctcaggctcaggggaggcatgcagatcttcgtcaagaccttgactggcaagaccatcacccttgaggtcgagtcgtctgacacca

SEQ ID NO: 407574 - DNA, 341 bp, Oryza sativa
ttgatccacccgccggagaggaaggccgccgcggccgccatgctcagggtcggcgggaggcgcctcaccaccgccctcgcctggcgccccgccgcggcggccggcgccaggggcccgctcgccgggggctccctccccggcgacgacgaattctcgcgtgagccccagaggccgcgcttcgccgtggattccccgttcttcgccgcttcgaggggcttttcctcagaaactcttgttccaaggaaccaggatgtaagcttgactgagcttccagcaacagtgtcagctgtgaagaatcccagtgcaaagattgtatatgatgaatataaccatgaaagata

SEQ ID NO: 407575 - DNA, 479 bp, Oryza sativa
  unsure (1)..(479): unsure at all n locations
gtggtttcattgatctgggtaagctcgacatgggaggtccttttgctcaaggggcatttgggaagctttatcggggaacatacaatggagaagacgttgctattaagctgctggaaaagcctgagaatgacccagagagagctcaattgatggaacagcagtttgtgcaggaagttatgatgttgtctacgttgaggcacccaaatattgtaaggttcattggggcgtgccggaaatcaattgtttggtgtatcattactgaatatgcaaaaggtgggatctgttcggcaattccttgcacgaaggcagaacaangtctgtgcctctggggctggctgtgaagcaggcacttgatgttgctcgggggatggcttatgtgcatgccttgcgatttatccatagggatctaaaatcagataaccttctaatttcagcagacaaatccatcaagatagctgactttggagttgttcgattgg

SEQ ID NO: 407576 - DNA, 456 bp, Oryza sativa
  unsure (1)..(456): unsure at all n locations
tgtatttataaattcaatttttggtgaagagaagtccaaaactgatgctttcagttcagccaccaacagtgtacgggagattgttggtaatgtcgatggtgtccagatacggatcattgatactccaggccttcgacccaatgtgatggaccaaggatccaacagaaaaatcctcgcttctgtcaagaaatataccaagagatgccccccagatattgttctgtatgtggaccgcctggatagtctgagccgtgatctcaatgatttgcctcttctaaagaccattacttctgttctgggctcatctatatggttcaatgccattgttgctctcactcatgctgcttccgcccctcctgaaggtctaaatggtgcccctatgacatatgaggtgctaatggctcaaaggtctcacattatccagcaatccatcangcaagctgcaagagatatgcg

SEQ ID NO: 407577 - DNA, 217 bp, Oryza sativa
attgctcttgatgagagggctaatgagtaccaggggcagtacaggactattggcctctactggattgcgagagatggaggattgatgctccttctgtgtcagttcctggtcacaaaagagacctttgaaagctgcaaaatccaagtgttctgcatagcatatgaggatactgatgctgacgagctcaaggctgacgtcaaaaaggtcttgtatgatc

SEQ ID NO: 407578 - DNA, 477 bp, Oryza sativa
tcgctcagaaaacatttgctgtccttgcaaatgcacttgattgttgttccaattcgacatcaaagctaacaaattatattgctatagcacaacgtggagaatgcgctttcactgctaaagcaaagattgcacagactggaggtgcagttggtttactagttatcaatgataatgaagaactttacaagatggtttgcagtgacaacgatacttccattaatgttacaatacctgttgtaatgataccacagtcagctggaaaaaagatgaagggcctcttggatcagggagcaaggctggaggtgcagctatattcaccaaatcgaccagttgtagacctttcagcatgcttcttgtggataatggctataggaaccatagtttgtgcttcactctggactgaatttgttgcatgcaggcaagttgatgagcgttataatcagttgacacggaaggatgggcctaattctggacaac

SEQ ID NO: 407579 - DNA, 457 bp, Oryza sativa
gtctttcccgcgtttgctctcatcgtaggccgggagggacggacgcggcgagaggatagagaccaggggcggccgggcggacggacagagcaaccagcgccggctgccggcttagctagctcgcggcggagcatgccgagatccagggggtccgagctgccgcagcgagcgtcgccgcgggcgccgctgcacctcaagacgacggcctgctcggatgcgaatggcgcgcaccaccgtacagtcgtcgaccggagcagccccaagctcgccgaccgccactcgccgcgcagcccgctgcatgagaagaagcgcgcggggacgcgggtggctgagctggagacgaagctgggcaaggtgcaggacgagctcaagaagctgcgggagcagctcgccaccgccgaggccgccaagaaggacgcgcaggtcgcgctcgaggaggctaagaaacgcgttggca

SEQ ID NO: 407580 - DNA, 438 bp, Oryza sativa
tttttgtctcgtcgtcctcgcatctccactcgccaggggcaagattaagatcggaatcaacggtttcggaaggatcgggaggctcgtggccagggtggccctccagagcgaggatgtcgagctcgtcgccgtcaacgaccccttcatcaccaccgactacatgacctacatgttcaagtacgataccgtgcacggccaatggaagcacagcgacatcaagatcaaggactccaagactctgctcttgggcgagaagccggtcaccgttttcggcatcaggaaccctgacgagattccgtgggctgaggctggtgctgagtatgtcgtggagtccaccggtgtcttcactgacaaggagaaggctgctgcttacttgaaggggggtgccagaaaggtgtcatttcagccccgagcaaaagatgctccgatgtttgtctg

SEQ ID NO: 407581 - DNA, 470 bp, Oryza sativa
aatgtacattgatccaaggacggaggcaaccgtgtgcttgtcagagaagcttgttcaattggctgttactcctacacagaagcaaatagcttttcatcagcttggatgcattaggcttttaaggaaggaatataatgaagctgaacaccaatttagtgttgccttctcagctggtcatgtgtattccattgctggtcttgctagaattgctggtacaagaggtagaaagggtttggcttatgagaagctcagttcggtcataacatcaagtgtaccactagaggatgatatgggagagatctctgtattagagggtgataaaaagttgggtgaccttgacaaagcaactgagctggatccaactctcacttacccttacatgtatcgagctgcatccttgatgagaaaaaaggatgcaagacttgccttagaggaaatcaaccgacttttgggtttcagctagcattgga

SEQ ID NO: 407582 - DNA, 470 bp, Oryza sativa
  unsure (1)..(470): unsure at all n locations
gtacccggagaccccacatatccagatctgcaaggggcctcctcctccttcctcctgatcctttagcttcctatatacgattccaccatcgaaggccagggcccagacttgcttgccgcaggttactgatccaccgaaggagggaggcgcccgcccgccgccatggccgaggtgacggtggtccgtgcggagcgcgaggaggagtccaccctggagcagggtctcctcgccatcccggaggaatccaaccaacttacatacactggagatggatctgtcgacttttctgggaatcctgttgtgaaggagagaactggtagatggagggcatgcccatttatcttaggtaatgagtgctgtgagcggttggcctattatggaatctccacanaccttgttacatacttgacaaagaaactgcatgatggtaatgcttctgctgctagcaatgtgactgcatggcagggaac

SEQ ID NO: 407583 - DNA, 463 bp, Oryza sativa
tcgtttagattcccagtatcccaccaccgcatggtgcatttgtgaattgtgagtgtcgaatccaagagttggagttcgtgttcgatggggtcgcaggcgatagaggcgcacagggagggggcggaggtgtaccacggggcggcgctgtgcgcggagaaggcggtggagctcctcgcggagatccacatgccgctgggcctgctgccgctggcggagatggaggaggtcggctacaaccgcgccacggggttcgtgtggctgcgccagaagaaggccatcacccacaccttcaagcagatcagcaggcaggtctcgtacgccgccgaggtcaccgccttcgtcgaggaccgccggatgaagcgcgtcaccggggccaagaccaaggagctcctcatctgggtctccctctccgacatgttcatcgacaaggacgaccccttcaaatcacctttaagacccccac

SEQ ID NO: 407584 - DNA, 471 bp, Oryza sativa
tcgatccgcgacgagcacggcggcgacgacgaccggggccgcgacgatggccgggcgcctcctcctcctcgtacttttcgccgtcgtggcagcgcgcgtaggcgcagcggcggcctatcagcccggatctgctgaggggcacacgatcgcgggccgcatcaagatcgatgctgcaagtgcaattgcaaagggctttggtcttccagccaagacatcaaacacaaaagtgatacttaacggtggtcagagggttacatttgccaggccagatggctactttgcattccacaatgtgccagctggtactcatttaattgaggtctcctcattgggctacttattttcaccagttcgggtagacatcagtgccaggaatcctgggcacattcaagcagcattgactgaaaacagaagagttctaaatgagcttgtgttggaacctctcagagaagagcaatactacgagaaaag

SEQ ID NO: 407585 - DNA, 466 bp, Oryza sativa
ttggttatacaacttgaatggccacatccgcgggaggtccgcgcagatgaaccgggtccgcaacggtgagctctaccgttacatctgcgacaccaagggtgcttttgtgcagcccgctttctacgaggcattcggtctcactgttgttgagtccatgacctgtggtctcccgacattcgcaaccgcctatggtggtccagctgagatcatcgtgaacggagtgtctggcttccacattgacccataccagggtgacaaggcctcggcgctgctcgttgagttctttgagaagtgccaggaagaccccagccactggaccaagatctcgcagggcggtcttcagcgtatcgaggagaaatacacctggaagctctactctgagaggctgatgaccctcaccggcgtctacggattctggaagtacgtctcgaaccttgagaggcgtgaaacccgccgctaccttgag

SEQ ID NO: 407586 - DNA, 491 bp, Oryza sativa
gtcggttcgagatcgggatcggccgccggcgagcggggagcggcgaggatggggcgggggaaggtgcagctgaagcggatagagaacaagatcaacaggcaggtgacgttctccaagaggaggaatggattgctgaagaaggcgcacgagatctccgtcctctgcgacgccgaggtcgccgccatcgtcttctcccccaagggcaagctctacgagtacgccactgactccaggatggacaaaatccttgaacgttatgagcgctattcatatgctgaaaaggctcttatttcagctgaatccgagagtgagggaaattggtgccatgaatacaggaaacttaaggcaaagattgagaccatacaaaaatgtcacaaacacctcatgggagaaggatctagaatccctgaatctcaaagaactccaacagctagagcagcagctggagagttcattgtagcacataatatcaagaaagagccaccttatgc

SEQ ID NO: 407587 - DNA, 470 bp, Oryza sativa
ctttttctttggtgcccagaagacagtgcaaagctggcaattattcttgtgtgtggcggttggtctttgggctggtctaatcattggatttgttaccgagtattacaccagcaacgcatatagccctgtacaagatgttgctgattcttgcagaactggagctgccactaatgtcatttttgggcttgctttgggttacaaatcagtcatcatccctatttttgctattgctttcagcattttcctcagcttcagccttgctgccatgtatggtgttgctgtggctgctcttggaatgctgagcacaattgccacaagtcttgctatcgacgcctatggtcccatcagtgacaatgctggaggaattgctgaaatggccggcatgagccacagaattcgggagagaactgatgctctggatgctgccggaaacacaactgccgcaattggaaagggtttgccatcggctc

SEQ ID NO: 407588 - DNA, 459 bp, Oryza sativa
tttttatccgatactacaaagaagctgttcttcctagagttgatcgaagaaaggcttataaggatatcaccttttgcaaaccgactgtcctttgatgctccatcagctgttcaacggttgagatgtctggctaattttgaagccttaaagttttctaagccgatcacaactttatctgacattttagtatctcgaatgagagaaaaaagtgccgaaaacaatgggaaatatgtagcggtgcatctccgttttgaagaggatatggttgcattctcttgttgtgtcttcgacgggggtgaaaaggagaagaaggaactggatgcagccagggagaggggttggagaggaaagtttactaggccaggacgtgtaataaggcctggagcaataaggatgaatgggaaatgtccacttacacctttggaggttgggttaatgcttcgcgggatgggtttcagc

SEQ ID NO: 407589 - DNA, 270 bp, Oryza sativa
atctgcatgaagagtgtatgtagatcactcttgagatcacggagattagcctgtatatttcataagctgaaaccaaacatgtatggttttatgatatatagtagctagtacacggacaaacctctttggttgcttctttctgaagaaaaaagaagaacagacatggatgtatgatctacctgatgtgtataaattgaatgatgcagtctgagaaataatcctctgatcatattgtggattctgaaatatatccgagtttcttttttcaac

SEQ ID NO: 407590 - DNA, 486 bp, Oryza sativa
tcttttgtgctgaaggacaggacaccgcacatgaggagtttgccaaatgtcacatcatgggaaatcacaagaggccattgttactatcgagtgaatccagaaagcttatcgcataccatgaaagtgggcatgctattgttgcactccacactcagggtgctcatcccatacaccaagcaactgtacttccacatggtctttctcttggaatggtcacacaagtcgcttcaccaggaaatacttcaattagcaaacaaaaaatcttggcccgcattgatgtttgttttggtggagcagttgctgaagagctgttgtttggggagcacactgttacagctggggcgaaaaatgacctctttactgctaaagagcttgcccaaaaattggtattatactgttagaccagtgatactggtgatcgtatgcatctggaaaaatggccaagtgtacaaatgcaagccacgattaatgcagaggtgttgaaac

SEQ ID NO: 407591 - DNA, 419 bp, Oryza sativa
  unsure (1)..(419): unsure at all n locations
ttgtttaaccctagctcgccgccttcgcgcgagctgtgctccatggagaaccccaggccacaggctcctgcggggacccctcccatggctcccctccccgtgcccccgcccatcgcccccatccctgccccgcctccgcgagccccagcacccgccccggccgccgccgccgccgtcgcctcgacctccgcggcgggaggaggcggcgggggcggcggtgaggctgactacgaggtctccgatgaccaccgcgccgcgcgggagcgccacgagcgcgcggtgcaagagctgctccagcgccgccgcgccttcgccatggccgggcccaccaacgacttcccccggcgggcgcgcctccgccggctcggcgagcccgtcacgctcttcngcgagcgcgagatggagcgccgggaccggct

SEQ ID NO: 407592 - DNA, 471 bp, Oryza sativa
ttggtggtttggcggcggcgtctacatcgtcaccgggctgctgatcttttacgtcaagatcggtgagcttggtgttgcgcggaaggtgttcgacggaatgccgcagaggagcgtcgtggcgtggaacgccatgatatccgggtgcgcgcgcggcggcgcggaggcgcgggcggtggagatgtttgggtcgatgcgggcggaggggatgaggccggaccagttcacgttcgcgtcggtgctctgcgcgtgcgcgaggctggccgcgctggagcacggccggcgcgtgcacggcgtcatggtcaagtcgcgcgtcggcggcggcaacgtcttcgtcgacagcgcgctcgtcgacatgtacctcaagtgcagcagccccgaggaggcgcgccgggcgttcgcggcggcgccggcgcggaacgtcaccatgtggaccgccgtcatctccgggcacggccagcacgggcgcgccgc

SEQ ID NO: 407593 - DNA, 449 bp, Oryza sativa
  unsure (1)..(449): unsure at all n locations
tgttctccgcatcagcagcagcaagcagctaatggggcgacgtacgcacaccgcgggccggggcgagatggcgcagtcgatgctggtgtcgggagccaatggcacggtggccgccgcgagcaccagcaggctgcagcccgtgcggccgacgccgttctcgcggctcgtgctgtcgcagccgtcgtcgtcgctggggcgcgcggtgtccgtcaagacggtggcgctgttcggcaggtccaagaccaaggccgcgcccgcaagaaaggctgagccgaagccaaagttcaagaccgaggacggcatcttcggcacgttcggtgggatcggtttcaccaaggagaacgagcttttcgtcnggcgtgtcgccatgctcgggtttgccgcgtcgatcctgggtgaggccatcaccgggaagggaattctggggcagctgaccttgagacggggat

SEQ ID NO: 407594 - DNA, 456 bp, Oryza sativa
ttcaaaccctagccgccgccgccggcgtactcgagagaaacatcagcatccatggcgggcaagggcgagggtccggccatcggcatcgaccttggcacgacctactcgtgcgtgggcgtttggcagcacgaccgcgtggagatcatcgccaacgaccagggcaaccgcaccaccccctcctacgtcggcttcaccgactccgagaggctcatcggagatgctgccaagaaccaggtcgccatgaaccccatcaacaccgtcttcgatgccaagcgtctcattggcaggaggtttagcgatgcttctgttcagagtgacattaagctctggcccttcaaggtgattgctggacctggtgacaagcctatgattgttgtccagtcaagggtgaggagaagcagtttgctgccgaagagatctcctccatggtcctcataagatgcgtgagattgctga

SEQ ID NO: 407595 - DNA, 416 bp, Oryza sativa
ctcatcgtcgacgaggaataaggcggcggcgggggcggaagctaaggcggcgaggatgcagtacaagaacctggggaggtcggggctgcgggtgagccagctgtcgtacggggcgtgggtgacgttcggcaaccagctggacgtgaaggaggcgaaggcgctgctccaggcgtgccgcgacgccggcgtgtacttcttcgacaacgccgaggtgtacgcgaacgggcgcgccgtggagatcatggggcaggcgatgcgggacctcgggtggcgccgctccgacgtcgtcgtctccaccaagctcttctggggagggcagggccccaacgacatgggcctcttccggaagcacatcttcgagggccttcgggggtcgctcaagcgcctcgacatggactacgtcgacgtcggctact

SEQ ID NO: 407596 - DNA, 277 bp, Oryza sativa
tcgtttcaatcttgcttttccacattcttcttcggcggcgggtggtttccaccgggttccgaacttcgagggaagcaacgccgcacccgggcggtggcggcggcggcatggcgttcgagaagatcaagggcggcaaccccatcgtccagatggacggggatgagatgaccaggatattctgggaggctatcaagggcaagcttatctttccatttttggatctggacattaagtactatgacttgggaggtcttcaccgggatgcaactggtgacaa

SEQ ID NO: 407597 - DNA, 495 bp, Oryza sativa
tcgctatcgtggtgctctttttactgcattggtgtgggatctatgctctcacttcaggaattgctgggtatattgcaacctctttctactgtcagctagagggaacaaactgggtgaggaacttgctgttgacaggatgcctgttctgtggacccctattcctgactttctgcttcctaaacactgttgctattgcttatagtgcaacagcagctttgcccttcggcactatctgtgtcattgtgctcatctggaccttagttacatttccccttctagttttgggaggcattgctggtaaaaacagcaagactgaattccaagctccctgccgtaccaccaaatatcctagggagattcctccactttcgtggtaccggcaaacaatcccgcagatggctatggctggggttttacctttcagtggcatctatattgagctctactacatctttgctagtggtgggggcacaggatttacacaatttacagcat

SEQ ID NO: 407598 - DNA, 294 bp, Oryza sativa
  unsure (1)..(294): unsure at all n locations
ttgattaaattaaaaagaaaatcacggcgcgggggcttgcagagacagcaatggggagagttggtgccgccgcggcggtgctcgtgctggcggcggcggcggcggccatggccgccgagccgcccaccgatgacggcgcggtccgggtggcggcggggctgacgaagtgcgtgtccgggtgcggtagcaaggtgacctcctgcttgctcggctgctacnggcggcggtgtcgccgaccgacctcttcctgacaggaatgccgttctgcctcatctgctgcacttggcgtcgttt

SEQ ID NO: 407599 - DNA, 421 bp, Oryza sativa
ttctttgaagcatactctggtattcttcaagggtgggagagctcccctaagacacaattactgatgcagtatgctcccaatattcttaatttccttgatgctctttacaatgggaaggatatggatgatactgtgatgaagactgcgataggtgtactgggagatctcgcggacacgttgggtgtccatgctggccctttgatcaatcaatctatctcaagcaagaaatttttggaggagtgcttagcatctgatgatccactggtcaaagagtcagctgattgggcaagggttgcaatcagccgtgcggtttcaggttgaggtcacattgggcttgagtctgcacatgcatcattccacttgtcatggtcgggtcttggttgcatcatgtctagacctgctctttggagaaggcaaccca

SEQ ID NO: 407600 - DNA, 371 bp, Oryza sativa
ttttctagaggcatgagaaccgctaacttatgaccgtcatactcaagaacaagttgatattcaggggatttgtgatcacggactgtcaagcgtgggtcaggatcacgacgcccccgcacaggcactactaccacttgctccaggagacaagccacgcggacattgacatggcgctgatcccgtacgactacccggagttcggagtcgacctagctacgcatgtgtcgaacgggtcgatcaagctggacaggatcagcgacaccgacagccgcatactccgagtcaagttcgccatgggcctgttggagaaccctgctcccggacccgcgcctctgcggaaagctgggcgacaaggagcaccggctgatcgc

SEQ ID NO: 407601 - DNA, 294 bp, Oryza sativa
ttcatgcgtccgagctgatggtgatgctgatcgcaacatgattctgggtaaaagattcttcgtaacaccttcagattcggttgccattattgcagccaatgctgttcagtcgattccttacttttcttctggccttaagggagttgccaggagcatgcccacatcagctgcccttgatgttgacgctaagaatttgaatctcaagttctttgaggtgcctactgggtggaaattttttgggaacttgatggatgctggaatgtgctcaatccgtggtgttgaaagctttggcac

SEQ ID NO: 407602 - DNA, 321 bp, Oryza sativa
gtgtttgtgacactacatatagcggaagggatgtagactgtattgaggaatacggaccccttgcactatataaggaggggtccgggtgccaataggggcacgatattgacccagatcatacaatcaataatacactcggccggatcaatccccggacaggagtggggcattacttgttgattaagaaggcctgaacctgcataaaaaaccttgtctctaaacccatctacttttctagcttgatagccaccccttttagtattgccgaaatcttgtctcgacaatagcccttaaatctttactatgcctaaaattctatac

SEQ ID NO: 407603 - DNA, 496 bp, Oryza sativa
  unsure (1)..(496): unsure at all n locations
gtgcgtcgtccacatctccaagaacttcatgaccctgcccaacatcaaggtcccactcatcctgggtatctggggaggcaagggtcagggaaaatccttccagtgtgagctcgtcttcgccaagatggggatcaaccccatcatgatgagcgccggagagctggagagcggcaacgccggagagccggcgaagctgatcaggcagcggtaccgtgaggcggcagacatcatcaagaagggggaagatgtgctgcctcttcatcaacgatctggacgcgggtgcaggtcgcatgggaggcaccacccagtacacggtgaacaaccagatggtgaacgccaccctgatgaacatggccgacaacccaaccaacgtgcagctccccgggatgttcaacatggaggacaacccncgtgtccccatcatcggtaccggcaacgactttttcacgcttgtacgcgcccgttattcgtgacgggcgtatgaagaagttttact

SEQ ID NO: 407604 - DNA, 509 bp, Oryza sativa
tcgttcacttctctgcttgtgttgttctgttgttcatcaggaagaacatctgcaagttatacatatatgtttataattctttgtttcccctcttattcagatcgatcacatgcatctttcattgctcgtttttccttacaagtagtctcatacatgctaatttctgtaaggtgttgggctggaaattaattaattaattaattgacttgccaagatccatatatatgtcctgatattaaatcttcgttcgttatgtttggttaggctgatcaatattattctagagtctagagaaacacacccaggggttttccaactagctccacaagatggtgggctagctgacctagatttgaagtctcactccttataattattttatattagatcattttctaatattcgtgtctttttttattctagagtctagatcttgtgttcaactctcgtaaatcatgtctctcgccactggagaaacagatcaggagggtttattttgggtataggtc

SEQ ID NO: 407605 - DNA, 439 bp, Oryza sativa
ttctttgaagtgactaagagggttgcacacataaaaaatgttatcgcggctgtcgaacaagaatacgagaaggaaaagctcaatgagaggattgcatagcttgctggtggtgctgcagtcattcatgtgggagcacaaacagagaccgatctaaaagagatgaagttgagagttgaggatgccctaaatgctaccaaggctgctgttgaggaaggccatgttgatggtggagggggctctctgatgtgtctgtcgcatggagtacactccgtgcatgactacctggtgacctatgagacggaggtaggagttccacatgtgaggagagcactggacgactcatttttgtcgcatgtttcacatggttatgttgcctgaagtaggagccacacaaaggaaaatcatatctctctcccatagcctgagtccgatccccacc

SEQ ID NO: 407606 - DNA, 375 bp, Oryza sativa
gtctttattaaagactcccatcaactatttgcacacaccctccctgtggataccatctgcctctatccagacgcagattgagagccaaagacattatattgatcttatcacgagggttgtgctagcagactcttgcccgcagcagactgacatactgctagccgcatccccaccgagaataccaagatgacgttctctggtacacaggacaagtgcaatgcttgtgacaagaccgtgcatttcattgatctcctaaccgcggacagtattccctaccacaagtcttgcttcagatgcagccactgcaaaggcacactttcgatgtgcagctattcctcccatggatggggttctttactgcaagacccattttga

SEQ ID NO: 407607 - DNA, 418 bp, Oryza sativa
gtacttcgaggccgggcacaagccgtgcgcgcaggcgttcggtgccgaccagttcgaccagaacgacgccaaggagtccgtgtccaggagctccttcttcaactggtggtacttcggcatgtgctccggcaccgtcatgaccaccatggtgtcctgctacatgcaggacaacatcggctggggcctcggcttcggcatcccctgcctcgtcatggcgttcgccctcgcaatgttcttgctcgggacaaggaactaccgctactacgtctgcacccagtccagccccttcgctcgcctcgccagagcgttcgtcgcgctcatcagaggatccaaagacgacgctttgcccgtgtggacgatgacgactgcggcgaccaccgagaggagctgagaggcgtgctgcggttgtttcccgatt

SEQ ID NO: 407608 - DNA, 162 bp, Oryza sativa
  unsure (1)..(162): unsure at all n locations
cgtcagctctctcagctctcacagctcactgcatcaatggccgcggccaccatggcgctctcctccccggtgatnggcccgcgcggcgccgcgacctactccgcgctcttcggcgaggcgcggctcaccatgcgcaagaccgccgcgaagcccaagccggcg

SEQ ID NO: 407609 - DNA, 354 bp, Oryza sativa
ttcgatccggcgatccccggcgagcgagagatcgaagcaagctgctacacagatctcacgacatggccgaggcggcgtcggcggcggcggcggcgacgacggagcaggcgaatgggagcagcggcggcgagcagaagacgcggcactcggaggtcggccacaagagcctcctcaagagcgacgatctgtaccagtacatcctggagacgagcgtgtacccgcgcgagcacgagtgcatgaaggagctccgtgaggtcaccggcaaccacccatggaacctgatgacgacttcggcggacgaggggcaatttcctgaacctgttgttgaagcttattggcgccaagaaaaccatg

SEQ ID NO: 407610 - DNA, 414 bp, Oryza sativa
tcttgcactcccaactcctctcctctccttcccactactctcgcgaggaggaaagcgaagccaagcgagagaggcttccgccgtcgccttccccttcgccttccgatcggtcgcgaggtttcaagatggcgacgtgcacacttgcaacttcatgtgtgtccttgagcaatgctagaactcaggcctccaaggtggcggcggtcaagagcccggcatctctaagcttctttagccaaggcatgcagtttccaagcctgaaggcctcctccaagaagcttgactgtctcggcaatggctacctacaaggtttagctcatcacaccagaagggcaagagcacgagttctaggctccggatgtcacctacattcttgatgccgccctgaccgctgtagtagagctttcctacttatgc

SEQ ID NO: 407611 - DNA, 433 bp, Oryza sativa
ttgttgagagagcccccctacgacgacgacgaccatggcgctcgcctgcacctgcgccaccgcgtccgcggccgtgctcaagacgcccttcctcggggcgaagcgcgcgctcgccaatgccgtcggcgtcgcgggcgccaagcccgcgccgcgccgcgcgctcgtcgtgtcggccaagaagtcgtggatcccggccttcaagagcgacgccgagttcatcaacccgccgtggctcgatggctcgctccccggtgacttcggcttcgacccgctggggctgggcaaggacccggcgttcctcaagtggtacagggaggcggagctgatccacgggcggtgggcgatggcggcggtgctggggatcttcgtcgggcaggcgtggagctggcggcccgtggttcgaggcccggggcgcagacggaggccatcgcgc

SEQ ID NO: 407612 - DNA, 401 bp, Oryza sativa
ttcgattaccagggccacatcgacgctgctgctgctgctgctgctggtttcggcaacatgggcggcatcggcgccgacgacgagtcgggcgaggaacgtgataacacacgtgaaggggttccaagggaggctgccgtccacctggagacggggtatgggaggtggacaacaccgataccgttgagctcttctactacttcatccagtcggagcgcagccccgacgatgaccccctcatcctctggatcaccggcggccccggctgctccgacctctccggccttctcttcgagattggccctcttaagtttgacgtatctgggtacacagaagggttcccttaattgatctacttccaagatttctggaccaaggtgagcaacgtgatatttgtggtcgcg

SEQ ID NO: 407613 - DNA, 259 bp, Oryza sativa
tcgtgcctcagctgtggccgggccgcgcccgagcgtgagcggactacagtggcagcttgctagctcacaggcgtggctggccgccgcccgccgcgcgcgcgatcggtggcgaggcggagatgctgcgggcggcgaagtacctgctgggttcccctggcgccaacggcttcggctccaagtccaccgccgaggacgtatgccccgacctcggctgcatcaccgccatcatcacaggcgcgacgtccgggataggggcgga

SEQ ID NO: 407614 - DNA, 494 bp, Oryza sativa
tcgtaaaaaggaagagcaagaagaagctctgaaacaactaaggaagaatctggttattagagcaaaacccatgccaagcttctatcaagagggtcccccacctaaggttgaacttaagaaggtgcctccaactcgtgccaaatcaccaaaattgacacggagaaagagctgcagcgatacccctcatacaccagagggtaaaaatggaagtgcagcatgttgccggttacatcgtcacagtattgggaactccaaagaagttaacagcaggacccaatgttctccgaagagtgctccaaagactggagtagccgcaaaacccagagcgaccaagggcgtcatgaagaatgtgggaaagccaggtgctgcgaatgttgctgtacaaacctaactcatgatccattcccattcccgtgcaatttttcgatttaatttattccttacatcgccgatgacggcatcattgtcccgaccacagtgagtttgttgctgga

SEQ ID NO: 407615 - DNA, 519 bp, Oryza sativa
gtcgttggcaccttacttttccccttgggcgctaatggtcactatgtctcagcagcaaagtttgtgaatgcaaatacgctgactattccgacaaagttagaatcaggcttcaagattgaaccacgggttctagctgacacacttgagacagtatctaggccatgggtttatatttctggccccacaattaaccctactggtttcctgtacagtgacagtgatattcaagagctcctttctgtttgtggtaaatatggagctagggtagtaatagatacctccttctctggtctggaattccaaactgatggctggagtcgatggaatttggaaagatgtctttctgctgtgaattgtccaaaaccctcgttctctgtagctcttctcggagaactgtcctttgagctgactgctgcagggcatgactttgggtttctgattttgaatgactcatccttggttgacacatttcacaggttccaagcttgagtccgtcccacagtacgctgaaggacactt

SEQ ID NO: 407616 - DNA, 366 bp, Oryza sativa
  unsure (1)..(366): unsure at all n locations
tctgtacggacacggccacaccacccaccaactgagagctgagcaggcgagcgagcggacatggcagcatcgctccaagccgcggccaccctgatgcagccggccaagctcggcggccgggcctgctccgccgcgctgccatcgcgcccgtcttcgcacgtcgccagggcgttcggcgtcgacaccggtgccgccggcaggatcacgtgctccctgcagtcncgacatccgggaggtcgccaacaagtgcgccgatgccgccaagctcgccggcttcgccctcgccaccttagctctgctcgtctcgggcgccagcgcggagggcgtgcccgggaggcttaccttcgacgagattcagagtaagac

SEQ ID NO: 407617 - DNA, 203 bp, Oryza sativa
tcgttctcagctgtcacagatcactgcatcaatggacggggccaccatggcgctcacctacccggagatggcccgcgcggcaccgtcgacctcctccgagctctggggcgaggagcgaaccaccatgcgcaggaccgccctgaagcacaagcaggctgcttggtttgacgagctgacgatcgaatagaagaggacagctaacg

SEQ ID NO: 407618 - DNA, 500 bp, Oryza sativa
  unsure (1)..(500): unsure at all n locations
tgtagttttcccgcaggcggagctctctctctctctccggcaaatcggcgaggatggaaatgttctttggcagttttcttaatgaatcagcatcacaagagtacttctctggtcgtccaaatgtcgagagatgcccattcctgagaaacatcaatggagctacaacattttcattttcttctgctttgccagtagctgcccgaggagccaagggtccaatttttgaggacggaccaggctttgattcagcatttaaacttttccatggacgggatggaatagttccgctttcaggaaagtcatatgtacctgatgagaacaacagcgagagcgttgatgccaagcctgaacctgctctgccgtttaacccattggctgctagagctgccacaataagtctatctgcatttgggccattcngctgtaacttctttaatggcaagggcaaaaggcagaacatgaagctcaacaatctaaatcagtcaaacaagaagcccagc

SEQ ID NO: 407619 - DNA, 505 bp, Oryza sativa
gtgatgctctagtcagagaaacgaatcctctcgcgtcctcaagatgcagatctttgtgaagacattgaccggcaagactatcaccctcgaggtggagtcctgtgacaccatcgataatgtcaaggctaagatccaagataaggagggcatccccccggaccagcagagtctcatcttcgttggcaagcagctggaggatggcaggacccttgctgactacaacatccagaagcgagatacccttcactttgtcctgcagctccgcggtgtgaactatacctgaaagcaagatgaggaccggcagacccttggtgactacaacatccagaaggagtcaacgcttcaccttgtccttcatcaaacaggaaggatttaaaatctttgttaaagacttttaccgggaagaccatcaccctcgaggtggagacttctgataccatcgacaatgtcaaggccaagatccgggacatggaggcattcccccgtaccagttacccttattttt

SEQ ID NO: 407620 - DNA, 367 bp, Oryza sativa
gctgaagtactacatgatactaaacaggagtacaacgcgacggtggagttctactgggcgccgttcctggtacagtccaactcggacgacccgcaggtgcacagcgtacgtgacagggtcatcgcgtggcgctccatcgcaaagcacgccgccaactggaagggcgtccactacctcgtcttcaatacctacatctggtggctcaacaacttccagatcaaagtgctgaaaagcagaggtgctccgtttgcgggcagcggggtggtggagcagccggtacgcgctggtagaccgagcgatcgcctacagggaggtgctaaaggacggggccaagggggtggacagtggtttcgaccccaacaaaacc

SEQ ID NO: 407621 - DNA, 507 bp, Oryza sativa
tcgttaggacaaagagggcatccccccagaccagcagcgtctcatcttcgccggcaagcagctggaggatggcaggacccttgctgactacaacatccagaaggagtccaccctccaccttgtcctccgcctccgtggtggcatgcagatctttgtcaagacactgaccggcaagaccatcaccctcgaggtggaatcttctgacaccatcgacaacgtcaaggccaagatccaggacaaggagggcattcccccggaccagcagcgtctcatctttgccggcaagcagcttgaggacggcaggacccttgctgactacaacatccagaaggagtcaacgcttcaccttgtcctccgtctcaggggaggcatgcaaatcttcgtgaagactctgaccggcaagaccatcaccctcgaggtggagtcttctgataccatcgacaatgtcaaggccaagatccaggacaaggagggcattcccccggaccagcagcgcctcatctttgc

SEQ ID NO: 407622 - DNA, 407 bp, Oryza sativa
tttttgtgataaaaaattgatggcggtctttattaataataaagccatttctaacccaagacactatacatagtttctataaacttcatatcatgtactagacactactcttccaatgcaaacaccactattccatacttaaatttaatactacttatctcacataatatcttggatgttgtgtagaaactatgtctcatgcaagacatggtttccttctcttttctcatttattcacttgccacatcattttttatcctaggtggcagcttatttaatactatagataccatcatagttattgggttgggaaatggcctaacatcgacgatccatataaacacaagacagttttttgaccagcacaatgatgcggatagagaactagtcgttgcccggctcagatc

SEQ ID NO: 407623 - DNA, 161 bp, Oryza sativa
tcgtcctcagcagcagcatcaggggaagggtctagaagcttctagaagcttcttccgagatgaaggtgatcgagaagatccaggaggcggcggcggatgggcggacggagttctcgttcgtgtacttcccgcccaagacggcggaggggctcgacttctct

SEQ ID NO: 407624 - DNA, 360 bp, Oryza sativa
tcgttctcgcccccgcaccaccactccctcctgctgcatctgctccgctcccgatctcacaaccaccgactcctcctcctcgcgcggcggcggcggcggcgtgagccagcagcagccatggtgctgttctcggtgacgaagaaggccaccacgcccttcgacggccagaagcccggcacctccggcctccgcaagaaggttactgtattccagcagcctcattacctgcagaactttgtgcaatccacatttaatgcccttcctgccgacaaagtaaaaggtgcaaccattgttgtgtctggtggaaggcccgtatttcttggaggatgctgttcagaaccataccaaaatgggtggccg

SEQ ID NO: 407625 - DNA, 301 bp, Oryza sativa
tcgtgccccttcttctccttcttcttcttcttcttctccctcaccatcaccaacaagagagaggaggagtggattcatcgatcgagaagtcgaggtagtacatacgttggattggattggaggaggagaatgcctcgcggtgggttctcggggtcgataagctcgcccaggatcgacgtcaccatcgacatggggaaccccttcctaaaccgcaccgtcgacggcttactcaagatcggcgccgtccgggcgtgcaaggagatcgtcaaagacacatttgactgccttcacagaggggatg

SEQ ID NO: 407626 - DNA, 307 bp, Oryza sativa
cgttcttttcggaggagctctgcctgaccatcaacccagatgaatgtgatggttatggtgctgctgtccaggttgccatctggcgtgacgtgggcctcgtgaaggtgcaggacctccttctggtgaacttcatgcttctgtctcttgcgacggagaccagttgcttggacatgagcgacttgatcccaaggaacaggaccattgccaccaagaaggagcaggtcttctccacctactgtgacaaccaggctgttgtgctgatccaggtttatgagggtgagaggaccaggacacgtgacaacaacct

SEQ ID NO: 407627 - DNA, 448 bp, Oryza sativa
tctttttctcttaacttgttaattcgacgggaggctcgtgagttctccagtgaactccgtgctggttcaaaggcatcgaagagcagtacaccattatttgagggtcctgcaagtgcaaaccagtcgattagtattaccgatactactgcagacgcatactgcaaaatgattacggttttcattccactgcttgttgacgagagctcattctttgcacattttatgtgctttgatgttgctgcgctagctccgtcagatgaatcagataacaataatcctgttgctgcttcagaacctcctggaagcagtgccaaaccaattaacagttcagctgagttgggagtactaaaccaattccttcaagagttgcttgatggtattcaggaggacttctatgctatagttgactgggcattcagctagatccttgagttgtatatcaatgcat

SEQ ID NO: 407628 - DNA, 327 bp, Oryza sativa
tcgtttagtatcgaatcctctcttctcctcgtgcccaccaccaccaccgtagcaatggcgggcaacgggccgatcaacaaggaggacccgctcaactggggcgcggcggcggccgagatggccggcagccacctcgacgaggtgaagcgcatggtggcgcagttccgcgagccgctggtcaagatccagggcgccaccctccgcgtcggccaggtggccgccgtcgcccaggccaaggacgccgccggcgtggccgtcgagctcgacgaggaggccctcccccgcgataaggccagtagggagtggatcctgaactgcatcggccac

SEQ ID NO: 407629 - DNA, 424 bp, Oryza sativa
tataaaaggaaaaaaaaacaaaacacaccaagccaaataaaagcgacaatgggatcgctcaccaccaacatcgtcctcgccgtcgccgtggtggcagcgctggtcggcggcgggtcgtgcggcccgcccaaggtgccacccggcccgaacatcacgaccaactacaacgccccgtggctccccgccagggccacctggtacggacagccctacggctccggctccaccgacaatggtggcgcgtgcgggatcaagaacgtcaacctgcctccctacaacggcatgatctcctgcggcaacgtcccaatcttcaaggacggcaggggatgcggctcatgctacgagctgaagtgtgagcagccggcggcgtgctcgaagcagccggtgacggtgttcatcacggacatgaactacgagcccatct

SEQ ID NO: 407630 - DNA, 489 bp, Oryza sativa
tacctacagtccagatcaggtgctggtgagcaatggagctaagcaatgcattacgcaagccgtacttgccgtttgctcacctggtgatgaggttttgataccagcaccatactgggtcagttatcctgagatggctacattggctggtgcaactccagtgatccttcctacaagcatatcagagaatttcttgctaaggccagagctgcttgcttcaaagatcaacgagaaatcgaggcttttgattctctgctctccttctaatccaactggatcagtatatccaaaggagctgcttgaagaaatagctgacatagtcaagaagtatcctaggcttcttgttttgtctgatgagatttatgagcatatcatctatcagccagcaaaacacacaagctttgcttcattgcctggaatgtgggatagaacattaactgtaaatggtttttctaaagcttttgcaatgaccggcttgcgacttggatacct

SEQ ID NO: 407631 - DNA, 251 bp, Oryza sativa
tacgcactgacacactcagcttaagcgagcgagcgagtgaacgagagagagagacagagatggcgagtgttgcctccttcccggcgatcaacatggagaacctggagaccgaggagaggggcgcagcaatggaggtcatccgcgacgcctgccagaactggggcttattcgagatgctgaaccatggcatcgtgcacgagctgatggacgaggtggagcgcgtgagcaaggcgcactacgccaactgccgg

SEQ ID NO: 407632 - DNA, 325 bp, Oryza sativa
tgtttgactcccgaggagtatgaaaagaagggggaatcggccaggagcttcaattcttcggcactacatggaataataaaggcctggaatgctcttgattaccatgattttattaattcatcgataacccttctcacaaagtttcctgaagtatacgacgagtgccgaaatacatggcaggcaatagtagttgatgagtttcaggatacaagtgctatgcaatattatcttttaaagacactagcatcccacaaccgcataactattgttggtgacgaaaatcagtccatcttcagtttcaatggggctgatgtctctggctttg

SEQ ID NO: 407633 - DNA, 360 bp, Oryza sativa
ttcacttctccccccggaatatctccgccaagagaagagaagagacacccaacaacccaaaacctagcgcctctgcgctcgaggcccccccgaatccgcgaatccgccgactcccatggcgagccagggagagccctcctcctcctccgatccgaaggggaagaaggatttctcgacggcgatcctcgagaggaagaagtcgccgaaccggctggtggtcgacgaggccaccaacgatgataactccgtcatcgggatgcaccccgacaccatggagaagctccagcttttccgcggcgacactgtgctgctcaagggtaagaagagaaaagacaccatctgcattggtcttgctgatga

SEQ ID NO: 407634 - DNA, 511 bp, Oryza sativa
tgcacattttccccaaataataatagaggaaggggaaaaacacatttgcagccacatcatccatggcctctctccgcaccattccggtgatcttcggcatcctcttctatgtccttgccagcactgccactgccaccgacgcaccggactacgtcgtccaaggccgtgtctactgtgacacgtgccgcgccgggttcgagaccaatgtcaccgagtatatcaagggtgccaaggtcaggctggagtgcaagcactttggcaccgacaaggtcgagcgtgcgattgacggtgtgactgatgagaccgggacatacaagattgagctcaaggacagccatgaggaggacatctgcgaggttgtcctcgtccacagcccccttgcaaactgctctgaaatcgaggccgaaagggatcgtgcccgtgttctgctcaccaggaatggcggcttctgtgacaacctgcgcttagccacccactcgggtacctcaagggccatccactgcccgtctgc

SEQ ID NO: 407635 - DNA, 285 bp, Oryza sativa
gccgaccacacccgcccgtagctctcctctagccggtgcacccacctgggctcccaagatctcacctttgcaccccctccgcccgcgacttgagccgggcctgtcttcccccggccggccccgtcggcgagcttctccggatcgaccccgccgaactccgctcgcccttcgagctgaagaagcagatctcgtgctcgatgcagctatcgaatctcagggacgactacatggccttcaaggtgaaacctccaggccaaaagaagtatacggtgcggcctaacacag

SEQ ID NO: 407636 - DNA, 506 bp, Oryza sativa
tctcactccactaaccagagagagaacgcagctagtagcattattagcatcatgaccgcgatggcggcggcggcggcggtgttggtgtcgttgctgctggtggcggcggctgcggggcagcaggcggcgctggtgccgggggtgatgatattcggggactcggtggtggacgccgggaacaacaaccggctggcgacgctggtgcgcgccgacttcccgccctacggccgcgacttcccggagacgcacggggcacccacggtgcggttctgcaacgggaagctggccaccgactacaccgtggacaacctggggctcaccttctacgcgacgtcctacctaggtcaggtcgcccagtccgacaaccgctccctcctccacggtgccaacttagcctacggcgcctacggctacctggacaccaccgactccctctacggggcgatatcgctgagccggcagctggggtacttcaaggagtacaagacgaaggttgaggcggtggc

SEQ ID NO: 407637 - DNA, 504 bp, Oryza sativa
tgagagactctgccgggttcctgaagattagttcaggttctgttgtgcttccaattgggaagttatcaatcggtctttgccggcaccgatcgttgctgtttaagaccttagcagacactatcagtctcccatgtcgagttgtgaggggatgcaggtactgcaaatctgctggtgctgcttcatgcctggtgcactttggtaatgacagggaatatctgattgatttgatagggaacccaggcttcttatctgaacctgactccctcttaaatgggctctcatccatttcagtttcttcaccattgcgcccaccaaaatacaattcagctgatattgttaataacttcaagtcattggcgaagcaatatttccttgattgccaatcgctaaatatgatgttcaatgatccagcagcagggacgggctgttgactcagatgaggccatgggatcaaatattggtccaaacttatcaccctgcacaaacagtgattttcaagctaac

SEQ ID NO: 407638 - DNA, 523 bp, Oryza sativa
tttccgccgccgccgcagcctcctcctctcgccatctcccgtcctctccttcaagtcagctacctgcttaatcaaccatgggtaaggagaagacgcacatcaacattgtggtcattggccacgtcgactctggcaagtcgaccaccacgggccatctgatctacaagcttggaggtatcgacaagcgtgtgattgagaggttcgagaaggaagccgctgagatgaacaagaggtccttcaagtacgcgtgggtgctcgacaagctcaaggccgagcgtgagagaggtatcaccatcgatattgccctgggaagttcgagaccaccaagtactactgcacggtcatcgatgcccctggtcaccgtgacttcatcaagaacatgatcacgggtacctcccaggctgactgtgccgtgctcatcattgactccaccactggtgttttgaggctggtatctccaaggatggccagacccgtgagcacgctcttcttgctttcactcttggtgtgaagcagatgatct

SEQ ID NO: 407639 - DNA, 455 bp, Oryza sativa
tcacgcgtccgggaggggtaagaagctccaagaggaatgggcggttccagtgaaatctgttgaagacattaacgagcgattcatgaacttctgtcaaggaaaacttacaagcagcccatggtctgagcttgatggccttcaacctgagacaaagataatagacgaccaattggtgaagattaaccagaagggcttccttaccattaacagccaacctgctgttaatggagagagatctgattcaacaagtgttggtggggggtggccctggaggctctgtttaccagaaggcctatcttgagctcttctgttcaaaagagaagctggatcaggctattgagaagagcaagggcgttcccttttgtaacatacatttgccgtgaacaaggaccgggagtcattctaaaacattcccacaaccgctgggattgcggtcccctgtggttgttctccct

SEQ ID NO: 407640 - DNA, 511 bp, Oryza sativa
tggctttatgtgttatgtctattttctgcccaacggtgatgtagacttaatacataataattttaatgttaattttgttctcacaatacatgattatctcagatggctactccttgatgggttacattaaagatattccgaccctgaaaggagataactacgaagaatggaaaagagaactcgaccttgcttttatcttgggagaggtggactgggtgttgactaccccatgtcctatagaacctgctgaaattttcagaggtgaaaaagagtcagatgctgaatggcaaaagagagagagggacaatgcttccctcatcatgtcgtatgacattgagcatgcgaaatggtcttcagccaacaagaattgtttggctgcggtaaagaacacgattgagccaaccatattgggctcaatcccagagtatgacactgtctctaagtacctcgaaagtataaagagcccgtttactggttcttcaagttttatgcgacacagctgataaagcag

SEQ ID NO: 407641 - DNA, 391 bp, Oryza sativa
ttgcacactgacattcttcgagttccattcaggagtgagaatggtatcctccgcacgtggatctcccgttttgatgtctggccattcctggaaacatacactgaggatgttgcaaacgaaattatgagggaaatgcaagccaaacctgatctcatcattggcaattacagtgatggaaaccttgttgccactctgctggctcacaaattaggagttacccagtgtaccattgctcatgccttggagaaaaccaaataccccaactcagacatatacttggacaagtttgacagccagtaccacttctcatgccaattcactgctgatcttatcgccatgaatcacactgatttcatcatcaccagtacattccaagacattgctggaagca

SEQ ID NO: 407642 - DNA, 463 bp, Oryza sativa
ttgaacatggagctccacaagtacatgaacaattctttccagcacatcaaggccatgtgtaaatctcatgattgcaacctgaggatgggggcgttcaccctgggagtcaaccgggttgcacgtgccaccctcttgaggggatgggaggcatgaggccattaacaacactcatatccatgtccgaaaatgttggacgaccaatgtctgatctgataaattcatcagaagtggccggcttggaaggagctcacttgcaataatattcaagatagatcggcgtcggcgtccttccaccgttccggcgaaaaataataataaatatattaagggtacctaacaaaaatgtgatgtttcttctttcgtttttacaaaaggccgattcaatcgtgcgtgattatagtattgacaaaaaatggtgtaagctctagaggcaatttgaatttcacaaaggttgtattctgtc

SEQ ID NO: 407643 - DNA, 490 bp, Oryza sativa
ttgacgcgtgggctctacccacccaccctctcgccgtcgcagatccgatccaggaagagctcgccgccgccgctgccatggcgctctccgtggagaagacctcgtcggggagggagtacaaggtgaaggacctctcccaggcggacttcggccgcctcgagatcgagctcgccgaggtcgagatgccggggctcatggcgtgccgcgccgagttcggcccctcccagccgttcaagggcgcccggatctccgggtccctccacatgaccatccagaccgccgtcctcatcgagaccctcaccgcccttggcgccgaggtccgctggtgctcctgcaacatcttctctacgcaggaccacgccgccgccgccatcgccagggactccgccgccgtgttcgcctggaagggggagaccctcgaggagtactggtggtgcaccgagcgctgcctcgactgggcgtcggcggcggccccgacctcatcgtcgac

SEQ ID NO: 407644 - DNA, 252 bp, Oryza sativa
tgttgctgctggggaagtaggcctgctcgcacatggaaaattacctctattgaggattgcaatgtatatgttggaactctggaaactttcatcgaggaaagggacactgtaactaacaagggaccctatgatggggggaaaattgaaggaagaaaccagggtcctgtgcttgcagtgtgggaacctgatctgagggctgagcttcctatactggttgtgcccaccacctaagtaatggtcaagaaccctcac

SEQ ID NO: 407645 - DNA, 440 bp, Oryza sativa
tgattttagccgccgccgccgccgacgccggtcacccgcgccttcgacgagctccagcccgtagacctcgccggatctccccggtggccgtgaccttcaccgacctccacaccgccggcgggctcaaagccctcgagcagcacctctgcggcaagacctacgtctccggaaacgcgatcagcaaggacgacatcaaggtgttcgccgccgtgccatcaaagcctggagctgagttcccgaacgctgctcgctggtatgataccgtcgctgcggccctcgcttcaaggttccctggcatggcagatggagtgaatctgcctggaggaggtgcggcatcgtctgctgcagcggctgctgcagctggtaatgatgctgatgaggatgatgatgacctgcagctttctggtgatgagacctatggagacccgacagctttgctt

SEQ ID NO: 407646 - DNA, 344 bp, Oryza sativa
  unsure (1)..(344): unsure at all n locations
tttgtagttctggaagacttcaacactggaaagtcatctgcaaatggtggcagccctggcaatgacagtccaggaaatgacaggaaaagggttagaaggccatatcagacaaaaacttttaaagttgagctgaactttgcagcaaaaattcctatgagcgccattgctcaggccttgagaggccaggaatctgaaaacacccaagaagcaattcgtgttattgatatcatattaagacagcattccgcaaaacagggttgccttttggttcgccaatcctttttccataacaatccttcaaattttgttgacttgggngctggtgcgatgggctgaaggggatt

SEQ ID NO: 407647 - DNA, 476 bp, Oryza sativa
  unsure (1)..(476): unsure at all n locations
gtcttcgacctccgcgcgcagacgacgctaacgcggaggaaagaaggacaacatacccaagaagagttacagaagaggaatctcagggacgaacttgaggagcgtgagaggaagcactactcgtcaaaggacaagtcctatgctgaggagagagataggcggaaaagcacaagcctactcctagaaggttcaaggagagaggctgaggataagatagttcctagagaaatcgatgcagatgattctgatgtggaacccagaagtgatgatgaaagtgatgaggatgatgacgacgatgatgacactgaagctctaatggcagagcttgaaagaatcaagaaagaaagagctgaagaaaaccttagaaaggaacgccaacaagcagaagaggaggctaagatgaaggaagctgaactgatgcggngaaaccccctgatcaatattaacaacgccggatccttcaatgttaagagaag

SEQ ID NO: 407648 - DNA, 491 bp, Oryza sativa
ttttctccaagtccaatcgacctcatttcattcgattcatcgatcgctcggcgcggcttagggtttttggcggcagcgatggcgtcggagaagcacttcaagtacgtcatcctcggcggcggcgtcgcagcgggatatgcggcacgggagttcgccaagcagggtgttaagccaggggagctcgccatcatctccaaggaggccgtggctccttatgagcgccctgctctcagcaagggatacctctttcctcagaatgctgcaagactcccaggatttcatgtgtgtgtcggcagtggaggagagaggcttttgcccgaatggtactcagagaaaggcattgagttgatcctgagcactgaaattgtcaaagctgatcttgcctccaagactttgactagtgcagttggagcaacctttacatatgagattttgatcattgcaactggctcctcagtcatcaagctatcagattttggtactcaaggagc

SEQ ID NO: 407649 - DNA, 420 bp, Oryza sativa
ttgattcttttcattgggaaagttcttgcatcagttgaaagtttatcgatggcagtaatagcatcgacactggactccctactggatcttttgtcaggtttcatactctggtttactgcacatgctatgaaaaagcccaacaagtatagctatccaattgggaagagacgaatgcagccagtgggcataatagtatttgcatctgtaatgggtacacttggcttccaagtgctaattgaatccgggcgtcagcttatcacaaatgagcaccaagtgttcgaccacaggaaggagctgtggatgatcggcagcatgtcctcagtcgcagtggtgaagttcttcctgatgctctactgccggtcgttcaagaacgagatcgtgagagcctacgcgcaggaccatttcttcgacgtgatcacc

SEQ ID NO: 407650 - DNA, 281 bp, Oryza sativa
ttgtgttctctgcaacaatgcccagttggattagaaaaatcacaagcaagtacttgaaagatccaatcattattgacctagttggtgatgaggaccagaaattacctgaaggaatctctctttattcaattgcctctgagcactatgggaagccatcaattcttggtccattgatcaaagtgagcactcttctgaatgtatgatgtgttttatagtttgcaccagaagcgactgtcttgtatacacttccacaggagcatgcttatggagggaaatgtatt

SEQ ID NO: 407651 - DNA, 372 bp, Oryza sativa
  unsure (1)..(372): unsure at all n locations
ttctaaagaggctgttgagcttcccttgactcatcctgagctatatgaggacattggaataaggcctcccaagggagtaatattatatggggaacctggcacaggcaaaactctacttgcaaaggcggttgctaattctacatcagcaacatttttgcgtgttggtgggagtgagatgatcccaaagtaccatggtgatagacgacggctttgaagtgtaggatattatttgccatgttactatgaggtgatatacngcccctaattgacgagatatactcaattaatgcccaaaaaaaacttctgcaccttgctttgtctacaagttgtgtatagagcaaggaaatgaacaaagattggcctttaatacta

SEQ ID NO: 407652 - DNA, 526 bp, Oryza sativa
  unsure (1)..(526): unsure at all n locations
tttgtccacatgctccatgtgtactaaatctacaaacgtgagcttgcaagagaatacccggttgctgatggaaaactttctcagacatgctatctgatggctcttgattcgtgctataggcaatattgtaccaagtatgaaaagatagtgggagaacaattctcgatttctgatgcagaatactgtgtcttccattctccatataataagcttgtacaaaagagtttcgcccgactttatttcaatgacttcatgcgtaattgcagcacggttgataatgatgctaaagagaagcttcagccttttgcaaatttgactagtgaagaaagctaccaaagtcgtgacttggaaaaggcctctcaacaagtagcaaagcatctgtatgatatcaaagttcaaccatcaactctgcttccaaaacagatcggtaatatgtacactgcatctctttatgctgcattggcatctgtgatctacaacangcatgacagtctggatggccagcgaattctcatgttttctttat

SEQ ID NO: 407653 - DNA, 385 bp, Oryza sativa
ttcggctctcgccatcgccatcctcctctcccttcccggagaagacgccttcctccgccgatcaccacccggtagggcgaggagggagccaaatccaaatcagcagccatggcgcagatgctgctccatgggacgctgcacgccaccatcttcgaggcggcgtcgctctccaacccgcaccgcgccagcggaagcgcccccaagttcatccgcaagttagcggaggggattgaggacactgcggccacctgcctaggcgcaagcagtgtctccagaatccagcatccggcctatgactacatgagtgcataaggtgggacacctggatgcccattggccgcaacgatgctccagaagtacagggcgctcttgctggaaagaggag

SEQ ID NO: 407654 - DNA, 385 bp, Oryza sativa
tccgtcgcagatccgatccaggaagagctcgccgccgccgctgccatggcgctctccgtggagaagacctcgtcggggagggagtacaaggtgaaggacctctcccaggcggacttcggccgcctcgagatcgagctcgccgaggtcgagatgccggggctcatggcgtgccgcgccgagttcggcccctcccagccgttcaagggcgcccggatctccgggtccctccacatgaccatccagaccgccgtcctcatcgagaccctcaccgcccttggcgccgaggtccgctggtgctcctgcaacatcttctccacgcaggaccacgccgccgccgtcatcgccagggactccgccgcccagttcgcctggaagggggagaccc

SEQ ID NO: 407655 - DNA, 405 bp, Oryza sativa
  unsure (1)..(405): unsure at all n locations
ttaccatcatgacaatctccaaggaccgtgtcaagccgtccccgaccccggactcgtggaagctcaaggagatcttcgccacgggcatcgtgctcggcacgtacatggcgctcatcaccgccctcttcttctacctcgcgcacgacaccgacttcttcacagagacgttcggggtgaggtcgatcaagacgaacgagaaggagatgatggcggcgctgtacctgcaggtgagcataatcagccaggcgctcatcttcgtgacgaggtcgcggagctggtcgttcgtggagaggccaggggcgctgctgggtgatcgcgttcctggcggcgcagctggtgccgacgtgctncgcggtgtacgcggagggggagttctgcaagatgcggggatcgnggggggtggga

SEQ ID NO: 407656 - DNA, 485 bp, Oryza sativa
  unsure (1)..(485): unsure at all n locations
ttgcgaccgggcgctcgccaagatctgcggcgtgatcgccgccgacgagaggcggcacgaggcgggctacacgatggcgtccggcaggctgttcgagctcgacccggacggcatggcgcgcgcgctggcggacgtcatgcgcgggaaggtgaccatgccggggcagctcatgtcggacggccgcgacggcgacggcgagcacagcctgttcgcccggttctccgccgtggcggagcgcgccggcgtgtacacggcgagggactacggcgacctcgtcgagcacttcgtgcggaggtggcgggtggcggagctcgcggcggggctctccggcgagggccgacgcgcgcaggagtacctgtgcgggttggcgcccaagatccggaggatggaggagctggcccaccggagggcggcccgcatcgagcccgccatggccngtttcagctggatcttcgataggcccgtcatgctgggctgatcaaccc

SEQ ID NO: 407657 - DNA, 502 bp, Oryza sativa
  unsure (1)..(502): unsure at all n locations
ttcagaacagaaatcagagaactgaggacagaaggcaagtaggaagaatctgagctgtctgaatggaagggaaaaacaactagggggagaaaaggaaaggattatccaagctttcgtgtatcatccgagtgtcccttgtatgcaatgggtttgatcaatagaggggtcttcttcaagatcttggccttcctctgcttcatcagatcatctcaaggaagaaatcattttaccacattggatctccctcccctactgaaggcaagcagtttctccagaatacagcatgaggcatatgactacatcattgttggaggtggcacagctggatgcccattggcagcaacgttgtcccagaagtacaaggtgctcttgctggaaagaggagggtctccttacggcaaccggaacatctcacatcttgagaacttccacatttgcttggcagatgactcgccaaattcaccatctcagggatttatctncactgatggtgtcatcaatg

SEQ ID NO: 407658 - DNA, 386 bp, Oryza sativa
taaaatgcttagcacaaactgcacagaagactttcagtgactttgaagaagctgttgaaaaggacgcaacaaagaatattcatattgatgggacagtgcatcctttgacgagctacgtgattaactatgtcaaatttttatttgactaccagtcaactctaaaacagctcttccaggagttcaaaagggaagatggaacaggttctgagttggccactgtaaccatgagtatcatgcaggctttacagaataatctggatgcaaaagcaaaacaatacaaggatccagctttgatgcacatatttttgatgaataacattcattatatcgtgaaatctgtccgcagatcagaagccaagatttattggtggatgactggattcaaa

SEQ ID NO: 407659 - DNA, 541 bp, Oryza sativa
ttcgccacctctccccaaccctagctagctccccctccttccccggcggcgacatcgacgatggcggcggctgcggcaggcggcggcggcggcggcgccccgcgggcgctctcccagcgggagcaggacatccagatgatgctcgcggcggacgtccacctcggcaccaagaactgcgacttccagatggagcgctacgtctacaagcgccgatccgacggcattttcatcattaaccttggcaaaacctgggagaagcttcagctggctgccagagtgattgctgccattgagaacccacaggacatcatcgtgcagtctgctaggccttatggtcagagggctgtcctcaagtttgcacagtacaccggagctcatgccattgctggcaggcacactcctggtacatttaccaaccaactgcaaacctcattcagtgagccacgtctttttatccttactgaccccaggacagatcatcagccaatcaaggagtctgctcttggaacatccccactattgctttctgtgacactgattc

SEQ ID NO: 407660 - DNA, 450 bp, Oryza sativa
tttaggtcttcttccccactctctccctcccacgccgccgcccccgcaaaccctagcgaacgcagcggagagaggagagagcgccatggccgtggaggtggcgacgcagaagatcaggtggggagagctcgaggaggacgacgagggggacctcgacttcctgctcccgccgcgcgtggtctccgggcccgacgagaatgggttcaagaaggtggtcgagtatcgcttcgacgacaaggggaacaaggtgaaggtcaccaggaccttccgcgtccgcaagatcgcccgcgcccgcctctgcaagagcgccatcgagcgccgctcgtggcccaagttcggcgacgccgtgcaagaggacgtcggcgcgcggctcaccatggtgtccaccgaggagatcgtccttgagcgcccacgcgccccagggagcaaagctgaagaaccaagtgcttc

SEQ ID NO: 407661 - DNA, 381 bp, Oryza sativa
atcatctggatcttgaggcttggagtgttccagaagtgcttcggccactctacgagtcatctagggtagttgctcagaaaatgactactgcagcactacggcacatcagacaaattgctcaagagacaagcggggaggttgtatacgctttggggaggcaacctgctgttttgcggacatttagtcagaggttgagtagaggcttcaatgatgctataagtggtttcaatgatgatggttggtctgtcatgggtggggatggcattgaagatgtgatcattgcttgcaatgcacagaaggttaggaatactagcacttcggccaatgcttttgtaactccaggaggtgttatatgtgcttaggcatccatgctactgcaga

SEQ ID NO: 407662 - DNA, 522 bp, Oryza sativa
tctcgcctgcctcctcctcctgctcctcctgctcactccttccggccccgatcctatagctcctccgctcgccgcggggatctgcttacgacgaggcccggcacccccgccgccgccggatcgtggtttggcgcttcagacccgtgcgtagcgtgtaggatcaattggcgctccacgttccccgatgttgccgaattttcagagtttgttgggtagattgacccccgctacctccactgtggagcaggcttcttctacaatctcaaacatggttgttgcaaatggtaatgtcgacacggaggaaggaactcttgagattgggatggagtacaggacagtctctggagttgctggtcctctagtcattcttgataaagtgaaaggtcctaaataccaagaaattgtcaatatacgattaggagatggcacaactaggcgtggtcaagtgcttgaagtcgatggggagaaagctgctgttcaggttttcgaaggaacatctggtattgacacaaatacacaact

SEQ ID NO: 407663 - DNA, 345 bp, Oryza sativa
gaccaatggatgtggaatacagctcctgcttcacgacctgcgcacaggggatccccagccacaacaggccatcctgctcgctgagtgctggacgatgagaaccacattctcgtgcataggacagccgactgcactctagatgcgacgaagtatgtagatgcaggaggctgtgcagactaaggcgaactactcactgatacataggttctcgacggaactaaggacaaacctgagtggagggagggacctgcatattggacaccacgttcaagaatggggcactcagtgccatggcatggtggcaggaaagttttgatgcttggaggcaatgctaagagtggtcca

SEQ ID NO: 407664 - DNA, 370 bp, Oryza sativa
tctgctgcatgccgcatgctcctactgctcctatatacatcccatcctcgccgcgatttccttcgccgccgccgccgaatatagtcttcttccccggcgccggggcacgcgaaaagggtttgcttctagcagaatatgtcgtgctttgcatgctgtggagatgaagatactcaaggagtaccagacaacaggaatccatacccagggaaccatccagcaaggagcgatgcatatcgcacagctgatccaactccaagaggtcctcaacctgtgaaagtgcaaccaattgcagtccccatcattcctggtgatgaaattagggaagtgactaacaaatgtggtgatgaagctttgattggtgaaggttcct

SEQ ID NO: 407665 - DNA, 467 bp, Oryza sativa
tgcatattcgcttggcgtcgatcctgtatggcatggtagccgcagtgagctgccttttcttaactccttgaagatgaagctgtctattcttattggagttgcacaaatgaaccttggaataatgatgagttactttaacgcaaagtttttcagaaatgctattaatgtttggtatcagtttattcctcagctgatattcttgaacagcttatttggttacctttcactcctcatcattattaagtggtgcacgggctcaaaagctgacctttaccatgtgatgatatatatgttcctgagtccaactgatgatcttggggagaacgagctatttcctgggcagaaactagtgcagcttgtactacttctgcttgctctggtttctgtgccttggatgctgattccgaaaccatttttcctgaagaagcaacatgagcagaggcaccaaggcccgcagtacaccatgc

SEQ ID NO: 407666 - DNA, 329 bp, Oryza sativa
gcttcgcttcctcccctctctaagccggggaagctaagccatggcgtccgtcaccgcccgcaccccggtcgcagccctccgctcgtcggcgtcgctcaagtctaccttcctagggcaatcctccacccgcctcgcccgcgcaccgactacgaggcgtaatgttcgggcggaggccaagggagagtggctccccggcctcccttctcccacctacctcaacggcagcttgccaggcgataacgggttcgacccgttgggtctggcggaggacccggagaacctgcggtggttcgagcaggcggagctggtgaacgggcggtgggcgatgc

SEQ ID NO: 407667 - DNA, 423 bp, Oryza sativa
tatccagttattttaactaggcttaagcaaaagcaagaggaatggtcaaggtgccggtcagattttaataaagtttgggctgaaatatacgctaagaattatcacaagtcccttgatcatcgcagcttctatttcaaacaacaggacacaaagaatctgagtacaaaagctctattagctgcaatcaaagaagttaatgagaagaaaaggacggaggatgatatgcttcttactattgcttctgggaataggcggccaatagttcccaatatgtcatttgagtatgtagacccagaaattcatgaagatctttatcagatcatcaagtcctcttgtggagaagtctgcagttcttcggatcaaggttgccaagtgatgaaaatctgggctacattttctggagcctattttgggtgttccatc

SEQ ID NO: 407668 - DNA, 168 bp, Oryza sativa
cccacgcgtccgttagcagagagagagaagagagcggcaccgtgtgttgtttcaagagagcgagggttacatgcccaccgccaccatggacctctcgcccccggcgctggccggcaaggccgccgcgaaggtgcacggcgaggggcgcatcaccatgcgcaagacagc

SEQ ID NO: 407669 - DNA, 459 bp, Oryza sativa
tggagaggtcgtagccgtcggtgccgttcccgttgctgcaggcgccggaggagagcgcgatacagggcctgtcaccatccacctaccgcttcgactgcgacaacccgcgaaagggcacccccgtcaagatccagtggagcgacctcttcctcaactgcgtgccctccttcaggcagcgcgcggagaacgaccccacggtgcccgatgcgcccgccaaggccgagaagtttgcccagaggtacactgcaatgctcgaggagttgaagaagaacccagagagtaatggagggccaccagattgcattcttctttgcaggcttcgtgagctagtccttagagaactgggatttagggatatattcaagaaggttaaggatgaggagaatgctaaggctatgtcactctttgagggcgttggtcagcgaaatgatgagattgaagatgatgggaaacgagcag

SEQ ID NO: 407670 - DNA, 498 bp, Oryza sativa
ttcttacctttccctccctacctctcgtctcgatacgggccactacctctacctactgtctgcgccgccgacgccgacgagcgccatggtggagctcgccttcctatagtacctctccccctgcggactcgcgcgccgacgatcggcctcctcaggcggctgtatctcatgctgcgcggccccgcccccgccctccgcgaaaggatctcaagaatccagaactccacgtagaagggtgaggaaaactgagggtgccaccaagagcctggaagattcagtcaagcgaaagatgcagcagttttatgaaggattggatggtccacctctccgagtccttccaataggtggccttggagaaatcggcatgaattgcatgctcgtagggaactatgaccgttacatattgatagatgcaggggtcatgtttccagactttgatgagttcggtgtgcaaaagattatcccagacacaacattcatcaagaaatggagtcacaa

SEQ ID NO: 407671 - DNA, 156 bp, Oryza sativa
gcgaccaggagggccagttagccgcacctgagtttgatgcatgccctgcgagggacacatggccgccgccaccatggtcctctcgtgcccggcgctggccggcaaggccgacgagaaggtgctctgcgaggggcgcatcaccatgcgcaagtcgga

SEQ ID NO: 407672 - DNA, 304 bp, Oryza sativa
tgggacctcttcatggagcagcttgacgataagatgacaacagatgatgtgtttctttcctttctaccgcttgctcacatccttgaccgcatgatcgaggagtttttctttcacaaaggagcctcagttggctattatcatggggattcgaatgccttgagagatgatctcatggagctaaagccaactctactagttggggtgcctcgagtgtctgaaaaaatttatgaaggtatctttgaaggccttatcagaactcagaccactcagaagattaattatgaatgctctgaatcaccgtaaa

SEQ ID NO: 407673 - DNA, 281 bp, Oryza sativa
tcgttcggaggagcagccgtacgagtgcgtgcggtggttcgacgcgcagcccccggcgtccgggctctttctctgcttcggcagcaaggggctcctgccgccgcccaaggtgcgggagatagccgccgcgctggaacgcagcggcggtcaccgcttcctgtgggtgctgcgcggcccgcccaaggacagtcggcaggggcagccgggtggcccacggacgccatgctcgacgagctcctccccgaggggttcttggagaggaccaaggggagggggctcgt

SEQ ID NO: 407674 - DNA, 532 bp, Oryza sativa
ttcgttagaggggagccaacggaatatttatgcaaaagcttgtactggcctgagaagggtgcatttttctcccttcctcatgataagctggcacttgcggatgagcaatgatgctcttgtcagcagaaagagccagacggtgatgaattgcaaatactatccaagaacagcttcatttacagaaacattacctacaatgtcaatgactatttgtatgctacacctggctatttctctcaagaggaggatcgtgcaaccttcaagggagggcgaaatgtgggtctaaagccctatgtagtttgccatctattggatgtccatgaacctgctggatccagaaaaattcatccagcatcaacaaaaatcagtgttagaagattttacagaccagatgacatttcatcagccaaagcttatgtttctgaccattgagagggttactattgggaaaaatagttaaagtgcctgtggtatgatagagggaaaagtgaggccaaaagaagacgacatctcaacttagatgttccaggat

SEQ ID NO: 407675 - DNA, 392 bp, Oryza sativa
tttctagatcgccagcggctgccctatgcataggcttgttctgcacagagaagggggcatcattctcccttcctcatgataagctgggccttggtaatggtttctgtagctcttgtcagcagaaagagccacattgtgatgaattgcaaatactatccaagaacagcttcatttacagaaacattacctacaatgtcaatgactatttgtatattagacctgactctttctctcaagaggaggatcgcgcacccttctagggagggcgcgatgatgtggtctccttcaccttctccgatatctcctccgcgccgatcaccccggcctgcccctcccagctccaggtgtccgcccacacgccgagcccggcgcgcgccaccacgcccgagttc

SEQ ID NO: 407676 - DNA, 493 bp, Oryza sativa
ttcgttcggagtgagcggcagcaagtgttcactgcgttcttcttctcgatgtatctttcttggtttctcgatctgtagcttattagcggccatgtgcggcggagcaatgatctccgggttcatcccgccgtcggccgctgcggcggcggcggctgcggcggccaagaagcagcagggcaggagggtcacggtcgacgtgctgaggccgtggatgctgcagaaggggaaggcggtggcggcggaggaggactatgcggccgactttcgcgagttcgagcgtggcatgagcgacgaccaggcggaaggtggcatccccaaggtactactgcacggtcatcgatgcccctgggcaccgggactttatcaagaacatgatcacgggtaccttccgggctgactgtgccgcgcgcatcattgactccaccactggtggtttgaggctggtatcttcaaggatggccaacccgtgagcaccctctttttgttttacttc

SEQ ID NO: 407677 - DNA, 433 bp, Oryza sativa
tcgttaaaggtttgccaatggaatatttatgcaaaagcttgtactggcctgagaagggtgcatttttctcccttcctcatgataagctgggccttggtaatggtttctgtagctcttgtcagcagaaagagccagattgtgatgaattgcaaatactatccaagaacagcttcatttacagaaacattacctacaatgtcaatgactatttgtatattagacctgactttttctctcaagaggaggatcgtgcaaccttcaagggagggcgaaatgtgggtctaaagccctatgtagtttgccatctattggatgtgcatgaacctgctggatccagaaaaattcatccagcatcaacaaaaatcagtgttagaagattttacagaccagatgacatttcatcagccaaagcttatgtttctgacacttgaga

SEQ ID NO: 407678 - DNA, 309 bp, Oryza sativa
cccagacccacccttacgttgacgcgtggcctaccacccagccatgggggacgcgtggacatgaccagcaccacgcaaccaccggcggctgcgccgacctcggctgcatgctgtgcgcgcgagctgacgcgactgccgcgggcgacgccgcctccccgctgtggaagcgcggcgagggtggcagcaccgggagcgggagcggatgcactagctgcaggcaggtgcggaggagggccgcggcggtgagggtccgtgcggcggtgcctaggagggtggaggcggtcgcgatggagttcgcggcggagaccg

SEQ ID NO: 407679 - DNA, 473 bp, Oryza sativa
ttgagattggtcatgtgacatccttatctccctctccctccaagtgcctaacccaactcttcccgagcctttttctgatcattggacaaatggccgtctcttcagccgttctcgttgggctactcgtcgtgagttgcgccgcggcggccgaagccacgaggtacaccgtcggcgacggcgagggctggacgaccggcgtcaactacaacaactgggccaacggcaagtttttcagacagggagacgaactcgtgttcaactaccaggcgagggcgcacacggtgacggtggtgagccagaccaacttcgacagctgcaacggcaacagcccgctgagcaacgacaacgggggatcgaccaccatcaggctctcctacccgggcatgcactacttcatctgcaccatccccggccactgcagcagcggcatgaagctcgccgtgaacgtcaacggtgacccgtcgtactctgcc

SEQ ID NO: 407680 - DNA, 401 bp, Oryza sativa
tatcgttggcggcggcgacgcttgagaggcggtcctgcgacgatggttcacgtcagcttctaccgcaactatggtaagacattcaagaagccacgtcgcccttacgagaaggagcgtcttgatgcacagctgaagctagtgggtgagtatggactgaggtgcaagcgtgagctgtggcgtgttcagtatgctttgagccgtatccgtaacaatgcaaggcacctgctcacacttgatgagaagaatccacgccgcatcttcgagggtgaggcactgcttcgccgcatgaaccgttatgggctccttgctgatgggcagaacaagcttgattatgtccttgccctcactgttgagaacttcctcgcaaggcgtcttcagactcttgtcttcaggctggcatg

SEQ ID NO: 407681 - DNA, 520 bp, Oryza sativa
ttgacgcgtgggcttccccccagccatcggcgacgcgaggacgcgacgcgccccaccaaccaccaccgcctccgccgacctcgccgccatgctgtccgcgcgcgccgccgccaccgccgccgccgccgccgcctccccgctgtggaagcgcggcgagggtggcagcagcgggagcgggagcggatgcacgagctgcagggaggtgcggaggagggccgcggcggtgagggtccgtgcggcggcgccgaggagggtggaggcggtcgcgatggagtccgcggcggagaccgagaagaaggaggagtttgcggcggccggcggcggggttgaggacatggctaccgaggaggtgcccgtcacgccatgggccttctccgtcgcgagtggttacacccttttgagggatccacatcacaacaagggccttgcctttagtgagaaggagcgggatgctcattacttacgtggccttcttcctccggcagttgtgtctcaggatcttcatgtgaagaagatcatg

SEQ ID NO: 407682 - DNA, 528 bp, Oryza sativa
  unsure (1)..(528): unsure at all n locations
tctgtttgagcttggagagagacaacaatggcggctcaggctcttctctctgggaggcagctgctggggaggccattgcaatcttcagtctccaggtcttcttcctccaggaaggcacccttcatggtcagggcagaggccactccccctgccaagcaaggtgctgacaggcagctgtggttcgcatccaagcagtccctgagctacctggatggcacgcttccgggagacttcgggttcgacccgctggggctatcggacccggaggggaccggtgggttcatcgagccacggtggctggcctacggcgaggtgttcaacggccggacggcgatgatgggcgtcgtcggcatggtcgccccggagctcctcggcaagctgggcctcgtccccgccgagacggcgatcccgtggttccagaccggcgtgaacccccccgcgggcacctacacctactgngccgacccttacactctttttggcttcgagctcgccctcgccggcttgccgagcaccgccgtttcagga

SEQ ID NO: 407683 - DNA, 488 bp, Oryza sativa
tcgtatcatcaagtcctattaaacatttggagaatggctgaagaaaagaagaccccatgcctgaatgagcggatcctgtcgtcgctctcgaagcgatccgtggctgcgcattcctggcatgatcttgagattggacctggagctcctcaggttttcaatgttgttgttgagatcacaaaggggagcaaagtgaagtatgagcttgacaagaagactggaatgatcaaggttgacagggtgctatactcatcggtggtgtacccgcacaactacggtttcataccgtgaacgctgtgcgaagatgggggatccaatgggatgtgcttggtcctgatgcaggaaccagtgattcctggctgctaccttagagccatggccattggcctcatgcctatgattgatcagggtgaggaagatgataagaccatgggggattgcgttgatgatcccgtgtttcgccccttatatgatataaggtgttttttttc

SEQ ID NO: 407684 - DNA, 528 bp, Oryza sativa
gacgaaccgactggagcacttaccagaaaggactatatgggaaaatggcatccatatgtgaagttaaagctactcagatcgagaaactaccatctaagataacgtcagagtagcgaacctacttgaaccctgaatggaatgaatatttcacgttagttgtgagacacccatagtctgaggctcaggagcttactgtttacgatggtgagcatgctgggaagcacgacaagattgtaatgagaggtatcccatcgaacgagcttattcctgatgaggcccaggcacttacacttgacttacacaagactatggatgctaatgacccagcaaatgacaagttacgagggcagctcactgtggatgtaacatataagcctttgaaggaaggtgattctgatgctgatacaagtgatgaatatggcaccattgaaaaagcccctgatggcacaccggatgggggtggtttgctggtagttatcgatcatgaagcacaagacgttgaaggaaagcaccacactaatccatatg

SEQ ID NO: 407685 - DNA, 485 bp, Oryza sativa
ttagatgaaggagaggagcagccatggcgtcgtcggtggcagcggcggcgagcacgttcctggggacgaggctggcggacccggcgccgcagagcgggaggatcgtggcgaggttcgggttcggcggcgggaagaaggcggcggcgaataaggcggcgaggccgtcggcgccgacgacggacaggccgctgtggttccccggcgcggtggcgccggactacctggacgggtcgctcgtcggcgactacggcttcgacccgttcggcctcgggaagccggcggagtacctgcagttcgagctggactcgctggaccagaacctggccaagaacaacgccggcgagatcatcggcacccggttcgagaccggcgaggtgaagtccaccccgttccagccctacaccgaggtgttcggcctccagcgcttccgcgagtgcgagctcatccacggccgctgggccatgctcgccaccctcggcgccctc

SEQ ID NO: 407686 - DNA, 494 bp, Oryza sativa
gaagcgtccgcctccccctccctccgagggcgagatcggaacaaggcccccacccaaccaccgccgccgccgccaccggcgatcgccggcgacccccgggccacgggaggcgccccgccctcctcgccattggagaggaccttctctcctgctcggattcgtttgctctggtggtggtggtggggctttgctgtcgcgaggccgtgcctgccatgccggagaccgggccctacggccacaagaagaccgacggcatctgcgacggcgtgtgcggcgagcctgcgttaaaggcagttctgaccatgtcgaggctgagatgtgcacttcggggatttgattccacagcactagagggcctattgatcggagtgccagttctaattataaggagatatgctcatggtcagaaggagacatacttagttaggccagtatgggagtctcctcctatgccctacaaactatacctaattactaccatgagaatgtcacca

SEQ ID NO: 407687 - DNA, 589 bp, Oryza sativa
gcctgctggtgccgctgcggaattaattgctggaccgacgcacgcgtttgttcccaacgaccgcccttgagaagatgctggcagtccggtgctagctcttctgtgctatggatccttggctggcgacatgtaacggccgagattgatatcgccaacatgacggcgctacataaacatgtttcgttcttggaccggaacaaggatggcattatcactccgtctgagaccattgatgggattgttgcaatcggttgtgactatgcatttgctagagactgtgccgcccctgtgcatgctggtcttggtcctaaaacaagccccaaggacgcaccattacctcacttgtcgatatacataaagaacatctataaaggaatgcacgggagtgacacaggtgcactagatgctaaaggaagggaacaccaaccacatgcctatatatacatatcttacataagtgttagaagatatcacatgatatcatataatgaatggtcaagcatattaacagtaatatgtgatgcatatgcatctaaatagcaggatagttacatattattagtttaaatgctttaggagtacatacaaa

SEQ ID NO: 407688 - DNA, 479 bp, Oryza sativa
  unsure (1)..(479): unsure at all n locations
ttgttatcgaggaagaagaaataatcaatggagtgttgggagaagaagccaaggaatctgggtggctcgctgccggtgcccaacgtgcaagacctcgccgtccgcccggaccacctcacgcccaccctcctccgccgctatcttcgcccgcaccacctgtccctgcccgccgacgaccaccatgccatggctatgatacctgtcgttgactttgccaggctcatcgatcaccatgaggaggccgccaagctgaggcacgcctgcgaggagtggggtttcttccaggtgatcaaccacggaatcgccgacgagacggtggaggagatgaagcgcgacgtcatggccttcttcaacctcccgctggccgacaaggcggcgttcgcgcagcagccggaatggatcgagggctacggccaggcgttcgtcacgtcggaggaccagacgctggactgggtcgacctctacttnctcaccacgca

SEQ ID NO: 407689 - DNA, 454 bp, Oryza sativa
  unsure (1)..(454): unsure at all n locations
tcgttcgtcaacaaaaaggcgcctctaagaattcctcccaaactttttggtgttgtcaagccgtgcgtttcggggtacatcaacggcggcgatgagctcccggatggccggatcggcgatcctccgtcacgtcggcggcgtccgcctcttcaccgcgtcggcgaggccgttccttgcaggcggagaagccgtccccggggtgtgggggttgcggctgatgtccacgtcgtccgtggcgtcgacggaggcggcggccaaggcggaggccaagaaggcggacgcggagaaggaggtggtggtcaacagctactggggcatcgagcagtcgaagaagctggtgcgggaggacggcacggagtggaagtggtcttgctttangccatgggagacctacaccgcggacacttcgatcgatctgacgaagcaccacgtgcccaagacgctgctcgacaag

SEQ ID NO: 407690 - DNA, 413 bp, Oryza sativa
ccttgggcttttccaggttcacatcgacgactccttgctctggacattgttgttagttggtgatggctgggcgaggtcctcatctgactgtccttcacaagtgcggtggccagttccaccttggctccagcttttctgaaggtgtacgggctcgcaacatctgcccatctgtctcatcctatgacaggcgctttaccacaaggagctacatgacccagggccttgtcaatggtggcatcaacgtcccaatgatgtcgtcctctccaatttttgctaatgctccagctgagaaaggtggcaaaaacttcatgattgatttcctcatgggtggagtgtcagccgcagtttcaaagactgctgctgctcccgatgagcgtgtgaagctgcttattcagaaccaggatgaaatgatc

SEQ ID NO: 407691 - DNA, 326 bp, Oryza sativa
gtgttcacttgtggcctcttcctgggcgcccccatgggcttgtccagggacgactccggcttggacgtaggcgaggaagacgggctcatggaggatctactgtaatagctcgcgaacggaggatgacgcagccggctgggactacacctgaacggcaggcgctgcgccagctggcactactggttcaagggtaccgtgatcgccatgggcttctactgagctgagctccagtacctagccgaccccatcaccaaccatgtgcagagcgcggagcagcacaaccagtacgtgaactggctgggtctcgtataggccaggaagaccct

SEQ ID NO: 407692 - DNA, 496 bp, Oryza sativa
ctcctcggttcggttccgtggttcgtctagggtttagtgggttgagatggcagcgctaaagcctgattgcgacatagttggtgacaatctctgtggcaagagtttcactgaggcattcgatgcggcctgcttcccacttacactattctcaactttatttgaacctggatggtcttctgggagttcagcagtctgccatacaagggcttttgtcattgctggtggaaggaggtgctgagaatgtaaatcagtgttttctagaagcttcacgtttctggaagtactgagcttgttcgcattttgctaaagattgcctatcagaacagcttggctgtcgatggcgatcttgctctagtctatgcttctcactactgcaaatttgaaacgatggcatgcttggtggatgaagggcatgccacatttttcctttggcccttagttacagcttttgagcgtggttgcttgtcggttgtccattggttcgccacccgtcttg

SEQ ID NO: 407693 - DNA, 470 bp, Oryza sativa
ccacccgttagtgcaagaatagaatagccagcaggagcagagcacctcctcgatctcaatcgtgggccgggtcgaggctccgaccaattcgttcctccacgatggctttaatccatctgctgcttctttctttcttttcttcctcttcttgggagttgaagagaaagaatcgagttgttgctttgtttaattttgtgtgttgctggcggtagcgtcatggcagggtgactcaatgacgacgacactcactgattcttaccctgtttaaatagaccgcgcggaaaggagagatttggggagagcaacagggcggtgctaggaaggcggtacaaacctacgcgttccatggggagaagacaatcttccatcttaacccatctggtccccttcgtcattggcggacctcatggtgatgctggtctcactggccggaagatcatcattgacacttatggtggctggggagctca

SEQ ID NO: 407694 - DNA, 332 bp, Oryza sativa
gcgttcttttcctcctcctcctctcctccttcctgcgtcgcctccctgatcagccgcagctcgttgccggccgttgttgcgcggccatggaggcgagcgccgggctggtggccgggtcgcacaaccggaacgagctggtgctgatccgggggcacgaggagcccaagccgctgcgggcgctgagcgggcaggtgtgcgagatatgcggcgacgaggtcggtcgcaccgtcgacggcgacctcttcgtcgcctgcaacgagtgcggcttcccggtgtgcccgccctgctacgagtacgagcgccgcgagggcacccaagactgcccccagtgc

SEQ ID NO: 407695 - DNA, 455 bp, Oryza sativa
tcgtaaggcggccggggtggggatcctgctgcagatatcgatgctggtggtctccttcgtgctcggccacgtcctccgccgccgcaaggtctactacatccccgaggccagcgcctccctcctcatcgggatgattgttggcggccttgctaagatatcaaacactcaaagaagtattaggagatggttcaattttcgggaggactccttccttcttttcttacttcctccaattatatttcagtctggattcagcttagcaccaaaaccattcttttcaaattttggtgccattataacatttgcaatcttgggaaccttcattgcttctattgtcactggtcttttagtatacgttggcgggctaatatacattgtctttaagtcgcccctggctgcgtgcatgatggttcggcgctctggtgttaggcacctgatcctggtccagcactgcc

SEQ ID NO: 407696 - DNA, 468 bp, Oryza sativa
  unsure (1)..(468): unsure at all n locations
tcttagtgttacaaagcaaactgcagcactcaccaagaggtacagttccatctatcagcgtttaaagccttcttggacatagctggtgacaatctcagtggcaagattttcactgaggcattcgatgcggcctgcttcccacttacactattctcaactttatttgaacctggatggtcttctgggagttcagcagttgccatacaagggcttttgtcattgctggtggaaggaggtgctgagaatgtaaatcagtgttttctagaagcttcacgttttggaagtactgagcttgtacgcattctgctaaagattgctcatcagaacagcttggctgtcgatgtcgatcttgctctagtctatgcttctcactactgcaaatttgaaacgatggcatgcttggtggatgaagggcatgccacatctntcctttgtcccttagtaaaagcttttgagcgtggttgcttg

SEQ ID NO: 407697 - DNA, 466 bp, Oryza sativa
  unsure (1)..(466): unsure at all n locations
tctgtcgccgccgcgagcgaaccgggaggagaaagtccaaaccctcgcgaaggcagagtcggggatagggatatcgccgaggtgggagaaggcgacgtcgccgacatgaagctgttcgtgaagaccctgaagggcaccaacttcgagatcgaggcgagccccgaggcgtcggtggctgaggtgaagagaatcattgagagtactcaggggcagaatgtgtacccggcggatcagcagatgctcatacaccaagggaaaattctcaaggatgatacaactttggaaggcaacaaagttgctgagaacagcttccttgttataatgctgtctaaggccaaagcatcatcaagtggagcttcaactgcttcaaaggcacctgtgagccagtctcaaccagcaactccagttgcctcagttgcaagaacaccacctncacangcacctgttggtacacctgaaccggcac

SEQ ID NO: 407698 - DNA, 454 bp, Oryza sativa
ttcgccctgaggagattggtgctggtgaccagggacacatgtctggatatgcaactgatgagacccctgagttgatgcccctcagccatgtgcttgctaccaagcttggcgctcgtcttacggaggttcgcaagaatgggacctgcgcatggctcaagcctgacgggaagacccaagtgactgttgagtaccgcaatgagagcggtgccagggtccctgtccgtgttcacaccgtcctcatctctacccagcatgatgagacagtcaccaacgatgagattgctgctgacctgaaggagcatgtcatcaagcctgtcattcccgagcagtaccttgatgagaagacaatctttcatcttaacccatctggtcgcttcgtcattggcggacctcatggtgatgctggtctcactggccggaagatcatcattgacacttatggtggctggggagc

SEQ ID NO: 407699 - DNA, 303 bp, Oryza sativa
tcgtgggtgcacctgagcagattctccaccttgctcataacaaaccggagatagagcggagggtccatgctgtgattgacaaatttgcagaacgtggacttagatcgcttgctgtagcataccaggaagtaccagaggggacgaaagaaagccctggtggcccatggcattttgttggtctcatgccactttttgatcctccaaggcacgacagtgctgaaacaattcggcgggcacttaatcttggtgtcaatgtcaagatgatcacaggtgatcagctggcaattggaaaagaaacaggcg

SEQ ID NO: 407700 - DNA, 401 bp, Oryza sativa
ttaattcaacccaaccgccgccgcatcgccctcgttagaacgatggccgcgtcggcgctgcaccagaccaccagcttcctcggcaccgcccctcgccgggatgagctcgtccgccgcgtcggcgactccggtggccgcatcaccatgcgccgcaccgtcaagagcgcgccccagagcatctggtatggacctgaccgtcccaagtacctgggcccgttctcggagcagacgccatcgtacctgaccggagagttcccgggagactacgggtgggacacggcggggctatcggccgacccggagacgttcgcgaggaacagggagctggaaggtgatccactcgcggtgggcgatgctgggggcgctgggctgcgtcttcccggagatcctgtccaagaacg

SEQ ID NO: 407701 - DNA, 423 bp, Oryza sativa
taacctctcgcagaatagacacaggctttgcttcgtttcatggaagaacacacacagagatagaggtgacgagcgagagagggtaataaaccgttgtgtctcactgggggagggaatgatgtccgaaggcgaggagcacgggtcgctgctggagaagatcaacgacatgatccatgagttcaagaagggatcgtcgtcatcctcgacctaggactccgactacgacaagaagcaccaccacatgtccaagtacaagaagaagctgttcttcggccggacgaacccgctacatcacgttctaggaggaggcactgctgctgatcttgtgctgcggagggacaagcagacgtcagggagcatcctggccggagtgaccgtgatctggtagctgttcgaggggatcggttaccactcttctaacct

SEQ ID NO: 407702 - DNA, 482 bp, Oryza sativa
ttcgatctcaaaagacacacattccaaaagcatctgtggccatctcctcctagtcctaggctcgcgtcaatggcggcgtccaccatggcactctcctcccctgccgccctcgccggcaaggcggtcgccaatgccaaggtgttcggcgagggccgcgtcacgatgcgcaagtcggcggccaagcccaagcccgccgcggcgtcggggagcccgtggtacggcgccgaccgcgtgctctacctcggcccgctctccggcgagccgccgtcctacctcaccggcgagttccccggcgactacggctgggacaccgccgggctgtcggccgacccggagacgttcgccaagaaccgggagctggaggggatccactgccggtgggccatgctgggcgcgctcggctgcgtcttcccggagctcctcgcccgcaacggcgtgaagttcggcgaggccgtgtggttcatggcggtgtcccagatctt

SEQ ID NO: 407703 - DNA, 558 bp, Oryza sativa
tcgttgactctacaccgagaggtggggcgaattgaaacctcaagatgggcatgccagtgcacctatcgtcagccttacgagtggctgactcaccactgtgccagcgaaggctcatcaggttcttagcatgagcaggacagaacctgtctctattaagagttgtctgtcaccgaatttcatcaaggatcaaaagatgagctgctggactcgctgtgtgtatgattgcaatactgaacttatccgtcttcaaattagggatcagaaggcaaagaacggcatggttgtcgctcgggagttggtcggagtaacaaagtcatcaaagaaaccatttaagctagcagagttcgtggacaacaagtggtcactgagcaactctaacttatgcatcactaatgacatgaaaccaagcaaggatggctctatacttgagctcaaatgtgacaacaaaacgatcaaactctaccagggaaagaggctagaatttcaacggaagtgctgcaacaatcacgcagaggagaatgcttcagctattactgctgtgaagttctctgctgaaca

SEQ ID NO: 407704 - DNA, 470 bp, Oryza sativa
gcgttcgttctcgaggaagatcaagacaatcggccctcttgagctccggatcctcagaaagggaaccttcaaggagatcctagatcatttcctgagccttggtggtgcggtgagccagttcaagacaccaaggtttgtgaacccatcaaacagcatggtgttgcagatactgagtagaaatgtcacccaaagttatttcagtactgcctatggattttgatacaaagaaacatattagatgctagcagctgcatgtaattacctttttacctcttgtttttcagctttactgtagtctccaccggaagaaaacgtttggtttagtctcttgaataatctattttcttatcctgtttgtgactatctagaatctatgtaaatggcccagctctagtgaaagttatggttgatgttatcaggaaagaaaatgtggtgttttccgttaattataaactatccttctttttacc

SEQ ID NO: 407705 - DNA, 218 bp, Oryza sativa
gtcgtgcctacgccctcttcctcccccctcggcttcgagggttattgttttcttcttcttttttctttttttcttcttctccttttttgattctcgtttctttttttttttcggtttcgggggagttggatgcttgaaaccttcctccccctgaggccaaaccctaataataatctgatccctgacacgagagcggaggcggaggaggaggtggggga

SEQ ID NO: 407706 - DNA, 157 bp, Oryza sativa
tagaaggagaggagcagccatggcgtcgtcggtggcagcggcggcgagcacgttcctggggacgaggctggcggacccggcgccgcagagcgggaggatcgtggcgaggttcgggttcggcggcgggaagaaggcggcggtgatgaaggcggtgagg

SEQ ID NO: 407707 - DNA, 572 bp, Oryza sativa
ggctcgcccgccggtaccggccgggactgaatggctgggccgacccacgcgttcgttcagatagtggaagggccagacgcagggatggcgatctgcaggctatatgccaccacctgcctgcactcccgatgcaccaccagcacaagctggaggcagagtcaggtcatcttcttcaccaccagaagcaacaggaggggtagcacaaggtacggaggagcaggaacctttcaggtttcatgctcagtcgacaagccagtggtgattggccttgcagcagactcaggatgcgggaagagcacctttatgcgccggctcaccagtgtgtttggtggtgctgcagagccacccaagggtggcaacccagactcaaacacactcatcagtgacacgacaacggtgatatgcctcgatgactaccattccttggacaggactggcaggaaggagaaaggtgtgactgccctggaccctagggcaaacgattctgatctcatgtatgagcaggtgaaggcaatcaaagaagggcaggcaattgagaagccaatctacaaccatgttactggtcttctaga

SEQ ID NO: 407708 - DNA, 394 bp, Oryza sativa
gttcacccaaaccgcgatttctgatcgatcgatcgttagctcgatccaagaacccatcttttctttgatccccaatcctcttttgccgaggattaattgggagaagatgacgatgatggggtgtgccgtgctgctcgtggtggtggcgtccatggcggcggaggcggcgggaaggacaatgactgcatactacaggatgggtggatatgctcttcaggccgcatatatattgtccaaagaaggaatcagtgctgaggtgataaaccttcgttcaattagaccacttgatagagctactatcaatgcatctgttagaaaaacaaattgattggtgaccattgaggaaagctttccacagaatgggattggtgctgagatatgcatgtctgttgtt

SEQ ID NO: 407709 - DNA, 523 bp, Oryza sativa
ttaatacaaattaaacctattgtgcgaacatccctgttcctctgctccagtgtttacattgctacaagtttctttgcatatctcctcttcggcgagggtaccctagatgatgttctcgctaacttcgatgcaaatcttgggattccatttagttccgtctttgatgatatagtgcgagtgagctatgctgctcacgttatgcttgtctttcccatagtcttctttgcccttaggctcaacttggatggactgctcttccccacatcaaggcacttttctcgtgacaacaagagatttgccataatcactatctcactcctcacagtaatttatcttgctgccattttcataccgagcatttgggatgcattccagtttactggtgcaactgctgctgtcctgattggtttcatcttccctgccatggttatacttagggatccttatggaatcgcattcaagcgtgacaagatcttggctgtaaccatgatcgtgcttgctgtcctcttcaattcttgtgcta

SEQ ID NO: 407710 - DNA, 531 bp, Oryza sativa
tgtgttgcaattatgccttctgttctatacattcagataacattgcgcaggaggcctttcttgataaagaatcttgaaaatgttatgcgcacataccttcagtcactggagttcttcgaagaaaatgagaggaagaaacttgccattttcacagcacttgccttttctcagaagttatcaggtcttccacctgaaactgtcttccagccactgctcaaggataatcttgtttccaaagggatagtgctttcgttcattactgagtttttcaaagaatatctgaaggagaacactttagatgatcttattgcacttttgaagaaaggcaaaatggaggacaatttgctggaatttttcccatcggcaaaaagaacctccgaggctttatctgaacatttcactaaagaaggtctgacaagtcttgttgagtacaatgaaaagaagatgtttgaggttaaactcaaggagattaagttaacactgacaacaatgatcaatgaagaggctgaaatatctgaagtcacagaagct

SEQ ID NO: 407711 - DNA, 421 bp, Oryza sativa
tcgttgaaatatggttgtagcagttcggaggatcatcaatttgttagaggtataccaatatatgcaataagtcaagtccttgagaaggtaatctctggtactcctggaccatttcgtattatcaatggagttaggaggccaataccattcatcagacttctggaggtggaactctatccaactttgctttcaaaggcaagaagttatggattgagtgatagctgggtgcaggctctagctaagaaggaccctgtgcgaagacaaggtttgcgggtcaaaggttgtttggctggatcccaagcagaaaattcccttgaacagggagacatgaaccctgctataataaggagccaattcaggcttctagatttgagaatgcttgccgaaattgaccaatctgttgttcagatggagccttaca

SEQ ID NO: 407712 - DNA, 467 bp, Oryza sativa
tcgttaagatgctcgtggcttgctcaaagctgcgattagggatccggaccctgttgttttcttggaaaatgaactgctctatggagaatcattccctatttctgctgaagtgcttgattctagtttcgctctgccaattggcaaagcaaagatagagcgtgagggtaaagatgttacaattactgcatactccaagatggttggatatgctcttcaggccgcagatatattgtccaaagaaggaatcagtgctgaggtgataaaccttcgttcaattagaccacttgatagagctactatcaatgcatctgttagaaaaacaaatagattggtgaccattgaggaaagctctccacagcatgggattggtgctgagatatgcatgtctgttgttgaggaaagctctgaatttcttgatgcacccagctagaagaattgctggagctgatgtacccatgccctatgct

SEQ ID NO: 407713 - DNA, 527 bp, Oryza sativa
tcgtcaccattagccatcaacgaccagcatctcggctttgctcgccttctcgaagcttctgctgccatggcggaccagctcttcgaagagcagattgtagagttcagggaggccttcagcctcttcgacaaggacggcgacgggtctatcaccaccaaggagctaggaaccgtgatgcgaagtctgtggcagaacccaacagaggcggtgctgcatgacatgatcagcgaggtggacacgctcagcaaccgcaccatcgcattcaaggagttcctgggcctgaaggcgcgcaagctgagggacatggactctcgggaggagctgagggaggcactcaccgcattctacagggccccgatccgcaccatatccacaggcacgctcatacacacgatggccgacatgacagcgatattcaccgcacccgtatggtcacacgtacccaccacctgcaaaaggacagcccacatatccacctgcgccctatgcttcaacttaaccaccagcaccatattgatatggcacac

SEQ ID NO: 407714 - DNA, 374 bp, Oryza sativa
tcgttcatttttggagatatggggaaggctgaggccgatggttcaaatgagtgcaatgacttcgagcctggttcactgaacacgacctaccagctaattaaagatttgaagaatattgatatggtaatacatattggggacatctgctatgctaatggttatctgtcacaatgggatcaatttaccgcacaagttgaacccattgcatccagtgtgccttacatggttggaagcggcaaccatgaaagagattggcctggatcaggttccttctatgggaatttggattcaggtggtgaatgcggtgtaccagctcagaatatgttctacgtgccagcagagaaccgggagcaattctgggtcttcgatgacta

SEQ ID NO: 407715 - DNA, 178 bp, Oryza sativa
tcgtggagatctgtctcctggccaacagcctgtggcttccctggtattgtctctgttgtcctcactgcgttaaattccatgctgtggtcaaggaatagtacaggagctcttcccatctcactcttcttcacacttctgtccttgtggttttgcatctctgtgccacttaccctcctcg

SEQ ID NO: 407716 - DNA, 504 bp, Oryza sativa
gcggctgttcatggtgtcggagctcgacctgccgctggacctcgtctccaggaaggtgaggaagatgaagatgatttcgacgtgcaacgctgccgccgacatcggcggtacgctcgcgccgcacgagtacatttgcatggtccgccgagaggtgctcgacgcctaccttcgttcccgctccgagggggccgccgccgaggtcgtcaatggtctcttcctgaggtatgaggcgcccaaggaacccaacgggtcgtacgtggtgcactacaaccactacgacagctccaacggcaaggtcggcggcgagaagcggacgctcgatgtggacgcgatcgtgggcgcggacggtgccaactcccgggtcgacaaggacatgggcgccggcgactacgagtacgccatcgcgttccaggagcgcgtcaagatccccgacgacaagatgaagtactacgaggagcgcgccgagatgtacgtcagcgacgacgtctcggcagacttctacgg

SEQ ID NO: 407717 - DNA, 501 bp, Oryza sativa
ctttctcttccggagaaaaagcttgggtgatttcttggaagcgaagagtgaggggagaagaagaagaagaagaagaagaagaggggggaggaggaggagcagcatggctgagcacaaggaggagcagtcggtgatggagaagctctccgagaagctgcacggcgactcctcgtcgtcttcctcggactcggacgacgacaagaagggttcctcctcgtcgtcggcggcggcggccatgaaggccaagatctaccgcctcttcggccgcgagaggcccgtccactccgtcctcggcggcggcaagcctgctgatctcgtgctatggaggaacaagaagatctccggtggggtgctcgccggagccacggccatctggctactcttcgagatcatggagtaccacctcctcaccttggtgtgccactgcctcattctctccctggctgtgctctttctctggtccaatgcctccactttcatccacaagttcccttcaaacat

SEQ ID NO: 407718 - DNA, 500 bp, Oryza sativa
gttcattcgccagccacacctctctccatcctctcgtgctctctctgtctcctcttctctctcccccgacggagaggagagaaggcgaggagccgggggagatgggatcggactcgccgcccaagaaatggggcctcagggagcagcgcgaagcctacctccggtggttctccctcgccgacgacgatggagatgggcgcgtgacggggaaagacgcgctcaagttcttcgccatgtcgaatctctcccgccccgagctgaagcaggtctgggcaatcgctgattccaagcgtcagggttatcttggattctcggagcttatgaccgcaatgcagctggtttctcttgcacaagctgggaatgagactagtcaggacacccttgcacatgcagatttggagacgttgctacctccgacaatggaaggtctggacaaaaaactaaaaaataattctatgagcaagagcaactctgatattgtcgtacgtcatccgtcagaa

SEQ ID NO: 407719 - DNA, 520 bp, Oryza sativa
cttgctggacccacgcgtccgcttatttcgagagagatctctcccgagctcgatccggtccaccgggacacgtagagagccagtgacagcagcaacggcggggggcgagcttgcgctgctggacttctgggcgagcccgttcgggcagcggcgccgcatcccgctggcggagaataaggtgcactactaattagcacaagcacaagtgaaaatttgcctgttattcatgaatctagaaatacagaccataccatgagtacacagagcaaagataagtcctctgcagcgaataattcgtcatcaagttctccttcatcttctgaggtgggtggtgctccagcagtacgaaagatgaaagtgaaagatgtctcagaatatatgattagtgctgcaaaagaaaacccccagatagctgagaggatccatgctgtcttacttgaaaatggagttgtcccaccacctgatttgttttcagaagaatcaagggaacaacctaaagaccttattgtgtatgacacat

SEQ ID NO: 407720 - DNA, 471 bp, Oryza sativa
tcttttccacccaccatccaccggtcgaacacttggcgctctcgcccgccttagctcgctctgctcgtggtgctcgacccgaacaagaacggacatggctcccaggaacgccgccgaggccgtcgccgtcgccgtggcggagggcggaggagccggcatggagcccaggttccgcggcgtgaggaagcgcccgtggggcaggtacgcggcggagatccgcgacccggccaggaaggcgcgggtgtggctcggcaccttcgacaccgccgaggccgcggcgcgcgcctacgacagcgccgcgctccacttccgcgggcccaaggccaagaccaacttccccgtcgccttcgcgcacgcccaccaccacgccccgccgccgtcgttgcccaaggcggcggcgctggccgtcgtcagcccgaccagcagcacggtcgagtcgttcttccgggacacgcccgccgccgtcccggt

SEQ ID NO: 407721 - DNA, 302 bp, Oryza sativa
cttgctggaccacgcgtccgttattcgagagagatctctcccgagctcgatccggtccaccgggacaggtagagagccagtgacagcagcaacggcggggggcgagcttgcgctgctggacttctgggcgagcccgttcgggcagcggcgccgcatcgcactggcggagaagactctccactacgactactacgagcaggagctcctcgtcgcctagagcgacctactccttcggtacaaccccattcacgccaaggtccccgtactgctccacggcgacggagacggccgcgccgcctgct

SEQ ID NO: 407722 - DNA, 269 bp, Oryza sativa
tggaccacgcgtccgtttttcgagagagatctctcccgagctcgatccggtccaccgggacacgtagagagccagtgacagcagcaacggcggggggcgagcttgcgctgctggacttctgggcgagcccgttcgggcagcggcgccgcatcccgctggcggagaatacggtgcactactaattagcacaagcacaagtgaaaatttgcctgttattcatgaatctagaaatacagaccataccatgcgttcacagaggcggcggcggt

SEQ ID NO: 407723 - DNA, 503 bp, Oryza sativa
gcgtctgtccttccactgtccacacctcgcctcgcgtcgagcacctggcaatggcggctcacgcgccctcgatgcgccccacccacgccctctgctcgtgagatcgcctgctgcgctctctccccgcgcgcgcgcgcgcctccctccctgtttgttgaatccaagagcgagcccgaccgcatcttggaccctcccctcccgcggttcttggacgacgccggtgcgcgcggtggctatgctgtcccgtgccgaaccgggccgaatgctggcagatcatgcgcccgcctgcggtgggatcggccactgcattcatgcttgcacaactggttgcgacattcctcgctgtctatgccaactggggctctgccaggatcaagggcattggctggggctgggctggcgttatctggctttacagcattgtgttctacttccctcttgacatcttcaagttcttcatccgctttgtgctgagtggaagggcctgggacaacctccttgag

SEQ ID NO: 407724 - DNA, 479 bp, Oryza sativa
tcgtttttatctactgtctgctatgctcttcctgagctccgtgcgaaggaagcttctggacggatctcccgtatgactacaagccgatggggaggtgctggtggtcatgcgcctccgcctccgtcgtcaccgcggactccgccccaggctccgccgcagggatggatggccttgtgacggagggcgatctgcgggagctggtgggcaacctcggggtggccgcgcgtgagccggagagggaggaggtggcagcaggtggtcgccaaagggaacgatgacttctcctacagtgtgaggtgcgacatgcccacagatgctcgtcctgaagatcttagtgctgcagcactgatactatgctgaacctgacttctgtgccctgcggagctgcatttacgaatgggaaaatgataaaagtccgcttgtggtacaacaccactggctgctttgagttatcaggcaatggttggtctgtaaaaact

SEQ ID NO: 407725 - DNA, 480 bp, Oryza sativa
gtgtgtagctgaagctcaaggttcagtacctggacacggcctacatcggcggattctgcagctacggcaaggatctgagcaagatctgcaccatgcacgccaactgctgcatcggcctccaatccaagatcagcgatctcaagggtgttcttgctgactggaagaactacaccaggttgccaccctgggcaaagcccaatgccaggtggactgtgcctggtaaatgcatccattgattttgattgccgatcgggcagtatctggtgttgtaggctacgtacagtcaggaagatagctttatttgcacatgaaagggcgaattgcgttatttttggtttgctgtagattgatgggttcgatttcaagttatattactgtatacctgacggcagacaagcatacgcatgatgggcacactatatgatatgatatgatatgataggactttagatgtaagatgtcatcatgtcttcagctatg

SEQ ID NO: 407726 - DNA, 505 bp, Oryza sativa
tttttctcgaaggacagagttaagccttctcccttgccagacagctggaagctgaaggaaatcttcgctaccggtattgtgcttggaagctaccttgctctgatgaccgttattttcttctgggccatgcacaagacagactttttcacggacaaattcggtgtcagatcaatcaggaacagtgaacatgagatgatgtctgcactgtacctccaagtcagtattgtgagtcaggccctcatcttcgtcacccgttctcgcagctggtccttcatcgaacgccctggtcttctcttggtcactgcattcatgcttgcacaactggttgcgacattcctcgctgtctatgccaactggggctttgccaggatcaagggcattggctggggctgggctggcgttatctggctttacagcattgtgttctacttccctcttgacatcttcaagttcttcatccgctttgtgctgagtggaagggcctgggacaacctccttgagaaca

SEQ ID NO: 407727 - DNA, 495 bp, Oryza sativa
ttatcgatgtcttcgagttcaactcaaagtttactgacaagctgcgaagattaaagatacctcttcctccagttgatgagaagaagaaagtagctgaagatgttgataaggatcgcagatacgcaattgatgcatcaattgtgcgtattatgaagagtcgcaaagtattgggtcatcagcaacttgtgatggaatgtgtggagcagcttggacgcatgtttaagcctgacttcaaggcaataaagaagcgaattgaggatcttatcacaagggattacttggagagggataaagacaacccaaatgtgtacagatacttggcttgatgggttttctgctggtggacggatacttgccggagcctgacttctgtgccctgcggtgctgcatttacgaatgggaaaatgataaaagtcgtcttgtggtacaacaccactggctgctttgagttttcagcaatggttggtctgtcaaaaactagcagagtccgcagga

SEQ ID NO: 407728 - DNA, 390 bp, Oryza sativa
ttgtcgggactacccgctgagtttaagcatataaataagtggaggagagtttggaggctatggcgctgaattactcgtcgtgctcgctcaccagctcgttcctgatgaacgaggactgcgctggcatgatgtgtgggtgcgggtgctggtcggaggaggcctcgccgctgtcatccggtggggtgaactccctgtggtgggatgagctggagtttgagctggagctggaagaggaagaggagttcgaccctgtggacctcttgcctaccgaccccttcggcatgaacctggagaccacgttcaccgcggcgatcgccagttgcattgaggacctcacagtcatgtccagtgctgggcgttttggagacagccccgatgaatgctgttttt

SEQ ID NO: 407729 - DNA, 313 bp, Oryza sativa
tggtattccgagtaggagagagcgagagagagaggtggggagggaagaagagtgactccacactccacactctcatcccctggtccctttcttggatcatgagaaaccgcgcttcacaaccgcaatactaggcagcattaggaccggggactcggctacgtggtgttcggccctggatcgcagcgtggaattaagaccggcgaggactcagcgacggaggcacccccgtcattcctacgcttttgtgcccgtcagcttctcgcagcgagagagagagagagatcgaccaggcgttcactgaattttactagaa

SEQ ID NO: 407730 - DNA, 506 bp, Oryza sativa
gcgttccttctctaatctcaagtctctgtctcgaggtgctcgcatctccactcgccatgggcaagattaagatcggaatcaacggtttcggaaggatcgggaggctcgtggccagtgtggccctccagagcgaggatgtcgagctcgtcgccgtcaacgaccccttcatcaccaccgactacatgacctacatgttcaagtacgataccgtgcacggccaatggaagcacagcgacatcaagatcaaggactccaagactctgctcttgggcgagaagccggtcaccgttttcggcatcaggaaccctgacgagattccgtgggctgaggctggtgctgagtatgtcgtggagtcaccggtgtcttcactgacaaggagaaggctgctgctcacttgaagggtggtgccagaaggttgtcatctcagccccgagcaaagatgcccgaatgtttgtctgcggtgtcaacgaggacaagtacacttcagatattgatattgtctcaaa

SEQ ID NO: 407731 - DNA, 413 bp, Oryza sativa
  unsure (1)..(413): unsure at all n locations
tgttaatgccggtgagccggatcgcggtgggcgcccccggcgagctgtcccacccggacacggccaaggccgccgtcgccgagttcatctctatgctcatcttcgtcttcgccggatcgggatccggcatggccttcagcaagctgacggacggcggcggcacgacgccgtcggggctgatcgccgcctccctggcgcacgcgctggccctgttcgtggcggtggcggtgggagccaacatctccggcgggcacgtgaacccggcggtgacattcggcgcgttcgtgggggggaacatcagcctggtgaaggcggctggtgtactggggtggcgcagctgctggngtcggtggtggcgtgcctgctgtcaagacggaacggncggcgccgtcgtgggtgccttctcgctgtcg

SEQ ID NO: 407732 - DNA, 459 bp, Oryza sativa
cttctttctgtcgaaccctctccagtctccactccactgaatcctcccacctcggctcgaaggaatggcaagcggtagtgaagctgagaagtcacctgaggttgtgctggagtggcctaagaaggacaagaagaggcttctacatgctgtttaccgtgttggagatttggatcgcaccattaaatgttacacagaatgctttggaatgaaattactgaggaaaagagatgtgcctgaagagaaatatacgaatgcatttcttgggtttggacctgaggacaccaactttgcacttgaattgacatacaattatgctgttgataagtacgacattggagcaggatttgggcatttcgctattgcaactgaggacgtgtacaaattggctgagaaaattaaatccagttgttgctgcaagatcactcgtgaacctggtcctgtaagggaggatccactgtg

SEQ ID NO: 407733 - DNA, 473 bp, Oryza sativa
gatttttatgtcacgatggtgtttcctgaaccttggtgcatgcctcgtctcttcactgctgatatcgcggctttctatgagagttactacactaacaaaggagttaagatcgtgaagggtacagtagctgttggttttgatgctgatgctaatggtgatgtcacagcagttaacctgaagaatggcagtgtgcttgaagctgatattgctgttgttggtgttgggggcagaccgctgactactctctttaaaggtcaagttgctgaggagaaaggtggaattaagaccgatgctttctttgaaacaagtgttcctggagtctatgctgtcggtgatgtggccaccttccccatgaagatgtacaatgagttgaggagagtggaacatgttgaccatgctaggaagtctgcagagcaggctgtaaaggcaatcaagggaaaagagtccggcgagtccgttgtggagtatgacta

SEQ ID NO: 407734 - DNA, 431 bp, Oryza sativa
ctctctataaatatttccagtccgagggataggagcggcgacgacaggcggctcccctccagcgctggctccggcgagcccgatcctccttcctccaaagagtactacctgctccctgcggtaacaggttgcccccccccgtgccgccgccccggcatcaccggcgccgaaaggcatcaacgtgccgtcgcggccccggccggccggcctcctcccctttgcctcgctttgctcccgctacgatcaccggccgcccgcccttgtccgccacccaccgccggtccgccgcctcctaggtcctgtctccaaacccgatcgcccacttccccctacccacagggaactctcggcatattaccaacgacagcctgcagaagctgatggtgctggccatgctcacggtgtggagacacctcagccggcgggggagc

SEQ ID NO: 407735 - DNA, 460 bp, Oryza sativa
  unsure (1)..(460): unsure at all n locations
gtgatggagaaccagttccaggatggcaaggaggaggtcatcgaagcttggtacatggatgacagtgaagaggaccagaggcttcctcatcatcgtgagcccaaagaattcattcctcttagcaaactttcagagttaggaatattaagctggcgcctgaatgctgatgactgggagaatgatgagaacctcaagaaaatccgtgaggccaggggatactcttacatggatatttgtgatgtgtgtccagaaaagctgccaaactatgaggctaagctgaaaaatttctttgaagaacacttgcatactgatgaagagatacgctattgtcttagggaaagtggatatcccgatgtcagggaccaaaatgatcagtggatccgtgtngcagtgaagaaagggggcatgattgctttgcctgcgggaatgtattaccgcttacattggacagtgacaacta

SEQ ID NO: 407736 - DNA, 400 bp, Oryza sativa
tccagatctaagcaggttgaaatggccacgacgcagcactccaacggcggcgccgccggcgacaacggcgaggccgcgccgccgtcggttccgccctccctcgcgccgtcgcggaaggtggccctggtgacgggcatcacggtgcaggacgggagctacctgacggagctgctgctcggcaagggctacgaggagcacggccttattcgccgttgctccaacttcaacacccagcggctcgaccatatctaccacgacccgaactcacagtcgtcgactgcgagtcccctgttgcgcctacactacgtttgacttttagatatgttcttgtttcgtcgcgcgctctttctcatgatgcccggacatggtcttcaaccgagtggaacatgttgaccatgct

SEQ ID NO: 407737 - DNA, 464 bp, Oryza sativa
gcgtctgtttggtcggtctggatttcgatttaccccaaatccaccgcaggagccaagtcgccgtcagtatgcgaagtggagatggcccgtacgaagcagaccgcccgcaagtccacctgcggcaaggtcccgaggaagctgctcgccaccaaggcggcgtggaagtctgctccgaccaccggctggtgtgtagaagtcccaccgctacaggccggggtcggtggttctccgctagatccgcatgtactcagaagagcacggagctgctgatccgcaagctgcctttcgagcgcctggtacgcgagatcgctcaggactgtaagaccgacctacgatttcagagccacgcggtgcttcgcctacatgagggccgcctggcctacctcgtcggtctcttggaggacaccaacctatgtgccatgcacgccaagcgcgtcatcatcatgcccaaggacatgcagctc

SEQ ID NO: 407738 - DNA, 444 bp, Oryza sativa
ctttctcttgggttctccgccgccgtcgcagcatcagcccaatccgacgccatgagggagtgcatctcgatccacatcggccaggccggtatccaggtcgggaacgcgtgctgggagctctactgcctcgagcatggcatccaggctgatggtcagatgcccagtgacaggactgttggtggaggtgatgatgctttcaacaccttcttcagtgagactggtgctgggaagcatgttccccgagctgtatttgttgatcttgagcctactgtgattgatgaggtgaggactggttgataccgccagctcttccaccctgagcagctcatcaatggcaaggaggatgcagctaacaactttgcccgtggtcactacaccattggcaaggagattgacgatctgagccttgaccgcatcaagaagctagctgacaactgcactggt

SEQ ID NO: 407739 - DNA, 482 bp, Oryza sativa
ctcattcttccattgatgggaaagaagttataaactttgcatcagcaaattatcttggtttgattggcaatgagaagattattgattcttgtgttggttcactggagaaatatggtgttggttcttgtggtccacgtggcttttatggaacaattgatgtccaccttgactgtgaggcaaaaatagcgaagtttcttggaactccagactcaattctgtattcatatgggatttctacaatatttagtgtgatacctgccttttgtaagaaaggagacatcatagttgctgatgaaggtgtgcactgggcagtgcacaatggtcttcatctgtcaagaagcactgttgtttattttaaacacaatgatatggcttcacttgcaaacactttggaaaaacttacacgtggaaataaacgagcagaaaagatcagacgatacattgttgtagaatctatctaccagaattctggtcaaattgct

SEQ ID NO: 407740 - DNA, 388 bp, Oryza sativa
tctttgaaacaaacccctctcactcccagatacctgctgctgccactagcccactaccatggatccttgcaagttccggccgtcgagctcgttcgacacgaagacgacgacgacgaacgcgggagctccggtgtggaacgacaacgaggcgctgacagtggggcccagggggccgatcctcctcgaggactaccacctgatcgagaaggtggcgcacttcgcccgggagcgcatcccggagcgcgtggtccacgcccgcggcgcctccgccaagggcttcttcgagtgcacccacgacgtcaccgacatcacctgcgccgacgttgtccggtccccgggcgcccagacccccgtcatggatcgtttgtcacccgtcatccacgagcgc

SEQ ID NO: 407741 - DNA, 453 bp, Oryza sativa
ctgtcgcgtggggaccggcacacctcgaagccggaggcggagtacccggcgctgcggttcatccgcagctgcagcgcgtcgctggcgccggcgatcatggagaagctggaggcggcgttcggggcgccggtggtggaggcgtacgcgatgacggaggcgtcgcacctgatgacgtcgaacccgctgccggaggacggggcgaggaaggccgggtcggtggggcgcgcggtgggtcaggagatggcgatcctggacgaggaagggcggcgggtggaggccgggaagagcgccgaggtgtgcgtgcgcggcgccaacgtgacgagcgggtacaaggggaacccggaggcgaacgaggcggcgctccggttggggttggttccacaccggcgactcggcgtcgtggacgaggaggggtacctgcggctggtggggcggaacaaggagctgatcaac

SEQ ID NO: 407742 - DNA, 486 bp, Oryza sativa
atttccatttccccctcgatcccacacaattcgatcccaatttccggttttcgtgtgtgaatcttttggagagatcgatgaagttcggcaagagcctgagcagccagatcgtggagatgcagccggagtggcgcgacaacttcctctcctacaaggacctcaagaagcgcctcaacctcatctccggcggcgccgccggggagagggcgagcaagcggcgtcgcgtcggtggcgcgacggcggtgacggtgacggcggcggcggcgggcgggatgacgctggagcaggccgggttcgtcggcctcctcgacgccgagctcgacaagttcaacttcttcttcctcgagaaggaggaggatgtacgtcatcaagcagaaggagctccgggagaggaagatggcatcggcggaggaggtgatgcgcgtgaggaaggagatcgtcgatctcacggcgagatggtgctgctcgagaattacagcgcgctca

SEQ ID NO: 407743 - DNA, 487 bp, Oryza sativa
tgttatcacaaacagatcgatcgctcctatcctctttcccccttctcctcgcgtcgcctccacaacccaaccaaccatggcgaggccgccgcaggaggcgatcgacaccttcgtcagcatcaccggcgccgacgaggccctcgccgtccgcaagctcgaggaacatggtggcgaccttaacacggcaatcaatgcacatttcaatgaaggagacagtacagtgaacagagccagtcaaaacaatatacctgagagtcatgatgatatgatggacctggatggaccacttgataatgcatttagaagactctttgttccctgaaactttgcgtgacccttttgcactgatggacacaaactttcagcaaaattattttgacgaggttggttccacagatcttttcggtcatggcccacaggtttcacaccctaaggaggtgcgagagatacctacgaagttaaggatagcaacccgcatacaggccct

SEQ ID NO: 407744 - DNA, 513 bp, Oryza sativa
gtggtctgtacgcgactcctcccccctccgccgccgccgccgccgcagcgagaccccggcgaatggcgtcccgcatcgcctctcgcctcctccgccgctccaacgcgactctaggcctcatcaggagttattcacatgccaggaactacagcagtcaactttcagctcttattccaattggttcccagagctcaaagcttacaagaagacgctattacttgccaaatgcctctccgtaccaactctggagtaggtcatttgcatctgacaatggagaccaggttgaagctgttgtccctttcatgggtgaatctgtaactgatggaactcttgctaacttcttgaagaaacctggtgacagagttgaggctgatgagcccatagcacagattgaaactgataaggttactatagatgttgctagtccggaagctggtgttattgaaaagtttcattgctagcgaaggtgatactgttactccaggcaccaaagttgctatcatatcaaagtct

SEQ ID NO: 407745 - DNA, 513 bp, Oryza sativa
cctgtgtggtagatttgggaaactaaacaagagagttacattcccaatgaagttagacctaacgccatacatgagtagcactgatggaagtgaccaatacgatctctatgctgttgttgttcatctggatatgctcaatgcttcattttttgggcattatatatgctatataaaaaattaccgaggacgctggtataaaattgatgactgcaaggttatggctgttgatgaggaggaagtacatgctcaaggtgcttatatgcttctatatagcaggagaacagctcgccctaggccactaattgcagtagaagaactcatgaaacagcagcaacagttgaaagtatgccctttgaatggacaaaatcatttgatacaagaggatgtgccattagaaggcgtgccatctttgaaaccctcagaagatctggaagttgattttgaatccaacaacatatctttacatactatggacagagagccagacctggattttcatgtgagctttgatag

SEQ ID NO: 407746 - DNA, 416 bp, Oryza sativa
atgcgttcttcttgagcttgtgctcatgtcttaatttctttgcagtgatgggcgaggcagagctcgactacggcgaggaggccggtgatgtatatgccgaggccgacaactccagtgaggcaggatgactggacgacgacagacgggcgcggcggacgggcacgttctggacagcgagcgcgcacatcatcaccgacgtcatcggctccggcatactgccactggcttgggcgatcgcgcatctggcctgagtggccggccccgccgagatgctcctattggccttcgccatatactacacctccaccctcctcgtcgagtgctaccgcaccggcgaccctgccaccggaatgctcaactacacctacatggacgccgtgcgcgccaacatttgcggtgccaaggtcaccttttgc

SEQ ID NO: 407747 - DNA, 487 bp, Oryza sativa
gcgatcctttcaacgctgccgctgaatctcactttctctctctgttcttggtgcttccgccgccatggctgctcccagcgtcgccgtcgacaacctcaaccccaaggttttgaattgtgagtatgcagtgcgtggagagattgtgatccatgctcagcgcctgcagcaacagctacagactcaaccagggtctcttccttttgatgagatcctatactgcaacattgggaatccccagtctcttggtcagaagccagttacattcttcagggaggttattgctctttgtgatcatccatgcttgttggaaaaggaggaaaccaaatcattgttcagtgctgatgccatttctcgagcaacaacaattcttgcctcgattcctggaagagcaactggagcatacagccacagccagggcatcaaagggctgcgtgatgcaattgctgctggaattgcatcacgtgacggataccctgcaaatgcagac

SEQ ID NO: 407748 - DNA, 479 bp, Oryza sativa
tttcctctcacctgaccaccatcacctgctcctcctcctgctcttcctccgcgcgcgcgagatccagggagagggagagggagagatcatggcggggacggtgacggtgccgtcggcgtcggtgccgtcgacgccgctgctcaaggacgagctggacatggtgatcccgacgatccgcaacctggacttcctggagatgtggcggcccttcttccagccctaccacctcatcatcgtgcaggacggtgacccgaccaagaccattcgcgttcccgagggcttcgactacgagctctacaaccgcaacgacatcaaccggatcctcggccccaaggcctcctgcatctccttcaaggactccgcatgccgctgcttcggctacatggtctccaagaagaagtacgtcttcaccatcgacgacgactgcttcgttgccaggacccatctggcaaggacatcaatgcttttgagcagcacat

SEQ ID NO: 407749 - DNA, 486 bp, Oryza sativa
ctcttttctgcttccgatcaaatcgatccccaaattccccgatccccgcagccgctcctgcgactcgtaggtctcgtcaagtcggcggcgacgactttgatctctattcaagatgcagatctttgtgaagactctcactggcaagaccataacccttgaggttgagtcctcggataccattgacaatgtaaaggccaagatccaggacaaggagggaatcccaccggaccagcagcgtctcatcttcgctggcaagcagcttgaagatgggcgcacgcttgctgactacaacatccagaaggaatccaccctccaccttgtgctccgcctccggggaggcatgcaaatctttgtcaagaccttgactggcaagactatcaccttgaggctgagtcttctgatactattgacaacgttaaggcaaagatccaggacaaggaaggggattcccccggaccagcagcgtctgatctttgctggcaagca

SEQ ID NO: 407750 - DNA, 485 bp, Oryza sativa
tttctatcacctcgatccattcgcagtagctgcgaggtgtctgacatggcgtcggggcagaaggtggtgaagccgatggaggtgtcggtggaggccgggaacgccggggaggcggcgtggctggacgacgacgggcgggcgcggcggacgggcacgttctggacggcgagcgcgcacatcatcaccgccgtcatcggctccggcgtgctgtcgctggcgtgggcgatcgcgcagctgggctgggtggccggccccgccgtgatgctcctcttcgccttcgtcatctactacaccttcaccctcctcgccgagtgctaccgcaccggcgaccctgccaccggcaagcgcaactacacctacatggacgccgtgcgcgccaaccttggcggcgccaaggtcaccttttgcggtgtcatccagtacgccaacctcgttggcgttgccattggctacaccatcgcgttgttcattagcatgcgcgccat

SEQ ID NO: 407751 - DNA, 486 bp, Oryza sativa
ttttctactagccagtaagctagctaactaactacgtggctatggcccccaccgtgatggcctcctcggccacctccgtggctccattccaagggctcaagtccaccgccggcctccccgtcagccgccgctccaccaactcgggcttcggcaacgtcagcaatggcggaaggatcaagtgcatgcaggtgtggccaattgagggcatcaagaagttcgagaccctatcgtacctgccaccactcaccgtggaggatcttttgaagcagatcgagtacctgcttcgatccaagtgggtgccttgtctcgagttcagcaaggttgggttcgtctaccgtgagaaccacaggtctcccggatactacgatggcaggtattggaccatgtggaagctgcccatgttcggctgcaccgatgccacccaggtgctcaaggagctcgaggaggccaagaaggcctaccctgatgcctttgtccgtatcatcg

SEQ ID NO: 407752 - DNA, 423 bp, Oryza sativa
gctcgcccgcctgcacgtacccgtacttaacttgctggaccgacccactcgttctgatacatatgacatgcgctttacacacaaggagctacatgacccagggccttgcaaacggtgggatcaacgtaccaatgatgtcctcctctccaatattagctaatgctccagctgaaaaaggaggcaaaaacttaatgatggatttcctcatgggtggagtgtcagccgcagtttcaaagactgctgctgctccgattgagcgtgtgaagctgcttatccagaaccaggatgaaatgatcaaggctggtaggctctcagagccatacaagggtattggggactgcttcggacgcactatcaaggatgagaggttttgctttattggggagaggaaacactgccaatgttatccgtttcttccccacc

SEQ ID NO: 407753 - DNA, 498 bp, Oryza sativa
agtgcggttcgttgctttctacaatgagcttgacaaacgactgggaggaacatctggctgtcaagcacttctgtgtggagggtcagcttgaattcaaggccatcctgtttgtaccaaagagagcgccatttgacctctttgacaccaggaagaagcaaaacaacatcaagctgtacgtacgccgggtgtttatcatggacaactgtgaggagttgatcccagagtggctcagctttgtcaagggcattgctgattctgaagaccttcccctcaacatctcacgtgagatgctccagcagaacaagatcctgaaggtgatccgcaagaaccttgtgaagaagtgcgtgaagctcttctttgagatcgcttggaacaaggaagactacaacatgttctactaggctttctccaagaatcttaagcttggcatccatgaggattccaccaacatgacccagaattgctgagctcctgaggcatcacatccaccaagagtgg

SEQ ID NO: 407754 - DNA, 510 bp, Oryza sativa
  unsure (1)..(510): unsure at all n locations
atctgtttgactgcttatggttttgaccttatccgtggagccaagactcttgaccttatcaagagtgctggcttcccctctggaaagtacctctttgccggtgttgtggatggacgcaacatctgggctgatgatctcgctgcatctgtcactacccttgagtctcttgaggctattgttggaaaggacaagcttgtggtctcgacttcctgctcactcatgcacaccgctgtggatcttgtaaatgagaccaagctcgatagcgagattaagtcatggctcgcttttgctgcccaaaaggtggttgaggtgaatgcccttgctaaggcattggctggacagaaggatgaggcttactttgcagcaaacgctgctgctcaggcctccaggaggtcatcacctcgtgtgacaaacgaggcagtccaaaaggctgctgctgctctgaaggggtctgaccaccgncgtgctaccaatgttagcgctagactggacgcacagcagaagaagctc

SEQ ID NO: 407755 - DNA, 431 bp, Oryza sativa
gtcggtatacgccgccgccgcactcatggccagcctcgcgccgcagaccaagttgctgagggacgggaagtggtcggagcaggacgcggcgatcctggtgcccggggacatcatcagcatcaagctcggcgacatcatcccggcggacgcgcggctgatggagggcgacccgctcaagatcgaccagtcggcgctcaccggcgagtcgctccccgtcaacaagatgcccggcgacagcatctactcgggttccacctgcaagcagggcgagattgaggccgtcgtcatcgccaccggcgtccacacctttttcggaatggtcgcccaccttgttgactgcaccaacaacgtcggccattttcagaaggggctgacggcgatcgggaacttctgcatctgctccatcgcggacgggatgctgatcgagatca

SEQ ID NO: 407756 - DNA, 480 bp, Oryza sativa
gcgtcttcttcgccgccgccgccgaatccgagacccccatctcggattcacctctcccgcctccggcctccctcaccgtctccccacgcgcgtcagtcatggcgggaatggcaccagagggatcccagtttgatgctaagcactatgattctaaaatgcaggagcttctgaaccaaggtgaaaccgaggagttcttcacatcttatgatgaagttcatgagagttttgatgacatgggtctccaagagaaccttctcagaggcatctatgcctatggtttcgagaagccttcagccattcagcaaaggggtattgtccctttctgcaagggtcttgatgtgattcagcaagctcagtcaggaacaggaaagactgccaccttctgttctggaattttgcagcaacttgactatgctgtggtttgagtgccaggccttggtccttgctcctactcgtgagcttgcacagcaaattgagaaa

SEQ ID NO: 407757 - DNA, 473 bp, Oryza sativa
ttttctgatcatcatatatctcttgtgagcttcagcaatgggggctctgccaagggctctagtcctcggcgtttgcgccgccgtcttgctggtgaacgtgctcgccgttgccgccgacggcgacgccgcggcggcggcgtccatggtcgtcggattggccaagtgcgccgactgcaccaggaagaacatgaaagctgaggccgttttcaagggtgttcgcgtggcgatcaagtgcaagaacagcaacggcgagtacgagacgaaggccaccggcgaggtcggcaagtctggcgcgttcgccgtgcccctcgcggcggacctcctcggcgacgacggcgagctgaggcagcaatgcttcgcgcagctgcacagcgcggcgtcgaaccagccatgccccgggcaggagccgtcgtggatcgtcaacgccgccgccgacaagaagaagaccttcgtggccgtcgccggcgacaccc

SEQ ID NO: 407758 - DNA, 490 bp, Oryza sativa
cctgtgtcaaggagagggtagtagcaccttgctctcctttgccttcagagaaaccggaagcaatggcgtctgctactctcctcaagtcatctttccttcccaagaagtctgaatggggtgccacccgccaggctgccgcccccaagccggtgactgtctccatggttgtccgcgctggtgcctacgacgatgagcttgtcaagaccgcgaaaaccattgcatcaccaggaaggggtatccttgccatggatgagtcgaacgcgacctgcggtaagaggcttgcgtcaattggccttgagaacaccgaggccaaccgccaggcttaccggaccctccttgtcaccgcaccgggcttgggacagtacatctccggtgctatcctcttcgaggagactctgtaccagtcaactgtagatggcaagaagattgtcgacatcctcactgagcagaaaatcgttccaggtatcaaggtcgacaagggtcttgtgcc

SEQ ID NO: 407759 - DNA, 431 bp, Oryza sativa
tctctgggtgatagggtttgtaactttcttcttgagttctatccttgacaatttgacttccactattgagatggtttcattgcttcggaaactagtacctccatcagagtacagaaaattgttaggcgctgttgttgtgatatctgcaaatgctgggggtgcatggacaccaattggtgatgtgacgaccactatgttgtggattcatggtcagattacaacgttgaacacaatgcagggcttgcttgttccctcagatgtttcattggcagttccactggctctgatgtccctcacgagtgaagcaaatggatcttctcagaaatcttccagcttgctgtcatcagagcagatggctcctcgaggacaacttgtctttgctgttggccttggagccttagtgtttgtcccagtgtttaaagctctcactg

SEQ ID NO: 407760 - DNA, 427 bp, Oryza sativa
atgctggctcgcccgccggcaccggcccggacttactggctggacccacgcatgcgttctaattcagtccgacggccgttggcaagggacgcggagacacagttcgcttcgatcacgtacacctacactagatggcatactgtcctgcttgcttgcgcacgaccatgccttcagagcaagtggaagctgctttcaaggccatcgagttggacggcgagagcgatgtatctaagctcaagccggcacttgctgcatgcactgtacaaaggactgtgacagacgtcttcatcaacgggaagcatattggtgactggaatgatacctcgccatagcacactgacggcaacctggtgcctgtggtgaccgaggctggagcaatctccagccctgcaatgacgacagtcaccgcacaggtgcccgagggaca

SEQ ID NO: 407761 - DNA, 494 bp, Oryza sativa
ccctgtttcggaatgagaaagcaagacggtacttgagcagcatgagaaagaaagatccagtccccttctctcaaaagtttcctaatgcagatcctttggcactaaaactcttgcaacggttattagcctttgatccaaaggaccgtccaactgctgaagaggcattgactgatccatactttaaaggcctttccaagattgatagagaaccatcatgccagccaatcagaaaactggagtttgaatttgagcagaaaaaattgtctaaggaagatataagggagctgatattccaggagatattggaatatcatccacaattgcagaagaactacagaaatggaagagagagagcaacctttctctacccaagtgcggttgatcagtttaagaagcagttctctaatcttgaagaaagcaatggaagtggctcagcaattccaatggaaagaaaacatgcatcgcttcctaggtctactactgttcactctact

SEQ ID NO: 407762 - DNA, 469 bp, Oryza sativa
tctcgtggaagggagacatcctcgcaatcgcagggacagagaatgatctggtcaaaggatcagactccaaattcgagaatgcggtgttgaagaagctcgacggacagctcggcggcctcctgtcggaggcatctgcggaggaggatttcaccggcaaagccgggcaatcagtggtgctccgcctcccggggcagggtttcaagagggtgggtctgatcggccttgggcagaacgccccctccaccacaacggcttgcaagggcatcggcgaatccgtcgcgttagttgccaagtctgctcaagctagcagcgcggctcttgtttttgctttcagtgggggggatcctggaagattttacgcttactgctgcggcttctattgctctagggactgtgcctgggctgcccgaggacagtagatacatgtttggattcctaattaagtgcaacattcatcaagtcgttcctt

SEQ ID NO: 407763 - DNA, 94 bp, Oryza sativa
tggtcccagcccgccgcccgttgggaagggagcttcgaggcggccgaccgagacgcgtcggccggaccagcttggccgctggcacgggcccttg

SEQ ID NO: 407764 - DNA, 404 bp, Oryza sativa
taatccccactttattagcaccaaccccgtctccttcctccattcctccgccgctagaaccttctagaagctctcctcctcctcccatggcggcgacgatcgtgtccgtcaaggcgcgccagatcttcgacagcaggggcaaccccaccgtcgaggtcgatgtgtgctgctcagatggaacctttgcaagggctgcagttcccagtggtgcatcaactggtgtctatgaagctctcgaattgagggacggtggatctgattacttgggaaagggtgtttccaaggctgtcgacaatgtgaactcggttattgccccagctctgattggcaaggaccctacgtcacaggctgagcttgataactttatggttcagcagcttgatggaaccaaaaatggagtgggg

SEQ ID NO: 407765 - DNA, 490 bp, Oryza sativa
gtctagcagtccatggccgcgtcaccgatctccgcgccggcgacgctcaggctcttcttccacgactgcgccgtcaggggttgtgacgcgtcgatcatgatcgtgaactcgaacggcgacgacgagtggcggaactcagacaaccagtcgctgaagccggaggggttcacgacggtgctcaacgccaaggccgccgtcgacagcgatccacagtgccgctacaaggtgtcctgcgccgacatattggcgctcgccgcaagagaatccgtctaccagagcggagggcccaactaccaggtggagctggggagatacgacggcagggtgtcaaccagagacagcgtagtgctgccgcatgccaacttcaacctggaccagctcaacgctttcttcgccggcctcggcctctcccagactgacatgatcgctctctcaggtgggcacacgttcggcgcggcggactgcaggttcttccagtacaggatcggcg

SEQ ID NO: 407766 - DNA, 492 bp, Oryza sativa
  unsure (1)..(492): unsure at all n locations
tcgatttagaaaacggcgcccactatgaacacctggaggggactaaacatgctagaaacatctctcgtcgctctccaagatctctcactggacaagatatttgatgaagccggtaggaaggccctatacaacgagatcccgaaattgatggaacagggttacgtgtacctgcctggtggagcgtgcttgtccgggatggggcgccatgtttctttcgagcaagctgtagcatggaaggtgctcggagaagacaacaatgtgcactgcctcgccttctgcttcgtcaactggtccttcgtgtgacccaaaatccaatccaccatgctcgcagtcatcgtcgttgtcgtcagatctccattttttgcaatctctgtagaagagaggacaccaaaccaaccacanacctgtcagctgttagctaatgattctactagcttttctagatctttgaggcaaaatgctgccggtgcctgtaagagtgggtgcgtgcgt

SEQ ID NO: 407767 - DNA, 471 bp, Oryza sativa
atcctgtacactgcatacgatttgcaacagctggagaagatgatccaaatagcactcctctgcactcatgtggagcctcatcttcgccctgctatgtcagaggttgtgcagatgctggaaggcaatgttgtcccagcggagcaatgggaggagtggcaggtggctgaacttgcccggcggcatcagcatgagatgaaccaacagcgcaggctgttcagcttcagtgaggagtctctcaatatccaggaagccattcagctatccagtggcagataactggaagatcatacaattgtatcacatgagcttcacttgtttcccaagaaagggtgaaggagcgaggagtctctcaatatccaggaagacattcagctatccggtggcagataactggaagatcatacaattgtatcacatgagcttcacttgtttcccaagaaagggtgaagggagacaacagcactcgctata

SEQ ID NO: 407768 - DNA, 493 bp, Oryza sativa
ccttgctctcgcctctcctcctcccccgtcttgccttcgcgcgcgccacccccacacacgcgaccatggcggcagtggcaggaggcgcagcgcgggcgctgtcgcaggcggagcaggacgtgcagatgatgctcgccgccgacgtccacctcggcaccaagaactgcgacttccagatggagcgctacgtgtacaagcgccgctccgatggtatctacatcatcaacctcggcaagacatgggagaagctgcagctcgcggcgagggtgattgttgccattgagaacccccaggacatcattgtccagtcggcccgcccctacggccagcgcgccgtcctcaagttcgcgcagtacactggcgcgcacgccattgctggaaggcatacgcctggtacatttaccaatcagctccagacctccttcagcgagccccgtctgctcatcctcactgacccaaggaccgatcaccagccaatcaaggagtctgctct

SEQ ID NO: 407769 - DNA, 495 bp, Oryza sativa
cttgcttgccctcctcaacctcaaccctccgcctgctcatctcctgctccccacgacggcctcctccgccgccgccaagagcccgccggtataacaggctcgcggcgtcggcttcggcggcgcgggagatgccgtggccgcacgtgctgacggtggccggctccgactccggcggcggcgccggcatccaggccgacatcaaggcctgcgccgcgctgggagcctactgctcctccgtcgtcaccgccgtcactgcccagaacaccgccggcgtccaggggattcatgtggtgccagaggagttcatccgggagcagctcaactcggttctttcggacatgtcggtggatgtggtcaagacaggaatgctcccttcaatcggagtagtcagagttttatgtgaaagtctaaagaagtttccagtcaaagctttagtggtggatccagttatggtgtccacaagtggagatactctttcagaatcatctactctct

SEQ ID NO: 407770 - DNA, 470 bp, Oryza sativa
tctgttgcgccggaggtggaagacggacggggtagagttggggtctcgcggtgagccgattcctctctagtggtcgcgcctggtgtgttcgccgacgacgccggcgtcgcgtcagccatgggtgggctcgaggagatcaagaatgaggccgttgatctggagaacataccgatcgaggaggtgttcgagcagctgaaatgtacgcgcgaggggctctcctccgaggaggggaaccggcgtatcgagatgttcggccccaacaagctcgaggagaagaaggagagcacgatactcaagttcttggggttcatgtggaacccgctgtcgtgggccatggaaatggccgtcatcatggtcatctagctggtcaacggcggcggcaagccaccggactgagaggacttcatcagtatcatagccctgctggttatcaacttcaccatctccttgattgaaaagaacaacgcccg

SEQ ID NO: 407771 - DNA, 508 bp, Oryza sativa
  unsure (1)..(508): unsure at all n locations
tctatttagttcatgccacccattatgaatccctgagggaaattgctatgaagatactgcaaaacggtgtttctaccgttccaattatgttttcctcatcaccagatggctcatatccacaattgttgcatcttgcttccctttctggaattttgaaatgtatttgtagatattttaaaaattctcaaggtaatttacctattttgagccaacctgtatgcacaattcctctgggtacctgggttccaaaaattggtgatcctaatggccgtccattggctatgttgcggcctaacacatctcttagcgctgccctgaatttgctggttcaagctggtgtgagctcaataccaattgtggatgacaatgactcactgcttgacacatattccagaagtgacatcacagctcttgcaaaagacatggtgtacacacacattcgnctagatgagatgaccattcatcaggctctgcagcttggacaggatgcaaattcgcccttggattc

SEQ ID NO: 407772 - DNA, 494 bp, Oryza sativa
tcctagacgacacactccccccaccttcttgcgccacaagccgaagccgccggaatcctcgacgagacgccccgccgccgccgccgccgccggcgacgccccccctcaccccccgcaggcatcggagaaatataatataaatacagttaaggggttgaagcaacttcacaatgagtagcatagggactggttatgatctttccgtcaccaccttctccccagatggccgtgtcttccaggttgagtatgctggcaaggccgtcgacaacagcgggactgttgttggcatcaaatgcaaagatgggattgtccttggtgtggagaagctggtaacatcaaagatgattttgaaggggtcgaatcggagactccactctgtgcaccgacactctggcttggctgctgctggcttagctgcggatggtaggcagatagtctctagggcaaagtcagaggcagccagttatgaaaaggtgtatggagaacccatgcct

SEQ ID NO: 407773 - DNA, 494 bp, Oryza sativa
tcttccgctgctgctccagcatgcgcatcctccggggaatcctcgccgtctccggccacctcgccggccgccgcgcgccggcgaacaacgcccacctggcactcttctcccgcgccctccaaatcctcgcccagcaggagcccgtccgcctccagaagctctcggcgcccgactccgggatcgtggagatgaggctggagcggccggaggccaggaacgccatcgggagggagatgctccaggggttgcggagcgcgatcgagaaggtgaaggctgacgcgacggcgaaagtcgtgctgctggcgagctccgtcccgaaggttttctgcgctggcgctgatctcaaggaaaggaggttaatgagcccttgcgaagttcgcgaatttgtcaattccctaagatctacattcctgtcctttgaggcattgtcaattcctacaattgccattgttgagggagctgcttttggcggtgggttagaattggctctttct

SEQ ID NO: 407774 - DNA, 496 bp, Oryza sativa
attagcatcaaccccgtctccttcctccattcctccgccgctagaaccttctagaagctctcctcctcctcccatggcggcgacgatcgtgtccgtcaaggcgcgccagatcttcgacagcaggggcaaccccaccgtcgaggtcgatgtgtgctgctcagatggaacctttgcaagggctgcagttcccagtggtgcatcaactggtgtctatgaagctctcgaattgagggacggtggatctgattacttgggaaaggggtgtttccaaggctgtcgacaatgtgaactcggttattgccccagctctgattggcaaggaccctacgtcacaggctgagcttgataacttcatggttcagcagcttgatggaaccaaaaatgagtggggggtggtgcaagcagaagcttggtgctaatgcaatcccggctgtgtcactggccatttggcaagctggagctatcatcaagaagattcctctggaccagcacattg

SEQ ID NO: 407775 - DNA, 232 bp, Oryza sativa
acggttaaggttcatcgcgtggtgcccattccagagcaacctgctggcatctggtggtggtgggagtgaccggtgcatcaagttctggaacacacataccggcgcatgcctgaactcgatcgacactgggtcacaagtgtgctcgctggcctggaacaagaatgagagagagctgctaagctcacatggattcgctcagaatcagatcactttgtggaagtacgccgccaat

SEQ ID NO: 407776 - DNA, 304 bp, Oryza sativa
ttagcatactgtcatgctctgaatttattgcttcgccgagaggcacgtgaattcgccaatgaacttcgagcaagcacgaaagcacctaaaaatccagctgtttggcttgaaggttctaatagcggcggtcagaatggcagtagtgctgacacttcaacagtatctgatgcatattcaaagatgctaacaatatttatcccacttcttgtggatgaggagttccttttttgcacattttatgtgctttgaagtacctgcccttgttccaagctgtgcttccgaatgcttaaagttgatcaggggg

SEQ ID NO: 407777 - DNA, 373 bp, Oryza sativa
cttacgcttgggcggtcactgatgaactttttgagtaatatcctacgggaagagggtggctttgagtacaagaaggctattgttgattcaattatcatactcattagagatattcctgatgcaaaagaaagtggtttatttcacttgtgtgaattcattgaagattgtgagttcacttatatgtctactcagatacttcactttttgggaaatgaaggtccaaagacatcagatcctagtaaatacatacgttatatatataacagagtgatacttgaaaatgctactgttcgagctagtgctgtaagtactttggcacagttcggtgcattggttgactcactcaagcctcgaattttttgtccttctgaga

SEQ ID NO: 407778 - DNA, 302 bp, Oryza sativa
ttgggcggcaaccctctggtagccatgggcgccttatcttagtggcaggtgaaccgccggaagctgctcaccagcaagaagcaagcgctggccacgcggctgtccgccggcggcgaggcgttccccggcagcgagcaccggccggccgaccggaagacgtggatggcggagctcgggccggagcggctgcgcgtgcaccagctggtgtggccggggacgcacgactcggcgacgaacaagatcggcatcccgttcgtgacgcgccccttcgcgcagtgccagtcgctgtcggtgtacgagca

SEQ ID NO: 407779 - DNA, 440 bp, Oryza sativa
gtcaatcttgaccaaatccaccctagctacaaattttcttggccgcgcgcggcaggcagatcgagcaggcgagcgaagatgtcgtggcagacgtacgtcgacgagcacctgatgtgcgagatcgagggccaccacctcacctccgccgccatcgtcggccacgacggcaccgtctgggcacagagcgccgccttccctcagttcaaaccggaggagatgaccaacatcatgaaggacttcgacgagccggggttcctcgccccgaccggactgtttcttggaccaaccaagtacatggtcatccaaggtgaacctggcgctgtcattcgtggcaagaagggatcaggaggcatcacagtgaagaagaccgggcaggcgctggtggtcggcatctacgacgagcccatgaccccggggcagtgcaacatgggggttgagag

SEQ ID NO: 407780 - DNA, 461 bp, Oryza sativa
ttctcgctctcgccgcggagcttggaggtttgggtgagatcggagcagcgaagcggaggcagccgcagccatggcgttggccgctcgcctcgtctcccgctcccggcagctatactctgctcaagctgccttggcaaatggaggtgccactcaagtccgcttgtatgccaaggaggcagatcgtactcccgtcaatggtgatgacctattgaagggcatatcttttgaggtaaagaagaaatttgagactgcccttggtgtacttaagaaggaaaagatcactattgatccagatgatcctgcagcagtttctcgttatgcccaagtcatgaagactgtaagacaaaaggcagatcttctatccgactctgagaggattaaatataccattgtcacctttacaaagggcattcctgatgcacggacttacttgatatctcttcaggagatccggataatga

SEQ ID NO: 407781 - DNA, 318 bp, Oryza sativa
ttctcttctctccgatcgatccttcccctctctctctctctctcaatccagataggaaggcggcgagcgagagcgacacgatgcaggcggtgagggaggaggagcaggtggtggaggaggtggcctggcaccttgctttcgctcaggttgtggtgccgtacaactgggtcgtggtgcactacaccgagggggccgaggttatcgagtccgtcctggaggtggtccgccaggaggccgtttactgccactgtttacaaggattccaaggttgccattgattgggcggaggctctttatcttgttcggggaaccattttt

SEQ ID NO: 407782 - DNA, 463 bp, Oryza sativa
tatccgcaaggggtacaaggctggtgcactcaaggaggggatgaagcatggctacgtccgcgaatgcgagtacgtggccatcttcgacgccgacttccagccggaccctgatttcctccgccgcaccatccccttcctcgtccacaactccgacatcgccctcgtccaggcccgctggcgtttcgtgaatgcagatgagtgcttgatgacaaggatgcaggagatgtccttggattaccacttcacagtggagcaggaagtgagctcctctgtctgcgcattcttcggcttcaatggaactgctggtgtgtggcgcgtttccgcggtaaacgaggcgggaggatggaaggaccggaccacagtggaggacatggatctggcatcaaggcgagtctaagggatggcagttgtctaccttggagaagttcggtcaaaagtgagccgccaggccttcaaagccttt

SEQ ID NO: 407783 - DNA, 365 bp, Oryza sativa
tacgtctactacaacgaggcgagcggcgggaggtacgtgccccgcgccgtgctcatggacctcgagcccgggaccatgggctccgtgcgctccggccccttcggccagatcttccgccccgacaacttcgtcttcgggcagtccggcgccggaaacaactgggccaaggggcactacaccgagggcgccgagctcatcgactccgtcctcgacgtcgtccgcaaggaggccgagaactgcgactgcttacaaggattccaagtttgccattcattgggaggaggcactggatctggcatgggaacccttcttatttctaagattagggaggagtccccggatagaatgatgttgaccatttccgt

SEQ ID NO: 407784 - DNA, 173 bp, Oryza sativa
attccgagagttcgtcccacgccgccacgcttccggtctttgcaatcatgcaagagattagcaaactgtcataccgggttactgaggaagatgttatccgtgcacgtaatcagctgaaatcttccatccaactgcacctcgatggttccactgctgtttgtgaggatattggc

SEQ ID NO: 407785 - DNA, 497 bp, Oryza sativa
gcaatcatgcaagagattagcaaactgtcataccgggttactgaggaagatgttatccgtgcacgtaatcagctgaaatcttccatccaactgcacctcgatggttccactgctgttgttgaggatattggccgtcagttactcatctatggtcgaagaattcctattcctgagctttttgcaagaatagatgcagttgacgcaagcacagtcaagcgagtggccaaccgtttcatttttgaccaggatatcgctattgctgcaatgggacccattcagggtcttccggactacaactggttcaggcgccggacctacatgctccgttactagactcttcaaccgatgtactatgtttacattctgcataggcaagataatcgcctcttttggcatcagtatattatggcctcgtccatgcacattgggtgtgccgacgtggaggaaattcttttgggcaccattttccctggttttttttgtccaatatcaaccaa

SEQ ID NO: 407786 - DNA, 407 bp, Oryza sativa
aaaggcaagaatattattcataaatgacgcatgatttttatcaaaacgcttgcaaatgatatcagataagtagagtcaacaagacaaaactgtatctgccaaagcacaccttcccaactccacccaattacgccattatttctgggcaaaagcaaacggcttcccattcctccccttcaccagtctcaaaccataaaccccacaacaaatcctcctaagtgacggcatataagatgatgaaaacaaagcaggatactccagagtcgtcatggcgaacttcaagttgacacttctcatgccacagccgctagtcgtgctgggcagcctagtaccggtagtgcgcgggcttgtagggaccctcaactggaacgctgatgtagtcagcctgcgactggagagcttggtca

SEQ ID NO: 407787 - DNA, 494 bp, Oryza sativa
  unsure (1)..(494): unsure at all n locations
aataattagtgttctcatttattattgccccaagccatcatataaaagggacttcagaaaggtagatcaacagctcataataattcacagtgtatgtctattttcaaaaccatttacaacgaaaaggccggtctaatggcgtcccttccccccaacctacgcccagccgacctctccaatctcctttgctttcttccttccattggaccattcacggtacaggggaagtataatcaagagttctccaatagattgtaactggtactaattaagcagcagtggcaactggagtgtcaggatgggctccccattcagtccatgatccatcatatacaggaacgtcggttttgccaaggcggtggaggcccagagctaatatacatgctgncacaccagtacccatgaggacaccaggggttgatcaagcgataaccttcttgtcaaatcgttacggagctcttctggaggaatagcttttgcgaactgcaagcaac

SEQ ID NO: 407788 - DNA, 331 bp, Oryza sativa
acgaatgaattacaaactggtcccagattgatttaaggctaaaagagaagagtcgaagatgttcaaagaaatttcacaggtccctaacaagccttattataagggcaaagggaactgttttatttatcgaacaaacagatgtggggggggatgatacttttcagaaaaaaaaaactaatgggcggaaatctgaaaaacaattatgatgttgggaacactgaacttaggctcatggttcaggtagacacttttcacaatctttttttattgactgaaaaaggatagatcaaagggacctctcaccaaagcttgtgaactcaacccctaccaa

SEQ ID NO: 407789 - DNA, 442 bp, Oryza sativa
gatcaccaacagctcacctttctgctattattttcctttgcttttgataaacaatgtgtaacaatttacaggtttatggctacaaattaatggaatacaaccccaccccaccagacctgaccaacctagcatttcctatatctacatgacagtataaaaattatcttgttttacccaccaaaaaattataactcagtaaaccgaccatcaggttagcctaaactcacaccatgtcagccctaagcgacacccctctgcaccacccttatttacctgtgtgctatgctacacttcaagcctgactcttgtcttgattggctttagttttactcccatgctttcgggtgacaggagatcgggtgatatacagaatgggctgagggggctgcgcgggctacagtccaatggttggtctgtacaggccatacccatgaagagtact

SEQ ID NO: 407790 - DNA, 471 bp, Oryza sativa
aacatactcaaactgtttttattacaatgttagccgatgacaatggaaagagtaatttaggtacaagcggatcattgacgggggagacaagacattggctgcaccacaacacccaccagtggcgccaacaaggagcgctatccgttataggacgagagaaaaagtaaaacatcacgatgggaagggaaactgaataattctagtagacgatgatgatgatgatggataggctccttaggacgcccgccgcccttagcgtcttgctgctcccatcttggccactggaaggctcactcgtcatcgtcttgatcctcttcgctgccctcgtcggcatcctcatcattgacctcggacttggacttgacagattcctcctcgaagacctcctctttctccttggcgggtgccttcttggcagggctctcgcccttgttgtaggcagcaatggccttgttggactcggccctgagc

SEQ ID NO: 407791 - DNA, 447 bp, Oryza sativa
agaaaacgtcaggtccaattgctcttaattcataaatgggtcactagtctacaacatgaataacgtgtgttatacacactgcagataaaacatgtacagtttgcttaaccaaccattcaaaccagagaggcctagaaaccctcagctgcaattgctcttgattcctaaatgggttactagtctacaacatgaataacgtgtaatatccacgctacacagaggcgctcctttttcacatagccggtgaatgatctgtgaagagggaaccactcaatctctcctgtgcaatataaacgcaaagctttggttttcacggacaaaaggtagcaggtcattctctgtcgtctcctcaatggttggcatcgacttcgcaatgtctttaagtgaaaaaggtatgctggaatcgtcatccaacaggacagaaaagctggtggcattatttgattc

SEQ ID NO: 407792 - DNA, 493 bp, Oryza sativa
  unsure (1)..(493): unsure at all n locations
gaaaattaatatagattatcttattcaattccagagcctacaagtaaaatcaacataacatataataatccaaacttgttccccgtaaaagttactcgtaatttagcacatcaagtaacaaacaaaatttgaacaggtacatccctgtgacggtatgacggtcaggctcattagccctggactttcctcacttgaatgtggtgagtagactcctctctccagatcgacttcactccactctgaacaagggtcacgtagtccccttctttcacgaattgggcgttcagcaagctactaattgctctagagaaagtttcctctgcatcatcagaaaacttcatgtaaatgggaaccacaccctggtagagtgccagacgttgcttcactcgttcctcatttgtaaatgcaaaaattgtanaccagggccnntagtggctgagaaggactgccatggagccggttcgtgtaaacacaataattggggtgcaagggt

SEQ ID NO: 407793 - DNA, 496 bp, Oryza sativa
  unsure (1)..(496): unsure at all n locations
ggctcaaagtcatataaaccttttctattcatgcaggcagaaatttctgactcattttctacaccttctacacattttatcgccgtaaaatgtttactattgcatggtacaatcaatacacatcttcctatcatatacatgaacaacttcttcagtttttacatgtctatgnactcctcgatgggcatcttgatgcccttgatctcgcgtgccagaagatcgcaacttcttcgacctcgtcgccggtgaggcttccagccgagcgcgccggcgaactcctgcgcctggccggcgttcttggctccggggattggcaccacattgccttggcatgtcagccagttcagtgaaacctgggttgggtttcttcccatagctttcttccaatctccttgatcctgttcatgagtggttgaagcttggtgaggaactcaggggtatatgggtttgctcgaggaccggtaggaggtttttctggagtgtattttcctgacag

SEQ ID NO: 407794 - DNA, 473 bp, Oryza sativa
ggccatatgaagcagtaacttgactaaaactgttcgacaacattcaagacaaacaaaaaaacaaataaaattcagtcctattagaacggaaaatcaaatgtagagaaacaaaaaataatgaccaaaactatgagacaacactccaactaatctttgagcaacaattaagtatggtacaaaacaggcgttagttaaaagttaacaaaatctagtgaggcatcataacactgtagtccgtaatcacttggaagcccatatacaaaaaaaatgcctctgcttcttgtctaagcacatgagggcgttggctttaaggtcctggagaacagcactgacaaatagagaactcattcccttttttggggtttctgaatcttgacataaggcaagaacccgaaaaggggggtaattttgggctcccacccaccctgttgagctcggcaaaacattaaaaatgtgtttgcaaagtatgagtt

SEQ ID NO: 407795 - DNA, 495 bp, Oryza sativa
acgtaacaatacgctatgcccaagacaagtcaatactacaacatctgtggcgagtacagaggtacaaaagtcaggcaccgtaagcctttcgattaaaaaccaaactgaaacacgcacgattttttaacaccccacgaaaaacaatctgatagctagctcctttggtggtggaacctaaagagctttatcttcccaaaacatccacatcattatctgtcatgactatatagtttcgatacgtaaaaaggcagcgttcactcagggatatccgccatgtcttcctttcatttaagcccggccaagatgcttcaagccttgttggcaatgctgttggaaagccagtcaagcccctcatacaaccccttaccagaggtagcacatgtgctctggatgtaccagtgccgctggcgcaaggagtgcagaccaagcttgtcggtgatctcagcagcgttcatggcattaggaagatcttgtttgttgaaacaccagcagcac

SEQ ID NO: 407796 - DNA, 416 bp, Oryza sativa
agcaaatcgatccatgcgaccatgcgtgcaaatcagttggagcacaaatttacatgttacacccacaccctacacccatgcataataatacatcgtatatacgtacgtacatacatacccctctcgatcacacgcaccatcgatcgtacaaagttgcgtacatacatacgtacacacatatacgcatacgcacgtacatacatacataattaaaaactcgtaattaattaaatacgtagttgatggcatctctaatggaacttgaggctggtgaggatgttgttgtggacgggatcagcgaggtgatcaagcaggttctgcacggggccaaccccggtgaagagcgcctggacggagaagccgaggaaggcgagcatggcgagcctgccattcttgatctccttgagcttgagctc

SEQ ID NO: 407797 - DNA, 491 bp, Oryza sativa
accgccacctccggtgccatgaacaagtacccgctcctccgccgacgccgcaggctgttcgtcatagccgtggactgctacggcgacgatggcagcgccagcaagaggatgctgcaggtgatccaggaggtgttcagggctgtccggtcggactcccagatgtccaggatctccgggttcgcgctgtcgacggcgatgccgctgccggagacgctcaagcttctgcagctgggcaagatcccaccgaccgacttcgacgcgctcatctgcggcagcggcagcgaggtgtactaccccagcacggcgcagtgtgtggacgccggggggaggctgcgccccgaccaggactacctgctgcacatcaaccaccggtggtctcacgacggcgccaagcagaccattgccaagctcgcgcacgacggatccggcccaatgtcgaaccggacgtggagtcctgcaaccccactgtgcttcttcttcatcaagacccc

SEQ ID NO: 407798 - DNA, 515 bp, Oryza sativa
gtagcatgctcaccccccataagatttattgcaataccatgttctgagtacaatacacataaactacaaaactctatatgaatcttaactgctccttgcacataaaaagcaatatggtcggaaaaaaataatgctaggtaaatttaacaaacagaaaacaaaagaatgtcaattaagaaataaaaagtgagtagatcaacccatacctcatcaatggattgtgtcctgcggttacgatgtagaaacaagtttgacctgagaagtgcaaagtttggttctccagaagctttcgagtttgatccatcgccattagcttcatcagcagaagcatctgaaagcccaagctctgcattgatctcatcatctgtcttctcttgtggtatagagcaattggcaaatgtcttatcttcgttttccttacaagtccatctgagattttcttttgagattttatctgccagttcagttggtatgcagcgccatttttcgcaatcatcacaacaaacccaagcagg

SEQ ID NO: 407799 - DNA, 490 bp, Oryza sativa
  unsure (1)..(490): unsure at all n locations
atctcccgctccatccgccacgcgctcgaccagccgctcaactacgcgcgcatctacctcgccgacacgctcccgcccgacgtgcgccgcgtcatctacctcgactccgacgtggtggtcgtcgacgacatccgcgcgctggcgtccgtcgacctcggcggccacgtcgtcggcgcgcccgagtactgccacgccaacttcaccaactacttcaccgacgcgttctggtcggacccggcgctcaacggcacgttcgccggccgccgcccgtgctacttcaacaccggcgtcatggtcatggacgtcggcaagtggcgcgccggcggctacacccgccgcgtcgagcggtggatggaggtgcagaagcagacgcggatctaccacctnggctcgctgccgccggtcctcctcgttctcgccggtgacatccaggccgtcgaccaccgctggaaccagcacggccccggcggcgacaacgtcaaggggcggg

SEQ ID NO: 407800 - DNA, 503 bp, Oryza sativa
aacagcactaaatcaacattttatttcgtctctcagacagtaccatgctgatgatgcgcacgaccaacacacaacacatgcttacatattcacaaaatgtatgtaggtaatgcacttgaaggtttgagatgctacaaacaaatgaaatcatttagtccattgaagagtggcttgtcaacatacttacaccaaactgactggatacagctgaacaactagatcagttattctgggtttctaagcgaacttcttgtcgaggtgacggtctatgatttcagatacggtttctaagaagattacttcacttgaccctgggagaacatggccctcggcttcctggacgatgtcctcaatctcagagtctctattcacagtttccctgcacagtatacgcccgatgtcatacggtgtgaggcctcgtgctgcacctttttttaaaagcatggtgctgatgcacaggacacgagcacatcttgcagacagctcccacccatggaacttga

SEQ ID NO: 407801 - DNA, 216 bp, Oryza sativa
gaaccgaactccaataggaggaggatagcttaatttgcacatagtaaaagagggatacacaactgagtactgaaattccaaggctgggttcagataaaaacagtattacaacaaacttgaaaaggaacgtcgactccacaataattactaacaaagcaggcacgcggaaaacagaccggggcccattcaaaaacaagcttggcttctggaatatgg

SEQ ID NO: 407802 - DNA, 498 bp, Oryza sativa
aagcaaattggaggacagcgattgaaccccaacaacaaataatatgtcatcattctgtggtcacagtatttaagatcattcacgcacgagttcccaaagcaaacaggtgatgcttgagctgagaaaagcttgacgtcctgtgattgtaaaatttgaccatagaaggccaggcagagaacctaagcaagccagccaatgcaaaatggtttacagattaagctttcaacaccgccttatggatcatcgtctccttgtgtatttggtgacagctcttctcaacaagatcgaggagtttctcgaggttcgccgcccaggaattgagtataccattactgtcttgtgctgtgcggaagcatacaacacccattggcctgtcaatcttcgcaatcagcgactttgagtttaccatgtccgaaaggtgtttctctgcctcctgcaagctcaagcaaagaagatctgcgagcctcttagggtaatccttgaatagtacttcgaaac

SEQ ID NO: 407803 - DNA, 368 bp, Oryza sativa
ggaggaaagccgagggagattattttaaaaagcctggcccccctgaggagatggagccggagtccctgatgggaccaccctgatgatagatgatccctccaagctagctagggatccatccaacattgatcgacacacgcccacactgacaacgacgacgacggttttatttaggggtcaaaaaaaaaggcaaggcctgcctacatataagctggggcctaatgcaagcaaattaagggctcgatcaaagctctgatcgacagtagcagcatccataccataaaacctcatgcagccgggcgacgaccaccattgattcagttgcaggagcaccaggagcagccccggcagctggggcccccttgcag

SEQ ID NO: 407804 - DNA, 460 bp, Oryza sativa
acgacaaaccacgaacttggatattaaagatgccacaaagaaggttcacataaacaacacaggtcacagcagcgaaagctacaagcaaaccctgcataatcgaaaagcaaatgtttttcaaaaccagacacacaaactgatagatagaagcccacacggacagatcataggatagcagcagtaatcaagcattgccaaggcaccaggcaagaaccctgaacctctctagtactcgtcaccctcatcaccctcgtcaccatcgtcgaactcggagccgacctcctcgtagtccttctccagcgcgggcgaggttcctcgcgggccttggagaaactccccctcctccatgccctcgccgacgtaccagtggacgaaggcgcgcttggagtacatgaggtcgaacttgatgtcgatgcgggagaacaccttgacgacgctggtggagtggagatcatgcaca

SEQ ID NO: 407805 - DNA, 436 bp, Oryza sativa
acaggtacaacagtgcagcgtttatcttactgctaccaaaagaataaatacacgtacttgaaggagtaaagcttctgacatccttttaaaaataaaagcaactcaagatctagcatacagtttgtttgctaaatgcatctctgttgattcatttccataacattcctactgcctctgttggaaaaaaaagaggaaaagtgaaagcacctaaatgaagggagaatttatgccatctagttttaccatcatgagcgccccagctgagagaagagaaaaggccataattccagaacgacgatattatccttcaattagacactcagagcaggtgccagtggttccggaacaccactaccaccgttaagaactatcaccttgccctctgaatccacatcaacaatagcagagtcaccttccttgacctcgccagccaaca

SEQ ID NO: 407806 - DNA, 469 bp, Oryza sativa
ccgtcggaacatgaaaccaccattcttttattccattacaccttgttgctacaagataagtgaattaactgtacagaaaaactaatgtacaggcaccgcaggggaagaaatatttatcagctgcttgacgtgatgtatctacacagatttcactggtcccgatcacgatcacgataaattggctgcggcgtccacttgaagtgcaagttcagctttccggatttagcaccttgcaaaacaaactcatcctgaaactcgccttcgagtattactctcgtaagtgtcaagaagcatttccctatgtaatcctttccaaacgtatcatgatccccatacttccaccatgagtaaattatgcaaggcatttttaacaacaaaatcaaacgtttgattccatattggatttagtgtcttaattacaacccttgtttttttttggttttcccttttcaaggactgactacaaatg

SEQ ID NO: 407807 - DNA, 268 bp, Oryza sativa
acacaatcaggtccattgtacttctttcatcaaccaaccagataacattgttttacacaatctgaacgaacgaagcaaatattcgggtacgcggaaagaggagaacgtcgcgcgtcttaccgcagcctgcatgaaagcaatggacctcaccgccgttgctcgccggagatccacactcacttgccggggacgaagttggtggcgtaggcccatgcgttgttgttgacggggtcggcgaggtggccggtcaggttttttcagtggccct

SEQ ID NO: 407808 - DNA, 499 bp, Oryza sativa
gattcatcagaaaaagattttattagcaaagaacaggggataaattattccacatgccgacttgatgaatgatactaattatttccagtgttaaatggaattaagttggcgtaaaaaaaattctagctgaaacaacaccagctgaactggcatgccaattggcagtacgctgccttattctatttacttttgaccgtgatacccttcggctgttcttgggataattttctatggtttaccattcaactggactttagctagcttctctccgctttcttcggcgccatccaccttaccaggaaatgacctcccactacttgtgacaagttccttgatggttgcttggatgtccttatcgtccaacagcgaatccaatgtcacatgtagccggaatctccataatgctttgggttgttgggtcattgattgtttcctctttgctggtcttgggtgtacttgttttaagtgcaagcaggtcctgtagtgggagattgccaca

SEQ ID NO: 407809 - DNA, 478 bp, Oryza sativa
gacgcctcgcattatcgcatatagcggatgaaaaaacgtcaggtcagcctgcgcgacaacgtttagttacagataagagcagaactgcaagtcaaatacactcttttctctccatagtagagtttgagcagcgagcgggcaaacataaattattcaattattaaatgatatgatcactcttgatcatctcaacactttaggaacaaaacttcgctaccgggattttactattttagttggccacaacttcaatgagggttggttcgtagtcagcaggagcctcgaaaccatggaagttcattacggttgcagcaacattggcgagcccaggggtctgaatgtcagaccggaatttcacaccagggtgaagaccgggacctccaatagcaaccgggaccggttgaagagtatgcgagggaagaatctggatccaccgttctgtcgagaagtggctggccagatttgttcttttaccata

SEQ ID NO: 407810 - DNA, 274 bp, Oryza sativa
ctcagccacaaatccaaacacttggtccttcctatcaaaagatcaaaatgaacaggttttaaaattcatttcccaactcgacgataatttacacgtacatttaacacatttttccacccttttaaaacttctcccttttttttcccgggtaagattaaaattaacttgaggccagccagcgtctgccgtgcggccaagatgttttacaggctgggcgttccttttcggcggaccccggaaaattgacggtggagcaggtttgtttgccaaaggg

SEQ ID NO: 407811 - DNA, 357 bp, Oryza sativa
aattcacaacaccatatttcattgatcaggttcagaacctgcacagaaatacacactaccggtacagatctcaccttctctccaatactcgtacatccatccacgcggtccacacgaatacgtacatctatacggtacacgtacgtacatctactgcaccgcgtacacacacgcacactctcctgcagagacgcgcatcgtcgtcaacctagctagcttagctgaaggcgatgcgtcgccatggcagcacggcggcggcggcgctcacttgccggggacgaagttggtggcgtaggcccaggcgttgttgttgacggggtcggcaaggcggtctgccaggttctcgagggggcccct

SEQ ID NO: 407812 - DNA, 433 bp, Oryza sativa
cgtccaactcataatatacctttccagaacagagaactaaacgcttgattccctcctcaaggtccttatggttgttctgatctttaattagacgcttaaaccgggttccttgcttgtcaaatccagggtgaccagcaaggtcatcaaattcagaaagattcgatttgcagtccttgtgtcgaaggagattctttggagacataacaatcaaaggctttctgaagtcccggtgaatctggcgacgcaggacatggaaatagtttgcaggagttgtgacattcacaacttgccagttgcactgctggatttgcttcctcagagttggatccatctcaggaataacataagggttgccatcactcatctgaaggaaacgctccaaccttgccctggaatgtcaggcccctgaccctcattccgtgaggaaggcaaa

SEQ ID NO: 407813 - DNA, 467 bp, Oryza sativa
agcggcgtcaaaggaattttctcatgttaattacatttgttgttacatttccaaactccaatggaaatcgaaatgaccacgtcagaaagaaatacaaaaagttattagccaaaaacggcatgaagaaatgggatcaaacaaaatatggcagaacgtccaagaggtgatccagaacatgccttgcggaggtggacaaggaaaagaggacgaggaaaaattaaaccacaattccccatgcatgcaatgcacggtggctaggaaaaatgcataggcatagagatcctactatgtgctgcgtgtgtcctctcatttcgtctccgtttaaattttggttgctgaccgaatttgaaactgtggcaaaccgacgacgaatgatggccgacggttgatctacaggcccctgcttctaccagggtagtcgccgagcctttggaccaccatgttgcactgccctggggtcatcggct

SEQ ID NO: 407814 - DNA, 494 bp, Oryza sativa
ttcttttcgccatattggtgtacaatagtagaagctacaaactaacatcttggaagcacatcatcaacctctaaatcaacataaccaaaaaaaaaatctcaaaattggcgccttggctttgattctgcaactgtaactcggatctgcctgccgtccaggtcaacgccgtcaagatttgatatggcattgttgacttcttcagcggagcccataggtgacaaaaccaaaacccctcgacctgccgctctccctgtcgtagatgaccttggcatcgagcacggttccctgctcactgaacaggtttctcgagtgtcgagttgtccgacaccccaagcaaggttccctacatagagcttgttggatgaatcaaagttgctcccaccacccctaggtgatcttggcgcgaaatcatcccgaggcggaagcggccctgagtttaccctcagaggtcttccttggaatgtgtatccattgaattgttcgacggcagcacc

SEQ ID NO: 407815 - DNA, 390 bp, Oryza sativa
gaaccaagtgatccaattattattcactaattaagcaaaaaaggaaataaaaacaagtccaaaattgtttgacaaaaaaaaatcgagcacgctagcacgaggacaatgtacgtgtcacactctcctagaccttaatgttgaccaggcgctccgacgccaacgacgcggggtccaccgtcatggcgcggacggtggcgttcgttcccagggacgggtggctcactgtcaggttgtagtcgccgtgtgggaggtcgagctcgacggcgccgtcggcgccggtcgtcgccgccgtcttgtgcgttttccactcggggatcagcttgtcgacgagggtcccaacgggcaggttcttgaaactgttgtccgtcaggcacatcacgtagcaaccct

SEQ ID NO: 407816 - DNA, 441 bp, Oryza sativa
ggacaacatgcaattcataaaacgtataggattacacgtacgcacagatcgtgtacatactgaagaaaattaagatggaacatgcacacagggagcgtgcaacataaagtatacagctgatacagagagagaatggagcgctgcatgtctgccgcagctgttattttaattactttgttcatatatgctgtagcaagtacgtgcttaattactagctgatcaactccgattgagctagcatgttaagctcgatcgatcgatccaagcaggattgatttaactgaccttgttgcagtcggtggagaggctgatggggaagccaacgttgacgccgcatttgccggggacgccggcgacggtgccgaggttgagcgacttgatgctgccggcgaggcttttgaggcagcggcaggccgcctggcggcggcggtggtgcgggcg

SEQ ID NO: 407817 - DNA, 455 bp, Oryza sativa
ggaaaaacgggaccaaggccgtttttattattcatagggaacatcccaataacaaggggggacagagcaccaaccacacaccacattccactgaactcacccccaactaaatcaaactagaaaactcccaaattcaatcgaccttacttttttaaggaaaaagagcagggcctaggaatgcaaagcatcctgaaaaatctctcttctcttttcatctctgaaaccagagaatggaaacaaagcaaagaaactccaatgctctcctttttcaaaggctcagcctgagatgttggccagctcacttgttcgacgggtcgcccttgacggccaacgggacggggctagccatggggcgggacttgggggcatacaggatctcaagggagcggggggtttcacgcctttccaggttcgagacgtactttcaaaatccgtaaacgccggtgaggggcatc

SEQ ID NO: 407818 - DNA, 485 bp, Oryza sativa
gggcaacaccggataaataaataccagctcgatgatacaaatagtttaagcataaccatagaagtaacacagcagtgttaaaaaagagccaacaaattcatggcagcaacatgtaacaccacacatcaaaagttttcaacccatcaggcacgcaggaaacgtccacattccacagacaagctaacactagcatgcattggcctaattcagactcttatgaagagactcaggctgaagcatgatagactcatgatcctctctactcgatcagatcgtcatcgtcatctgggagaggttgtgctgctgcagccgcaagctcagcctcatgctgttgctgcattgccaggtcaatgggaacttccggaggtttaagagcaacagcttcaacgaaatgcaggttcgggtcaccagcaagcttccttgcaagataaaggaagggcttctcaaagttgtagttgctcttggcagaaatttcatagtactgg

SEQ ID NO: 407819 - DNA, 406 bp, Oryza sativa
gtaataatgaattattatacattacaaatcaaattaacacatatgctctcacatactgagaataaccaaagaaaaaacaactgccagaggaatcacattcacatcaatgctttaatattgaattgaaaccgtaaaatgttgtgatatacatggatactaattgctcaaaccaaggaattctgtgaagcttggatacttcggttgccacccaatctcagcacgagttttggaattcttcatcctcttccctaaaggaccatcagtccctgtgaagccttgaaacttcgtatcaaatttcccacttctattaacaaggtccattatttattgcctagatagaggctgattgtcacaaccaacaaaaacacgagccacgagtctcctttcataatggcaattgcaagaa

SEQ ID NO: 407820 - DNA, 438 bp, Oryza sativa
ccaaaaaaagggattataattaaataattaatttactgtatataaattattgataaaaggtgtgcttacaataatgatgaagtatcaggagaaacgtgtcttcaggttacagattattacatgatggtggtacacgaattgtgcggtgatagaaatcatatatgtcctctttccaaaatagactcgatcgatcggtattgctagagtatgagtagcaattattatccgatagagtgaggctgaggccttccgtgactgaagcagattgcaacgctgatcgatctccttacatgctcggcttcgcgctgagacggctcgccagtttctgacccagagacctgtcagcctgagaccagtaggagagccagatgctcctgatctcgtgggtgaggcgagggtcagagagtgcgtcgatccatcttttgatgaaccggcttg

SEQ ID NO: 407821 - DNA, 501 bp, Oryza sativa
  unsure (1)..(501): unsure at all n locations
gttccatctttattcattcacaaaagtagatacagccagtgccttggagagttggaggttcgagcatcttggcctacaatgctcttgctaacaattcttggcaatgaaaaccaaaaagagctcaagtgtgaaagtttaaagatacatggcacaatattacagaagttgccgtgacaaagtgatctacgaacgaattatgctcacccgacagaaagaataggaccggactatatataactacagcaaaaaggnccacaagttcaaacatttcaatttatttaagctgcacttgagagaaaacatttgattttttctgaacattagatcagtgggtagcatcctctgctgtagtactgatccaatgtcttcgcagggatacgatggagaagctcacgagggaatatgcgaagcaatgtccatgctaggtcaagntgctgaaagatgtttcttgtatcataagctccttgtgtaacaaatttcctttaaatttgtcaaggaatt

SEQ ID NO: 407822 - DNA, 448 bp, Oryza sativa
atagcccatatctttatattatattattattaacaaaaacttgtcatgcccagctatggcttgggcgcgatctgatacacagaacaaagagaaaacataaaaaggagaaataattaatagcaagcgttaagccggtctgcttaaaaggtgtaaaggcagctgtcgtcgtcgctcctcgccgttgggtcgaagatcttggcaacagggtcggtgcaaccttccggcacaggcaggttacctgcttgctgtgctccttgccctccttctcctatgcaggccgcctacgatgcatcgatgggatgcgaatagctagagatcttttattcagctggatggcgcataacccgtagaaggaaccagtcttcatggcgtcggagttagcgtcaccaagagcagccttgctcaagaacttgctcagcagctgcaccacgcttgacgctctcctgct

SEQ ID NO: 407823 - DNA, 456 bp, Oryza sativa
gggaggataacttcgatgttattcatttcatagaataatcgcaactcaaaaacaaccagaacacgtattttttctggtaccctcatcaggcatctgattaaatttgaataaaccgaacatatgtgtccaaaatcacaagtgagaaccacaggtagcaataggtattacagtctttgaatagaagaaaatgataacagataggccggctgaaaactttgtccacgctaatgaagaaacagcaacaaaaagagagaaacaagcaggaggacggcgataacagctcctcttggcttagcattcttgggtccgaagaattagaagcatttcctgtgcaccaatggatgggcccgactcgtcgtacttagccttggcaatccacatttgctggaatgtgctgagagatgtcaagaaggatccttcaattcagaacactgcacttcctttcaggaggggcga

SEQ ID NO: 407824 - DNA, 332 bp, Oryza sativa
aaaaaaaaaaaacagagatggccatgcccgcgcggggggtattaatttcatagcctcacgaaaaacacggggagctccgggcagtcgccgccgggcgggctgatcatgtagagggactccgagttcctggagcccatgatgggctcgaagctcccacgcatggaccccattttgccgtttttcccgtccatggccgaaatcccgggggggacgccgtcgcccatggacaccgcccacagagtcttcagcacggggatgtcctcgccgggcgggttttgccgcaccgggtaccccacctttttgccgttgcaggacatggtccacatggactt

SEQ ID NO: 407825 - DNA, 495 bp, Oryza sativa
ggggaacaattttagtacacaggaaatcattctatttgatcacagtgcacgcttattataattgagagttggttgaggaacggtctaagcccacactcgcacaacagattggagaaaccaaaaacaacacatatgggggtaaacaccatcttgcgcatgtcctgctagcaatgtagcatgcaagattagtgctcaggcttgctctgccttcgggggacccctccacttgaagttctctgcataagatttggccttcaaaagaggtgtatggcgtttcctaaccacataatcccatccatgcttttcagcaaatgcctttgctgaatctgcactgtcaaacgtaagccctgctttaccaacattagcatatggatctccagtagatgtccatcccattaatgggtcctcccactttttgggctgacacaaagttgatttttcacctcccgactttgcctgaaccctgctgagatgcagccctagcgggtgaatata

SEQ ID NO: 407826 - DNA, 362 bp, Oryza sativa
accaagggcaagaattactggttcacataaaacacaagaaatctgaaaacacactttaaaggaacatttccggaaaatccttttttgcgacttccggtagtaggaagcttcactggaaaaggaaaaaacaagggttgcactttaactaggactatgcaacacacaatcttttttgccttaaagtttggttccatggcttacttggccatcaagacctttacaaacttctaaaagtttatttgaccatcaccattaacattagtcttacgggatattttatccaccctcttgttagttagtttctcgccaagatttgtatcacatgggggagcttcactcgcggagaagaaagcccttttggt

SEQ ID NO: 407827 - DNA, 476 bp, Oryza sativa
attaggaaatgtcttgtattatatggccaacattaaagtttgatattcggatacattttgctcactgtggcagacaaagcagaccacctagagcccttttattcagaatatatgcaagataataaagaacattggtcatagcatatactagtactatatgaatagtctggctggctgcttcacaaagtaacagagtgatcgctactggagttttgagtattctttaatcttcagtgcgcttccctcatcagcagctcctcatcttcttaccctctgtgccatctatctcctcgacagcatcgtcttcccagtagagagcctccattttaccagctttctccgtgttttcatcagcaaagcaatgcagaacagatcgtggcgacccggtggcgatttcagcagcagcagtgaagctctggtaaatgagcaaacccccagaaggcagctcctgctcaccatgttgctgcaagaatagg

SEQ ID NO: 407828 - DNA, 427 bp, Oryza sativa
atgggatcaaaacatttctattaccacaactttttaaggatggaatcgagtagcaatactttcaccccaaaatacagtttagcgacaatatcttaggaaagccgcttgctttgccgccatggctggcaagctgagcagagcagctaacacaaagaacacgagatcactataaaccaaacggcaacgaacgaagaaaatacagggtcttttttgtctgaagatacacgaagcggctcgttttcttttatttttagtctcctctcctcctcgatgatgggtgtatggcaatggcaatggcgatgggaccttggcttagttgatgggaaggggctcgccgttccacttcttgaggcagtcgagcatggggtcgatgagcttgccctggctgatgccgaggaacaccttgttgcactcctccgcgggggac

SEQ ID NO: 407829 - DNA, 408 bp, Oryza sativa
ggagcatcctcgtccatgcgtccggccatgtcagctccggcgccctggtacatcttggcgatgatggggttgcagacgccctccagctccttcatcttgtcctcgaactcctcggcctcggcgagctggttgctgtcgagccagctgatggcaccgtcgatggcgtcctcgatcttcttcttgtcggcctccggcagcttggacgcgatcttgtcgtccttgatggtgttccgcatgttgtaggcgtagttctcgagcgagttcttggcgtcgaccttcttcttgtgctcctcgtcctccgccttgtacttctccgccttctgcaccatcttctcgatatcctccttgctcagacggcccttgtcgctggtgatggcgatcttgttcttctgcccggcggccttgccc

SEQ ID NO: 407830 - DNA, 465 bp, Oryza sativa
ggttggagcaagtatagagagatttgattacatcgatcgccaagaaaagaaatggcgggaacggagcagattacaccgattagtgacgacgacgacgacgacgatggcggcggcgtgacgtcatgaggtcagatcgcctcgtcgcgcgcggggaagaagagcttccagtagagcagctcgttccacgcgtcggggacgccggggaggcaccagtgggtgcagtcggcgtagctcctcgggtcggcggcgagctgctccgccgtcggcttcgcccaccgctgctccctgtacacctgcgtgtgcgcgtcgcggcggagctccgacatccgggtgacgttcaccaccccgacgggcacccgcgatgcccccagcacctcgccggtgacctgcaccatccgccggttcgtgctcccgcagtacgacgccgcgttggccgtgcccaccggcgtcgtctggtcgtagcac

SEQ ID NO: 407831 - DNA, 491 bp, Oryza sativa
  unsure (1)..(491): unsure at all n locations
acatgtccggaaaagagcttcagattaattagttagcaatggtgtccttccatgcagccatcgtcttcttcctcgtcgccgcgtcgtcgctcctctcatacggtgaggcggcgccgaagatgacggcggtggcggcggactacgggtacccggcggactacgggtacgcggcggggagcaagctggggccggagaactgggggaagctgagcccggcgtacaagctgtgcggcgacggcaagaagcagtcgcccatcgacatcgtcaccaagcaggccatctccaaccccaacctcgactcactcaaccgcacctacaccgnctccgacggcaccctcgtcaacaacggcaaggacatcttgatggagttcgagccagacaaggtggggacggtgacggtgaacggaaggtgtacagcttcaggcgggtgcactggcacgcgccgtcggagcacaccatcaacggggagaagcacccgctggagcttcaga

SEQ ID NO: 407832 - DNA, 225 bp, Oryza sativa
agctctctccccaccggggtccgggtatcctttctccgaacccagccgagagctcgaagcctttccttactctcttgccatgtaccgcgcggcggccagcctcgcctccaaggcccgtcaagccgggagcagcgctcgtcagattgggagtaggctcgccttgcatagaaactatgctgccaaggacatcaagtttggtgtcgaggcccgggccttgatgttgag

SEQ ID NO: 407833 - DNA, 351 bp, Oryza sativa
ccgccgggcccttaccttcgtcctccgctccgcctcccgccttcgcgccgcctccccttccccgtgcccgcgccgtgcgccgttccacccccaccgtcggccgttccccgtgggctttctcctgaaccgcgccgccgccgtctacgcgtcgtccgccgcggcgcaggcggtccccgcgcctccccccgcgtcgggcaaggccaccgggggcggcaagatcaccgatgagttcacgggcgctggcgccgtcgggcatgtgtgccaggtgattggcgccgtcctggacgtgcggttcgacgagggcctgcccccgatcctgaccgcgctggaggtgttagaccacaacatccg

SEQ ID NO: 407834 - DNA, 425 bp, Oryza sativa
  unsure (1)..(425): unsure at all n locations
gctctaaaaccccgaccctatccactgtgccgtcgccgtcgccttcgccgccggcccgccgtcgccgttttagccatgaacgcctttcggttcctcggggacatgacccacctcttctcggtcctcgtgctcctgctcaagatctacgccacgaaatcctgctcaggggtgtcgaggaagacgcaggagctgtacatgctggtgttcgtggcgaggtacatggacctgttcacggactacatctcgctctacaactcggtgataaggtnggttttcatcaccagctcggcggcgatcgtgtggtgcatgctgcgccacccacaggtgcggtgcacgtacgacaaggatcagggcaccttccgccatgaggtgctcgtcgtcgttgccttcttgctcgcattgctcttcaacgagcggatcacctt

SEQ ID NO: 407835 - DNA, 436 bp, Oryza sativa
cgggccgcccttgagtgtggggttgttttttttagattggcttgctgttgctacactggcgagcggctgcaacaacgcggagttcatgccgcacgagaccttggcaaagcatctcttccactgggagacaaagccattgagctgggcaatgagggtacgagctgcattctatgtggctcaggcattggagtactgcagtagcaaagggagagctctctaccatgatctgcatgcatacagggttctctttgatgtggatggtaaccccagactggcgtgcttcggtctgatgaagaacagcagggatgggaagagctatagtaccaatttggctttcacgcctcctgagtaccttaagactggcagagtaattccagagagtgtggtgtacagttttggtactaacttgcttgatctcctaagtggaaaacatatc

SEQ ID NO: 407836 - DNA, 403 bp, Oryza sativa
ccaaccgccgccgcatcgccctcgttagttcgatggccgcgtcggcgctgcaccacaccaccagcttcctcggcaccgcccctcgccgggatgagctcgtccgccgcgtcggcgactccggtggccgcatcaccatgcgccgcaccgtcaagagcgcgccccagagcatctggtatggacctgaccgtcccaagtacctgggcccgttctcggagcagacgccatcgtacctgaccggagagttcccgggagactacgggtgggacacggcggggctatcggccgacccggagacgttcgcgaggaacagggagctggaggtgatccactcgcggtgggcgatgctgggggcgctgggctgcgtcttccggagatcctgtccaagacggggtgaagttcggga

SEQ ID NO: 407837 - DNA, 125 bp, Oryza sativa
gatcgcaaatactctcttttgccgatgcatcagcagtagttatgtgttcgccctcgccgccgcatccaccgccttcgccgccaagccgcgcctggcgcgcgcgccgtcgtccccggccgagcggt

SEQ ID NO: 407838 - DNA, 479 bp, Oryza sativa
  unsure (1)..(479): unsure at all n locations
cccaaaatcatcagatccgcctgcggcttcttcttctccacctcctcctaccccctcgccgatccagatccatcgccggggaggcgccagccatggccggcggcgggggcgccggcggcatgtcggagtcggtgctccgcaaggtgctcctctcctactgctacgtcggcgtctggatcttcctctccttcgccgtcatcgtctacaacaagtacatcctcgaccccaagatgtacaactggcccttcccgatctccctcaccatggtccacatggccttctgctcctccctcgccgtcgccctcgtccgcctcctccgcgtcgtcgagccgccctcgtcgcccgccatgaccccgcagctctacacctcctccgttgatcccatcggcgcgctctacgccatgtcgctgtggttctccaactcggnctacatctacctctnccgtgtccttcatccagatgctcaaggcgctcatgcc

SEQ ID NO: 407839 - DNA, 343 bp, Oryza sativa
aaaaaacaaaacacaccaagccagagtattatttacaatgggatcgcttaccaccaacatggtcctggccgtcgccgtggtggcagcgctggtcggcggcgggtcgtgcggcccgcccaaggtgccacccggcccgaacatcacgaccaactacaacgccccgtggctccccgccagggccacctggtacggccagccctacggctccggctccaccgacaatggtggcgcgtgcgggatcaagaacgtcaacctgcctccctacaacggcatgatctcctgcggcaacgttccaatcttcaaggacggcaggggatgcggttcatgctacgaggtgaagtgt

SEQ ID NO: 407840 - DNA, 236 bp, Oryza sativa
  unsure (1)..(236): unsure at all n locations
tcgtcggcgccgagatggctctcctgtgttgtattaccggcggcctctcgtgacttcctcggnggcctcccccctgccatggctgtgaatggccacagggtcatggtgatctctcctcggtacgaccagtacaaggacgcttgggataccagcgttgtggctgagatcaaggttgcagacaggtacgagagggtgagtgtttttcattgctacatgcgtggagtctaccgtgtgtt

SEQ ID NO: 407841 - DNA, 482 bp, Oryza sativa
cgcctcatgccgtccagcaggtgcgactttattgtggcaacggatccttccattccctggaagctgccgccgagcccaccttgcagatcgggtttactccagagcagatgaacaactcatgcgtgactgccttcatgccgacatggctaccctgaactcctgaaggccgatgcgacaaccaataaaaacggatgtgacgacacagatcaagtcgcaccattagattgatcttctcctacaagagtgagactagtaattccgtgtttgtgtgctagcgtgttgaaacttttctgatgtgatgcacgcacttttaattattattaagcgttcaaggactagtatgtggtataaaaggccgtacgtgacagcctatggttatatgctgcacaaaaactacgtatggtacagtgcagtgcctgtacatttcataatttgcggtaaagtttattgactatatatccagtgtgtcaaatataataaaa

SEQ ID NO: 407842 - DNA, 507 bp, Oryza sativa
  unsure (1)..(507): unsure at all n locations
cgccaccgccgccgccgccgccgccgaatccgttacccccatctcggattcacctctcccgcctccggcctccgtcaccgtctccccacgcgcgtcagtcatggcgggaatggcaccagagggatcccagtttgatgctaagcactatgattctaaaatgcaggagcttctgaaccaaggtgaaaccgaggagttcttcacatcttatgatgaagttcatgagagttttgatgacatgggtctccaagagaaccttctcagaggcatctatgcctatggtttcgagaagccttcagccattcagcaaaggggtattgtccctttctgcaagggtcttgatgtgattcagcaagctcagtcaggaacaggaaagactgccaccttctgttctggaattttgcagcaacttgactatgctgtggttgagtgccaggccttggtccttgctcctactcgtgagcttgcacagcanattgagaaagtcatgcgcgcacttggtgactatct

SEQ ID NO: 407843 - DNA, 522 bp, Oryza sativa
ttccttatatccacgccagagaggctgtttgaactaatagctttaaaggcgattgacatatcaggcgtatcgatgctggtgattgatggtctgaagtgtttcacggaccttaatgtcagcgacaagctttgttctattagggatgccatattgagcaaccctcaaataactatattcagtgacccgtctgaccgaagggtagctgcactggcaacaaaactagtcggtggaaaaaagatcacaaggctttgtacgaatgattcagttacttctagaggtgcattcataacacaaaagatacacatatgcccatcaaaggaccaaaaggcaccgaaggtgaaggaaattcttgaacaaattctaaatgatcatgctagaaagactgcaaaggtcctactggtaaccgcaagtgatcatgaagcacagcatctgtcatcattctttgaattgcaaaattgtaccgtgaccaatgactcgcatggcaactcttttaccatatgcagcagtgttgggctgattaat

SEQ ID NO: 407844 - DNA, 394 bp, Oryza sativa
  unsure (1)..(394): unsure at all n locations
catagctcctcctcctttgttcagtttctttttcagngtgctttgcatctctccattgagcaagaggagaagggaggctcggctagctagctagctaccatctatactagtatcaagtttttttgttcagatttttttgttggaggaagagttctagggagatcgatatggccttcatgtccatggaacgcagcacttgggccttcacctttggcatcttaggtaacttaatctcactaatggtattcctttcgccactgccgacgttctaccgggtgtaccggaagaagtcgacggaggggttccagtcgaccgccgtacgtggtgacgctcttcagctgcatgcctgggatgtactacgcgttcgtctagtccggcgccgagctgctggtca

SEQ ID NO: 407845 - DNA, 306 bp, Oryza sativa
catcggcgagcagaagaagagcagaggctcagttagcaggcgagagagatcagcgagcaggatggctggggctgcagggtcgtcgtggtcctctctgctcctcgcagcggtggcggtggcgctcgccgtcgccgcagcgccgtcgctcgccggcgacccggactacctccaggacatctgcgtcgccgacctcaactccgaggtgaaggtgaacgggttcccgtgcaaggcgaacgcgacggcggacgacttcttttccggcgtgctcgccagccccggtgccgtcgtcaacaccaccaccggcgc

SEQ ID NO: 407846 - DNA, 257 bp, Oryza sativa
  unsure (1)..(257): unsure at all n locations
tgggtgctaagaaggagaggcttttgaagttggaccaggctgccgctgattgcaaaaccgntgaggnaaagaaaccaattgttgtgaagtatggtcttaaccatgttacatacctcattgagcagagcaaggcccaacctggtggcattgcttatgatgtcgatcccattgagctggttgtgtgggtttcaaccctgtgcaggaagatggaggacccttactgcattgtgaaaggaaaagacccgcttggatcaatt

SEQ ID NO: 407847 - DNA, 413 bp, Oryza sativa
acaacgtgaaggccaagatccaggaggttattttatccccccggaccttcatcgcctcatcttcgccggcaagcagctggaggacggccgcacccttgccgactacaacatccagaaggaatccaccctccaccttgtgcttaggctcaggggaggtatgcagatcttcgtcaagaccctgactggcaagaccatcacacttgaggtcgagtcctcggacacgatcgacaatgtgaaggccaagatccaggacaaggagggcattcccccggaccagcagcgtctcatcttcgttggcaagcagctggaggacggtcgcacccttgccgactacaacatccagaaggagtccacccttcaccttgtgctcaggctcaggggtggtatgcagatcttcgtcaagaccctgaccg

SEQ ID NO: 407848 - DNA, 438 bp, Oryza sativa
tcaatttgtcgggtaaactacttggagctcacttagcccatgcaggattaatcgcattctgggccggagcaatgaacctatttgaagtggcccatttcgtaccagaaaaacccatgtatgaacaagggttgattttacttccgcacttagctactctaggttggggagtagggcccggggcagaagttctagatacttttccgtactttggatctggagtacttcatctaatttcctccgcagtcttaggcttcggtggcatttattacgcgcttctgggaccggagactcttgaagaatcttttccattctttggttatgtgcggaaagatagaaatacaatgactacaattttgggtacttacctaaatttgtaaggtaatggagcttttcttttatttactcaaagctctttattttggcggtttatttatacct

SEQ ID NO: 407849 - DNA, 244 bp, Oryza sativa
  unsure (1)..(244): unsure at all n locations
agcagagcaagcaaccaagcagcagcagctattttcgccgcagccacgacatcctcccacctgctcctgctctcccgccagcaggcggcggncttgcttcaatgcggcctctcctttcggaggcaggccggcaggctcgccggtgggttcgttgcccccagcgtgcggtgcatggtggtcgttgacaccgtcttggtgccccgcgtgaccgaggcttgcaagaagagcagctactagatcacca

SEQ ID NO: 407850 - DNA, 474 bp, Oryza sativa
gctggcgcggaggcggaggaggagggactctgtttgctggtggagggagttgcggcggagaggaagaggaaggtggcggcggtgatcgaggacgtggagcacgcgctgtcgaccccgacggcgctgctgcggggcatctcggacgccatggtcaccgagatggagcgaggcctgcgcggggacagccacgccatggttaagatgctcatcacctacgtcgacaacctccccaccggaaatgaacaggggttgttttatgcattggatcttggaggaaccaacttccgcgtcctgcgagtccaactcggtggcaaggagaaacgtgtcgtccaacaacagtacgaggaagtctcaattccaccacatctgatggttggaacttccatggaactgtttgattttattgcttctgcattggcaaaatttgttgatactgaaggtgatgatttccacctcccagagggagacagagag

SEQ ID NO: 407851 - DNA, 448 bp, Oryza sativa
ggcgctcaaggtcgtctctttccccgggtacttggccgcggtctcatttctcgactccaacagaggaggagctttcaaccagctcaaagtggacctcccgtttcaaacgagggacagaagagcagtttccctgagaaggacttgctgttcaatgcaacaggctccaccaccagcatggcctggtcgagccgttgttgaacctgggaggaggtcatgggatggccccaagcctatctcaattgttggctcaaccggttctattggcacacagacattggacatagttgcggagaatccagataaattccgggttgttgctcttgctgctggctccaatgtgactcttctagctgatcaggtgaaaacattcaaaccaaagcttgttgctgtaagaaatgagtcattagttgatgagctaaaggaagccttagctgattgtgattggaag

SEQ ID NO: 407852 - DNA, 506 bp, Oryza sativa
  unsure (1)..(506): unsure at all n locations
gtctctcaagagcggtgcagggttcacaaggcaggagaaaatgggggagatcaccaatgtcatggagtaccaggccatcgcgaagcagaagcttccgaagatgatctacgactactacgcctctggagctgaggatgagtggactctcaaggagaacagggaggcattctccaggatcttgtttcgtccccgcatcctgatcgatgtctcaaagatcgacatgtccgcaactgttcttgggttcaagatatcaatgcccataatgattgctcccagtgccatgcagaagatggctcaccctgacggagagtatgcaacagccagggcagcttcagcagcaggaactataatgacactgtcatcttgggctacttcaagtgttgaaggaggtcgcctcaactggaccaggaatccgtttcttccagctatacgtgtacaaggacaggaatgtggttgagcagcttgtcagaagagccgagagagctgngttcaaggcgatcgcactg

SEQ ID NO: 407853 - DNA, 376 bp, Oryza sativa
cccctctcactcccagatacctgctgttgccattagcccactaccatggatccttgcaagttccggccgtcgagctcgttcgacacgaagacgacgacgacgaacgcgggagctccggtgtggaacgacaacgaggcgctgacagtggggcccagggggccgatcctcctcgaggactaccacctgatcgagaaggtggcgcacttcgcccgggagcgcatcccggagcgcgtggtccacgcccgcggcgcctccgccaagggcttcttcgagtgcacccacgacgtcaccgacatcacctgcgccgacttcctccggtccccgggcgcccagacccccgtcatcgtccgcttctccaccgtcatccacgagcgcg

SEQ ID NO: 407854 - DNA, 484 bp, Oryza sativa
ttacatgtcaaacatagacttgacagtaaactaagagcacatccggcgtttcttttctgatattggtggtgtgacagcaataaggttgctgagggacaagttcaccaaaaaatcaagggggattgcatatgtggatttttcagacaatgaacatcttgaggcagcaattagaaaaaacaaacataaactgcttgcaaagaaagtaagtgttgctcgttcagatccaagcaagggcaagaaaaaccgtgaagcaggatctttctccaaagaccaagctactagtggcgatcgtggtgaaacggcagaatttgccaataggccagacaaggaaattcccaaagataaacccacaatcacagggaagaacacctttgctgcaccacgatctgtggttaaacctcttggatggacacaaaaggatgaaaaatagatgtgggcgcagaagagttaaaatcaaatgaggagttcagaaaccttttactta

SEQ ID NO: 407855 - DNA, 529 bp, Oryza sativa
  unsure (1)..(529): unsure at all n locations
aaacaaacaagattactccagctaactagctaccttggcaatggcctccttatcctccttcctgctcgccgcagcagtggcgacactgtttgtcgttggctcatacgccaccgagcttaccttcaaggttaatgagggctctagcgcaactagcctggaactcatcaccaacgtcgccatctctgaggtggagatcaaggagaagggtgccagcgactggacggcgctgaaggaatcatcgtctaacacctggacgatcaaaagcggctcgccactcaagggccccttctccgtccgcttcctcgtcaagaatggcgggtaccgcgtcgtcgacgatgtcatccccgaaagctttacggccggctctgtctacaagagtggtatccagctctaagtaacatacacgtatgctttttttttggtgagtcgcatgagaatttttagcctctaaataattctattttaagacagattgggccgcctgcgagcgagccaaaaaatatttntctggtgtcatttcatcggaata

SEQ ID NO: 407856 - DNA, 482 bp, Oryza sativa
gctcaaaagacacacattccaaaagcatttgtgtttcatctcctcctagtcctaggctcgcgtcaatggcggcgtccaccatggcactctcctcccctgccgccctcgccggcaaggcggtcgccaatgccaaggtgttcggcgagggccgcgtcacgatgcgcaagtcggcggccaagcccaagcccgccgcggcgtcggggagcccgtggtacggcgccgaccgcgtgctctacctcggcccgctctccggcgagccgccgtcctacctcaccggcgagttccccggcgactacggctgggacaccgccgggctgtcggccgacccggagacgttcgccaagaaccgggagctggagggtgatccactgccggtgggccatgctgggcgcgctcggctgcgtcttcccggagctcctcgcccgcaacggcgtgaagttcggcaggccgtgtggttaaggccgggtcccagatttcagcga

SEQ ID NO: 407857 - DNA, 542 bp, Oryza sativa
  unsure (1)..(542): unsure at all n locations
ctccagccacacgagcctagttcaggttgatactatggcgtccaccgcctctttcatgctcgccgtcttgctggcggtggccgtcgcggcggcgccggcgagggcggtgcgatgcccgccgagcgacaagcaggcgctgatgagagtgaagcagtcgctgggaaacccggcgacgctgtcgacgtggtccctggcgtcggcggactgctgcgagtgggaccacgtccggtgcgacgaggccgggcgcgtgaacaacgtcttcatcgacggcgccaacgacgtccgcggccagatcccgtccgccgtggcggggctgacggcgctcatgttcgctgtcgcttgtcccgctcccgggcctctccggccccatcccggcgtgcctcaccgcgctcttcaacctccagttcctcaccatctcccacaccaacgtctccggcgtcatcccggactcgctcgcgcggatccgcagcctcgactccctcgacctctnccacaacagcctgaccgccccatcccgactccttttcgcctcccgaccttcg

SEQ ID NO: 407858 - DNA, 561 bp, Oryza sativa
  unsure (1)..(561): unsure at all n locations
ctcgccttctcccgtcttctccttcgagttagttacctccttattcaaccatgggtaaggagaagacgcacatcaacatcgtggtcattggccacgtcgactccggcaagtcgaccaccacgggccatctgatttacaagcttggaggtatcgacaagcgtgtgatcgagaggttcgagaaggaagccgctgagatgaacaagaggtccttcaagtacgcgtgggtgcttgacaagctcaaggccgagcgtgagagaggtatcaccatcgatattgccctgtggaagttcgagaccaccaagtactactgcacggtcatcgatgcccctggtcaccgtgacttcatcaagaacatgatcacgggtacctcccaggctgactgtgccgtgctcatcattgactccaccactggtggntntgaggctggtatctccaaggatggncagacccgtgagcacgctcttcttgctttcactcttggagtgaagcagatgatctgctgctgcaacaagatggatgccaccactcccaagtactccaaggccccgtatgatgaaatcg

SEQ ID NO: 407859 - DNA, 512 bp, Oryza sativa
tcctcttcccttcgctcccttgccgggttttatttcgacttcgccgcctttcctcccccggcgacgactacgacgagtgacccctccgcgggcaccgggtcgccatgtaccgcgccgtctccggccttgtggccatcaagcggcatggactggatggtcaaatgttgaatgttgcgattaggtgtgctagcacaagtgttgcacagaggtcatcaggtggcttctggacctggctgacaggtgcacggtcaaatgcattaccttctccagattttacacttgcaggggtcaccattccacctccgctacctgaccttgtggagcctggcaagacaaaaatcacaacacttgcatatggtgtaaaaattgtttctgagacaactccaggaccattttgttcagtcggagcatatgttaattgtggttttgaacaagaagcacctgaaacactaagtgccacttatctgttgaagaagatggcctttacaaccacttcaaacaggagccatttg

SEQ ID NO: 407860 - DNA, 491 bp, Oryza sativa
  unsure (1)..(491): unsure at all n locations
tctcattctcctaattgtcatcactagcttttatttagcttaattaattaattagccatggcggaggagaagcaccaccaccacctgttccaccacaagaaggacgacgagccggccaccggagtagactcctacggcgagggcgtctacacgtcggagacggtgaccaccgaggtggtcgccggcggccaggacgagtacgagaggtacaagaaggaggagaagcagcacaagcacaagcagcacctcggcgaggccggcgccctcgccgccggcgccttcgccctgtatgagaagcacgaggcgaagaaggacccggagaacgcgcacaggcacaagatcacggagngagatcgcggccacggcggcggtcggcgccggcggctacgccttccacgagcaccacgagaagaagaaggaccacaagagcgccgaggagtccaccggcgagaagaagcaccacctcttcggctgatcgacctatcacaacg

SEQ ID NO: 407861 - DNA, 359 bp, Oryza sativa
tggccgtgcgcgcccggcaaggcgttccatgcttgcggacccatgcatatcgcatacaactacaactatggggcggccggcgaggcgatcggcgcggacctgctgggcaacccggagctggtggcaacggacccgacggtggcgttcaagacggcgctgtggctgtggatgaccggcgcggtcgccgagccagccgtcgccgcacgccgtcgtcacggggcagtggactccgactcccgcggacagcgcggacggccgcgcgccaggctacgggcttaccacgaacattcttaccggggggctccagtgcgccggtggcaacggtggcgccgaccgggtcgctgtttacatgcgcttct

SEQ ID NO: 407862 - DNA, 376 bp, Oryza sativa
atcatgtgaggtggaaccggattagtttttcatatggccggcctttccatgggatgagcagacaattagtgaaggtactgctcagccttatcttcacgaaggtgcaagaggacaactgcacatcatcaatgtgtgccatttgcttggaagactacaatgtcggagaaaaattaagagtgttgccttgccgtcacaagttccatgcagcttgtgtggacctttggctcacaacttggagaactttttgccctgtatgcaaacgtgatgcaagtactggaataccagatcctccagcctcagagactacaccattgctttcttctgcagttcgtttgccttctcagtcatcttcgttccggtcaagcgtggcagaatt

SEQ ID NO: 407863 - DNA, 453 bp, Oryza sativa
  unsure (1)..(453): unsure at all n locations
gtatcctgaagttgcttgactcacaccttgtgttctcatctactgctgcagaatctaaggngntttacctcaagatgaagggtgattaccacaggtaccttgcggaatttaagactggtgccgagagaaaggaagctgctgagagcacaatggtggcttacaaggctgctcaggatattgctctggcggatcttgctcccacccatcccataaggcttggactggcacttaacttctctgtgttctactacgagattctaaactctccagacaaggcttgcaaccttgctaagcaggcgtttgacgaagccatctccgagttggataccctcgnggagggagtcttacaaggacagcactttgatcatgcagctcctgagggacaacttgaccctctggacctttgacctacggaggccgtgtatgatgagtgaaagaaaccttcagggcgac

SEQ ID NO: 407864 - DNA, 516 bp, Oryza sativa
  unsure (1)..(516): unsure at all n locations
ctctctttctgaggaaactgaagatttgaggaagcagcgtcagaaatttgaagaagagtgggagcagctggatgaaaaaagaactcacttggaagaggaagccaagaaactgaacaatgaaaagaagaatctagaaaggtggcatgacaatgaagaaaaaaggctaaaggatagagaggatgagttggacataaaatacaaggagcagggggaaaatctcgcacttaaggaaaaatccttgatcgataatatagaccatcagcgtttggaaaatgaggaattgctaaagagagagcgtgctgatcttcaacaaaatttgcagctccatcggcatgaattggagatggagatggagaaaaaacaagcgagcaaagagagagaactttgagagaaggaaatgagttaaatggaagatggactttgtagaanatgagctcaaacgtgcagccgaattgaatgaatcanagattcagaagatactattggagaaaaaacagctgcagagggaaagggaag

SEQ ID NO: 407865 - DNA, 427 bp, Oryza sativa
  unsure (1)..(427): unsure at all n locations
agccatgaagaagctcgcatgtgagatcctggactctgttaggagaggggctaggtctcaaggaccccagatacttcagcaagcttaccacaaacgctgacagtgactgcctcctgaggatcaaccactaccctccatcatgcaacattcacaaacttgaccatgatgaccaatgcaatatcaagagccttgttagcaccaaggctagcaatggtgggaatctgatggcaggtgggcgcattgggttcggcgagcactctgacccgcagatccttagcttgctccgagcaaacgatgtggaagggctacaggtgtttgtgccggaccacgagggcanggagatgtgggttcaggtgccatcggacccatcggccattttcgtcaatgttggtgatgtcctccaggctctgacaaatgggaggctgat

SEQ ID NO: 407866 - DNA, 451 bp, Oryza sativa
ggaggagccggaaggcagccggggcggtttctttggaggtgtttctcagttgggaccccgggctggagatccaagtccctttcgagcaaagaccggtgaacgagtactccgccctcaaggatagcgtactctactcgtgggcagagctgagcccggggtcattcttcctgcgcctaggcagcctgtggctgatcaccttcacggtgctcgccgcgcccattgcagctgcaagtttcagtccaggaaaggatccactcaaattcgtgctagcagctgggattggaactctgctcctcgtctctttggtcgctctccggatttatctgggttggagctacgttggtgataggctgttgtcggcggctgtgccgtacgaagaaaccggatggtacgacggccaaatgtgggtcaagccaccagaggtattggctcgtgacaggctcttgggatc

SEQ ID NO: 407867 - DNA, 508 bp, Oryza sativa
  unsure (1)..(508): unsure at all n locations
ttaatttacctcctccacctgctccggtttctttcgancggatcggctcggctcctcctcctccgccgacccaccgtcgccgcagataggagaagatggccgcacttgataccttcctctttacctcggagtctgtgaacgagggccaccctgacaagctctgcgaccaagtctcagatgctgtgcttgatgcctgcctcgccgaggaccctgacagcaaggtcgcttgtgagacctgcaccaagacaaacatggtcatggtctttggtgagatcaccaccaaggctaacgttgactatgagaagattgtcagggagacatgccgtaacatcggttttgtgtcagctgatgtcggtctcgatgctgaccactgcaaggtgcttgtgaacatcgagcagcagtcccctgacattgtacagggtgtgcacggtcactttaccaagcgccctgaggagattggtgcttgtgaccagggacacatgtttggatatgcaactgatgagacccc

SEQ ID NO: 407868 - DNA, 397 bp, Oryza sativa
tatttcaattcaatgatggccagtatgagttcgttgatcaacttcatgctagggcacaacagatatgtgccgttctctatcccggtgatgctacagaagaaggaaagcttctcagactgaagcaacagtatttcctttgcagtgcatcgcttcaggatatttttttcaggtttaaagaaaggaaagctgacagagtttctgggaaatggagtgagttccctgcaaaagttgctgttcaattgaatgacactcacccaactcttgcgattcctgagctgatgaggctactcatggatgtggagggactttggtggggatgaagcatggcatatcacaaataaaacaactgcctacaccaatcacactgttcttgctgaagcccttgagaaatgggcgc

SEQ ID NO: 407869 - DNA, 486 bp, Oryza sativa
  unsure (1)..(486): unsure at all n locations
gcaccaaaccggagccaatccgagcgctccgtgttgcggaggcggtggctgccggacctactcgctgccgtgggtgggggctgggagggagcgggctggtggctcgtcccgtccgcgatggactgggcggcggcggggtacccggcggcggcgctggtgtgcgccgcggcggccaccgtcatcgcgctcgtgcacatttaccggcacctcctccactacgcggagcccatctaccagcgattcatacggcgcctcatcttcatggtcccggtctatgccgtgatgacgttcctttcccttatcttaccagataattcaatatattttaattctattcgagagatttatgatgcttgcgtcatttaccaatttcttttcactttgcttgcatgggtnggggggtactggtgctgggggggacagtttgattgggcgaaccctgagtccttcgtggtttctggggacatggcggttttaaccttttct

SEQ ID NO: 407870 - DNA, 198 bp, Oryza sativa
ggccaccgacgaccggtttattgaggacgacttctccacctacggagagatcctagactccaagacaatcaacgacagggagacggggaggtcacgctggcaagctgtgggacgcacacctaaaggtagttgacgggccaccctaggacaggcatgaacgggaaggagctccacatacgtaaccaaccgtcaatgagg

SEQ ID NO: 407871 - DNA, 481 bp, Oryza sativa
ggtcatggaacctgtacaggattcatttaattgacagctgagtttgatacgacacgatgccaaacataaaccacaggtaaatatttttcaacacgttcaccaaccaacaaaccggagctaaattattcactccatatcatgtgatacgcaagcagatgcaagctcacattactgaaccaaatagggagtaaacttagtcccaaatgaccaaaatagcatattgaggacttagcaaccctgctcgatcagataatcgccaagcctctccacaatcatgttgcactggcctggggtcatcggctcatcatagattccaagaatcaacgacaggccagtcttcttgacacatatgcctccagtgcccttctttcctcggatgacaacccctggttcacctttgatcaccatgtattttgtgcccccaaggaaaagaccagttggtgcgagactgccgggttcatcaaaggccttcatgatgcca

SEQ ID NO: 407872 - DNA, 452 bp, Oryza sativa
ccacccacactctccgtctcctcctcttggttttctcgaaggcttggatctcgctgctgctcgcgctcgccgtggtgctgtcggcgccggcggcgagggcggatgaggcggcggctgcggaggaggggggcgatgcggcggcggaggccgtgctgacgcttgacgcggacggtttcgatgaggccgtcgccaagcacccgttcatggtcgtcgagttctacgccccgtggtgtggacactgcaagaagctcgctccagagtatgagaaagctgcacaggagctaagcaagcaccgatccaccgattgttcttgccaaggttgatgccaacgacgagaagaacaagcctcttgctaccaagtatgagatccagggtttcccgacactcaagatattcaggaaccagggcaagaacattcaggaatacaagggcccgagggaggctgagggcat

SEQ ID NO: 407873 - DNA, 497 bp, Oryza sativa
gttcaagaaggtggtcgagtatggtttttttttaaggggaacatggtgtaggtcaccaggaccttccgcgtccgcaagatcgcccgcgcccgcctctccaagagcgccatcgagcgccgctcgtggcccaagttcggcgacgccgtgcaggaggacgtcggcgcgcggctcaccatggtgtccaccgaggagatcgtccttgagcgcccacgcgccccagggagcaaagctgaagaaccaagtgcttctggtgatccactggcaagcaagagtggtgcagttctcatggtttgcagaacctgtgggaagaagggtgatcactggacctcaaagtgcccctacaaggatctagctccccagacagaagcttttgtggacaggcctcccactgctgatggctctggacctccaggtggcgccgtgaagggagcatatgttccttcaagcatgaggtctggtgctgttgatagggttggacatgacatgaggcgtaggaa

SEQ ID NO: 407874 - DNA, 381 bp, Oryza sativa
gcggtggcgccggagatgtcgtcattcttgctctgcgggaggaggcggcggggggcggatctccatggcggaggccgcgtcgcccatcagcagccggccgccgccggcgcagcagcagttcgacgagctcggcgtaggcggcggaggcggaggcggaggtgggtttgacgccgaggcgctggcggcggcggcggtcggcgaggagggagccagcggcggcgcggtggggaaccggtggccgcggcaggagacgctggcgctgctcaagatccggtcggacatggacgccgcgttccgggacgccaccctcaagggcccgctctgggaggaggtctccaggaagctggggaggagggttacccgaggagcgcgaagagtgca

SEQ ID NO: 407875 - DNA, 463 bp, Oryza sativa
ggcagcgacgagccatggccacacacttagtgttcgcggcgtcccgcattccggccaccgcccggctgcacagcaaggcggcgtccaagcagagggtggacttcgccgacttctccggactgaggccgggatcgtgctccatcagccacgccgcgagggaggcgtccttctccgatgtccttggctcgcagctcgtcgccagggctaccggagagaacgccgtgagggcgccggctgaggcgaagctcaaggttgccatcaacggcttcggccgcattggccgcaacttcctccggtgctggcacgaacgcgagaactccccgctcgaggtcgtcggcgtcaacgacagcggaggccgtagggacccatcacacctttcttagtccgactcgatgctcgcaaccttaaagccgacgtcaagatcgtcgacgaccagaccatcagcgtcgacggcaagctgatc

SEQ ID NO: 407876 - DNA, 335 bp, Oryza sativa
cagcagctcagccgccgcctatggtttccattatcatggccccaacctcccgcgtcctcgccgacaagacccccttcctcggccatccccgcccctccaatgcccccgtccgcgacatcgtcggcgtcgccaccggccgcatcaccatgagcaaggagctgtggtacgggccggatagggtgaagtacctggggccattctcggcgcagacgccgtcgtacctgaggggcgagttcccgggcgactacgggtgggacacggtggggctcttcgcggacccggaggcgttcgcgaggaacagggcgctggaggtgatccacggccggtgggcgatg

SEQ ID NO: 407877 - DNA, 493 bp, Oryza sativa
cttctaggtcctcttcatgttaagtctgttatgttagaactctcccgatctgaaagaggcgatgatggagaaaatgtgaagtattcggaattgttttatggtcgcaactttaatggtacaagctgttatgtgttttccattctgttgtgtatttgcgctaaactataaccttatttatgtttggccttgaagtttgttcattacaagtccctttttgctacagttgtttttattggcacaacgctctttgctttacaacagttatccggcataaattctgtgttctatttctcatcaactgtgttcagaagtgtgggtgtgccccctaaccttgcgaacatatgcatggggatagcaaatttatcaggctcaattgtagctatgcttctaatggacaaactaggaaggaaagtacttctttcagggagctttcttggcatggcctttgcaatgggacttcaggctgttggagcaaatcgtcaaccaccttggt

SEQ ID NO: 407878 - DNA, 395 bp, Oryza sativa
tctatagtctcagctcttcttccaccttcacttagctcctcctcctcctcctcgccggtgttcgccaccaccgctcggagagatggcgagccagaccgccgacgccacggggttcgtcgcgagcgacccgctgtcgtggggcaaggcggcgctggagatgacggggagccacctggacgaggtgaagcgcatggtggcgcagtcacgggaggccgtggtgaagatcgaggggtccagcctccgcgtcggccaggtggccgccgtctccgcggccaaggacgcctccggcgtggtggtcgagctggacgaggaggcccgcccccgcgtcaaggccagcagcgagtggatcctcaactgcatcgcccacggcggcgacatctacggcgtcaccaccg

SEQ ID NO: 407879 - DNA, 416 bp, Oryza sativa
cgttttggtattcccatacactttgttttttttccccgtctcgtggtcgagagaaaccgagaggagagagagggagaggagcgctgccgattttccggagggggagatctttttcttctccctgaaggttcgagatcgatctgcgacgaggaggagcggggaatcgtaactttatttccgaggaaatttcaacaaattgatgcactaatggagtccaagggtggcaaaaagaagtctagcagtagtcgttcctccctgatgtacgaagctcccctcggctacagcattgaggacctccgacctgccggcggcatcaagaagttccgctctgctgcttactccaactgcgcgaggaagccctcttgatagcccccttggctaccttgacctaatagtttagttactcctctgaattc

SEQ ID NO: 407880 - DNA, 438 bp, Oryza sativa
ctgattgatgttttttttctgatttttttggttaattttctggtggcgttcttggggacgcaggcaagattaagatcggaatcaacggtttcggaaggatcgggaggctcgtggccagggtggccctccagagcgaggatgtcgagctcgtcgccgtcaacgaccccttcatcaccaccgactacatgacctacatgttcaagtacgataccgtgcacggccaatggaagcacagcgacatcaagatcaaggactccaagactctgctcttgggcgagaagccggtcaccgttttcggcatcaggaaccctgacgagattccgtgggctgaggctggtgctgagtatgtcgcggagtccaccggtgtcttcactgacaaggagaaggctgctgttcacttgaaggggggtgccaagaaggttgtcatcttagccccga

SEQ ID NO: 407881 - DNA, 446 bp, Oryza sativa
cctcatgcagaagtctccgcgtcgcgagcatttgttttgtaggctctcaccagtggcgaccccgagcccgaggccttcgtgttcttcaagatcaccaagttcgaggaggagctccgctctgcactgacccgggagatcgaggccgaccgcgtaaccgacgacaacgggaccgaccccgatgacaaccggatcagggagagccggtcgttcccgctctaccgattctttcgagaggagctcgcttgcgtattcctcaccggcgagaagctcaagtcccccggcgaggagtgcaacaaggtgttcctcggcatcagccagggcaagctcatcgaccccatgctcgactgcctcaaggagtggaacggtgagccccttcccatcaactgagccaagatcccatcgccattgccattgccatacacccatcatcgtggaggagaggagac

SEQ ID NO: 407882 - DNA, 415 bp, Oryza sativa
  unsure (1)..(415): unsure at all n locations
attcttaattcatgagctgttgggggtgttacgtttgtnaccacaaacagacactaaagcaagtgttggatttaaagctggtgttaaggattataaattgacttactacaccccggagtacgaaaccaaggacactgatatcttggcagcattccgagtaactcctcagccgggggttccgcccgaagaagcaggggctgcagtagctgccgaatcttttactggtacatggacaactgtttggactgatggacttaccaggcttgatcgttacaaagggcgatgctatcacatcgagcccgttgttggggaggataatccatatatcgcttatgtagcttattcattagacctatagtgagagggttatgttactaacatgtttacttccattgtgggtaaccgatttggtttc

SEQ ID NO: 407883 - DNA, 472 bp, Oryza sativa
gccgtgcaaggcgacgaacccgatcgaccggttttggaggtgccgcgccgactgggtgacggacaggaagcggctggcgcggtgcgcgcaggggttcggccggaacaccaccggagggctggccgggaagttctacctggtgacggacggcaccgacgacgacgtggagaacccgcgcccggggacgctccggtggggtgtcatccaggacgagccactgtggatcatcttcgccaaggacatgatcatcaacctcaaggaggagatgatgatcaacagcgacaagacgatcgacgggcggggagcgcaggtgcggatcaccaatggcgcgcaggtgacggtgcagaactccaacaacgtgatcatccacaacatccacatccacgacatcttgcaaggcaagggcgggatgatccgcgactcgccggagcacttcggcttcgcacccagtccgacggcgacggcatcagca

SEQ ID NO: 407884 - DNA, 472 bp, Oryza sativa
gtgcatccaaggaaagcacctcctttttatttggtgctggcaagaagaaggccgcttctggctctgatgaggatcattcaaattcaccaactcgcagccatgatggtgacaatgtggctgcagatgaggatgacgacgatgatgtccagtggcagactgacacttcgctggaggctgcaaaacagcgcatgcaagagcaactgagcgctgcaactgctgagatggtgatgctgtccactgaagaacctgagaagaagaagaagcacgaggcctcacacaaggagggtgcctccaacggaagtgcaaaacatgtggttgaagaggctaaaagcagtccttatgatgatctggtcaaggagatgaaggataacttgagcaagggtgctactgctgttcagctcaagggtctgatgacttcctcagccctgccaccccaggatgctatgaatgctctttttgatgcactctttgg

SEQ ID NO: 407885 - DNA, 497 bp, Oryza sativa
ttccctgtgcgcccattcctcctctccatttgctttccatccgcgcccgctaggaggagggagccggacgccgccgaggggagagcaggggagagaaggagaggaggagatcgccgacgccgtcgccgtccccgtcgccgatctcgagcgggagcggagatggcgctcacgtccacgaagctgttcagccgcctcttcgccacgaaggagatgaggatcctcatggccggtctcgatgcggccggcaaaaccaccatcctatacaagctcacgctcggtgagatcgtcaccactatccccaccatcggttttaatgtcgacactgctgcgtacaagaacattagcttcaccgtctgggatgctggtggtcaggacaagagcaggcccctgtggaggcactatttccagaacacccagggccttatttttgttgtggacagcactgacagagagcgtgttgttgaggccagggatgagcttcacccgctgctgaatga

SEQ ID NO: 407886 - DNA, 422 bp, Oryza sativa
cggtggggggctcaaccggtcgtcgttgaggtttcagctgccgccgcaggagcttctcgacgatctctgcagccgcttcgtgctcaacgtgcccaaggaggatttggagtcgttcgagcggatcctgttcttgctggagcaggcgcactggttctacgaggacaactccgtcgagcacaacccctccctcaagtcgctctccttcaaggacttcactacgctcatgttcaatagctgtgctgcgctcaggccataccgcgcgcaccttgatgacatttacaaggatttcactcactataagttccgtgtccctgtctgcggcgccatcatcctcgatgacacctacgagaagtgcttgcttgtgaagggatggaagtctagcgccagctggagttttcctcgtggaaagaggagtaaagatg

SEQ ID NO: 407887 - DNA, 410 bp, Oryza sativa
gaaaaaaaaacaaaacacaccaagccttatttaagcgacaatggcatcgctcaccaccaacatcgtcctcgccgtcgccgtggtggcagcgctggtcggcggcgggtcgtgcggcccgcccaaggtgccacccggcccgaacatcacgaccaactacaacgccccgtggctccccgccagggccacctggtacggccagccctacggctccggctccaccgacaatggtggcgcgtgcgggatcaagaacgtcaacctgcctccctacaacggcatgatctcctgcggcaaacgtcccaatcttcaaggacggcaggggatgcggctcatgctacgaggtgaagtgtgagcagccggcggcgtgctcgaagcagccggtgacgggggtcattacggacatgaactacgag

SEQ ID NO: 407888 - DNA, 302 bp, Oryza sativa
aaagctcgtcagcagggaatcttcatttttatctctggagaccagcacccatgccatgagtggaaatggggcattgacttttgacttagaatacactagatggctcgaggagcaaaataagcagataaatgagttgaggacagcagtgaatgctcatgcaagtgacagtgaccttcgtcttattgttgatggcataatggcgcattatgacgaggtattcaaggttaagggtgtagttgcaaaggccgatgtgtttcatatactttcaggcatgtggaagacacccgcagaaagatgctttc

SEQ ID NO: 407889 - DNA, 380 bp, Oryza sativa
cggtgacctggttcccctgtcctacattgcctgtctcatcaccggccgccccaacgcgcaggccatctcgcccgacggcaggaaggtggacgccgccgaggcgttcaagctcgccggcatcgagggtggcttcttcacgctgaaccccaaggaaggtctcgccatcgtcaatggcacgtccgtggggtcggagctcgcggccaccgtgatgttcgacgccaacatcctcgacgtcctgtccgaggtgctctcggcggtgttctgcgaggtgatgaacggcaagccggagtacaccgaccacctgacccacaagttgaagcaccaccctgggtcgatcgaggccgtcgccatcatggagcacatccttgtcgggagctcgt

SEQ ID NO: 407890 - DNA, 454 bp, Oryza sativa
acgttaagtttttaaacaaacaaagtatattaatttgcctattccatgttaagaaacattgcagagaaaagacaggaagcacattttcagataaaacaaagaaggatctgcacaaagattttgaggacattgtgaacaattgtttaacaagagaggaatttgaaagcttatggcctcaaatgattgaaaaatatagcttgcacaatgtcaaatattttgaacacatgtggaaaactagagaacaatttgtgcctgtatatttcaagactgacttctgccccttcattcaaagcacagcattaagtgagggcacaaatgcaaggtttaaaagaagtgtaggaccaaagcatagtgtgatgagctttatgaatgagtatgaaagcatatatgacactatatttagcactgagtacagcaaagatcatgaatcaagaactaaaagaccagatttcta

SEQ ID NO: 407891 - DNA, 478 bp, Oryza sativa
tcaatcggggtgatcatcgagatcgtgttgaggtatagatagtttactctaacaacggcgaagatcctgctccatgggacgatgcacgtcaccatcttcgaggcggaatcgctctccaaccctagcaggccaagctcccaagcgccccagttcctccgcaagctggtggaggggatcgaggacacggtgggcgtgggcaaggggacgagcaaggtgtacgccaccatcggcctcgacaaggcccgcgtcggccgcacccgcacgctcgccgacgacaccgccgcgccgcgctggtacgagtccttccacgtctactgcgcccacctcgccacccacgtcgccttcaccctcaaggccaagaaccccatcggcgcctcccttctcggcgtcggctacctccccgtacgggacgtcctcgccggcgacgaggtcgaccgctggctccccctctgcgacgacaccgacgcgcgcaccccca

SEQ ID NO: 407892 - DNA, 475 bp, Oryza sativa
gccgccgagaccgccgccgccctcgccgtcgtttccatcgtcttccgcgacgccgaccccgactactccaaccgcctcctcgaccgcgccatccaggtgttcgagttcgcggacaagtacaggggcccatacagcagcagcctgcacgcggccgtgtgcccctgctactgcgactactccggctacaaggacgagttgctgtggggcgcggcgtggctgcacaaggcgtcgcggcgccgggagtaccgcgactacatcaagcggaacgaggtggtgctcggcgccagcgaggccatcaacgagttcggctgggacaacaagcacgccggcattaacgtcctcatctcaaggaggtcctgaggggaaggacgagtattttcagtcgtccgcgtgaacgccgacacttatctgcaccctctcccgcatcttaatatcccagaccagactcccagtgggctgtgtcaagtgggcacag

SEQ ID NO: 407893 - DNA, 211 bp, Oryza sativa
  unsure (1)..(211): unsure at all n locations
ttctcctccccctcccggttcggttcggtacggnacggctccggttcgatccccggcnnttccttnggttcgggggttggtgggaaagcatggcggcgacggatgttgagtaccgctgtttcgttggcggcctcgcctgggtcaccgacaaccgctccttttaaggcgcctttttcacctacggggagatcctcgagtccacgatcatcaa

SEQ ID NO: 407894 - DNA, 381 bp, Oryza sativa
cacaagttaggtgcatgccatggcgttttttatggagtgcgcctcgccaccggcactcacgctggccctgttcgcgttgtgcggtgcccttctcgccacctccatgctcccggcgcgtgcgacggcgggcagttgcttggacgtcggcgacatggtgatgatggacaggttccgcgcttggcagggagctcacaaccggtcgtacccgagcgcagaagaggcgctgcagcggttcgatgtgtaccgccgcaacgcggagttcatcgacgccgtcaacctgcgcggcgaccttacttaccagctcgcccagaacgagttcgcagacctcaccgaggaggagttcctggccacgtacaccgggtactacgccggcgatggccc

SEQ ID NO: 407895 - DNA, 464 bp, Oryza sativa
cactcctaagaagactccaaggatagcttcaatggaggtgaagtgcttgctgctcctggctctcttccttctgctaggaacacatggtggtgaagcgcagccgctcgtgccggccgtcatgacgttcggtgactcatcggtggacgtaggtaacaatgactacctcaaaaccatcatcaaggcaaacttccctccctacggaagggacttcaagaaccaggtacccacggggaggttctgcaacggcaagctggctactgatatcactgccgagacgttggggtttgaaagctacgcacctgcgtatctcagcccagatgcgtcagggaagaaccttctgattggagccaactttgcatctgcaggatctggctactatgaccacactgcacttctgtatcatgctattcctttgtcccaacattggagtacttcaaggagtaccaatctaagctggcagccgt

SEQ ID NO: 407896 - DNA, 484 bp, Oryza sativa
atccgcgcgcggtgcgtagtagcgagatgagaattggggggagggcaaagcgatggctccgatgaagctgtacgggtcgacgctgtcgtggaacgtgacgaggtgcgtggcggtgctggaggaggccggcgccgagtacgagatcgtgccgctcgatttctccaaaggcgagcacaaggcccccgaccacctcgccaggaacccctttggtcaggtgccggctttgcaagatggtgacttgttcctctgggaatcacgtgcaatttgcaagtatgtatgccgcaagaacaaaccagagctgttgaaggatggcgacctcaaggagtcagcaatggtggatgtgtggcttgaagtggagtccaaccagtacactcctgcactgaaccccattctttttcagtgcctaatccgttcgatgatgtttggggcaccccccgacagaaagttgttgaggagaaccttgagaagctgaagaaggtgttgg

SEQ ID NO: 407897 - DNA, 498 bp, Oryza sativa
ggctctttcgagtcagaatggagttcttgttttataccaaaactgacaagtcacacacgaccttatcaacgcatactaccactgactcgagtggatccagagctggcttgtttagaacacctatatctggtggtgtgcagagtgcgacttttgcccatggtctacctccgccggcattggctgttcgcaacttgatggaacaggcgcggtttgctcatctgtgcactgtcatgtctggcatgcatcatcggcgtactggatacccatttggttcgcttgttgatttttctaatgactcgatgggccatccaatattttcactatcaccgttagcaatacacacaaggaacttgctctctgacccaagatgcacacttgttgtccaggtacctggatggagtggactgtcaaatgcacgtgtcacaatatttggtgatgtatatcctttgccagaagatcaacaggagtgggcacataagcagtatgttgcaaaacatc

SEQ ID NO: 407898 - DNA, 477 bp, Oryza sativa
  unsure (1)..(477): unsure at all n locations
cctcccgcggcggcggcggcgagatgttttctttagactnggcggccgtgccgcccagaaagatggctggtggttttcgagtactgcatcttgacaggccctttctggctttcctgccagaagtacagagtgctgataggaaaataccattcagagaaaaagtgatctataccgttatctctctcttcattttcctggtgtgcagtcagctcccactctatggaattcattcaactactggagcagatcctttctactggatgcgtgttattcttgcatcaaaccgtggcactgttatggagctgggtattaccccaattgtgacatctggaatggtaatgcaacttctagtgggatcaaagattattgaagctgacaacagtgtgagagaggaccgtgcacttttgaatggcgcacaaaagctgctgggtatcttgattgctattgaagaagctgtgcatatgtgctggctggaat

SEQ ID NO: 407899 - DNA, 466 bp, Oryza sativa
  unsure (1)..(466): unsure at all n locations
atcatggtccaagaattcttgctcatatcgccgtgcaacgtctgaagaggtgttcaatccggacgaacaagatgcagcagagccggcaggacgtggacgagcatgtcgccgagctccgcggcgagctgcgcaaggcgcgcgaggagcgagaccgcgcgtaccgcgtcctggaggtgagcgagtggaaggcgctggcgtcggccaacgaccgcaccaccatagagacgctcgaggcggagctcgacgcgtccagggagtccgagaagcggatgctcgagtccctggcgatgcagacgaagcagctcgagatgaccaagatcgagctcgaggaggccaggctggagaacgcgtcgctgcgtgagaccatccagaggctcgaggcctaagcggtgcccgtcgcgacgacgccgaagggaagtacgatcgcgactaccgagggttcacgcnagctgccgatgggcttgtg

SEQ ID NO: 407900 - DNA, 499 bp, Oryza sativa
atccaaaccaacctcaccgtcgacgaggattaatgcggcggcggcggcggaggcgaaggcggcgaagatgcagtacaagaacctggggaggtcggggctgcgggtgagccagctgtcgtacggggcgtgggtgacgttcggcaaccagctggacgtgaaggaggcgaaggcgctgctccaggcgtgccgcgacgccggcgtgaacttcttcgacaacgccgaggtgtacgcgaacgggcgcgccgaggagatcatggggcaggcgatgcgggacctcgggtggcgccgctccgacgtcgtcgtctccaccaagctcttctggggagggcagggccccaacgacaagggcctctcccggaagcacatcgtcgagggcctccgcggctcgctcaagcgcctcgacatggactacgtcgacgtcgtctactgtcaccgtcccgacgccaccacccccgtcgaggagaccgtgcgcgccatgaactgggtcatcgaccacggc

SEQ ID NO: 407901 - DNA, 434 bp, Oryza sativa
tttcgccaagtggcgcactgttgtgagtattttttttcggcccatctgacctcgccgcgaaggaggctgcctggggccttgcccgctacgccgccatttctcaggacaacgggctggtgccgattgtcgagcctgagatcctcctcgacggtgagcatggcatcgacaggaccttcgaggtggcgcagaaggtgtgggcggagaccttcttctacatggccgagaacaatgtgatgttcgagggcatcctcctcaagccaagcatggtgacacccggggccgagtgcaaggacagggccacccctgagcaagtatctgactacaccctcaagctcctccacagaaggatcccccctgccgaccccggcatcatgttcttgccgggtgggcagtctgaggtggaggcgacccaaaacctgaacgcgatgaaccag

SEQ ID NO: 407902 - DNA, 305 bp, Oryza sativa
atcgcgcaggaggagatatttgggtctttgttttccatcctcaagctcagcacggtggaggaggtggtgcggagggcgaacgcgacgccatacgggctggcggcgggggtgttcacccagaggctggacgcggcgaacaccctggcgcgggcattgagggtcgggacggtgtgggtgaacacctacgacgtgttcgacgcggccgtcccgttcggaggctaccagatgagcggcgttggcagggagaagggcgtttacagccttcgcaactaccttcagaccaaggccgtcgtaacgcccatcaa

SEQ ID NO: 407903 - DNA, 401 bp, Oryza sativa
tcccatacactggctctcctggtttggtcaacttgtagctttctggaatgttgcaggcgcgcttgcgctgacgatcttgatcccatcggttgccaaggaaagggcgagcccagagttcatctttacccatttcaacacagaaaacggcatgggcatccaccagaaggcctacattctagctgtggggttgctgatgagccagtactctgtaatcggctacgatacatctgcacacatgatagaggagacgaagaacgcggattggagtgggccgatggggatcatcacgtccgtaggcctatcaaccatgttcgggtggatctacctgattgccctgacatcgatcatgacccacataccttacctcctgaaccccagcaacgacgccggcgggtacgcca

SEQ ID NO: 407904 - DNA, 441 bp, Oryza sativa
tcctgctcactcatgcacaccgctgtggatcttgtataatgagaccaagctcgatagcgagattaagtcatggcttgcttttgctgcccaaaaagtggttgaggtgaatgcccttgctaaggcattggctggacagaaggatgaggcttactttgcagcaaacactgctgctcaggcctccaggaggtcatcacctcgtgtgacaaacgaggaagtccaaaaggctgctgctgctctgagggggtctgaccaccgccgtgctaccaatgttagcgctaggttggacgcacagcagaagaagctcaaccttccagtccttcctacaaccacaattggttcattcccacagactgtggagctcaggagagtccgccgtgagtacaaggctaaaaagatctctgaggatgagtacgtcagtgccatcaagggaggaatcagcag

SEQ ID NO: 407905 - DNA, 427 bp, Oryza sativa
gcttctcctccccctctttaccttttcctccttggttcggttccgcggctcgtctagggtttagggggttgagatggcggcgccggatgtcgagtaccgctgcttcgtcggcggcctcgcctgggccaccgacgaccgctccctcgaggccgccttctccacctacggcgagatcctcgactccaagatcatcaacgacagggagacggggaggtcacgtgggtttggcttcgtcaccttctcctccgagcagtcgatgcgcgacgccatcgagggcatgaacggcaaggagctcgacggccgcaacatcaccgtcaatgaggcccagtcccgccgctccggcggcggaggcgggggctacggcggcggcggtggcggctacggcggcggtcgtggaggcggcggctacggaggaggtggcggcggc

SEQ ID NO: 407906 - DNA, 391 bp, Oryza sativa
  unsure (1)..(391): unsure at all n locations
ctaggactgccagcaatgaagccgtttaggtaattattggcaagaaatggaaggagattgttgactacaatgataagatggtctacagcttccatgatgacgccaagagggagaaaccaagcagaggtggacggtacaacgtgtaagtcaccgcaaaacgttgcagcttggatagtggccatcgagtggtgtgccgataccggcgcctgttctttacagcctcagctagtgttgttgtccgaggcaatttttccgacctattgtgttgctttcctctctgatagcttatggtaaaagatacaaagatgttgaggagtttgtacgccacttaattttgctcgtaacatacattgacaatcaagaggagccatggcattgcgatcaaannaaa

SEQ ID NO: 407907 - DNA, 386 bp, Oryza sativa
ctccaagtccatccccttccccgatctatatgtatttatccgatccaggccatggcggccaccatccagagcgtgaaggcccgccagatcttcgacagccgtggcaaccccaccgtcgaggttgatatttgctgctcggatggaacatttgcgagggctgctgtgcctagcggtgcatctactggtgtatatgaagctttggaattgagggatggtggctctgattacttgggaaagggtgtcctcaaggctgttgacaatgtgaactctattattggaccagcattgattggcaaggaccctacagaacagactgtcattgacaacttcatggttcagcaaactggatggaaccaaaaacgagtggggctggtgcaagcaaaagc

SEQ ID NO: 407908 - DNA, 403 bp, Oryza sativa
atctagctagggagagaaaggaagagattatttgagagagatggccattgcttatgctcccatggcgagccagctgatgaagagcagcttggtgtgctccaagccgagggggctgtctggtgcttcgctgacaaggaggccccgcttcacagtcaaggccatccagtctgagaagccaacgtaccaggtggtgcagcccatcaatggcgaccccttcatcggcagcctggagacgccggtgacctccagcccgctggtcgcctggtacctctccaacctcccggcgtaccgcaccgccgtcagcccgctgctccgcggcattgaggtcgggctcgcccacggcttaccttctcgtcgggccctttgcgcttaccggcccgttcgaacacgccggtgcaccggc

SEQ ID NO: 407909 - DNA, 367 bp, Oryza sativa
ccgccgccggagcaggagcagagaatggttgttttgtgcggcgacaactgcacctgcaacccctgcaactgcggcaagtgaagcaagcaacctcctgacgaaaccaaggagatggaagggcctagtactgctaagctagtagtttgatccagttacaagtgatgagttattgtcactgtaactttgtgtttcctgagtttgtgatctaagacctgagactgaagaaatgcatcctagttaaataagtgctaagaataaagatgttttgagacatctatggcgtgtgtacgatgatgtagtccttcctctccagtcttgtggtgtgtacgtaattaagaatgcagtgctgtgtcatgtggtatgcttt

SEQ ID NO: 407910 - DNA, 494 bp, Oryza sativa
aaaatgggggagatcaccaatgtcatgttgtttcaggccatcgcgcagcagaagcttccgaagatgatctacgactactacgcctctggagctgaggatgagtggactctcaaggagaacagggaggcattctccaggatcttgtttcgtccccgcatcctgatcgatgtctcaaagatcgacatgtccgcaactgttcttgggttcaagatatcaatgcccataatgattgctcccagtgccatgcagaagatggctcaccctgacggagagtatgcaacagccagggcagcttcagcagcaggaactataatgacactgtcatcttgggctacttcaagtgttgaggaggtcgcctcaactggaccaggaatccgtttcttccagctatacgtgtacaaggacaggaatgtggttgagcagcttgtcagaagagccgagagagctgtgttcaaggcgatcgactgaccgtggacactccgcgactgggacgc

SEQ ID NO: 407911 - DNA, 459 bp, Oryza sativa
tcgtcgtcgtcggtggcagctgtctttttttgaaggcggaggagatcgttctccagcccatcagggagatctccggggcggttcagctgccagggtccaagtcgctctccaacaggatcctcctcctctccgccctctccgagggcacaacagtggtggacaacttgctgaacagtgaggatgttcactacatgcttgaggccctgaaagccctcgggctctctgtggaagcagataaagttgcaaaaagagctgtagtcgttggctgtggtggcaagtttcctgttgagaaggatgcgaaagaggaagtgcaactcttcttggggaacgctggaactgcaatgcgaccattgacagcagccgtgactgctgctggtggaaatgcaacttatgtgcttgatggagtgccacgaatgagggagagaccgattggtgacttggttgtcgggttgaaacaac

SEQ ID NO: 407912 - DNA, 482 bp, Oryza sativa
  unsure (1)..(482): unsure at all n locations
tcctctcttctcctcgtgcccaccaccacttactttagcaatggcgggcaacgggccgatcaacaaggaggacccgctcaactggggcgcggcggcggccgagatggccggcagccacctcgacgaggtgaagcgcatggtggcgcagttccgcgagccgctggtcaagatccagggcgccaccctccgcgtcggccaggtggccgccgtcgcccaggccaaggacgccgccggcgtcgccgtcgagctcgacgaggaggcccgcccccgcgtcaaggccagcagcgagtggatcctcaactgcatcgcccacggcggcgacatctacggcgtcaccaccggcttcggcggcacctcccaccgacgcaccaaggacggtccccgcctccaagtcgagctcctcaggcatctcaacgccggaatcttcggcactggctccgatggccacacgctgccgtcggagacggtgcgggcggncatgc

SEQ ID NO: 407913 - DNA, 388 bp, Oryza sativa
aaatctcccctcgaagcgaagcgttgttatcttcttctcaagatgcagatctttgcgaagaccctcaccggcaagaccatcaccctcgaggttgagtcctcggacaccattgacaatgtcaaggccaagatccaggacaaggagggcatccccccggaccagcagcgtctcatctttgctggcaagcagcttgaggatggccgcaccctggccgactacaacatccagaaggagtccaccctccaccttgtgctcaggctcaggggaggcatgcagatcttcgtcaagaccttgactggcaagaccatcacccttgaggtcgagttcgtctgacacccattgacaatgtcaaggccaagaaccaggaccaggaggggattccccccga

SEQ ID NO: 407914 - DNA, 337 bp, Oryza sativa
cctctcactcccagatacctggtggtgttatttgcccactaccatggatccttgcaagttccggccgtcgagctcgttcgacacgaagacgacgacgacgaacgcgggagctccggtgtggaacgacaacgaggcgctgacagtggggcccagggggccgatcctcctcgaggactaccacctgatcgagaaggtggcgcacttcgcccgggagcgcatgccggagcgcgtggaccacgcccgcggggccttcgcaagggcttcttcgagtggacccacgaacgtaccgacattacctgcgccgactttcttccggtccccgggcgcccagaccccc

SEQ ID NO: 407915 - DNA, 394 bp, Oryza sativa
accttgactttggcttccccactgtttttttttcttgggaggctgggagctaccagcacaacacaccaaggaagctgagcaggtgcgttgatttcttgatatcatggccaagaggcacctcttgttggtgacaacttgtttgtgggctctgtcatgtgccttgctgcttcatgcttcctctgatgggttcctgagagtcaacctcaacaagaagagattggacaaggaagatctcactgccgtcaagttggcgcagcaaggcaaccgttttctgaagaccggcagttcagacagtgatcctgtccctttggtggactaccttaacacccagtactatggggtgattggcctcggctcaccgccgcagaactttacggtgatatttgacacttga

SEQ ID NO: 407916 - DNA, 448 bp, Oryza sativa
aacccctctcactcccagatacctgctgttgccattagcccactaccatggatccttgcaagttccggccgtcgagctcgttcgacacgaagacgacgacgacgaacgcgggagctccggtgtggaacgacaacgaggcgctgacagtggggcccagggggccgatcctcctcgaggactaccacctgatcgagaaggtggcgcacttcgcccgggagcgcatcccggagcgcgtggtccacgcccgcggcgcctccgccaagggcttcttcgagtgcacccacgacgtcaccgacatcacctgcgccgacttcctccggtccccgggcgcccagacccccgtcatcgtccgcttctccaccgtcatccacgagcgcggcagcccggagacgatccgcgacccgcgcgggttcgccggcaagttctacacccgcgagggcaactggga

SEQ ID NO: 407917 - DNA, 443 bp, Oryza sativa
gacgaaggagaggagcagccatggcgtttttttgttgcagcggcggccagcacgttcctggggacgaggctggcggacccggcgccgcagagcgggaggatcgtggcgaggttcgggttcggcggcgggaagaaggcggcggcgaagaaggcggcgaggccgtcggcgccgacgacggacaggccgctgtggttccccggcgcggtggcgccggactacctggacgggtcgctcgtcggcgactacggcttcgacccgttcggcctcgggaagccggcggagtacctgcagttcgagctggactcgctggaccagaacctggccaagaacaacgccggcgagatcattggcacccggttcgagaccggcgaggtgaagtccaccccgttccagccctacaccgaggtgttcggccttcagcgctttcgggagtgcgagcttat

SEQ ID NO: 407918 - DNA, 408 bp, Oryza sativa
  unsure (1)..(408): unsure at all n locations
caggagacgccaccacgcgcgccgtgtttgctattccaatccccgcacgcctcctccgccaccgccgtctnggcctccgccgccgccgcgaccaggatcacagttgcgatggaacacaaggaggctggctgccagcagcccgagggcccaatcctttgcatcaataactgcggcttctttggcagcgcggcgaccatgaacatgtgctccaagtgccacaaggagatgatcatgaaggaggagcaggccaagcttgctgcctcctccatcgatagcattgtcaatggttgtgacggtgggaaggagcatattgttgctgccagtggtagcacggcggtggcggtggcttatgtcgaggcgaagacccttcgttgtgcagcctaccgatgtcgcgggcaccaaccagga

SEQ ID NO: 407919 - DNA, 494 bp, Oryza sativa
cccgagtcggttgctcgatcagtctgggcttggttttcgccggtgctgcagagcgcttccacagccggaccgtgctcatcacgggcgccaccggattcatagcgaaactacttgtggagaagatcctgcggctgcagccggcggtgaagaggctctaccttctcgtgcgcgctgcggatcaggtttccgcgaacaggagagtcgaatccgagatcatgcaacttccgatatttcaacccttgcgggagaagtatcaaacgcacttcagttcatggttctgggacaaggtttttcctctagcaggagatgtgtccttgaagaatttcggtataggagacgctagactggctgaagatataaggaaagaaacaaatattattgttcacatggctgcgacagtaaacttcgcagaaagatatgatacagcgttggcaataaacactatgggtgtgaagcatatgatagattttgcatcaaaatgcacaaacctagag

SEQ ID NO: 407920 - DNA, 436 bp, Oryza sativa
gaagatatatggtatatagctatcagggaaaaagatacaaaaaaatgtacatttgttgatttatggtcagcactatgcaaccatggtgatctcaaggcgcaagtatatatcatgtctgtaaatatatctttttcaaaaaagtttttacatctctataggcagtgagatgcatgctaccaaggcttcaggtcgcccaccggtccagcagtccagttcagggccctctccccgggcttcaagaagacgttttcgccatgtggaagcttgcgagcgagaccattcagtatctgatggaatgcatctcctgcctgagcaggctgggggaacagcatggcctgcttcatcgacgggttcgcgagaagcctctgcttcctcaggataacatctgttggtatggttgtcaggatactgtccagcttcggaacatcctcctcgg

SEQ ID NO: 407921 - DNA, 356 bp, Oryza sativa
gtggttgagagcgcggacgccgggaagatgaccgagtggtgccggggttgtagaaggaggcgatggacatgcggttgacgctggggctcgtgaggacgctgtgcatgacccttttgtacctgccgatggtgatcacctccagttggtcgtcgatgttggcaacaattgtttggcgtatggtacgggacgtacacccactagttttccttgagcagtttgatgccgcttacctgggggcaactggaacagttggatgatgccaccggcgtggcttgggcgcggagcgtcgctttcaagatcggggccttggatcggcgggtagctgttcaccttgaggccaaacgattgtgcgcact

SEQ ID NO: 407922 - DNA, 428 bp, Oryza sativa
attccaaggaaaaaaccatcactaggttaaagtgtttatgtaggccttctttagcaaggccgaatacaccggtccatcccccggatatgggctttacatactagacaaaaggccgtgcctgaaaatttaattcctgtagccgaacagcatgtttaattctcaacgctattttctctgcagtctgcactgcatagcgtgcgtactgatctttggggctctgctgatgcagtgtcaaattgcctttgaaagaaacccatatggtacacgattttgcgcacattattctcataataagatagtaaactttgattcagtgatgaccacgccggcattttttcttccttcattgcagttcgcctaccggagcttcgttgagccacaagaagtggatgaaatcgtacagcttagcactcacgctaaccttgtac

SEQ ID NO: 407923 - DNA, 449 bp, Oryza sativa
gaaaggaactgtagaaactttattccagatttatcatttattacccatccctaggacggtaacattcttgtgatgaaaatacatatgcccatgcttaaggtaactggatacaaggaacttcacatcacgtcgaaaaggaaatattacaatacaggcatgaacgacacggggaaaaaaaggcttgaagtaactccggtagactcatcagaattacagcgtgcagtactgaacaagtagtaagattttgcaggaaacagttcatagatatacatgactggaatagatccggataccggatgaccagattcaccggtagttgcggtaaagtgggctgtacatgcagctctctgcatacttaaccaggtcctttggccgagggcgcctgcttgccaaaccaagttcatatgcctttgctgcaacgttggctgcaatgtgggcagagatctttc

SEQ ID NO: 407924 - DNA, 424 bp, Oryza sativa
tttttgttgagtaaaaatagtttctcagtagcacgcgaacataggattgttgatgtgaaacacatgcattcgacaaaagggaaatgaaatacgacaacgaaagcagttctcttagcagtagaccaactagaacatgtaagggtaacggcacaacacatgcggcggccaaaaatttagagcttgtcctcgaaatcggagaggggagtcatctgctccttgagacccttcctcttgcggatatcctgcaccagggttgaagcctgcgagccagcttcaagaggatcagaggtcatcatgtcccaatggtcgaacacacactgggggaaggcctggccagatgtcgcagccctaagctggcttgagaacccaaaggactcgatgacagggaggaaagccttgatgttgtacagaggggtaccaggcc

SEQ ID NO: 407925 - DNA, 431 bp, Oryza sativa
aaaaaaatcctgaagtctgtaccaaagttcagtattacacctcacagaaaatggcccgtgtctgcagctgtgtttcttcttcgacagtcatgcgttcctctgtcgaaggggaacaacgtacgggcagccaatccgagcacagtatatatagtatagcagttctgcccggggacagtcaatgtgtgtgcttcgttacattataggagtatatatttctgcacctacgcgagcccgtacttggacagtggtcttagttttcgtacactttgcactcgtcggtctccgggttgtccttgcagaagtcctccagtgggtcgccgctgccctgcaccggcgcgccgggccacttgctcgccaccagatgcgccagatcgaccacgcgttggctgtagccccactcgttgtcgtaccaggcgaccaccttgaccatg

SEQ ID NO: 407926 - DNA, 440 bp, Oryza sativa
caaaagtaggtccaccacttcatctcatgcatatcactgaagcaaatcagtttacaataggtttaagtgacaaatggtaagagacaagaagcctcatgactacggctcaagagtgtcacttagaacagtaaactatcaaatgtcaacagacaatttactccaccttttccaagaaatccttgatctctgccggggttagaactttgaattcacggtcagatcgaataactccaatttcaatattgttggctgagatttgaccctcatatccttctttcagagtcaaaatggcagtatggatggcatcatcaagctccatgtcttctgggaatcttttttcaagaaatgtctttgcattggagacatttttccccatagctgatgctttccaggagaagtatgatcctgagggatcaacctgatacaactgggggccattg

SEQ ID NO: 407927 - DNA, 440 bp, Oryza sativa
gacgagagcggagcacactaagattcattcattcattcatttgatcaaagcaaacgagacgagctttcttcttgcgatcaaaaacacagatgggcaaccacacagttaacacaaactagatagttccacacaaaactaacgatgataacgatcggatgatgatgatggtagctcgattagatagatagataacttggccatgagggccccaccgctcagttcctccagttcccgtcggagttgccgccgccgcggctgccgtagccgccgccgtagccgccgccgtagccgccgccaccacggccgccaccgtagccaccgccaccgccgtagccgccttcacggcgctggccgtagccaccgccgtcgtcaccaccaccgtagccgccgccaccgtagcctccgcctccgccgcgctggccgtagccaccgccgcctcc

SEQ ID NO: 407928 - DNA, 395 bp, Oryza sativa
ggggcagaaatcattaataccaaggcagaatgcccagcccaaaaccaatacaagagtgccaataataattaaacaaactcaacatctagtacttgactatagcaaactgaagcccgtaccccacacgaaacacaaacttcgatcactgatcgggcttcgctgaccaggccttgaccaatcttgacacgaacttaacaaagctgcagtgcagaaaaagcaccaaactaacacacgccaaacacttccaaattccaaccatggcctggtctcacacacgccccaattaagcgctgctcttgtgctcgccggtggcggcggcggcggtcttgtcttcctcgccggagcccttgtggtaaccgggcagtttctccatgatcttgcccagtatacccttc

SEQ ID NO: 407929 - DNA, 372 bp, Oryza sativa
gtaccgtaaccagcaattggtatattaactcgagcaaacttaaaatgctcgaaaaagttgttcagcaacgaacaaaaaaaaagctctaagcaaaataaaactaatcacattgttgcccaatggcagataaagctttgagcataccaactgacgacggttacaaaatcctaccatctgagagcatcttcctcttgtttattggcccgggggaaaaaagggtaaaatgcggctaactctttcgagtttatgctcagttattagcatcaaagatgctcaaagagttaaaaaaaaaaaaaaaaaaacgcagccgtgtaggcgtgtgtagcttcaagcagcaaccttcttgcagtggttctccagccactccatggt

SEQ ID NO: 407930 - DNA, 405 bp, Oryza sativa
ttgtttttgacgagagcggagcacactaagattcattcattcattcatttgatcaaagcaaacgagacgagctttcttcttgcgatcaaaaacacagatgggcaaccacacagttaacacaaactagatagttccacacaaaactaacgatgataacgatcggatgatgatgatggtagctcgattagatagatagataacttggccatgagggccccaccgctcagttcctccagttcccgtcggagttgccgccgccgcggctgccgtagccgccgccgtagccgccgccgtagccgccgccaccacggccgccaccgtagccaccgccaccgccgtagccgccttcacggcgctggccgtagccaccgccggcgtcaccaccaccgtagccgccggcaccgt

SEQ ID NO: 407931 - DNA, 441 bp, Oryza sativa
acgtaatcaatgatgaaattaattaattcccaaacatgtacatctatacatataaccggccggcggtggcggtggcggcggcggaggcggctgccggccgtgcagcggcggcagcagcaccggcgtggtggtggtggtcggcgaggacggcctcgaggacgtgcacgaccctgcccatggtgggcctgaccttggggttctggctgaggcagtcgtaggcgaggcgcgccacccgctcgacggcggcgtcgacgccgccgccgtagtccgccgccggcgccggcagcgccatccggcggtcgacgatcctctccagcttcttgggccggatgaggatggggcgggcccagtcgacgaggttgcacttgctgcagccggcggccggcggctcgagcgcgcggcggccgacgagcatctcgagcaggacgacgccgaagccgt

SEQ ID NO: 407932 - DNA, 462 bp, Oryza sativa
gttcttgatgtccacgtcgagcggcgcctccaggcagttgagcgccatgccctcgcggtcggcggccgacggctcggggagcttctggccggacttgatcttgacgatgccggaggcaggctggctggacacgagcttgacggcgtcggactcggcgaggtcccatgcgcggccgacgaactccgtggagaagccggtgaagatgccggtggcaccggtgagctgcatgtttgtgaattggccggccttgtgcgccttcgatgtgtcgccgaggaagaggatgacgagctcgattggggactccgggaggttatgccaccatgtcaccacgccaaaggggagtgccagggagtctccctccttcacggcgatcaccttctccttgctcgcctccggcaggacaatgccacaagtgcccttgccttgaagaacatacgcaacctttccggagtcggaaaagct

SEQ ID NO: 407933 - DNA, 436 bp, Oryza sativa
caccccaaaatacagtttagcgacaatatcttagaaaagccgcttgctttgccgccatggctggcaagctgagcagagcagctaacacaaagaacacgagatcactataaaccaaacggcaacgaacgaagaaaatacagggtcttttttgtctgaagatacacgaagcggttcgttttcttttatttttagtctcctctcctcctcgatgatgggtgtatggcaatggcaatggcgatgggatcttggcttagttgatgggaaggggctcgccgttccactccttgaggcagtcgagcatggggtcgatgagcttgccctggctgatgccgaggaacaccttgttgcactcctcgccgggggacttgagcttttcgccggtgaggaatacgcagccgagcttctcgcggacgaaacggtagagcgggaacgaccg

SEQ ID NO: 407934 - DNA, 447 bp, Oryza sativa
aacaaaagccatactctctgtattaaagatccaacaggttcagagaacacgcaagctcagaactacacatcaccaaaattggagcaagtttgggggtacatatccgctcatacagtggaggatttatttctcgattctacgagctttttaactagagttcgaccgggaagtcaattacggatagaaatgagcatcctgtcttcacaaaacccatgcacacaacagtgggcatgaaccgcatgatattcaccatcaagtttagtagggctccacgggtgcgcggaacttggcaccagcgtagacagcagccgcaccaagctccttctcaatcctaagaagctggttgtatttggcaaggcgctctgatcggcagggtgctccagtcttgatctgacccgtggcccaaccaacagccaaataagcaatgaaggtatcctcagtttcacc

SEQ ID NO: 407935 - DNA, 401 bp, Oryza sativa
gagaagcaggtaaaaaccttttaactgcccaaaaaacggcaacaggttttttggctaccaattaacatagcacgaggctaccaattctaactaccgttaggcttatatacagataccctataatcaacggactactatggtacattacataagcacaaggctagaatgtaggactacacggtaagtttcgccaacagataatacacagaaagacacgaagagaacacagagtctcccgcttttaatggccaccatcggggagaccaacttcatggtgtcccccttttcctccacaagaccttgcaacagactcgaacagcttttcgatctcaggtgcacagcgagtaaatgatcgagcccaaaaactgtagcagggattctttataagctcaatgaaagct

SEQ ID NO: 407936 - DNA, 335 bp, Oryza sativa
ggaataaaatcatcaagtagatcttgggacacacggtaggggacatcacataacaccaatccagctacacacaaatagattattggttttggtccataaacaaattaaacatgacaactcttccttcttttaatccagctaaacaagtaaaaccttatatttctaaggaaaccataacacactgcaagaacaccattcttatggcaccatgctcagcatcttaatactggaacattttcagctcttggtcttggacttgacctttgctcttggggcaagaccaatggcttcggaacccttcatgatcctcaagcgtttgcatgactcgacaaaca

SEQ ID NO: 407937 - DNA, 401 bp, Oryza sativa
gctatggctactcccatattttttttaacgaaatgagccgatcctctaccctctatacactgtttatatttcaatatacctaaacccatataagactagataaatattaaccaggacttttccgcctagataaaaatctattatagccaacaaattgtgatcttttatttgcaaatacccccgtacatggtaaaacaaatacacatattcatctaagaaataactacaattaggaaacctggaagcctggaacatgccacaggaatttgcggacttgttttctgacaaacctcaaaagccttttgcctatgtttggaccacacgaaaaccggtttgaaccagcaaacaaaaacgggggagcccagccccaaatgaccttggaggcgtaatttgggaccaac

SEQ ID NO: 407938 - DNA, 428 bp, Oryza sativa
attcagaatccgggcctcattttattcgggaaaaagatgctcaggccagttccaggtcacctgatggcaagctcacaagttcagacagtcacgcacacacatacaatactctcggacaaactgtaacaagatgcaagctcccttgagattatcttatctcactctacgatgactgccggagctctgggcgcacgaaatcggcgttggcaggcacggagatgtcgacggtgggccgcagctcagcgcacacctcgattgcgccatggacggggtcggacatgaagttgctgatgaggtcctggttgatgggagcatccttgtccactgtcacgaatgcttgctgggtcaggatgtagcccaagcgtggcgcccatttccttgatcccagacgagccggcgttgagcagttgccaaccatgaaggccact

SEQ ID NO: 407939 - DNA, 373 bp, Oryza sativa
ggcaagttgcaaacattatctgaccgaaaaaaaccaccagtttgatactattcgaaatcactgcaatgagtgagtgacacaatggagcaacaccaagagtgcactgcaaagccggttttgatccttacaccacacaaggcgagagggagacacacccgttgataatgttgttacaacatcgacatgaccatcgatatctgaggtgctacatggcgtacctctgagtccaggtccttgctgtgttctcgtacttgtgcctatctgtcttgtacatgtgggcgatcttagggaccagaggatcatcagggttcggatcagtcagcagggaacagattgacagcaacaccttggaaatggttagtgctgggcttca

SEQ ID NO: 407940 - DNA, 437 bp, Oryza sativa
gctaaagaacgatatttattatgaacaatttcgtgagcacggtagtatcacatgacactgagaatatgtggtatatcttcgcggacagtgagaaaaacggtcgccctccacgtttttttcttccttcaatttctccaatataacgtacagcttggcacatatctgtacaaaccgcggtactggtaaacaaaaacaacgtacacagcatactactttaggatcctcatgctggtacagccacaggtttttggctgggcttgattcccttgatagcttctgcatagtctggagccccgaaaacggttgaaccagcaacaatggcgttggccccagcttcaatgaccttgtaggcgtttttgggaccaactccaccatcaacctcaatccaagggtttactcccttctctgcacataatcttctcagctctgcaatcttc

SEQ ID NO: 407941 - DNA, 411 bp, Oryza sativa
agttggacgcgcgcagcatgcattttatttaggcacggtccacaattcatacatgtatagtggatacgtctcgtcggcagacactcacggtatagtagggtagtcgtgtgtacagtgatatagtcatatctgcgcgtcttttcatgccgttcgttgacttcgttcacagggtcagggtcgggtaggcgatatcgagtgtgacgccacacaggccggggccaccgacgtcgcggagaatccggatgtagccgcgctcgccccatgactggccccatgagttcttgatggtccagtacttggcgccggaagacgcgtcggtgccgtacccgacgacggtgacggcgtgcgctaggagcgtgccgcacgggcccgtgtaaacgccacccttgtagaactgcattccgctaccga

SEQ ID NO: 407942 - DNA, 343 bp, Oryza sativa
gggaaacgaataaaatcattattgcaaaaacatcatcttcttcttcatcttcttagtgtacacaacaccaactcgatcatcatctcgtcgcactaaacccatcttccccaacccaaagacaacgaactcgctggccacaaatccatccaaccacaattaaccactgctaagctacggtcccccacttcacttgccggggacgaagttggtggcgtacgcccaggcgttgttgttgacggggtcggcgaggtggtcggcgaggttctcgagggggcccttgccggtgacgatggcctggacgaagaagccgaacatggagaacatggcgaggcggccgttcttg

SEQ ID NO: 407943 - DNA, 384 bp, Oryza sativa
ggcttattgcaccgaggagcaaacagttttcactcgagataccagtggcagtagcaggaccggtggcagaatacatatggcaaatagtcaaccatgacacaaataaataacatcattcggtcatacatagttttaacaatagatataataaaagtaaaagactcctccctcctcaccagcacatagcacagcctagcaactacaaaaattcccataacatggcataaaaatttggaaattgtctacgaccacagtgacttttaaaacagaacccccacctttatcactcccccccccccccagataagacagtgatacttcagacaaaaacaatccttatcaggccccttaacataacttttttgaacttgatcacagaaggtc

SEQ ID NO: 407944 - DNA, 348 bp, Oryza sativa
aaaaattaaaggagtttataaaccggttccgtaaatatcttaaggcgagatatacagatgccaaataggtgtacagtactcgaaattacaaagattataccagtataattaatcgttgggattaagagcatgaacgacccagttacgaggggtgcacggagtacgtgtgttgcttgcgcgcgtgtggatcgacgagattcttttgcaaaaattacctaattaattaatcggcgtgctctctggcgtcgtcgatattgcttattgtttggctagagttcgccggcggcggcggcggcgaggtcctcacaacctggggaaggggcgggcgaggcggtcggcgccggtgtt

SEQ ID NO: 407945 - DNA, 431 bp, Oryza sativa
aattaattcacaacaccatatttcattgatcaggttcagaacctgcacagaaatacacactaccggtacagatctaaccttttctccaatactcgaacatccatccacgcggtccacacgaatacgtacatttatacggaacacgtacgtacatttactgcaccgggtacacacacgcacactctcctgcagagacgcgcattgacggaaacctagctagcttagctgaaggcgatgcgtagccatggcagcacggggggggcggcgctcacttgtcggggacgaagttggaggcgtaggcccaggcgttgttgttgacgggctcggagaggtggtctgcgaggttctcgagggggcccttgccggtgaccatggcctggacgaagaagccgaacatggagaacatggcgaggcggccgctattgatctcc

SEQ ID NO: 407946 - DNA, 422 bp, Oryza sativa
attactcgagcagcagcagcaggatctactcatcggggacgcatcctcttgatgcaggggacacgagcttcgtgtacttccaaagcgctccacgggcagccttgtgtggcggcggcgtccatttcctccgtctttcttccagctcagcttcagtcagttcaacatcaattactctcttcacaacatcaatggtaattttgtcaccggtttgaacaagaccaattgggcctccctcctgtgcttcaggacaaatggggcctacaacaaatccatgtgatcctccagaaaatctgccatcggtcagcagggcacactcctttccaagaccagcacccattattgcactagttggagtcagcatttcaggcttccctgggccaccttttgggccttctcctcggatcactactaccttccccttg

SEQ ID NO: 407947 - DNA, 305 bp, Oryza sativa
ttggggttttagttcagattcatggaattcatttaaacagaagagtcgctacacagaagccaacacaaagcagaaattccccccgaatcccatcgaaaccctagctcctacaccaccaccaccacccgcacgccaccaggaaggaaggaaggaaggaatcagccgtcgaagccgaagagggtgcggccctggcgcttgagcgcgtagacgacgtccatggcggtgacggtcttgcggcgggcgtgctcggtgtaggtgacggcgccccggatgacgttcttgaggaagatcttgagctcgccgcg

SEQ ID NO: 407948 - DNA, 433 bp, Oryza sativa
  unsure (1)..(433): unsure at all n locations
ttttgttttttttactagacagcgatattatattattatatatcactgggattgggggtacatatggtccatatggatgaagctacatatcacgaaactaattacagtcacacgcacgtaactgattcccaaaggctacaagaataaaacactggaacactagtcaaataagccgaacccgtaatattaagggcttgggatatcgcaactataagatcctccccagacggcccaagggaatggaaaaagacaaggggtaaagttggttccccaaccaccaccatctgcatgccttcatgccnaaactggggaaaccagcnaaactatgctgctattgccactactgtgccacttactatggncaacaccagcttattgcnnnngttggagcnnnnggtattgtataacaaanctnnnacaagttcacatgaag

SEQ ID NO: 407949 - DNA, 400 bp, Oryza sativa
tttttgtttttttttttttggaaggcaaaggaaatttcccgcaaatacttattcatatgttttgacaacatttctcccgacgcatgctcattgagggagacgcagctgaccacctagaggttttagttcaccattattatttagaccaagcatacgtcccaagatcagaacacattgcttacaagcgaaaatactaatagcctggctggctgcttcacagaataaccaaacgacaacctcaacagataaaaatgccacggaatgaaaacaaagcagcgaatcgtcaccagaagtcccatcttactcatcaaacactccatcattctgctgcaacgcatcctttccccaggggagaagattgcccagtttaccttccttaacaggagcagggttcaccata

SEQ ID NO: 407950 - DNA, 405 bp, Oryza sativa
  unsure (1)..(405): unsure at all n locations
tgttttttttttttttttttggatccgcaacgattcaaatgcagatgaaacactggtgattcccactcagattacacacaatacaaatacaccgacaaactgcctcaaaaaccaccaaattgattcaaaagtaaaacgggtatgagggatcttcccaccgagactgactaaacctaaccacagacaattggatccactggacccagattattcaaaaacagatggctatgacggcatcgtcctcgcaaccgaagggaacttgcagctatggatatcctcacttcncgctggcaagctgggtgcggatgagcttggcggccgaaaccatgttggtaagggcgggcttgacctcgttgtacttgcggnccttgagaccgcagtcagggttcaccccagagaatgtta

SEQ ID NO: 407951 - DNA, 396 bp, Oryza sativa
gccacggcacagaaacactgaacaaaatgtgcctttgttcaatacaatcaagaaaaggaataataaaaaggaatgaaaatcctctatcctattaatctagctataataaggaactatacaggtatttacgggaacatgtcagatatgcctacgtaaggtttttgctatgcctccatcgaaagtcgaaataggcgattcaagaaaatacgaggataaagttgatccccaaaccaccaccatctgcatgccttcatgcaaatactggggaaaccagcgaaactatgctgctattgccactactgtgccacttactatggtcaacaccagcttattgcatctctagcaacaaattgtattgtctaacaaaacttctacaagttcacatgaagctcatcc

SEQ ID NO: 407952 - DNA, 459 bp, Oryza sativa
  unsure (1)..(459): unsure at all n locations
tttgtttttttgactaaaagcagaatttattataaggttctcaagagcgaaggccagagcacaagaatgctcatagcagtacaagacttaggttggatcatatgcagcataacaacacaatcctgattgcttgaacattcaacatccaggacacacataataacacaaatccttaaaccgagcaaccaactgggcacacctcagcttattctgtggaccatggacgacaaacctgtgcctagaacaactaccttaagcaggaggcttcatcagtgaagccaccttctgggaagacggccttgccatcaggtcagtccaccaggccttcacatgcgggtatgcgtccaacacggatgcgtggggagtagcccccaagcatacagtgccagccacatggcttaggtccgcgacactgatgtagtctccagccaggtacttgcacttngtcaggcgcgcctc

SEQ ID NO: 407953 - DNA, 407 bp, Oryza sativa
gaacaaacgcgcatattataagtgacgaagcggtctcacataaaacagggcacacaggttacaacaacgagggttgtaagcccattaagccccaaacatcagatcaccacaagcaaatgtctcgaagacacacgcacacggcaacaggataactccacactggcagatcatgggatagcagcagttatcaatcaggccttgacacacagaacatcaagcccccagacgacgacgactcctctagtactcgtcaccatcatcgccatcctcattctcgtcggactcagcgccaacctcctcgtagtccttctccaacgcggcgagatcctcacgggcctcagagaactcaccctcctccatgccctcacccacgtaccagtggacgaaggcgcgcttggagtacatga

SEQ ID NO: 407954 - DNA, 412 bp, Oryza sativa
tttttgtttttttttttttttaaggatggaatcgagtagcaatactttcaccccaaaatacagtttagcgacaatatcttagaaaagccgcttgctttgccgccatggctggcaagctgagcagagcagctaacacaaagaacacgagatcactataaaccaaacggcaacgaaacgaagaaaatacagggacttttttgtctgaagatacacgaagcggttcggtttcttttatttttagactcctctcctcctcgatgatgggtgtatggcaatggcaatggcgatgggaccttggcttattcgatgggaagggggtcgccgttccactccttgaggcagccgagcatggggtcgatgagcttgccctggctgatgcccaggaacaccttggggcacctcaccccggggg

SEQ ID NO: 407955 - DNA, 402 bp, Oryza sativa
aacacaacaatggtaaattatataaaacttacatatcaataatgtcttactattaaaaaatgttaacaaagaaaaatcactctcatttagatgttctcattccgtttaactgatagccttgctccaacagctaaggaatttgcgataaccgcaagaggcatgcctttcgtttcaggcaccttaattaacacgaatataaaggagactatgcagacaacagcatatatcccacaaacaccaattagacctatggagcttagcataacaggaaatgcataagtgacaataatggaaacaatccaaaatgtcaatgtacaaatagacatacaacggttacgacaactaggaggaaaaagctctgagcaaagaacattgggaattggtccaaatcccataacgaag

SEQ ID NO: 407956 - DNA, 424 bp, Oryza sativa
  unsure (1)..(424): unsure at all n locations
cagacagttacaaagtgattgataaaaacaaaaactccgggccagctgatgttcatcagcaaatattttacaagaaaaaaacaaggttctggattattaagacaaggcttttagataaccacagatatattgtgccccagggttcgatctatcggaaaggganaaaaattctgaaattccgatccgaaattgtgaatcctgttagagcctctagatatcaaaaccgaattaagtaacggccccagaatgggcaatcgatcaggtagccaagccatagcaggccagcgcctgatgcagatcagtacttgtagtccttgacgtgcaggctttcagcagcgccctcgccgaggacagcatcacccttgtaagtacccagggtagcctcggagttggccttgcacctgacgaggaaggccgccctggc

SEQ ID NO: 407957 - DNA, 441 bp, Oryza sativa
  unsure (1)..(441): unsure at all n locations
tttgtttgtaaatattcatatggctcaaaatgatcattaagaaaagtagagtacatgcggacgatgcagaacacaatacgatactaccacagcgcgcaacctatatagcatctacgaatctgagcagcacaagagcaaatggtagctactcaaacttctaggccagcttcaaaggggattgtgctattgtctcaagctatacaaagntgcgggcgcgaaaaacaaagtaccaaaagttaagttcacacaaacagatagctcatcaaatagcacaagcaagcaaacccatggcgtaaatgttaatcaaaaaccgatcgacagaaaatgtagagcctactggaagtgcttgtcgccaaggccctagcacaataaactccatagtcttcaaaagcatcatcaatagtcagaaggcgagataacatcatcgatcttgagaatcat

SEQ ID NO: 407958 - DNA, 398 bp, Oryza sativa
  unsure (1)..(398): unsure at all n locations
tttgtttttggacacaatgatgagggatcacttattcattatagttcttccatgctgctctaccacagcaaaacgtttcagacaccatcaaaccagacttaaggatacacattacaggtaaatagtacacaatgaaacgggacacgaccaaggaccagaccagacaaccatagctccattggggaagacaaataggcagacttgtgaaccctagaacagcagcagctccatggctgaggacttactggccaccacggaggcggagcaccaggtggagtgtggactccttctggatgttgaaatccgcacgggtgcggccatcctcaagctgcttaccagcaaagatcagacgctgctggcccggggggatgccctccttggccnggancttcgccttc

SEQ ID NO: 407959 - DNA, 433 bp, Oryza sativa
  unsure (1)..(433): unsure at all n locations
gccgcgtcggcggcggcgagcgcgggcgccgggaagatgacggcgtcggcgccggggttgtagaaggaggcgatggacatgcggttgccgtcggggcgcgtgaggacgcggtgcatgacgctcttgtacctgccgttggtgatcacctccagctggtcgccgatgttggcgacnatggcnctggcgcnngngcggtacgtccacccactccccntccttgagcagctggaggccggtcacctggtcgtactggaacagcaggatgatgccaccggcgtctgtgcgggccccgaggccgcctactagatcggtgcgagcacactgggggtagctgcttacctgggtgccggacggtgtctcgaacgaacaggctgaagcacatttctggtaacccttctccagacacagattctctttacagtttggagagcac

SEQ ID NO: 407960 - DNA, 438 bp, Oryza sativa
  unsure (1)..(438): unsure at all n locations
tcgggccgccgttcaggtgcgccggctggtagctcccctgcgcgatctcgctgtcccggttgccggccagcgaccgctcgttgaggttcgccgagccgaccatgacgtactcgtcgtccacgatcatgagcttggcgtgcacgtagatggggaaccggcggttcacctgcgcgcgccagtagatccgcgtcaacgtccggcgtctccggcggcnagtactcgccggggcgcggcgcctcccggttcccgaggcagaagaagttgaggtagtcgcaggggtgcgcctggccgcgcagcccgtcgtacacgatggccttcgtgacgatgccgtacataatatctacggtgagccggtttcaccgtaggatggacttgacggagtcgccggccgacttgacgttcggtcacattcgcgttacgacttacgcggcttacagc

SEQ ID NO: 407961 - DNA, 435 bp, Oryza sativa
gccggcgtggcgtccgtcgtgacgtcggaccagttcgagcgcatgctgccccaccgcgacgacgcggcgtgccccgcccgcgggttctacgcctaccgcgccttcgtcgccgcggccggcgcgttcccggccttcgccgccacgggcgacgccgacacccgcaagcgtgaggtcgccgcgttcctggcccagacttcccacgcgacctctggtgggccctactcgtggggctactgctacaaggcggtgaagggcgcgacgtcagacttctgcgtgccgaacgcgcgctggccgtgcgcgcccggcaaggcgtaccacgcccgcggacccatgcaaatcgcatacaactacaactatggggcggccggcgaggcgatcggcgcggacctgctgggcaacccggagctggtgggcacggaccctgcggtggcgttc

SEQ ID NO: 407962 - DNA, 419 bp, Oryza sativa
gcggtactagaaaagttcaagaatctcaaatcaatttatgaaatcaaactacacacataatgttcttgactccccacgtacttacggaataattatattggcatacacaaaaaccggagctaatcagagtagatacacccatagacaagccatcagacccaacaatttttttgtccatgaaacagccagctaatgctaatagacaaggggttctcatgaaagatacagctaggccacatctagaagcacttcctgtggacgatagctgggccagattcttcatactcagcccttgagatccacatctgctggaaggtgctcagagatgcaaggattgatcctccaatccagacactgtacttcctctctggcggagcgacaaccttgatcttcatgctgcttggcgcgagcgcggtgat

SEQ ID NO: 407963 - DNA, 410 bp, Oryza sativa
  unsure (1)..(410): unsure at all n locations
gttattaacataggaaagctccattagatcctgttaacatacaaggcaacatctatattccagaagagattacttgagctgtgcaactcacacaagatagaatcgaataacacagaagctcaaagcctaggaacttctgtgggcacacagaccctatgagnctggtactaatgaatacattgagattgcctctttcttcatcctcccttgcttcctccctcgatccatgttgtaatcatctacattgctttaatttcagtcggttgtcatgggctcagtgatgcaacagcggaagcgtgctttacggacattgctcagaatctccatctctgcactctcaagcatacaaacgatatcagtaaatgcggggcgaacttcagggttcgcatcccaacaaagagtcatgatgt

SEQ ID NO: 407964 - DNA, 406 bp, Oryza sativa
atcacagaaaccaaaacaaacaagatgactctggcataagcttaaaacgaaccgctgaccaagatggtaaaatctttgtacacgtacaagaagaatttttaccaagatggcagaggaggagcatatcgatctcatgtaaaaaaggaaaatggtaaaattctaaactatcaagccatattctaaatgatgataccgggcttgatcaagatggccactgcagttagtcgatggaacttcagaaagctcaagcttccctgtccactcctctcccggtttcagagtgatttgtctctccgctgcagccgcatcaacgcacagcatctgtttgtactcctcatcgccgaagtccacgatgtttttcgatttcttttcccacggattccacacaacaacgtcaggcagtcct

SEQ ID NO: 407965 - DNA, 428 bp, Oryza sativa
tttttgtaaccgaatagaaataagacgagttttaaacgactaacatagtgcacattgcgagcagatattaacggtccatgcaacgagtgccatggccgtgggcaaaacttaacgaacgctaagatatctcaaatgcagccagcataaccaccacttcaacgatgctcatttcttcttggcggcagccttggccaccttggcaccggttgggtccttcttctccacgttcttgatgacgccaacagccaccgtttgcctcatgtcacgcacggcaaaacgaccaacaggagggtactcagagaaggtctccacaaccatgggcttggtgggaatcattttaaccataccagcatcaccgttcttgaggaactcgggctccttctccagctccttgcccggatcgctgtcgatcttggtcaccagctcag

SEQ ID NO: 407966 - DNA, 403 bp, Oryza sativa
ggcaaggaaaataacaaggtcaggcttgccctgttctttttactgaagaaaaagaacattttatctgcctattatagaaatgtaagcatcacaactcacaagaatgcaatgcagccaatgaaccaaggccacaagatcgtggtgatactattcccaatcacatcgcctcatatttacacacaacctgaacctggagctaaacgaaaattggaaaaaccaaaagggaacatctgctgctgaaaagaaaagccactactgcttttgagtgggttgtccagtccagtaaggtcttgacagccacaagtatcttctcagggttgaatggaccagattcgcgatccattatttggctcttccaccgcatgccttctgtaattgattggatcttcactaacacctccac

SEQ ID NO: 407967 - DNA, 397 bp, Oryza sativa
aattaagaagcatccatatcactatatcggcactgatcattcagaacacaggttatggtattgtactaggtagtgtttaattaataactcgacgagagtagtaagaagcatgcatttggattgagctaagctactgaaacggtgaccctaagccatacatgcatggtgatctaggcccttctgggcacgagacgagcgcgcagcggcttcgccatgacggttgtgaactcgatcttctcggcgaagtccacctcgtcgccggcgacctccttccactcgaactcgctcaccatgttcgccacgaagtactcgacatgtagcatggcgacgccgagcccggcgcaaatcctccgcccaacgccgaacggcatcatccggatctccctgctgcctgtga

SEQ ID NO: 407968 - DNA, 364 bp, Oryza sativa
ggcatggcatggcatcccgcgcctatcgattattcttctgttcatttcgcattggggcatgggtctatttccatggatgggcaaatgaagaacgtccaagatgcctttcttttttttcaccccccttttgccaggggggcctggagagggagacgctctgagcccgcaactccttccactggtgcgggacccccttgatctgggtgaagaactgaacgcccgccttgccgtaaaaattcaagtctcctgcaaaggaggctttgctgcccgtgaaggaaaaaaacggcaggggtcctggaatcggcacgttgatgcccacctggccagcttcaatggctgtttgaaatttccttggtgacccccc

SEQ ID NO: 407969 - DNA, 410 bp, Oryza sativa
aaagcaagcacaactagcgaacatatcaagaaacaaaagcatccagacaggaacaaaccccagggccaacgggtacagatttcccaccggaagtctcactgtaaacacaggccaagtctacctcctgttggaacgccaaaattgcatatccagtatccagctcaagacagcctaaagataaaaataaccatgttgcatacatagataaggagacattctccccagtaacagaagaaaagcctagttcatcctccggatgagctcgttgatgtagtcctcacggttgccggcatcaccaccctcgacatagtggttcctcttcttcttgaggccaccgagtggtgccttcaacttgaagggccacaggaagttgttggcctccttgaagtgtggaccgacagtcatgatct

SEQ ID NO: 407970 - DNA, 427 bp, Oryza sativa
tttttgtttttttttttgggctgcaaatacaggaagtggttgaaagttgctaattaactagtaaataagtcacggaagcaatgtagtgcacataaactgtgtccactgggtacttcagctcgacacattttgacatacgcagccctaatcttatgattccacatagcaatgtgatcctagtacatcttatgatccagtaatacagcaggtaggctgagtaaatggactcagaaatagacttcaggacagattagtggccctctccttcaggcttcgctgcttccttgatctcgtcaccaccatcctccgcattgtcagaggtccagagagtcagattgtcacacagaagttgcatgatcaaggcgctggccttgtaagactcctcgccaagagtgtccagttcagcaatagcatcgtcgaacgcctg

SEQ ID NO: 407971 - DNA, 424 bp, Oryza sativa
  unsure (1)..(424): unsure at all n locations
tttgtttttgatacccaaatgaaatatactcatgtatagtatagcccatatctttatattatattattattaacaaaaacttgtcatgcccagctatggcgttgggcgcgatctgatacacagaacaaagagaaaacataaaaaggagaaataattaatagcaangcgtcaagnccggcctgcttaaaaggtgtaaaggcagctgccgtcgntcgctcctcgccgttgggtcgaagttcttggcaacagggtcggtgcaaccttccggcacaggcaggttacctgcttgctgtgctccttgccctcctcctcctatgcaggccgcctacgatgcatcgatgggatgcgaatagctagagatcttttattcagctggatggcgcagaaccgtagaaggaaccagtcttcatggcgtcggagttag

SEQ ID NO: 407972 - DNA, 400 bp, Oryza sativa
  unsure (1)..(400): unsure at all n locations
ggaatatactcatgtttagtatagcccatatttttatattatattattattaacaaaaacttgtcatgcccagctatggcttgggcgcgatctgatacacagaacaaagagaaaacataaaaaggagaaataattaatagcaagcgtcaagccggcctgcttaaaaggtgtaaaggcagctgccgccgtcgctcctcgccgttgggtcgaagttcttggcaacagggacggtgcaaccttccggcacaggcaggttacctgcttgctgtgctccttgccctcctcctcctatgcaggccgcctacgatgcatccacgggatgcgaatagctagagatcttttattcagctggatggcgcagaaccgtnnaaggaaccagncttcatggcgtcggagttag

SEQ ID NO: 407973 - DNA, 396 bp, Oryza sativa
cttccactgtcagttatcacttgctttaaggctgaagaatcaatctcccacgcagcatatctgataaagagtcactccacacaagaaaccatacaatggaatctgttctctcctctctttcaaaagacaacaaaaagaatccctaaaaagaaaatcggaacaaaacaaaactggcttcatggctttacttataggccgacccaatatgatcgaccattgctgttatggattggtgatggagaaggtgccgtcacagcccactcgtaccacacctttgttgcaccgcagcatcgccaaaagtgcacttctataggcgtcttcgacggtacgtagatgggctttctcaatgggaagaagatcgggaaccagctaaacatgtttggtgtagccgtgttt

SEQ ID NO: 407974 - DNA, 410 bp, Oryza sativa
gaacgactcgcacgagacggtacgaagttctattgatagagcaggaaaaaattacaagatcacaaccctaaagggtcgtaaccaggaaaaaggaaaaatataccaccacccacacaccgacagtttcaacacacaagaccgggagaaggctaacaccggaccggccgccgttaagcttgaccgactgccgctagaccaacaaagaaacatagatgagatcgcccaaaagaacaccctcacaaccaatacaaagccaactcctagagtgtgcttgcaccaatcgatcgagaggcttcggctaggggataccaaaacgacgtattcaagaagagaagcgatggtaaaccaccgccgccatccgtcggggctcaaaggagccaggactgggctttcgcccggacgcgtgggtc

SEQ ID NO: 407975 - DNA, 419 bp, Oryza sativa
ttgtttttttttttttttttgttttttttttttttttttttttttttttttttttttttttttaaaaggggcgggaagccccacaaaaataaaatttctcaccccatttaaagggggcaaagaggtcccaacgcagttttttaattaaaaaagactgcccaaacaaaccagggggtttataatagcagcaaagttttttaacccgcaacattaaagagaccctaatgcaataagaaaacttgaagggggggtcactagcaaatttcgggcttaggcgaccccctcgatcttggggccagcacccttgccccctggcggggggggatggtccttggccatgccgccggccatgtccccgccagggccctgggacattttggcaaaaaagggggggaaaatgccctccagctccttaattt

SEQ ID NO: 407976 - DNA, 415 bp, Oryza sativa
gccgtaatgtttatattgacaatattgatctctcttgtcatctacaaaggagtgctcaaaaatgtgttctgtaaccagcaacggtaataacagcagctgaaaaaaaggggcagcaatataacaggtgatacagaattacagatggaaacttaccatactaccaacagctatgaacttccatgaatcaaaatatgcccaactcctgatgtcaggattgagactagagatcacctcctcaatcagttctcaccaagggtgtaccgggtgaacctccgtaccttgatgttctccccaagggtggcgatcgtctccttcacaagatcctttaccgtcttgctgtcatccttgatgaaaggctgctccaggagggccagcacgccgagcctcttcgatatccggccttcgacgatcttct

SEQ ID NO: 407977 - DNA, 345 bp, Oryza sativa
accacaatgtaaaatattttatttctattgacagcgcatagcacgacagtagcacgagctagtacacgttccgggttacttagtacttcatttgacaatgggtatgtccatgcatgttgcagaatatacatatactaatattagcatggatatatcagtatatgccaataatccaatatctacttgtcctttaacaacgtgatatatatgttggccttgtataccaaagttactccatcttgacttttagatatgttgaaatccctcctttggtaacattgattcttttctcatatatactcaggcagatggagccggccaagagtagagaggcggcacaccacc

SEQ ID NO: 407978 - DNA, 425 bp, Oryza sativa
aatcaagatagcgctatattagtatatttcacttgcaaaatacaacaacggaatcagaaagctgccagccaaggccatgaacgctgcaggcgccacggcattgcagcagcaatctcacacgattacaacacggataaatacagcaagctcaaaaaggaaaaaaaaaacacggacggagaaacaacgtaatctgctgatgagcgtacgagaagccttcaggatcctgaattcctccctttcttatattcggtgcacgtatcgtctcttcctggatcttgtcgcgttcgcgggtggactggttcgatcagcagatgggcaggggctcgccgttccactccttgaggcactcgagcatcgggtcgatgagcttgcgctcgctgatggccaggaacaccttgttgcactcctcgccgggggacttgagc

SEQ ID NO: 407979 - DNA, 412 bp, Oryza sativa
gttggaaatagtcaaccgtgacacaaataaataacatcattcggtcatacatagttttaacaatagatataataaaagtaaaagactcctccctcctcaccagcacatagcacagcctagcaactacaaaaattcccataacatggcataaaaatttggaaattgtctacgaccacagtgacttttaaaacagaacccccacctttatcactcccccccccccccagataagacagtgatacttcagacaaaaacaatccttatcaggccccttaacataactcttctgaacttgatcacagaaggtcagcgacgttggccggcagctcctcaatcaccacattgtagaacctctggatgtcaaacagcattctctcattgtcacgggtcacaaagttaatgggaacacctt

SEQ ID NO: 407980 - DNA, 370 bp, Oryza sativa
  unsure (1)..(370): unsure at all n locations
atacattatgcatctaagggacaagaagtttttgttccacttcattggatcgagattcagacaggagcacaacacggttagactcaggattgattgattaattaattaattaacagtgccttttaattataactgctcgatcagccacgctgaggcagattctttctctcttctcctggggtagtgctcatcttgatttcatttcacatcctggagtagccatcgtactgatccatgaaagtgtcgttgaacttcttgaanctggtcatgatggcaggcatgtcctcctcagctggcaggatggtcgtcctcaggtggaacaccccttctttttgtccgaaacctgaccctggaacagtggatattccag

SEQ ID NO: 407981 - DNA, 449 bp, Oryza sativa
ttgttttttagttgatgatatagctgcatcctctttctttaagcaccctattacaagcatattaaattgtacaagcaccttacttttaccgggcaaattgtcccattgctactttgttgttttcatacgactacttgggacagattattattacttgcctaataggacggatgttagaaatgcatatgttccaataaaataacaaaaggatgcagtagcttgtttggggttcatggtgaaatttctcgagggtttgcaagcagatggagaccattgtcgatatggagagtgaacattgttttatagattggctccttggattcatcttccagtctgaacttgaagaaatgtatcagggtagcagccatgatcttcatctgcctgtgtgcaaattctttccccaagcagatacgtggcccagcattgaaagacacaaacttgaacgggct

SEQ ID NO: 407982 - DNA, 384 bp, Oryza sativa
ccccacgcgagcaaccccatttttctgaaaaaacactattggacaaccttcaagggggggaagaccatatatgaaatgggggtttttcataagggcaaaggatcgctcttttgggtggagcctaaagatgaactttttaaaaaaaaaaaaaaattatttttttggaaaattctcccaaaaaaaaggaccatccctccgtttttgataccatgtccccagttcccaacaaaaagggcccggacaacaacgtttggtttcccttttgcacattcttacaggaggccagggaaggggccgtttccccgttgttgattccaacccttaaccaatttgtctgggcaaaagattgcaccgttttttgcaaaagatccatgtggggcatgt

SEQ ID NO: 407983 - DNA, 418 bp, Oryza sativa
agcacgcgaacataggattgttgatgtgaaacacatgcattcgacaaaagggaaatgaaatacgacaacgaaagcagttctcttagcagtagaccaactagaacatgtaagggtaacggcacaacacatgcgggggccaaaaatttagagcttgtcctcgaaatcggagaggggagtcatttgctccttgagacccttccttttgcggatatcctgcaccagggttgaagcctgcgagccagcttcaagaggatcagaggtcatcatgtcccaatggtcgaacacacactgggggaaggcctggccagatgtcgcagccctaagctggcttgagaacccaaaggactctgatgacagggaggtaagccttgatgttggacagaggggtaccaggcctttgcatttcctcgaacacatg

SEQ ID NO: 407984 - DNA, 443 bp, Oryza sativa
attataaaatgacttgtattatattcccaacattaaagtttgatattcggatacattttgctcactgtggcagacaaagcagaccacctagagcccttttattcagaatatatgcaagataataaagaacattggtcatagcatatactagtactatatgaatagtctggctggctgcttcacaaagtaacagagtgatcgctactggagttttgagtattctttaatcttcagtgcgcttccctcatcagcagctcctcatcttcttaccctctgtgccatctatctcctcgacagcatcgtcttcccagtagagagcctccattttaccagctttctccgtgttttcatcagcaaagcaatgcagaacagatcgtggcgacccggtggcgatttcagcagtagcagtgaagctctggtaaatgagcaaacccccagaaggc

SEQ ID NO: 407985 - DNA, 419 bp, Oryza sativa
gaagcacaagagttcagttgcagtttcaggtttaacaagagaacataagcaatgtatgcgtttccatctgaatggaatgcaatactacagaggttaaatagtagtacagaatctgatttgtctaggactgactgcagggcatcagctcatttaatcttttgagggtacattattgcaaacagaactgatcaaaacaacggtggaatactcttgagacagcaccatgctcatttcattctgcagaactaacaggtaggttgccaggtatgtaagcatctcaaactatgtgttccgctaacgctaggatcttgagatgcttctttttcctgagttcgtggggaacaggaccaaatacacgagtgccaatcagctcgcctttgttgttcacaaggacaatcgcgttgtcatcaaactggatc

SEQ ID NO: 407986 - DNA, 427 bp, Oryza sativa
gttaaacggaacatcacagctgaaaatatctttccatcatatatgcagttactcaatggaatattacaaattaaattatcgtcgcgcttagttcctgccatattctgtttgtctgctatgaatttcagttgtacagaaacatctttaaacttaccagaaaaaaaaaagaataaatcagatcgtggtcttctcaatgctcgctaagcaatggagctgtaaaaatagtgaaacaactttgtttcagaccttctggtcaagctctgattgtgatgacttctgagttttctcgctgggcaccgagtaaacctgccgctctttgcctcccggttttgacgaagcattcccgtaccaaatcatgccaatcacagcaagcatcatgccaaggactacgtgaaaattaaggccctcttttccaaagaaagaaaac

SEQ ID NO: 407987 - DNA, 444 bp, Oryza sativa
gagacagaaaatacgtagatattattgtcggaattgcctgcaaaggctgttataggatactgaacatagcatactgaacaaaagaaacgaaaatgtagcctctcccaacctacagatgggtctctgaacagacgaacatcagcaggtcggccttctacttggacctaagagatgatgagatgatactctcagaaacggcagttaccgattccgcgaagcgacagcatttctaaacgccatgactagagtttcaagctctgcctgccattggtgacagcctcaagcttcaggaacaacccggactcagtttgacatcacgcgaggcgaccgcggacgcacgggtgtcttggaagggctcaccctgataggaagtgtgccaagaaccattccactatagttcagggctagaatggcgctttctgcttgagcaaactcaacaaatgc

SEQ ID NO: 407988 - DNA, 130 bp, Oryza sativa
ataggatcaaaacattgctattaccacaactttttaaggatggaatggagtagcaatactttcaccccaaaatacagtttagcgacagtatcttagaaaagcctgttgctttgccgtcatggctggcaag

SEQ ID NO: 407989 - DNA, 450 bp, Oryza sativa
ggcggatgcggcgcccgcgggaggcggcggcggcggcagcggcggcgagctcctgtccgcggcgcgcgcgccggggttcgcggcgtggctgcgcggcctgcggcggagcatccaccggcacccggagctggcgttcgaggaggtccgcaccagcgagctcgtccgcgccgagctcgacgcgatcggggtcccctacgagtggcccgtcgcccgcaccggcgtcgtcgccaccatcgccggcggcgacggcgctggggccgggaccgtcttcgcgctcagggcggacatggacgcgctccccctgcaggaattggtagattgggaacacaagagtgaggaaagcggaaagatgcatgcttgtggacatgatgctcacaccactatgcttctaggagctgccaagctacttcaatctcagaaggatgaccttaagggtactgtgaagctcgt

SEQ ID NO: 407990 - DNA, 216 bp, Oryza sativa
gcaaaggttattaaatacaataacaccatttagcaaccaaagcacgactatcaaaattacatgataaaattattattgtcttgaattatgtaaacgatgataacaaatccttttccagctacaaaagaaccagcataacaacaaagaattataaagttgcttaagtaatctctcccttcatctcaaaaagagctatatctagggggcctaggccac

SEQ ID NO: 407991 - DNA, 436 bp, Oryza sativa
ggctgacaagggacaacttttgagttattatgcatgaatttcctaattaacaaggattctccaactagccaagttcagagctggatgagattacagatacacaagcgttttattccctactcttgtgttgatatttcaaacaatagtggcagttgcacaatttttatgacatatatatatagttctagttacatggcgtccttcgaaagccggtatggtcgggatgcaccgagcattagtgagctcatccactgcatccccacgctcaaagacagcagcagcccccatgccagaacctatgcacatggaaatcacaccaaatcgacagtctttgccccgtcgcttcatttcgttgagaagggtactgacagaccgtgcacctgtagcacccaatggatgcccaagagccattgcacctccgttaacgttaactttt

SEQ ID NO: 407992 - DNA, 465 bp, Oryza sativa
tcgtcggcgtggggcatcgcttcgtcgcgggctccctatccagggagggagaggaggagcgcgagctggtggtgccctaccaggtcgttccatgccacaaggggaatgaatgcaagggattactatgatgttcttggagtgaacaaagatgcatctgcatcagacataaagaaggcatattatctgctcgcaaagaaattccatcctgatactaataaagaagatgctgatgcagaaaagaaatttcaagaagttcagcatgcctacgaggttttgaaggatgatgataagcgtgaaacatacgaccagcttggagcagaagcttatgagcgccaagcgtcaggtggtggccccgatgatttttctgggagtcatccatttggtgacatttttggtgatatgtttgataatccttttgccatgagaggaggtcgagatgtcaaggttccaatcaaactatcatta

SEQ ID NO: 407993 - DNA, 440 bp, Oryza sativa
  unsure (1)..(440): unsure at all n locations
aggatgaattcaaccatagcaaatctttaatgttaaccacatagaggttcagattccagacaacaaaaagggctaatcagtaccaaaacattccgataagcatagacgctaattggattctccagttcaagaaacaagcattctagtaaccacccttgagatcattgaccacatcatacggaatgggggtaacagtctccagcgtagcaccctcaaccatgaaaccaggtttgggtccctcgggctgtctcttggtgctgataacctcaccacgggccttggcatcagccttgagctgatcgttcttgattttcctcaggcggagctcctcggtgcacctggatggctggacatgctccacacggacatggatcctcttcctgatgatgcggttaccgacctgcttgttgatctcgacgncgatggtgtgtttggtgacc

SEQ ID NO: 407994 - DNA, 457 bp, Oryza sativa
  unsure (1)..(457): unsure at all n locations
aaaggaacacaactcattttttattgatatatgttggatgaatccaataaaaccgatacaagttacgaaaaatcagactagatgaatcctccccgatcacatgagcaaaagctttngacgaaagctgtnctatagtcgtggaagcaataacacttgataaagataggaattcagacacgagaggttgcagactataagatgtcatcaaatctccttgaacgccgcgaagagatcaccgttgatgtagtcgttgtccacaagactaaccaagaagtagctcttctggaccttgtctagtatctccctagatgagtcgnccttagggaacaggnaaggnnaantttttgattaaattttgaaaggttcgtctttccaaaccataaagctggctgagttaatgatagttggntggactatttncttggnagggaaaanaccctatgtgaccgcattcaca

SEQ ID NO: 407995 - DNA, 440 bp, Oryza sativa
ggagaacgacacattaaaattagtatgccaaccgcaaattttcatcttcgaatacattggtccgtaaaatccaaggacaaagtgtacaatcaaccagtagaaaccagaaagatcaagaaattgtgttcttgatctctaaagcctattatgcaaagggggcagaaattaacttaagacaggcaacaacagaaaaagatctcagcagatgctagcataagcttttcactcctgatccagctcgaatggaacttcttcttggacgtctacctcctcttcaatctcaacttccttggtgtcgtactcttcctcatcgtcactggcctccccgtctctgagctccatcctgtatggtctctcttcctcgtgcagctgcttccacttggcaacccatccttcccattcctcctgaagctgcttccgcctcttgcgttcctgctcgc

SEQ ID NO: 407996 - DNA, 392 bp, Oryza sativa
atccatgcaggcagcctgtttgtgcccttgtgcagatgcatttcatttatacaagtagaaggcactcaaatcagccaccacatgaacacacacatgttccatcatcgatcgatctacacatgcatcacccggtcatgcacttacaaacaaaagatctacttgaagaagtacgggaggtcgagcacgtagaggaggaagtaggcccagaggacgccggagatgccgccgaagaagaagccgccggtgaacttggcccagccgtcggcggtctgcagcttgtcggcctccttcttgcggccggtgagcgtcagcgtcggcgccgtggacggctcgccctcgccgaaggaggcgacgccgtacatggtgaggcagactctgaggatggtgactag

SEQ ID NO: 407997 - DNA, 466 bp, Oryza sativa
gggtcactcacaaattggcatcgttttagctggcttcgttgtagatcctataataacgatacatcattaattcgatcatcccttggatgcggcctgcggcttacattaaatctcgatccaaagaagcaaagatgatgacagacagaaattaattaagctagaaatctcctcgatcgatcacacacacacacacaattaaggtacatacatacatgcactgctgcaactgcaactgcagggtcggtgcgtggctactacaagtgtacacatggtacgttggttggcaccatctcgatcgtgtcgatgtgctcacttgccggggacgaagttggtggcgtatgcccaggcgttgttggcgacggggtcggccacgtggtcgaagaggttctcgatggggccccttgccgtgacgatggcctggacgaagaaacccaacatggagaacatggcgaggcgggcggtcttt

SEQ ID NO: 407998 - DNA, 466 bp, Oryza sativa
  unsure (1)..(466): unsure at all n locations
angttcaagcacagctggtacgagatgaggattaccatgaaacagaatccataaaacagcacttgaccacaatcgccgaatgcaaaaacatataaaaacaccaaaattaaacatctccagacatatctttaattcgagctacctaacatggtgccaaaaagtgctaacataaaccaaacatctgaaggccaacctgcttgaattctgaaatccagataggcaagctacataatttgggcccagttactcagcacagaaagttttatgatcattaaggaaacaactagttgcaaacttcttttctcattcctcatcttcctcctcaccgtaaccggcaccgncggttgccttgttgtggttcttcctcttcaccctaccaggggggcctccaccgaatgggcttgtcagtgagaagtcaatgtgcttctcagactcaaccctcaccatgaacgacgggatgttgaca

SEQ ID NO: 407999 - DNA, 472 bp, Oryza sativa
tgtgtttgccaagagtgttgtgttgctgaattacactatggactaaaaaggacagatacttatacagaaagtagccatggccagtctttgatcaaaggagatgatgaacaatgttttaaaaaccatggcagatgaaattactcagatactatatctcttcttgccaacagaacatctctctttctgatacggtgaccacatagcataatccagctaaaacttattctgatactttgcaactgaatcatcaaccttgagcaactgggcagaacccatgcataattgcagcagaccaaactttgtccatatcaagcaccttgtcaccacattcatgctcattccatccctccaacgcatgaagaattcccgcgattcgccatgcgctcataaccctccttggcagccaattttcgcatgaatgcacattctgcagcgtttttggtacagccattgcaggagttgccgagtagct

SEQ ID NO: 408000 - DNA, 447 bp, Oryza sativa
ttgtttttttttatctttaaaggcaagaatattattcataaatgacgcatgatttttatcaaaacgcttgcaaatgatatcagataagtagagtcaacaagacaaaactgtatctgccaaagcacacctccccaactccacccaattacgccattatttctgggcaaaagcaaacggcttcccattcctccccttcaccagtctcaaaccataaaccccacaacaaatcctcctaagtgacggcatataagatgatgaaaacaaagcaggatactccagagtcgtcatggcgaacttcaagttgacacttctcatgccacagccgctagtcgtgctgggcagcctagtaccggtagtgcgcgggcttgtagggaccctcaactggaacgctgatgtagtcagcctgcgacttggagagcttggtcagcctggcaccaagcttgccca

SEQ ID NO: 408001 - DNA, 406 bp, Oryza sativa
tgtgtttcgttccttcgttgcgttgcgttggttgatggatagatcgttctcgatggtgatggagggcatgggcatggcggcggcgtgggcggcgggggacctgtgggtgctggcggcggcggtggtggccggcgtggtgctggtcgacgcggtggtgcggagggcgcacgactgggttcgcgtggcggcgctgggggcggagaggaggtcgaggttgccgccgggggagatggggtggccgatggtgggcagcatgtgggcgttcctccgcgccttcaagtccggcaaccccgacgccttcatcggctccttcatccgacggtttgggcggacaggggtgtacaggacgttcatgttcagcagcccgacgatctggcggtgacgccggatgcgtgcaagcatgtgc

SEQ ID NO: 408002 - DNA, 437 bp, Oryza sativa
ttattctcttcttcctctgcggccgactccttgctggccatgtcgctcgcgctggggtgccccgccactgcctcggcgtcgtcagccaagagcaccttcccgccctcctcctccccaccggcgtagaggctcccgaggaggccgcccgccagctgcaggtgctactactacggcgacggcgggggcttccgcaagaactacgaccacatccccaagcagttccgcgaggagaacctcaaagatggcctgatggataattacaagaatgttcctcaattcctttatggctcaagccctgctcagatcgaaacgtttatgaacgatgataatccatatgatcggcaatcacagagagttacagaggaaagcatttctgcttctaggagctatgatgaatttggcatgtacaacttgttccgtctgcatgaaggccctgc

SEQ ID NO: 408003 - DNA, 376 bp, Oryza sativa
tttcttttggacaccagaaacatagtacacttggggggactccaaactcaaacggtggaccaaaggctctccaagttcaggccgcactcctgccctctgctctctctgtccccaagaagggtaactcgagcgcgggggcgaaggagccggggttccttagcgtgagccagaatgccaagaaaccgtcgctggtggtgagggcggtggcgacgccggcagcgccggtggcgagcccctgctcggacacgttgaaagcggtcgggaagaagacgctgctggagggggtggtggtgatcaccagcgcgttctctgggctcgggctcgcggcggcgaacgcgctagcagagaccgggaaatggcacgtggtgatggcgtg

SEQ ID NO: 408004 - DNA, 528 bp, Oryza sativa
  unsure (1)..(528): unsure at all n locations
tcgtctaggtacaaagatactcctggtatttgggcgaaggatcaagtggaagcgtggaagccaatcgtagacggcgttcatgccaaaggaggaatatttttctgtcagatttggcacgtaggaagagtctctaataacacttttcagcctaatgggcaggctccaatttcgagcaccaataagtcactaaaacctgcaggttgctgctagaaatgcaattgaagcaggatttgatggtgttgaaatccatggagctcatggttatttgatcgatcagtttctaaaagaccaagtcaatgatcgttctgacaaatatggtgggagcttagagaatcgctgccggtttgcgctagaagtggtccaagccgtaactgatgaaattggagctgacaaggttgggataaggctgtcaccctttgccagctattcagaggcagcaaactcaaacccagaagctctaggcctatacatggcatatgcactaaacaagttttgtatnctctattgtcacatggtggagccacggat

SEQ ID NO: 408005 - DNA, 527 bp, Oryza sativa
ttcgtgtacgcgtgggcgacggcgaaggggccggcgggggtctcccgcgctcgcgcgggtctaacctgccgctgccggcgccgcactccgacccaaacctccagttctccgggacggacgatgacttctccaaccgtcacagcagctcgtcggcgacgggcggcgcgagccccgggtactactccgactacccgtccagcttcagcggcgagtgctcgccgtacaacatgtcgccctggaaccagaccatggcgtcgccgtggtcgcaccacagcgacgcgtccatggccgggctcggcggcgcgcccgccatggcgcccgggaccagcctcatcggctcgctggtgagggaggaagggcacatatactcgctcgccgacaagaccgacaccctgtacaccggctccgacagcaagaacatccgcgtgtggcgcaagcagaaggattcccgcgggttcatgtcggctagcggccttgtcaaggccatcgtcatctccggcgagcgcatcttcaccgggcaccaggac

SEQ ID NO: 408006 - DNA, 557 bp, Oryza sativa
tcgtaaaattcccatcgcttctcaagttctacgcgggctgtggcagttgcttctgggcccgccgccgccgccagttctagggttagctcgtcggcgtccagccctctcactctccccctccgctctcacgatggcggagagcgcgaagccgacgccgcagctggagctcttcaactcgatgacgaagaagaaggagctcttcgagccgcttgtggaggggaaggtccgcatgtatgtgtgcggcgtcacgccctacgacttcagccacatcggccacgcccgcgcctacgtcggcttcgacgtcctctacaggtatcttaaattcttggggtacgaggtcgaatatgtgcgcaacttcactgatattgatgacaagattatcaaacgagcaaatgaagctggtgaaactgtaactagcttgagcagcccgtttattaatgaattccttctcgatatgggtcaacttcagtggttacccccaacttgtgagccacgtgtgacggatcacattgaacatatcatagagttgataaccaagattatggagaatgggaaag

SEQ ID NO: 408007 - DNA, 433 bp, Oryza sativa
tcgttaattccattcctcgcgattcctctcccctggcctcctcgtcctccccgtgctaggggatcgccggagaggaatcgcgcggaggaaaaaaaaagaaaagggcttgctcgtcgtctaagctaaaaggaagccatggagcacaaggagactggatgccagcaggcagaaggcccgatcctttgcatcaataactgcggcttctttggcagtgcggctaccatgaacatgtgctcaaagtgccacatggagatgataatgaagcaagagcaggccaagctggcagcctcctctatcgacagcattgtcaatggtggtgatctcgggaaggaaccaattattgctgggcacgctgaattagctgttgctcaaggcgaggtgaagacgcttgttgcgcagcctgctgagattgctggtcctagtgagggggtca

SEQ ID NO: 408008 - DNA, 456 bp, Oryza sativa
ttgttttctcggacactgctcaagggtctgtatgctagattgttaggctgtgactttctgaaatttcatgagccatgttcaattgccttttgacggttcaacaatctttaaagatcaaatgtttcctgtatgcatgcaaggtacaaagatactcctggtatttggacaaaggagcaagtggaagcgtggaagccaatcgtagacggcgttcatgccaaaggaggaatatttttctgtcagatttggcacgtaggaagagtctctaataacacttttcagcctaatgggcaggctccaatttcgagcaccaataagtcactaaaacctgcaggttgctgctagaaatgcaattgaagcaggatttgatggtgttgaaatccatggagctcatggttatttgatcgatcagtttctaaaagaccaagtcaatgatcgttctgacaatatggtgggagc

SEQ ID NO: 408009 - DNA, 564 bp, Oryza sativa
ctcaaatcctcctgctcacctcaccttatcctcagctctcagcacctcttcctccctcccccaagcttccctctaatggcgtccgccaacgccatctccaccgcctccctcctccgctctttctcctcccaggggagggtgaggagggccaagaatgggcgggcgcagcggctagtggtgcgggcggacgccaaggacatcgccttcgaccagaaatcccgggcggcgctccaggccggcgtcgagaagctcgccaacgccgttggcgtcaccctcggcccacgagggagaaacgtagtgcttgatgagtacggcagtcccaaagtggtaaatgatggagtcaccattgcccgggctattgagctatatgatccgatggaaaatgctggcgcagcattgatccgtgaggttgctagcaagaccaatgactctgctggcgatgggactacaaccgcctctgtacttgctcgtgaaatcatcaagctgggccttttgagtgtaacttctggtgcataccctgtatcactcaagaaaggaatagacataacagtgcatggtcttatg

SEQ ID NO: 408010 - DNA, 498 bp, Oryza sativa
ttagaagaggaatttaattataagaggaagagggagaagaagagcttaggtacaggctccagtacaagagatcgatcgagagacagaggatcggagaggaggaagaaggagaatccaagtactgggaggcaattaatttgagttgagatcgacttgagagctagcagaggctcatctcatctaggccagcagaggctcttcgctcgcttatttcatccatggcttccaaaggcacagaaggaggccatggtggcgtggagagaaaggagcagcagcagcagaggggttaccagctgccccgtgactcccggggatcactcgaggtgttcaacccctcatccgcttcctccttccgcactgctgctgccgcccccaagtccgcctcccccttccttgctattcccgacagggaagaggataatgtggtggcacagcagcgggcagcagagtggggcctcgtcctccagaccgaccaccacacaggcctcccccagggcg

SEQ ID NO: 408011 - DNA, 344 bp, Oryza sativa
tcgttctttgagcttagctatggcaatggccgggccgcttacattggtggtgggggcggctgccgcggccgtcgtcttcgtcggcggcggcgtggaggggtggctgctcaaggaggggttctaccagcagagctgcccgcgcgcggaggcgctggtgaagcactacgtggagcagtacgtccccctcgccccctccgtcgtcgccaccctcatccgcacccacttccacgactgcttcgtcagggggtgcgacgcgtcggtgtcgctgaacgggacggacggggcggtggcggagacggacgctgtgccgaacctgacactcccggggttcttcttaattgacc

SEQ ID NO: 408012 - DNA, 497 bp, Oryza sativa
tcggtttgctatccataaggttcagttgaaccaggtacgccacttggtggaagatatatcctgtctgttcaaggatctggacctgaggctgatgttgtctaccaaaagaatccttaagaacttagatgctgaagtggaaaatgcaataaattgcttggtatcttctgctgttattgatcctgatgtcaaaggtggacttagatggcctcttgggaaagaatcgattgatgagaggttcagcatagttggagtgtggcatacaaactacaaagctttcagaaatgagaagttgaggctcaagctaaggcatgctgaccggtttgaccatcgaagctcaactggagaggtttctaatgaagttacctttaaactaattggcatatctgcaagtctggaggctgttgatcaggaagcgaattctctgcaggagatgctggagtctgtggtaggaatgatctgggagagcggtttgagctacaagaaggcgccctgagcac

SEQ ID NO: 408013 - DNA, 381 bp, Oryza sativa
gtagtgtgaggctgccccggggggagagagagatcacccgcctcgccgcccgcccgcgccgcggcggatcgatggagctgttcgagcgcgcgaggacggtgcggctgcgcggtcaccatgacaagtacctgtacgcggaggaggacgagtcgcgcgtctcccaggaccggagcgcctcgtccccgaacgcgcggtggtccgtcgagccggtcccccacgcccccggcgtcctccgtctccgcagtcactacggccgatacctctgcgcctccaacgagcccttcctcctcggcgtcaccggccgcaaggtcctccaggccctcccccaccgactcgactgctccgtcgagtgggtccccgtccgagacggtgcccacgccc

SEQ ID NO: 408014 - DNA, 514 bp, Oryza sativa
tgtcagaaggacgcctacgtcggcgacgaggcgcagtccaagaggggtatcttgaccctcaagtaccccatcgagcatggtatcgtcagcaactgggatgatatggagaagatctggcatcacaccttctacaacgagctccgtgtggccccggaggagcaccccgtcctcctcaccgaggctcctctcaaccccaaggccaatcgtgagaagatgacccagatcatgtttgagaccttcaacacccctgctatgtacgtcgccatccaggccgtcctctctctgtatgccagtggtcgtaccacaggtattgtgttggactctggtgatggtgtcagccacactgtccccatctatgaaggatatgctctcccccatgctatccttcgtctcgaccttgctgggcgtgatctcactgattacctcatgaagatcctgacggagcgtggttactcattcaccacaacggccgagcgggaaattgtgagggacatgaaggagaaagctttctaca

SEQ ID NO: 408015 - DNA, 497 bp, Oryza sativa
ttctcgtggtcgcatgatctcatcaggagcgcagatgctacggcgtccttgagaattgcagagaggcaaaagaagaacaagcagagagcaagaacaagcagaagcagaagcaaagaggcgatggacggcgacacgctgtcggcggcggcggcggaggacgggaaggtgctgcacgcgttccagacgagcttcgtgcaggtgcagagcttgctggaccagaaccgggtgctgatcaacgagatcaaccagaaccacgagtccaaggtccccggcgacctctcccgcaacgtcggcctcatccgcgagctcaacaacaacatccgtcgcgtcgtcgacctctacgccgacctctcctccctcttcgccgactcctaccccggccccgccgcctccgagggcgcctccgtcggcaccgtcgtccgccacgccggccacatgcgtgtcaggtccacccacctcgactgaacaagaaccattctcattttctcaattaacca

SEQ ID NO: 408016 - DNA, 439 bp, Oryza sativa
ttacgtgcgccagccggtacagctcggcgatgtaccggatgaacacggcgcgatcaccgtgccgtcacctagtcaagcggctgcgggagcaggaggcgctgcagctggtgtgcggcccgggcacggaggagtactggagggcggcggagcggctgggctcccggcggaacggcacggtcggcgccgacgactaagggtgcaagtacctcgtgcttgtgccgtacaggggcctagggaacaggatgctggccatggcgtcggcgttactctacgccatgctcaccgggcgcgcgctgctcgtcgacaggggggagtcgctggccgacctgttctgcgagccgttcccggtcacgtcgtggttgatgacgccggagttcccgatcaagaacctccaggacttgaccggcgaggcgctcgagagctacaggatacctgtgca

SEQ ID NO: 408017 - DNA, 486 bp, Oryza sativa
  unsure (1)..(486): unsure at all n locations
gtatattgtaggtagatatatatggagatcgtgggcgagtgctagtaccggggcgaggcggtgttggtgacgccgagctcggccacgccgtggcgctccctctacctctccaacctggacgaccagcgattcctccgattctccatcaagtacctctacgtcttcccgccctccgccgccgtggccgccgacgccctcagggccgcgctcgccagggccctcgtccactactacccactggccggaaggctcaggcaccacgccgacgataagcttgtgctcgactgcaatgccgagggcgcgctcttcgccgaggccttnctgcccaccctcaccgtcgtcgactttctccgtgccggtgccaccgccaagccgcacaagtcctggaggaagctgctctacagagtccacgccgtcaccttcgtcgccgttccgtcgctcgtcgttcaggtgacacaactggggtgcggaggcatggtagtgtgt

SEQ ID NO: 408018 - DNA, 507 bp, Oryza sativa
tataggcttcagagacacaaagcacttgacaaacgcacaagggcttgcagttataactgttatgctcgtcacgacatgtttgatgtcactggttattcttctttgctggaacaagagcattgtctatgctctcagcttccttcttttctttggtgcaatcgaagtaatctacttcgcggcttcacttgtgaagtttcacgaaggggcttgggtacctgtcactctttccttcattttcatgatggtgatgtgtgtgtggcactatggaactaaaaagaagtatgagtttgatgtgcaaaacaaggtctccataagttggctcttgaatattggcccttccttgggaattgttcgtgtacgaggaattggtctgatacacacagagcttatgtcagggattccagccattttctcccactttgtgaccaacttgcctgcgtttcatcaggttctggtgtttctatgcattaaatcagtatccgtaccacacgttcagcctgaggagcg

SEQ ID NO: 408019 - DNA, 554 bp, Oryza sativa
ttcttcagccgtcgccgccgcagcctcctcctctcgtcttctccttcgagttgttagctccctccttattcaaccatgggtaaggagaagacgcacatcaacattgtggtcattggccacgtcgactccggcaagtcgaccaccacgggccatctgatctacaagcttggaggtatcgacaagcgtgtgatcgagaggttcgagaaggaagccgctgagatgaacaagaggtccttcaagtacgcgtgggtgctcgacaagctcaaggccgagcgtgagagaggtatcaccattgatatcgccctgtggaagttcgagaccaccaagtactactgcacggtcatcgatgcccctggtcaccgtgacttcatcaagaacatgatcacgggtacctcccaggctgactgtgccgtgctcatcattgactccaccactggtggttttgaggctggtatctccaaagatggccagacccgtgagcacgctcttcttgctttcactcttggagtgaagcatatgatctgctgctgcaacaagatggatgccaccactcc

SEQ ID NO: 408020 - DNA, 466 bp, Oryza sativa
ttgttccctctaccagtacataaacaagaaagatagctccaaaaaattagctagctcgccaatggccttgttgtcctccttccggctcgccgtggcagaggcggcattgttggtcgtcggctcatgcgccactgaggtcaccttcaaggttggtgagggctctagcggaaaaagtctagagctcgtcaccaacatcgccatctctgaggtggagatcaaggagaagggcggcaaggactgggtggcgctcaaggagtcagcgactaacacctggtcgctcaagagtgaggcgaccctcaagggccccttctccgttcgctttcttgtcaagaacggtggctaccgtgtcgtcgacgacgtcatccccgaaagctctacggccggcactgtatacaagagtggcatcaacatctaatttatagacctgcgtactcttgcattgggctgcatggggatcattaacatc

SEQ ID NO: 408021 - DNA, 484 bp, Oryza sativa
  unsure (1)..(484): unsure at all n locations
tcgttcgccgctagctaagctaggaattgaaatggggatggagaggccgcaagagaaggtggccaccaccaccaccgtcgccttcaacctcgccgagtccggctacgccgaccgccccgacctcgacgacgacggccgcgagaagcgcacagggacgctggtgacggcgagcgcgcacataataacggcggtgatcggctccggcgtgctgtcgctggcgtgggcgatagcgcagctggggtgggtgatcgggccggccgtgctggtggcgttctcggtcataacctggttctgctccagcctcctcgccgactgctaccgatctcccgaccccgtccatggcaagcgcaactacacctacggccaagccgtcagggccaacctaggtgtggccaagtacaggctctgctcggtggcacagtacgtcaatctcgtcggcgtcaccattggctacaccatcactacngccatcagcatgggtgcg

SEQ ID NO: 408022 - DNA, 426 bp, Oryza sativa
tcgttcggcggcggcggcaaaggcgacaagaggaggattgaatagaaagttgggccgggtgccatagacgtcacggttgtcactccctatgaatcccaggttacactcaaggggatatctacggaccgtgttctggacgtgaggaagctgctgggctcgaatgtggagacgtgccacctgacaaactactcgctctcgcacgtgacgcgagggcagcggctggaggacggcgtggaaatcgtgtcgctgaaaccatgctctctcaccatcgtggaagaggagtacgcgacggaggcggcgagcggcggcgcaagtccggcggctgctggacatcgtcgcctgcaccaccacgttcatgaacaagccccgcgacagcgccaagcacaagtcgttcaagcacgcgcgcccggtgacgtcttcgtcacc

SEQ ID NO: 408023 - DNA, 418 bp, Oryza sativa
gtcaagtgcgggagcgcgctgaaccggggggaggctgtggcagcgagcctggcggcgctaaacagcgccggcgtggaggggatcatggtggacgtgtggtggggcatcgtggagagcgagggccccggccggtacaacttctacggctacgtggagctcatggagatggcccgcaagaccggcctcaaggtccaggccgtcatgtccttccaccagtgcggcggcaacgtcggcgactccgtcaacatcccgctcccgaggtgggtggtggaggagatggagaaagacaacgacctctcctacaccgaccaatggggacgccgtaacttcgagtacatctccctcggctgcgacgccatgcccgtctttaagggccgcacgcccgtcgagtgctacaccgactttatgcgcgcctttc

SEQ ID NO: 408024 - DNA, 532 bp, Oryza sativa
ctgattagttcatgttggttcctaatcctgatcaaattacactggaaaggctttttagagttgatgatatcagggttggcgcaacttccagaaaatctattcctcttcttgttgacctactcaaacccattccagaaagacctggtgctcctttcttggcgttgggtcttctgacacaattagctattgattgccccccaaacatgatgctaatggctgaagctggaatcctagaggcacttaccaaatacttgtcacttagcccacaagatgcaacagaagaagctacaactgatttgttaggcattctttttagttgcgcagaaataaggcacaatgaagcagcacttggtactgttaaccaacttgtggcagtccttcgtctaggaggaagaaattcacgctacagtgctgcgaaggcattagagagcttatttattgcagaccatgtcaggaacagtgagtcagctcgccaggctattcaaccacttgtagaaattctgagtactggcatggagagggagcagcatgc

SEQ ID NO: 408025 - DNA, 355 bp, Oryza sativa
gttgtcttctcctccccctcccggttcggttcggttcggttcgggtccggttcgatttcggtttttccttcggttcgggggttggtgggaaagcatggcggcgccggatgttgagtaccgctgcttcgtcggcggcctcgcctgggccaccgacgaccgctccctcgaagccgccttctccacctacggcgagatcctcgagtccaagatcatcaacgatcgggagacggggaggtcgcgcggattcgggttcgtgacgttctcgagcgagcaggccatgcgcgacgccatcgaggggatgaacggcaaggagctggacggtcgcaacatcaccgtcaacgaggcccagtcgcgc

SEQ ID NO: 408026 - DNA, 517 bp, Oryza sativa
tttgtgtactggtgtccaattcttcggcatgctgctggttacgatgatttttgcagttctgggtttcctttctccatcaaatcggggaggattgatgaccgcgatgcttcttgtctgggtcttgatggggttgcttgctggttatgcttcttcacgcctctacaagatgttcaagggttcagagtggaagagaataactatgcgcacagccttcttatttccagggattgcttttgttatcttcttcatattgaatgctcttatttggggggagaagtcatctggtgccgtccctttcaccactatgttcgccttggtcctcctttggtttggtatctcagtgcctcttgtgttcgctgggagctatcttggattcaaaaaacctgccctggaacctccagttaaaaccaacaagattccaaggcagatccccgagcaagcttggtacatgaatccaatcttcactattctacatggtggcattctaccatttggtgctgttttcatgagctattct

SEQ ID NO: 408027 - DNA, 513 bp, Oryza sativa
ttcatttcagctcaccactgctagcttgggaagaggaggaggagcttgagcttggagagagacaacaatggcggctcaggctcttctctctgggaggcagctgctggggaggccattgcaatcttcagtctccaggtcttcttcctccaggaaggcacccttcatggtcagggcagaggccactccccctgccaagcaaggtgctgacaggcagctgtggttcgcatccaagcagtccctgagctacctggatggcacgcttccgggagacttcgggttcgacccgctggggctatcggacccggaggggaccggtgggttcatcgagccacggtggctggcctacggcgaggtgttcaacggccggacggcgatgatgggcgtcgtcggcatggtcgccccggagctcctcggcaagctgggcctcgtccccgccgagacggcgatcccgtggttccagaccggcgtgatccccccccgaggcacctacacctactgagccgacccttacac

SEQ ID NO: 408028 - DNA, 472 bp, Oryza sativa
ttgacttccgctgtagtgattggtggtgcaactgtcatatggatcttgtttgaagtgcttgattaccatctcttgactctgctttcccatgtgatgattggtgccttggccatcttgttcctgtggtcaaaagctaccacatttatcaagaagagttcaccagatattcctgtagtacagatacctgaagatgtcgccgtgaacgtgtcacgagcattacgcagtgacataaacagagcacttcacctgtttcgggagatcgcgttggggcatgacctaaagaagtttctgggcgtgattgctgctctctgggttctctcagaagtaggaagctgctgcgacttcctcaccttgatatatgttgccgtcctgatgctccacacggtgccgatcttgtatgacaagtaccaggataaggtcgaccactctgctggaagggctcactctgaggcctgctagcactatgaggtgc

SEQ ID NO: 408029 - DNA, 535 bp, Oryza sativa
  unsure (1)..(535): unsure at all n locations
ttacagccaccaactcctctcaacttcttgatccggcggcggcggcaagatgttcggcggcggcggcggcggcgggaggaagccgctggactacgaggagctgaacgagaacgtgaagaaggtgcagtacgcggtgcggggggagctgtacctgcgcgcctccgagctccagaaggagggcaagaagatcatcttcaccaacgtcggctacccacacgcgctcggccagaagccgctcaccttcccccgccaggttgtggcgctgtgccaggcccccttcctgctcgatgatcccaacgttggtcttatcttccccgccgacgccatcgcgcgggccaagcactacctcgccatggcacccggtggactaggtgcttacagtgattcccgaggtatccctggtattaggaaggaagtcgccgagttcatcgagaggcgtgatggttatccaagtgatccagtacttatttaccttacagatggtgccagcacaggtgtgatgcanatgctgaataccattatcagaaatgagaga

SEQ ID NO: 408030 - DNA, 494 bp, Oryza sativa
  unsure (1)..(494): unsure at all n locations
tcgctctccgcgacggtctcatgttccccagccggggccttcttgcgcgctcggcgagagaagcgacgaagaagaagaagaggaggaggaagaagccaggctaagcccagcggcatgggggaccagctcaccgacgaccagatcgccgagttcaaggaggccttcagcctcttcgacaaggacggcgatggttgcatcacaaccaaggagctgggaaccgtgatgcgttcgctggggcagaacccaacagaggccgagctccatgacatgatcaacgaggtcgacgcggacggcaacggcaccatcgacttcccggagttgctcaacctgatggcacgcaagatgaaggacaccgactcggaggaggagctcaaggaggcgttcagggtgttcgacaaagaccagaacggnttcatctccgccgtcgagctccgccacgttatgaccaaccttggcgagaagctgaccgacgaggaggtcgacgagatgatccc

SEQ ID NO: 408031 - DNA, 512 bp, Oryza sativa
tgtcttttctcaattgggttattgcagcttcatgggagggtgctcctcctgtccaaatgggagaacgatatcctcacatgttcttgatcctcctactttttcatggagcccatgcggctttgaaagatccagtacagaaatggcagactcttggaggtcagcgtcctcttgtcattgctcgtggagggttctccggcttgtttcctgattcaagccagttatcgtaccaatttgcaatgtcgagtaccttgcatgatgtggctctgtactgtgatctgcaattgtccagtgatggcttgggcttctgcaaaactggattgacattagagaactcgacgcttatcgccgaagcctgtcctaagagggccaagacatacaaggtgaatggagaggaaatccatgggtggtttgctttggatttcaacgcagacgagcttgatcagaatgtcacattgattccggacatattttctcgcccagcacatttgatgggaccatgggactgttaccct

SEQ ID NO: 408032 - DNA, 449 bp, Oryza sativa
ttcgttgctacgcggcgccatactggaggcggcgcacgtgtcgtgcctcgaggatcgctacgcgctggggccccagctcgggtggggccagttcggcgtgatccggtcgtgctccgacatggtcaccggcgaggcgctcgcctgcaagtccatcgccaaggaccgcctcgtgtcccccgacgacgtgaggggggtcaagctcgagatcgaggtcatggcgcgcctctcgggccaccccaacgtcgttgacctcaaggccgtgtacgaggacgaggcgtccgtgcacctggtcatggagctctgcgccggcggggagctcttccaccgcctcgaggagcgcggctgcttctccgagcacgaggccgccgagctcttccgctacctcatggaggtcgtggcgcattgccatagcaaggggatcgtgcaccgggacctcaagcccgagaaca

SEQ ID NO: 408033 - DNA, 484 bp, Oryza sativa
ttacttcgcagcagcaaaaccgcgagacacatgacgacggcgacgacgacgacgaccttgccggcggcggcggcgctgctgctgctgctgctgtcggcggcggcgcagctgtgctcggcgtgcccgccggcggcgagccagacggcggagaacaacccgcggctgcagcgggcgtacgtggcgctgcaggcgctgcggcggcgcgtcaccgacgaccccaagaacctcaccggcgggtggtgcggccccgacgtgtgccgctacttcggcgtctactgcgccgccgcgccggacgacccgtgcgccgtcaccgtcgccggcatcgacctcaaccacggtgacctcgccgccaccctccccgacgagctcggtctcctcaccgacctggccgtgctccacctcaactacaaccgtttctccggcgcgctccccgacaccctccccaagctctccctcctccacgagctcgacgtcagcaacaacc

SEQ ID NO: 408034 - DNA, 509 bp, Oryza sativa
tcgtttcactcccccatctctgtaccaaactggaggttagaattcagagatccaataaccaaaagcaagaacaccatgagagccccatccttcttcttcctctccctcctcctcctcctcctcctcatccacatctccatccattgcaatgctgcagattcccagctaggttcagagaaggtcaccaacctcctcttctacctgcacgacaccctcagtgggaaggatccaactgctgtcccagttgctcgtgctgagaacgctgtacccaagcctgataatccggtacccttcagcacgatctatgtggtcgatgatctgctgacagaggggcctcagagagaatccaaggtggttgggaatgcgcaggggatgtacatttcgacagccaagaaagggctcacgcttgttcttgggatcgatttcgagctcactgatggcccctacataggcagctcgttcgtcgtgtactcgcggaacccggtcatgcaggggaatggcagggagct

SEQ ID NO: 408035 - DNA, 444 bp, Oryza sativa
  unsure (1)..(444): unsure at all n locations
ttcatattaaagcctcccatcaacttcttgcacacaccctccctttggctttcatctgcatctattcatttgcagattgagagccaaagacattatattgattctatcaggagggttgtgctagcgaattcttgttagcaacaaattgacatattgctcggcacatccccaccgagaataccaagatgacgttctctggtacacaggacaagtgcaatgcttgtgacaagaccgtgcatttcattgatctccttaccgaggacagtattccctaccacaagtcttgcttcagatgcagccactgcaaaggcacactttcgatgtgcagctattcgtccatggatggggttctttactgcaagacccattttgagcagctattcaaggaaacaggcaccttcaaagagaacttgccctcangtacaaggcatacagtgaacaggc

SEQ ID NO: 408036 - DNA, 260 bp, Oryza sativa
ttttgtgccgttcacaccaccaccgtctcgtcggctggtcggcggcgtcttctccgcgcgagggtccccccccaaaccctagccgccgccattgccacgcgcgcgccccccaccccacgaatggaaggaggcggaggcggaggcggaggcggtggcggaggtggaggtggaggaggcggaagcagagcaccttacgccacgcgcacggaggaggacgccttgcaagacctccgaagccggcgagcggacatgatcaaggc

SEQ ID NO: 408037 - DNA, 353 bp, Oryza sativa
ttctatcttgataccgagagatcctcatggtgccaatgatttatggttccacaagccatgttgagaggacctgaattctgcatcaattcaataacagctcacatgtgactacaaccttacttgcaaaggtggcagataacatgactgatattcgagaagccaatgtgatcatacaaatattatatcatgctggctcacgggagccacgaagctcaacggctgggacgtattgttacgcctagagggacgacatgaagacaggatggctggcggaaaagaagaatgccatgtgctcttctactatattgtgtggactgacactcaggagatgttctactcttctaaaaggcaac

SEQ ID NO: 408038 - DNA, 519 bp, Oryza sativa
tttgttggtgctcctcctgtccaaatgggagaaagatatcctcacatgttcttgatcctcctactttttcatggagcccatgcggctttgaaagatccagtacagaaatggcagactcttggaggtcagcgtcctcttgtcattgctcgtggagggttctccggcttgtttcctgattcaagccagttctcgtaccagtttgcaatgtcgagtagcttgcatgatgtggctctgtactgtgatctgcaattgtccagtgatggtttgggcttctgcaaaactggattgacattagagaactcgacgcttatcgccgaagccttccctaagagggccaagacatacaaggtgaatggagaggaaatccatgggtggtttgctttggatttcaccgcagacgagctgtatcagaatgtcacattgatccaggacatcttttctcgcccaagcacatttgatggagccatgggaatgtttacccttgaagatcttgtcggactcaagcccccacatttatgg

SEQ ID NO: 408039 - DNA, 441 bp, Oryza sativa
tttgttgagaggagaggagatcagggggaggaagggtggccggtgcagcagatcggggcgggcggatttaggggaggagcgcgctagccgcgagcggcagctatggatgaggagcacgacgtgatcgtgctggggacggggctcaaggagtgcatcatcagcgggctgctctccgtcaatggcctgaaggtccttaacatggacaggaacaattactatggaggagaatctacatccctcaatctcactaagctctggaagagattgacaggcaacgagaccgctcctgaacatgtgggtgtcagcaaggaggacaacgttgacatgggtcccaagttcatgatggccaacggtgcactgatgccgagtctcatccacacgagcgtgacaatgctatgtgattgcaaggactgctactgcagcctcatgtacaacaatggc

SEQ ID NO: 408040 - DNA, 413 bp, Oryza sativa
tcgtttcaagccaagaagagggagagcaccaaggacacgcgactagcagaagccgagcgaccgccttctcgatccatatcttccggtcgagttcttggtcgatctcttccctcctccacctcctcctcacaggttcttggtgtagcttgccactttcaccagcaaagtttcatgtctgatctcgacattcagatcccaactgccttcgatccctttgctgaggccaatgctggagactctggtgcggctgcaggatcaaaggactacgttcatgtacgcatccagcagcgtaatggccgtaagagcctgaccactgtccagggattgaagaaggaattcagctacaacaagatcctcaaagatctcaagaaagagttttgctgcaatggtactgttgtccaggacccagagct

SEQ ID NO: 408041 - DNA, 532 bp, Oryza sativa
tcggtcggatctaacaaacacacctactacacctgctcctcctacacccgatcggatgggcccagatcctcctgctacgccgacggcaccgacggcgtagataggagatgatggccgcacttgataccttgctctttacctcggagtctgtgaacgagggccaccctgacaagctctgcgaccaagtctcatatgctgtgcttgatgcctgcctgagcgaggaccctgacagcaaggtcagttgtgagacctgcaccaagacaaacatggtcatggactttggtgagatcaccaccaaggctaacgtcgactatgaagagatcgtcagggagacatgccgtaacatcagatctgtgtcagctgacgtccgcaccgatgctgaccactgcaaggtgcttgtgaacatcgagcagcagtcccctgacattgcacaaggtgtgcacggccacttcaccaagcgccctgaggagattggtgctggtgaccagggacacatgtttggatatgcaactgatgagacccctgagttgat

SEQ ID NO: 408042 - DNA, 481 bp, Oryza sativa
tcgttcctctccaacatgaagatgccattgctgctgcttatctccatcgtcgccgtgtccctctcccgtggcaacggggagcagaccgacctcacgcgggagacgttccccggggtcttggtgttcggcaccgcgtcgtcggcgtaccaggtggaggggaacgccctccagtatggccgagggccctgcatctgggacaccttcctgatgcaacctggtgtaactcctgataatgcgaccgcgaatgtgaccgtggacgagtaccaccgctacatggatgatgcggacaacatggtgagagtgggctttgacgcgtatcgcttcttgatctcctggtatcgcattctcccgagaggacttgggaagattaacaaagacggcggggaccatcaccacaggctcattgatgacatgcttgcttacaacattattccataaggtgtgctctaccactacgaccgtacacaggtggctcatgatc

SEQ ID NO: 408043 - DNA, 472 bp, Oryza sativa
ttgagcttcagcccggtgctgaggcggcggcacccggcgccggtggccgtcgcggcggtcaccctgcacggctgctacggcgtcgtgctgaggcagtacctcggcaaggtgaccatcctcacggaggagctcgtgcgcgtgctccagtcggcgagcaggatggagaaggccatggcgcacatgacggcggaggacgccgccgactgccgcgacgaccgggccaaggccatcgtcggcgacatggagccctacgaggtggattccgtcgttatgggcttgctcaaggtgtggatggacgacaggttcaagatcaccatggactgcctcgccagagccaaagaaaccgagagctggataccaaaatccaaagatgaaccttttgccgggtcagcgatggagatgatgaagctggctaagtataccgtcgaagagttctccgagatcccggcgagcgcgaaagacgaggtggtgc

SEQ ID NO: 408044 - DNA, 536 bp, Oryza sativa
tcttctaatcggacggcgatggtaaatcgtagggggtaatcaaaagtcgatggtgtattgtacaatgcgacaaagtcgatggtaaattgtagatgtgtgacaaagtcagtggcatataatggattctctcctatatatatataggacttatgaaatgacttagctaaatgatttatcattttagaagtgattgcaagactccaattaatgaaacaaactgttcaatcatccatatattaaaaatattactgaattttaaattggcaaatcatgatatatgggttcttgttctctcttgtagctaatcgctataatatgtatgatatcgagttaccgatcatacatcaacgctacaaaatcactgttcactaaaccttaagtgagttgccatgtctcgtagatggcaccctccatctctaaatcttggcttcgccactgattattgttgcagcaggtacacctattagacatgcattcagttgatgagcattgaccacccaaccaaggtaccaatcaattttcgtccaaaacatatg

SEQ ID NO: 408045 - DNA, 421 bp, Oryza sativa
ttctatgaaggtgtcgctgatcagggcggtgctgtgggtcatcttgcagtgcctgggcgccatctgcggcgtggggctcgttaaggggttccagagctcgtactacgcgcggtacggcgggggagccaacgagctcagcgacggctactccaagggcaccggtctcggcgcggagatcatcgggaccttcgtgctcgtatacaccgtcttctccgacaccgaccccaagcgcaacgcccgcgactaccacattccggtgttggctcctctcccaattggattcgcggtgttcatggtccatctggacaccattcccattaccggcaccggcattaacccagcgaggagcttgtgaaccgcggttatctacaacaaggacatggcctgggatgaccaatggatcttctgggtgggccccctg

SEQ ID NO: 408046 - DNA, 464 bp, Oryza sativa
ttgattatataagaagcagctgcagaagatgctttatgactgcaatgagcaattgcagcagttcagtcatgtcaacaaaaaagctcttgaccagtatgttaacttcaccgaacaacgtgaacaactacagagaagacgggctgaacttgatgctggtgatcagaaaatcagagaactaatatcagttttagaccaaaggaaggacgaatcaatcgaacgtacatttaaaggtgttgcaaggcacttccgtgaagtgttctctgaactagtgcaaggtggccatggacatttggttatgatgaggaaaaaggatggtgatgcagatgatgatgataatgatgaggatgggcctcgtgaaccagatcctgaagggagaattgagaagtacattggtgtaaaagtcaaggtttcctttactggcaagggagaaacacagtctatgaaacagttgtctggtggacaga

SEQ ID NO: 408047 - DNA, 498 bp, Oryza sativa
tttatatggtcatcgagattgaaagcaaatgggggtgtctttgtaaatatcattgtgaagaaggatatgaaacagtccctattattctgttgggacatgtcgaaatgcactggtactgggtttaaaactcttgaaaacaaaaacaaaccattagtactgaaggagctaaagaaactgtggaataaagaggatcctgatcttccatgggagcaagaagagttttcaccttcaaatacattacttgtggatgattccccttacaaggctctgggcaatccggcacacactggcatttttactcacccgtacaggtatcttaacaagaaagatgattcattgggaccaggtggagatcttccggtgtatctggagaaccttgctactgcagatgatgttcagcgctatgtacaggagcacccattcggtcaaccttccattacatagagtgatcgacattggaatttctatgcgaaaatactagataaactggagaagccc

SEQ ID NO: 408048 - DNA, 553 bp, Oryza sativa
ttgcgatcatggaaagcctcttctgtttgtgttatatggaaaaaatacagacagcggaaattattcaaagcctgctagttttgaggggatggagaagttcgattccgatctaagtacacttcaccctattttaactgaatgccgtgttatcaaatctgacatggagcttgcccttattcagtatgctaatgatgtgagctctgaagctcacattgaggtcatgagacgagcaaaaccaggcatgaaggaataccagttagaaagcatctttcttcatcatgtttatatgtatgggggctgtcgacattgctcttatacatgtatatgcgctactggagaaaatagttctgttcttcattatggacatgctgcagcaccaaatgacaggaccctgaatgatggagacatggcactaatggacatgggaggtgaataccattgctatggatccgatataacatgctcataccctataaatgggaaattcaacagcaatcagacaatagtatacaatgctgtccttcaggctcataatgctgtcatagcacacatg

SEQ ID NO: 408049 - DNA, 469 bp, Oryza sativa
ttcgtttcgtgttcgtcttcctctcgccgctgattcgattcgatccgatccgatccaaggggaggggaagcaatggcgacgaagaggagcgcggtgacgctgggggaggcggatctgagggggaagaaggtgtttgtgcgggtcgacctcaacgtgccgttcgacgactcccagaagatcaccgtcgacagccggatgcgcgcgtccgtgcccactgtcaagttcctcctcgagaagggcgccaaggtcatcctggccagccatctgggccgtgcgaagggtgtcacccccaagtacagtttgaagactcttgatccacgcttgactgagctacttggagtcgatgttgcgatggccaatgattgcattggtgaggaagttgagaaattggctgctgctttgacggaaggtggtgttctactcctagagaatgctagattgtacaaggaggtagacaagaatgatcctg

SEQ ID NO: 408050 - DNA, 537 bp, Oryza sativa
  unsure (1)..(537): unsure at all n locations
tttgtgcactctcgcccttcacctctcctccctctgacccttccattacatggatcagggagggaggaaggaggcctgaagtggcgcagagtaggcgcttgtaaacaaatccccccatttgcttcttttgcactgaagaatccctgaagaatccagcaggatggagaagaaggcgtccatcctcatgaaccggtatgagctcggccgcatgctcgggcaaggcaccttcgccaaggtgtaccatgcacggaaccttgcatccaaccagagcgtcgccatcaaggtcattgacaaggaaaaggtattgcgtgtcggcatgattgaccagatcaagcgagagatctccatcatgcgcctcgttcgccaccccaacatcgtccagctgcacgaggtcatggccagcaagagcaagatatattttgcaatggagtatgtccggngtggtgagctcttcagcagggtagccagngggcgactcacggaggatgctgcgaggaagtacttcagccagtgataggagctgtggacttctgtcac

SEQ ID NO: 408051 - DNA, 562 bp, Oryza sativa
tcttaatttctgttatccagtctttgggagaggaggatataaatgtgaagtttctggtgcaactagacaaattaatccgtcttttagagactcctgtatttgcttacttacgtttgcagcttcttgagcctggaaaacatacctggcttctcaaaacactttatggtctcctgatgctactgcctcagcaaagtgcagccttcaagatcttgagaactcggctgaagactgtgcctttcagtgaaaatttgaaacgcacatcttcaacaaatccatactctcagattctacaagtgacagaagatggtaatcgaaatcacgacactcagagctacaatgcaatcaatttcccatcccggctccaccagtttgagagcatgcagcagcagcacagagttcatctaaagaatcaactgcaatcccaaaaatctgcttcagctatagtattatcacaggaaattcaaagatacgaagaagcacattcctcttcgacatcaagagattggcaggcccccttcgagaacatccagaggcatttcatgatgcattttgttgattggat

SEQ ID NO: 408052 - DNA, 456 bp, Oryza sativa
ctctctttgatcgccgccgccgccgccgccagggaaggtcttctctcgccatggcccggatcaaggtgcacgagctccgggggaagaacacggcggagctgctggcccagctcaaggacctcaaggcggagctctccctcctccgagtcgccaaggtcaccggcggcgcccccaacaagctctccaagatcaaggtggtgcgcacctcgatcgcgcgcgtgctgacggtgatctcgcagaagcacaaagcggcgctgagggaggcgtacaagaagaagagcctgctaccgctcgacctccgacccaagaagacccgcgccatccggaggcgccttaccaagcaccaggtatagaaacaactcgtgactcttctctttctttgtaccattcgaatgcatctaccttatactaattggatgtgaattacctcacttatcggttagggctagatgtgct

SEQ ID NO: 408053 - DNA, 538 bp, Oryza sativa
ttgcttccctctccctcctccaccgcctccgggtgcgccttctctcgtgccgcggatctccatcgccggcgtgcggtgcaccgagatccacccgagatgtggcgcggctgcgtctcgcgtggcctcaggagcctctccaagggcaagggctcctcctcctccgcccccgtctccgccgccgctaggctcttctccaccgcctcgtcgtcgtacacggtggtggatcactcgtatgacgcggtcgtggtgggagccggcggcgcggggctccgtgcggcgatcgggctctccgagcacgggttcaacacggcttgcatcaccaagctcttccccacgcggtcgcacaccgtcgcggcgcagggtggcataaatgctgctcttggaaacatgacggaagatgactggagatggcatatgtatgacactgtcaagggtagtgattggcttggtgaccaggattctattcagtatatgtgcagagaagcaccaaaagcagttatagaacttgaaaactatggggtgccatcttcaagaactg

SEQ ID NO: 408054 - DNA, 278 bp, Oryza sativa
tcgttcatcccaaccgccgtcgcatctcccgggggggaactttggcactatcgggggtgtaccaaaccaccagcttgctcggcaccgacccttgcctggatgagctcgtccgctcggtttgtaactccagtggccagattaccatggcgccgaccgatcaagagcgcgccccagagcatctggtatggacctgaccgatccaagtacctgaggccggtttcagagcatacaccatcggacctggacggagaggttccgggagactacgggggggacac

SEQ ID NO: 408055 - DNA, 488 bp, Oryza sativa
tcggtatgacccaagtgactgttgagtaccggggggggttctttgccagggtccgtgtgcgtgtccacaccgtcctcatctctacccagcatgatgagacagtcaccaacgatgagattgctgctgacctgaaggagcatgtcatcaagcctgtcattcccgagcagtaccttgatgagaagacaatcttccatcttaacccatctggtcgcttcgtcattggcggacctcatggtgatgctggtctcactggccggaagatcatcattgacacttatggtggctggggagctcacggtggtggtgccttttctggcaaggacccaaccaaagttgaccgcagtggagcatacgtcgcaaggcaagctgccaagagcattgttgctagtggccttgctcgccgctgcattgtcccagtattatacgccatcggtgtcccagagccactgtccgtattcgtcgacacatacggcacttgcaggatccct

SEQ ID NO: 408056 - DNA, 438 bp, Oryza sativa
tcgtttccatcgctatggctgcctcgttgcgagccttcctccgccctcaccggggccgtctcctcctccgccagagccgcagcctctccgccagcgccgccccggccggtgccgccgccgcatccacggttatccggcgcagcgtagtggaggtgctccgggagcgggggctcgtggaggccaccacttctgagtctctggggtcggcttcagcgagccctagggagctcaaggcgtactgcggcttcgaccccacggcggagagcctccacctcgggaacctcctcgggctcgtcgtgctctcctggttccgccgctgcggtcacaacgccgtcgcgctcgtcggcggcgccaccggccgtgtcggtgacccctctggaaagagcgccgagcgggccgagctcgacctcgccgccgtcgagaccaactccaacgcta

SEQ ID NO: 408057 - DNA, 468 bp, Oryza sativa
tctttgaagctcagctcctcctcctctcgcgggggggccttggccaccaccgggtccagcctcctcaagacctccttcgccggcgtgcgcctccccgccgccgaccgcaaccccaccgtctccgtcgcgccgcgcaccggcggcgccatctgcaactccatctcgtcgtcgtcgtccactcccccctacgacctcaacgccatcaggttcagccccatcaaggagtccatcgtgtcccgcgagatgacccggcggtacatgaccgacatgatcacctacgccgacaccgacgtcgtcgtcgtcggcgccggctccgcggggctctcctgcgcgtacgagctcttcaaggacccctccgtcagcgtcggcgtcatcgagcagtcggtgtcccccggcggcggcgccgtggctcggcgggcagcttgtcttcgccatgggggtgcgcatgccggctcaccttgtcctcga

SEQ ID NO: 408058 - DNA, 481 bp, Oryza sativa
tgtttcttaacaagcaaggcaccaaatccccccagggtggatcaccgtctcctcggggtgggtctcctcctcctctccccggcggtggccgccgcctcagtccccggcgaggaggagccgctgatccggcaggtggtcggcggcggcgacgacaacgagctggagctgaacgcggagcgccacttcgccagcttcgtccagaggttcgggaagtcctaccgtgacgccgactagcacgcgtaccggctctccgtgttcaaggacaacctccgtcgcgcgcgccgccaccagctgctcgacccctccgcggagcacggcgtcaccaagttctgcgacctcaccccggccgagttccgccgggcctacctcggcctccgcacgtcgcgccgcgccttcctgcggtggctcggcgggtccccccacgaggcgcccgtcctccccaccgacggtctgcccgaccactttgactggagagaccacg

SEQ ID NO: 408059 - DNA, 474 bp, Oryza sativa
cgtgggcgccgcccaactcgcgaaggcggggaaggaaaaaaagagagaaaaaaaaaggaagaaaaaaaaataaaactcgcgcacagcaaccgaatcatctgcctcctcctcaagtagtctagtcctcctctcttctccggagtctgcgtgcgatcgaagcagaggcgcggcgctcctcctcctcctccggctccgatccccatggcgttcatgcgttcccactccaatgcatcctccggtatgggggttgctcctgacatcagggacacattccttgagcttcagatgaagaaagcatttcgctatgttatcttcaaaatcgaggaaaagcaaaagcaagttgttgtggagaagaccggggcaacaactgagagttatgatgatttcctggcatctctcccagaaaatgactgcagatatgccctctatgattttgactttgttactggtgagaatgtgcaaaagagcaagatt

SEQ ID NO: 408060 - DNA, 357 bp, Oryza sativa
gcctgttgcaaggcgaggtgcacaggagggggtttttctaagcgttgggcgaaaccacaaacactggtgtgtgctactttactgaagtcacattttcttaccacgaagtcttaaaggtgagccaccctccaggctgccgtccccaagccggtgactgtatccatggttgtgcctgctggtgcctacgacaatgatcttgtaaagaccgcgaaatccattgcatcaccaggaagggggatccttgccatggatgagtcgaacgcaaccttgggtaataggcttgcgtcaattgggctatacaacaccgatgccaagcgccatgctttacctgaccctgcttgtcacctcacctgactt

SEQ ID NO: 408061 - DNA, 480 bp, Oryza sativa
ttgttttcacctcctcctcctcctcctcttcctccgcgcgcgctagatccagggagagggagagggagagatcatggcggggacggtgacggtgccgtcggcgtcggtgccgtcgacgccgctgctcaaggacgagctggacatcgtgatcccgacgatccgcaacctggacttcctggagatgtggcggcccttcttccagccctaccacctcatcatcgtgcaggacggcgacccgaccaagaccatccgcgtccccgagggcttcgactacgagctctacaaccgcaacgacatcaaccggatcctcggccccaaggcctcctgcatctccttcaaggactccgcatgccgctgcttcggctacatggtctccaagaagaagtacgtcttcaccatcgacgacgactgcttcgttgccaaggacccatctggcaaggacatcaatgctcttgagcagcacatcaagaacctcctcag

SEQ ID NO: 408062 - DNA, 272 bp, Oryza sativa
  unsure (1)..(272): unsure at all n locations
tcgctgacgcgtgggtttcccccctctcctcctcagccctatttcaccaccacctccaccgctgccgcggcgagaattcgatcggttcttggcagccgtagtgcagttttgtgcagttttcttctctcttgttgttgaggatgaagtttgggaagagcctgagtagccagatcgtggagacgctcccggagtggcgggacaagttcttgtcgtacaaggatctcaagaagcggctcaagctgattggtgggggtggggtggggngaggtcac

SEQ ID NO: 408063 - DNA, 534 bp, Oryza sativa
tttgttcgaagcttgacgacgagcagtggctggcctgctggatcctctactccttcatcaccctcgtggagatgcttctcgagtccctcatctactggataccgatctggtacgagctgaagctgctgttcatcgcgtggctggcgctgcccaacttcaggggagccgcgttcatctacaacaggttcgtcagggagcagctcaggaagcatggcctcgccggcgccggcgccggcgccgccgccagcgtcggcaagaaggacaagtcgtcgccgtcgtcgtcacccaaggacaaggagaagaccaagagcaagttcctctccttcgtcactcccaagaaggatcatgaagcttactgagccaagaagtgctgatcagtcggatccctgaagatagttttttagtgtgtgtactgttccatttgtgtttgtccctcttcctctccttcagaagaggcagctagctagcttcatgtttggctggtctttttggccatctgtgcatgtctgtaaactttattggagtgaggggaaa

SEQ ID NO: 408064 - DNA, 495 bp, Oryza sativa
tcggtcgagacctcctcgcgagtcgtcaatccatgggcgcctccgcgtcggcgtcgctgcgccaccacctcctcctccgccgccgcccgcgcttccccctcggccctagccccactttccgcacctcctccctaccccgccgccaccagcggctcttcgcctctgccccatcctcgtcgacggtggagaatggcgagccctcctcgccggtggagccgtccgacggtgcgtccgtcgtcgacgtgaatccgccgcgcgggaccagggatttccccccggaggacatgcgccttcgcacctggctcttcgaccagttcagggaggtgtcccgcgtcatggcgtttgaggaggtggacttcccagtgctcgagtctgaggcgctcttcattcgcaaggccggagaggagatcacgcagcagctttataacttcgaggataaaggagggcgccgtgttgttctgaggcctgaaatcaccccttccttggcacgcctag

SEQ ID NO: 408065 - DNA, 505 bp, Oryza sativa
caggagcgtgatccaggaggtgaagggcgagatcggcgccatctcgcggcgggggttcaggtcgcggccggggcgagtccggcgagtggcggcggcggcggaggagccgccggacgagtcgtcggcggcggcgctggtgatgcgggagagctgctggacgcagctgccgccggagctcctgcgggaggtgctggcgagggtggaggagtcggaggggtggtggccgcgccgccgtgacgtggtggcgtgcgccggcgtctgccggagctggagggggatcgtcagggagatcgtgcgcaccccggaggcgtccgggaacctcaccttcccaatctctctcaagcagcctggcccgagggatgctcctatgaaatgattcattgtaaggaaccggaccactcagacatattacctgtacattggactgactgatgcattaactgatgatgggaagtttctacttgctgcacgcaaatgttgtaggaccacatgcactgagtacctg

SEQ ID NO: 408066 - DNA, 532 bp, Oryza sativa
  unsure (1)..(532): unsure at all n locations
gttctacgcggcgacgccctatggcgacccaccacgcccgccgcctccccgccgccgccgccgtcctcctgctcgtcctcctcgccggcggctccgcggccgacgacgcctccagcgacgacgacgcgggcgtcccgccgtcgcccggctgctccaacaagttccagctggttaaggtgaagaattgggtaaatggaactgaaggtacaattgttgttgggttgagtgcaagatttggagcctccgtgcctcgagatattcatgaagctcagaaaacatttgctgtccttgcaaatccacttgattgttgttccaattcgacatcaaagctaacaaattatattgctatagcacaacgtggagaatgcgctttcactgctaaagcaaagattgcacagactggaggtgcagntggtttactagttatcaatgataatgaagaactttacaagatgggttgcagtgacaacgatacttncattaatgttacaatacctggtgtaatgataccacagtcaagctgaaaaaagat

SEQ ID NO: 408067 - DNA, 534 bp, Oryza sativa
ttctttatctccaaagaagcatctactgtgtacagggctactcttcgttatgaaggatttagtgagataatggcaaccttcgcgaaaattgggttttttgatgctgcaagtcatccactgttgcaacaaactactcgccctacatacagggattttcttgttgaactcttcaatgcttgtaacatctccacaaccgccagaaaggaatatagtgaagtctctggaggacaagatggtgaactgatttccagactcttgagttttgggcattgcaaagataaggaaatagctgctaagacagtcaaaacaatcaagttcttgggattatatgaggagacacagattccagagaactgttcaagtgcatttgatgtgatttgccagcgaatggagcagagaatggcttatatccacaatgagcaggatatggtactgctgcaccatgaggtggaggtggaatacccttgtggccgacccaaccgaaagcaccaagcaaccctacttgagtttggcaaggttgaaaatggcaggcct

SEQ ID NO: 408068 - DNA, 506 bp, Oryza sativa
tttctccctccttcacttggtttcttgttgtgcaactctcgtcgtctcgttcatccccgggctggcatcgcaggagctggcgtctcgacaggatcagcagccgcagcagctgctgctgcaccaacaacaacgacaagaagaagaagacttggagtcggagcagcagcggaaccagtggttggtgatccggctgtacgaggccatcaacgcccgagaccacaccgccgcgcacgccctcctcgccccggacctcgagtggtggtaccatggcccacccgccagccaccacatgatgcgcctcctcaccggctgcgcctcgccctcctcttcctccttccgcttccgcccgctctccgtccacgccctcccggcctacgacgtcgtcatcgccgagggcatcaccggccgctaccacgacagctactgggtgcacgcttggaccgtgggacccggccacaatggggatagggtcatcacccacctccgcgagtacctcaacaccgatc

SEQ ID NO: 408069 - DNA, 533 bp, Oryza sativa
  unsure (1)..(533): unsure at all n locations
ttttctttcggcatctctcctgcgcgggcgaggcgtcctcctcgtcctcgtcgtcccctttctctgctcccgcgagatctcacccccgctgcggcgacgcggccatggcggggaggaactaccacggctacggcggcggcggcggcgggggcatgtccatggtggtggcgagcacgccggggcaggagctggccctcaccaactgcgcgtacgtctcctccgccgacatccgccgcttccccaacgccctcgccctcgtcggcgacgccttcgtcttcaccctgcgtgcccatgatgctgtttctgctggaagcatcgcattgaatgccattcagcgtcgccagacgaaggtttcagctggggattcaatcactgttagcagttttgcccctcccgatgatttcaaattggcattgctcacattagaactagagtataccaaggcaagaaccaaccgaaatgaggagctggatngctgtgtgcttgcccaacacttcgaaggagatttcttgatcaggtcatgacatctgggc

SEQ ID NO: 408070 - DNA, 484 bp, Oryza sativa
tgttacctctctctctgtgtctccgccgccgccgcctccgtcgctcgccgcatccgtcggaggcgagatgggcatcaagggtttgacgaagcttttggcggacaatgcgcccaaggcgatgaaggagcagaagttcgagagctacttcggccggcgcattgccgtcgacgccagcatgagcatctaccagttcctcattgtagttggaaggacggggatggaaaccctcacgaacgaggccggtgaagtcaccagtcatttgcaaggtatgttcaaccggacaataaggttgctggaggcaggaatcaagccagtatatgtttttgacggcaagcctcctgatctgaagaaacaagagctcgcaaaaaggtactcgaagagggaggatgccaccaaagaactaacagaggcagtagaggaaggagataaagacgcaattgaaaaattcagcaagagaactgtgaaggtcacgaagcagcacaat

SEQ ID NO: 408071 - DNA, 515 bp, Oryza sativa
gtgttattaaaatcatcatattccagcaaaaggcctccaggagatgatgcttgtggtacgagctcttctactgaagcagcatattatgctaagtttggatttgattttatagagaagagcaaccaaataggcccactgttccacaacatcgcgctgcagcaatacatcctgctttgcgcacaggtgctggatggagggttgagggataagcctgggaagaacagagatcactaccactcgtgctactgcctgagtggtctgtcagttagccagtacagcgccatggttgattctgatgcgtgccccttgccgcagcacgtgcttggtccttactcaaacttgctagagccgatccatccgctctacaatgttgtactagacaaataccatacggcctatgagttcttttcaagctagtgatacaactgtctaggacatgtatgatatgtatgagctctacaatgttgcgccttacaagttacaactgtctaagacatgtatgatatttcattctt

SEQ ID NO: 408072 - DNA, 505 bp, Oryza sativa
ttctttccccactcccactcgcctgaaaccctaggggggagctcccggcggatggacgagggaggcggcgctggtgctgcggctgccgccgccgggaacgcggcgggggcggcggtgcaccacaacgcgcggtccgcggaggacgtcttccgcgacttccgcgcgcgccgcgcgggcatcgtcaaggcgctcaccaccgatgtggagaagttctaccggcagtgcgaccccgagaaagagaacctgtgcctttatggattgcccaatgagacctgggacgtgacccttccagctgaggaagtaccttctgaacttccagaaccagcactgggcataaactttgctcgtgatggaatgatcgaaaaagattggttgtcgctggttgcagttcatagcgatgcatggctactgtctgtagcattttaccttggggctcgctttggatttgataaggaagccaggagacggctcttcaccatgattaatggtctttccactgtatatg

SEQ ID NO: 408073 - DNA, 514 bp, Oryza sativa
tcgtccaccctctcgccgtcgcagatccgatccaggaagagctcgccgccgccgctgccatggcgctctccgtggagaagacctcgtcggggagggagtacaaggtgaaggacctctcccaggcggacttcggccgcctcgagatcgagctcgccgaggtcgagatgccggggctcatggcgtgccgcgccgagttcggcccctcccagccgttcaagggcgcccggatctccgggtccctccacatgaccatccagaccgccgtcctcatcgagaccctcaccgcccttggcgccgaggtccgctggtgctcctgcaacatcttctccacgcaggaccacgccgccgccgccatcgccagggactccgccgccgtgttcgcctggaagggggagaccctcgaggagtactggtggtgcaccgagcgctgcctcgactggggcgtcggcggcggccccgacctcatcgtcgacgacggcggcgacgccacgctgctcatccacgagggcgtcaa

SEQ ID NO: 408074 - DNA, 543 bp, Oryza sativa
tcgttcatctcctccgatcccttcctttcctgccatctagtagcaaagatgatctccccggacgcggctcgcaacgtcgtcggcatcatcggcaatgtcatctccttcggcctcttcctctcccccgtgccgacgttctggaggatctgcaagaggaaggacgtggagcagttcaaggcggacccgtacctggcgacgctgctcaactgcatgctatgggtgttctacggtatccccatcgtccacccgaacagcatcctcgtcgtcaccatcaacggcatcggtctcattgtcgagggcacctacctcttcatcttcttcctctactcccccaacaagaagcgcctgaggatgttggctgtgctgggcgtggagttggtgttcatgctggcggtgattctgggcgtgcttctgagcgcgcacacgcacaagaagcgttccatgatcgtcggcatcctctgcgtcttcttcggctccatcatgtacttctccccgctcaccatcatggggaaagtgataaagacgaagagcgtagagtacatg

SEQ ID NO: 408075 - DNA, 562 bp, Oryza sativa
tgttactatggaataagacggctattccaatccggggggggactaagattgatgacttttctcaacttcctcttgagatgcaatggaccatcgttaacgaggccagggcatacgcgagagcgatgaaggcgaccctcttcttctgcagctcgacgcacaacatcaacgtgaacaagatcttcaagttcatcacggccaagctcttcaacctgccgtggacggtggagcgcaacctcaccgtcggcgagcccatcatagacttctgaagactctacacccttacactgacaaaatgctaggcaaaaaaacgtacacgagcccttccttccctccccttcgtcgtcttgctcctgacctttctctgccggaaatggaggccggccatggccatggctgagcagaactgagctcttgcatgtacatataggtgaaagaaaaaagaaaaaaaaagaaagaaaaaggatcaagttgaggttctcgttggagaaggagtatcccttcccttgtgcgtgcaagcaagggcagaagagaaaccgtgagatgttgcttgaacccttgtaca

SEQ ID NO: 408076 - DNA, 468 bp, Oryza sativa
tttttcgcgccgcggaacgaggcgctcgagcgcgacctctacccggagtttcgccgcttcctcctcgagccccgcaacctccgctcgctgcagcggctcctcctcttccacgtcctccccgcccgcctccacgcctccgactcctcctcccccgacttcccctcctcccaccccaccctctccggcgagcgcgtcgacctctccgcctcgccgatgcgggtcggcgccgcggcggtcacgcggcccgacgcggtggtgcgccccgacggcgtcatccacgggatcgagcggctgctggtcccgcgctccgtgcaggaggatttcaaccgccgccgcagcctcgccgcgatctcggcggtgctcccgacgggggcgcccgaggtggatccgaggacgcaccgtctcaagaagcccgcgccgtccgttccccccggtgcgccgtcggtgctgtcgaactgggacgcgatg

SEQ ID NO: 408077 - DNA, 566 bp, Oryza sativa
  unsure (1)..(566): unsure at all n locations
ttttcattcaaccccctaaactttataataccgtttatataacccctaagatggttttgcatagtggggtttttatctaatttatatataagttggatgagtttgatcacatatcatactctttagagtaaaattttgacttaaatatttatttttctacttatgagctctcacaaacaagtacctacatgataatagtataatattactgaataagaataaattgatgagttgcaactgatgatatgcaaatgtgttatattacttatttaaaattgttcgtttaagcttccaaaatatacaaaaccatcatccaaaaccaccttagggggtgatatggatgatatggcaaagttcggggggttggataactgattttaaagtttagggtgctagacggattttcatctaaagtttatggatgtatttggactttntcctattatttatttattgtgtgtgttgattcgatcgatagtacatgaagatccattcgttgacacgtctcacctctattattactcttcctatcgntnttcataaaaagagaagatggtttgaatact

SEQ ID NO: 408078 - DNA, 567 bp, Oryza sativa
tcttgatcacaccgtccgccaccggaagagagagcccccctacgacgacgacgaccatggcgctcgcctccacctccgccaccgcgtccgcggccgtgctcaagacgcccttcctcggggcgaagcgcgcgctcgccaatgccgtcggcgtcgcgggcgccaagcccgcgccgcgccgcgcgctcgtcgtgtcggccaagaagtcgtggatcccggccttcaagagcgacgccgagttcatcaacccgccgtggctcgatggctcgctccccggtgacttcggcttcgacccgctggggctgggcaaggacccggcgttcctcaagtggtacagggaggcggagctgatccacgggcggtgggcgatggcggcggtgctggggatcttcgtcgggcaggcgtggagcggcgtgccgtggttcgaggccggcgcgcagccggaggccatcgcgcccttctccttcggctccctcctcgggacgcagctgctgctcatgggctgggtagagtccaagcggtgggtcgacttcttcaacccggactcgcaggcggtggagtgggccacgc

SEQ ID NO: 408079 - DNA, 563 bp, Oryza sativa; identical to SEQ ID NO: 392207
  unsure (1)..(563): unsure at all n locations

SEQ ID NO: 408080 - DNA, 472 bp, Oryza sativa
ttgttctttagcactgcatctttcttgctgggagcgatcacctctttggtctctggttaccttggaatgaagatcgccacatttgccaatgccagaactaccctggaagcaaggaagggtgttgggaaggcatttatcattgctttccgctctggtgctgttatgggcttcttgctggcatcaagtggtcttgtggttctttacatcgccattaatgtatttaagttgtattatggtgatgactgggaaggtctttttgagtctatcactggttatggtcttggtggatcttccatggctctcttcggaagggttggtggaggtatttacactaaggctgctgatgtgggtgctgatcttgttggcaaggttgagaggaacatccctgaagatgatcccaggaacccagctgggattgctgacattgtccgtgacaatgttggtgatattgtggaatgggaacagatctttt

SEQ ID NO: 408081 - DNA, 503 bp, Oryza sativa
gtcttactcacttcgctgcagaggaaaaaaaagagagaaaaatctccgatggctctccaggcggccaccaccacctccttcctcccctccgcgctctccgcccgcaaggagggagcggtgaaggactcggcgttcttgggcgttcgtctcggcgacgggctcaagctggagaccagtgctctcggccttcgcaccaagagggtgagcacgtcgtcggtggccatccgcgcgcaggcgtcggcggcggtgtcgtccccgacggcgacgccggcgtcgccgtcgggcaagcagacgctgcgcaagggcacggcggtcatcaccggcgcgtcgtccgggctcggcctcgcgacggcgaaggcgctggcggagacgggcaggtggcacgtcgtgatggggtgccgcgacttcctcaaggcgtcgcgccgccgcaggccgccggcatggagaagggcagctacaccatcgtccacctcgacctggcgtcgctcgacagcgtcaggcag

SEQ ID NO: 408082 - DNA, 504 bp, Oryza sativa
ctaaacctcgcccttcgtctccgcctccgtcgcctccatctcgccgcgatccctctccccggggccagtgccggggtccgcgaggaagctggtgcaggggctgaaggagatcgtgaaccggcccgacgcggagatctacgcggcgctgcgggactgcggcatggaccccgacgaggcggtcagccgcctcctctcccaagatacgtttcaagaggtaaagagcaagcgcgacaagaaaaaggaggttaataaggaggcgcttgagccaaaatctagaggagcagttaactccaatagtcgagccactagagctggtgcagaccgtagtggacgaagcagttcagttcagtctggatcaagtggtgctgataacatgtcctcaaggtcatcaatattgggacctggcgtgctagcaactaattctacacagaagcaaactgttccaagttctactgtaaacagggatgttctttacgatggatcttttgagcaatgcaccatcgt

SEQ ID NO: 408083 - DNA, 530 bp, Oryza sativa
atcagctctagctagctacaggcatcagtggtcagtagagtgatcagttgcaactagctagctagttagattatatcttcagtgatggctccggcctgcgtctccgacgagcacgccgtcgcggtgtcggcggagcggctgtggaaggcgttcatggacgcgtccactttgcccaaggcctgcgccggcttggtcgacgacattgcggtcgaggggaacggtggtccgggcaccatctacaccatgaagcttaaccctgccgcgggtgtgggaagcacatacaagacccgggtggcggtgtgcgacgccgcaagtcatgtcctaaagtcggatgtgctcgaggcagaaagcaaggtggggaagctcaagtcacactcgacggagacgaagcttgaggccaccggcgatggctcctgtgtggccaagctcaaggtggagtacgagctcgaggacggcagcttactgtcgccggagaaggagaaggacatcgtggattgctactatggcatgctcaagatgatcgaggacta

SEQ ID NO: 408084 - DNA, 541 bp, Oryza sativa
ttcatctctgggaagatacctccggccatctctggaatgaggatactcaactatctcaacctgtcccggaaccatcttgatggagagatacctccatccattgcaacaatgcagagcttgaccgcggttgacttctcatataacaacttgtctgggcttgtgccaggaactggtcaattcagctacttcaatgccacatcttttgttggtaacccaggcttgtgtggaccgtacctcggaccatgccgccctggtgttgctggcaccgaccatggtggtcatggtcatggcgggctatccaatggtgtcaaactgctcattgtcctaggcttgttggcctgctccattgcatttgctgtcggggcgattctgaaggctcggtcgttgaagaaagccagtgaggcacgtgtgtggaaactcacagcattccagcgcctcgacttcacctgtgatgatgtgcttgactgcttgaggaagaaaacgttatcggcaaggtggtgctggaattgtgtacaagggggctatgcctaacgagatcatg

SEQ ID NO: 408085 - DNA, 492 bp, Oryza sativa
  unsure (1)..(492): unsure at all n locations
tcgcgtgtactggagaagcgaatggggaagcgtcagcagcagcggcggctcgtccgcttcgccgtcgccgccgccgtcgttgtcgcggcggccctcatcctgaccgcttcggccaagaagtccggagatgtcacggagcttcagatcggtgtgaagtacaagccagagtcatgcaccctgcaagctcacaaaggagacaaaatcaaagtgcattatcgtgggtcactcactgatggatcagtgtttgattctagctatgacagaggtgacccctttgaatttactcttggaaacggccaagtgataaaaggttgggaccaagggttactaggtatgtgtgtcggtgaaaagaggaagctaaagatacctgcaaagatgggttatgggagnaggaggctccccaccgaagattacaggtggagcaacactaatctttgacacggagcttatcgccgtcaatggaaagacaaccggtggtgctagcaatagtga

SEQ ID NO: 408086 - DNA, 555 bp, Oryza sativa
tttttagacttgctcgcaaagagtgttgagattgcacgttaagcgcgtgacatgtttctgaaggaacattcagatcgtcccatacaacatcctatcctggttgcagcttccattgcaagttatggggcctatcttgctgacggctctgagtacagtggggattatggcgaagctggcacgttagaattcctgaaagattttcataagcgaaggctggaggttcttgcggaagcaggtcctgatttgatcgcctttgaaacaattcccaacaaattggaagctcaggcttacgttgaacttcttgacgaatgtaacatcagtatccctgcatggatctcatttaattcaaaagatggagttcacattgtgagtggagactcgctaattgaatgtgctactattgctaatgggtgctcgaaggttggtgcagttggaataaattgcacacctccaagagttatccatggcctgatactctccattcgaaaggtcacagataagccaattctgatatatcccaacagcggagaaagatatgatgctgagaaaaggagt

SEQ ID NO: 408087 - DNA, 460 bp, Oryza sativa
tttttcgaattcccaagcaacccccccacacccagctgagtagctgacgcagcaccagcagtcgcggggaaagggacacgtctcgccgccccagcttcccgcctccctcccatcccgccgccgcggacgcgtccaagccacagcaacagcaaccactccgacgaacacctcgcctgcgcgatggtggcggcggcgctggacgcgatggcggggacgaggtgggggaggtggctggggctcgtgacggcggtgtgggtgcagtgcatctccggcaacaactacaccttctccaactactcccactccatcaagacgctcatgggcctcacccagctgcagctcaacggcctctccgtcgccaaggacgtcggcaaggcgttcggtcttctcggcggcctcgtcttcgaccgcgttcccacctggcttttcctcgccgtcggctccctcgagggccttctcg

SEQ ID NO: 408088 - DNA, 528 bp, Oryza sativa
tctttatgggaggcaccatcataattatatgatccagcattatgaagtaaccatcaactgatctaagctgggagagtactgtaagctgtggcaccggggatggccaacctcattggctactgctgcgacagcgacgagcggcttctcatcgccgagttcatgcccaacgacaccctcgccaagcacctcttccactgagtttcctccctccctccagtcccctgcaatttaactccgggtctctatattcccctcccatttgatgatcctaccaacgattggatccttttggtcataatggatgttgctgtgcttcgtgtgctacctcttcagttctgtagttacgcagccaatggtgcagcgagcttggatttttatgatgaaatggctagcttcggtagctgatttagaattttgcagcggcaaaataaaaagtgatagctgaaggaaaatcttggattcatggtagtattcatgcacatcaactggcattagacaatctcacatttttgctgcttatttacacac

SEQ ID NO: 408089 - DNA, 442 bp, Oryza sativa
tcggtggctcctcttcttcttcttcttcttcttcttcttcttcttcgccgtcgccgtcgtcttgttctcctccgtctccgtcgcccagatacctgggttccagagcatcgactgcgggggctccggcaactacaccgacgaggtcgggctggagtggacgggcgacgaggcgtacgtgggcgggggcgcaggcacgacggcgagcatctcgtccatctcggggcaggggcggcggccttacaggacggtgcggtatttcccagcggacgggcgcaagtactgctacagggtgagcgtgaaggccaggacgaggtacctggtgcgtgcgagcttcctgtacggcaacttcgacggcagcagggtgttcccggagttcgacctgtacgtgggcgcctcgcggtggtccaccatcgtcatctacgacgagtccaaggtggtgacg

SEQ ID NO: 408090 - DNA, 545 bp, Oryza sativa
  unsure (1)..(545): unsure at all n locations
cattgtcaaccctcatctccccccctcctctccaccgacctcgatctcgcccctccccccacgcgcgcgatctcgcccagatctcgctgagccgccgccgccgccgcagcagcagcggccatggagaacctgatctcgctcgtcaacaagctgcagcgggcctgcaccgccctcggcgaccacggcgaggagagcgccctccccaccctctgggactcgctgccggccatcgccgtcgtcggaggccagagttcgggtaaatcctcggtgctggagagcgttgttgggaaggatttcctaccaagaggctcaggcattgtcacccgtcgtcccttggtgctgcagcttcataggatcgacggagacagagaatatgcagagttcatgcaccttcccaggaagagattcactgatttcgctcttgtgaggaaggagatagctgatgaaactgacagagaaactggtcgttcaaagcaaatatcatcggtccctattcatttaagcatatattctncaaatgttgtgaacctgactcttatcgatct

SEQ ID NO: 408091 - DNA, 544 bp, Oryza sativa
ttagatcgcgagggccgcccttttttttttttttttgatagacagtggctttttgatcccatatatccaaaattattacaaaattttggaatttgtgaagccaagcagtttggatgttaaaagcaaaacagaacttaaatgtgaatcgcctttgtgaaggtttgcaggcaggcctccttcaaggcttcgctcacggtgggatgagcgtggcatgtacgagctatgtcctcacttgatgctccatactgcaaagcaaggacagcctcatgtattatctctccagcaccgggagccatgatatgcacgcccagaatcttgtcagtttccttctcagccaccaccttcaccaagccctcagcatcgtcaatggcctttgcacggctgtttgccaacagcggaaatttgccaacacggtagggaattcctaaagctttcacctgctcttcagtctttccaacagacgcaacctctggatgtgtatagaccacaccaggcactgtgtcatagtcgacgtgcccctccttgccagcaatgaactcaacac

SEQ ID NO: 408092 - DNA, 508 bp, Oryza sativa
tgtttgttgtagagagcacaacaacgtacgtacacagcagcaaagactgagactagctagcttagctgacatggctccaaggtgcgcgacgctggcggtggtggtggtgctggtggcggccgtggtggcgccgccgacggcggtgcgcgcggcgatctcgtgctcggcggtgtacaacacgctgatgccgtgcctgccgtacgtgcaggcggggggcacggtgcccagggcgtgctgcggcggcattcagagcctgctcgccgccgccaacaacacccccgaccgccgcaccatctgcggctgcctcaagaacgtcgccaacggcgcctccgggggcccctacatcacccgcgccgccgcgctccccttcaagtgcaacgtctccctcccttacaagatcagcaccagcgtcaactgcaacgcgataaactagggcggccggcctgatgcgtacgtgtgtgcccgcgccttccgtacgagaggagaataaaatgtcattagtaccatc

SEQ ID NO: 408093 - DNA, 514 bp, Oryza sativa
gtttgtgatctctttagctcggatcatctctgcatttgcatttgcagctgctcgtcacggcaatggcatccaccaacagctggacccacgagatcgagtcgccggtggccgcgccgcgcctgttccgcgccgccgtcatggactggcacacccttgcccccaagatcgcctcccacatcgtcgccagcgcccaccccgtcgacggcgacggcagcgtcggcagcgtcaggcagttcaacttcacctcagccatgccattcagccacatgaaggagaggctggagttcctggacgtggacaagtgcgagtgcaagtcgacgctggtggagggcggcggcatcggcaaggcgatcgagacggcgacgtcgcacatcaaggtggagccggcggcgaacggcgggagcgtcgtgaaggtggagtccacgtacaagctccttcccggagtggaggtgaaggacgagatcaccaaggctaaggagtccttcaccggcatcttcaagaccgccgaggccta

SEQ ID NO: 408094 - DNA, 486 bp, Oryza sativa
tggacgcgtgggattttttttcccaaatccatttattttcctctcttctctctctcgaatcgaatcgaatcgcctcgcctcctttgttgaattgaatccaagctcgattcgccgccgccgcacgccgccatgggcaactgctgcggcacgccggcgacggcggaggagggcgggaagaggaggaggagggggaagcagaagaaggcgaaccccttcaccgtcgcgtacaaccgcgcgccgtcgtcggcgggggcggcggcggggaggcccgggctgatggtgctgcgggacccgacggggcgggacctcggcgcgcggtacgagctcggcggcgagctggggcgcggcgagttcgggatcacgtacctgtgcacggaggcggagacgggggacaggtacgcgtgcaagtcgatatcgaagcggaagctgccgacgcccgtggacgtggaggacgtgcggcgcgaggtggagatcatgcgccacatg

SEQ ID NO: 408095 - DNA, 504 bp, Oryza sativa
tttttaatttacctcctccacctcctcctcctccccccgatcggatcggcccggctcctcctcctccgccgccgccaccgccgccgcagataggagaagatggccgcacttgataccttcctctttacctcggagtctgtgaacgagggccaccctgacaagctctgcgaccaagtctcagatgctgtgcttgatgcctgcctcgccgaggaccctgacagcaaggtcgcttgtgagacctgcaccaagacaaacatggtcatggtctttggtgagatcaccaccaaggctaacgttgactatgagaagattgtcagggagacatgccgtaacatcggttttgtgtcagctgatgtcggtctcgatgctgaccactgcaaggtgcttgtgaacatcgagcagcagtcccctgacattgcacagggtgtgcacggtcacttcaccaagcgccctgaggagattggtgctggtgacccaggacacatgtttggatatgcaactgat

SEQ ID NO: 408096 - DNA, 553 bp, Oryza sativa
  unsure (1)..(553): unsure at all n locations
ttcagagaaaggcgtcttcgtactcgcctctctccgcgcctccgcgcttttcctcctcctctcccctctctcccttctccgccgccgtcgcagcatcaacccaatccgccgccatgagggagtgcatctcgatccacatcggccaggccggtatccaggtcgggaacgcgtgctgggagctctactgcctcgagcatggcatccaggctgatggtcagatgcccagtgacaggactgttggtggaggtgatgatgctttcaacaccttcttcagtgagactggtgctgggaagcatgttccccgtgctgtatttgttgatcttgagcctactgtgattgatgaggtgaggactggttgctaccgccagctcttccaccctgagcagctcatcaatggcaaggaggatgcagctaacaactttgcccgtggtcactacaccattggcaaggagattgttgatctgtgccttgaccgcatcaggaagcttgctgacaactgcactggtctccaaggtttncttgtgttcaacgctgttggaggtggaacgggctc

SEQ ID NO: 408097 - DNA, 448 bp, Oryza sativa
tcgtttagcgcctacagcgcgcataacaccaggagctagatataatgatacggggaccgatcaccacatacatcgccttctccggcttcgcgaccagagagacgagggcgtgctggtgctgcagttcgcccaaggcggcaacctgcccgaacagctcgaccaactgcagcggcccgtgggtgacgcccagggcgacctggttcgggcaggccttcgggttcgggtgcaccgtcagatggccgcgcctgccggagcaagaacgacaacctgcctgcctacaacaggatgatctactgcgtgatcgacccaatcttgaaggacgagatgtgatgctgctcatgctactaggcgaagtgtgagcagtcggtgcagtgctcgaagcagccggcgacggtgctcatcacggacatgaactacgagtccatctcggcgtaccacttcgacttct

SEQ ID NO: 408098 - DNA, 538 bp, Oryza sativa
tctgtttagagctcatcaccacgcctctcgcctcacatcataccaagtgtcctccttcctcctcatcctccccaaccactgcatccgggtcggcgtcctcctcctcctcctcctcctcgcagaatgcaacgggcaattcaagctatcgggtcacatggcagtctcctcaagtctgctgttctgcgacacatcagtgctccaaaaccatctattttacctgctgtatattcacgctccatgtcagtttcatctgctcaaatagaggagagtggatttgagactgccactgtggcagatattttgaagtctaaggggaagagtgctgatggatcttggctctggtgcactactgatgactctgtctatgatgctgtcaaatctatgacgcaacacaatgttggagctctggtggttgttaaacctggacaggataaatcaattgctggtattgttactgagagagattacctcatgaaaatcatagtgcagggacgatctttcaagtcaactaaagttggagacatcatgacctgagaga

SEQ ID NO: 408099 - DNA, 459 bp, Oryza sativa
cttctacctgtagcccgcttcagtccgacgaccatggccactcctttgctcgccgcgctcctcgccgccgcgctgctcgcctcgccggcggcgccggcggcgtcggccagcggaggcaccatcgtcttcaccaccctcggccgcagccgctacgagttcgacatcttctccctccccctcgcgccctccccccataaccccgccgccgacgccgagctccgcctcaccgatggcgtctccgtcaactacaacggcaacttcgcccccgactacgattccatgctcttcgtctccgagcgcaacggctccctcaacctctacctctgcccggatccctactcccgccgcgaggcgctcgaggcggcgtcgtcgtcagcgtcttcggcggcggcgacgatctcgccggtcctaccatgggagccaatcgcgctcaaggaccggtcgtcgctcacccccgac

SEQ ID NO: 408100 - DNA, 508 bp, Oryza sativa
ctccttagcgccgccgccgccacacactcccccacagctccccttcccttccactcctcctcctcctcggatcgggaggcggagcgagcaatcccccaaggaatttgtatttgtagcgtgatttgcaaagctagtcaagatggtgaagttcacagtagaagagctccgccggatcatggacaagaagaataacatccgtaatatgtccgtcattgctcatgtggaccacggaaagtctacacttacggattctcttgtggcggctgctggtattattgcccaggaagttgcgggtgatgttcgcatgactgatacccgtgcagatgaagctgagcgtggtattacaatcaaatccactggtatctctcttttctatgagatgagtgatgaatcactcaagttgtacaagggtgagagagatggaaatgagtacctgatcaaccttattgattcacctgggcacgttgatttttcttcggaggtcactgctgctcttcgtaatactgat

SEQ ID NO: 408101 - DNA, 458 bp, Oryza sativa
  unsure (1)..(458): unsure at all n locations
cttttccccatccatcctctcctccgactccgagctcccttaaccgcagcgccggccgatccgccgccaccgccaccgccaccgccggcagctcgatcccccgcactcgggggggttttggaattggcgaatggtggcgaacgaggtggttgcggcggcggcggtggtggaagaaccggcgcccgcgtcggcgggggcggttgacccgatgaggctggcgtcgcggtggcggtcgccggcggagtggggggccgcggcggccgagatggaggcggagccggcgccgtccgagctcaacaccaccaacagctcgggcctcttcgccgtcgtctctaccgaccggatgtccgtcaggtacctcggcgtcaaccagcacgngcacgacgtcggcgtcgtgcaggccaaccgncccgccctcacgcgccgtgccgtctactacttcgagatgggcgtcaaga

SEQ ID NO: 408102 - DNA, 493 bp, Oryza sativa
tgttaagatgcaggagcactttgaggatttctatgaggatatctatgaggagctgagcaagtttggtgaggttgagaccctcaatgtctgtgataaccttgctgaccacatgataggcaatgtgtatgtccagttcagggaggaagaacaggcagtcgctgcgcataatgcccttcaaggtcgcttctactcagggcgcccaataattgttgagtattcccctgtgactgatttccgtgaggcgacctgtaggcagtttgaggagaacagctgcaaccgtgggggctactgtaattttatgcatgtaaagcagattggcagggagctcaggaggaagctttatggggggcgatccaggaggagccatgggagaagccgcagcccaagcccacgccacaggaggggcaatcgtgaccgtgatgatttccgccgtgaacgtgatggttatcgtggtggtggtgatggttaccgtggcggcggcggtggcggtggt

SEQ ID NO: 408103 - DNA, 522 bp, Oryza sativa
gtagagagagagagagagagagagagacgcaggtctgttcttcttctcctctctggaaatttctggatctcgcgagagatcgggaggacgatggtgggtgggcgcgcgctcctgccgctgcttctgctctccgcgctgctcgtccagatccgcgcctccgatccgctgttctatgagccgttcgacgagagcttcgaggggaggtgggttctctccgggaaggacgactacaaaggtgtatggaagcacgaaaagagtgatggacatgaagactatggcctgcttgttagtgagaaggccaagaaatatgccataatcaaggagcttgatgagcctgttactttgaaggatgggactgttgtcctgcagtttgaagtgaggcttcagaatggccttgagtgtggaggtgcatatcttaagtacattcgtcctcaggatgctgcatgggatgccaaggagtttgataatgagactccttacactattatgtttggtcctgacaaatgtggatcaactaacaag

SEQ ID NO: 408104 - DNA, 393 bp, Oryza sativa
cttcgtcatgtgcgccgaccgctgcgacattccggcggacctttatcagattgctggggttatccccaaccagatcagggagaccgtcaccaaggacctgcactcgacgttgctcctgtcgtattcgacgccgtcgtaccgcatcgacattccgatcaatggccagagccagatggactacatctgcagagatgccatgaagcacctctccgacaggctgaagaatgtgctccgaccagagccgtagaccgattccacggcactgtcttaccggagatgaaccgcttccgcgtatttcaacgaagagcctaggcctcaccccaagcattgacgtggcatggaagtgcaagataaggggcaaggatgagaataattctgctatcgagttcgact

SEQ ID NO: 408105 - DNA, 361 bp, Oryza sativa
  unsure (1)..(361): unsure at all n locations
tcttgtactgctgggtatggggcttcgtcgtcgcgctcctggctgtggcggcggcggcggatggggaggaggaggaggggaagtggnatccnctgattnctatgccgtctgaggaaggggacgacgctgatgctgctgttcctgctcctgctcctgcggttgcgtattactgcgggacgagcatggccatcctcgtatcctgcttccttcacctactggaactacctgcaccagaccgatgtgtgccatgcgtaccagattctgcagaagggagcagtgaaggataacaacatcttcctgtttatgaatcgtgaccttctccataacaatctctctccaaggcctgttaccatcattcaac

SEQ ID NO: 408106 - DNA, 559 bp, Oryza sativa
tgttaaaaaccccctcgaaacccaaggcggcgggcgtggtggtggactggactgttttcacctcactccgcctcgtccccgccccaaaggccacgctcccctccctcccaccaacccaccaccagcgtcacccatggcggcccagcgactcgccgccctccacgccgccgcgccgtcggccttctcctccacctcctccgcctcgcatggccgccccgcggcgcgatccagcaccaccgctctcctcccggtggccctcccgcgcgcctccgccaccctccgcgccgcaccttctcggctcctcccccaggaggcgaaggcggcggggagcggcaggtcggtgatgtgcatggcgtcggcgtcggcgtcggcggcgtcggcggcggtggcgtcgggcgcggcggagctgaaggccgctcgcgaggacatcagggagctcctcaagacgacgcactgccaccccatcctggttcgtcttggatggcatgattcccgtacgtatgacaagaatattaaagagtggccacaacgaggtggagctaatggagcttgagattga

SEQ ID NO: 408107 - DNA, 434 bp, Oryza sativa
  unsure (1)..(434): unsure at all n locations
tnctccctttctgaacacagcaccaccccttctggtggattttccacctccctgtgaattgtgggcctgaggcgatggcggcgctcgccccgtccaagatgctcggcacccggctcaacttcgccggctcctcccgctacgccaccgcggcaccgaccaccggagcgcagaagatcgtctccctcttcagcaagaagcccgccccgaagcccaagcccgtcgacgtcacctactcgagccccgacatcggcgatgagctcggcaagtggtacggccctgacaggaggatcttcttgccggaggcgctcctggaccgctcagaggtgccggactacctcaaccgagaggggcccggagactacggctacgacccttttggccttagcaagaagccagaggacttcttcaagtaccaggcctatgagctgatccat

SEQ ID NO: 408108 - DNA, 539 bp, Oryza sativa
ttattttgcaagggacaatgaaatctgctactcattgttctcaccatcctgctgcaactggcactttcttcactgcaatgctcctggggctgaaattttgctcatgccagtctcagtctaacttgcagaaatgtaatatgggacttcagttattagaggacagggtataccgtgctgctttgggatggtttgcttatgcacctgagtggtatgaatctcaaaacaaaagttttgctcagagagaggcccaatccgtgtcaatatttgtccattgtctacaaaatgagcgccccagtggttctgctgattctgctccgaagtcacagggacgtgaaggtgaacccaatatgctggatcagaaccaccctgtctggggctcagtggataactatacaactgtacgggaaaagcgtaaacaattactttttatgctttctcagaatgaggcagacagacttgaagtgtgggcacaaccgataaatacaaaagatgcagcaacatttcgtggtaaaattagcttagataaaaggattgatcat

SEQ ID NO: 408109 - DNA, 498 bp, Oryza sativa
tttcttattgattgattgatgtatgggtatggggggcggtgtggtgatggtgatggtggaggcgacggcgatggcaatggcggtgcaagggagccgtgacccggatttcttcgtggagggcgacgtgtactgcgacacgtgccgcgcgcagtttcagacgaacgcgacgacggctatccaaggcgcgcgggtgcggctgcagtgccagcacttcatgagcgctagcgtgcccgtggagagatcggcggaggggacgacggacgcggcagggcactaccgcattgagctggtggacaacctcggcaccaacgaggtgtgtgcggcggcgctgcttagcagtccggaccccgaatgccacaagaccgaggtgggtcgcgaccgcacgcctgacaccctcgttcaggacgtcggcctcgccaccatggtccggcgcgccaatcctttcggcgttcttaagacccgtgcactccctatttgtggtgaccttctcaagagcta

SEQ ID NO: 408110 - DNA, 461 bp, Oryza sativa
tttgtgacatgggagggtttgtcaagacccaggagagccatgtctacttcaagcgtgggcaagacaagctcaagagacggaggcagggcaagactgactacagggccaggattaggctcaccaaccaagataagaacaagtacaacacaccgaagtaccgctttgttgtgagatttacaaacaaagatatcacagctcaaattgtctatgctaccattgcgggtgatatcgtgatggctgctgcctactcccatgagctgcctcgttatggacttgaagttggtctcaccaactatgcggcagcttactgcactggcttgcttctggctcgccgtgtgctcacgctccgtggatcggaccaggagtacgagggcaatgattaggccactggggaggactacctatgtgaaccagctgatgaaaggaggcctttcccggctctttgggatgtggcctcatta

SEQ ID NO: 408111 - DNA, 558 bp, Oryza sativa
  unsure (1)..(558): unsure at all n locations
tttctgtcgcgtggggccgtttgtgtgcccgcaacacagacctcggagaaagctgcaccactctctagtcttctcagttccctggttgcaaagggattgatttcttcgccttctgcagattcaactgtagcgatcccacaacagccctgtaaatcagaactgaacacaccagatgacactgcttcagctccatctctgccttttgtccagccttcagttaaaaaggaaacatccaatcaaaactcatctgccccatctaaggtgctggtgcatcaacctgttgaaatcaagaaggaacctgcagaaatcaagatggtagaccttattggctttgacttcaagcctgagatgctccgcaagtaccatgcacatgtgatcagcaccctctttgatgaccaaagtcatcaatgtaatacatgtggtctaagattcagtcttgaagaagagctctctgtgcacactgcgtgccatggatcgaagcanagtgagactagaaagactggtatcgcacctgaaaaatgtaccctagcaaaataattgggtcgaagatcacatgag

SEQ ID NO: 408112 - DNA, 506 bp, Oryza sativa
ggtgtctctcactcgctctgtacgtacgttgccgtctgcccatggcgtcgcggtcgctgttcgcgttgctggtagtggcggcggcgatgtgtgcgtcggtggcgtcggcattgcggagcagggcggcgaccgacccgaacatggaggtgaagttcgacttcacgccgtttctgatccagtacaggagtggcagggtgcagaggctgatggggacgacggtggtggcgccgtcgctggacgtgcgcaccggggtggtgtccaaggacgtggtcgtcgaccggagcacggggctcgcggtgcggctgtaccggccgaagcaccggggcgggaggctcccggtgctcatctacttccacggcggcgcgttcgtcgtcgagtcggcgttcgacccggtgtaccacaactacctcaacgcgctcgcggccaaggccggcgcctcgcggtgtcggtgaactaccgtctggcccccgagcacccgctccccgcggtgtacgacgacgcgtgga

SEQ ID NO: 408113 - DNA, 557 bp, Oryza sativa
tttttcggcggcggcggtggtgatgccaatggcggtggattcagtggaggagcagaagaagggctgtaccggctctcctctgttggagaagagattgataatctgagtaacttgtccgatattgatgatcttgcgagcacttttgcaaagttgaaccgaaccattagtggaacacggaatcctggtgttattggtgacagacgatccatctcaagaggaagttctctaactgttgattgggctgaagatgtagaatttcctaactgggtagatcaagacattttagaggatgaggaatttcaggaaagtaaaagatggtggtcacagtcacacactctggtgcagcaaggggatgccaaaccattgagccgaacatcttcctatcctcagcaaccactgcagcaccgggcaagtgaacctatcattccaccaaaatctccttcatttacgtcctttccaccgccaggtggtagatcaccttatacttctcaaggccttacacgccatgggagcattccatcacttgggtgctgcctgcaaatgggttcttcaagcat

SEQ ID NO: 408114 - DNA, 537 bp, Oryza sativa
tcgttgaagtgaaacagcaaaaaaaatcaaacagaaagaaaaaatattccccatctgtgaaattcgcaaaaccctagcgcggcggcgatgtcgaacacgagggtgttcttcgacatgaccgtcggcggagctccggcggggcggatcgtgatggagctgtacgcgaaggacgtgccgcggacggcggagaacttccgcgcgctctgcaccggcgagaagggcgtgggcaagagcggcaagccgctgcactacaaggggagcaccttccaccgcgtgatcccggagttcatgtgccagggcggcgacttcacccgcggcaacggcacgggaggggaggtcgatctacggcgagaagttcgccgacgaggtgttcaagttcaagcacgacagccccggcatcctgtccatggcgaacgccgggcccaacactaacgggtcccagttcttcatctgcaccgtgccctgcagctggctggacgggaagcacgtcgtggtcggccgcgtcgtcgagggcatggacgtcgtcaaggccatcga

SEQ ID NO: 408115 - DNA, 362 bp, Oryza sativa
gcagtaaccaaatcgattcacaggccacacatacaggtagtatacagattcgtctacacacaaggttattgcagaggcaaaacacgaggtatgtatatcaaacgctctagaaaagattcatgtgatgaaatacatgatgaaccacgtatgttctcaaggtaaaattaattaatgcagtatagttttaactttgtccatcgatctcaacctgtaactgtgacgacacactggctacagtgccctcgaggtactagcagtatagcagtagctgtagtacgtagcagcagcagcagcaggttcactgtcttgattggattggatcggattagtagacgtagttcttgacgaacatgccctccttg

SEQ ID NO: 408116 - DNA, 485 bp, Oryza sativa
gccagatcattatagaagtgctacgagcgtactgctcccctccttcagattggatcctcttcttcggccgcccctccttttttttgtggttttttttttttttttttttttttttgatcccaaatgatctcattgattgatagcgatttcatagaagcagcgacacgaattaagatttaaaaccaaccccaagaaggatcgcaaatccaactccaccaaattgatccaagaactccggctaatccaaccaaaccatgggcgatctcatttcaccaacacgacacgaactcataaaaagactaacaccaccaccacctgctacttatttagggactcgacgactcaagacgactgatactggcaaaaggcgaaggggaacagcacagatctaggagagctggccgcagtcggcgatgacaaccggcttggcggtgctcccgcccggggatcccacctttttgatggccttgacgacgttcatgccc

SEQ ID NO: 408117 - DNA, 328 bp, Oryza sativa
ttgggttaagaaccaaaccggacatatattattattgcaaagggggggcaccagtcaaagggcctctaagcgaaaccaggcgaataattcaatttccaagggtggtagaaccggattaccatttggcgtgacataactcaaaagcccaggccaaagcagatgaaccatcatcgggtcatttatcagttgcccgaacacaccgcaggcaggcaccttcatgcagcaggtcaaacgccttggtgatgtcagtcaggttcatgccgggaggaacgtacccgtccaccttgatttccttggtcaaggacttctcaacgagccatggaacttg

SEQ ID NO: 408118 - DNA, 423 bp, Oryza sativa
gaacacaagaacaaattctgacattcattgctttaattttttttatacaattacaaagctacaaactgttccactcacttccacagagtaggcatttagctcagcgacattggagatatacaactttgataaatatcatctagctatgtgaaactagaaactcctcagtggaaaaggacataacttaaaacttcacaataacatcaaagccgagtttttcatgtgagcttttctatttccaaggtttcagatctgctacaggccccgcagtccagttgagatgcttctcgcctggctttaagtatacactgtctgggtgtgggagctttcgagcaaggccgttgaggatctgatggaatgcatctctaggttgtgctggctgcggaaacaacatggcctgtttcattgatggattggcgagta

SEQ ID NO: 408119 - DNA, 331 bp, Oryza sativa
gaaccgaactccaataggaggaggatagcttaatttgcacatagtaaaagagggatacacaactgagtactgaaattacaagtctgtgttcagataaaaacagtagtacaacaaacttgaagaggaacgtcgactccacaataattactaacaaagcaggcagcgggaaacagccgtcgcccatcagaaacagcttgctctggattggcatcttgacagtgataatagctgatgcaggttacgacctgctcttgaatggaattgccctgatgaccacctggtggtagatggcagcaagggcagcgccaatgaaggggccaacccataagat

SEQ ID NO: 408120 - DNA, 384 bp, Oryza sativa
aaacagcaatcatccccaaagatccaaacagcacattttttattatagcagaggggtgtcacagttcaaagggcttttaagcgaaacggggagaataattcaatttccaagggtggtagatctggattacaatttggcgggacatagctcaaaagcccagccaaaagcagatgaaccatcatgggttcatttatcagttgccagaacacaccggaggcagccaccttcatgcaggagggcaaacgccttggtgatgtcaggcaggttcatgctgggggtaacgtactcgtcccccttgatttccttggtcaaggactttttaacgggccatggaacttggcttcggctcttgaaaccgccgaaaggtgttccctttcagacacg

SEQ ID NO: 408121 - DNA, 415 bp, Oryza sativa
agagcgcataaatcgtaacgctggctagactatacaaaggtgcacgagcttgcatataaaccaggtcaggatacaaaatgcccgcgggcataaacatctggaataacaattaggtttgacatggcactaccaaatgtccaaatcaagtaccgaagcaaactaggcgagctgaaagttcactgcggcttgggaacaggttcgagggcttcaatcatcacaacactgtttcccctgataaccaccatccctatgtcattcttgtcgtttccattgacctccactgtgttgtccacgaccaaattcataaactgatcgaatcctggaagagtgccaatgacaacacggttcgcattcagcttgatttggagcttcttgtccatgtacttcttcagatccggaggctggcccgatcggc

SEQ ID NO: 408122 - DNA, 403 bp, Oryza sativa
  unsure (1)..(403): unsure at all n locations
aagtaaatatatcatatattcgattatatatatatatataatagcagacaggttacatccattagaactcagaatcaccggaattgaacatcaaaagtacaacacaagcagcagcagcatcagccagcagcaaacgacatgattacccacgcttttggatgaagaacaangaagtacgagaagaagaagacgatggtcgaacaccttgatcgagctcaacaatggcgatcgatcaccaatcacctacttggtgaactcgatggcccaggcgttggcgtagatgtaggtggccttgaagccggtgaatccggcggcgcgggcgagctccctgaactccctctcgtacctctccttgccgccggggttgtgggcgagcatgatcatgtcgacgtggaacaccccc

SEQ ID NO: 408123 - DNA, 309 bp, Oryza sativa
gaaggaaaaactatgtatagcttgaaaagcatctaagcaaagataactacagcatccgacgtcccagttatactgagaaaacctaattttatggactatccctattacaagataaccttttcataactagggcaaacatccgacaaggtacaagcacacctgatcttacgattccatttttttttttgtttgcttttccaacaaatgcaacattagccctagtcacattaacatacaaacaagtcaatgtaaaagattagaaaaagctttacagtgaagatccaaccggcatgcacggctatctttgga

SEQ ID NO: 408124 - DNA, 397 bp, Oryza sativa
aagatccaaacagcacatatattattatagcagagtggtgtcacagttcaaagtgcttctaagcgaaacgagcagaataattcaatttccaaggctggtagatctggattacaatttggcgtgacatagctcagaagcacagccaaaagcagatgaaccatcatcggttcatttatcagttgccagaacacaccgcaggcagccaccttcatgcagcaggtcaaacgccttgttgatgtcagtcaggttcatgctgtgagtaacgtactcgtccaccttgatttccttgttcaagtacttctcaacgagccatggaacttggcttcggctcttgaaaccgccgaaagctgttcccttccagacacggccagtgacgagctggaatggtcgtgtagag

SEQ ID NO: 408125 - DNA, 395 bp, Oryza sativa
gctcccacaaacattcaatcaactctgttcaccagatatattactactaacccagaagacatctctaaattagatgctccgatttgctaatgagcgatagagatttacataatggagaggtgcgaatgttgtgaatctgcagatacactgaaacatgctgatacgtcctcccccggtctctgaatctggtgacaatcagagcacacgcaaaaatgggggcggatactcctactaggataatgcatactactacaacaattggtttggggggagccctcgcccctcagtctactccttgttccgggttgatcggtctttcttgtgcccgccaaggatacgggagatctgcagacctctgctgaaggcctggttgaagagcatcctggtctggaact

SEQ ID NO: 408126 - DNA, 409 bp, Oryza sativa
gtaccagtctaaaagcagccttcttttactcttgccacataaacatattcagtttaactacacttttagcaccctgtgtggatgtcatgtgatgagaggcaggaccgactgacttgttcactcacgggattattcaagctgccaggctctttgaagctatctcgtacacatttctctgataggcccattggctgacacgatcatctccagctgagccttagcaagagcttgtctgctctcatcatatcgcctccaccgagagaaagctgacaccatgcgggaggccacctgaggatttatcttgtctagctgtaaaacaacttcacccaagaacttgtaaccagagccatcttttgcatggaaatttacaggggacccacaaaatcctccaattagcgaatacaccttg

SEQ ID NO: 408127 - DNA, 219 bp, Oryza sativa
acactattggagagccaccacggcagaagcgcgcgcgcgcgagcgcgggccctttttagcgggcgccccctttttttttggttcgaagaccgaagagaaatacccccatgttaggaaaagccaaatctgtatattatattattaataaccaaaacctggcatgcccagctatggcttgggccccgtccggttcacagaacaaagagaaaacataaaaag

SEQ ID NO: 408128 - DNA, 394 bp, Oryza sativa
gataacttaagaattaagatctccatcacataaaaacatacagtgactgagtactggattacacgattgagttgttcagggttcagataggaaaaacatcttggggactagagatagagggaatcgacagatgcgcagcagtagcgcgcgggaaacaggacatcacgattgctgttgcatgttcgtcggctgcgcagcggcggcgcggggcttaagacctgctcttgaatgggatcgccctgatgatcacctggtggtagatggcagccagggcagcgccaacgaagggaccaacccagaagatccaatggtcattccaggcatggtccttgctggagatgaaggcagcgccaaggcttctggctgggttgatgccagtcccggtgatggggat

SEQ ID NO: 408129 - DNA, 361 bp, Oryza sativa
ggaaaaatgccttttttatcaccagtatatatagatggcctgaatctattaaactaaaatcatccttgcttgcaaaatctgaagtccaaaaagtaaaatcctagaagtacaaaatctgaagaagttctcaactaggacaagacatcttattattcatacaaccaaaactagcataacaaaaaagcactccaaaagctgccaacagggataataatccaactcaaacctaactttttatcatcttcctgaaccaacgcgttgagtctttagggcaccgcgtgaaagggctccgggctacatagaccattccaaattttgaagtgaacccgagccgccactcgaagttgctaagcagggacca

SEQ ID NO: 408130 - DNA, 403 bp, Oryza sativa
gatacccaaatgaaatatactcatgtatagtatagcccatatctttatattatattattattaacaaaaacttgtcatgcccagctatggcttgggcgcgatctgatacacagaacaaagagaaaacataaaaaggagaaataattaatagcaagcgtcaagccggcctgcttaaaaggtgtaaaggcagctgccgtcgtcgctcctcgccgttgggtcgaagttcttggcaacagggtcggtgcaaccttccggcacaggcaggttacctgcttgctgtgctccttgccctcctcctcctatgcaggccgcctacgatgcatcgatgggatgcgaatagctagagatcttttattcaactggatggcgccaaaccgtagaaggaaccaggctttatggcgtc

SEQ ID NO: 408131 - DNA, 294 bp, Oryza sativa
caaataccaagatcgatcgatcgatgtacaagtggatgcattaattcatcatcttgggtgttcttatattacaaatcaccaccatgcaagtcgccattaaccaccaacccagctttcctaatttaagtagtaatcaacaaaaggatgacctctcctttttccatacccttcccagctcgcttcgtcatcacaaaactaaacagttgcgcgcgaacgcacaccaacgcattgatcccgtttgaattgcgcgcgaaagagcttaaattaagaggatgaggagaaggtgccgaagat

SEQ ID NO: 408132 - DNA, 377 bp, Oryza sativa
ctgggaccaaacatctcagaaacattaacagaaggggaaggataatatcatcgatgggccccggtgcacagggaagcaaattgtactagtagggataatagtatcaacacaacttagggactttaaaccagaacacaacacaactcatgaacacgatgatatgacagacgagcggcataggtataatggaagcccaaggctgcaccacagcacacgctcagagaccaccacggaggcgcaggacaaggggcaggggggactccttctggatgttatagtcggcaagggtgcggccatcctcgagctgcttgccggcgaagatgaggcgctgctggtctggaggggagccctccttatcctggatcttggccttcacg

SEQ ID NO: 408133 - DNA, 411 bp, Oryza sativa
aagtattattccttaattaatacacttgtggaaaatttcaagtataagtgacagtaaaaatgaaataagttgacgacagaggagcaatgatagcctaacgcaataaacaggttgtaattaatcatagttaggctatcaattgtacaaatctgtgaatccaacttccaaccagaacaatcgaagtcataaaatatacatttctgtggagcagctatgcataagtgagtgcgcataatcttgtcaaccctcctcgccaaattcttttgtaaacctttcgtgcacctccaagtctttcttgctcactgtcggtctctgcctggcgaggactttctcgaaatctgtccttgagattggtggtggaaggatctttgctgcaaggcccttggatgcgagctcctgcatggttgtttg

SEQ ID NO: 408134 - DNA, 409 bp, Oryza sativa
  unsure (1)..(409): unsure at all n locations
gtccgccggcgtgtccatcagccagcgcgggttcctgatccggcatccggctatcctggtgaggtatgtccggcaatgctccggccacgagtagagctggatgttgngcaggncgttcttccggcactcctgccacaggttcttgtccgccaccagcttcagcagcgcgtcggcaatggcgtgctggtcatgcgggtctaccagcagtccattgttcagagcatttttaatgtcaaccggaccgccgttcttggtggcgacgatcgggcagaccgtgagccgcagcctcgatcagggtgagaccgaaaggctcaacaagagcacgactgatgaagacgcccttaattttncctgtgaggcgataaatatccggttcgcctgactgcttgtgatgcttggggaatgcaac

SEQ ID NO: 408135 - DNA, 410 bp, Oryza sativa
gccggcgtggcgtccgtcgtgacgtcggaccagttcgagcgcatgctgccccaccgcgacgacgcggcgtgccccgcccgcgggttctacgcctaccgcgccttcgtcgccgcggccggcgcgttcccggccttcgccgccacgggcgacgccgacacccgcatgcgtgaggtcgccgcgttcctggcccagacttcccacgcgacctctggtgggccctactcgtggggctactgctacaaggaggtgaagggcgcgacgtcagacttatgcgtgccgaacgcgcgctggccgtgcgcgcccggcaaggcgtaccacgcccgcggacccatgcaaatcgcatacatctacaactattgggcggtcggtgaggcgatcggcgcggacctgctgggcaacccggagctggt

SEQ ID NO: 408136 - DNA, 418 bp, Oryza sativa
ctgtataaaatatggtcccatctaattcaatggcgcaagcaggaagtatcccccctcatggctgagtcccagccaacaaaaataaagtgtgtccaccccaaaaaaatcggcccagttacaacaaatgattcgattcattgtaaaagacacaatagtaccaccacggccacatttaacgctaggataacattggtttaaacttttgtgtaccaaaaccaactaccgatagtgtaagcagctggaacgttattatctccactcgagcaaatgataactccgcatattaacctccaactgaagaccttatattccaatctgcttctcgaacttctggatttgattcaagaatatccatgtgatcatcacatggggagcaatcctgacacagtacacagggaagccagcgtagaacttgaat

SEQ ID NO: 408137 - DNA, 395 bp, Oryza sativa
gatagaggagatcaaactgtgtttatagactgaactgaaacttgattatacagtttgccacgactcctaactcaagcccctatgacgtggatacatatgtacaaaagttttgacacctgagaaaatgatctagtttccctacatggatagctagctagtagctatctcatgtcatggagtgttgccaagaaggcgtccaacttgacattgtcacctcgagacaagaacttgatgcagatgggcgccctggcacccatgagtgtcagcatggacagcaagatcgagccgacgccgtcgccgcagatgagccccgacgccagcgccggcgagagcattcgcccgcggccggcgtccatctttttccacaggtacgccaccaggctgccgatgcacat

SEQ ID NO: 408138 - DNA, 183 bp, Oryza sativa
  unsure (1)..(183): unsure at all n locations
ataggatcaaaacatttctattaccacaactttttaaggatggaatcgagtagcaatactttcaccccaaaatacagtttagcgacaatatcttagaaaagccgcttgctttgccgccatggctggcaagnctgagtcagaagcagcttaacacaaagtaacaccgagatcacttattaaacc

SEQ ID NO: 408139 - DNA, 361 bp, Oryza sativa
cggatgatgatttgtattaaaagcagacgatttggagcacggtaaacataaattcagaggttcaaattttgctcatatctccctggctcgcacttgaaaagaattcttatctcctagcaagccctagaaccaagcataaattaaaacaaaaggtacagaatgtcgagcacacgttctggatataagaaggctatatctagggcgatttgacatagtcctgcactatgttaaggcccttagactcttcaccatagtccttgacaacgacgcaggagcagcccacaaccttccttgccttgccctcagagtcaatcttggaaagccctgcccacttgccaagggtcttaacactaggcacggt

SEQ ID NO: 408140 - DNA, 407 bp, Oryza sativa
  unsure (1)..(407): unsure at all n locations
actcaggaaaccttacttcagagtgccatatagtgcatcctttacatttttttagataatggattaaaccggcctctacacccaaaaaaggatgtacacagtccccaacgaaacttacaagagtacataaatctcacactccttatcacaaggttttaacatccattcacaaggcatactatgaccccgagtcacttatggcttcttagcaaccagaatnattcttaaaaaggtttaataccaaagttttcaacccattacccactactaaggaataacccacgagagcatttannatctcccaaatcttttccctttaagtttccattccctttcattgggcgaannnaagccagaaaacttctctttctctagnaattccaagcaaaccttcttctcaccttttt

SEQ ID NO: 408141 - DNA, 169 bp, Oryza sativa
ttcgttgctccaacctttgcgaggacatgaagtttttcgccaccccttccgtccacggatccctcgccaaccagatcgtgcaccctggtgatctgtgcttcaagctgccggagaacgtgagcctggaggaaggcgccatgtgcgagccgctgagccgtgggcagtgcac

SEQ ID NO: 408142 - DNA, 392 bp, Oryza sativa
gacagaaattaattaagctagaaatctcctcgatcgatcacacacacacacacaattaaggtacatacatacatgcactgctgcaactgcaactgcagggtcggtgcgtggctactacaagtgtacacatggtaccgttggtttggcacccactctcagatcggtgtccgttgtgcctcactttttgccggggaccgaacgttggctgggcgctatgggcccacggcgttgtttcggcgaacggggttcggccgaccgtggttcgacagagggtttctcgatggggcgcccctttgccggttgacgaatgtgccttggaccgaaggaagtccgaaccatgggagaaccattggcgaggggcggccgtttcttgagcttcctttcacctttga

SEQ ID NO: 408143 - DNA, 412 bp, Oryza sativa
  unsure (1)..(412): unsure at all n locations
aacaccaacaaaagacagcaactcaataatctttcgatatttcaccgagggtaatgtatggtaggaaaatcgccagacataacagagccggccagactcaactcaaactcaaccctatgatggtaaanctggtttgcgattatacagccttccgcgcttatgacaatgtgttgggaagattaaaccgttttccacccaaaaaaccaatatggtgggggaagtggttcttccccttaccaggaaattaattaattggcttttcacatggttaaacaaaggggcaaatatttcactcacgattccccgtttaggtgcagggaccccaggaattaaacactttttgtttcgtcattcatttttctgcccagttttagggcacccgcccgagcccgtaccttcttttccaaaggaa

SEQ ID NO: 408144 - DNA, 260 bp, Oryza sativa
aggcaaataccaagatcgatcgatcgatgtacaagtggatgcattaattcatcatcttgggtgttcttatattacaaatcaccaccatgcaagtcgtcattaaccaccaacccagctttcctaatttaagtagtaaatccaacataaaggtatgaaccttctccttctctccatagcccttgccagcatcgcatcgttcatcacaacaactaatacagacgcgctgcgtaacgtcacatccaagcgcatttgtatcccgt

SEQ ID NO: 408145 - DNA, 377 bp, Oryza sativa
ggagatgagcaccacgacgcacttgatgctcttgcacaccgtctggatcaccgtcggcccgggctccgggatcgtcaggttcaggttgtcgccgaacccctccgcgtacggcggctcgccgaccaccacgatcgcgtagtcgtacttgtcgccggtgaccacgctgctgtccgggttctccgagtacaccaccgtcgtgctgggatcaacggtggccttgatcgccgacaggatcgtcgtgccagcagtgatgttgttgccggggctgtccttgccaggtgatggtccattctccacactgtctgcccaaatcatcagcatggctttccgcgacgagaattttaccggctttctttgggaggggaagcaccggagag

SEQ ID NO: 408146 - DNA, 86 bp, Oryza sativa
aaaggggggaaaaaaaaaattggattgaattctgaacgaaaaacaccaggaaccggggtttatttgggggaaggcccctgcccaaa

SEQ ID NO: 408147 - DNA, 148 bp, Oryza sativa
cttcttctcaaagtagtgtagcatctttccttctttcaccattacataagcttaagcaataacagataacaaatcctcctcctcctctaggtaaaatattcaaacacaatatcccttataatgtacttattatttaggaaaggtagcg

SEQ ID NO: 408148 - DNA, 222 bp, Oryza sativa
aatctaacatacgcaaactgatattatcacaatgttagccgatgacaatggaaagagtaatctaggtacaagcggatcattgacgggggagacaagacattggctggaccacaacatcccaccatggtggcgccaacaagggagcgctattccgtttatagggacgaggaggaaaaagtaaaaccatcaccgatgttgaaagtgaaaacttgaataaattct

SEQ ID NO: 408149 - DNA, 103 bp, Oryza sativa
ctacattgggcaggccggtatccaggtcgggaacgcgtgctgggagctctattgcctcgagcatggcatccagcctgatggacagatgcccggtgacaagacc

SEQ ID NO: 408150 - DNA, 471 bp, Oryza sativa
tcgttataactcaaaaggttgagggtcagctatcaaagtctcagaaagagtttttgcttcgccagcagatgcgggctatcaaagaggaacttggcgataatgatgatgatgaggatgatgtagcggcattggaaaggaagatgcagaatgctggaatgcctgctaatatttggaagcatgctcaaagggagttaaggcgtctaagaaagatgcaacctcagcaacctggatatagcagctctcgaacctacttggaacttcttgctgaacttccttggcaaaaagtcagtgaggagagggagcttgaccttagagctgcaaaggagagtcttgaccgtgatcattatgggctgaccaaggttaagcaacggattattgaatatttggctgttcgtaagcttaagcctgatgccagaggtccaggcctgtgttttgtgggaccacctggtgttggaagacatcattagcatc

SEQ ID NO: 408151 - DNA, 70 bp, Oryza sativa
atgcctaggagtttgataatgagactccttacactattatgtttggaccagacaaatgtggatcaactaa

SEQ ID NO: 408152 - DNA, 408 bp, Oryza sativa
tgtatgctgtgatcggaaccaaacgggtgggagcaatgtactgtcactagagagcagagaacgagcattgaggaaccgattgattatcgagctgaaacaactggatggccaggtactcgtagcacacaatatactgggatatgactagcacgggctttggcaccgggcacagactagcactggaccaaggaatatgtggtggatgattgcacggcttacgctctcattgatgcccagactcacgaaagggaacacactgtatggacttggagcgagaacaggattgatgacctgcattgctggacgaatactgtgtgatacctacttatgctctagcgatctgctgaaggatgcgaggcattcttagacacaacttgcagaaacacaattgaaaaaagagaggaaaga

SEQ ID NO: 408153 - DNA, 255 bp, Oryza sativa
tcgtccatggcggcgaccatccagagcgtgaaggcccgccagatcttcgacagccgtggcaaccccaccgtcgaggttgatatttgctgcttggatggaacatttgcgagggctgctgtgcctagtggttcatttacttttgtatttgtattcttttgttttttttgtatttttttttttttcttttttcattttttctttactataactttccttttttttcttctttatcttctttctttttttttccttttt

SEQ ID NO: 408154 - DNA, 166 bp, Oryza sativa
ttcttttaaaaacctcaccatcatcgacccacttgttcctagcgatctagaacgagagacttggcaatggcgggaagcggtgagctgaagctgctgggcgtttggagcagcccgtacgcgatcagggtccgcgttgtcctcaacctcaagtcgttgccgtacgagt

SEQ ID NO: 408155 - DNA, 483 bp, Oryza sativa
tatccgcttcgcttcctcccctctctaagccggggatgctaagccatggcgtccgtcaccgcccgcaccccggtcgcagccctccgctcgtcggcgtcgctcaagtctaccttcctagggcaatcctccacccgcctcgcccgcgcaccgactacgaggcgtaatgttcgggcggaggccaagggagagtggctccccggcctcccttctcccacctacctcaacggcagcttgccaggcgataacgggttcgacccgttgggtctggcggaggacccggagaacctgcggtggttcgtgcaggcggagctggtgaacgggcggcgggcgatgctgggggtggccgggatgctgctgcctgaggtgctgacgaagatcgggttgatcgacgcgccgcagtggtacgacgccggcaaggccacctacttcgcgttgtcgtcgaccgctgttcgtaatcgagtcatcctgttcactactggagat

SEQ ID NO: 408156 - DNA, 426 bp, Oryza sativa
tcgtgatcgcgctcaccattatgcgggactgcctgacgtgcaaccccagcacgttccgcacgatgaacgagaggcttgtcggaggctgcgtggagaccaccacctgtgtcaagaggctctaccagatgcaggagaccgtcgccctcctgttccgctccatcaacagtaacgactccgtgaccaagagcaagtttgacaacctgtctgggtgccgccactgtatccctgaaggactcatgagggctaccgatgttatgaccgttggcaaggttgccgtgctctgcggctatggagatgatatcatgggctgcgctgctgctctcaagcgagctggggcccttgtcattgatactgagatggaccccatatgtgccctccatgctcttatggagggtttccaggttcttaccttggaggatgttgagt

SEQ ID NO: 408157 - DNA, 286 bp, Oryza sativa
ttttgttggtcatatctttcgatggttcttatgtcaattacagacatctggccattctttgtgatacaatgacatacagagggcatctgatggctattacaaggcatggtatcaaccgtaatgacacagggcctcttatgagatgttcctttgaagagacggtggatatcttgcttgatgctgctgtatatgctgaatctgactacctgagaggtgtcactgagaacattatgcttggccagcttgcacctattcggacaggaggctgtgcattgcatctttatga

SEQ ID NO: 408158 - DNA, 495 bp, Oryza sativa
tcggcacatccttccttcctagcaccaactcgccacccaattaggccattaccttccaaaattctcccatccaatggcgctacgcctctccgtctcctcctcgcacgggccggcttcctcgccggccatctccacatgccgccccgccgcctgcgggcgcttccccgccttgctcggcggcggtgtggcttctcagaggaggagcctgacggtggtgtctggccctgagacaagggcggtgatccccgtgaggtcgagcggctcggacaccgccactgttggggccgaggcggaggcggtggccgtgaccgggcaggtgacggaggtgaacaaggataccttctggccaattgtcaagtcggcagggcccaaggtcgtcgtcctcgacatgtacacccaatggtgcgggcctttgcaggtgatggcaccgaaattccaggagatgtccgagaggaccaggacgttgtgttcctaaaactcgactgcaatcaagac

SEQ ID NO: 408159 - DNA, 116 bp, Oryza sativa
tttgatgcgagcgactcccttactcgataaggattcttctagagtcagcaatcagaaactgtgatgagttccaggtcaccgggaaggacgctgagaaaatcctgtactggttgaac

SEQ ID NO: 408160 - DNA, 462 bp, Oryza sativa
ttggatattgttatgcttgtcatatcatggcacatgaaagctgccacaatgtgtgaatttactcgccaggaattcattggtggactgcagtcaattggggtggattcaattgaaaagctccgtgagaaattgccatctttacgggctgagataaaagatgaccataaattccgtgagatatacaactttgcttttgcttgggctagggaaaagggtcaaaaatctctcgcactggagactgctcttggaatgtggcagttgctctttgctgaaaggcactggccccttatcgaccattggtgccagtttttacaggtgaggcataataaagccatttctagggacacatggtctcaactgttggaatttgtcaagacgatcgatccacagttatccaactacgacgaagaaggtgcttggccctacctaatagatgaatttgtggagtacctaaccgagaat

SEQ ID NO: 408161 - DNA, 241 bp, Oryza sativa
tcgtgacgatccagaggttctggttttgtttctttcagaaatcagcaggacgcacataatgccataaatgaactgaatgggaagtggctcggtaactcgcaagtgtcgtgcaattgggcggcaaagggggctaatgcatgggaggagaaacctgactcatacttcacgggtctgatacgtttttgactaatgcgcacggctcattgttttatgggtgtcactgattgagatggtcgtggat

SEQ ID NO: 408162 - DNA, 317 bp, Oryza sativa
tcgtgtcaaaccaaaaagcacctgcagtgcttcttaaaggaagggaccttgtgaacaggggacagtatgctaaagccacggctgttgcttatggcctatctggtgaccaaacacaggtataccagcctcttggtgatattgatctggcctttgatgaacacgtggaggacacaaattataaaagaaacctagatcttcgaacagcaactgttaatgtctcttacaccattggcgaggtggtctacttcctggctctcatatcatcctatctatacttagttttctcttatttttatactactttctattcctttttt

SEQ ID NO: 408163 - DNA, 470 bp, Oryza sativa
tttgtatcgcgcgcgcgcgcctgcctcgtcgccggcggccatggcgctcctcctccgccactctcccaaggtgcgaagagcgcatgctatcctcggatgcgagcgtgggactgttgttcgtcacttctcatccagcacttgctcctctcttgtaaaggaagatactgtatcaagttccaaccttcatccagagtatgcaaaaaaaattggaggatcagatttttcccatgacaggcagtctggaaaagagcttcagaatttcaaggtctcaccgcaagaagcaagtagagcctccaatttcatgagagcatccaaatatggaatgccaattactgctaatggggtacatagtttgttcttatgtgggcaggtagtaccgtctagggtgttttcaagtggagcagatttgcctccacatcaggaaatcggaatgccttcactcttccctaccatgactgagggaacattgc

SEQ ID NO: 408164 - DNA, 458 bp, Oryza sativa
tcgttagttttccaagatagaagatgatgtacagaaaacatcatcacagaataaacatgcaaaaaagatggtgctagacaaaggagcacaggatgtcatggtgtctgattctacagcatcagattacgacagcatggatgcaggaagttcttggagcttatcagatggagatgatgttgaatccttttcggacgctgagattttcagatattgtttagatggtacacatgagcggtcaaagtttctcagagctgtagctacttgtgttaacgaagatgacttgataaaacttgcaaatcaggtctttttgtatagtggatgcacccatcacagaaacccaatattaatatcaaaagcactgctccatgaaggtgctgacatttggtgtttaatctcaaagaaccattgaacgtgcttctttggtcattgcagttcctgaaatgaaaagcaaatttttt

SEQ ID NO: 408165 - DNA, 487 bp, Oryza sativa
tcgttgccaagcgccatgtcgaccagagcaccaccattctcgacgtctccggcgttgggtacaagaacttcaacaaggccgccagggatctcatcggccgcctccagaaggtcgatggtgacaactacccagagactctgtgccggatgttcatcatcaacgccggtcaaggattcaggcttctctggaacaccgtcaagtccttcctcgatcccaagaccacagccaagatccatgtcctaggcaacaagtaccagagcaagctgctggaagtgattgatcccagcgaattgcctgagttccttggtggcacttgcacctgcgaaggcggcttgatgcgctccgacaaagggccatggaaagatcctgaaatcataaagatggtccaatgtggcatgggaagatgcggatttaatagctcgggtcaatactgaggctgatgagaagatgatcactgaggatgacatagtggcacttcccaagaagc

SEQ ID NO: 408166 - DNA, 327 bp, Oryza sativa
tcgttgatcaggccttgtcagtggcaagaacaacagcattgacaggagcatccaagatgcatacatccacgcaattcgccgcgccaagaacttcatctacatcgagaatcagtacttgcttggcagctcatttgcatggaaagccgatggcatcagaccagaagacattgaggcgttgcatctgattcccagagagatttctctgaagattgtgaacaagattgaagctggtgagcgttttgcagtctatgttgtgctgccaatgtggcctgaaggacctcctgctagtggatcagtgcaggcaatactggattggcagaggaggac

SEQ ID NO: 408167 - DNA, 399 bp, Oryza sativa
tcgtttccgatgcctaaactgttccctgatgttcatgactggagctccacctggagacttttcactgcagctccagttcttgtgaccgcctacatttgccattacaacgtgcacccaattcacaacgagctcaaggaccactcccagatcaggccaatagtgcgggcgtcgctgctgctctgcttggccgtgtacaccaccaccagcttcttcggcttcctcctcttcggcgaggcaacgctggacgacgtgctcgcaaacttcgaactccgaccttggcattccctacagattggtgctcgacgaccccgtcagggtcagctccgtgttccacccttagctcggttttcccattggattccatcccctgtggtttaacatggacggcctctttttttc

SEQ ID NO: 408168 - DNA, 389 bp, Oryza sativa
tcgtgcaggatcaggctgctgctgagtctcataggagggctgctgcagccacagctgctgggaaattcaaagatgagattgttccggtgcctacaaagattgttgaccccaagactggagaggaaaagaaagttgtgatatcagctgatgatggaattaggccagggaccacagcatctggattggcaaagcttaaaccagttttccggaaggatggtaccacaactgcaggcaactctagtcaagtgagcgatggtgctggagctgttcttctcatgaggagggacgtagcgatgaagaagggacttcctattcttggtgttttcaggagctttgctgctgttggagtagatcctgctgttatgggtgttggtcctgcagtagcaata

SEQ ID NO: 408169 - DNA, 129 bp, Oryza sativa
catcacattaaaactttcctacacacatgaacttccaactttttcgttacatcgttcactttcaattaaactttcaatttttgggggaactaaacacacccctaagttttcttttccttcgcaggaaaa

SEQ ID NO: 408170 - DNA, 121 bp, Oryza sativa
gggaaatgctgcccattacaatgggagctaaaactatgctcttattgcactctttataatcgatcaaagaatgaaacactgatcggtacacatgcgagatatgcttccataatcgttacaa

SEQ ID NO: 408171 - DNA, 258 bp, Oryza sativa
gacagcaactcaataatctttcgatatttcaccgagggtaatgtatggtaggaaaatcgccagacataacagagccggccagactcaactcaaactcaaccctatgatggtaaactgtttgcgattaacgcctccgcctatgacaatgtgttgggaaataaacgccttccaccccacaaaaacgaatgttcgcgggaggtgttcctccccctacaaggaaattatttattggtttttcaatggttaaaaaggcgaaaa

SEQ ID NO: 408172 - DNA, 357 bp, Oryza sativa
  unsure (1)..(357): unsure at all n locations
aggcaacttctatcagtatatatcaagcagagaaggaacagcgcaagacatgtttcgtacaatcacatcttgaaccacacaaatatataaaacggtagtgttacaaacaaacaattttggacggagcgtttccttagngcctaataacctctctcggaagagattaagcgtaataantttaaacccttggacttctttttnntggcttgcacttttgttatgaatccctttcatttggaaaatccttccgtgttggtcacccttcctgttagcattcctcggccgttaggggcaagggcaatgccctgcctttctaccacaaaccggcccttcagtttgttgcaccccattgaaggt

SEQ ID NO: 408173 - DNA, 155 bp, Oryza sativa
gggcaacaataagactcagagcatccaagtttttaaccgaatagaaataaacgagttttaaacgactaacatagtgcacattgcgagcagatattaacggtgccatgcaacgaggtcccatggcccgggggccaaaatcttaacgcaaccgctaa

SEQ ID NO: 408174 - DNA, 187 bp, Oryza sativa
gaattaaagccgctgctccaatttaccatacgcagcatttgattacaggaataccaaaaaactactaccgatgacaggtattaattattaaaaagcacaggttcagattattgcgacaaaagtttttgatacccgtaagattggacgcttgatagccaaaccacacttcagaaccctaaatatgcat

SEQ ID NO: 408175 - DNA, 377 bp, Oryza sativa
  unsure (1)..(377): unsure at all n locations
gataaaaagagcggggtcttttccccagctcattagctttagtattattctgcttaactgaccagcaatggctttacatagcgttaaagttaaacagatactgtcctgtcctactgtacaaaatacattacaaattgacgaagggggcgacantcacccctgacggnagccccgcccctttgagaatatcaccagtatccatcatncttggtctatttaaaccggtncnnaggataaatataaggggggtcaccccataanntctggcacaaccctcttcctcctaccattttaccannagtcatcaaaatgggaatcccagcaataaaatttgcccagtttcttcatgggctatcccaatcattctcgttgcccgt

SEQ ID NO: 408176 - DNA, 378 bp, Oryza sativa
  unsure (1)..(378): unsure at all n locations
cgtagcacagtttgcaagtggaaccattaatcgaataaagtcgaacatcgatgccacttgaaacatagaaatatgaacaggcagttaaaacaggcccacagcatctgccgcttcgttacagttagggngaccagacttttttccaataaatatccgacacanngaacacatcagagcttttgtgatagtaccttaatagatcttannatttcacaggngtatagagncnnaaccaattannagtgttgctttgggtngcaccaaaccaagcacactttattggtgnnatctagattggataattcaagaaagcagcnagctgccttttgcttgggcaaacaggtttggcccttcggcatttgccacggtttggcaggc

SEQ ID NO: 408177 - DNA, 336 bp, Oryza sativa
gccgccgttcctctcatctcggatcgccccaagcatgccgccatcgtcagaagcgggacggagtggacggcggcggcgcacgtgatcacggcggtgatcgggtccggggtgctgtcgctggcgtggagcgtggcgcagctggggtggctggcggggccggggatgatgctcgtgttcgcggccgtgacggcgctgcagttcggcgctgtttcgccgactggctaccgctcgccggacccggagggtcggccccgcaccggaaccggcacctacccccaacgccgtcgaagcgcaaccctaggtagctttgagcgcgtggggtctggcttgttgctg

SEQ ID NO: 408178 - DNA, 236 bp, Oryza sativa
  unsure (1)..(236): unsure at all n locations
gggaaacgaataaaatcattattgcaaaaacatcatcttcttcttcatcttcttagtgtacacaacaccaactcgatcatcatctcgtcgcactaaacccatcttccccaacccaaagacaacgaacctcgctggccacaaantccattccaacccaccaattaacccacctgcctaagctaccggtcccccccacctttcacctttgcccgggggaccgaagtttgggtggccgt

SEQ ID NO: 408179 - DNA, 358 bp, Oryza sativa
gatccgcgccgccccgccgtgctacggtgatccgcgccgccgccgtctcctacgccgacgagctcgtctccaccgcgaaatctgttgcttccccagggcgtggtatcctggcaattgatgagtcgaatgccacatgcggaaagagattagcatccattggtttggacaacacagaagttaaccgccaggcttacaggcagcttttactgaccactgctggtcttggtgaatatatttctggtgctatcctttttgaggaaactctttatcagtcaaccactgatggtaagaagtttgttgactgcttgaaggatcagaatatcatgcccggtatcaaggtcgacaagggcttggttcc

SEQ ID NO: 408180 - DNA, 124 bp, Oryza sativa
acggcgcatgcagcatcgaatgggatcctttacaacttatatagccataggaataggacaattatatcaacatcataaacagggggaaattaataccatgggcgaaccgggccatggggggact

SEQ ID NO: 408181 - DNA, 156 bp, Oryza sativa
cgcattccacaacagtcgaagggcaataataagtcttaacatccaagtttaaaccgaacagaaaatagagttttaaatgactgacatagtgcacaaagcgagcagatattaacggtacaatgcaacaacttgaaatgcacccgtcgaccaaaactt

SEQ ID NO: 408182 - DNA, 376 bp, Oryza sativa
  unsure (1)..(376): unsure at all n locations
gggaaacgaataaaatcattattgcaaaaacatcatcttcttcttcatcttcttagtgtacacaacaccaactcgatcatcatctcgtcgcactaaacccatcttccccaacccaaagacaacgaactcgctggccacaaantccattccaaccacaattaacccccactgctaagctacggttccccccacttttcacttnngccggggaccgannagttggtgnngcgtaccgcccaggncnngttgttgtttgaaccgggnngtcggcgagggtggtttcggcgagggttcctcgagggggccccttgccccggtgaccgatggcccctggacgaaagaagcccgaaccatggnagaacatggccgaggccgg

SEQ ID NO: 408183 - DNA, 153 bp, Oryza sativa
aggcttgcaaactgtgcaattgattttattttcaccatgcatacctcaaataatcacagccataataacaaaagccatactctctggattaaagatccaacagggttcaggagaacaccgcaaggctcagaaactacaccactcacccaaaat

SEQ ID NO: 408184 - DNA, 169 bp, Oryza sativa
gctatggctacttccatattttttttaatgcaatgagcctatcctataccctctcttttctgtttatatttcaatataccgaaacccatataagactagataaatattaagaggacatcttcacgcctaagataataaattctatctgtggggcagctaaagattgtgt

SEQ ID NO: 408185 - DNA, 219 bp, Oryza sativa
  unsure (1)..(219): unsure at all n locations
actcttattgaatcgcggtaaagtattctaattcaataaaaatttcgcgggcgaatatttactctttcctgtcttatttgttaattcataacccttatcaaataangacacattttttttggttttgtttccgcccattcccaccccaaatgaagttatttgggcatttcttttttcaaggaaaaatccctatcccagtccattagggttcctgttcgt

SEQ ID NO: 408186 - DNA, 102 bp, Oryza sativa
actcttattgaatcgcggtaaagtattctaattcaataaaaatttacgcgggcagaatatttactcgtttcctgttcttatcttggtaaattcagtaacctt

SEQ ID NO: 408187 - DNA, 414 bp, Oryza sativa
  unsure (1)..(414): unsure at all n locations
aacatgatacaaaaggcacatctttattatatcgataatatttacattattacaaaggcacttcaggcctaacaaataaaaataaacaacagcggacttagcgggcctacggcgtccatcattcacagngggctacaactgggtgtataangcgcaggactcgcacctttaggactttcgttcttcaaaaagcttctctttacnnntgaagggnngggacgagnanntagatgcaagaattgaggtattacnaccacagttacttcaagcaaggtcacaactgggnnnagatgcanntgaataanntgcaagggggttacagagggngttaataatatagggttttaggttttttgcagttaaacaaaccatttaaaagttcaacttagtttgccccaaaagctatttttataa

SEQ ID NO: 408188 - DNA, 312 bp, Oryza sativa
actcttattgaatcgcggtaaagtattctaattcaataaaaatttcgcgggcgaatatttactctttcctgtcttatttgttaattcataaccttatcaaataagacaatttttttggttttgtttccgccattcccacccaattgaagttatttgggatttctttttcaaggaaaaatcctatcccagttcattaggtttctggtccgttccccactggcttcttccttttaaatggtttagggttttgaatcttcgcaaatgggagccttcccaaaaaaatttttcttttccgagttcaaatttctcagt

SEQ ID NO: 408189 - DNA, 362 bp, Oryza sativa
acgcgcccctcgcatctttcgcgaaggcgattcaggcgagaagagagagagagagcgcgaggccggcggttctagaagcttccagacccttcggcgcgagcgagctcacctcccccgtaggagctgttcattagatctgaataagggggattgaagcagtgaggagaagatgagcgtggtgggctttgatctagggaatgagagctgcattgtggccgtcgcgcggcagcgcggcattgatgtggtcctcaacgaggagtcgaagcgggagactccggctattgtctgcttcggcgacaagcagcggttcatcgggacagcgggcgctgcttcctccacgatgaacccgaagaattctggtt

SEQ ID NO: 408190 - DNA, 287 bp, Oryza sativa
gaagtgataatttaaatacttaatagtaatagactctttgatggagtattacaacatgcagcagtggcattaatacgccagtacattaattaagttacacatatgcaggctccattttggtttcttttaatttatcgtattacagaatttctgtagccttgctgatgatcacttggatatcatgtactagtaattaacaataggatgcatacaaaagatgggcccaacgacaacagaagatggcgtgcatctgacatttgtctggccttatttggttggtagtactt

SEQ ID NO: 408191 - DNA, 403 bp, Oryza sativa
  unsure (1)..(403): unsure at all n locations
acttaatagtaatagactctttgatggagtattacaacatgcagcagtggcattaatacgccagtacattaattaagttacacatatgcaggctccattttggtttcttttaatttatcgtattacangaattttctgtagccccttgctgatgatcacttttgggatattcatgtaccctagtaatttaaaccaatannggatgcattacccaaaagattggcnnnccaacgaccaacagnannagatgcgtgncnnatctgaacattnngtctggccttaaatttggttggttagttacttccaatttaaatttaaacaagnnnagatgattgcatttctttgtgcctttaggtttcctttcacaaatgcttggctttcacggttgaggccttattcgcaa

SEQ ID NO: 408192 - DNA, 171 bp, Oryza sativa
aaaacatatttctacttgattcaacagttcaagcatggctgcaatggattcacatgaaaaccaacaccatgccccagttgccgcggagaccatacaacaataggaagatctaaacttggatctggccaaacccctttcagtttattagcaattaaacctttttctatcgta

SEQ ID NO: 408193 - DNA, 376 bp, Oryza sativa
acctgctgcaccagctcctcgggccggcactgcgcgtcctgcggctgctcgtggttgcgcatctccacgcacgtgaagttgagcaccgcgccgtggcgggccagcatgcgcgcgatcggctggtacccgtcgtggtgcctcgtgttgtagtaccctgccgtcagctccgcggcgtgggaccgcgtgccgtagtgccagtggatgccggccaccttcacggagatcttcacgccgggtgtgccggtgtacacgcccgacgccgccgacaggatgcgctcgccgtgttccaggagcatctgcgagtaccagctcatgaaaaactcaccgtagggagtgttccacccaccttcacggcggaagaagggcggacgcgtgg

SEQ ID NO: 408194 - DNA, 390 bp, Oryza sativa
ttatatcggttcggccttccttttttttttttggaagcccatctatgaactttatataaaggtgatcactaataacaatgatgattaaaccacatgtggaaaggaggactatgatccacaggatgggacaagtaccttaggtacgggcattattggaggattacacaaaaacacccaaacgcactcatctccaaaagaccatataataaagtgatctgaatctaaatgcgtagatgattcaattgtagctagtagccggtttacatgtcaaaccaaattcaaaatgtaaatgaggaattttttttatggcggtgattttactcttgtatcatctttgcctttaactctattacttaatctgcaggcacaaatagcaattttaccaatatt

SEQ ID NO: 408195 - DNA, 233 bp, Oryza sativa
ttcggccttccttttttttttttttaaggcgaaattctgatcaaacattgattactcaagatcgatcacacatcaagagtacacttatacaagttcactattacgcccacagttctgatcatacgacacttaattgcaataggtcgatatcaatactgcagttcctaaatatcctatcagtcacataagaattatcagcacaagctcttgtatgctcattcctaagccggaca

SEQ ID NO: 408196 - DNA, 361 bp, Oryza sativa
atcttgacagcaaatagcttggtaactttgaaactccacagtacaatatcggcggtctagaggtccagacaaagagcatcaaagcaagaatgaagagaaagacaattggaatcacataaaaagatggcccaaagcacactaatttttattacaaccgccacgacagtcttgatcgtactgactctaaggcgcaaaatacaaatcggcattaatcttttgcggatatcccgctctctaaaggcttcttattcctcagcaaatcccagttcagagagcttgaggtgggcctcggcgtaatccgaaaagagggcgtcctcatccgcagcatatttctccaccagtggacggaaggctgggtcag

SEQ ID NO: 408197 - DNA, 365 bp, Oryza sativa
tttgtttttgttcaattgttttttttcgtttgtttaaatgcaaattacattattgggggatatgatcatcatttcacgagaacagaggaagaaacaaaagctaaaaattaaaaccatcaacagcccgaacgagtttgcattactagatacacacattgcagcctttacttcccttctctccaaggtatcgaaatatcaaacccggtccacgcacaaaacattttgttcaattccctactcgagctgcgcgtaccacaccccttggatccttgaacatccttgggcaccttgggcccgaggtctgtgtccgacggcttgcacgcctcttgaagacgccaatcacctcgccggtctctggcttgctc

SEQ ID NO: 408198 - DNA, 302 bp, Oryza sativa
gggaaaaaattaactaagggagaaaaaatttctaagccaaaaacccaaacactgggcccttcctataaaaagaccaaaaggaacaggtttaaaaaataaaccccaaactggacgaaaattaacacgcacattaaaaaaattcttccacccttcaaaaacccccccctttttcttcccggggaagataaaaataaactgggggccagccagggtcgccggggggaaaatgttaacaggcggggcgccctctcggggggcccggaaaaaacggggagcaggttgtggccaaaggggccgctgag

SEQ ID NO: 408199 - DNA, 187 bp, Oryza sativa
aaggcttaacatccaagtttaaaccgaacagaaaatagagatttaaatgactgacatagtgcacaaagcgagcagaaattaacggtcaatgcaacaacttgaaatgaccgcgggacaaaactataaccgagtcactaaatagaggctacgatatacttaaaatgcaacatgatggaaagtcacacac

SEQ ID NO: 408200 - DNA, 373 bp, Oryza sativa
  unsure (1)..(373): unsure at all n locations
gcagagcttaattcggatcataattgtctgctcaatggcacatacaaactccagacattgaattgcctggcaaactccaaagggttacacggtataacttggacactttcagaactaatcaaaactgaacgacccgctagctacaacaacaattggacaatgcttggttnntagtgatctgaatatggttgatcccaacangatcaatgaatcccctgtgtttctgcagggcccgcatgcttttgagcaggtaagttagcccttgctgcttatttatttctctttctttcagcagttcatgctatgatggatatgctatctatcaggaaaacaatccattcttcacttactaagcttctagtacacggtgact

SEQ ID NO: 408201 - DNA, 246 bp, Oryza sativa
agcccatatctttatattatattattattaacaaaaacttgtcatgcccagctatggcttgggcgcgatctgatacacagaacaaagagaaaacataaaaaggagaaataattaatagcaagcgttaagccggcctgcttaaacggtgtcaaggcagctgccgtcgcacgctcctctgcacgttgaggtcgaagactctttgggcaacagggttcggatgcaacacttccgggcacagagcaggtt

SEQ ID NO: 408202 - DNA, 165 bp, Oryza sativa
tttctcagtttgataagttcaacgtaatcataacgtcatatgatattatacgcaaggatattgattttcttgagaatgtcttttggaactattgtgtgctggatgaggggcacataattaagaacttaagatcttaaataacatctggtgtgaaacatttgaaag

SEQ ID NO: 408203 - DNA, 258 bp, Oryza sativa
cttctgtctcaagctggagaccagtgctctcggccttcgcaccaagagggtgagcacgtcgtcggtggccatccgcgcgcaggcgtcggcggcggtgtcgtccccgacggcgacgccggcgtcgccgtcgggcatgcagacgctgctcaagggcacggtggtcatgaccggctcgtcttccggtctcgtgcctctcgactgcgaaggcgctggcggagactgtcagttggcacgtcttgatggggtgccgcgactttc

SEQ ID NO: 408204 - DNA, 147 bp, Oryza sativa
tcggttacaacgtcaccgggcaggagggcacgctgtggtggctctcccatttttccttcctccgcgccaccgtctatggcgcgctcatcatcaaacctcgcggcggcgccaaggcctacccgttccccgcgcccgatgaggaggcgg

SEQ ID NO: 408205 - DNA, 514 bp, Oryza sativa
ctcgtagaaaaagaaagaaattaaaaagaaaatcacggcgcgtgagcttgcagagacagcaatggtgagagttggtgccgccgcggcggtgctcgtgctggcggcggcggcggttttattttttttcaggcgtttgttttttttcctctctttcttcttttgcgttgtttttttctttctctcttttttctttcttcgttttctttttccttttctctttttttctcctccttcttctctttctctctttttccttttcttcctctctttttctctttttttttctttctcttcttttttttcttctcttttctccttttcttcttttttcctccccttttcttcttcttttttttttcttttcttttctttctttctttcctttttctttttcttttttctctcctctttccttttttctctcttttctttttttttctcctctgtttccttttacttttctctctctctttttttttctcttcttttctttttctttctccttttccttttc

SEQ ID NO: 408206 - DNA, 215 bp, Oryza sativa
  unsure (1)..(215): unsure at all n locations
tanctcatccatcgatcgccctacctagctactctcgatcgatcgaccgtccgcccgccatggacgtggagtacgacgtgatcgtgctcgggacgggcctcaaggagtgcatcctcagcggtctcctctccgtcgatcgcctcaaggtgctgctcatggacaggaatgtcttctacggtggagactttatatctcttatcctgattcagctatgg

SEQ ID NO: 408207 - DNA, 348 bp, Oryza sativa
  unsure (1)..(348): unsure at all n locations
tcgctaacaaaacagatactatgtccggtcacttgacttnttctnttccttctctgcctcagcagcccacttcaagaagcactggcagaactatgtcaagacatggttcaaccagcccgcccgcaagcagaggcgccgcattgctcgccagaagaaggctgtgaagatcttcccccgcccaacatctggccctcttcgacccattgttcagtgccaaactttgaagtacaacatgaagtcgagggctgggagaggctttacccttgaggagctgaaggctgcgggcatccccaagaagtatgctccaaccattggaatttccgtggatcaccgccccaagaaccgctc

SEQ ID NO: 408208 - DNA, 142 bp, Oryza sativa
tgagactgcagaaacgagagctagctagccagaggctgcaagaagattctgcacccatagatcgtttaccatggtctcatacccatgacttttaactgtgttccctatttatgtttatatttattttatctctttctttcat

SEQ ID NO: 408209 - DNA, 371 bp, Oryza sativa
ttatgtggcagatcttcgtgaagaccctgacggggaagaccatcaccctcgaggtggagagcagcgacaccatcgacaacgtcaaggccaaaatccaggacaaggaagggatccctccagatcaacagcgtttgatattcgccggcaagcagctggaagatgggcgcacactggccgactacaacattcagaaggagtcaactcttcacttggtcctcaggctcaggggtggcactatgatcaaggttaagaccctcactggaaaagagattgaaattgacattgagcccaccgacacgatcgattggatcaaggagcgtgttgaggagaaagaaggcattcctcccgtgcagcaaaggcttatttatgct

SEQ ID NO: 408210 - DNA, 258 bp, Oryza sativa
ctcctttgcaaattctggttgatgctagcgatggtgcttctgactatgggaataagtttggtgaacctctaattcagggctttactagaaattttgggatgaggctgcttaatggggaacggcgtgagtggctgaagccaataatgtttagtggggcaatcgggcaaatcgatcatgcacacatatctaagggggatccagagattgggatgctagttgtgaagattggtggccctgcatacagaattggtatgggtg

SEQ ID NO: 408211 - DNA, 420 bp, Oryza sativa
gtagatggagatggattcagaggctcacagcaggatgctgtgggagtccagcagcagcaacggcaggaggtacatcagctacgacgccctgaggagcgacgtggtgccgtgctcgaggcagggtgtcccttactataactgcaggatcatgaccaccgccaacccttacacccggggatgcgagaccatcaccaggtgcagggatgtggatccgtgattactactgcactgcctgcttgttttgctggatgatcttgccatgagaggaattgcaggagtggctacctgagatgcaaatcttggtttttattttttttttgtttttcttttaccctctcttctgttctttcttcttctttatgttctgcatctgctgaatcattggaggtgattcatggatgatttacatgttcaaagatc

SEQ ID NO: 408212 - DNA, 405 bp, Oryza sativa
gtctatcaaattgcttctagacttggtagctcaaaagatgcgcagggctcaacaaacttccagaatgcgctagcttctcttctgaagaaaatggccattgatcatccttatcatacaatatttcagcttttggctctagcaaatggtgaccgcgtcaaagacaagcaaaggagtagaagttcttttattgtagacatggacaagaaacttgctgctgaaaatctgttaaaggatttatcttcttctcatggagctttgattcgtcagatgaagcaaatggttgagatctacattaagttggctgaactagagaccaagaaggaggacacgaacaaaagaattccactacctagggagatccgcagcatttgtcagctggaacttgttcctgttggtactgctagt

SEQ ID NO: 408213 - DNA, 178 bp, Oryza sativa
tctggtttcaaccaacgatattatctgtgtgtgtgtgcgccgcgcgggcatgcaccaacgcgcgcaacggatgaaccatccgcctgcatcgatcttcctgcgatggccgccgcgtcgacgttccctctggctctgctgctcgccattgttgccgcatgctgcgtcgccgggggcgagg

SEQ ID NO: 408214 - DNA, 416 bp, Oryza sativa
tttcattaaagaatttactacgtgaggtgtgtgttttaggtattgcgcatcttaggtgcattttagcgcaaacgtgtataatatatatcccatggtactaactcatgtcttaaccataattgcacaccaacacataacatacactactatagagataagtatcgaagaagacatgcccaccggtgcggaagggacggtgattgtgccccacacaatggagcagttcgccctccacatgagccaagccaagcaatcccacatgctcgtagtcatccagttcactacttcccggtgccctgcttcacgctacatcgcgccagctttcaccgagtatgcgaaggagttcgctggtgcggttttcattaaggtcaatgtcgacagcgatgagctggagagtgctacggactggtatgaca

SEQ ID NO: 408215 - DNA, 152 bp, Oryza sativa
  unsure (1)..(152): unsure at all n locations
cncgtcantaacctggtgttactcatgtcttagtaacagtaggtgctggctatattgggtcacatgcttcattacgcctgttaaaggacaataatcgagttaccattgtggacaatctttctagaggaaacacgatagcagaaaaggttctc

SEQ ID NO: 408216 - DNA, 296 bp, Oryza sativa
catctttcccccctccgccgccgccgccgccttcttcccgggggcggggcggggagaggaggctcgggggagcagggatatagtatagacactcaccaaagatgggagaacatgtggactctggtctatactaagtgaagctaacagtaaggctaaggtaacaacttccaagaggccaaatataagacaacagcaattctgtaacaacatgagacccaaaaagaaactgtgcggacgattccaaagcacaacatacactggtaagtttattaatgatgatacgactatagatatta

SEQ ID NO: 408217 - DNA, 363 bp, Oryza sativa
ctccttttaacatgcaacaatcatcatctcattgttcaagagttcaaacattatcgtcgtcatcatgggacgaggaaaatttgccagacacgcaccagagatgggagaacatctggactctggtctcttctaagtgaagctaacagtaaggctaaggtaacaactcccaagaggccaaagataagacaacagcaatcctgaatcaacatgtgacccaaaaagaaacggtgcgggcgattcccaagcacaacgtacactggcagtcgttattcgtgatgtccgtcgaagatttcagcgctgctgccaatggcattatgttcttagaaccacttgtacagcagtccaccgcttgtggcgattaat

SEQ ID NO: 408218 - DNA, 363 bp, Oryza sativa
ttcgttacgcgtccggaattccacttcccatggttaaggagatatgccgacatgtgctcattggccttgactatctccaccgcacactttcaatcattcacactgaccttaagcctgagaatatattgcttgaatccactattgatccctcgaaggacccccggaaatcaggtgtgccgctggtggcaccttctgcaagaactgatgatcctcctccaaaggcacatgcaccatcagtgaatggtggtctcaccaggaaccaaaagaagaagattcggaggaaagccaagcgtgcagccgctgcaacttcagaaggaagtgggactgttgcatctggggagaccgatgggtcagatgataggg

SEQ ID NO: 408219 - DNA, 198 bp, Oryza sativa
tctttcagcggctccggcgggacacctcgctccatgggcggctacatggagtccggcagtgtcaaggacctgcagactcacctcttcagctacgaggagctcgaggaggccaccgatttcttcaacgagaacagagagctcggtgatggcggctttggcaccgtctacaaagggatactttgagacgggcgcgtggtg

SEQ ID NO: 408220 - DNA, 444 bp, Oryza sativa
ttcagatgaatgtccggtccatctagataatgattggaatattagtgttgttgctggtctccttgtccagaatgctctgaaatatttgttgaagtttggacaagtttccccttacttgggatataattcacttaaggattatttcccaacaatggaaatgaaaccaaatccacagtgttcaaatccagcatgtgttcagagacagaaagaatatatgcagtcaaaacctgctagagatgcagcagcaaaagctaagatggaagctgaagcatcagcagcagatgaatgtccggtccatctagataatgattggaatattagtgttgtcgatgacagtgacacagtgacacctagcattctaagcactggagctgatagcctcccagatggccttgtccgcgaactcccaactgcagattcctaccatgaaccagttgctccagt

SEQ ID NO: 408221 - DNA, 204 bp, Oryza sativa
gtgatggctgagcaggctaatcaaccgactgtgcttcataagttcggtggccaggtccaccttggctccagcttttctgaaggtgtacggtctttgaacatctgcccatttgtcttatcctatgactggcgccttaccacacggagctacatgaccaatggccttgttcaatggtttcattcaacattcatatgatgtcttcct

SEQ ID NO: 408222 - DNA, 100 bp, Oryza sativa
catgaactgccttacccaggtggacacgaagggggtcactatgaaccccaccggcgacctctccagcgcgcgctttagtgagaagaacctttttactgtc

SEQ ID NO: 408223 - DNA, 119 bp, Oryza sativa
gtctggagggagctcccccccctcctcgctgcgggccgtttacgccgttttctgggagaggagaaatccgtaggctcagaggatttttggtagtcttgtctcgtgatattcgttaagag

SEQ ID NO: 408224 - DNA, 594 bp, Oryza sativa
ttgtgctgcgtcacgatgcgcaagtcggtggccaagcccaatcccgccgcggcgtcgggtagcccttggttcggcttcctcctctttcttttctttggtttgcttttcggtgagtctgtttctctactctttttttctttcttattcttttttcttcttctttttctttcttcttatttttttttttctttttatcttatctttttatttttttctttcttttttctttttttttctttctctctattcctttctctttttatttccttttcttctttttctttttctattgtttcttttttttcttttttttttatttttttcttctttcttttaccttttttttttcctttttttcttatttatctttttttttttccttttttcttttttttcctttttttccttttttatcttctcttttctctttttttcttttttttttattcttcttttctcttttttctccttcttttctttttattctttattctctcttttatcttttcttttttcttttcttttttcttttttttttctttctttcttctttttttttttcatttctctttttctttctctttctctttttct

SEQ ID NO: 408225 - DNA, 124 bp, Oryza sativa
atcactcctccggctcttcttcagtatcgaatggtctcttctcctcgtgcccaccaccaccaccgtagcaatggcgggcaacgggccgatcaacaaggaggacccgttcaactggggcgcggtg

SEQ ID NO: 408226 - DNA, 321 bp, Oryza sativa
tctagaagttcgccgacgaggtgttcaaggggaagcacgacagccccggcatcctgtccatggcgaacgccgggcccaacactaacgggtcccagttcttcatctgcaccgtgccctgcagctggctggacgggaagcacgtcgtgttcggccgcgtcgtcgagggcatggacgtcgtcaaggccatcgagaaggtgggatcccgcggcgggagcaccgtctagccgtgttgtcatcgtcgactgccgccagctttcttagacctgtgtctgtttccccctcattattccccattctattttcgccctttagtccttctcc

SEQ ID NO: 408227 - DNA, 234 bp, Oryza sativa
atgctttcaacctcctctctcttctcatcaagcctcaatcaaaaggcttgaagggaagaagagcaactccagcaggtagaaaggccagaagcaaagatggcgatctccagcctatatgccaccacctccctgcactccccatgcaccaccaacacaagcttcaggcagaatcaggtcattttcttcaccaccagaagcaacaggaggggtagcacatggtaccgcggatcaaga

SEQ ID NO: 408228 - DNA, 305 bp, Oryza sativa
tgatgcaagtacagtagccatggcgaagcatctcgcgctgtccgtggccgccgcggtggccgtgtcgtggctggcggcgtcgtcggcggcggcggcggggttctacgagaagttcgacgtggtgggcgccggcgaccacgtgagggtggtgagcgacgacgggaagacgcagcaggtggcgctgacgctggaccggagctccgggtccgggttcacctacaaggacacctacctgttcggcgagttcagcgttcagatgaagctcgttggtggtaacttctccggaaccgttacctccttttacc

SEQ ID NO: 408229 - DNA, 293 bp, Oryza sativa
taccaccaaaatagagggccgtggcaatggcgtcaagactaacattgtgaacatgggggatatagcaaaagccttagccaggcctgcttcctacacaacaaagtactttggatgtgagcttggtgcacagtctaaatttgatgagaagactggtatttccttggttaatggggcacatgatcctgctaagctgccttggtctcctcgagaacttcatcaggaagtctgttcaatgccttggatgttgtatctctgtgacttgtgttcctatcttctagaactagttgactttc

SEQ ID NO: 408230 - DNA, 468 bp, Oryza sativa
tctttggctgccaagctagctcgcctccacagtctgcgcgaacgcctcggtgccaccttctcgtctcatcccaatgagttgattgcactcttctctaggtatgttaaccagggaaagggaatgctccagcgtcaccagctgcttgcggagttcgatgccttgatcgaagctgacaaagagaaatatgctccctttgaagacattctccgggctgctcaggaagccattgtgctgccgccctgggttgcactggccatcaggccaaggcctggtgtctgggactacattcgggtgaatgtaagtgagttggcagtggaagagctgagtgtttctgagtacttggcattcaaggaacagcttgttgatggacccacccaacagcaacctctgtttttgcgccttgattttgggccctttaatgtcttctttcccggcccgtccatgttctaattaatttgtaatgggggt

SEQ ID NO: 408231 - DNA, 384 bp, Oryza sativa
tgttcccccatatcacatcctctccttcctcttggtctgctcactcagctctcccccgcgcgcgccaccgtcgtcgccatgtcgggcaacatcgccttcggccgcttcgatgactccttcagcgcggcctccctcaaggcctacgtcgccgagttcatctccaccctcgtcttcgtcttcgccggcgtcggctccgccatcgcctacaccaagttgaccggcggcgcgccgcttgacccggccgggctggtcgccgtggcggtgtgccacgggttctggctgttcgtgttggtggctcatctcgcccacatttttcgtgaggtcttctttacctcgttctgcactttattgttctttcttccctcgtgtctttccccctctccc

SEQ ID NO: 408232 - DNA, 199 bp, Oryza sativa
tatcaaagcgaatctagttcgattcgatagggttcgttatcgctgcggagccaccttctagactcataccaatgagttgattgcactcttctataggtatgttaaccagggaaagggaatgctccagtcttaccagttgattgcggagctcgatgccttgatcgaagctgacaatgagaattatgcttcatttgaagac

SEQ ID NO: 408233 - DNA, 122 bp, Oryza sativa
taactcatcccagccgccgccgccgcagccgggggcttttgccatctcccgcgcgctccttcaagacagctacctgcttaatcaaccatgggcaaggagaagccccacatcatcattgtggt

SEQ ID NO: 408234 - DNA, 262 bp, Oryza sativa
tggcacagttatggctagggtcacatttatgtgagaggaacagtactctcgcatggatgctgccaaccacctcctactcgtaaaagactatgtcactcttctgggtgcaaccatgaagaagtatggataccaaaccacattattgtttgaaattcttgagaagaatagggacaaattctatcaacttcttctttctgattgccggaaaaagatagatggcatcttcactaaggactcatatgagctgatgatcattaagtaa

SEQ ID NO: 408235 - DNA, 280 bp, Oryza sativa
gtgagctctgccttttggtttgctcttggtggaaagcagaattacacaagcagaaatgccacacatgatgttgttagagagcctcacttgtatacattctcattgaggaatgggaaactggaggtcactgaaattttcaacttttcacaagatgatttgctgactgaagacatgatggttcttgatacacatggggaagtctttgattggatgggtcagtgtgtggatgctaaagagaagcagaaggcatttgaaattggccagaaatatgcagaacatg

SEQ ID NO: 408236 - DNA, 380 bp, Oryza sativa
tttctagggcgatggtgtcagctagggtgaggcaatctctgtaggatatgctatcccaacatgctatgcttttgctggaccttgctgggcgtgacctaactgactacctcatgaagatcctgaggagcgtgggtactaattgacggcacaggacctgagggaaattgcgagggacatgaaggagaagctttcctacatcgtcctgcactatgaccaggaaatggagactgccatgaccagctcctccgggagaagagctacgagcttactgatggacaggttatcaccattggtgctgagcgtttccgctgccttgggtgcatttccagcctttcttcataggaatggaagctgccggtatccatgagactacatacaac

SEQ ID NO: 408237 - DNA, 333 bp, Oryza sativa
ttttctctccttctccgactccgacgatctttttgccggcgaggtgcggggagcatgtacctgtcggccttctcctcctcggcgtcttcgcacggcggcggggacagcgaggccagggacagctccacggtggtcgccgtcgaccgggacaagaacagccagcaggcggtcaagtgggcggtggaccggctcctcgccaggggcagcgttctccagctcgtccatgtcaagccacagcaaaatgctgaagcaggagcggatgcagagatgcaacagatgttcatctaatacagaggctattgtgctcgtaaagggatgcaattgaggaaggtg

SEQ ID NO: 408238 - DNA, 430 bp, Oryza sativa
tgttgttgctgctgctgctcctcccgttttccgatcgcagccatgggaacccgcagcgtggccttggtgctcctcgcggccgtgctgctccaagccctcctccccgcttcggcggcggagggtttggtgcggatcgcgctgaagaagcgcccgatcgacgagaacagccgcgtcgccgcgcgactctccggcgaggaaggggcgcgccggctgggcctccgcggcgccaactcccttggcggcggcgggggtgagggcgacatcgtggcgctgaagaactacatgaacgcgcagtacttcggggagattgggcgtcggcacttcgccgcagaaattcaccgtcatcttcgacactggcagctccaacctctgggtgccgtcggccaagtgctacttctcgattgcgtgcttcttccactctcgctacaag

SEQ ID NO: 408239 - DNA, 262 bp, Oryza sativa
ttaggaggaaattgtcacaggaatcattagaggcacttggggatgggaacccgaaatatggcactaaggtgctcctcgtggacgggctgctacaagccctactgccggcataggcggaaggagggaaaggagcggatcgcgctgaagaagcgcccgatcgacgagaacagacgcgtagccgcgcgactctccggcgaggaaggggcgcgccggctgggccttcgcggcgccaactcccttggcggcggcggtggtgagggcg

SEQ ID NO: 408240 - DNA, 272 bp, Oryza sativa
tctggatgacacaaatgtctatcgagttaccatgggacaaaatattcgagggtaacttgaccactaaaccaatcaatggtgctatttttatttttaatccaagatctgttcaattatttttttaggttattcattcatgttttttgtctgtattttttttttcttcattttttttactttgttttttattcttttatcttttttactttatttatcattctttccttatttgtattcatatcctcttttttttttttttttttttttctctt

SEQ ID NO: 408241 - DNA, 255 bp, Oryza sativa
ttccgcctctttcttcttgggggggcgcgggggcttatttaaaggaaccggcggatataccattgtgctcctcgcggccgtgctgctccaagccctccttcccgcttctgcggcggagggtttggtgcggaacgcgcttaaaaaacgcccgaacgaagaaaacaggcgcgttgacgcgcgaattttcggcgaggaaagggccccccggctgggccttcgcagcgccaactccctttggcgcggccggggtgaggg

SEQ ID NO: 408242 - DNA, 262 bp, Oryza sativa
ttctcgtgccccaccttcgtctacaacaagtacatactagaccccaagatgtacaactgggccttaccgatctgcctcaccatggtccacatggccttctgctcctccctcgccgtcgccctcgtccgcctcctccgcgtcgtcgagccgtcctcgtcgcccgccatgaccccgcagctctacacctccttcgttgttcccatcggcgcgctctacgccatgtctctgaggttttccaacctcggctcccatttacctcttc

SEQ ID NO: 408243 - DNA, 193 bp, Oryza sativa
aaactaaataccgcttagatcctaagtgtgctaatgtaaagacacctgacagacatgtccggacaaggctttatttcacatcagaatcttacatacactccttaatgaatgtccttcgctattgcaacttggatgaatgtctacaaggggaggattgccttttattgtcaaagacgcattatactttcttgca

SEQ ID NO: 408244 - DNA, 293 bp, Oryza sativa
tatactacatccgcttcgcttgctcctctggggaagtcgggaaagctacgcgcgggaccatggcggcagtggcaggaggcgcagcgcggtcgctgatgcaggcggagcaggacgtgcagatgatgcttgtcgccgacgtcttactctggcaccaagaactgtgactttcagatggagcgctacgtctacaagcgccgctccgatggtatctacatcatcaacctcggcaagacatggggagaagctgcagctcgcggcgagggtgattgttgccattgagaacccccaggaca

SEQ ID NO: 408245 - DNA, 306 bp, Oryza sativa
tctctgccttgctccacttgccaaggttatcaatgacaggtttggtattgttgagggtttgatgaccactgtccatgcaatcactgcaactcagaagaccgttgatggaccctcgagcaaggactggaggggtggaagggctgccagtttcaacatcatccctagcagcactggagctgcaaaggctgtcggcaaggtgcttcctgctctcaatggaaagttgactggtatggctttccgtgttccaaccgtggatgtctctgtcgttgattcgactgtcaggctttgagaagccagcttcctatg

SEQ ID NO: 408246 - DNA, 157 bp, Oryza sativa
tctgatcgaatcctctcttctcctcgtgcccaccaccaccaccgtagcaatggcgggcaacgggccgatcaacaaggaggacccgctcaactggggcgcggcggcggccgagatggccggcagccacctcgacgaggtgaagcgcatggtggcgcag

SEQ ID NO: 408247 - DNA, 467 bp, Oryza sativa
ttttcgcctctcctcctcccccgtcttcccttcgcgcgcgccacccccacacacgcgaccatggcggcagtggcaggaggcgcagcgcgggcgctgtcgcaggcggagcaggacgtgcagatgatgctcgccgccgacgtccacctcggcaccaagaactgcgacttccagatggagcgctacgtctacaagcgccgctccgatggtatctacatcatcaacctcggcaagacatgggagaagctgcagctcgcggcgagggtgatttgttgccattgagaacccccaggacatcattgtccagtcggcccgcccctacggccagcgcgccgtcctcaagttcgcgcagtacactggcgcgcacgccattgttggaaggcatacgcctggtacatttaccaatcagctccagaccttcttcagcgagccccgtctgctcatccttaatgacccaggaccgatcacca

SEQ ID NO: 408248 - DNA, 201 bp, Oryza sativa
tgcagcagcagcagctgagcttgaagcagcagagcgaggtagacatggccgccgccaccatggccctctcgtccccggcgctggccggcaaggccgccgcgaaggttgtctttcagttttttatatctcttttccatattttcttttattctatttttctttttcttcttttatttttactcttttccctttttcttccct

SEQ ID NO: 408249 - DNA, 194 bp, Oryza sativa
ttatctatgtttatatgtcctatctgcaacacaaagacctgagctcatccgtgctacactggctacacttcatgctttcttatcatggataccagtgggcttcatatttgagtcacctttgctggagacattactgaagttctttcctatggctgcttattggaacccttacattccagtgccttacagaggtc

SEQ ID NO: 408250 - DNA, 333 bp, Oryza sativa
tatgaacatcgccgacaacccaaccaacgtgcagctcctcgggatgtacaacagggaggacaacccccgtgtccccatcatcgtcaccggcaacgacttttccacgctgtacgcgccgctcatacttgacggtcgtttggagtcgttttctcttttctttcttctttctactttttttttctttttttcttttctttttctatattccttttttccctttctctttttctctttattcttctttttttttttttcctcattcttttctttactttttttttatatcttcttttttttttatttctctttctttttttatttattctttttttt

SEQ ID NO: 408251 - DNA, 288 bp, Oryza sativa
tctaggcaagcttgaatacactgacttctgaggtacagcgtctgtacaagttatgtgctgagtggaaagaagcggaagattccttgaagaaaaagtggaagaaaatagaagaatttgatgctcgtagatcagaacttgagtgcatttacaatgctcttctgcgggccaatatggaggcatcaacattttgggagcaacagccattatctgcaagaggatatgcgtcaagaacaattatccctgcttgtaatgctgtggtagacatgtcaactaactcaagggatctta

SEQ ID NO: 408252 - DNA, 100 bp, Oryza sativa
tcgccaaggccaggtacgtcaagttccactggaagcctacctgcggcgtcagctgcttgatggactactaggccacgctcgtccacaataaagaaccaca

SEQ ID NO: 408253 - DNA, 339 bp, Oryza sativa
tcttaactttgctactgcagagcactttgcaaggatgctgctggagaacaaccctaatgagagccaagcaaagagggcccgacaggtgcagcaacagtgcagtggaaagaaggatagctgtgagctgaactatgactacagaaatccatttgtcgtctgtggtgccacatatgttccaatttaccgtggccagaaggatgtttcctgcccgtactgtggatcccggatttgttccttccatcgaagggcagctttgtaccatatgtgagcttgctgtggttggtgcagatgcttcaggccttctctgctcccctacgcagttgagataagtggcgcttg

SEQ ID NO: 408254 - DNA, 168 bp, Oryza sativa
taaacaaacccctctcactcccagatacctggtgctgctcactagcccactacgcatggatccttgcaagttccggccgtcgagctcgttcgacacgaagacgacgacgacgaacgcgggagctccggtgtggaacgacaacgaggcgctgacagtggggcccagggg

SEQ ID NO: 408255 - DNA, 126 bp, Oryza sativa
acctaacaaatccccaaatctaaccggagaaaaccccaatctttcgccgccgccgccgtgatgtctcgccggtacgacagccgcacgacgatctattagccggaggggcgtatttaccaggtggag

SEQ ID NO: 408256 - DNA, 472 bp, Oryza sativa
tttttactctttcccctcgagttcttcaccggcttctttcccctcctctccggaccagggaagcagctaactgtctgcgcaagaaaggtggttcaagcacgatgggacggaaccatctttgcctggtcacttgcttgtggattctgtcatgcgcagttctgcttcatgcttctcctgatggattgctgagaattagcctgaataagaagagattggacaagaagaccttggacggtgcaaaattggcaagggaggaaagccatcgtctgagagccgacggtttaggtgatgacatagttcctttggacaactacctggacacgcagtactttggagagatcggcatcggcactccaccacagaacttcactgtgatattcgacactggaagctccaacttgtgggttccatcagtgaaatgttatttttcgatagcatgctacttacaccacaggtacaagttcaaagggtc

SEQ ID NO: 408257 - DNA, 387 bp, Oryza sativa
tgtcctctgcgacgacgactcaaccatggtgtagtactgatgcaagacgcgcggcccaaccaagtcctccaaggccatgggccgggacttgcgtgtgcactttaagaacacctgtgagacagcttttgctatcaggaagttgcctctgttcatggccatgaggttaccttgaggtttttttagtttcattattttattttttcctttttctctttcctttctttttattctctttttttactttttcatagtcttcttttttctatatatatttctttcctactttctctctcctctttttctattatttttctttcttactattacttcttcttttttttcttatcactctcctttttacctcttcctttttactcttatcttttt

SEQ ID NO: 408258 - DNA, 465 bp, Oryza sativa
ctacttttcctcgtcgccggccagagctcttcgtcttctccaactcgaccggaagcaagcgcgcttccgatccgccatggtgctctcccacggcgtgtcgggctccgatgagtccgtccactccacgttcgcctcccgctacgtccgcacctccctccccaggttccggatgccggagcagtcgatccccaaggaggcggcgtaccagatcatcaacgacgagctgatgctggacggcaacccgcggctgaacctcgcgtcggttcgtcaccacgtggatggagcccgtgtgcgaccagcttattcaggccttcgttaacaagaactccgtcgacatgggccaagttccccgttaccctgaactccataacctgtgtgtgaacatgattgtccccctcttcaatgctcctcttggggactctctaccgcctctcttttcctcttctttcgcttttcttgagttct

SEQ ID NO: 408259 - DNA, 316 bp, Oryza sativa
ttttcaaagtggggacggataaggcgctttgagatggaaatggggcaagctctgctgcggatctaccttctaactacctaatgaattctaaggttgttgggctcgagaaagctgtggccttcctttggcgtggcacacactccagatttgaagctgctatggatgatgcaagaatccggacgactgatatagcgacacatgctgacgttgctatatattggacctctatctgacttgaactatgacacatgaggatgattggcactggaccacagacgtttgttgagattgcagagggtcgccatgccttctgttc

SEQ ID NO: 408260 - DNA, 420 bp, Oryza sativa
tttatgtcaacgagttccagaccaacctggtgccctacccgaggatccacttcatgctttcctcctacgccccggtgatctcggccgagaaggcctaccacgagcagctctccgtggcggagatcaccaacagcgccttcgagccgtcctccatgatggccaagtgcgacccgcgccacggcaagtacatggcgtgctgcctgatgtaccgcggcgaccgtggtccccaaggacgtgaacgcccgggtggccaccatcaagacgaagcgcaccatccagtttcgtggactggtgcccaccggggtttcaagtgcgggatcaactaccagccgcccagccgtcgtcccgggggggagaccctggccaaaggtgcacagggcccgtgtgccatgattctccaactccacccgcgtcgttcta

SEQ ID NO: 408261 - DNA, 72 bp, Oryza sativa
tctttccatctctctcagctctcacagctcactggatcaatgttcagaggccaccatggcacatcaaatcca

SEQ ID NO: 408262 - DNA, 342 bp, Oryza sativa
ttcgtttctgaccaccattggttcctgaaattgaggcatggctgccaagctagctcgcctccacagtctccgcgaacgcctcggtgccaccttctcgtctcatcccaatgagttgattgcactcttctctaggtatgttaaccagggaaagggaatgctccagcgtcaccagctgcttgcggagttcgatgccttgatcgaagctgacaaagagaaatatgctccctttgaagacattctccgggctgctcaggaagccattgtgctgccgccctgggttgcactggtcactcaggccaaggcctggcgtctgtcactccttttctctgatactttgtaact

SEQ ID NO: 408263 - DNA, 158 bp, Oryza sativa
ttcatctctcttcccccccgcgtccagttccatctaatcagcttctcgtcgagatgggccgcaagttcttcgttggaggcaactggaaatgcaatgggaccactgatcaggtggacaaaattgtcataatttaacttgagaacagatcgcttctacag

SEQ ID NO: 408264 - DNA, 484 bp, Oryza sativa
tcgtgtaaatgacaagtctttctactgtttggtgaaggaatgtgagcatcctgttgcaccaagacagcggaaatttgttcgagtgcaacttttgagatcaggatggtgcattaggaaaatccctggaagggatgcatgccgaattacagtgctgcatcatgaagacaacggcatgaacatagagatggcaaaactggcatttgccaagggcatttggaattacatttgtaaaatgaacagtgcactacgtcgctatcctcaacgtaacatttcatcaatatcaattctgaccatgcaaagacttaccaagaagtttcctcaggccttggagactgatgtagatgcaaatcatcatcctcaaggaaatacaagagcaaatgttgttcctacacattttgcaagaacttcatcacgccaacagccagggaagaagtcatctcgggcaacgattgcaagtggacttctgcttatcggaagcattgtt

SEQ ID NO: 408265 - DNA, 445 bp, Oryza sativa
gtgatcatcatcatcatcaagtcctattaaacatctggagaatggctgaagaaaagaagaccccatgcctgaatgagcggatcctgtcgtcgctctcgaagcgatccgtggctgcgcattcctggcatgatcttgagattggacctggagctcctcaggttttcaatgttgttgttgagatcacaaaggggagcaaagtgaagtatgagcttgacaagaagactggaatgatcaaggttgacagggtgctatactcatcggtggtgtacccgcacaactacggtttcataccgcgaacgctgtgcgaagatggggatccaatggatgtgctggtcctgatgcaggaaccagtgattcctggctgctaccttagagccaaggccattggcctcatgcctatgattgatcagggtgagaaagatgataagatcatcgcggtttgcgt

SEQ ID NO: 408266 - DNA, 515 bp, Oryza sativa
tcgatgtttaccagaatgctcgtgcctgcattaggctccgtgtggcttgtgagaagctcaagaaggtgctgagtgctaaccctgagtcaccaatgcacattgaatgcttgatggatgtgcaggattcttgatgtttttttactaatttctgttcctcattattacttttaatttatatcttattattatttctcatttttttatattctttatatatttttttctatgtacttttttattttctacttctctataaattctcttattatacatctttacttttacaatctattattactttttctcatttatatatctttaacctcttttaactctctcacttttttactatattcattattttttattctttctttctctactattttttcattaatctctatactcattattttatcttatacttctttttttcctctaccttaatttctttattaatttactatttacttattatataatctttttgaattttacctaatactatatttatc

SEQ ID NO: 408267 - DNA, 437 bp, Oryza sativa
gttttccagggtcttgaggatcacttgggtgatatggacttcaaaattgcaggaacaaggagaggtattactgctattcaactggatataaaacctgctggaataccgttggacataatatgtgaaagtttggaacctgcacgaaaggctcgaaatcaaatccttgaccgtatggaccaggaaataagttctgcacgtgcttttaatgatgggagctctcctcgattagctacactgagcttcagcagtgattctcttaggaaactgcttttccacaggaaaaaaattgagcaagaaacaggtgcacgggtatctgttagtgatggtacagtcactattgtagcaaaaacccaaccaattatggataaggctatcgagaaggtagaatttcttggggtcgtgaaatgaagttgcagaacgaccaaggtgttgttcct

SEQ ID NO: 408268 - DNA, 440 bp, Oryza sativa
ttttcactacggggttccagctttgcctcggcattggtatcctgacggacaacctgactaactacagggcggtgcgcatcccgctgcgggggggggagctctccctcggtctggctgcggcgccagggcacgtcatactactcgatgcactggtcatcttggacaccccaagcagtctgctcgagcgcgggcgggtggagcacgcccacggaggccaagctgaaggtggcgatcaacgggttcgggcgcatcgggcgcaacttgctgcggtgctggcacgggcgcggcgacagctcgcccctcgacgtcatcgccatcaacgacaccggaggcgtgaagcaggcgtcgcacctcctcaagtacgacttcacgctcggcatctttgacgccgacgtttagcccgtgggcgacaacgccatcttcgtcgactgtaaggtgat

SEQ ID NO: 408269 - DNA, 309 bp, Oryza sativa
tcgttgatgctctaatctcaatcagggaagaaattgcagaaatcgaaagtggcaaagcagatgtgaacaacaatgtcctcaagagtgctcctcacccgccccaacttctgatgagcgactcatggactaagccgtactccagggagtacgctgcgttccctgcagcgtggcttcggggcgccaagttctggccaacaacatgtacttgcttgcttctgtgtctccaaaagattgctctttgctcaacacaatttgacaccaacctaatctctattttgccgagtctgtgctcttactaggtcgcgttgg

SEQ ID NO: 408270 - DNA, 456 bp, Oryza sativa
ttctaggttgatcgcccgatatggagatggcgaagatactggttttgcaccggtggatttgttgatctacacaggggatgcactgggagagtcttctttaatcactgagcatactgagctattactacttgccggaggctatggagctgagatgatatgaggtcacgcgtcagacgatgggtcggctatgctcacatttgaatcactggtggaaacagcataatttgctaggagatgggttccattttgcaagaagtactccattgaggcacgtgcccctgagttctacttctgacagaagattgactacttgaaggacaagatacacccatctttcgtcaaggagcgtcgggctatgaagagggattacgaagaatacaaggtgaggataaatgctttggttgctaaggctcaaaaaacacctgaggaaaggctggattatgcaagatgggacac

SEQ ID NO: 408271 - DNA, 288 bp, Oryza sativa
ttcgaattgagggacggtggatctgattacttgggaaagggtgtttccaaggctgtctacaatgagaactctattattgtcccatctcttattgttaagttttctactatatcttgctcatctatataacttcaattttcatctttctaacttgttccaaatactatgttcttttttctactatcttttaattcttttttttttattcatctctatttttttttcctcttctatttcttttatccttttttatttcatttctttcttactatttcactctattctttt

SEQ ID NO: 408272 - DNA, 506 bp, Oryza sativa
gttagtacccaatccgctggagtccccttgcagatgtagaggatgggtattctccaacacttcctcatctcaagggtctacagaatggagacactgccacaagtgccattaagcaggttgcatctggacgctttggggttacaccaacatttttagtaaatgctgaacaaattgagataaagattgcacaaggggcaaagcctggtgaagggggccaacttccagggaaaaaagtcagtgcatacattgctcggctgagaaactccaaacctggagttcctctcatatccccaccaccccaccatgacatctattcaatcgaggatctagcacagttaatttatgatcttcatcagatcaatccaaaagcgaaggtatctgtaaagcttgtagctgaagcaggaattggaactgcagcttctggagtatccaaaggaaacgcagacataattcagatatcaagtcatgatggtggcactggagctagccccattagttcaatcaag

SEQ ID NO: 408273 - DNA, 582 bp, Oryza sativa
ctcactgtagggctggctcgcacgcctgcacgcggcccggccttcctggctggacccacccatccggttactctcgactagcagaagccgagcgaccgccttctcgatccatatcttccggtcgagttcttggtcgatctcttccctcctccacctcctcctcacaggttcttggtgtagcttgccactttcaccagcaaagtttcatgtctgatctcgacattcagatcccaactgccttcgatccctttgctgaggccaatgctggagactctggtgcggctgcaggatcaaaggactacgttcatgtacgcatccagcagcgtaatggccgtaagagcctgaccactgtccagggattgaagaaggaattcagctacaacaagatcctcaaagatctcaagaaagagttttgctgcaatggtactgttgtccaggacccagagcttggccaggtcattcaacttcagggtgatcagaggaagaacgtatcaaattttcttgttcaggccggcattgtgaagaaagaacacatcaagattcatggtttttgagcaactgccaaaaccattgcaaagacta

SEQ ID NO: 408274 - DNA, 386 bp, Oryza sativa
tcgcaatggctgcaattcgattggatgaggatggtgacaacattgagaacaccctgtcccttgctctagttgacacagcaaggccagggactacagataggagcatccaatcgttcgatccacttgcctctagctcatgggaaagggttccagaggagaaaactttaattacacctgtccagtgcaaatctttatggaggcaatttaaggctgaaactgaatatactgtcacacaggccatagctgctcaggaggcaaataagaggaacaacaactggctgccacctccatgggcacttgccgcaatggctatcctcggattcaacgagttcatgacattgttaaagaatccccttcacctgggagtcatatttgtcgtcttcctt

SEQ ID NO: 408275 - DNA, 237 bp, Oryza sativa
tttttatatcaacccgctccacaccaacctggtgcggggccttttgaaccacttcacgcgtacctcccaccccccggagatctcggccaataaggcctaccactagcagccctccctactggagatcaccattagcgccttcgagccttccttcattatggccaagagcgacccgcgccacagcaaagtcatggcgtgcttcctgacttaccgctgccaccatgtcccccatggtac

SEQ ID NO: 408276 - DNA, 174 bp, Oryza sativa
tgatcgaacaacgcactctgcagctagctatacaaggtctgtttaattagctaggtagctagcgagtcataaatcaagaagccatggacttttacgggcggcgcgagcagtacggcgggtatggcgggtacggtggcggcggcgccctggcgacgccggggtacgcgccggcgg

SEQ ID NO: 408277 - DNA, 253 bp, Oryza sativa
aataatttacctcctccacctcctcctcctgcggggcgatcgtatcggcccggctcctcctactccgccgccgccaccgccgtcgcagataggagaagatggccggacttgataccttactctttacctcggagtctgtgaacgagggccacccttgacaagctctgcgaccaagtctcagatgctgagcttgatgcctgccttgcctaggaccctgacagtaaggtcgcttgtgagacctgtaccttgacaa

SEQ ID NO: 408278 - DNA, 424 bp, Oryza sativa
ttttctggtagcttttctcctggttctcctctgcgtgcatcgcccgagctattaagcgcagcagttatggaagcaaagaaatggttagaagagaaaaggcagggattaggttcaaagcctgaagaccatggaccttgcacattaaacactgatatgcttaactctgggtttgaatctgacatgggttctccagttgatttagcaaaatcatacatgcagtcattgcctccttggcaatctccattcttaggtagccagaagtttaaaacaccaccctctgctgggttacatatgtatgattatgaagggaagtccaaatattctctcccctcatcaaaggtcaccaccaaggaagaatatctttccaatttttgggaaaatttggaggaatcttgtaggttttgcctgggatcattttggaagt

SEQ ID NO: 408279 - DNA, 397 bp, Oryza sativa
tgtttggataaaaggcaattacctgaagtggacaaaacttctatgtacaaagcttctggatatatggacgttgataaaataaatgcagctgcttggcccgctttggtggctgacttggatgctggagaccagagcattacagctcttgcatttggttttacaaggctcttccagccggataaacccgtgacgaaaggacaagtggctcttgcactttcaactggtgattctgctgatgtggttatggaggagcttgctcgtattgaagcagagaaaatagctgaagatgctgtaaatgcacatggtgaactcgttgctcaagttgagaaaggatctgaatgccacttttgagagagagcttacaaaggaaagagaaaaatttgagagaccttgaaaa

SEQ ID NO: 408280 - DNA, 334 bp, Oryza sativa
ttcccacgccgcgggagatgtgccggaggctcggcgagttcgtcatcgggcaggggaaagctaaaaaggtcttgtcggtagctgtatacaatcactacaagagaatatataacgcgactgtacagaaagggtgttccaccaattctgggtggctagacgctgcaagtgatgatcaaaataacatagaaatagataaaagcaatgtgcttctaatgggtccaactggctcaggaaaaacattactcgccaaaacactagcacgcattgtaaatgtaccattcattatagctgacgcaacatcattaacacaggctggatatgtaggtgaagatgt

SEQ ID NO: 408281 - DNA, 546 bp, Oryza sativa
tgatggatatctgtttgcatctttccggcttgagggggctgaaaactcttgcgaggaccacgaatgggctcgttctttctaagaagctcccaaggttgaaagaatgtgggctcaatgctctaaatattagcttggacaccgttggctcctgcatagtttgagttttctacatgtccttatcggccattttcaagctttcgtatcgctttgatgctttatattctacttcgctattcccttcttttttctttctattctccctgtttttatcttcctgtttacatttacctttatatctcaccatccttcttcttttcttttctacttctttttttttcatatacttcttcttttcactttcattattcttctcttacttatcctccatctatattaattattcttcactttataaattctcttatttcacatttttctttcttattttcttttctctcctctctcttactctattattcttttaccattcctttatcttatcttcttttctctctattttcactctttcttatcttttgttctact

SEQ ID NO: 408282 - DNA, 493 bp, Oryza sativa
tttgtcgtctccctccgccgctttcttcccctttagggacccttccaaaattcaaacgcgaccaagccgccggcgaggtgaacgaaacccaaccatggcaggcggcggaggtggcgaggggaaggtggcgtgcgcggcgtggatccggcgccgggaggagaaggagaaggcgacgcgcgtcttcgcggcgtacgggcgggcggggtcgccgccggccgtggaggtgctcgggttcgactccaaggagtgctccctctccgaacccctggcgagggcggagctcggggaggagccgggcgacgcgccgcgtggcatcacggtgcaccccagcggcgacgagctcgtctgcgccacggccaaggggtgcaggctattcaagctgatttttgaagagttcactggtcgacttatttcaagagacgcttcaacacttgaatccgttggaccgcagaagtgtcttgttttagcactgatggatctaaatttggcattg

SEQ ID NO: 408283 - DNA, 389 bp, Oryza sativa
ctaacccctctcgcacccaatccaacccaatcgcctcctcatccactccgctctgcggccatggccgcctgctgctcctccctcgccaccgccgtctcctcctcctccgccaagcccctcgccggcatcccccccgccgcgccgcactccctctccctcccccgcgctcccgccgccaggcccctccgcctctccgcctcctcatccagatccgcccgggccagcagcttcgtcgcccgcgccggcggtgtggacgatgcgccgctggtcgggaacaaggcgcccgacttcgatgcggaggcagtcttcgaccaggagttcatcaacgtgaagctgtccgactacatcgggaagaaggacgttatttctttcttctacccgttggactt

SEQ ID NO: 408284 - DNA, 378 bp, Oryza sativa
tcgatgggacagactcccgtgttccctcggatcttcggccatgaagctggaggtattgtggagagtgttggagagggtgtgactgatcttgcccctggtgaccatgttctccctgtgttcactggggagtgcaaggagtgtgcccactgcaagtcagcagagagcaacatgtgtgatctgctcaggatcaacactgacaggggtgtgatgattggtgatggcaaatcacgcttttccatcaacgggaagcccatttaccatttcgtcgggacttcgaccttcagcgagtacactgtcatgcatgttggttgcgttgtgaagatcaacccggcagcttcacttgataaagtttgcgttcttagctgtggcatttctact

SEQ ID NO: 408285 - DNA, 385 bp, Oryza sativa
ttctttctaccgcaactgcgtcatctccggcaccggggacttcatcttcggcgacgccgcggcggtgttccagaactgcgtcatcgtgctccgccgcccgctcgacaaccagcagaacatcgccacggcgcagggccgcgccgaccgccgcgaggccaccggcttcgtgctccagcactaccgcttcgccgccgagtcggcgctcggcgacgcctcccgccccgccgtccgcagctacctcgcacgcccgtggcgcgagtactcgcgcacgctcatcatgaactccgacatccccgccttcgtagacaaggccggctacctcccgtggagcggcgacttcgggctcaagacgctctggtacgcggagtacgggaacaagggcgcc

SEQ ID NO: 408286 - DNA, 347 bp, Oryza sativa
tctttggcgcgcggagcctgatccatcacactggggcgaatataatcctctccaatgcctgcagaagagagcaagatgttcgggttcgggcactcactgccatcatggccaagagcagacagcccatcaccacgtgcgcggatgatgcagcgcgcaccattccaccttcaagatcttctgacccgcctacgaggggtactgcgtcgccaggcgcgaggggaacgtacttctatatctgaccaacccgagagacgagcaccagcactgttacaaggacatgcgctttagcgccaagatcaaggacttggagggcaacccggcgttcgcgctcgtcaacaaggccaccg

SEQ ID NO: 408287 - DNA, 461 bp, Oryza sativa
agaaaaggcctgtgtcaaggagagggtagtagcaccttgctctcctttgccttcagagaaaccggaagcaatggcgtctgctactctcctcaagtcatctttccttcccaagaagtctgaatggggtgccacccgccaggctgccgcccccaagccggtgactgtctccatggttgtccgcgctggtgcctacgacgatgagcttgtcaagaccgcgaaaaccattgcatcaccaggaaggggtatccttgccatggatgagtcgaacgcgacctgcggtaagaggcttgcgtcaattggccttgagaacaccgaggccaaccgccaggcttaccggaccctccttgtcaccgcaccgggcttgggacagtacatctccggtgctatcctcttcgaggagactctgtaccagtcaacttgagatggcaagaagattgtcgacatcctcactgagcagaaaa

SEQ ID NO: 408288 - DNA, 483 bp, Oryza sativa
tttttcggcctgggcatggccgctcgtcttcctcgtgtcgtgctgctgttcttggacccagcggcgaatcttggttgctgcgaccactgacgccaatgatgttactgtcctcaatgcgctattcaccagcctcaattcgccggggcagctgcgcggttggcaggtgaatggcggtgacccatgtggcgcctcatggcagggcatcacctgctctggatcatcagtcacagcaattaaattgccgagcttggggctttcggggaatctggcctacaatatgaacaccatggagtccctagttgagcttgacatgagccaaaataatcttgggggtggccaaaatattcaatacaatcttccaaataagaagcttgagaggctcaatcttgctgggaaccagtttgtggaaatgtgccatactcattttcacaatgcctaaccttagtatctaaccttaatcataaccattacaggaaatatgac

SEQ ID NO: 408289 - DNA, 392 bp, Oryza sativa
ttattctcctttaccccaatctcgtgagcggcgacgaactttgccaccgatttcgatccttttttttggcagcgtgtagtgacgcgagagagaaatggcgagcaagaggagcgtgggcaccctgacggagtcggatctgaaggggaagaaggtgttcctccgcgccgatctgaacgtgccgctggatgacagccagaagatcaccgacgacacccgcatccgcgcgtcggttcccaccatcaagttcttgatggggaagggcgccaaggtcatcctggccagccatctgggtcgcccaaaaggtgtaaccccgaagtacagcttgaagcctcttgttccgcgcttgtctgagcttcttggtgttgatgttgtgatggccaatgactgcatcg

SEQ ID NO: 408290 - DNA, 302 bp, Oryza sativa
catctcctgagacagaatatggcaggatgaacattggtagccgaccatcaaagagaaagcctagtggtggcattgaatcgctccgtgcaattccttggatttttgcttggacacaaactaggtttcatcttcctgtatggcttggatttggtggagcgttcaaacatataatgcagaaggatatcaggaacatccatacactgaaagaaatgttcaatgagtggccattcttcagggtcaccttggacttgcttgagatggttttcgtcaagggagacccaggatttgttgctttatatgac

SEQ ID NO: 408291 - DNA, 442 bp, Oryza sativa
  unsure (1)..(442): unsure at all n locations
ttctccaccctctcgccgtcgcagatccgatccaggaagagctcgccgccgccgctgccatggcgctctccgtggagaagacctcgtcggggagggagtacaaggtgaaggacctctcccaggcggacttcggccgcctcgagatcgagctcgccgaggtcgagatgccggggctcatggcgtgccgcgccgagttcggcccctcccagccgttcaagggcgcccggatctccgggtccctccacatgaccatccagaccgccgtcctcatcgagaccctcaccgcccttggcgccgaggtccgctggtgctcctgcaacatcttctccacgcaggaccacgccgccgtcgncatcgccagggactccgccgccgtgttcgcctggaagggggagaccctcgaggagtactggtggggcaccgagcgctgactcactggggc

SEQ ID NO: 408292 - DNA, 502 bp, Oryza sativa
ctatctcgttcctccttcctcatcaccaccatacgggaacactacgacaccagccagcaagcagcggaggagagagagagagagagagagactccatagacggccatcgatcgtacgcgactccccccatccatccatccacccgccggcgccccctccctctcatcgatcgatcgattcccaccgccgcccccgttttgaccacctacctagggtttcccccatcggaatgatgaccatgagcgacgatggagaccgcacctgcccgctctgtgctgaggacatggacatcactgaccagcagctcaagccctgcaaatgcggctatgagatttgtgtctggtgctggcaccacatcattgatatggctgagaaagaggacactgagggccgctgtcccgcatgccgcaactcgctatgacaaagataggattgtcagatggctgccacttggacaggacggtagtggagaaaaatgtggacaagaaacagaagacccaaa

SEQ ID NO: 408293 - DNA, 345 bp, Oryza sativa
taaaaaaaggaaaaaaaaacaaaacacaccaagcgcaaataaaagcgacaatgggatcgctcaccaccaacatcgtcctcgccgtcgccgtggtggcagcgctggtcggcggcgggtcgtgcggtccgcccaaggtgccacccggtccgtacatcacgtccaactacaacgccccgtggttccccgccagggccacctggttcggtcagccctacggctccggctcctccgtcattggtggtgcgtgcgggattaagaacgttaatttggcttccttcaacggtttgatttttttggcgcaacgttctctatttttatggtctgcctgggatgccttctttgcct

SEQ ID NO: 408294 - DNA, 457 bp, Oryza sativa
tcgttcacactctccgtctcctcctcatggcgatcgcgaaggcttggatctcgctgctgctcgcgctcgccgtggtgctgtcggcgccggcggcgagggcggaggaggcggcggctgccgaggaggggggcgatgcggcggcggaggccgtgctgacgcttgacgcggacggcttcgatgaggccgtcgccaagcacccgttcatggtcgtcgagttctacgccccgtggtgtggacactgcaagaagctcgctccagagtatgagaaagctgcacaagagctaagcaagcacgatccaccgattgttcttgccaaggttgatgccaacgacgagaagaacaagcctcttgctaccaagtatgagatccagggtttccccgcactcaaggatttcaggaaccagggcaagaacattcaggaatacaagggccccgaggaggctgagggcattgttga

SEQ ID NO: 408295 - DNA, 467 bp, Oryza sativa
tcttagaacaagggcgcgaggaggctgccactgcgccaagaggaggaggatgatttcgaggccgacttcgaggagttcgaggtggattccggcgagtgggaggtggagtccgacgccgacgaggccaagccgctcgccgcgccccggagcggcttcgctaaaggtggattgaaaaacactactgttgctggtgctgatgggcctgcagcaaggtctgctaaaaggaagagaaagaaccaattcaggggtatccgccagcggccatggggcaaatgggctgcggaaatcagagatcctcgcaaaggtgtccgcgtctggcttggcaccttcaactctcctgaggaagctgccagagcttatgatgctgaagcacgaaagattcgaggcaagaaagccaaggtcaatttcccagatggggcttcagtggcttctcagaagagtcatgctgagcccttcttcatgaacat

SEQ ID NO: 408296 - DNA, 490 bp, Oryza sativa
tgtgatctgagctctggtcagccgagccaagcctgccggtcgccggaggaggcaacgacgaccatgatggcgccgtccttgtccaccgccgtctcctctcttctcctcctcctcctcctagccgctgctatctccgtctcctcctcaccgccgatgccggaggacagcatccgggtcatctccgccgagaaaaggatcgacctcaccagccccatagtcaaagttttcctcacactaaagctcgagaatgatgccactgcccctgaagcatctcaagttctactcgcattcacacccacagaggttgaacatcttgcgattgtcaaggcgaccagagcggaggggaagcgcaagaagaagatatatgtgcctctctctgtgaaagcctctgatcttgctgccgctccaaatggtgctcgccttgactccattttgctgagcacttcattgaaacctgctgaggtgaccacgctggaagttttttttgctt

SEQ ID NO: 408297 - DNA, 393 bp, Oryza sativa
tcggtggagaagaagaagaagaagaagaagaagaggggggaggaggaggagcagcatggctgaacacaaggaggagcagtcggtgatggagaagctctccgagaagctgcacggcgactcctcgtcgtcttcctcggactcggacgacgacaagaagggttcctcctcgtcgtcggcggcggcggccatgaaggccaagatctaccgcctcttcggccgcgagaggcccgtccactccgtcctcggcggcggcaagcctgctgatctcgtgctatggaggaacaagaagatctccggtggggtgctcgccggagccacggccatctggctactcttcgagatcatggagtaccacctcctcaccttggtgtgccaatggctcattctctcctg

SEQ ID NO: 408298 - DNA, 354 bp, Oryza sativa
gctgaagccgagcgaccgccttctcgatccatatcgtccggtcgagttcttggtcgatctcttccctcctccacctcctcctcacaggttcttggtgtagcttgccactttcaccagcaaagtttcatgtctgatctcgacattcagatcccaactgccttcgatccctttgctgaggccaatgctggagactctggtgcggctgcaggatcaaaggactacgttcatgtacgcatccagcagcgtaatggccgtaagagcctgaccactgttcagggattgaagaaggaatccagctacaacatgatccttaaagatctcaagaaagagtttttgcttttttggccctgttgt

SEQ ID NO: 408299 - DNA, 170 bp, Oryza sativa
gctacaagaatgtgattggtgcccgccgtgcgtgctggcgtattgtctcatccattgaacagaaggaggagggtcgtggcaatgaggaacatgtttctctgatcaaggagtaccgtggctagattgaagcttctctgagcaagatctgctgatggtattctgacgatgct

SEQ ID NO: 408300 - DNA, 252 bp, Oryza sativa
gtgatacaaacccctctcactcccagatacctgctgctgccactagcccactaccatggatccttgcaagttccggccgtcgagctcgttcgacacgaagacgacgacgacgaacgcgggagctccggtgtggaacgacaacgaggcgctgacagtggggcccagggggccgatcctcctcgaggactaccacctgatcgagaaggtggcgcacttcgcccgggagcgcattccggagcgcggtggtcacgc

SEQ ID NO: 408301 - DNA, 424 bp, Oryza sativa
  unsure (1)..(424): unsure at all n locations
gtantgcacacacggcggaagcaacgccactagcgtgacgtacgtacggcagcaatggccatcgccaccgagtcgcagcaggcgcaggtgcaagccgccgccaccgacgccgtcgcggcggcggcggtcgggcgcaaggtggtggacgaggtgtccggctggctgcgcgtgttcgacgacggcaccgtcgaccgcacgtggacgggtccccccgaggtgctcccgctgatgcagccggtgcccgcctacgccgagccgcgcgacggccacacgctgcacgacctccccggcgagcccaacctccgcgtgtaccttcccgaggtcgccctcgccgagcggcgccttcccgtcgtcgggcagcttcacgggggcggcttctgcatctcccacccgtcctggctcatgtaccaccacttttacgcgc

SEQ ID NO: 408302 - DNA, 405 bp, Oryza sativa
tctgttgctgctgctcctcccgttttccgatcgcagccatgggaacccgcagcgtggccttggtgctcctcgcggccgtgctgctccaagccctcctccccgcttcggcggcggagggtttggtgcggatcgcgctgaagaagcgcccgatcgacgagaacagccgcgtcgccgcgcgactctccggcgaggaaggggcgcgccggctgggcctccgcggcgccaactcccttggcggcggcgggggtgagggcgacatcgtggcgctgaagaactacatgaacgcgcagtacttcggggagattggcgtcggcactccgccgcagaaattcaccgtcatcttcgacactggcagctccaacctctgggtgccgtcggccaagtgctacttttcgattgcgtgct

SEQ ID NO: 408303 - DNA, 399 bp, Oryza sativa
tttttaagctgggacatatgaccctaagcgcctttggggtgtgacgacacttgatgtagtgagagccaatacttttgtggcagaagttcttgggcttgatcccagagatgtaaatgttcctgtcattggtgggcatgcaggagtaacgatattaccactcctttcacaggtgaatcctccctgctcatttacctcagaagagattagttatctcaccactcgcatacagaatggtgggacagaagtagtcgaggctaaagctggagcagggtctgcaactctttcaatggcgtatgcagctgccaaatttgcagatgcctgcttgagaggattgcgcggagacgctgggatagtggagtgctcttttgtagcttctcaggtgatagagctgcctttttt

SEQ ID NO: 408304 - DNA, 369 bp, Oryza sativa
ttttatctctttagctcggatcatctctgcattgggatttgcagctgctcgtcacggcaatggcatccaccaacagctggacccacgagatcgagtcgccggtggccgcgccgcgcctgttccgcgccgccgtcatggactggcacacccttgcccccaagatcgcctcccacatcgtcgccagcgcccaccccgtcgacggcgacggcagcgtcggcagcgtcaggcagttcaacttcacctcagccatgccattcagccacatgaaggagaggctggagttcctggacgtggacaagtgcgagtgcaagtcgactctggtggagggcggcggcatcggcaaggcgatcgagacggcgacgtcgcaca

SEQ ID NO: 408305 - DNA, 517 bp, Oryza sativa
ttcttctcatggcgaagccgcagcttcttctggggggcgccgccgccgcactgctactcgtcgttgcagcctccgccaagaaatccggcgacgtgacggagctccagatcggcgtcaagcacaagccagaatcctgcagcattcaagctcacaaaggcgacagagttaaagttcactaccgtggaaaacttactgatggaacagattttgattctagctatgaaagaggtgacccaatcgaatttgagttgggcactggccaagtgatcaaagggtgggatcagggcattctgggcatgtgcgttggcgagaagaggaagctgaagatcccttaaagctcggttatggtgctcaagggtcaccgccgaccatccctggtggagcgactctcattttcgataccgagcttgttgctgtcaatggcgagccagccagcaaatccgatgaggacgatgatgacagcgagctttagaatggcaggaaggttcacattttacgcgccaaaacaaagtctagt

SEQ ID NO: 408306 - DNA, 509 bp, Oryza sativa
tgtttttaggcctgtgctcaagtatttctgacaaaggtcttgcttttatcagttcaagctgtggaaagctgattgagcttgatctctatcgctgcaattctattaccgatgatgggctggcagctttagctaatggctgcaagaagattaagatgctaaacctatgctactgcaacaagattaccgacactggtttgggccacctaggctctctagaggagctcacaaaccttgaactgaggtgcttggtccgcataacaggtattggaatctcatcggttgccatcggctgcaagaacctgatagagatagacttgaagcgttgctattctgtcgatgatgctggcttgtgggctcttgcccgatatgcgctaaaccttaaacagcttactatatcctactgccaagtcactggcctgggcctgtgtcacctgttgagctccctgaggtgcctccaggatgttaagatggtacacctctcatgggtctctatagaaaggttcgagatg

SEQ ID NO: 408307 - DNA, 472 bp, Oryza sativa
tttgttgtttcaagatggcgacgtgcacacttgcaggttcatgtgtgtccttgagcaatgctagaactcaggcctccaaggtggcggcggtcaagagcccggcatctctaagcttcttcagccaaggcatgcagtttccaagcctgaaggcctcctccaagaagcttgacgtctcggcaatggctacctacaaggttaagctcatcacaccagaagggcaagagcacgagttcgaggctccggatgacacctacatccttgatgccgccgagaccgctggagtagagcttccctactcatgccgtgctggagcatgctctacctgtgccggtaagatcgaggctggctccgtcgaccagtcggatggatcattccttgatgatgcgcagcaggaagaaggctatgtgctgacatgtgtctcctaccctaagtccgactgcgtcatccatactcacaaggaggagacctttac

SEQ ID NO: 408308 - DNA, 517 bp, Oryza sativa
  unsure (1)..(517): unsure at all n locations
nctgtttgttggcggaaacagggacaaagttcaggggaagattgttaaggagaaaattaagcttccggcatatttatctagcgaagttcattctctgctaaaaggcttactgcacaaagaagctggcaggaggctgggctgtggaccaggcgggagcaatgaaataaagaatcacaagtggttcaagtcagtaaactggaagaagctagactcccgacagattcagccaagcttccgcccaaatgttgctggcaaaacctgcatcgccaactttgacgagtgctggaccagcatgcccgtgctcgactctccagtggccagccctgtcgctgcagatagcaacttcgtgggattcagctatgtgaggccagcgcccttccttcagaggccgagtcctctaggctgaagacctccagttgagaccgaaatacatcttgccactgggtatgaagctgacaaaattactgtttcgatgattattatgtaaaactacctatttatgttgttcggtttgtct

SEQ ID NO: 408309 - DNA, 407 bp, Oryza sativa
tctgtctcactacccttgagtctcttgaggctattggtggaaaggacaagcttgtggtctcgacttcctgctcactcatgcacaccgctgtggatcttgtaaatgagaccaagctcgatagcgagattaagtcatggctcgcttttgctgcccaaaaggtggttgaggtgaatgcccttgctaaggcattggctggacagaaggatgaggcttactttgcagcaaacgctgctgctcaggcctccaggaggtcatcacctcgtgtgacaaacgaggaagtccaaaaggctgctgctgctctgaaggggtctgaccaccgccgtgctaccaatgttagcgctagactggacgcacagcagaagaagcttaaccttccagtccttcctacaaccacaattggttcattc

SEQ ID NO: 408310 - DNA, 390 bp, Oryza sativa
taagagccgggtggcggcggggtacggcgggggagggtacgggtacggcgggtacgaggggcgggacgacaggaagtggtggccgtggctcgtgcccaccgtgattgtcgcctgcatcgcggtgttcatcgtcgagatgtacgtcaacaactgccccaagcacggcagcgcgctcggcggctgcgtcgccggcttcctccgccgtttcttctttcagccgctccgcgagaacccgctcctcggcccgtcttccgccactttgcagaaaatgggagcttttgactggaacaaagtttgtcatcagcacccaggatggggtctcattagctggatctggcttcatgctggccctaatccatttgggtgggaacatgctgaggttactgttta

SEQ ID NO: 408311 - DNA, 239 bp, Oryza sativa
gttcttgacaccgccaccgccgatccgaagggcggggacgacgaccaccaccgccgccgccctcgtcctcgccgccggcggccatggcgttcggcgaccgcatcaccaccttcgaggactccgagaaggagagcgagtacggctacgtccgcaaggtctctggacctgtggttgtggctgatggaatgggaggtgctgccatgtatgaactcgtccgggatgggcacgataatctttat

SEQ ID NO: 408312 - DNA, 115 bp, Oryza sativa
tacatcaatgggcacgaccactgcgtgtaacacattagcagcagagacagtcctatccaatacttcacaagtggaggtggttcaaaagcatggagaggagtctggctgccagatt

SEQ ID NO: 408313 - DNA, 369 bp, Oryza sativa
cgtgttcttggttggtgatgctgcatctgtgggttgggtcttggaaccgagtgggaggtacgtaggaggtaggcccttcgtgaggcatgaacacgtcgagggcggaggataaggccatcgactactggttccccatcagctccttccgcaacgccaagtggtggtacttcgctttccacaacgtcaccgccatggtcggcgccggcgttctcagcctacccttcgccatgtccgagctcggctggggtcctggggtggcggtgatcatcatgttgagggtgatcactctgtccacgctgaggcagatggtttaagtgttgaagtgcttaacaaggttttttttttcctctattcaacttttctttatcc

SEQ ID NO: 408314 - DNA, 480 bp, Oryza sativa
tttatggatgctaaaaattaccatgcttggtctcataggcagtgggttcttcaagcactgggtggatgggagactgaactacagtattgcaaccagctgcttgaggaagacgtcttcaataattcagcttggaatcagagataccttgtaataacaagttcaccacttcttggaggccttgcagcaatgcgtgactcggaagtggattacacagttggggctattctggctaaccctcagaatgaaagcccctggagatacctcaaaggcctgtacaagggtgaaaataacttgctgatggctgatgagcgcatctctgatgtttgtctcaaggtcctgaaacatgattcgacctgcgtatttgctttgagcttgctgctcgatcttttttaaattggtttacaaccttcagatgaactcaaaggaactatcgaagcataaagaactctgatcctgaagcaaatgaacaatagatgcttg

SEQ ID NO: 408315 - DNA, 486 bp, Oryza sativa
ttccacggcaacgacttctccggccccatcccggactccatcgccgactgcaagcgcctctccgacctctgcctcaacagcaaccagctcgtcggcctcgtcccaccggcgctcgagtccatggccggcctcaagtccgttcagctcgacaacaacaatctcttgggccccgtcccggcgatcaaggcgcccaagtacacctactcacagaacgggttctgcgccgacaagccgggggtcgcctgctcgcctcaggtgatggcattgcttcacttcctcgccgaggtcgattaccccaagaggctggtagctagttggtccgggaacaattcctgcgtggattggctgggaattagctgcgttgcagggaatgtgacgatgctcaatttgccggagtatggactcaatggcacaatcagcgacagtcttgggaatctgagtgaactctcggacatcaaccttatcggaaataaccttactgggcat

SEQ ID NO: 408316 - DNA, 298 bp, Oryza sativa
tcgtaacctctcccaaaattagccccgatccgatcgcttcctagccctgattcgaggtaaaaaaggggaggagaagatgagggagatcttgcacatccagggcgggcagtgcgggaaccagatcgggtccaagttctgggaggtggtgtgcgacgagcatggcatcgacccgacggggaggtacgccggcacgtcggacctgcagctggagcgcgtgaacgtctactacaacgaggcgtctggcgggcggttcttgcccctcgccgtgcttatggacctggagcccggcaccatggac

SEQ ID NO: 408317 - DNA, 447 bp, Oryza sativa
ttcctttgcccaagctaatccccctcctcttcctcgtcgccggcgagagctcttcgtcttctccaactcgaccggaagcaagcgcgcttccgatccgccatggtgctctcccacggcgtgtcgggctccgatgagtccgtccactccacgttcgcctcccgctacgtccgcacctccctccccaggttccggatgccggagcagtcgatccccaaggaggcggcgtaccagatcatcaacgacgagctgatgctggacggcaacccgcggctgaacctcgcgtcgttcgtcaccacgtggatggagcccgagtgcgacaagctcatccaggccttcgtcaacaagaactacgtcgacatggacgagtaccccgtcaccaccgaactccagaaccgatgtgtgaacatgattgcacaccttttcaatgctcctctaggggactctgaa

SEQ ID NO: 408318 - DNA, 355 bp, Oryza sativa
ttggataggcacttcaccaaccctctgcctcccttcggccgccctccgccgccgcatgcaagccatcctcgccgctgccatggccgcccagaccctcttgttctccgccaccgcccctcccgcctcccttttccagtccccttcctctgcccgccctttccactcgctccgcctcgccgccggccccgcgggcgccgccgctgccagggcgctcgtcgtcgccgacgccaccaagaaggccgccggcgtgctcaagggcacctcccaggttgagggagtcgtcacccttacccaggatgaccaagggtcctacacagtgaatgtcccggtgacgggacttactcctggactttac

SEQ ID NO: 408319 - DNA, 429 bp, Oryza sativa
tcgttcagccgtccgccgccgcattggccgagcaggccctgctcggttcagacgccagcctcgccgtccacgcgggcgagaggctgggcagaaggatcgccacagacgcgatcaccacgccagtagtgaacacctcggcctactggttcaacaactcgcaggagctcattgacttcaaggaggggaggcatgctagcttcgagtatgggaggtatggtaacccgaccactgaggcattggagaagaagatgagtgcactggagaaagccgagtccactgtctttgtggcatccgggatgtattgcaagtgtggctatgctcagcgcgcttgttccagcaggtgggcacgttgtggcccccactgattgttaccgcaagacgagaatttacatggagactggacttcctaagaggggaatttccatgacc

SEQ ID NO: 408320 - DNA, 457 bp, Oryza sativa
atagattaagaaaaaaagaaaaaaaaaacatagcgaggaggagcccgcgagatggcgatggcgagcttggcgaggaggcgcgcggcggaggcggcgctgctgcggcgggcgccggcggcggcgtgggcgtccgcgtggagggggtacgcggcggcggcggcgggggaggagagcgacgtcgtggtgatcggcggcgggccgggcgggtacgtggccgccatcaaggcggcgcagctagggctcaagaccacctgcatcgagaagaggggaacgctcgggggcacctgcctcaacgtcggctgcatcccctccaaggctctcctgcattcgtcgcatatgtaccatgaggccaaggcttcttttgcacaccatggtatcaaattctcaaatcttgaaatagatttgcctgccatgatgtcacagaaagacaaagcagttgctgggctgactaaaggga

SEQ ID NO: 408321 - DNA, 488 bp, Oryza sativa
ttcgttatcgcggaaaccctagcctcctctctgtctgggctcgttcactcgttcctggcgccgccgccgcgacccgcgagcgggaggaggagccatggcgccgaccaagggggaggggccagcgatcggcatcgacctcgggacgacctactcgtgcgtgggggtgtggcagcacgaccgcgtcgagatcatcgccaacgaccaggggaaccggaccaccccctactacgtcgggttcacggacaccgagcgcctcatcggggatgccgacaagaaccaggacgtcatgaaccccatcaacaccgattgcgatgccaagcagcttatcggcagacggctctctgatgcctctgctcagagcgatctcaagaggaggccttacaaggatattactggcccaggggataagcctatgattgtagggcagtaccagggtgaggagaaggcattcttttgccaagaaatttcatcctggcccttataaagat

SEQ ID NO: 408322 - DNA, 519 bp, Oryza sativa
tcgatcagttgctcctgcaggagtaggatatgcaggtactaaccaaggtacaggaggtccagcggctgtacctccacccgcttctaataataaagcaccagccacccaacctggtgcaaatgaagtctatctggtgtgggatgatgaagcaatgtcaatggaggaaagaagattgtcgctacccaagtatcaggtgcatgatgaaactagccaggtaagttctgatttttataattttatatctgtaatattaatgatatgtgaaaaaaaccaagttgaagttcatggggatgctctgaactggaatattgggtaagtgttcattctagggtatagagtaaagtaaaaattttaggcacttatgaattgcatgatacgcctttgtgttctaaaattgggtttccatccctttagtttgtgcgtcagaaatttcattttgtttctgttccaattggtcctgtataaccttagtattgctttaattacatttgtagacccttcactgggcttcgattgctt

SEQ ID NO: 408323 - DNA, 438 bp, Oryza sativa
  unsure (1)..(438): unsure at all n locations
tcgtatcatgaacccgacgatcatcagccagggggacaggttcatcgcgcccgacgacttgaacgccaaggaggtgaccaagagggagtacacgccgtacgacgagtacaaggagtgggtgtggaagtcncatggcgacgtgatgatgaacggcgccttctttaacgagtcctgcggccagaacgagcgcagctacgaccagctcgacttcatccctgccaagcacggcaagtacgtcggccagatcaccaagttcgtcggcacgctcaactgccacgtcggcatgccatgctaattaactagacatatcagcaacgatatggaagaggacgagagaaagctaattaaccatgccttaatttgtatatatatgaaaatctgacacatttgtacattgtgtaaaactttataattgtcagaagagaaaaaaaaacgtac

SEQ ID NO: 408324 - DNA, 520 bp, Oryza sativa
tcgttccattgcagcatcagctacaataaaaaatgtgactaccttgattcggacaaaaagcaaaagtccacaaactgtctctggaaaatcatctggctcaaaggcagctgcaaagggtgcagttgatcaatccttgcctttccagcagaatgtggccattgctttacttctgggtgctttctacttgcttagtagatatgctgtacactgcacttgggtgacatctgaagcttactcttctccttccattgttctggccgcaaggggtcataatggaggcagggtcatatttgatgattatcgtgaagcgtattattggcttcgtcagaacactccttctgatgcaaagattatgtcatggtgggattatggataccaaatcacagctatggggaacagaactgttattgttgataacaacacatggaataatacacatatagctacagttgggcgtgcaatgtcatcctatgaagatgaagcgtatgagataatgcagtcactggatgtgaattatgtg

SEQ ID NO: 408325 - DNA, 527 bp, Oryza sativa
  unsure (1)..(527): unsure at all n locations
tcgtttgttcccagatcggccagcaatggcttcatgttcggacccatggatgaaagagtacaatgaggcatctaggcttgctgatgatatcaattccatgattgccgatagagggtctcttccacaatcaggcccggaaattatacgtcacacatcagccattcgaagaaaaataactattctttgtactagactggatagcttggaagcattgttgtccaagattcctccgaagtcactcagtgacaaggagttacacaagcgccaagacacgctttccaatttgaaatctaaaacaaaacagatggcaacaagttttaacatgtcaaactttgccaacagggaggacttgcttggtcagaacaagaaggcagctgatgatatgagcagagttgctggtttggataaccaagggattgttggccttcaaaggcaaattatgaaagaacangatgaangtcttgagaagctggaagagacagtcctgagtacaaaacatatcgctttagcagtcaatgaagaactta

SEQ ID NO: 408326 - DNA, 396 bp, Oryza sativa
ttaatttgatggtataatccttctttaccatgggaactactcctaacaaccagtaggagcaatcgtacgcctttgctggaacaaagacaaatcaggaccatgtttgtattgatctgttgaagaacaacagttcttttgaaagttgttgctgagttgcttttattgatctgtaggtctcagctgcttccattgtaggggtttcagatagaaaattgcccatctgttgataggttaaatcaagcataagttcattctctctgtaggtccattgtgacataagctagtgttgggtttttgttttgtgagtttgtaaatcagttcctgcttgtgccagggttttggacgcgactcatatgttgtcatcaaaattatttatttattggggttcaaaccaaa

SEQ ID NO: 408327 - DNA, 441 bp, Oryza sativa
tctcatagctgctcgcttgctcattccccaatttgaagtcgctcgtccttgttggctgtcaggggttcagcactgatgggcttgctactgtcgctaccaattgcagatttatgaaggaactggacttacaagagagtctggtggaggatcgagactctcgttggcttggatgttttcccaagccttctacattactagaatccttgaatttttcttgcttgaccggggaggtgaatagccctgcattggaaatactggttgcaaggagtccaaatcttagaagcttgagattgaaccgttcagttccacttgatgttttggccagaattctttgtcgcagacctaggctggtggatttattgacaggatcttttgtacgagggaatattgctggtgcctatgctgggcttattaataattttcaacattggaagtttgctg

SEQ ID NO: 408328 - DNA, 452 bp, Oryza sativa
tcgttcttaccggcggataaaccctaaccggagaggaggaggagggggaggccatgagggggaagaagccgcacaaggagctcaagctctccgtgcctgcgcaggagacgcccgtcgacaagttcctgaccgcgagtggtacattcaaggatggtgaactgcggcttaatcaaagaggtttgcagcttatatccgaggaaactgcagatgaacctcagtcaacaaacctgaaggtggaagatgttcagttgtcaatggatgaccttgagatgattcaagtcattggcaaggggagtggtggtatcgtccaactagttcggctacaagtgggtggggacattatatgccttgaagggcctacaaatgaaacattcaagaggcagtgcgcaaacaaatagttccatagctcaaattacattaagcacacataactcacatatagttctttgccc

SEQ ID NO: 408329 - DNA, 511 bp, Oryza sativa
tcgttggaatgaaagagcagcaactgatcgagaaggatgtattctccttctggctcaaccgcgatcctgatgcaccgacagggggtgagttaatctttggtggtgtagacccaaatcattacaaggggagccatacatatgttcctgttacccgcaaaggctactggcagtttgagatgggggatcttcttattgatgactactcaactgggttctgttctggtggttgcgccgctattgcggattcagggacttcattgctcggtggcccaacaactattgttgctcaaattaatcacgcaattggagctgagggaattgttagtatggaatgcaaacaagttgtgcgggactacggggacatgatcctcgagatgctcatagcacaggcaagccccatgaaactgtgctctcagattggtctctgtgcatttgatggtactcgttctgtcagaaacaatatagagtctgttgttgattaagaaaaagtgggctcagatcttttctgcac

SEQ ID NO: 408330 - DNA, 412 bp, Oryza sativa
tcgttggtggaacgcgtacttacccacaagttaggtgcatgccatggcaccattcatggcgtgcgcctcgccaccggtactcacgctggccctgctcgcgtcgtgcggtgcccttctcgccacctccatgctcccggcgcgtgcgacggcgggcagttgcttggacgtcggcgacatggtgatgatggacaggttccgcgcttggcagggagctcacaaccggtcgtacccgagcgcagaagaggcgctgcagcggttcgatgtgtaccgccgcaacgcggagttcatcgacgccgtcaacctgcgcggcgacctaacttaccagcttgccgagaacgagttcgcataccttaccgaggaggagttcctggccacgtacaccgggtactcctccccccattgccccgttgca

SEQ ID NO: 408331 - DNA, 528 bp, Oryza sativa
  unsure (1)..(528): unsure at all n locations
tcgttcatattagcagccgatgcagagttctttgacatgactctaagacggccagggcaacatcaagaaaaaacaaattgcactatgatcttggctcctcttgttggcattatcctcaatcttatggaaagcagcagtacttcaggccatagggagttaaatgatgtgattacagtgttcacaagcatggattgccctgccacaatccattttgggttgcagtacctactgagctacaattggagcaatgttctccgaggtgacgcttcccttgcaaagctagctcagcttgaagaattctcccattactttatgcacatcactatgtcagcggatggcaatgaagagcaaggtttcagcactgccagtaatgaagaggacaactgctgcatatgctacaattccgattcggataccacattcgagccatgccatcacaggtcctgctacggctgcataaccaggcacctnctaacagccaaaggtgcttcttctgcatgcagtggtgacttcagttaccagatagct

SEQ ID NO: 408332 - DNA, 451 bp, Oryza sativa
tcgctagaccccatttcggtgcttaaccaaactgaggataatatcagttcatccacagcaatgtcggcctactgcggcaagtacaaagatgagctcataaaaaatgctgcctacattggcaccccgggcaagggtatcctcgccgcggacgagtccactggcaccatcggcaagcgcttcgccagcatcaatgttgagaacgtcgaggataaccgccgtgccctccgcgagctcctcttctgcacccctggcgccctccagtacatcagcggcgtgatcctcttcgacgagaccctgtaccagaagaccaaggatggcaagcccttcgtcgatgtcctcaaggagggccggtgccctccccggcatcaaggtggacaagggcaccatcgaggtcgccggcaccgacaaggagaccaccacccagggccacgatgaccttggcaagcaatgc

SEQ ID NO: 408333 - DNA, 518 bp, Oryza sativa
tttgtttctgaagaggctcaccgctcccacacatgggatgctaaacaagcttgctggagctttagcccgcaagccatgttttgtggctcacaagatcagtgcgtgactgcctctgatcctgattattaggaacaggctcaggtctgctctgacatacctggaggagatcaatattctcatgcatagccatgctttggatgaaggcaaggtcaagactgactagagcttctcgggtgaatagatggatgcaagtggcataccgaatgactgcggagaactacaggctgctgcacgacaccaagggacgtttccgccttcagattgacaaggatgaggatgctaagttcaagctttgcacggttcgggttgtgcagcatggccagaagggaatttcctacctgaacacctatgatggtcgcaccatccggtaccctgacccgatcattaaggtaaacgacacatttcaagatcgttttgtaacccaacaagattgtcgacttcatcaagtttgatgttgg

SEQ ID NO: 408334 - DNA, 504 bp, Oryza sativa
ttcattgcacccttgggtttgaacccaccacacacgcagccctttgcaaccgagatcttcacggtgcttgaaggaacactctacgttggctttgttacgtccaacccagataacaggctattgtccaaggtgctcaacaagggtgatgtgtttgtgttccctgaggggctcatccacttccagttcaatcctaacccacacaagccggcagttgccattgctgcactgagtagccaaaatcccggggttattactattgccaatgcggtgtttggatcgaacccacctatctcagatgatattttgatgaaggcgtttcaggtggataagaagatcatagatttgctccaagctcagttctagaagaacaactactgattgtcctgttggttgcaccattaaggacagtatactacatgcacctgatgctatgtaactatcatatatgatacgtagaataagtgggggtttatgtgcttgaattgttttctgcatgatttgcta

SEQ ID NO: 408335 - DNA, 312 bp, Oryza sativa
ttcatgtgtccattacgaggggaaagaacactcgtgatcgagagagcttcttatcagccgacagagaggagagacgagcatgtcgtcttgcacggagaagcccacggtgacagagcgtggcagacgtacggaccgccgcaactactacgggagataaaagaaggacggaggcggtggatccatgtagaaggtgacggccgcaccgcatgagctcagagcgacgacttaggggagttcaaaccggaggagatgaccaacatcatgaaggacttcgacgagccggggtttcttgccccgaccggactgtttctt

SEQ ID NO: 408336 - DNA, 294 bp, Oryza sativa
tcgtagactttggcttccccactctctcttcttcgtgggaggctgggagctaccagcacaacacaccaaggaagctgaggtgcgttgatttcttgatatcatggccaagaggcacctcttgttggtgacaacttgtttgtgggctctgtcatgtgccttgctgcttcatgcttcctctgatgggttcctgagagtcaacctcaacaagaagagattggacaaggaagatctcactgccgccaagttggcgccatagggcaaccgtcttctgaagaccggcagttcatacagtga

SEQ ID NO: 408337 - DNA, 423 bp, Oryza sativa
tcgtcgagaagtgggtcgccaaggtctctgattgtggcctgtccaagactggcccgacggccatgaaccagacccatgtcagcaccatggtcaaaggaagcttcggatacctcgacccagagtacttccggcggcagcaactcacggagaagtccgacgtctactcgttcggtgtcgtgttgttcgaggttctgtgtgcacggcctgctttgaacccgagccttccacgggagcaggtcagccttgccgaccacgccatgagctgccagaggaaaggaaccctttatgacatcatcgacccgttgctaaacggcaagatcgcaccctgactgcctgaagaagttcgtccaatctggtaaaaagtgcctggccgaccttggtgtggaccgcccgatcattggcgatttcccttggaacctttag

SEQ ID NO: 408338 - DNA, 314 bp, Oryza sativa
tcgtaacgctgactatcctcctccccgtctccctgcggcgccggttcccctaccctccatctgcctagtgagcacagtagggcagaggaggggatcctggttgaatattcacctacctcggagtaattggcatacgtcacaagttaaaagatgggtatccttgagaggatcaaggagattgaagccgagatggttcggacacagaaaaataaagcaacagaataccatctgggacaactgaaagcaaaagtagcaaagtagaggacacaattattagagccccctaaggagtccactgccggaggagatagtat

SEQ ID NO: 408339 - DNA, 411 bp, Oryza sativa
ttggatatgtggccgtcgaggtgtccggtggacctgccgtcctcttccacccaggaagggaggacaaacctgcacccccacctgagggccgtcttcctgatgctaccaagggttctgaccacctaaggcaggtcttcggtgcgcagatgggcttgagtgatcaggacattgttgccctctctggcggtcacaccctgggaaggtgccacaaggaaagatctggttttgagggaccttggacaagaaaccctctgcagtttgacaactcttacttcacggagctttctgagtggtgaccaaggagggcctttttcagctttctagtgacaaagccctgctgagggaccctgctttccgcccactcgttgagaaatattgctgcagatgagaaggctttctttgaagactaca

SEQ ID NO: 408340 - DNA, 505 bp, Oryza sativa
ttcgttttcgattccaatcctctcgaccagcgagaggcctcgccttcctcctctcccccacgttggcgtagctcgcgcgcgcgcgcgcgcccgcgcccgaatccacaaacagcgtggtcgcgggcgggggttctcgatgaggcggatgctggaggtggcggcggacgccggctcgtctgcggcggcggcggcggcaaacggcgcggtggactggtggcgcgacgtgaacgagtcgccggtgtggcaggaccgcatcttccacgtcctcgcggcgctctacggcttcgtctccgccatcgcgctggtccaattgatcagaatcgaatgtagggtgcccgaatacgggtggacaacacaaaaggtgttccatttcctcaacttcctcgtgaacggcgtgcgatccatagtgtttgtgctgcgacgaaatgtgcagctcatacatccagagatactttaacatgtgcttctagatatgcccgggctcgcattcttcacgacgtatgca

SEQ ID NO: 408341 - DNA, 370 bp, Oryza sativa
tcgtgtagcggcgagatggcggcgaccggggacagcagcggcgccctcgtctgcgtgacgggcggcagcggcttcatcggctcgtggctcgtccgcctcctcctcgaccgcggctacaccgtccacgccaccgtcaagaacctccaggacgacggcgagacgaggcacctgcaggctctggacggcgccgacacgcggctccggctgttccagatggacctcctcgacccggcctccatcacgccggcggtggacggcgcccactggcgtcttccacctgggttgccctctcacactttacccgactcaagaccccgagggtgagctgctgaagccagcggtgagtggcactcttaacgtcctcctcgcc

SEQ ID NO: 408342 - DNA, 234 bp, Oryza sativa
  unsure (1)..(234): unsure at all n locations
tcggtcaaagcgacgcgagcgcgagagcgaggaggagagcccgagatctcggcggcggcggcggcggcgatggcgctctccgaccgctcccgcgagtcgctcctgccgagcttcctctactcgacggcgggggcgcggccgtacaccgcgggcggcggnggntccaacttaaaattccccgtggaggctgacctaggaggagtaacagtactcttaccaatctcacccagaatg

SEQ ID NO: 408343 - DNA, 126 bp, Oryza sativa
tttcgttgaaggttgactgtgatgagcacaagagtgtgtgcagcaagtatggagtttctgtgcaccccacaatccaatggttccccaaaggtcccttggagcccaagaagtatgaaggtcaacttc

SEQ ID NO: 408344 - DNA, 426 bp, Oryza sativa
ttttacatactctactactactagccagtaagctagctgactaactacgtggctatggcccccaccgtgatggcctcctcggccacctccgtggctccattccaagggctcaagtccaccgccggcctccccgtcagccgccgctccaccaactcgggcttcggcaacgtcagcaatggcggaaggatcaagtgcatgcaggtgtggccaattgagggcatcaagaagttcgagaccctatcgtacctgccaccactcaccgtggaggatcttttgaagcagatcgagtacctgcttcgatccaagtgggtgccttgtctcgagttcagcaaggttgggttcgtctacctgtgagaaccacaggtctcccggatactacgatggcaggtattggaccctgtggaagctgcccatgttcggctgcac

SEQ ID NO: 408345 - DNA, 232 bp, Oryza sativa
gtcgtttcattccggttgagtgagttggtgattatctgtagggggtgaaaatggcgcaggcggtggtgccgtcgatgcagtgccagttcggtgccgttcgtttgaggcctgttttggctgcttctgcttctgtttggagtatttttatctctctgtcttttttatcttgacttaagctatgcttgatcgtgttatttttatatctttttttttctttgtttttttttttatt

SEQ ID NO: 408346 - DNA, 423 bp, Oryza sativa
gtcttttacctcaagatgaagggcgactaccacaggtaccttgcggagtttaagtctggcgacgagaggaagcaggctgcggagagcaccatgaatgcatacaaggctgctcaggacattgctctcgcagatttggctccgacccaccccataaggcttgggcttgcactcaacttttcagtgttctactatgagatcttgaactcccctgaccgtgcctgcaacctcgcgaagcaggcgtttgatgaggccatatcagaactggacagccttggtgaagaatcctacaaggacagcactttgatcatgcagctcctgcgtgacaacttgactctgtggacttcagatgccaatgatgatggtggtgacgaaatcaaggaagccgcagcttcaaaagagcctggggatcagtgagatgaattc

SEQ ID NO: 408347 - DNA, 152 bp, Oryza sativa
ttcatctcgtcgtctaagttaaaaggaagccatggggcacatggagactggatgccggcagccagaaggcccgatcctttgcatcaataactgcggcttctttggcagcgcggctaccatgaacatgtgctcaaagtgccacaaggagatga

SEQ ID NO: 408348 - DNA, 420 bp, Oryza sativa
tttattatccaacccaaccgccgccgcatcgccctcgggagaacgatggccgcgtcggcgctgcaccagaccaccagcttcctcggcaccgcccctcgccgggatgagctcgtccgccgcgtcggcgactccggtggccgcatcaccatgcgccgcaccgtcaagagcgcgccccagagcatctggtatggacctgaccgtcccaagtacctgggcccgttctcggagcagacgccatcgtacctgaccggagagttcccgggagactacgggtgggacacggcggggctatcggccgacccggagacgttcgcgaggaacagggagctggaggtgatccactcgcggtgggcgatgctgggggcgctgggctgcgtcttcccggagatcctgttcaagaacggggtgaagttcggggag

SEQ ID NO: 408349 - DNA, 456 bp, Oryza sativa
ttcatagaaaaaaaaatctcccctcgaagcgaagcggcgaatcgccttctcaagatgcagatctttgtgaagaccctcaccggcaagaccatcaccctcgaggttgagtcctcggacaccattgacaatgtcaaggccaagatccaggacaaggagggcatccccccggaccagcagcgtctcatctttgctggcaagcagctcgaggatggccgcaccctggccgactacaacatccagaaggagtccaccctccaccttgtgctcaggctcaggggaggcatgcagatcttcgtcaagaccttgactggcaagaccatcacccttgaggtcgagtcgtctgacaccattgacaatgtcaaggccaagatccaggacaaggagggcatccccccggaccagcagcgtctcatcttcgctggccagcagcttgaggatggccgcaccctggccgac

SEQ ID NO: 408350 - DNA, 514 bp, Oryza sativa
  unsure (1)..(514): unsure at all n locations
tcgttcgctctccgccgccatcgccgccgccgccttgctctccgccgccgccgttggtactcgcgcttgccgcccgtcgagctcccctcaccgataaaggctcaccgaaggtttcgtcgtcgaccccgggagtttcaaatatgtctggccgaggactgatgaagcaggacttaagcaagcttgacgtgacgaagctccaccctttatcacctgaagttatctcacgccaggcgacgatcaatatcggtaccatagggcatgtggcccatggaaagtccactgttgtgaaggctatatctggagttcagaccgttcgcttcaagaatgagctggagcgtaacatcactataaagcttggctatgctaatgcgaaaatctacaaatgtgaagacgagaaatgtccacgaccaatgtgctacaaggcttatggaagcnngaaagaagatagccctcactgtgatgtgcctgggtttgaaaacactaggatgaaactactgagacatgtttcttttgg

SEQ ID NO: 408351 - DNA, 477 bp, Oryza sativa
  unsure (1)..(477): unsure at all n locations
tcgtttttctctccctcctcctcgccgtcgcgtcgccgcggaggcggaggcggagagccaaggccgcggcggtgcagccgccctcccctcctcccgccgccatggtgaggccgacgcaggacgcgatcgacaccttcgtcggcatcaccggcgccgatgaggccgtcgccgcccgcaagctcgaggaacatcatggtgacctaaatgaagctgtgaatgcctatttcaatgaaggagataggaccagcaccagagccaatgaaaatcctatacctaccggttatgatgacatggagttggatgaaccatttggtcctgttcctacatttcacatgcctttgggcaaccctttttcacttctggatcaaggttttttagaacgagctgctgctgtgtatggtgagggacctcatattacacaccctanggaggtgaggcggatagatgtgaaagttaaggacaacaatactccagcag

SEQ ID NO: 408352 - DNA, 390 bp, Oryza sativa
cttgttctggttcgggttctcgtggctgctcgaccagctccccaagctgaacccgatcaaccgcgtccccgacctcgccgtcctccgccgccgcttcgaccacgccgacgggacctcctccctcccggggctggacatcttcgtcaccaccgccgacccgatcaaggagcccatcctgtcgacggcgaactccatcctctccatcctcgccgccgactaccccgtcgaccgcaacacctgctacctctccgacgactctgggatgctcctcacctacgaggccatggcggaggcggccaagttcgcgacgctgtgggtgcccttctgccggaagcacgccatcgagccgcgcgggcctgagagctacttcgagctcaagctccaccccta

SEQ ID NO: 408353 - DNA, 263 bp, Oryza sativa
cttgatccctgaaaggattcaagatgttatatgcagaggggcggatctttttgacatgcttcctgaagagtacacgttccaagagatcattgccaagttggggccgattccaagcacattttctgctgttcatcttcctagctatctgctacagaatgttgatcggtacagataccttctcccagggtactgcaggagagaaagtgggtagattttgatgatctacactcttcaatctgatgtgcaggccctgtcactgtcat

SEQ ID NO: 408354 - DNA, 132 bp, Oryza sativa
gtaaatctaacattgataatgggaaaccgtgaggctgtttccatgatgcataatatgagtgcagctgacttgacatcagtacttacattgattgatgaatatgatttgcatggtcaagaggcatacccaaag

SEQ ID NO: 408355 - DNA, 470 bp, Oryza sativa
gtaattaactacacttgttgctaacacatccaacatgcctgttgctgctcgtgaagcctccatttatacaggaattacaattgctgaatacttccgtgacatgggctataatgtcagtatgatggctgattctacttctcggtgggctgaagctttgcgtgagatttcaggacgtctggctgaaatgcctgcggatagtggttaccctgcatatttggctgcacgtttggcatccttttacgaacgtgctggtaaggtgaaatgtctcggcagtccagatcggacaggcagtgtcacaattgttggtgctgtctctccacctggaggtgatttttcagatcctgttacctctgcaactcttagtattgtgcaggtcttttggggattggataagaagctggctcaaagaaagcatttcccatctgtcaattggctcatctcttacttaaaatacttaaaggctctggaat

SEQ ID NO: 408356 - DNA, 379 bp, Oryza sativa
tcgttacctccccacacgctcccctcctcctgccgagccgaaaccctaacgatccaattcctcctccctttgggcctcccaccatgagcgccgccgccgccccagcagccgccgtcggcagcggcaaggagctcgccaacccgccgacggacgggatctccaacctccggttctccaaccacagtgaccacctcctcgtctcctcctgggacaagacggtgcgcctctacgacgccgacgcgaacgtgctcaagggtgagttcgtacacgccggggccgtgctcgactgctgcttccacgacgactcctccgggtttagcgccggcgccgaccacaccgtgcgtcggttagtctttggttcagccaaagaggatctctt

SEQ ID NO: 408357 - DNA, 483 bp, Oryza sativa
tcgttgggccccacccgcgcggcggaaggctctaggctctcctgcgaaggttctggaaggctcgagaggaggtgggagatgattctgttcgtgctcgcgactccggcggcgatcaacctcggggctctcgctgctgctcgtagccccttcatcctcttccgaccgcctcggacctaccctttctcgccctgcatctccccctctcccgcgccgtcggactcatccgtgccctcaacctgcacccgcacgacgcctccccctccccctccagccgaggtgatggcgacgtcccccccggaaccctagtcgagaggcccatccacctcgcctccatggccaccgggaagagcggcggctcctctgctgaagaccttggccaccacgccgggtactaccgtcttcccacacccacgacgcaaggctgttctactttctctttcagtccagggggagcaagggggaggaacacccccttggtaatct

SEQ ID NO: 408358 - DNA, 322 bp, Oryza sativa
gtgcatataaacatttctctcgcgagtcgcgagttggaccgatcgaattaagggtcgagagatgttcgggttcgggcaccaccacaaccaggcaccggcggcgccgtcggacccgaaccagatcttcaagatcttctgccgcgccaacgagaactactgcctcaccgtccgcgacagcgccgtcgtcctcgcccccgtcaaccccaaggacgagcaccagcactggttcaaggacatgaggttcagcaccaaggtgaaggacggggagggcatgccggcgttcgccctcgtctacaaggccaccggacttcgcgtcaagcac

SEQ ID NO: 408359 - DNA, 369 bp, Oryza sativa
tcgttttgttgccactcggcactcgccaccatgctggtcgtcggcgtcctcctgctgctcttcttcaacctacatctccccacggccgccattgacaccctcacgctaggccagtctctgctgtggaaccagacgctggtctccaatggcggcaacttcgagctcggcctcttctcgccgggaaagtccaacaagcactaccttggcatctggtacaagaagatctccaagaagacggttgtttgggttgccaaccgtgagcgcccgattcttgagccgtcgagctgccacctcgagctgagcgtccacggcgatctgcggctgttctcgacggcgccgtcgaacaccttgctgtggtcgtcgaacgcg

SEQ ID NO: 408360 - DNA, 252 bp, Oryza sativa
tcgataccaacccaaccgccgccgcatcgccctcggtagaacgatggccgcgtcggcgctgcaccagaccaccagcttcctcggcaccgcccctcgccgggatgagctcgtccgccgcgtcggcgactccggtggccgcatcaccatgcgccgcaccgtcaagagcgcgccccagagcatctggtatggacctgaccgttccaagtacctgggcccgttctcggagcagacgccatcgtacctgaccggaga

SEQ ID NO: 408361 - DNA, 436 bp, Oryza sativa
ttatgactgcaatatgtgcttgaaggcacttgctgatgcttactcaaacgcagcgatgaatgactgcggcagcgatatgcatggcgggcctgaacgcgctactgggcctgtatacatgagcctgcgtccagataacgtgggacgggctaacatgccagagagtgcggctccagttccgatgggggcttatggccatagtcggcaactggctccaggtcgtggacgaccttaaccaccgtaacctgatggcgctggcgcggcggttcggcgacatcctcctcctccgcatgggcgtccgcaacttgggggtggtgatcagcccggacctcgcaaggaggtgctccacacccagggcgtattgttcggctcccgtacccgcatcgtggtgtacgacatcttcaccggtaaggggcaggacatggtgatcaccgagtac

SEQ ID NO: 408362 - DNA, 234 bp, Oryza sativa
gctttgatgagattcaggcaagggttgcacagctgaagaaggaactctccgagactgattcgatgtatgatacagccaaattggctgagaggattgcaaagctttctggcggagtggctgacatcaaggtcggggctgcaactgagactgagcttgacgaccgccaactacggatcgaggatgcgaagaatgcaactgtctcagctattgaggagggcattgctgccggaggag

SEQ ID NO: 408363 - DNA, 350 bp, Oryza sativa
tctggagaagagccgggtcctcgtcgtcggcggcaccggcttcgtcggtcggcgggtcgtggcggcgagcttggcggcgggccacccgacctacgtcctgctccggccggagatcggcctcgacatcgacaagctccagatgctgctggccttcaaggcgcggggcgcgcggctcctcgaggcgtcgctcgacgaccacgacggcctcgtcgtcgccgttcggcaggcggacgtcgtcgtctccgccatgtccggcgtccacttccgcagcctcaatctcatgctccagctcaagctcgcctaggccatcaaagatgctggaaatggaaagcgacttctgccatctgaat

SEQ ID NO: 408364 - DNA, 521 bp, Oryza sativa
  unsure (1)..(521): unsure at all n locations
ttcaggacaaggagggcatccccccagaccagcagcgtctcatcttcgccggcaagcagctggaggatggccgcacccttgctgactacaacatccagaaggagtccaccctccaccttgtgctcaggctcaggggaggtatgcagatcttcgtcaagaccctgaccggcaagaccatcaccctcgaggtcgagtcctcggacacgatcgacaacgtgaaggccaagatccaggacaaggagggcatccccccggaccagcagcgtctcatcttcgccggcaagcagctggaggacggccgcacccttgccgactacaacatccagaaggaatccaccctccaccttgtgcttaggctcaggggaggtatgcagatcttcgtcaagaccctgactggcaagaccatcacacttgaggtcgagtcctcggacacgatcgacaatgtgaaggccaagatccaggacanggagggcatccccccggaccagcagcgtcttatcttcgctggcaagcagctggag

SEQ ID NO: 408365 - DNA, 519 bp, Oryza sativa
tcttattttcttgtttcatggaagcagattgttagtcatgaagaaggtttgctcttgaaagataactttgaaggtggtgcaacctgggcctttgaagttggtacgcgatctatgacatgtccaatcatagtagaggatctcaatccaccccgtcaaatgcttgtggagatgctttgtaaagagagaggaatcttcttggaaatagctgatcaaattagaggtttagggttgactatcttgaaaggtgtgatggaagttcgtaaagataagatttgggctcgctttgctgttgaggcaaacaaggatgtaactcggatggaaatatttctttctcttgtccatcttctggaacctagcactgggagctctattttgtcagcaggtgttgagaacactagcctgccgcgcgatagtttctttccatcgtctattccagccactggtttctccaactgcttgtgacacgatgtaccataccttaacaggtggagcgctgtgagtgggtaaaggtttcacctg

SEQ ID NO: 408366 - DNA, 459 bp, Oryza sativa
tctatacccctctcactcccagatacctgctgctgccactagcccactaccatggatccttgcaagttccggccgtcgagctcgttcgacacgaagacgacgacgacgaacgcgggagctccggtgtggaacgacaacgaggcgctgacagtggggcccagggggccgatcctcctcgaggactaccacctgatcgagaaggtggcgcacttcgcccgggagcgcatcccggagcgcgtggtccacgcccgcggcgcctccgccaagggcttcttcgagtgcacccacgacgtcaccgacatcacctgcgccgacttcctccgggccccgggcgcccagacccccgtcatcgtccgcttctccaccgtcatccacgagcgcggcagaccggagacgatccgagacccgcgcgggttcgccgttcagttctacactcgcgagggcaactgggacctgctc

SEQ ID NO: 408367 - DNA, 399 bp, Oryza sativa
tcggcagccacctcgacgaggtgaagcgcatggtggcgcagttccgcgagccgctggtcaagatccagggcgccaccctccgcgtcggccaggtggccgccgtcgcccaggccaaggacgccgccggcgtcgccgtcgagctcgacgaggaggcccgcccccgcgtcaaggccagcagcgagtggatcctcaactgcatcgcccacggcggcgacatctacggcgtcaccaccggcttcggcggcacctcccaccgtcgcaccaaggacggccccgccctccaagtcgagctcctcaggcatctcaacgccggaatcttcggcactggctccgatggccacacgctgccgtcggagacggtgcgggcggccatgctcgtgcgcatcaacaccctcctca

SEQ ID NO: 408368 - DNA, 378 bp, Oryza sativa
ctttacctccttccggcggagctacggtgagccttctactccgcgccggcgtgcggtcggtgagcaggaagggggtctgttctatggtcctcttggctgtggtaagactttgttggtcaaggcaattgctaacaagtgccaggttaattttattaacaatatgggacgtgatcatattactcatgagcgataggtttatgaaggaagactgtcatatgaacaagaggtattttaagtacgctagattgttcgacaagttcaaggtcgatcgtgagagaggtattaccattgatattgccctgtggaagtatgagaccaccaagtactattgtacggtcattgatgctctcttggttatcgtgtatttattaagaacta

SEQ ID NO: 408369 - DNA, 525 bp, Oryza sativa
ctttcactccctcctcctccatctcctccggtcccgatctcacaaccaccgactcctcctcctcgcgcggcggcggcggcggcgtgagccagcagcagccatggtgctgttctcggtgacgaagaaggccaccacgcccttcgacggccagaagcccggcacctccggcctccgcaagaaggttactgtattccagcagcctcattacctccagaactttgtgcaatccacatttaatgcccttcctgccgacaaagtaaaaggtgcaaccattgctgtgtctggtgatggccgctatttctcgaaggatgctgttcagatcattacaaaaatggctgccgcttatggagtaagacgtgtttgggttggacaaaacagcctcatgtctacttcagctgtatctgctgttatccgtgaaagaagatggcgcagatggatcaaaggctactggggccttcatttaacagctagtcaccaacctggtgggtctactgaggactttcggaatcaatataacatggaaaa

SEQ ID NO: 408370 - DNA, 427 bp, Oryza sativa
gcctttttctagacgcaagctgggtggactaagggtgctgaactcctactgggtgaatgaggactccacctacaagtactttgagatcattcttgtggatgctgctcacagcgctatccgcaatgacccaaggatcaactggctctgcaagcctgtgcacaagcaccgtgagctccgtggcctcacctctgctggcaagaagtaccgtggcctgcgcggcaaaggccacactcaccacaaggccagacctttccgcagggccacctggaagcgcaaccagaccgtctctcttcgtcgctaccgttaagcttatgtgctttggtgtttcgttacagtggaatctgtcccttgcagacattaattatctgtctattttcttgtgatgagagaaagaattatttagttatcgaatatctcatgatttggc

SEQ ID NO: 408371 - DNA, 529 bp, Oryza sativa
tgccgccgccgccgcagcctcctcctctcgtcttctccttcgagttgttagctccctccttattcaaccatgggtaaggagaagacgcacatcaacattgtggtcattggccacgtcgactccggcaagtcgaccaccacgggccatctgatctacaagcttggaggtatcgacaagcgtgtgatcgagaggttcgagaaggaagccgctgagatgaacaagaggtccttcaagtacgcgtgggtgctcgacaagctcaaggccgagcgtgagagaggtatcaccattgatatcgccctgtggaagttcgagaccaccaagtactactgcacggtcatcgatgcccctggtcaccgtgacttcatcaagaacatgatcacgggtacctcccaagctgactgtgccgtgctcatcattgactccaccactggtggttttgaggctggtatctcccaggatggccagacccgtgagcacgctcttcttgcttttactcttggagtgaagcagatgatctgttgctgcacaa

SEQ ID NO: 408372 - DNA, 423 bp, Oryza sativa
ttgcgcatctgcatccaaaaccaaacccaaactcgtcttctccaccggagcagagcagcggcggcggcaatggacgccctcctcgtggagaaggtcctcctgggcctgttcgtggcggcggtgctggccctagtggtggccaagctcaccgggaagaggctccgcctcccgcccggccccgccggcgcgcccatcgtcggcaactggctccaggtcggcgacgacctcaaccaccgcaacctgatggcgctggcgcggcggttcggcgacatcctcctcctccgcatgggcgtccgcacttggggttgggtgtccagcccggacctcgccaaggaggtgctccacacccagggcgtcgagttcggctcccgcacccgcaacgtggtgttcgacatcttcaccgggaaggggcaggacatggtg

SEQ ID NO: 408373 - DNA, 423 bp, Oryza sativa
tcgtctggacgcaagctgggtggactcagggtgctcaactcctactgggtgaatgaggactccacctacaagtactttgagatcatccttgtggatgttgctcacagcgctatccgcaatgacccaaggatcaactggctctgcaagcctgtgcacaagcaccgtgagctccgtggcctcacctctgctggcaagaagtaccgtggcctgcgcggcaaaggccacactcaccacaaggccagaccttcccgcagggccacctggaagcgcaaccagaccgtctctcttcgtcgctaccgttaagcttatgtgctttggtgtttcgttacagtggaatctgtcccttgcagacattaattatctgcctattttcttgtgatgagagaaagaattattcagttatcgaatatctcatgatttggc

SEQ ID NO: 408374 - DNA, 466 bp, Oryza sativa
tatgcagttgagtttgacagttactgccacaaccatcagccaccaattgctttcattaagtcagaaattcgtggcctttttggcagtgtcttttgtgactttggtcctgagtttactgtattggatgttgatggagaggagccacatacaggaatagtagcatcgatcagcaatgacaaccctgcgcttgtttcctgtgttgatgatgagcgtctggagttccaggatggtgatttagttgtgttctcagaagtccatggaatgagtgaactaaatgatgggaaaccaagaaagattaagaacgctaggccttattcttttactctagaagaagacactacctcatatgggacatatgttagaggtggtattgttactcaggtcaagccatccaaggttcttaaattcaaaaccttgaaagacgcccttaaggaacccggaaaatttcttatgagcgatttttcca

SEQ ID NO: 408375 - DNA, 529 bp, Oryza sativa
gtcggagaatccctctcctcccgtcccgccgccgccgccgacgacgacgacgacgtccagccctcctccgtaatcccccacttgttgggcctgcaccttgtggtagccactctttaatcaatggagagcacagagcccctacaggatatcatgtgcgagtttcgtgcgggtaagatgtcccttgatggaacacgagtgatcccagacacacgcaagggtcttgttcgcataggaaggggtgaagaaggcttggttcattttcaatggcttgatcgtggacagaatctagttgaagttgatcaaattgtcttccctgaggaggctgtctttgagaaggtaacacaatcttctggaagggtttacatcttgaagttcaggcacgatagcaggaaattcttcttctggatgcaggagccaagtgctgatgacgactcacaaatatgtcgccaagttaatgcctacataaaccgaccattagatggtgaggcagtttctattgaagctgaaatgtacatgaagacacagctga

SEQ ID NO: 408376 - DNA, 440 bp, Oryza sativa
gtctccgtccaaaggagatttgttctatggccctcctggcagaggcaagactaccgctggccaaagcaaatgttaacgagagccaggctaacttcattagtgtcaaggcacctgagctgcttaccatgtggcctggtgagagcgaggccaatgtgcgtgagatttttgacaaggctaggcagccagctccttgtgtcctcttctttgatgagcttgactcaattgctacccagagaggaagcagtgttggtgatgccggaggtgctgctgatagagtgctgaaccagctgctgactgagatggacggcatgaacgcgaagaaaaccgtgctcattattggtgctactaacaggccagatatcattgaccctgccttgctaaggccagggcgtcttgatcagcttatctacattcctctggctgatgatcaatctaagctg

SEQ ID NO: 408377 - DNA, 432 bp, Oryza sativa
gaacgcgtacttacccacaaggtaggagcatgccatggcaccattcatggcgagcgcctcgccaccggtactaacgctggccctgctcgcgatgtgcggtgccctactcggcacctccatgcttccggcgcgtgcgacgggggacaggtgcttggacaacagcgacatggtgatgatgctcagcaccctagcttgacagtgagcttaaaggcgtaaggccccgaacgtagaagaggcgcctacacgggacaacaatgacattggtggccttgagaaacaggttcaagagctggttcaagccctctggtggaccatgactcacaaggaccggtttcagaagttgggaattcgtcccccgccaggtgactttctgtacagtctaccactgcaaggaagaccctaatggctcgtgcatgtgctgtccaaactaac

SEQ ID NO: 408378 - DNA, 494 bp, Oryza sativa
tggagactgtccaatatccagtggagcatcctgagaaatttgagaagtttggcatgtctccgtccaaaggtgttctgttctatggccctcctggctgtggtaagactttgttggccaaggcaattgctaacgagtgccaggctaacttcattagtgtcaagggacctgagctgcttaccatgtggtttggtgagagtgaggccaatgtgcgtgagatttttgacaaggctaggcagtcagctccttgtgtcctcttctttgatgagcttgactcaattgctacccagagaggaagcagtgttggtgatgccggaggtgctgctgatagagtgctgaaccagttgttgactgagatggacggcatgaacgcgaagaaaaccgtgttcattattggtgctactaacaggccagatatcattgaccctgccttgctaaggccagggcgtcttgatcagcttatctacattcctctgcctgatgatcaatctaggctg

SEQ ID NO: 408379 - DNA, 539 bp, Oryza sativa
tctttaggatgaggctgaagaggatggtgcgaacatcgatctggattcacaaaggaaaggaaaatgcgttgttttgaagacatccacaagacaaacaatattccttcctgtaatcgggcttgttgaccctgaaaagctcaagcctggggatttggttggagtcaacaaagacagctacttgatactagacacgctaccttcagaatatgattcacgggttaaggcaatggaggtagatgaaaagcctacagaggattacaatgacattggtggccttgagaaacagattcaagagcttgttgaagcaatagtattgcccatgactcacaaggaccggtttcagaagttgggaattcgccccccgaaaggtgttcttttgtacggaccacctggcactggaaagaccctaatggctcgtgcatgtgctgcccaaactaacgccacatttctgaaacttgctggtccacagcttgtccagatgttcatcggtgatggtgcacagcttgtccgtgatgcctttcagcttgcaaaggagaaat

SEQ ID NO: 408380 - DNA, 480 bp, Oryza sativa
tttaccttgactttggcttccccactctctcttcttcttgggaggctgggagctaccagcacaacacaccaaggaagctgaggtgcgttgatttcttgatatcatggccaagaggcacctcttgttggtgacaacttgtttgtgggctctgtcatgtgccttgctgcttcatgcttcctctgatgggttcctgagagtcaacctcaacaagaagagattggacaaggaagatctcactgccgccaagttggcgcagcagggcaaccgtcttctgaagaccggcagttcagacagtgatcctgtccctctggtggactacctcaacacccagtactatggggtgattggcctcggctcaccgccgcagaacttcacggtgatatttgacactggaagctccaacctgtgggttcctttagcaaaatgctatttttcgatagcatgctacctccacagcagatacaactcgaaaaagtcgag

SEQ ID NO: 408381 - DNA, 315 bp, Oryza sativa
ttgtacgcgtggtcggacgcgtgggcggacgcgtgggcgaacgaacaacgcactctgcagctagctatacaatctctgtttaattagctaggtagctagcgagtcataaatcaagaagccatggacttttacgggcggcgcgagcagtacggcgggtatggcgggtacggtggcggcggcgccctggcgacgccggggtacgcgccggcggcgccgtacgggatgtcgcaggtgaacatcgaggggaacgggtgtggcaggacgctgccgccgtagctgacggagaaggtgtactgcctggcgaatcccgaacta

SEQ ID NO: 408382 - DNA, 358 bp, Oryza sativa
cttacgcgtgggggacgtcgtcggcgcgatcgccgcgcaggccggccgcctgcagcactccaccgtgctctacctcaaccacgccatcgccgacttcgccgaggcgctcgcctccaagatgcccggcgacctcaaggttgtgttcttcaccaactccggcacggaggcgaacgagctcgccatcatgatggcgcggttgtacaccggctcccacgacatcatatcgctccggaactgctaccacggcaacgccgctggcaccatgggcgccaccgcgcagaagaactggaagttcagtgccgtccagagcggcgtgcaccacgtcgtgaacctggacctcgacaggggcgcgttcggc

SEQ ID NO: 408383 - DNA, 519 bp, Oryza sativa
atttcatcgcgctcgcgcgccccgcccgtttcgcctcggccgcctcctccaccgactccggccgccgctgcctgcggcgcggcgctgtcaggcggcatatccttttactagtggaggcctgacagaattatataaagactgctgaaaatgtctgagttccttgaccttgaggcacaagatgggataaggatgccctggaatgttattccaggcacgagggaggatgctttgagctgtgttgttcctatttctgctatctatactcctctgaaacaagttcctgatatccctgttctcccatattctcccctccgttgccggatgtgccgttccattctcaaccctttctccattgttgactatgtcgcaaagatctgggtttgcccattctgctttcagcgcattcacttcctacagcattactccttaatttcagaaagcaatcttcctgcagaacttttctctcagtacaccaaaggtgagtacatattcactgctgacactggccctgtagtgcca

SEQ ID NO: 408384 - DNA, 349 bp, Oryza sativa
tcgttacgtcaaggtcgacgacgacgtccacgtcaacctagggatgctgacgagcaggctggcgaggtacaggacgaggccgagggtgtacgtgggctgcatgaagtccggcccggttctgtcacagaagggcgtgaagtaccacgagccggagtactggaagttcggggacgaggggaaccggtacttccggcatgccaccggccagatctacgccatctccaaggacctcgcctcctacatctacatcaaccagccgatactgcaccggttcgcgaacgaggacgtgtcgctgggggcgtggctgatagggcttggaggtggtgtacgtggcctaccgtagttggag

SEQ ID NO: 408385 - DNA, 487 bp, Oryza sativa
tcttctccccgccgccgccatgggtgcgtacaagtacgtgtcggagctatggaggaggaagcagtcggacgtgatgaggttcgtgcagcgcgtgcggtgctgggagtacaggcagcagccggccatcgtccgcctcacccgccccacccgccccgacaaggcccgccgcctcggctacaaggccaagcagggttatgtggtttaccgtgtccgtgtgaggcgtggtggcaggaagaggccagtgcccaagggtattgtctacggcaagcccaagcaccagggtatcacccagctcaagttccagaggaacaagaggtcagttgctgaggagagagctgggcgcaagttgggcggactcagggtgctcaactcctactgggtgaacgaggactccacctacaagtactttgagatcattcttggggatgttgctcacagtgctattcgcaatgaccccaggatcaactggctctgcaagcctgtgcac

SEQ ID NO: 408386 - DNA, 507 bp, Oryza sativa
tttcgggggctcacagtgcgcgacgagctggagttcggggagccaatgcaggacgtcttcttctgcctgcagcacgccgaggggctcaagttcccgctcctcttcatggtgaacgcgttggtgcacaagggaatcatcaaccagcaccagctcacgcctgaattcttcagcctgctggggagaagcgaggagaacgtcaatgtggctgcattgagggatttctggggggacaagttcccagtgtttgatgcgtgcgggaggctgaagaaggcactgaatcgggtggccaggaaccccaaacttctctgcagcaaggtcggggatgaccacgcggaggtgcggaggctggtgatcacgcccaccagggcttattgtctgcctccagaagtggagcgctcaaaccgtgttcttcggcattaccatgaggtggctgacaggtttttgagggtcacttttatggacgagggtatgcaggtgctgaacaacaatgtgctcaactccttcact

SEQ ID NO: 408387 - DNA, 434 bp, Oryza sativa
tgttgcctctcctcctcctccctaacccctacgcttccagaaccttctcgaagctcccgctcccccccccttccgctccaatggcgaaggaaccgatgcgcgtgctcgtcaccggcgccgcaggacaaattggatatgctcttgtccccatgattgctaggggtgtgatgttgggtgctgaccagcctgttattctacacatgcttgacattccaccagctactgaatctcttaatggccttaagatggagctggttgatgctgcatttcctcttttgaagggaattgtcgcaacaactgatgctgtggaggcctgcactggtgtgaatgttgcggctatggttggtgggttccccccgtaggcgggactggaagggcatggtgtttttgttaaaacaatgtcttcttctactatacccagttttcttcttttt

SEQ ID NO: 408388 - DNA, 480 bp, Oryza sativa
cgtacggcctttctttttgttaggttactcggggtctttttggacgagagactgggtggtaagattcgccggccatggtgggcgccgtgctggtcgccattcatggtctccatcggcaacttgctgcagggctgggataatgcaaccattggatgtgcggtactgtacatcaagaaggaattcaacttgtagagcgagccccttatcgaaggcctgatcgtggccatgtcgctcattggggcgacgatcatcacgacgttctctggagcagcggctgattcttttggtaggcggcccatgctgatcgcgtcggctgtcctctactctgttagtgggctagtgatgctttgggcgccaaatgtgaatgtgttgctcttggcgaggctcattgacgggttcgggatcggttaggctgtcacgcttgtaccattgtacatctttgagactggcccgtcggacatcagaagacttgttaaacac

SEQ ID NO: 408389 - DNA, 357 bp, Oryza sativa
gccctgtgtttattttgtgagtggtagcacaggaaacgagagggagctctgtctagagctcgcgagcatgaccaaggaaagccagaggcctgttgcagaggctactggtgattctgaccttcatgatagtgcacctgagaaaggcagagtaatgggtcaacttctatccaaggctagagaagatgtgtatgattgcacggcggttactcagagacttagagctatgtttcagtcagctgatgaacaagtcaggagcttgaagaagcagagtacatttcttagccagttggctgctaagacaattccaaacacccttcattgtcttgtctatgctgcttaacactggataactatcct

SEQ ID NO: 408390 - DNA, 517 bp, Oryza sativa
ttccgcctctcttcttgttaggggatccgaaatctcggtggacgagagacttggtggtaagattcgccggccatggcgggcgccgtgctggtcgccatcgcggcctccatcggcaacttgctgcagggctgggataatgcaaccattgcaggtgcggtactgtacatcaagaaggaattcaacttgcagagcgagccccttatcgaaggcctgatcgtggccatgtcgctcattggggcgacgatcatcacgacgttctctggagcagtggctgattcttttggtaggcggcccatgctgatcgcgtcggctgtcctctactttgttagtgggctagtgatgctttgggcgccaaatgtgtatgtgttgctcttggcgaggctcattgacgggttcgggatcggtttggctgtcacgcttgtaccattgtacatctctgagactgccccgacggacatcagaggactgcttaacacgctgccgcagttcagtgggtctggagggatgtccctttcat

SEQ ID NO: 408391 - DNA, 532 bp, Oryza sativa
tcttccagccatctgcaacatatagacacaagaaggaattcaatcagcagccaccacctgccaattgggaggtggttccaacacaaggaggcaagccgggtcaagcagagcagcaaagagaagctgcgagccgagaaggcccatgtacacgccatggtgtcggtggcccgggtcgcagctgccgttgctgcggttaccgcggccaccacgagctcagatatccagacctccaagatggccgcggccatggtgtcggccaccgagctattggcttcgcactgcgtggagatcgcgcagcacgcgggggcacgccatgagcaggtggcctgtgccatccagtctgcagttggtgttagaagctctggtgatctgatgacactcacagcagcagcagctactgctcttcgaggagccgcaacaatgaagcagagagtgcagcgagagatgagaagcaatgcgagtgttcttccctatgagaagggtcactcatggagtcctgacatctggtgcaaggagggggagttactgaaac

SEQ ID NO: 408392 - DNA, 503 bp, Oryza sativa
tgttgccctagctaggaatagctaatattgctggtagcattaggctgctacgcgagccaatcggccaatcagagcatcctaaggttggcacgggcctgcattggcggcagagagagagagagagagcgatcccttggttgtactgctagcgcccaaaacccaatttaggttgggaactgacttgcatggctctttgggccgcaagaagtgcagggagtgctacacaaaccatgtacgcactctatttgaggcgcaaggactccaagttcttcaactgcttgcagcgaagacaccagaactcgctggagatgatgccgctgttcttcgtcacgctgctggtcggcgggctgcagcacccgctcgtcgccgcggggctcggggtgttctacgccgtctcgaggttcttctaccttaagggctacgccaccggcattccggacaaccgcctcaagattggggggctgaacttcttggcgatctttgggctgatcatttgcaccgct

SEQ ID NO: 408393 - DNA, 337 bp, Oryza sativa
gctttttatactcttaggatgaaacacgacatgcagaatgataacaagaacatggctgacttaatagcatatagaataaagtttacacctcatccccatgctggcgacaagtggtttatctatccaagctatgactatgctcattgtttggctgactctcttgaaaacattacccattcgttgtgcacactagaatttgacatacgtcgtccttcatactactggctgctcgtattcctggaccagtaccagccatatgtttgggaatattcaaggttaaacatatcaaacaatgttatgtccaagcgaaagctaaataaacttgtgacagagaagc

SEQ ID NO: 408394 - DNA, 451 bp, Oryza sativa
tgccgctccatctccaagcccgaatccccaaaaccctagcccaccccctgccgccatggccgcctcccccaccggctcctcctcctcggcccccgccgccgcggcggcggcggcggccgaggccaccgacgggccgaccctcagcgtcgtctcgaagcggctccgcgcgctgcggaagaagcacaaccggatcctccagatggaggagtcgctcgccggcgggaggaagctcaacaaggagcaggagggggtgctccgatccaagcccgccgtcgtcgcgctcatcgacgagctcgagcggatgcgcgcccctctcgccgccgccctcgccgaggagcttctcctcccgccccgccccctactcctccgccgcgccgccgccctccgcattctcctccgccgcaggcgccgcggattcgtccgtcgtcgaggatcttctcgcgctcatcta

SEQ ID NO: 408395 - DNA, 453 bp, Oryza sativa
tgaaaaggcctgtgtcaaggagagggtagtagcaccttgctctcctttgccttcagagaaaccggaagcaatggcgtctgctactctcctcaagtcatctttccttcccaagaagtctgaatggggtgccacccgccaggctgccgcccccaagccggtgactgtctccatggttgtccgcgctggtgcctacgacgatgagcttgtcaagaccgcgaaaaccattgcatcaccaggaaggggtatccttgccatggatgagtcgaacgcgacctgcggtaagaggcttgcgtcaattggccttgagaacaccgaggccaaccgccaggcttaccggaccctccttgtcaccgcaccgggcttgggacagtacatctccggtgctatcctcttcgaggagactctgtaccagtcaactgtagatggcaagaagaatgtcgacatcctcactga

SEQ ID NO: 408396 - DNA, 525 bp, Oryza sativa
cgttcgaacccattataatccataaacaaacaatcccctcctcctctccaatctccattccctctcgagaagaagaagaaatcgcaacaatttgacggccatggcggtgtcgatcgagctgaccaaggaatacgggtacgtggtgctggcgctggtcgcctacgcgttcctcaacttctggatgagcttccaggtcggcaaggcccgcagaaagtacaaggtgttctaccccaccatgtacgcggtcgagtcggagaacaaggacgccaagctcttcaactgcgtgcagcgggggcaccagaactcgctggagatgatgccgctgttcttcgtcacgctgctggtcggcgggctgcagcacccgctcgtcgccgcggggctcggggtgttctacgccgtcgcgaggttcttctacttcaagggctacgccaccggcatcccggacaaccgcctcaagattggggggctgaacttcttggcgatctttgggttgatcatctgcacggctatcgtcggcatcaacct

SEQ ID NO: 408397 - DNA, 440 bp, Oryza sativa
gcgtgggcgaggcggcgccgcttggtctagctagtagccacagggagaggtggtagccgcagccgccgacgacgagacctcgccgccggggggagggcaccatgtgtggcatcctcgccgcgctcggtgtcgcagacgtctccctcgccaagcgctcccgcatcatcgagctatcccgccggttacgtcatagaggccctgattggagtggtatacactgctatcaggattgctatcttgcacaccagcggttggctattgttgatcccacatccggagaccagccgttgtacaatgaggacaaatctgttgttgtgacggtgaatggagagatctataaccatgaagaattgaaagctaacctgaaatctcataaattccaaactgctagcgattgtgaagttattgctcatctgtttgaggaatatgggaggaatttg

SEQ ID NO: 408398 - DNA, 390 bp, Oryza sativa
ggtttgaagaatggcaaaacaccccagaacttcacagagctcgagaaattagcactgggcaatgttcaagaacatagccgaaggctgtgggcatttctattatcagtctattgggtctcttttgtcacgtacttcgtactatggaagtcctacaagcatgtttctaatatgagagcggctgcaagatcaacaccagatgttaaaccggaggagtttgctgtgttggtgagagatgttcctaagccacctcctgatcaaactataaaggattctgtagactcatatttccgagcacttcatcctgataccttctacagatcaatggttgtgactgaccacacaaaggctgacaaaatttattaagagattgaaggtcacaaacagaaaatt

SEQ ID NO: 408399 - DNA, 514 bp, Oryza sativa
  unsure (1)..(514): unsure at all n locations
ctctctctcattctctctctctctctctctctctctctctgccccttttcccccacctacacgccacattctctctccctctcctccccccattgcggctaccaaatgctcctccagatttgctccaaggtatgctatgtttttatgtatgcatctgtagcacccatgtcctctccttttccctctccttgttctttgtagcagtgtgtgtagcctgcccatgtcatggcatgccaagggaaggcagaaagaattgcacaaaacaacagagaggcaggcaggcaggcagatgatggtcttgatcatcagctggatttagttagttttgtgtgtcatactataataatacacacatgggatgatagctaattcaattaggggagtacttgcttgtatgcacatctccatgtgtatgtttggtgtgtgtgcatgcatgctngcatatgcagcaaacacacacaaagnttggttatttatttgcttatttgctcctggnggtcagcctgaactggct

SEQ ID NO: 408400 - DNA, 446 bp, Oryza sativa
tcataaacaaaggcgcacaacgaacccgcaggcagccaaccgcagcagtggtactatgttgttagccatgggcaaaggcaaggtgatgaccagcaagtagatcgtgaatcatgtagtctactctcgaggtggggctagtccggttgactgattcttgaggacgggtagttgctgacgcttacactgtagaggacttgcggttcagggtttcagtccaagtacgagtacctctactgtaagattgatatgcagttaaagctcgttctcgggaactccgtcggcactgtcaccgaacctattttactacttatgggcctgcgcatgatgagattgactttcagtttctggggaatgtgaccggggagctcgacacgctgcacaccaacgtgttcactcatgggcagggtcagcgcgagatgcaattctgcctttggaacgaccccacc

SEQ ID NO: 408401 - DNA, 456 bp, Oryza sativa
ggtcatggcgctcaaggtcgtctctttccccggggacttggccgcggtctcattcctcgactccaacagaggaggagctttcaaccagctcaaagtggacctcccgtttcaaacgagggacagaagagcagtttccctgagaaggacttgctgttcaatgcaacaggctccaccaccagcatggcctggtcgagccgttgctgaacctgggaggaggtcatgggatggccccaagcctatctcaattgttggctcaaccggttctattggcacacagacattggacatagttgcggagaatccagataaattccgggttgctgctcttgctgctggctccaatgtgactcttctagctgatcaggtgaaaacattcaaaccaaagcttgttgctgtaagaaatgagtcattagttgatgagctaaaggaagccttagctgattgtgattggaaagc

SEQ ID NO: 408402 - DNA, 524 bp, Oryza sativa
tcgttgctactagccggtgagctagctaactaactacgtggctatggcccccaccgagatggccttctagggcacctctgtggctagagttcaagggctcaagttcaccgccgatctccgagagagccgccgctccaccaactggggcttcggcggcgttagtaatgggggaaggatcaagtgcatgcaggtgtggtcaattgagggcatgaagaagtttgagaccgtatcatacctgccagcactcaccgtggaggatcttttgaagcagatcgcgtgcctgttttgatccaggtggtagccttgtgtcgcgttcagcacggttgggtacgcctaccgagagagccacaggtctaccggatacatacgatggcaggtattggaccatgtggaagctgcccatgttcggctgcaccgatgccacccaggtgctcaaggagctcgaggaggccaagaaggcctaccctgatgccctttgtccgatcatcggcttgacaacgccaggcaggtgcagttgattagct

SEQ ID NO: 408403 - DNA, 408 bp, Oryza sativa
tcttcaggctcctcttcttcctgctcttctccaccaccgcgctctactcctccacctcgtcgtcctcctcctccgccgtgctccgcgccacgacgacgacgacgaccaccaccacaaccaccacgaccaccaccaacaccttcaccctctccttccaagccaacccaaaccctcccccatctaacctctccaaccacactgccctggacgcggcgggggcggccgggcacacgcagagccacgtggtggtggggcggcatgggatacggatccggccatggccgcaccctgaccccgccgaggtgatgcgggtgcaccggatcatggagcgcgtgcaggaggagcagcggacgaggtctggctctcagtagccccgctctgttctgctcgtgacgactctctacattc

SEQ ID NO: 408404 - DNA, 303 bp, Oryza sativa
ctcttcttcctacttcgtcttcttgctggtgtgttcgaggaggaggaggaggaggagaagctagcggcggcggcggcaatggcgacgagcgggctgaggagctgcagcgcggtgggcgtgccgagcctgctggcgccgtcgtcgaacaggagccgcctgccgggctgcgcctacgccaccacctccgggcgcgtcaccatgttcggcgagtggctgccgggccagccacgcccggaccacctcgacggcttctttcccggagacatccgggtcgacccgctgggccttgttaccgtggctgat

SEQ ID NO: 408405 - DNA, 479 bp, Oryza sativa
tcttcccttttttttttttttgagttggagcagaggagaagaatggcggctctgcttgtggtcgtgttggttgccatgtcggccatggtggcgacggccaactttaaccaggagttcgacatcacctggggcgatggccgtggcaagatcctcgaggatggccagctgctgacgctcacgctggacaggacgtccggctcagggttccagtccaagcacgagtacctctacggcaagatcgacatgcagctcaagctcgtccccggcaactccgccggcaccggcaccgcctactacttgtcgtcgcaggggccgacgcatgatgagatcgacttcgagttcctggggaatgtgaccggggagccgtacacgctgcacaccaacgtgttcacgcaggggcagggccagcgcgagatgcagatccgactctggtacgaccccaccaaggacttccacacctactccatcctctggaaccc

SEQ ID NO: 408406 - DNA, 302 bp, Oryza sativa
tcgctagctccggccaccaactttgacccgtgctcctcctccgcatcccccatcccctcctccccggcggcggcggcggcgcggaggcggcggcacgggagcggctagtggtttcgtcggcggaggcggaggcggggccaagatgttcgggcgcgcgccgaagaagagcgacaacaccaagtactacgagatcctgggggtccccaagaccgcctcccaggacgacctcaagaaggcgtatcgttaggccgatatcaagaaccaccctgacaagggcggctacccccgagacgcccacggag

SEQ ID NO: 408407 - DNA, 462 bp, Oryza sativa
tttttctcctctcttccccgtcgccgcgcacctaccgatccctccctccgctcgctcgcccatcgcgccaggtgggctctctggacacccggtgatggatcacgcggagctgaccaccgagcaggttctcaagagggatattccatgggaatcatacatggcaaataagctgatttccgggacatgccttcagcttttgcgacgttatgaccacaaaccagaaagccaacgaggtcctttgcttgatgaggatgggccatcctatgttcgagtgttcctgaatatcttgcggaacatctccaaggaagatactgttgaatatgtgcttgccctgattgatgagatgcttgcagtaaatcctaaacgagcagcactgttctatgataactctctctctggtgaagacatctacgaccctatcctaagattgctcttgaaagggtactggtttgtgccagaaaa

SEQ ID NO: 408408 - DNA, 506 bp, Oryza sativa
gtatgcgcgagggggaaggaggaggaaaggtgcacaaggtcagactaagtttgcgttgaagaacaaaggagaggaaaaatgtcgcctgctgaggcatcgcgtgaggagaatgtgtacatggcaaagcttgccgagcaggctgagcgttacgaggaaatggtcgaattcatggagaaggtggcaaagaccactgatgttggtgagctcaccgttgaggagcggaacctgctttctgtggcttacaagaacgtgattggtgctcggagggcatcgtggaggatcatctcttctattgagcacaaggaggagagccgtgggaatgaggcatatgttgcatcaattaaggagtaccgtagcaggattgaaactgagctcagcaagatctgtgatggtatccttaagcttttggattcccaccttgtcccatctgccactgctgcagagtccagggtggtctaccctgaaatgaagggtgactaccacaggtaccttgcttagtctaagtc

SEQ ID NO: 408409 - DNA, 156 bp, Oryza sativa
tctatcttgcataagaactcccccccctccttgggcccctccgtcgacgccgtttttttggagaggagaaatccgtaggctcagaggatttctggcagtcttgcttcgcgacatttgtgaagagggggggagctaaggggggatcctgtaatgatc

SEQ ID NO: 408410 - DNA, 442 bp, Oryza sativa
tcttgagagagagagagcctttgaccgccggagcggcagcgtcaccgccatggcgggcgatcagatgcacgtgctctccgtgctggacagcgccaagacgcagtggtaccacttcaccgtcatcgacatcgccggcatgggcttcttcaccgacgcctacgacctcttctgcatcttcctcgtcaccaagctcatcggccgcgtctactacaccgccgacggcgcgtccaagccgggcagcctgccgcccaacgtctcggcggccgagaacggcgtcgccttcgtcggcacgctcacggggcagctcttcttcgggtggctcggcgacagggtcggccggaagagcgtctacggcatgacgctgctcttgatgatcatctgctacgacgcgtcggggctgtcgttcggggacacgccgacgagcgtcatggccacgctctgc

SEQ ID NO: 408411 - DNA, 515 bp, Oryza sativa
tttagagtaggcacaaatcgtttacaaaaggcaaaatgtatatgaaaaaaagattgattgaactttccgacggactcattccatgagtaaacgattgaatgggattcgtttgggcaacgaaatcaagtgctggtccccttttctctcttattgaattaactaattcatttccttttgacttttggatttttggatatttttttggtgttgatttggcattattcaacaagaaaaaaatcaaaatttcgataaattccttttttttgaaaattatgtgataattatgagaaccaatcctactacttctcgctccggggtttctacaattgaagaaaaaagtacagggcgtatcgatcaaattattggacccgtgctggatgtcactattcccccgggcaagttaccttatatttataatgctttggtagtcaagagtcgagacactgaccgtaagcaaattaatgaactctggaggtacaacaatatttagaaataatcgagttagagctgtagct

SEQ ID NO: 408412 - DNA, 382 bp, Oryza sativa
caaacacaatacccttataagtacttattattaggaaagtagcgtgcatgggcataaatggcagcggggggcaggttaagaatcacaatgctgagcagcgaggaaacaaaacaccataatgggacagagcaaaagcctccgaaagggagcttttaggcagaaggcttttcccacttgaggggctttaccacctcccaggtgaagtctgggtcgtcccttccgaagtgaccgtaagccgccgtcttgaggtagcgtccgttgccgcctttcttgaggtcaaggttgatgatgatcatgccaggcctgaagtcgaagttctcctttacaatcttgaggatctccttgtcagggatcctgccagtgccgtatgtgtcgaccaata

SEQ ID NO: 408413 - DNA, 384 bp, Oryza sativa
aaagagacatggaatattacaagaagcactcaaacatcttcagagttacaaaattcatgtcacgctacagggagtatcaagaactctcttgaacatcaggcaattcttacctcctaccagactacatgttctaccaaaaaccatccaatccggtcgcacatcccacttccatttatatatgttaattgggagacaccattgtatcacatttgtagcaaatgatggttcgagctgtctcatcagtcgatcttcacagaagcatatatcttcctcacgaaccagaagcaagcatagaagccaatggtaccagtcagcacgaaaaaagcatacgagatgatcagcatgtaacccaagtagagaatgcctgaaacaagcttcgtgatc

SEQ ID NO: 408414 - DNA, 345 bp, Oryza sativa
ggagatgagcaccacgacgcacttgatgctcttgcacaccgtctggatcaccgtcggcccgggctccgggatcgtcaggttcaggttgtcgccgaacccctccgcgtacggcggctcgccgaccaccacgatcgcgtagtcgtacttgtcgccggtgaccacgctgctgtccgggttctccgagtacaccaccgtcgtgctgggatcaacggtggccttgatcgccgacaggatcgtcgtgccagcagtgatgttgttgccgggctgtccttgccaggtgatggtccatcctccacactgtctgcccaaatcatcagcatggctttccgcgacgagaattttacc

SEQ ID NO: 408415 - DNA, 389 bp, Oryza sativa
atgtaaatggttgatttctattaggtaaccgctcagcaaactgtcggtttgggcagcagagagttcagcaaaggggtcaggtgcttgggacccgagtatctgacatggcatacatggaaagaaaaggtgctgcttcttgtcttaacatgaatagtagaaggtatatatccccgaagtactggttttagaccatgtatgctaacatatgtcgtactattgatgagaaactgttcagtgaattatgtagcctctgcagttgatcagctggagatcactttcttaagctctcaatgatgtaggcgccgtataggtccattgagtacttgattgcgttgatggcattttttgctgggagaaacttattgacagcaacttctttggtctcattc

SEQ ID NO: 408416 - DNA, 378 bp, Oryza sativa
agttgagcaccacgacgcacttgatgctcttgcacaccgtctggatcaccgtcggcccgggctccgggatcgtcaggttcaggttgtcgccgaacccctccgcgtacggcggctcgccgaccaccacgatcgctgtttttttttttaaattttattattttaattattttttttttttttatttatttaccacctgtattgtctgtgtttaatatgttgtatcattttctcttactgtttatttttatgcccagcagggtatgttgtttgccgggcttgtcctttgccaaggtgatggtcccattcctttttttttttttatttattatttatctatttttttttttttttatttattttttttttctatttgttttc

SEQ ID NO: 408417 - DNA, 385 bp, Oryza sativa
agtaaaaaggtaaactcttcataataatattattaagacattatagctgatgtcttttgatcacactgcgatcaaattatgcatcataggcagtacaactccgcgtcaggaaaaagtagaggagatatatttcttgttattacttaatacagcattcacatatatcgaaccatccggtacgtacgtagtagtactccacgcgttcacatcgatgatcggggacgatatcctcaggtagtacttatgcaaaagcgttggcgtaaactgacgaactgaacggacggacggtcggatttagggctcccataagtccaagttgccggagacgaagtcgtagtggccgccgacgagcttgagggtgccgttggcgatcccctccttgacg

SEQ ID NO: 408418 - DNA, 391 bp, Oryza sativa
gacagcaaatagcttggtaactttgaaactccacagtacaatacggcggtctagaggtccagacaaagagcatcaaagcaagaatgaagagaaagacaattggaatcacataaaaagatggcccaaagcacactaatttttattacaaccgccacgacagtcttgatcgtactgactctaaggcgcaaaatacaaatcggcattaatcttttgcggatatcccgctctctaaaggcttcttattcctcagcaaatcccagttcagagagcttgaggtgggcctcggcgtaatccgcaaagaaggcgtcctcatccgcagcatatttctccaccagtggacggaaggctgggtcagccatgagggctttgtcacttggcagctgaagaaggc

SEQ ID NO: 408419 - DNA, 372 bp, Oryza sativa
caaattcaaaaaccacgatttataaagtgccggagatgaagtacacaaattaacattacatcgagttttaataaaacatcatgcgaaaagccagcaaaaacaaaaggcagcatacagctaatgaagctctactggagtagctcgcaaaaggtccgacttattttcagtagcactctactccatttcttccgaaagagtgaccatcttctactgggtgttgtacatgtgacggatcaggtcaacaacgcgagagctgtatccccattcgttgtcataccaagacacaagcttaacaaagttgtcattgagagcaataccggcctttgcatcaaagatgcttgacctgttgtcaccctggaagtctgtggaaac

SEQ ID NO: 408420 - DNA, 350 bp, Oryza sativa
acaagtaaagctgatgactgttgtttggagttacatgaaatggttcactgaatgtttcttggctgaacatgaaataaaatgacactgctgaaagactagagtgcagtgtgaagcagtaacatgtccaacttcattgtagctcagccgggctcacttatggttgttagggactgatcgatctcctctgtcgtgagtgctctgaaaacacgatcatctttcctcacaacaccgaccttaatcttggtggccttgaaatcttcctgaagaactgattgcaatgcaaaaattgcaatctggacagtttccttgtaggagaactgtggggcatacttcattttcttttccagaaa

SEQ ID NO: 408421 - DNA, 392 bp, Oryza sativa
acgacaaaccacgaacttggatattaaagatgccacaaagaaggttcacataaacaacacaggtcacagcagcgaaagctacaagcaaaccctgcataatcgaaaagcaaatgtttttcaaaaccagacacacaaactgatagatagaagcccacacggacagatcataggatagcagcagtaatcaagcattgccaaggcaccaggcaagaaccctgaacctctctagtactcgtcaccctcatcaccctcgtcaccatcgtcgaactcggagccgacctcctcgtagtccttctccagcgcggcgaggtcctcgcgggccttggagaactcccccttcttcatgccctcgccgacgtaccagtggacgaaggcgcgcttggagtacatga

SEQ ID NO: 408422 - DNA, 381 bp, Oryza sativa
aagcaaaagatcacaaaaaatgtcaagaacaagagaagaatgtcatcgggttcagtacatatatgcatcgatcgatgaattaggccgggaggtaggacggcggcagcggcaggccgacgaccttgccgcagcggagggcgttctccggcatgttgtactcgtcccggagcgacctcgccggcgagacgacgctgatgtagagctgctcgccgaggtagtgcctctcccagatgttggacctcacgttccacatcccggcgttgtcgaacgtcagcatgatcgccgtccacgacctcgggtacacctggaccgagtgccggctcaccccgtccagcaggttggacgtttttcttttcttcggcgaccactttcccgggccca

SEQ ID NO: 408423 - DNA, 383 bp, Oryza sativa
cccaggaagtttgaaaaagtactcgattttccacaactgaatgtgatataatagcatcagatgcagtggagcaagtacaaaactaacggaagcaattcaaaagaacaatcagttattctttgtttgcatcatttgaaccctcctccataggcactgcttctgctgcatctcctttcttacctttcttcttttttccaccacttttcttctttgtttttgtccccaaagcaagccatgccttgatctcagcgttgtcttcaatggatttagtgggctgcaactcctgaagtgaatgcgatgttaccctctgtgaaccagatggcagcagaagcacagtaaacttgatgtgtgcaacaaggtcgcctggcttcttgtgaaggaca

SEQ ID NO: 408424 - DNA, 286 bp, Oryza sativa
ccaaacccttttttttcccctggttttctatttaatttcattccgatagataccaccaagcatttaaaaccccataaccaaagggaactcaattcatgggaacatcacgggcaaaaaacccctaacactggagggatggaaagagggctttccgactcgagagagccactggacacaataaccactccgacttgataaaaaaaagattttgccccggttagctaaggataactggccacaaggggccccaccaaacagtccctccagatccccccggaatcccccc

SEQ ID NO: 408425 - DNA, 385 bp, Oryza sativa
cactaagattcattcattcattcatttgatcaaagcaaacgagacgagctttcttcttgcgatcaaaaacacagatgggcaaccacacagttaacacaaactagatagttccacacaaaactaacgatgataacgatcggatgatgatgatggtagctcgattagatagatagataacttggccatgagggccccaccgctcagttcctccagttcccgtcggagttgccgccgccgcggctgccgtagccgccgccgtagccgccgccgtagccgccgtcaccacggccgccaccgtagccaccgccaccgtcgtagccgccttcacggcgctggccgtagccaccgccggcggcaccaccaccgtagccgccggcaccgtagc

SEQ ID NO: 408426 - DNA, 392 bp, Oryza sativa
cagtcacaaaacacagtgcacatgttatcagaagttcacttatcagtacgagaattcgaacagagactggtccgagatattcttgccaagctaaaatagacgggcgccatctcaggccttggaaaacataaacatgttatgtagcatgcatatatacacacatcgccggataaatacgctagttaaaagctacggtcttcttctctcggcgtatgcgtccacctcgtcattaggaacgtgacaacaacacgtttaggccgacttcgcgaagccaaccctcatcttgccgtagtcgaacacggtatggtaggcacccatgaaaacgtcacccaggatccagagaggaccacggggaggagggatgtccatggctgtgaatccactgatgcact

SEQ ID NO: 408427 - DNA, 231 bp, Oryza sativa
aaactcgtataaatatatgataatattacgccaaaagatcactgattcttaacaaactctttgcagctacagacactggaattcataccgtactattactgattgacaaagccagaaatttgcccaggatacacagaagaaccgtatatcatcattcacccaaggcaggctgctcaagctgcccaatcttattacccaacaccataatcccctgaaaaacctcagttctcc

SEQ ID NO: 408428 - DNA, 417 bp, Oryza sativa
tcgtttcgcgccggcgtggcgtccgtcgtgacgtcggaccagttcgagcgcatgctgccccaccgcgacgacgcggcgtgccccgcccgcgggttctacgcctaccgcgccttcgtcgccgcggccggcgcgttcccggccttcgccgccacgggcgacgccgacacccgcaagcgtgaggtcgccgcgttcctggcccagacttcccacgcgacctctggtgggccctactcgtggggctactgctacaaggaggtgaagggcgcgacgtcagacttctgcgtgccgaacgcgcgctggccgtgcgcgcccggcaaggcgtaccacgcccggggacccatgcaaatcgcatacaactacaactatggggcggccggcgaggcgatcggcccggaccttgtgggcaaacccggagct

SEQ ID NO: 408429 - DNA, 368 bp, Oryza sativa
aactgtgtatatatttttctcttaagataatataaatggtttacatctccagccaataccgacggtcgatcacagccaaggcaatgtagtgtatatatatgtcactaatcatgcgtatgtatattacaaatgtacttatctatatacagggattgaaatcctatatcttcaaagtcatcatggcttagacccatggtttatcggtcccacatatcagtgacgaaagtacgtacctttgaaggtagaagagcctgttccatatacagcagaagtaaaacataagaggtggcacaaaagcatcatatcgctaatcaatcagagcgatgcgctggaagaggtgcgatgatcggcggcggcggcggcgcttt

SEQ ID NO: 408430 - DNA, 353 bp, Oryza sativa
gcaccattggatacatctctttattaagctaatgttaccaaatgagccatggagtgaatgttctaggtattatggggacttgttaccatcgaaattacatatagaccacagcaagcatacagttttagttacagggaatacacaggatgaatcaacacctgagggtatgcaaatccttcaagatctttatatccatatatcagaggggcaatctccaccaggatatctcatttcatgggccaaggagggaccctttggctcagcaccaaaatttacaaagaagttagggttgatcgatagtcctcctttctcagtgtcgacgttgatctgcaacatgtgggagccctttttga

SEQ ID NO: 408431 - DNA, 300 bp, Oryza sativa
aaaaccctactaatatttatttttaaaataccataccctcacactcattttacttttaaccgaacaatataatagcccatcagatgcaatgtttaacccctaactccgggtttggcttcacattgggaaaaaagggtttgacctttaactttggctatggcttggcttgggggttagtccgaacccaaatgggaacagggggttgtaaagcttggcgccgaaatttattggtaggtggccccccggtttgaaccaagtccggggaattttgccggtgaagccgtgatcccccaacagcac

SEQ ID NO: 408432 - DNA, 398 bp, Oryza sativa
gatcccaaatgttctcattgattgatagcgatatcatagaagcagcgacacgaattaagatttaaaaccaaccccaagaaggatcgcagatccaactccaccgaatcgatccaagaactccgcctaatccaaccaaaccatgggcgatctcatctcaccaacacgacacgaactcataaaaagactaacaccaccaccacctcctccttatttagggactcgacgactcaagacgactgatactggcgaaaggcgaaggggaacagcacagatctaggagagctggccgcagtcggcgatgacgaccggcttggcggtgctcccgccgcgggatcccaccttctcgatggccttgacgacgtccatgccctcgacgacgcggccgaacacgacgtgct

SEQ ID NO: 408433 - DNA, 277 bp, Oryza sativa
aaccgaatagaaataaacgagttttaaacgactaacatagtgcacattgcgagcagatattaacggtccatgcaacgagtgccatggccgtgggcaaaacttaacgaacgctaagatatctcaaatgcagccagcataaccaccacttcaacgatgctcatttcttcttggcggcagccttggtcaccttggcaccggttgggtccttcttctccacgttcttgatgacgccaacagccaccgtttgcctcatgtcacgcacggcaaaacgaccaag

SEQ ID NO: 408434 - DNA, 326 bp, Oryza sativa
aggatctgcttacccttgtggcctgacatcgcgtttcccattgttggatcgtgaaatttcttatgcacgtgacaaatttatacaggtgcattgcccatgtacacaggaaaacacgacaaaagacctaaaattccagtgcgtcgttgaacccggcgtcgtaggcggcgtcagcctccatgtcgccgaccatttccccgagcatcatcccgccgaccgcgccgccgaggagcccgagtccgaggcccatgcccattcgtccacctttcctcgccgccggctgttgtgccgccgcgtagctgtacctcgccggcggcggtgggccggcg

SEQ ID NO: 408435 - DNA, 382 bp, Oryza sativa
aaatcaattggacgacacaattgcgtcatgcaacatttcaatatcgccaaagagcttcgacacaacatccctggagcaccctccattgtcactgtttttttaacatctatcatgcttttcacagtttactcaatctgctcgcctatgagatcaaggcctactaacaagaaagatatgccctggaacaggaggaagtagaaatgtataccctgtttcgagagcaaactgcgagctgcagcggttaggaggagcaatgagagtgcaagctctttcttgtatatccggttgtgcttcttctttacgtcctttctaggagcggactgctcctttgcaatagcgtcgaggttaggcgcccgttagttttttggtggttcaactcttt

SEQ ID NO: 408436 - DNA, 281 bp, Oryza sativa
aaatataaccagagggctttgccgtgtttcaagtacgattagtttcaacacaaaggcatggcagatggaaccaatattgaacacaaactcggaggggggggttaccgagggcacaaccgacaaccctactttttttaatcgtcattatcagcgacgggggcagcagacccaaaaggatcagccgcagttccagaaccagtttttgtccgttcgaaacggaactcactgccaaacccgggagactgctgcaacgtttgggcgaacgcctggtacttgcggat

SEQ ID NO: 408437 - DNA, 368 bp, Oryza sativa
ataatcccccgaaatttccactcatcataagcacaaggagtccacaaccgccacaaccattacaagcactactgccatgacaatctgcccgaggctcgccgccgcggcggcccgccggtgcgcgctcgacggcttgggtatcgtgtccgggagcgcgcactcctcgccgtcgaagtagagccttttggggaagccttcccccttggcaatgttgacgttcggcgcgtccttccgcgagaaggagatgacggactgctgcttcccgggcacccttgggtcctccggcgtcctcccctcggtgatcggttcgaggtaggtgagcccgggcaacccctgcatgaagatgctgttgttgaacggggccccca

SEQ ID NO: 408438 - DNA, 366 bp, Oryza sativa
ggcgtataacgtttaatataatcatttgtgttccttcaaatcacgcttgcgccacgcaacatcaaaattaagcgttttgtgggagcatgtccacccacatctgaccgtggggaattattgctcaaaccctcacaatcttcacaaaatttacggaaacgaagtggttctattcccatctagtagggctccactggtgcacggaatttggctccggcatagacggcagcagcaccaagctcctcctcgatcctaagaagctggttgtacttggcaaggcgctcagatctgcaaggagctccagtcttgatctggcccgtggataaaccaactgccagatcagcaatgaatgtatcctcagtttcacca

SEQ ID NO: 408439 - DNA, 396 bp, Oryza sativa
ggcggcaggtgcggcggccgggccttgggcggcgccgccgccgctttcttggtcttggcacggatggcgtcgagggcctcgacgtacttctgcacccgcttctcctgcactcggcgctgctccttgacctcgccgtcggcggcgatggagtcgagcttgaccagctcattcatcagcgcctgggtgagcgccaccacgtcggcgtaaaccaccctcccgcccttgctcacgatcgcctccagcgccgacaccttggaggcgagcttgtcgacgtcgagggcgacgcggtagacggacttggcggcgcgctcggccttgcaatggcggcgctcctcgaggaggcgcttggcctgggcggtggggtcctagaggaggagcatcttggagcggtccttg

SEQ ID NO: 408440 - DNA, 389 bp, Oryza sativa
gccgccgcaaaacccgttttgggtggccaaagctaataaagcaagcgtggcaaataagggtggaattatccaagcacaggtgaacaccacgcatacataatacaacatgatcagtgactggtgcaaaagtgcaagagacaacacacggtttaaccgctggatcatagcacacatcaagtggtttggtaaatgaaatgaagttcttgcgttgatcgataataatgcatgcgcatgcaggtaagtaacacgagcactgcaatttattcctcggcttgttatctagatcgagcgatgatacggtgtccggcggccggccggccggcgacgagcaggccgccggcggcggcggcggcggcggcgatgatatatcaaccgaggcgcaggtcgtg

SEQ ID NO: 408441 - DNA, 364 bp, Oryza sativa
gggcaatcactgagctgattcgcatagactgaagcttatttaacaggtcgaaaccagatacaactgattgtagtcatagctcaaagcacaccatcatattggatcagtacatacaaagcgtgcgtattgacaccgtctaattggattagtacattcgaagtggataagtaggctttggttcaccagtccatgcctaaattccttgaggtaaacagatcttcaacgtagagaattactggtccagatgctctgatgaaagtctgcatttgaacctttgccgaattttcatcttcattcaatttcttcaggagctgcgattttgagggaagggcgtacattccagcagcaacggctttccttatgg

SEQ ID NO: 408442 - DNA, 365 bp, Oryza sativa
gggaacactataacttagacagcaaaaagatgatccaggttccacatccgttacatcacgacagagtaaaaatagtttctcagtagcacgcgaacataggattgttgatgtgaaacacatgcattcgacaaaagggaaatgaaatacgacaacgaaagcagttctcttagcagtagaccaactagaacatgtaagggtaacggcacaacacatgcggcggccaaaaatttagagcttgtcctcgaaatcggagaggggagtcatctgctccttgagacccttcctcttgcggatatcctgcaccagggttgaagcctgcgagccagcttcaagaggatcagaggtcatcatgtcccaatggtcga

SEQ ID NO: 408443 - DNA, 375 bp, Oryza sativa
ttttgtgaacaaccgttaaaaactatcatcaccatgctcgtctagacatagattaaaacattcacgctctcaacatgctctctataacaccataaccaaagcgaactcaattcatggtaacatcacggacgaagaacacctaacactggatggatggatagagggcttctcgactcgagagagccactggacacgataacgactcgactcgatgataagatgattctgacacggatagctaaggataactggccacgatgggccccaccaatcagttcctccagttcccgccggagtcgccgccgtagccgccgccacggatgccaccgtagccgccggagagttgggagagcaggtggaatggaaatgggagct

SEQ ID NO: 408444 - DNA, 357 bp, Oryza sativa
aaaggattatagcacttctgttgcatcataacttgccatagttattacagtttagtgggcatcaaagcaaggtccttacatatagagcatattggcgaacactattattacaacttttagaaaatcatgagaagtatttctacaagactgctcttttcaataggctttgttccaggcttccagcacacgacttaccatagcgatgcagtgcgacatcaaagtatctgcttcttcctcaagatgactgcttccatccaccaatgtcttcctcagataaaccccgatcgcgatcatcctctggagtgaacgtcaggcccactttgatttctccacggtattcttcttctttcacaacat

SEQ ID NO: 408445 - DNA, 370 bp, Oryza sativa
gtgtagaaccgtaaaataggatcatcaccatgttcatctagacatagtagaaaacattcacactctcgaaatgctctctatctttcagttttgtgttgctatacgtcttcttgttttgcattttttttagtattccatttctgttcagcagagtggcagtggcgcgccattccattccttgaggcattcgagcagcgggtcgatgtgcttgcgctcgttgatggcgacgagcaccttgttcagctcctcgccgggcgaccgcgtcttctcgccggtgaggtactcggtgccgacctcctcgcgcacgaaccggtagagcgggtacgagcggcactccttgatccggttggggacgagcggggtgccggtc

SEQ ID NO: 408446 - DNA, 424 bp, Oryza sativa
gcacgcgcgcgtacgctagcatgctttcgagcggtcggccttcctttttttttttccatggatataaccagtcttagttatacgttgcttagcatccccttatttacatatagagttcagaggtgcaaactgcaaatagtgattgcatagaggtgcaaactacactaattcatgacaccataacacaccatcagaacgaaccagttctacttcacccagtgttctgcataccagcagcgatgcccttcatggtcaggatgagagtgtcctcgaggcctgggccgtactcgcttgttgtgttcagcttcacaagctcagcggctggcttccctgagtccattatgtccttggagaggtgagctcgggggcttacatggaagccagggtccctgatacgctttagcgtgcaagcttggcaaacatt

SEQ ID NO: 408447 - DNA, 455 bp, Oryza sativa
ggccacactatgtactagcatctgacgatgcacgcacgcgtacgctagcatgctttctatcgggtcgcccttcctttttttttttttttttgatccaaacatggtgttgaactttgcttataacgtttaatataatcatttgtgttccttcaaatcacgcttgcgccacgcaacatcaaaattaagcgttttgtgggagcatgtccacccacatctgaccgtggggaattattgctcaaaccctcacaatcttcacaaaatttacggaaacgaagtggttctattcccatctagtagggctccactggtgcacggaatttggctccggcatagacggcagcagcaccaagctcctcctcgatcctaagaagctggttgtacttggcaaggcgctcagatctgcaaggagctccagtcttgatctggcccgtggataaaccaactgccagatcagc

SEQ ID NO: 408448 - DNA, 365 bp, Oryza sativa
aatctatgaataaaatttttatataggtgttcctagtgatctaaaagtaaatgctgaaaaacaaattttaatgagaaaaccacaaaatcaggtccaaatctaagattaaaaatttaaattttgactgctaagcataaataaaagcgaaaagatgttacacgaacctattcagaaaaactacctaacggcatcccgtggagacgggatagtagtactgccttatctcctcttcccctctctctgtgtctcttcctctccactcgctctctctctgtctcttcccctccactcgatctctctctctgtgactaccacccatgagcatggaggcggcgatgacgatgacgacgacgacgacggtgccg

SEQ ID NO: 408449 - DNA, 359 bp, Oryza sativa
aaaataaaaatatatagcatattatatattgatatatcatcaacatagcccaaaacaaagctgcatactattattataggcagcaatccaccagcgcgatgcttgatcttagcttagttgccaccagactcctcgcaacctgggggcttgtaggcgatgaagctaatcaactgcacctgcctgacgttgtcgaagccgatgatacggacaaaggcatcagggtaggccttcttggcctcctcgagctccttgagcacctgggtggcatcggtgcagccgaacatgggcagcttccacatggtccaatacctgccatcgtagtatccgggagacctgtggttctcacggtagacgaaccc

SEQ ID NO: 408450 - DNA, 368 bp, Oryza sativa
  unsure (1)..(368): unsure at all n locations
atatcaatcaacaatcccatcagtccatttatttctggcaaaattgatcttacatcacccaacgatcccgattttagttttctagcaccgacaaatcccaggtcacttgaatagcatggaaccaatttcgcctttatttatcgtatacatttgtatgtctgaaacgcatcctccgaaagactgcatcagtgaatgttagtgaacctcacagtttggatgcgttggcagtagcaaccttgcttcccaaagcgatagctgccttggacccagactggcgccccagatggttgcagatgaactcgccggcggccatcaccttgcccaggtcgacattggtgctgatccccagnccgttcagcatgtacacc

SEQ ID NO: 408451 - DNA, 354 bp, Oryza sativa
ataaactgggagcaaacattcccgatgatcatagctcattatagttaatgcccaacaccatgctgataagaattgggcccaaattgtcttacaattacatacgcccacagtaagatgtacttagcacacttagtacaaccgagatggcagtgttctttgcatacatacaaaattacatcacttgcatagcattactgttacataacaacatctcatccaagatcaggaacgatgaaaaagtcctcgtcgtcatcgggtatctccacccggggcttcttgctttggcgtgcaccgctcgccttgtagagccccatgttgctcgctggctgcggcgaggcaaagagcttaggcacc

SEQ ID NO: 408452 - DNA, 360 bp, Oryza sativa
catattattagatgggcagaggtaaaatgtcaagctgtaagatgagaccttacagaagttacagttgcggtgctgcagaacaagcagcgacaagagagttgcatgagaaaatttcaaccgaaggagcatcctttgtacaaatctatgagggtttgtagtacttggtcggcacgaacggcatattggtgacgacggcatcgtaggacttcccacggacgacaaccttgaactctgtcccagccttgtgcaaaccggattttacgtagcccatggcgatgttcttcttcaagcaggggctgaaccctccactggtaacctcaccaatgttctccccggagttgctcacaatctcactatgac

SEQ ID NO: 408453 - DNA, 384 bp, Oryza sativa
tccggtggccgtgggcggggcgaaggcgtaccacgagcgggtggtggaccactacgagaacccgcggaacgtggggtcgttcgagaacgacgaccccagcgtcgggacggggctggtgggggcgccggcctgcggcgacgtgatgaagctgcagatccgcgtcgacgagagctccggcaagatcgtcgacgcatgcttcaagacctttgggtgcggatccgccatcgcgtcctcctccgtcgctactgaatgggtaaagggcaagcaaatggaggaagtagtgactataaaaaacactgagattgccaagcacttgtcacttccaccagtaaagcttcattgtagcatgcttgctgaggatgcaattaaagctgccgtgaaaga

SEQ ID NO: 408454 - DNA, 313 bp, Oryza sativa
gcgattaagtaaggaattttatttaggggccaggcggcaacatgacatacatgagaccctaagggagctagctagctagctagcagcaaattaaggacttgcatgcaagctaggtagctagtccatggcatatgtaggggaactgggagctcgttgatgaggggatgaattggatggggaaaagtttcttctagttgcagttgcagcaggagcagccccagctggggccccacttgcaggggttgcaaccccaactgccgttttccccccccaactctgatcccccggaagcagcacccgaccccttggtggt

SEQ ID NO: 408455 - DNA, 361 bp, Oryza sativa
acaacctgtgacctacatgtttttgtttcagatttgtatatctaccctacaaaagttgtatattgcctacaaaaagaattcagtcttcatcaaaaaggcattagaggcatttccctcatcgatttttgcatctccaatctgaatgaaattaatttatgctgttcgctacacctagccaaaactttgcagctatagctaatattactggtagtcaggtttcagcacccacgttgcaccatttgcacctctttgcaacgtagctatttccttcagcagattcttaaacagcagcatatccttggacagtatccggttcttgaagtgttcagttatacttgttgagctggcggaaccaccatgc

SEQ ID NO: 408456 - DNA, 367 bp, Oryza sativa
ggattataggtaatcaccacctttattcgattcttcgtcgtcatcgctgtttggtacattaccatggcagttcaagcgaaattttcagaaaactaccaccacataggcttacatgcgaacatgcatactacatacaacggcgcctttgacaggcagcagagtttccaccattccatggctatgtatttattattcttcaccaggtgcaccaacagcaggcgatctggttgccggtaaagagaagggcgtcatcatcagaggagcacctgagctgcagctagcctagcaattgggaccctgaaaggcgaacaagaaacatagtccagcccagccttcgcaaagaaagcgactgacagaggctctccac

SEQ ID NO: 408457 - DNA, 366 bp, Oryza sativa
aagaattaagatctccatcacataaaaacatacagtgactgagtactggattacacgattgagttgttcagggttcagataggaaaaacatcttggggactagagatagagggaatcgacagatgcgcagcagtagcgcgcgggaaacaggacatcacgattgcgttgcatgtcgtcggctgcgcagcggcggcgcggggcttaagacctgctcttgaatgggatcgccctgatgatcacctggtggtagatggcagccagggcagcgccaacgaagggaccaacccagaagatccaatggtcattccaggcatggtccttgttgtagatgatggcagcgccaaggctcctggctgggttgatgcc

SEQ ID NO: 408458 - DNA, 359 bp, Oryza sativa
cggcaagcagtacaaaatttcatttatacaagttgcccaaaagggaccagttaggcactagcattagcatgagtttggcctttatttttctagcaaattacacaaaataccgagggaaaaaggaggatggaattcaggtcgcactttcagctaggaatgcccagcccctgaattattaacaccacacagaattacggcgctgcgtgaatcccgaactaataaacacgcgccttgggtgggaacgactcaacttcactgtccaatgggttcatgtggactggcctgtatgccaagcgaaccttctcattctcccagaaccccagcgagtgcttcatccattgctcatcatctcttttcgg

SEQ ID NO: 408459 - DNA, 358 bp, Oryza sativa
gctgcctgccaagattattctagtacgtgtattaaaggcgcggttcatgcacgaagaggaaaccggatttccagcaacagagatgataacttaagaattaagatctccatcacataaaaacatacagtgactgagtactggattacacgattgagttgttcagggttcagataggaaaaacattttggggactagagatagagggaatcgacagatgcgcagcagtagcgcgcgggaaacaggacatcacgattgcgttgcatgtcgtcggctgcgcagaggcggcacggggcttaagacctgctcttgaatgggatcgccctgatgatcacctggtggtagatggcagccagggcag

SEQ ID NO: 408460 - DNA, 365 bp, Oryza sativa
acgaggaagagctatatgtatgtgtaataatccaaaacaagcacgtagtacaaggagttgcagtacatgcatgtagaatctctagctctctctggtacacgtacccctcgaaaaggagcaaaacgtacgagacgaacacacaagaagaagaaagctagctagcgttgaccgggccgatcaaccatggatgcatggtgattgatcgagaccttagctagctcatcttttattccagaatacagatatgatactactagtactggatacagaattcggctccacacattgacccaggcagaatctactaggtggcaaccggcgcgctgctgtatatatatgatccgtctctgatcgatggctcagct

SEQ ID NO: 408461 - DNA, 343 bp, Oryza sativa
atattatattattattaacaaaaacttgtcatgcccagctatggcttgggcgcgatctgatacacagaacaaagggaaaacattaaaaggagaaataattaatagcaagcgtaaagccggcctgcttaaaaggtgtaaaggcagctgccgacggcgctcctggccgttgggtcgaagttcttggcaacagggtcggtgcaaccttccggcacaggcaggttacctgcttgctgtgctccttgccctacttctcctatgcaggccgcctacgatgcattgatgggatgcgaatagctagaggtcttttattcagcttgaaggcgcaaaaccgtagaaggaacca

SEQ ID NO: 408462 - DNA, 341 bp, Oryza sativa
gttgcagaggcaaaacacgaggtatgtatatcaaacgctctagaaaagattcatgtgatgaaatacatgatgaaccacgtatgttctcaaggtaaaattaattaatgcagtatagttttaactttgtccatcgatctcaacctgtaactgtgacgacacactggctacagtgccctcgaggtactagcagtatagcagtagcttgagtacgtagcagcagcagcagcaggttcactgtcttgattggattggatcggattagtagacgtagtttttgacgaacatgccctccttggcctaggcggacttgccgtcgctggtgtacttgccgagctgcgcca

SEQ ID NO: 408463 - DNA, 419 bp, Oryza sativa
agggaagaaaggtgcattttatttcttattaaattggaaatatacaaagtcatgacaaatcttggacaaattatcagatataggacatcagggacgatgtgtacaaattgtccaaatcatgctcacctccccaagttatacatatcagatacctggcttccaaaataatagtttcactcctctttgaagagctcgcggccaattatcattcttcttatctcactagtaccggctccaatctcaaacagttttgcatctctcagcaatcggccagttgggtactcatttatgtatccgttgccaccaagacactgtattgcctgaagtgcaacctgagttgccctttcagcagcaaagagaatcacaccagcacaatccttgcggtcaactttaccattgtcacagtccctagcaaccga

SEQ ID NO: 408464 - DNA, 387 bp, Oryza sativa
ggatacgaaaaagagctatatatctatgtataatccacaacgtacacgcacgtagtacaaggagtactccatgtacatgcagaagtacatatgcatatgggacaaaaactgatctctagctctcaggtacgtatagtcgatcgacgaataaattaaggaaacagatagcgtagtgaccggccgggcgatcaaccatgtatgcatggcgatggatcgacctagctagctagctctcattttattcagcataaacccagataacacaagatacaaagcgtgagacgacagctgcatctcggccggcgctgcatgtcatcctccggtagcgatcgatcggattagttcacgctggagcagtcgatggaggggctgatggtgtaggggatg

SEQ ID NO: 408465 - DNA, 396 bp, Oryza sativa
aacacgacgtccatgtctatgtttctttactgattttatgcggcccaaatcagtggtattaggcttgaaaaagtcctgcaaaaattcactgcgcacacgacgttgaagttggagaagttgaagctttttcaattcaatgacactctttgttaaagcagaaagatcctccgatgaactaacattttccttcagcttctcataggatgctgaaattctcctgtgtgccttctgtaactctaatgccttccttttgttttcttcatatcttatgttctgatgatccaaaatccatttatcagtcattgggtacttcggaggagataatggtaaatcatcttgctcagaaagatcttcgtctccttcatctgcagatcgctcaaatatcatctcttccat

SEQ ID NO: 408466 - DNA, 325 bp, Oryza sativa
attgcaaaaacattatcttcttctccatcttcttagggtacacaacaccaactggatcattatttcgtcgcactaaacccattttccccaacccaaagacaacgaactcgttggccacaaatccatccaaccacaattaaccactgttaagctacggacccccactttacttgccggggaccaagttggtggcgtacccccaggcgttgttgttgacggggtcggcgagggggtcggcgaggttctcgagggggcccttgccggtgacgatggcctggacgaagaagcccaacatggagaacatggcgaggcggcccgtcttgat

SEQ ID NO: 408467 - DNA, 421 bp, Oryza sativa
ggatagcaataccaacttgtaaaccaccagaggcaccaaaattagggatatatagacaggggaacatgaagcgagtctttagtaccagctacgccattgtcgggaccatatgaagccgggaaaatccagctgaagttaaacgaccgacaacatgtataacaaacaacaaatggaatcagcttttatcgcttgttggtgaggaatcaccgtccatcttgtcatgttgaaatttcacgacaatgcatgtgatattgtcaccactcccttgggaaaatgcagcctctgtcagcttccgagctgctgcctcaggttcctcctcaatcttcacgagtgaaacagcattctcattcggaaccacattccacagcccatcactagctaaaatcagaaactccaattcatcatctatttcttgttcctg

SEQ ID NO: 408468 - DNA, 397 bp, Oryza sativa
caaaaaccacgatttataaagtgccggagatgaagtacacaaattaacattacatcgagttttaataaaacatcatgcgaaaagccagcaaaaacaaaaggcagcatacagttaatgaagctctactggagtagctcgcaaagggcccgacttattttcagtagcactttactgcatttcttccgaaagagggaccatcttctactgggtgttgtacatgtgacggatcaggtcaacaacgcgggagctgtatccccattcggggtcataccaagacacaagcttaacaaagttgtcattgagagcaataccggcctttgcatcaaagaggcttgccctgttggcaccctggaagtctggggaaacatggtcctcctcaacgaaacccagaataccc

SEQ ID NO: 408469 - DNA, 357 bp, Oryza sativa
gacctgaaactctgtgagccctaggacccttttaggaacttgattgccttgtgagtggcccaaggggcaataaccagctgtttaacaaggctcagcatccaagaagaacagagcacataatgtgttttggatgctaacttggcttgatgcatgggctggtgtttgaatgcatgggcaggtagggccctcctgctacggctggccttgctgcgaagtgaatgaagcggcttcaccacgatggtcatgtttggacggaaacctgcctcgtattgcacgcacaacgtcgatgccgccgccatcatggcaactgcttttggaggatagtcatcccccaggttcggatgcacccactgcctc

SEQ ID NO: 408470 - DNA, 412 bp, Oryza sativa
atcaaaacgcttgcaaatgatatcagataagtagagtcaacaagacaaaactgtatctgccaaagcacacctccccaactccacccaattacgccattatttctgggcaaaagcaaacggcttcccattcctccccttcaccagtctcaaaccataaaccccacaacaaatcctcctaagtgacggcatataagatgatgaaaacaaagcaggatactccagagtcgtcatggcgaacttcaagttgacacttctcatgccacagccgctagtcgtgctgggcagcctagtaccggtagtgcgcgggcttgtagggaccctcaactggaacgctgatgtagtcagcctgcgacttggagagcttggtcagcctggcaccaagcttgcccaagtggagggcggccaccttctc

SEQ ID NO: 408471 - DNA, 406 bp, Oryza sativa
caaaatactacaacataaccgaattctgatctgctgtatactgcatacaaggttggttatacacaagctgagaagctttcagtgtgacagcaatccgcggataaaatgaggagaatgataacgatcaccaagaagatagccaagcaaaaattacatcaatcaaggaaaaaacaatttggggataaatggactccaggaaaaggtaactgcagttcgagagggccgaactgatcaataaacatcatgcagcatacattaattcccaccagaatttattcagcaggtagcttttctttgagatacttcagaattgctttcgttcctcgctccagcagagtccgccgtatgctcctgaggggatttccatcaagtttcaagacttgcaggttaggctcaagcaaaccca

SEQ ID NO: 408472 - DNA, 417 bp, Oryza sativa
ataggatcaaaacatttctattaccacaactttttaaggatggaatcgagtagcaatactttcaccccaaaatacagtttagcgacaatatcttagaaaagccgcttgctttgccgccatggctggcaagctgagcagagcagctaacacaaagaacacgagatcactataaaccaaacggcaacgaacgaagaaaatacagggtcttttttgtctgaagatacacgaagcggttcgttttcttttatttttagtctcctctcctcctcgatgatgggtgtatggcaatggcaatggcgatgggatcttggcttagttgatgggaaggggctcgccgttccactccttgaggcagtcgagcatggggtcgatgagcttgccctggctgatgccgaggaacaccttgttgcactcctc

SEQ ID NO: 408473 - DNA, 360 bp, Oryza sativa
attcagagagtttgtctgcaggccgaacgaatgatgtcccgcccgcttatttggatcagaaaaacgcagaaggtttactctctgaacaggctgatatgcagaaaccttatttcaatcaaggatacattggctcctttttaccggtccaggtagaatccctaacgggaaattaccagatgcaaaccagaggacactttgccacaaaatttaaattaaaacgggtatataggggtactttatccaaaattactcatcttgcctacaaggttggctttggcttggatgaagggctcacgcgcctggccaaggccccgattgggacaaactttttagcagcaaacgggtgaataccaacagtgc

SEQ ID NO: 408474 - DNA, 386 bp, Oryza sativa
gcagcgaaagctacaagcaaaccctgcataatcgaaaagcaaatgtttttcaaaaccagacacacaaactgatagatagaagcccacacgggcagatcataggatagcaggagtcatcaagcattgccaaggcaccaggcaagaaccctgaacctctttaggactcgtcaccctcatcaccctcgtcaccatcgccgaactcggagccgacctcctcgtagtccttctccagcgcggcgaggtcctcgcgggcctcggagaactcccccttctccatgccctcgccgacgtaccagtggcccaaggcgcgcttggagcacatggggccgaacttgatgtcgatgcgggagaacaccttcactaccctgggggagttggagatcatg

SEQ ID NO: 408475 - DNA, 425 bp, Oryza sativa
actctatataagagctaacccgtcatgcgcacgcacacgagagcgtggaccctatagtgtgcgccctgtggcggcggcggtggtgtcctgcatgctcttgtgcccccgagacagacgtttagtcgactcgccgacaacgacaacgccaaggtttctgacaacgacattgaccctccttctagaatgatctcgaaacttggcgaccatatgcttgcagggcgcatacttggtcaagctggatggctcgaaggcgcacggatccgtcctgaaatactcagaggcgagggcttcggtggcggcgccacgggcggagggctcgactgagaggagcttggagaggagcgcgaacgcataggggcccatcatgaccccgaacgtttccatgagccggctctcgtacagttgatgagggcggaacccggagc

SEQ ID NO: 408476 - DNA, 416 bp, Oryza sativa
aaaggcaagaatattattcataaatgacgcatgatttttatcaaaacgcttgcaaatgatatcagataagtagagtcaacaagacaaaactgtatctgccaaagcacaccttcccaactccacccaattacgccattatttctgggcaaaagcaaacgggttcccattcctccccttcaccagttcttaaaccataaaccccacaacaaatccctcctaagtgacggcatataagatgatgaaaacaaagcaggatactccagagtcgtcatggcgaacttcaagttgacacttctcatgccacagccgctagtcgcgctgggcagcctagtaccggtagtgcgcgggcttgtagggaccctcaactggaacgctgatgtagtcagcctgcgacttggagagcttggccagcctgg

SEQ ID NO: 408477 - DNA, 414 bp, Oryza sativa
aaaggcaagaatattattcataaatgacgcatgatttttatcaaaacgcttgcaaatgatatcagataagtagagtcaacaagacaaaactgtatctgccaaagcacacctccccaactccacccaattacgccattatttctgggcaaaagcaaacgggttcccattcctccccttcaccagtctcaaaccataaaccccacaacaaatcctcctaagtgacggcatataagatgatgaaaacaaagcaggatactccagagtcgtcatggcgaacttcaagttgacacttctcatgccacagccgctagtcgcgctgggcagcctagtaccggtagtgcgcgggcttgtagggaccctcaactggaacgctgatgtagtcagcctgcgacttggagagcttggacagcctgg

SEQ ID NO: 408478 - DNA, 388 bp, Oryza sativa
agcaatgtaaatactcgcattccaaaacagccgatggacaataatcggactcagagcatcagttttaaccgaacagaaataaacgagttttaaacgactgacatagtgcacattgggagcagatattaacgggccatgaaacgagagccatggccgggggcaaaacttaacaaattctagaactagatatctcaactgcagacatgcaaaccaccatttgaacgaggctcacttttttttggggggagccttggtcaccttggcaccgggtgggtccttcttttccacgtttttgatgaccccaacagccaccgtttgccccatggcacgccccggaaaacgaccaagaggggggtactcagagaagggctccccaaccctgggcttg

SEQ ID NO: 408479 - DNA, 426 bp, Oryza sativa
gagcggacagggtgaaccaaatttatattaagagatgcagggttctttacatttaaggtctatgagaaactgcatataccacaaatcaattgacaggtacactgagctctgttctgtattaattgacaaaagaaagttgatgatccaaccattctcatctacgaccagcccttgagccactgggatgcttatgcaccccaggacccatgcatgaaaagagtgatggtttctttggcttcgtgccgaacaggaaagttctaaggggaactccagctttcgttgacaggttacggaagttttgctgagctcggttgcttcttgctatagataattcaagattttctcggagcttcaagagcaccctgccaacctccacttggagacctcttacatggtccagcccagcttctagctctttagcgactt

SEQ ID NO: 408480 - DNA, 392 bp, Oryza sativa
gggcaatacaggtcgttgaaagaacaaccaacaaagcgaatgcaccttttttgggttcttttttaattgctaggcggccttgcaactacatcaaccaatttaccaccactatatgctcatgctattggctccatagagactacgcttcttatcaactcacacttgcttggaataaataccaactaaatgaattgacttgatctcttctcatacaaggcacagacccgaattgggtagtgaagaatgaatggccaagagaagagaacaaaatctattcattcgggcatcaatgttcttgaggggggttttttaatggtacattcaaaatggtttccattgtttgccaccctagtccaacgttgctgccttgcataatggctacaaattcgggg

SEQ ID NO: 408481 - DNA, 420 bp, Oryza sativa
aaataccagctggatgatacaaatagtttaagcataaccatagaagtaacacagcagtgttaaaaaagagccaacaaattcatggcagcaacatgtaacaccacacatcaaaagttttcaacccatcaggcacgcaggaaacgtccacattccacagacaagctaacactagcatgcattggcctaattcagactcttatgaagagactcaggctgaagcatgatagactcatgatcctctctactcgatcagatcgtcatcgtcatctgggagaggttgtgctgctgcagccgcaagctcagcctcatgctgttgctgcattgccaggtcaatgggaacttccggaggtttaagagcaacagcttcaacgaaatgcaggttcgggtcaccagcaagctttcttgcaagataaaggaagg

SEQ ID NO: 408482 - DNA, 410 bp, Oryza sativa
aatgaagcattggaaaatagtaacaccaacaaaagacagcaactcaataatctttcgatatttcaccgagggtaatgtatggtaggaaaatcgccagacataacagagccggccagactcaactcaaactcaaccctatgatggtaaactgtttgcgattaacgccttcgcctatgacaatgtttggagataaacgcttccaccaaaaaacgaatgtcggggagtgttctcccctacaagaattattattggtttcaatgttaaaaaggcaaaattcaccagatcccgttagtgcaggaccaggaataaacacttgttcgtcatcattttctgccagtttaggcaccgcccgagccgtacttctttccaaagaagaggatctgcaactggtcatagcctgagagcacacc

SEQ ID NO: 408483 - DNA, 423 bp, Oryza sativa
aattaaaatttacttatgtttcttcttcttcttcacagttcacatggaaatcagaaggaagtagcaaaaggaagagctgttctacactcgacagagtaacaaactaagagagcaacacaagtaacaagaggagagatttagtctcttttctggtgttctgcaaataaaactctcccctcttgctacccctaaaccccaacccaaggtagtagtaagtcaccccactaaaagtaaccggccatctcttacaaaaattggctgtctcctttgaatcaatcgaatcagatcatcatcatcatcatctacagctcgtcatgctcgtcgtcgacgccgccctcgccgtcggcgccgccacccggggcgccaccggtcctctggtagacggcggagatgatggggttgcagacggcctcgacctccttg

SEQ ID NO: 408484 - DNA, 432 bp, Oryza sativa
gggaagaatcggacaatctaatacatgaagaacaggtagacaattgaagcataaacccacttttcagctgcaaagacaagacacttgccaacacgaaaaatccgatccaactccaacgggtaaaggtaaaaagatcaatctccctacacaattaagaagcattgaggcgattgcatgcacacaagcagttgccttaggctccaattcattcatgagtgttcacagcttgccaaaccaaattctttggggcagcaccactaggggctttcctgggctgcaatgcagcagcccttaatggtttccatgggaacacaatagcctgtcagaacgaggcgggggcataaggcaagccatgctttttgcaaaggtcacgaacaatggggaaacctttctaagggggcacccccggaggcgaggaaacagatggggctc

SEQ ID NO: 408485 - DNA, 331 bp, Oryza sativa
aaataaaattattgtgtataaatgtaaaagtctgcctttttctctcttgggtgcagtacataaaacatgcatgctgatatgcaatttacaagaaggtttctgtttatgttttcttgagcctcccctagctagctacttgtacaaaaggttgtaagctggtatgtcacggattccattgacgtcctccagagataggtctctctccagctgctgctttgttgcttccagcacgtctttgaactgcatgtaggatgctcgcattgccagccactgggcattcatcatctcgaaagcttttcagtacaggacgtcaaatgcctcttcgtgttct

SEQ ID NO: 408486 - DNA, 403 bp, Oryza sativa
gatggccatgggggtccagatgcagcagcctacatgaaaaggcatgctataaggctgttctttgaggattctgagttcccacaggcattagaagaagatgaatcattttatgaatcagttgagaaatctatccacaatgcattcttgagcgcagaccttgctctcgctgacgatttggctatcagccgatcatcaggaacaacagctcttgctgctttgatatttggaaggcagctgttggtcgcgaatgctggggactgccgcgcggtcctgtgtcggaaaggtgtagctgtggagatgtctcgtgatcacaggccaacatatgatgcagagcatgaaaggattaccgagtgtgggggatacattgaggatggctacctcaatggagtactatctgtgacca

SEQ ID NO: 408487 - DNA, 263 bp, Oryza sativa
ttttggggggaaagtagtttttgaattcttcattctgggtgggattgctttggggaaaatcccggcttctcaattaatgccctggccatgcacccacatgggccttcacagacacatgaaaaatgcctcgaccgaaaccgaaaaatgcataaagcaaactgactaactttggctgcaaagcgaccgatcgaagggagtcataaaacgcaattttattcgaaggataggggccggaacgggggggcagactgttactgtagaag

SEQ ID NO: 408488 - DNA, 214 bp, Oryza sativa
ataggcgtaccagagcgggcaatggcggctcatgaagatctcgacggagccgagcgcccaccggagcacctggtgcagacgatccgacaggttgatgggcgccgaccccttgaatgccgccctcgccggcgtgcagtacaccgacttccacccacggcaatgcatcttgaaccccgttaagatgtcctccgtcaccgacccgtagatccaccca

SEQ ID NO: 408489 - DNA, 259 bp, Oryza sativa
aggtattcactggagcaattatatattgaagtcaatctgaggcaagtgttcggatctattatgacataaggattgggtgcctaacggactttttttatcttggatttctccacgtaacaaaaaaacctttttttaatttaaaaagctagtctattttttttaagagtataagtccctatctatatctactttccttgagcataatatagatttttttattcgattccaaattccaagataactcattagaattattaat

SEQ ID NO: 408490 - DNA, 279 bp, Oryza sativa
gcacggggaggacgtgaagagggaggtggccatcatgcggcgcatgtcgtcggcgtcgtcgtcgcgcgggggcggcgccgcgtcgtccgccgccgtggtgcggctccgcgaggcatgcgaggacgccgccgacggctccgtccacctcgtcatggagctctgcgagggcggcgagctgttcgaccgcatcgtggcgcgcggacactactccgagcgcgccgtcgccaacattttccgcaccatcgtcgacgtcgtccagctgtgccactcgaacggggt

SEQ ID NO: 408491 - DNA, 279 bp, Oryza sativa; identical to SEQ ID NO: 394031

SEQ ID NO: 408492 - DNA, 255 bp, Oryza sativa
agctagaacactgctgctaccatgagatagtttatccccctgtagtactgtacatcagaaattcaccactcaactcaccccctcacccatgcatccagatccatgcatgcaggaaacaattaccacaacacacacagtaagtctgaatctcatcacatccatctctctctctctcctccccccaattcattaacatcttatacatgcatactccacaaaaaaaaaaaaaggaagaaacaagaagagaacatcttc

SEQ ID NO: 408493 - DNA, 260 bp, Oryza sativa
ggacaaaacaaaattgaactattatatcatctagtagtaaaaagagtttgtatatagtatctcaatgcaagcccatctgccgggggtggttaatggacacaagatagatgggggatgaactctagcgattagcaccgtaccgtcactggaaatccgcttcaatcatcatctatccagtgtacattatctgttgtggccttgtcacattataacatagtcacataatcaaatattatatatttggatgattcttctgttaa

SEQ ID NO: 408494 - DNA, 222 bp, Oryza sativa
gaacgagttaaaaaaagtttcaggtaaactgaactgaatgctttatgctttttcccaaacattttattgggagctccacgaaaagggggggggcatttttttgaattacaggtcattttagggggtagttaagcagcagcaagaaatgggggggttgttaaacaaggggcatatacggattataccgaaagaaatgtaattcagcaccccattattgcgcag

SEQ ID NO: 408495 - DNA, 277 bp, Oryza sativa
gggaaggcggcgatggagcggcaccagtcgatcgacgcgcagctgcggctgctcgcgccggggaaggtatccgaggacgacaagctcgtcgagtacgacgccctcctcgtcgaccgcttcctcgacatcctccaggacctgcacggccctcacctccgcgaattcgtgcaggagtgctacgagctgtcggcggagtacgagaacgacagggacgaggcgcggctcgacgagctggggaggaagctcaccagcctgccgccgggggactccatcgtcg

SEQ ID NO: 408496 - DNA, 271 bp, Oryza sativa
ttcggccggaatcttggcgccgtccgtgtccgcgggagacgaccgcttgatcttgttcatgatcctctgcaccgagtcctgcgggtccgacgatggcgcgtcgttcatggatgacccccgctcgccgtcgatggacaggcgcagcgagaggtcctggacgtccatgagcgagtcctccagggcttcctcctcctcggcggccgcgtccgccggcgtgtccatcagccagcgcgggttcctgatccggcatccggctatcctggtgaggtat

SEQ ID NO: 408497 - DNA, 255 bp, Oryza sativa
acctcgagcatgccacatggaatcagcatgtgaagctcttgggtgtccacttccagtctctctccagcgggtacaagaagacaattagacagtagttaacattacggggttttgtccatttcctcggcaatgatccaaatgatacgctcaagaggcgaccttggacatatctttgctggatctgttgtatttcatgtggctctggaccaaatggcctgcagcttgagcagagatgagggacaactccccagcaag

SEQ ID NO: 408498 - DNA, 257 bp, Oryza sativa
gatgaacaatgttttaaaaaccatggcagatgaaattactcagatactatatctcttcttgccaacagaacatctgtctttctgatacggtgaccacatagcataatccagctaaaacttattctgatactttgcaactgaatcatcaaccttgagcaactgggcagaacccatgcataattgcagcagaccaaactttgtccatatcaagcaccttgtcaccacattcatgctcattccatccctccaacgcatga

SEQ ID NO: 408499 - DNA, 482 bp, Oryza sativa
gtgtctgaatcgccggcggcggccatgggacgggtgaagctgcagatcaagaggatcgagaacatcccgaacaggcaggtgacgttctccaagcggcgaaacgggctgatcaagaaggcctacgagctgtccgtcctctgcgacatcgacatcgccctcctcatgttctccccctccggccggctcagccacttctccggacgacgcaggatcgaggacgtgctcacaaggtacatcaatctcccagaaagtgacagaggaggaactatccaaaacagagagtatttgatcaacatgctcacccagctcaaatgcgagagcgacgtcaccgaggatctcactaacacgagcagtaaggcgccggttaactccaacattgaggagcttcagcatgagatcaggagatgccagcaccagatgcagctcacagaggagcaattgaggatgtttgagccggacaccgccaggtctgcatccatgga

SEQ ID NO: 408500 - DNA, 541 bp, Oryza sativa
tttcccccatatcacatcctctccttcctcttcctctgctcactcagctctcccccgcgcgcgccaccgtcgtcgccatgtcgggcaacatcgccttcggccgcttcgatgactccttcagcgcggcctccctcaaggcctacgtcgccgagttcatctccaccctcgtcttcgtcttcgccggcgtcggctccgccatcgcctacaccaagttgaccggcggcgcgccgcttgacccggccgggctggtcgccgtggcggtgtgccacgggttcgggctgttcgtggcggtggccatcggcgccaacatctccggcggccacgtcaacccggccgtcaccttcggcctcgccctcggcggccagatcaccatcctcaccggcgtcttctactggatcgcccagctcctcggcgccatcgtcggcgccgtcctcgtccagttctgcaccggcgtggcgacaccgacgcacgggctgtccggcgtgggcgcgttcgagggcgtggtgatgggatcatcgtcaccttcgggctggtgtacacc

SEQ ID NO: 408501 - DNA, 493 bp, Oryza sativa
ttttggcattcgactgccgcgaaaaccctaggcgccgccgccgccgccgttggccaaaatgtccacgccaccggcggccgccgacgactccccggacaccgaccaaggcaagaccaagtcgaagaagaagagcaagaagcatcaggaggacacctgctgctccctggccgtcgccggagcatcggcggatgaggcggaggacgccaaggccgacggctacctgagcaagccgcagtcggtggcgccgtcgctggacacgtcggagcggccgctccttctaaagaactacgaccgacttaacgtccgaaccggccactacaccccgtttcctgtcggccactccccgataaagcggcccatcggcgagtacctacggtgctgcgtgatcaacctagacaagccgtgaaacccttgctcgcacgaggacaggggatggatcaagcgcctcctgcgagtcgagaagaccggccacagcggtacccttgaccccaag

SEQ ID NO: 408502 - DNA, 226 bp, Oryza sativa
gttaccttcggcttcgtcttcctctcgccgctgattcgattcgatccgatccgatccaaggggaggggaagcaatggcgacgaagaggagcgtggggacgctgggggaggcggatctgagggggaagaaggtgatcgtgcggtgacatctgctgtaatgggatcacagaaagacaagtatcctgcaaattacaatcctgcactagtgggctatcactgtgaagttt

SEQ ID NO: 408503 - DNA, 482 bp, Oryza sativa
ttcgaggcgatcggcgcggacctgctgggcaacccggagctggtggcaacggacccgacggtggcgttcaagacggcgctgtggctgtggatgaccgcgcggtcgccgagccagccgtcgccgcacgccgtcgtcacggggcagtggactccgactcccgcggacagcgcggccggccgcgcgccaggctacgggctcaccacgaacatcctcaccggcgggctccagtgcgccggcggcaacggcggcgccgaccgggtcgcgttctacaagcgctactgcgacgtgctcggcgtcggctacgggcccaacctggactgcttcggccaggcgccgttcgacggcgacatcatgtcggcgtctgcggcgaagtagacctgtgcgccgccgtgccggccccgatcgatcgaataaattgcgtgtgagtacgcactcgcacggtcgctctgcagcagagtgagtgagtttgctttatgtatttt

SEQ ID NO: 408504 - DNA, 519 bp, Oryza sativa
tttgagactacggctacgacccttttggcctgagcaagaagccagaggacttctccaagtaccaggcctatgagctgatccatgccaggtgggcgatgctcggcgccgctgggttcatcatccccgaggcctgcaacaagtttggcgcaaactgcggccccgaggccgactggttcaagaccggcgccctcctcctggacggcaacaccctcaactacttcggcaacagcatccccatcaacctcatcgtcgccgtcgccgtcgaggtcgtcctcgtcggcggcgccgagtactaccggatcatcaacggcctggatctggaggacaagctccacccaggtggcccattcgacccgctggggctggcgagcgacccggaccaggcggcgctgctgaaggtgaaggagatcaagaacgggcggttggccatgttctccatgctggggttctttatccaggcctacgtcaccggcgagggccccgtcgagaccctcttcaagcacctcagcgacccctttg

SEQ ID NO: 408505 - DNA, 536 bp, Oryza sativa
tttcagatcgcatcgattttctccttttcgagtttttttccccttcgcttgagagctttcgacgagagcgagggagagggagatcatggccggcaagggagacgggccggcgatcggcatcgacctcgggacgacctactcgtgcgtcggcgtgtggcagcacgaccgcgtcgagatcatcgccaacgaccaggggaaccgcaccacgccgtcgtatgtcgcgttcaccgactccgagaggctcatcggcgacgccgccaagaaccaggtcgccatgaaccccatcaacaccgtcttcgatgcgaagcgtctcatcggccggcgtttctctgacacgtcggtgcagagcgacgcgaagctgtggccgatcaaggtgctacccggccccggcgacaagccgatgatcggcgtgcagtacaagggagaggagatgcagttctcctgcaggagatctcgtccatggtgctcaacacgatgaaggagacggccgaggcctatcttcggagcacccgtcagacgccgtcgtcaccgtccgg

SEQ ID NO: 408506 - DNA, 404 bp, Oryza sativa
gttcgttgcgtgactcatcagatcgagcagagtcatacatggccatggagaagagccgggtcctcatcgtcggcggcaccggctacatcggccggcggatcgtggcggcgagctaggcggagggccaccccaccttcgtgctgcttcgggcggagatcggcctcgacattgacaagctccagatactgctggccttcaaggcgcaaggcgcgcggctcctcgaggcgtcgctcgacgaccacgatggcctcgtcgtcgctggccggcaggtggacgttgtcgtatacggcatgtccggcgtgcacctgcgcagccacaacctcatgctccagctgaagcttgtctaggccatcaaagaagctggaaatgtcaagcgtgtcctgcctgcagaatttggcatggat

SEQ ID NO: 408507 - DNA, 549 bp, Oryza sativa
gtatgagcggtggtgacaccgctcgcctccgtccgcctcgcctccaccgagaggttctctctgccgccgattcagatttacagggagattatcttgtgatctgtaaacatgtttgggcgtgtaccgaggagtaacaacaccaagtactatgaggttcttggagttcctaaaactgcaagcaaggatgagctaaagaaggcataccggaaggctgccataaaaaaccatcctgacaagggaggggatccagaaaagtttaaagaattatcacaagcgtatgaggttctcactgatcctgagaagagagacatatatgaccaatatggggaggatgctcttaaggatggaatgggaggaggcagtgacttccataatccatttgacatatttgagcagtttttcgggggtggtgcctttgggggagtagctcaagagtacgcagacagagacgtggtgaagatgtggcgcatactttgaaggtgtctttagaagatgtgtataatggatctatgaagaaactatcattatcacgaaatatcttgtgccaaa

SEQ ID NO: 408508 - DNA, 535 bp, Oryza sativa
tggcgtcaaggaacacagcgatacgccccgcgccggcccggtcggccctggccgtccggcggcgcggcgcgataccacgagttaaatccacacgactctcggcaacggatatctcggctctcgcatcgatgaagaacgtagcgaaatgcgatacctggtgtgaattgcagaatcccgtgaaccatcgagtctttgaacgcaagttgcgcccgaggccatccggccgagggcacgcctgcctgggcgtcacgccaaaagacgctccgcgcgccccccctatccgggagggcgcggggacgcggtgtctggccccccgcgcctcgcggcgcggtgggccgaagctcgggctgccggcgaagcgtgccgggcacagcgcatggtggacagctcacgctggctctaggccgcagtgcaccccggcgcgcggccggcgcggtggcccctaggacccaacgcaccgagagcgaacgcctcggaccgcgacccaggtcaggcgggactactccgtgagtttagcatataaatagccgaggag

SEQ ID NO: 408509 - DNA, 547 bp, Oryza sativa
ttgacgcgtggggcggtcatgtccgccgccgacgacgcgggcgcggcgtccggccgggaggacccaccgccagccgtggtgctcgtctccgccggcgccagccactccgtcgcgctcctcgcgggcaatgtgctgtgctcgtgggggagaggggaggacgggcagctcgggcacggggacgcggaggaccggctggtgccgacggtgctgagcggcttcgacgccgtcgcgccggggatcacgtcggtcatctgcggcgccgaccacaccaccgcctactccgaggacgagcagcaggtgtacagctggggctggggagacttcgggaggctcggccatggcaactccagcgacgtgttcactcctcagccagtcaaggccctgcaggggataaagatcaagcagatagcttgcggcgatagccattgtcttgccgtcactatggcaggtgaagtgcaaagttgggggcgcaaccaaaacggacagctaggtcttggaacctactgagactcattgctcccacaaaagattcaatcttttgagggag

SEQ ID NO: 408510 - DNA, 530 bp, Oryza sativa
ttcgaggattagcgatcgataactggagggagtatacagttggaaaattcaaactagacgctgatcatatcgagggagagttcaactcaactggagcgcggagatggcaacgcccaagctgtcccctgtatcgccggtgcggccggaagataagcagcgcgcgtcctcctcgtcgtcgtcgggggcggcggctgcgcctctgagggtgcaggacgatacggcggtcgaggagtacgagcagtacctgcggcttccggagctcgcaaggctgtggaaggataggtgctgtccggagtgggccgacgagggcctcgtcaagccggcgctgcaggcgctggagatcaccttccgcttcatctgcgtcgcgctctccgacccgcggggctacgccagccgccgcgagctcgcgcggcggctggaggcgctcgcggcaagggaggaggagctggtggccgcgctctgcgagggcgagcagtgcccgccgatggccgagctgagcgcgttcaaagccgtgctcccgcggagcggag

SEQ ID NO: 408511 - DNA, 474 bp, Oryza sativa
tttcccccgcattccgcgccggagctgaggagggacagcgagccagcgagggaggtggggcaatccagcgagcgccagatcgtgccgccagccccgctccgtcctctctccggcgaccctccgccccgcctgatcccgtggtggatcaactacaactcatctttaggaaagcctcttgaacattagccttgtgtgcctttcaacagtatggcctcggtaggtgtggtgcgttcttccttggggtttcagaacgaaacaagtacaagtggcgatgccgaccgacttccgaatgagatgagcaatatgagtataagggatgataataaggacattgacgacatagttgtcaatggcaatgggacagaacctggtcatgttattgtgacaagcattgatggaagaaatggacaggctaaacagaccattagctacatggccgagcgtgtcgtagtcatggatcctttggaactgttt

SEQ ID NO: 408512 - DNA, 531 bp, Oryza sativa
  unsure (1)..(531): unsure at all n locations
gtctcctcgtcctcctcctcctcctccccctgccggtaaggcggacgaccgagctgaggctgagctagggctagggcacccacctcctccccttccgtatcctggatggctgctggtcggggcattaaccagctcctacggagaacactccataatcagtcctcaggctcatctctgctatcctcgttccggataaagcatgaagaatcctccgctggactgagagcattggctcttcttggagttggtgcttctggtcttttaagctttgctacaatagcttctgcagatgaagctgagcatggtttggcagcagctgaatatccctggccacatgctggcattcttagctcttatgaccatgcatctattcggcgtggacatcaagtttatacacaagtgtgtgcctcttgccattccatgtcattaatnttcgtaccgagatttggttgtgtggcctacactgaagaagaaacaaaggctatggctgctgagattgaagtggatgatggtcctaatgatgagggtgaa

SEQ ID NO: 408513 - DNA, 326 bp, Oryza sativa
cttgggcttttccaggttcagatcgacgcctccttcctctggacattgttgctagttggtgatggctgagcaggctaatcaaccgactgttcttcagaagttcggtggccagttccaccttggctccagcttttctgaaggtgtacgggctcgcaacatctgcccatctgtctcatcctatgacaggcgctttaccacaaggagctacatgacccagggccttgtcaatggtggcatcaacgtcccaatgatgtcgtcctctccaatttttgctaatgctccagctgagaaaggtggcaaaaacttcatgaatgatttccttatgg

SEQ ID NO: 408514 - DNA, 524 bp, Oryza sativa
ttcctcccattcatcgggtcgtgtcgccgccggcgaacaacacggcgagcggcgccggtagcgagctacctaccctccatctctccagatcccttccagggacagtacaagacaagtcgcacaaaacagaaaatcttgtgatagtttaaatggcttcaaagcttcaagccttttggaaccatcctgctggccccaaaaccattcatttctgggctccgacatttaaatggggtattagtattgccaatgttgcagactttgctaagccacctgaaaagatatcctatccacagcaagttgctgttgcttgcactggagtcatttggtcacgctacagtatggttataacaccaaaaaactggaatctattcagtgttaacgttgcaatggccggcacaggcttgtatcagctttcccgtaaaataaggaaagattacttttctgatcagaaggatgatgttgcatcattggaaggataatgatgactgacatgatgaaaacctcgcccacaacctttgagcgat

SEQ ID NO: 408515 - DNA, 484 bp, Oryza sativa
ataggactgcacggagttcctgccggagaggtggatcaccagcgaagggaagctgcggtacgagccgtcgtacaagttcttctccttcaacgccggcccgaggacgtgcctcggcaaggagctggcgttcgtgcagctcaagaccgtggcggcggccgtgatgtggaacttcgccgtggaggtggtgccggggcacgccgtcgagccgaagctgtccatcatcctgcacatgaagaatgggctcgctgtcacggtcaagaggagggccaccatggctagctgctagctagctcatgagtcattagccatcagccatggctggttccgttcgtgacgtcctcgtcaatggccgcagcaacgtacgtcgtcagctaaacttacaatgacctaatgatcgtcatcgtataccacatcatttatggtaccaggactagagctacacgtaggtgacacgtatcagtatttcatcagttcgtatacgtat

SEQ ID NO: 408516 - DNA, 433 bp, Oryza sativa
tttcacgctttcttgcataagaacttccccccctcctcgctccccgtcgccgtcgccgttttcttggagaggagaaatccgtaggctcagaggatttttggtagccttgtttcgtgatattcgcgaagagggggggagctaaggggggattcgttagatcagaattggatcacgcgggggcccgctcgggatcgggggttccaaacacagtttcttcgttgaatttaagtggatgtactaatggagtcaaagggcggcaaaaagaagtctagcattagtcgttccttgatgtatgaagctgcccttggctacatcattgaggacggtcgacctgccggaggcctgaagaagcttcagactgctgcttactgcaactgctccgaagaagccatcctgatagccttttcgggttctccatcctagtggtttagga

SEQ ID NO: 408517 - DNA, 556 bp, Oryza sativa
tttagcagcagcagcagcagcagccgcgatgctcctgacgcgcgcctcccccaccttcctcccctccacctccgccgcctcgccctcgccgcagcaggcgccgtcctccccgaccttcgggaggagccagtaccgccggggaggtggattggtctccgtttcttctccggtggccggtcagcgctgtgctgccaggaggaggtccgtgatggcggcggccggcgcggtccccgcggcgaagctggagaacgccgacgcgctcatcgactccgtcgagacgttcatattcgattgcgacggtgtgatttggaagggcgacaagctgatcgacggagtgccggagacgctcgacatgctcagatcaaagggcaagaggctggtgttcgtgacgaacaactcgaccaagtcgaggaagcaatacgggaagaagtttgagacgctgggactaaacgtcaatgaggaagagatcttcgcttcgtcggtcgcagctgccgcgtacctgcagtccatcgatttccccaaagacaagaagggttatgtgattggagaggacggg

SEQ ID NO: 408518 - DNA, 475 bp, Oryza sativa
ttctcctcctcccctgcacagaccactcgtttcctccacaaagagggagggaacaagggaagggtgtcgcccgccccccaccccgatctgcctccgccgctccgctcctccgcgcctgcgaaatctaccaacgctaactcagcaagatgggtgccggcggcaggatgacggagaaggagcgggaggagcagcagaagctgctcggccgcgccggcaatggcgcggccgtgcagcggtcgccgacggacaagccgccgttcacgctggggcagatcaagaaggccatcccgcctcactgcttccagcgctcggtgatcaagtccttctcctacgtggtccatgacctcgtgatcgtcgccgcgctgctctactttcgcgctggtcatgatccccgtgctgccgagcgggatggaattcgcggcatggccgctctactggatcgcgcaaggctgcgtgctcaccggcgtgtgggtca

SEQ ID NO: 408519 - DNA, 438 bp, Oryza sativa
gtcgttgttacgtaggcaccacaggctaggcagaacgctctggcttgcttcggcaccacctgcactgcgacgatcctgctcctgatcctgggtcgggcggagaaggggtaccggatgctggagctcacgctggactacgcgagcgacctgaacaagggcactgtcttttcgcgcatgcatgggtacgccgctgtctacatgttcgggagcaacggcccgatgcacatgcacgggacccacgccgaccggagcggtgggaggaaccctgcgtggaacaccgcgctccacttacctgttgctgcctgctttgacacccgaggtctcgtccttcacgtacagctacgagcacggcgctacttcggagggcaccgagacgtcggtgacgtgatcgtgcccctagacgacctacacggcggtacgcacgacagaggtgagccg

SEQ ID NO: 408520 - DNA, 552 bp, Oryza sativa
ttgtagaaaaaaaaatctcccctcgaagcgaagcgtcgaatcgccttctcaagatgcagatctttgtgaagaccctcaccggcaagaccatcaccctcgaggttgagtcctcggacaccattgacaatgtcaaggccaagatccaggacaaggagggcattcccccggaccagcagcgtctcatctttgctggcaagcagcttgaggatggccgcaccctggccgactacaacatccagaaggagtccaccctccaccttgtgctcaggctcaggggaggcatgcagatcttcgtcaagaccttgactggcaagaccatcacccttgaggtcgagtcgtctgacaccattgacaatgtcaaggccaagatccaggacaaggagggcatccccccggaccagcagcgtctcatcttcgctggcaagcagcttgaggatggccgcaccctggccgactacaacatccagaaggagtctaccctccaccttgtgctcaggcttaggggaggcatgcagatcttcgtaagaccttgactggcaagaccataccctt

SEQ ID NO: 408521 - DNA, 435 bp, Oryza sativa
ttcggttgctgcttcttccccggggaggtttatcggatcttgatggagacccatatcggatccgtggacggggcggcggcggcggcggacaacggcgcggtggggtgcccggcgtcggcggtggggtgcccgatgacctcggcgcgccccgcgcccgtgtcggccggcgaggcgtcgctgggacggcacctggcgaggcggctggtgcaggtgggcgtcagcgacgtgttcgccgtgcccggggacttcaacctcacgctgctcgaccacctgatcgccgagcccgggctgcgcctcgtcggctgctgtaacgagctcaacgccgggtacgcggtcgacggctacgcccgcgcgcgcggcgttggcgcctgcgccgttacgttcaccgtcggcggactcagcgtgctcaacgccatcggccgcgcgtacagcgag

SEQ ID NO: 408522 - DNA, 522 bp, Oryza sativa
tgctctcacttcttgtgcccaagtgtgagagcaatgggagttcttggtagtagggtcgcttgggcatggctggtccagctgctgctgctccagcagctcgccggagcgtcgcacgtcgtctacgacgacctcgagctgcaggcggctgctaccacagcggacggcgtgccgccgtccatcgtcgactctgagctccggactgggtatcacttccagccacccaagaactggatcaatgatccgaacgcgccgatgtactacaaggggtggtaccatctgttctaccagtacaaccccaagggcgccgtgtgggggaacatcgtgtgggcgcactcagtgtcacgtgacctcatcaactgggtggcgctcaagccggccatcgagcccagcatcagggccgacaagtacggctgctggtcggggtcggcgacgatgatggccgacgggacgccggtgatcatgtacaccggcgttaaccgccccgacgtcaactaccaggtgcaaaacgtggcgctgccgagg

SEQ ID NO: 408523 - DNA, 495 bp, Oryza sativa
gttctctgaaccccacaacctccttggaggttttgccttcatcggagagggcatccctgttgctactggtgctgcctttgctgctaaataccgccatgaggtgctcaagcagtctagccctgatggacttgatgtaaccctggcattctttggtgatggtacctgtaacaatggccaattctttgagtgcctgaacatggctcagctttggaagcttcctattgtgtttgttgtggagaacaacctatgggcaattgggatgtcgcatcttagggctacttcagacccagagatttataagaagggtccagcgtttggaatgcccggcgtgcatgttgatgggatggatgtcctgaaggtcagggaggtggctaaggaggccattgagagggcaaggagaggtgaaggaccgactcttgtggagtgtgagacttaccggttcagaagacattctcttgctgatccagatgagctcatgaggcctgatgagaaatc

SEQ ID NO: 408524 - DNA, 553 bp, Oryza sativa
  unsure (1)..(553): unsure at all n locations
gggtactgtgtgtgtgtgtgtcagagtgagagagagatagagagagagaggcagctgatcgccacagcgtgctcctcgccgcccgcctgccatggccgacccatacggcgacggcaagggcctcaagcagcagcagcgccagaagctcaagcccgcgctcgaggtggaggacttcatcaacctcctccacggctccgatcccgtccgagtcgagctcacccgcctcgagaacgagctccagtataaggagaaggagcttggggaggcgcaggctgagatcaaggctctgcggctgtccgagcgagcgcgcgagaaggccgtcgaggatcttacggaagaattgacaaaggtggatgggaagctgaagcttacagagtctctcctcgaaagcaagaaccttgaggcaaagaagataaacgattgaaagaaagcagcacttgcagcccaatttgcagcagaggctacacttcgaagggttcatgcagcacagaaggatgatgacatgccccctattgaggccattcttgcgccattngaagctgaactgaaacta

SEQ ID NO: 408525 - DNA, 449 bp, Oryza sativa
tttacgtcagtcctgaagctgctgcccagtcagccactaccacaacatggggatctggggttacctcagttgcttttgatcccactcgagggggatcagttattacagttgtaatagttgaagggcagtacatgtctccttatgatcctgatgaaggaccttccatcactggatggagagtccagtgctgggaatcttcagtccaacctgttgttcttcatccaatatttggaagccctgcaaactttggtggacagccacctacacagactgtttggtccacaagagttaacaaaagcatcccaccatctgaggaccttaagaaccctcaatcatatgttccaatgccaacaacttcagatgagcggagttcttctgagtgcagtgttgacagggcgaaccgacttagctttgacccttatgatctttcaaatgatgtcagacaattg

SEQ ID NO: 408526 - DNA, 509 bp, Oryza sativa
ttttaatgttccctatatattttctgcatgttggaaggttgtgaaacccctgttgcaggagaggacaaaaaagaaggttaaagttttgcatggttgtggaagagatgaacttctgaagattatggactattcatctgttccacatttctgccgccgcgagggctctggctcatccaaacattcatctactgacgctgatgactgctactcacttgaccatcctttccacaaagagctttatggtcacattgaggagctagcatcgtgcaaggaactcatcaagatgggatcattacatgtcagcattcccgagcctgaccccgatgacgcaaagattgttgaggtcatccaagctgaattccagaagatcggtgagcagaatggatccgccaatggtcacaaggtttagccaaaacattggccatctgcagaacaccttaaccagtgctggtgacttctgaatctgatgaagttgattactactgtccatgtcaagtattttggtgaca

SEQ ID NO: 408527 - DNA, 280 bp, Oryza sativa
ctggaggatgggcacataatgctgtctgattttgatctctcccttcgttgtgctgtaagccctactgttgtcaagtccgcgaatcctggaccagatgcgttgcagaggaacaatcaagcttattgtgtccagcctgcctgtattcagccatcctgcatccagccatcatgtgtagctccaacaacctgctttggtccccgttttttcttctccaagtctaagttcaagttcaagaaggggaagaaatcaaagcctgaggtttgtaaccaaattagcccac

SEQ ID NO: 408528 - DNA, 557 bp, Oryza sativa
gtaactggtgccaagaagcgtaaatctggaaatgtgaggaggtttgagcagaataaaccaacacaaggacaaggagaatgtggagcattagtggtggctgaggatgttggttccactgaaggagaaactggcgataagaaaaagacagagggctgtcctaaccgagttcatatcaccaagatcatcaagccagtgcgatttgcagcagctgtgaacaacgatgtgcagcaagtttcaattacattcaaagcactcaggtctgatgggcaggaagtcatggtggacgacaaagaattgaaagcaaataatcccttgctgcttattagctactacgagcagtgccttcgttataatccgacttcgtgagagatgaactgaaggaactgggtttagctgcctgtgtatttaattagcatttgtgtgtttagaagcttgtagctctatgggcttgataatttagtctggtcttgcagtaggttgctaaatgcaagaaatgtattgcttggtctccccactgattgcttattcgcgccatcttatgtgtaacattttgaaca

SEQ ID NO: 408529 - DNA, 523 bp, Oryza sativa
atcaacagctacatccaagagctatacttttagagaaggggatagggtaagatatgtgggtccagctcagcaatcgtcattgtcgcaaaggggacccagttatggttatcgaggcagagtgatgcttgcttttgaagaaaatgggtcttccaaaattggagttcgatttgacaagcagatccctgatggtaatgatcttggtggtttgtgcgaggaagatcatggtttcttctgctctgctgacttacttcgccctgacttttctggtggtgaagaggttgaaaggctagcaatggccgagttaattgaagtcatctcagaggaacacaaagctggccctatgatagtgttacttaaggatgtagagaaatcattcactggaattacagagtcactttcatctttgaggaataagcttgaagcgcttccatctggtgtgcttattataggatctcacactcaaatggacagccgcaaagagaaggcccacccacgtggatttttttctacaaagttgtagtag

SEQ ID NO: 408530 - DNA, 552 bp, Oryza sativa
  unsure (1)..(552): unsure at all n locations
ttacctcgccgcgatccccgccgggggcgccccctccgccggagttcgagatctcgcggcagtcccgtctcctcgcggcgctgtccaagaaggtgatagatctcgatgagctgaggatgctggctgctcagggggtccctgacggcgccgccgtccgtcctactgtgtggaagctgttgctgggctatttgccgagtgatcgtgccctgtgggagcaggagttggcaaagaagagatcacagtacgcagcctttaaagaagaattccttagcaaccctatggaaattgcacggcaacaggaattagaaggccaagggagtgagaatgcagggagtatcaataatgggttacttcatagatcagaggttacacaagaagagcacccattgagccttgggaagacaactgcatggaatcagttctttgagtattcagagattatcgagcaaattgaccgtgatgtgaagcgcactcaccctgacatgccatttttttgtggagactcatctnttgcaaagtccaatcaggaatctctgaaaaatatactgatta

SEQ ID NO: 408531 - DNA, 466 bp, Oryza sativa
  unsure (1)..(466): unsure at all n locations
ttttgaggtgggttggcttctcctccccctctttaccttttcctcctcggttcggttccgaggttcgactagggtttagtgggttgagatggcggcgccggatgtcgagtaccgctgcttcgtcggcggactcgctctgggccaccgacaaccgctccctcgaggccgccttctccacctacggcgagatcctcgactccaagatcatcaacgacaggtagacggggaggtcacgtgggtttggcttcgtcaccttctcctacgagcagtcgatgcgcgacgccatccagggcatgaacggcaaggagctcgacagccgcaacatcaccgtaaatgaggcccaatcccgacgatccggcagcacaggccgncgctactgcggacgcagaggcacatactgcggacgtcgtggaggcggcggataccgaggaggtggtggcggcggctacggtcacccagagggcgg

SEQ ID NO: 408532 - DNA, 538 bp, Oryza sativa
gacgcagcaaggcacagctgggccgccgacaatggcgatggcggcgcgggcggcgtacctggcggcgacgcgcgcggcgctggcggcgctggagcgcaacgccctccccgacgcggtcacccggcgcctgacgcggctgctgctcgcgcagcgcctccgcctcggctacctcccctcctcctcctcctccgcgccgctccacctccaccacctcctcctcttcgcccacgctctagaagagatgcccatcgcaatcgagacggagaaagctaaagaccagcactacgagttgcccacgacatttttcaagctggttcttggaaggaatctcaagtacaggtttgtgccgtgcttcatgcataatagtacaaagttcactactttgggaaactattgcatcattttgacaggtcatttaaatagttattatttttttaaaaaaaatgatataataaatcaatatgatgtatgccattccacaaatatgcaaattcaaattcaatctgaagtgttatttttttttctactcacactaaat

SEQ ID NO: 408533 - DNA, 520 bp, Oryza sativa
  unsure (1)..(520): unsure at all n locations
ctgtcgcgtgggctccaattaaccaaagctaattaagctagctcaagctctaatccacatttagctagaatggcgccgtccaagtccacagccgccgccggcgtcctcctcgtcctgctcgtcgcggcggcgggcggcggcgcagaggcggcggcgacgacgtgcgtggcgtcgctgctggagctgagcccgtgcctgccgttcttcaaggacaaggcggcgacggcggcgccggaggggtgctgcgcggggctgtcgccatcgtgaagggggggcggtgtgcctgtgccacatcgtgaaccacaccctggagcgcgccatcggcgtcgacatccccgtcgaccgcgccttcgccctactccgcgacgtctgccgcctctcgccgccggcggacatcatctccacctgcgccaacgagaaaggtggtgtgccgnctctctactcttgcccggctccatctgcctgagtatatatgagaaaagaatacatgttaccaaaggagggatttcaacatatctaa

SEQ ID NO: 408534 - DNA, 491 bp, Oryza sativa
  unsure (1)..(491): unsure at all n locations
ttatggcatactggggatcctatactctgtgcttataactgcggtaatcacagatgcaattaaggatggtgtgggtcgtccacgcccagattttttctggcgctgtttcccagatggaaaggatgtttatgataatgtcactactggtgtcatatgccatggagagaagagtgtcatcaaagaaggtcacaagagctttccaagcgggcactcttcatggtcttttgctggtctaggcttccttgcatggtacttagctgggaagatcacagtttttgatcgtagaggtcatgttgcaaagctatgcatagtatttctgcctcttcttactgctgcacttgtggctgtttctcgagtggatgactactggcattactggcaggatgtatttgcaggctctctgataggtcttacagtcgcatcattttgntatctgcaattcttcccatattcttatgacgcagacgctttctggcctcatgcatacacct

SEQ ID NO: 408535 - DNA, 536 bp, Oryza sativa
gtacgcttgctgactacaacatccagaaggaatccaccctccaccttgtcctccgcctccggggaggcatgcaaatctttgtcaagaccttgactggcaagactatcacccttgaggttgagtcttctgatactattgacaacgttaaggcaaagatccaggacaaggaagggattcccccggaccagcagcgtctgatctttgctggcaagcagctcgaggatggtaggacccttgctgactacaacatccagaaggagtccacccttcaccttgttctccgcctaaggggaggaatgcagatcttcgtgaagacccttactggcaagaccattacgcttgaggttgagtcatcagacacgatcgacaacgtgaaggcgaagatccaggacaaggagggcattcccccagatcagcagcgtcttatttttgccggcaagcagctggaggatggcaggaccctcgctgactacaacatccagaaggagtccacccttcaccttgttctgcgcctaaggggtggaatgcagattttc

SEQ ID NO: 408536 - DNA, 450 bp, Oryza sativa
ttggtggcctaggagggttaagttctacagatttgggaggtatgctgggtggtggctcggatacttccttcttgagtcaggtgttgcaaaatcctacaatgatgcaaatgatgcagaacattatgtcaaatcctcagtccatgaatcagctgcttaatatcaacccaaatgtacgtaatatgatggaatctaacactcagttgagggagatgttccagaacccagaatttgttcgccagatgacatctcctgaaactttgcagcaattaatcttattccagcagtccttgatgtcacaacttggtcaacaacaagctggcccagagcgaacccaatcaggtgctggtgcaggcaatactaacctcaacaatctgatgagcatgttcagtgggctcggtgctggtggtggactaagtgttcctagtcgacccaatgttccaccagaagagc

SEQ ID NO: 408537 - DNA, 517 bp, Oryza sativa
ttccgccagcgagcaaaaaaaaaaaaagaagaggaaaaaatccaccgatctggactcgactcgacggtcgacgccaccccccaccggccggccccgtctcgccgtcgacgacgtcgtctccgccacccaaaaccctagccctgcagcctcccctccgcagctcgccccctctcctcgccatggccaccaacggcagctccccgagggcgagggagactgagagcagcctggagaaggtgaagcggcagctctcgtcggggtccgggcggtacctgctgcaggggccactgctgaagcgatctgagacgttgaggaaatggaatgagagatgggtaattttagaccctacttcaggaaagatggaatacaaaattcggagaaatgaaactgccattaaaggaaccattatatttgatgcttcaagcactattaccttgtcccctgtaaatttccaagggatgccaaagtatgatggctgctgtttctacattggaactcctcaaaaaaaggattactt

SEQ ID NO: 408538 - DNA, 404 bp, Oryza sativa
gtacgccgcctccccgcccagcgacctcggcaactccggcgaagatgggcgccttcaggttccaccagtaccaggtggtggggaggggcctgccgacgccgaccgacgagcaccccaagatctaccgcatgaagctctgggctaccaacgaggtccgcgccaagtccaagttctggtacttcctccgcaagctgaagaaggtgaagaagagcaacgggcagatccttgccatcaacgagatttttgagaagaacccaacaactatcaagaactatggcatctggctgcgttaccagagtaggactggctaccacaacatgtacaaggagtaccgtgataccaccctcaatggtgccgttgagcaaatgtacactgagatggcttcccgccaccgagtcagattc

SEQ ID NO: 408539 - DNA, 532 bp, Oryza sativa
ttcgcatccatccaccgtctcaatctcggtagtaatcctcgcggcctcgccgttagttccaccaccgggcgccaccatgtgcgggatcctggccgtgctcggcgccgccgactggtcgcaggcgaagagggctcacgtcctctcctgctcccgcaggctgaagcacaggggacccgactggtccgggttgtaccagtgcgagggaaacttcctcgctcagcagcgtctcgccatcgtctccccgctctccggcgaccagccgctgtacaacgcggaccggaccatcgtcgtcgtggccaatggagagatctacaaccacaagaagatcaggaagcagttcgcctccaagcacacgttcagcaccggcagcgactgcgaggtcatcatcccgctgtatgaggagtacggcgaggactttgtcgacatgctggacggggtgttcgcctttgtactttacgacacctcgaccaagacgtacatggacgcccgggacgccattcgcgtaaccccctttacatcggaggggcagtga

SEQ ID NO: 408540 - DNA, 555 bp, Oryza sativa
tttctctctctcctcctcctcgccgccgaccgccgccgtcgccgcgagtcgccttcgccgtccgggtagcagcaggaagagggaggaagggggggcatggcgctacggaggctgctccaggggagcgtcctgccgcggatggcgggcagagccgccgcggcgccgttctcgacggcgtccggggagaccgtccgcgccacgctcttcccaggcgacggcatcgggccggagatcgccgagtcggtcaagcaggtattcaatgttgcaggggtaccaatagaatgggaagaacactatgttggtacagaagttgatcccagaacagagagttttctgacttgggaaagcttggagtcggtgcggagaaacaaagttggcttgaaaggtcctatggctacgcctattggaaaaggccaccgttcattgaatcttacactaaggaaagagcttggtctttatgcaaatgttagaccttgcaacagcctcccaggatacaagactcgatatgatgatgtgaacctgtgactatacgggaaataccgagggagaaatagt

SEQ ID NO: 408541 - DNA, 535 bp, Oryza sativa
gttatatcttcttagagattgtccaaacatgcagagcttggcatgtaattactgcgatatgatctcagagcatggcctaggaatcttgtcaggtctttcaaacctgacatctctcagtttcaagagcagcgatggtattactgctgaagcaatggaagcatttgctaatttagttaatttggtaaatcttgatctcgaacgatgcctaaagattcatggtggccttgttcacttaaaaggcctcaggaatctggagtcactcaatatgagatattgtaacaacattgcagattcagatatcaaatacttatcagatctcacaaatttgaaagaattgcaattggcttgttgtagaatcactgatctgggtgtttcttatcttagaggcttgtccaagctaacacagttgaatttggagggctgtccagtgactgctgcctgtttggaagctatatcaagattggcttctctggtggtgttgaatttgagcggtgtggcattatacagtgaaggctgtgaaaactttcaaggtctt

SEQ ID NO: 408542 - DNA, 537 bp, Oryza sativa
attggagaaggagaggtcgccgaggaagaggaggaggagggatggcggcggctgcggcggagggcgcggcggcgacggcgctgcgggcggtgctggggcgcgcggcgaaggcggcggagcggtcggggcgcgcggcggaggcggtgcgggtggtggcggtggggaagacgaagccggtgtcgatggcgcgggagctctacgacgccggccaccgctgcttcggcgagaactacgtccaggagttcgtcaccaaggcgccgcagcttccagaagatatccggtggcatttcatcggccacctgcagagtaacaaggtgaaatcactgttagctgctgttccaaatcttcacatggttgagggtgtagataatgtaaagaatgctaaccaccttgatcgtgctgttagtagcttgggaagggatcctttgaaagttttggtacaagtaaacacttgtggagaagaatcaaaacctggtattgacccttcagaagcgtcgagcttgcccagcatgtgaaagtagcatgccccaactaata

SEQ ID NO: 408543 - DNA, 389 bp, Oryza sativa
gttcgatctcgccgcgcgcgctcagctcgtcgacaaggcagcgtgcacccaccaagatagcgggatgatccagtgagcgcgtggaggcggtgtttgattctagattgttctagaaccgaacgagcgagcttagctagctagctagctgctgctgcttcgatcgatcggtcgttgcctcatgcaggagttccagtccatcccggggctcgccgggcggctgttcggcggcgcggcggcggctgacatccggcgcgcgcaggcgcagcagggcccggcgtcgcggtgcggcgggataccgtcgccggaggcgttgaagtgcccgcggtgcgagtcgaccaacaccaagttctgctactacaacaactacaacctctcgcagccgcgccact

SEQ ID NO: 408544 - DNA, 502 bp, Oryza sativa
ttgcccttggcgcccgagcgccgcctgccggcgcacatcgacaccggcgtcgacgggctccgccggctccgctccatcgcgctgtccgacgccgccgctctcggcgacccggcggcggagctcctccggacggccgccgacttctcgcgggtgttcctcatcggggacagctcgggcggcaacctcgtccaccacgtcggcgcgcgcgtcggcgaggacggggcggacagctgggcgcccctccgcgtcgccggaggcatcccgctccacccggggttcgtgcacgccacccggagcaagtcggagctggagccgaggcccgactcggtgttcttcaccctcgacatgctcgacaagttcctcgccatggcgctccccgagggcgccaccaaggaccacccgtacacgtgcccgatggggccgaacgcgccgacgctggagtccgtcccgctgccgacgctgctggtcgccgccgacgagcacgaacttattcgggacacca

SEQ ID NO: 408545 - DNA, 499 bp, Oryza sativa
actgaccaacttaagcaactattataatgcaaagaccaaactcctcgttcttacaacactcactcaacgatacatcacaagatataaacaggggcgagcgagcaaggcaggaggcactagagtgacaccaagcgattatacttaattacttatatataaaccatgcattccagacacaccattcatcatcacatacaccaccatggcacaagaccagaacgcaaccccctcctccaggcaggagatcaggatacattcccgacttcacagcaaaattaaatcaggaaggaatacttcgctctaagctcaaccagatctaggagtcccatgttcttccaggctgctgcctaggctgcgaggacgattatcactatgagcaggaccaccccgaatataaccagcaacaagcatatcagcgaagagttcgacttctgagttttagcagccttagagagttggccttttgcttgtgtagtcgctataacagcattctcgatat

SEQ ID NO: 408546 - DNA, 374 bp, Oryza sativa
gttcattgctcagcttgagctgtggaaggagaagagcactggcaagtacgagaagaaggtgtacgttcttcccaagcacctcgacgagaaggtggccgccctccacttgggcaagcttggtgccaggctgaccaagctcttcaagtcgcaggctgactacatcagcgttccagttgagggtccctacaagcccgcgcactaccggtactaggctgaccagcacgactagcggctgtggcatgagaagtgtcaacttgaagttcgccatgacgactctggagtatcctgctttgttttcatcatcttatatgccggcacttaggaggatttgttgtggggtttatgcgtttgagactgatgacgggagggaatgt

SEQ ID NO: 408547 - DNA, 404 bp, Oryza sativa
ttgccatggccaccgagctcactgagtacttgctgctcctgccgcttctcgtcgtaccgctcctctacctcgcggcgtcgtcgtcgcggaggtcggggaggctgcggctgccgccggggccgtgggcgctgccggtgatcggccacctgcaccacctcgccctcgccggcgcgcccacgcaccgcgccatgcgcgacatggcgcggcgccacggcccgctcatgctgctccgcttctgcgagctccccgtggtggtggcctcctcgccggacgccgtccgcgagatcatgaggacgcacgacgtcgcgtttcgcgtcgcggacgatcgggccgatgctgcggctcgtgttccagggcgccgagggcgtgatcttcgcgccctacggcgacgggtggaggcagtt

SEQ ID NO: 408548 - DNA, 358 bp, Oryza sativa
ctatccatctcaagaggcacattacattgggttcatgccctaaaattaagaaccaagagcacaagctagcactgactccagctggagggactgacaatgatggtgagggtactgtggagcgcccatctaagaggcgttacagatatactggttatgcaaatgctgcttttgatcaagaccgcagttgctcatatctggcaaagatgataattttgcatgactacccacttcacattgttcaacagccagcgttcactacctttattgacagtctgcagccacgtttcaaggttgtagatgttgagacaatggaggggagggtgtatgctggttaccagaaagaaaaggaaaaccttac

SEQ ID NO: 408549 - DNA, 292 bp, Oryza sativa
gtgacggccacgggggacaaggcggacagcctgtgctttatcgaggtggtggcgcacaaggacgacaccagcaaggagctcctcgaatggggctccagagtctccgccgccaactccaggccgcccaacccgcagtagtaccgccattaccattcatcctcgatcccggccccatttgcacctacctgctgccttttatatataaatttcgataatattagtatactatatatatagatcatatagaatcatcgtacgaataaatgatggagtgaataaagctacaattttt

SEQ ID NO: 408550 - DNA, 341 bp, Oryza sativa
gttggaacgaaacccaacccaagcgaggcaaaagcggcggtggcggaggaggagaggagcaatggagagggcggtgccggtgaggaagccgcacacctcgacggcggacctgctcacgtggtcggcgacggggcccgacgccgccgccgccgcggcctcgccggtcgcctcctcccgccccagcctcaagccggccggggggatcacgccggcgatgttcggcgcgccggtgagcgagaaggaggcggaggatctgagcaagagtgaacgaaaattttgcttgggctcaaagttaaaagaaatgactggaagtgggatattcgcttggaatagggaaaatg

SEQ ID NO: 408551 - DNA, 508 bp, Oryza sativa
  unsure (1)..(508): unsure at all n locations
gtaagagagagcccccctacgacgacgacgacgatggcgctcgcctccacctccgccaccgcgtccgcggccgtgctcaagacgcccttcctcggggcgaagcgcgcgctcgccaatgccgtcggcgtcgcgggcgccaagcccgcgccgcgccgcgcgctcgtcgtgtcggccaagaagtcgtggatcccggccttcaagagcgacgccgagttcatcaacccgccgtggctcgatggctcgctccccggtgacttcggcttcgacccgctggggctgggcaaggacccggcgttcctcaagtggtacagggaggcggagctgatccacgggcggtgggcgatggcggcggtgctggggatcttcgtcgggcaggcgtggagcggcgtgccgtggttcgaggccggcgcgcagccggaggccatcgcgcccttctncttcggctccctcctcgggacgcagctgctgctcatgggctgggtagagtccaagcggtgggtcgacttct

SEQ ID NO: 408552 - DNA, 513 bp, Oryza sativa
tttccatgcgagacaaaaaccaatatggactggaagttgatatctggtcatttggctgttttttattggagatgcttacacttcggataccctaccagggcctacctgattcagaaatatatgatctcataatgaggaagaagcaaagaccaagactaactcaagaactagaagcgttctggacgttagacaagccaattacgaggctggagttgggtatcacatctgatgctcatgcagaaaaactaagactgttgatagatctcttctaccagtgcactaaaggaattgcatctgagcgcccaaaagctgaggcggtttacaatttactgtgctctctacccacatgctatgacatgaggtgaaagtgtggatcttaaatcagtatgacataaggtgaaaatgtggatcttgaatcaggaacctgttgatgagacagtcagccagatcggcctgcgccaggatggcaagttatgctgggtggttttagcaggtcaacagatcttgcctcgc

SEQ ID NO: 408553 - DNA, 516 bp, Oryza sativa
  unsure (1)..(516): unsure at all n locations
ttcggcgcaggacatgcagggctgcgacgagcagttcaggaaggtcggcgagaagaaccccatggaccacttcaaccggtccctcctcgagatgtccgagatctgccgctccctctccaacatgatctgatcgatcgctctcgccgcccgccaccgtgccggcgcgcgcaccgcgcacgcgtgccgccggccggcgaccctttgcgtgagagcgagcaagcgcgctccagcagcgctggtgattgaagcttctctttttaatttgttttctttcgcttctttttttttaacgatcttgttttcttagtgaaaaatgtgttaacttgtaattgttggtctcgggaaagagaaggcacattcaagagggtcttctaattttgaatggaaatgttgntgattcttttttgttgtaatttatccttgatgtcaaaatgtgcatgagcagtatattgaagtgtaacagcgactaaattaaatgtatacttttgtagcaccattatatantaaataagattt

SEQ ID NO: 408554 - DNA, 234 bp, Oryza sativa
cttgtttctgtcttctttctttgtctacatttgtgcaacctcttgaggaaaagagagcgattgacaaggcctttaattccatttgtatgtatgcagcagcaggatatcttgcagctaggccccccacactggaaatcttccctccatggccaatgagtcatctacaggagccatacagcaactcgcagtcagtagggagcaccactgactctagctcagcttagaacacaatgt

SEQ ID NO: 408555 - DNA, 203 bp, Oryza sativa
cgcgggtcctctttagctcggatcatctctgcatttgggtttgcagctgctcgtcacggcaatggcatccaccaacagctggacccacgagatcgagtcgccggtggccgcgccgcgcctgttccgctccgccgccatggactggcacaccgttgcccccaagatcgactcccacatcgctgccagagaccaccccgtccacg

SEQ ID NO: 408556 - DNA, 306 bp, Oryza sativa
gttatatccaatgcatctcgtgcttctgccactcggagaaagttctacttcttgcagaaatctctgcttgtctcttctttgcttgcggctgctgcagcagatgctgttggagcagggccaaaccagcagtgttttccttcctcctgtggtgatcttggcaacatatcctaccctttccgtcttgcaagcgattcacgcccgtgcgttggtactcttcgcccatggtacaacctctcatgtagcagtggcagggctaccattcagatcaacacacggacgtactatgtcaccagcatcaactatact

SEQ ID NO: 408557 - DNA, 337 bp, Oryza sativa
attttggaacgcgtacttacccacaagttaggtgcatgccatggcaccattcatggcgtgcgcctcgccaccggtactcacgctggccctgctcgcgtcgtgcggtgcccttctcgccacctccatgctcccggcgcgtgcgacggcgggcagttgcttggacgtcggcgacatggtgatgatggacaggttccgcgcttggcagggagctcacaaccggtcgtacccgagcgcagaagaggcgctgcagcggttcgatgtgtaccgccgcaacgcggagttcatcgacgccgtcaacctgcgcggggacctcacttaccagctcgccgagaacgag

SEQ ID NO: 408558 - DNA, 349 bp, Oryza sativa
gtgaagaacacacacacaaacacaaacagaagaacacaacacattaagctagctagaagaagagagaaattaaagaagctaggagctaacgatcaggatggctgctggcatggtggcgacaatggtgctactgacgtgccttgctgcaggagggctggtcgtcggagctgaggaagacggtggcggcggcggtcttggccggctggggtcgccggactactgcgacgcgctggcgaaggccatcctgttcttcgagggacagcggacggggcggctgccggcgaaccagcgagcgacgaggcgcggggactcggcgcttaccgatggcccgtgaagaaaacgtgaacct

SEQ ID NO: 408559 - DNA, 263 bp, Oryza sativa
tctttggaaggagagaagactggtcaccaccatgttccagaaacaagaggtttatgcttatcagaagagcaaactgtcagcacgatattgaggagaccaagaatggctggaaataaagatactggaatgataactgagccatatagagcgactcgtcgatgtgaagtgactgcaaatcttattctttatggagtcccaagattgttgacaggttcaattctagctcatgagatgatgcatgcggagttgggacttaaaggata

SEQ ID NO: 408560 - DNA, 90 bp, Oryza sativa
tgtctcttctctagtctagaccaaaggaaggaaaccaacctataggcgtggcgaggtgaggagaggagaggataggagaggcggaggatg

SEQ ID NO: 408561 - DNA, 324 bp, Oryza sativa
ggaaaaaaaatgttgcaggtggaggaggcgctggcggccgtgctgtccgcggcggcggcaagcgcggcggcgcgcgccgccgaggccgtgccgctgcacgacgcgctcgggctcgtcctcgcggaggacgtccgcgcgcccgaccccctccctcccttgcgcgcctccatcaaggatgggtacgccgccgcggcctccgacgggcccggggagcacccggtgattacggagtcgcgggccggcgacgacgccctcagcgatggacgtcacccccggcacgggggcgtatgtcacgaccggagggccgatttctgatggagctga

SEQ ID NO: 408562 - DNA, 385 bp, Oryza sativa
gtttgatgttgatggatttcatccactgaacattggacgacttgcaatgcaaggtcgggatccgttctttgttccatgcacccctaaaggatgcatggaattactacacagatatggagttgaaatcaaagggaagagagctgttgcaattgggcggagcaatattgtggggatgcctgctgcattattactgcaaaaagccaacgcaactgttagcattgtacattcaaataccaagaagcctgaggaaataacaagacaagcagatattgttatcgcagctgttggagttgctaatctggtcagagggagttggataaagcctggagctgctattattgatgctggcatcaatccagttgatgatccagaaagccctcgaggt

SEQ ID NO: 408563 - DNA, 434 bp, Oryza sativa
gctttcagacagcctgaattcatacttgaacaagtaccgtattgagcttgacccacagcttgaagccctcgttggaaggcacagcaggaaaccttggtcaaagtttattaatgctgacaaccaacatctagtatccccagaggccatcgatttccttgacaagcttcttcgctatgatcaccaggatagacttactgcacgtgaagctatggcacacccatactttctccaagtgagggctgcggagaacagtatgcctcgtgcacaatagacaaaaaaacgggactattgctgactgtcgattagcaacagtcatggagctgcaccgtattagtgacttagttcagtcacttgtattgggagtttgagattcggtaatggttgaatcacctggcacgaagattctgggagagcatgtaacagctcatgtgtgc

SEQ ID NO: 408564 - DNA, 345 bp, Oryza sativa
tcctgtgcaactgcaaggaggatgtaaagaggaaggtgcatgctgtgattgacaagtatgctgagcgtgggcttcgttctcttgctgttgcaagacaggaagtacctgagaagtcgaaggagtctgctggtggaccatggcaattcgttggtctgctgcccctgtttgatcccccgaggcacgacagtgctgaaactatccggaaggctctccatcttggtgttaatgttaagatgatcactggtgaccagcttgctattggtaaggagactggtaggaggctcggaatgggtacaaacatgtatccttcatccgcattgctcggacaaaacaaggacgcttcac

SEQ ID NO: 408565 - DNA, 407 bp, Oryza sativa
ttataatgggaggaaatgatccagtcacaggtgatataatttcaactactattggagggaagaacgatgagcccaaaaggactattagctatatggctgaacgagttgttggaactggatcctttggtgttgtattccaggcaaaatgccttgagactggtgaaactgttgccattaagaaggtcttacaggacaaacgatacaagaacagagagttacagataatgcgatcaatggatcattgcaatgtcatctccctaaagcattgtttcttctctaccacaagcagagatgaacttttccttaacttagtcatggagtttgttcccgagtcactttatcgtgtcctgaaacactacagagatatgaagcagaggatgccacttatatatgtcagactttacatg

SEQ ID NO: 408566 - DNA, 188 bp, Oryza sativa
tgtacagggagagtggcaggtcaaggggatttggcattgtgacgtatggttccgctgaagaggttgagaatgcactttcaaatcttgatggcgctgacatggatggcagacagatccgtgttacagtagcagaatcgaaaccacctaggagacaatattgaaattcgtttagattgcctggaggctat

SEQ ID NO: 408567 - DNA, 286 bp, Oryza sativa
gggggcccctgggggccggccgggatccggggggagcccacgcgcgctgttgtgcggactattgctacctacacctaagggtacgtcatggcttatgtgaccgagctctgacaggcataatctatatgacaccactgcgaagcacatgggcctgtacatgaggatcgggggggctggcaagcatctcatgagcaaggcgcggactctgtgccgtcatgggactgaacacaaacggcagccccagtggaagtacgatggatccagcaccggactgtcagcaggggag

SEQ ID NO: 408568 - DNA, 375 bp, Oryza sativa
ttttaacattatattgcagcaatggcatcctcctcccttctactcgcctgtgttgtggtggcggctatggtgtccgccgtctcctgcgggccacccaaggtgccaccgggccccaacatcacgacaagctacggcgacaagtggctggaagccaaggccacctggtatggtgcgcccaagggtgctggccccaaggacaacggcggcgcctgcgggtacaaggatgtcgacaaggctcccttcctcggcatgaactcctgcggcaacgaccccatcttcaaggacggcaagggctgcggctcatgcttcgagatcaagtgctccaagccggaggcctgctccgacaagcccgcccttatccacgtcaccgacatg

SEQ ID NO: 408569 - DNA, 426 bp, Oryza sativa
ttttatgatcacctacgccgacaccgacgtcgtggtcgtcggcgccggctccgcggggctctcctgcgcgtacgagctctccaaggacccctccgtcagcgtcgccgtcatcgagcagtcggtgtcccccggcggcggcgcgtggctcggcgggcagctgttctccgccatggtggtgcgcaagccggcgcacctgttcctcgacgagctcggcgtcgcgtacgacgagcaggaggactacgtcgtcatcaagcacgccgcgctcttcacctccaccgtcatgagccgcctcctggcgcgccccaacgtgaagctgttcaacgccgtcgccgtcgaggacctcatcgcaaggagggccgcgtcgcggcctggtcaccaactgggcgctggtgtcgatgaaccacgacacgcaagcgtgcatggccc

SEQ ID NO: 408570 - DNA, 337 bp, Oryza sativa
tgtacagggagagtggcaggtcaaggggatttggctttgtcacgtatggttccgctgaagaggttgagaatgcagtttcaaatcttgatggcgctgacatggatggcagacagatccgagttacagtagcagaatcgaaaccacctaggagacaatattgaaattcgtttagatgccctgaagcctatggatagtccagatatgaatcatactatcgtcatgattgttctatagcatcgagggaattctagtcgtaactttcaccatatggatcaaaagattggtttggtgatgatatatatctcattttggtttaagcttttgaacccactttttt

SEQ ID NO: 408571 - DNA, 398 bp, Oryza sativa
ttcttcttcttcttcttctctcctcacttcgctcgctccctcggtcgctcggccgccatgtcgtcgcaaggagcaggaggaggggtaggggacccggagctgttcgcggagctgtggcgggcctgcgcggggccgctggtggaggtgccgcagcgggacgagcgggtgttctacttcctccagggccacctcgagcagctgcaagagccgacggacccggcgctgcatggcggagcatatcaagatgttccaggtgccgcacaagatactctgcaaggtcggagacgtcgagctgaaggcccagacgggaacctacgaggtgttcgcgcagattaccctgcaacctgacccggatcatgagaatctgccaacattacctgacccgcccctgccggagc

SEQ ID NO: 408572 - DNA, 325 bp, Oryza sativa
gcgggtatctcctgctccgcccttacccccgcgcgcgtgcacgcgacggcgcggcgatctgatgctgccgccgctgctgctgcaggcgccgcggtgatggcggcggcgccgtccgccggcggcgttggggagggctcttcctcctccgccgccgccggcgctgctgctgctgccgcgacgatcgggccccacgtggtcgacgaagaggcgatgtggcagatgaatctaggagaagctatgggagctgggccatacccagagcgtattggagaaccagagtgtagatattacatgaggactggcttgtgcaggtttgggatgacct

SEQ ID NO: 408573 - DNA, 428 bp, Oryza sativa
  unsure (1)..(428): unsure at all n locations
ttttgagctcgctaaggagaacgtcaagaacgcctcgtcgtcgacgggcaacatcacgttgagcgtcaccaagagcaagccagagaccggcgaggtgattggcgtcttcgagagcgtgcagccgtcggacacagacctcggcgccaaggtgcccaaggatgtcaagatccaaggggtgtggtacgcgcagctcgagtagggaatgaacaaatgttttgtgcgtggccgggttgatatatcgatacatggagagagggaaggaaggctgcaatgtgtgtatctagtaatgcaaactcgatcgggctgttgatggctttaattattagcttttgtttcttcctctgttctcgngaactgatgatcatatcccncgatgatgctatttgcatttcgacaagcgagaggacattgtacgttttccttttttc

SEQ ID NO: 408574 - DNA, 469 bp, Oryza sativa
tttctgtgctttcgcttaagatctattatggactacccaaatcttaaggcacagctttttaacatgccatttggatatatcttgacacacccactggaacctttaaaggtttgcttgccatcgatagttgatgagttcctgaggcaggccaaggctgccaggttgttcaatgcatctgtccattcagaatttgaagatgcgcttgaatctgatttgtccaaaacttttggaggaatgaatagacttgacatgttcttcccatttgatccttatctgctaaaagaatccgacagatatatgcgtccaaattttgagtactggtccatggtcaagacgacatacaacaattataacagtgatgttgatgatgagctagtggacctcgatgcaccttgaatgaatgtcggcagtttagatgatcattgtgagatagatctcacagtgatgatgacttggaatacttcatgaa

SEQ ID NO: 408575 - DNA, 384 bp, Oryza sativa
caaagatcatgtgatcagaattaacaaagcagaagctgaatattggaagaagtcagagggctatcgcatgggctggagtgatgaaatattaggctttgattgtggcgggcagcagtgggtttctgaaacctgcttccctgcagggaccctagcaaagcctaatatgaaggatctggattatatagaggagctgctgcagttgattgagaaggaagatatacccgcaccggcacctattgagcagcgctggactgcctgcagcaagagtcccatgagcccagcatcaagctctcaagaagatgacatattttcatggggtgggataataatgtacctcccaacgtccgatgctcgacaaaggaaggaaattaccgagggattttt

SEQ ID NO: 408576 - DNA, 412 bp, Oryza sativa
tttattcttgagctcaatcagcaacaacatctatctccttcttgcttagttaagtccttcgccctcccaagaagaagaagatgtcttgctgcggcggcaactgcggctgcggcagcggctgccagtgcggcggcggctgcggcggatgcaagatgttccctgatgtggaggccacagccaccaccaagaccttcgtcctcgctgctccatccaacaaggcgagctctggaggaatggagatggcggcggagagcggcgagaaccgcggctgcggctgcaacacctgcaagtgtggcaccagctgccgcggctgctcctgctgctcctgcaactgaatctatcgtcggcgttcgccggcttgatgaggaattatcgcatggatgctgctactggcgatcagagctttgatcga

SEQ ID NO: 408577 - DNA, 389 bp, Oryza sativa
  unsure (1)..(389): unsure at all n locations
tttacaggcggacgcgagcgtcgtcctcttcgtttcgcttctcctcctcctcctccgcctccgctctcgcgagatctcctgatcgactcgctccgccatggctggagaagctgatggaaaagccccactgggatcaagatacccccctgctgctctcaacgagcgcatcctttcttccatgtctcaaaaacatgttgctgctcatccatggcacgatctggagataggtccaggagctccagcagttttcaactgtgtggctgaaattcctagaggcagcaaggttaagtatgagttggataaggcaactggtctaattaaggttgatcgngttctttactcatctgntggttacccacacaactatggtttcattccacgcacacttt

SEQ ID NO: 408578 - DNA, 451 bp, Oryza sativa
tttcagccgccgccgccgcagcctcctcctctcgccatctcccgtcctctccttcaagtcagctacctgcttaatcaaccatgggtaaggagaagacgcacatcaacattgtggtcattggccacgtcgactctggcaagtcgaccaccacgggccatctgatctacaagcttggaggtatcgacaagcgtgtgattgagaggttcgagaaggaagccgctgagatgaacaagaggtccttcaagtacgcgtgggtgctcgacaagctcaaggccgagcgtgagagaggtatcaccatcgatattgccctgtggaagttcgagaccaccaagtactactgcacggtcatcgatgcccctggtcaccgtgacttcatcaagaacatgatcacgggtaccctccaggctgactgtgccgtgctcatcattgactccacactggtggttttgag

SEQ ID NO: 408579 - DNA, 431 bp, Oryza sativa
gtacgcgctggtgagtgtgagagtgagatcgatggcggcggcgtccatctcgcggagcctcctccgccgatcccgctgcggcggcggggagcaccacctcctcctgctggcgcgcggcttcgtcacggcggagtgccaccgccccgtcgtgctccacaagcgcggctccgacatcctccacgacccatggttcaaccggggcacggggttctcgatgacggagagggaccgcctcggcctccgcggcctgctcccgcccaacgtcgtctcctcccagcagcagatcgaccgattcatgcttgacatgcaacggctgcagaaatatgcgagagatggcccatcggatacttacccgttagcaaaatggcgtatccttaacaggctgcatgacagaaatgaaacaatgtattacaaggtcctaatagataata

SEQ ID NO: 408580 - DNA, 351 bp, Oryza sativa
ttctagctcgcagctcaagcgcacccagccatggcgactcctcagatctcgcgcaaagccctcgcctccctcctcctcctcgtcgccgccgccgccgcggtctccaccgcgtgcgccgacgacgtgctcgccctcaccgagtccaccttcgagaaggaggtcggccaggaccgcgccgccctcgtcgagttctacgcgccatggtgtggtcactgcaagaagcttgcccctgaatacgaaaaactcggtgcaagtttcaagaaagccaaatcagtcctaattgcgaaggttgactgtgatgagcacaagagtgtgtgcagcaagtatggagtttctgggtaccccacaatc

SEQ ID NO: 408581 - DNA, 248 bp, Oryza sativa
ttgggaacccgcagcgtggccttggtgctcctcgcggccgtgctgctccaagccctcctccccgcttcggcggcggagggtttggtgcggatcgcgctgaagaagcgcccgatcgacgagaacagccgcgtcgccgcgcgactctccggcgaggaaggggcgcgccggctgggcctccgcggcgccaactcccttggcggcggcgggggtgagggcgacatcgtggcgcttgagaactacatgaacgc

SEQ ID NO: 408582 - DNA, 401 bp, Oryza sativa
gttttcacaatccatttctttactagaagaaactgataggcagataagagaaaaatcatgcatggagcaagtaagacgcttgaaggaagcccgcaatagttatcatgaggagttggtggattgtgtcaggcattgtgtttggtatcgtgccactgttttttcttcatggaagcaaaggggaatgtatgcaacttgcatgtgggttgtggagcttcttttggtgctcagtgattcttcttccattttccactatattcctgaattctatgtggaatcattggtagactgtttccatgccctgcggcggagtgatcctccttttgtctctcctgcagtatttcttaagcatgggctagcttcatttgtcactcttgttgtcaaacactttgatgatccaagga

SEQ ID NO: 408583 - DNA, 374 bp, Oryza sativa
tttttatctggagctcttcgtggccatcagcacccacgcctaaggtccggttttctgttagaacgacaaggtgatggtgtttggggtgttccgttgtcaactaggagcagggaaggaagaagattaattgagatccggaacgcgcttgaaatgattcacagaggggaaaatgtaagatttgagtccattttctatggtggagtcgacattcatgacagacacagggatatgcgccttgacatagacaacatgtcttatgaggagctattggcactggaagaaagaataggcaatgttagcactggcctcagtgaggaagaaagtgacaaaagctcctaaaagcaaggaaattctcatcatggaggttggaagca

SEQ ID NO: 408584 - DNA, 344 bp, Oryza sativa
tgtcgtcgccttctccgtcgacaaccgccagatcgtctccgcggcgcgcgacaacaccatcaagctctggaacaccctcggcgagtgcaagtacaccatcggcggcgaccatggcgccggcgagggccacaccgggtgggtctcctgcgtgagattctcccccaaccccatggcccccaccatcgtctccggctcgtgggatcgcagcgtcaaggtctggaacctcacgaactgcaagctgcgcaccaagctcgagggccacaacgggtacgttaacggcgtcgccgagagcccagacagatgcctgtgtgccttccgtgggaaggaccgaaccaccctgctct

SEQ ID NO: 408585 - DNA, 363 bp, Oryza sativa
ttttacatgtaaccatagttagtactagaaccactctctagctacttgtatagttgtatgttccagcttcctagtaggtggttatggacaaacacccgtgatgatcttagtgtcttatcagaataatcatgctgatgcattggtcaacactggtctggcgaaattggggtaccagtatgtgaatatagatgattgctgggcagaatatagtagggattcccagggtaactctgtgccaaataggcagacgttcccctctggtatcaaggcactggcagattatgtgcatgcaaaagggctgaagcttggcatttacagcgatgccgggtcacaaacatgccagtacaaaatgccaggatcact

SEQ ID NO: 408586 - DNA, 378 bp, Oryza sativa
ttttagggccccttggcctcggggttaactcgcggccatcagcgcgcactattgctaagtcttttagcagaaccaaagacatgacctggagacctgatctgtttagtgatagtatggcagctagtggaattgaaactggtacaaaattgtacatttcaaacttggactatggggtttccaatgaggatataaaggagctgttttcagaagttggtcacttgaagcgctttgctgttcactttgatggttatgggcgcccaaatggcacagcagaagtggtgtttactaggagaagtgatgcaattgctgcattgaaacgttacaataatgttctgcttgatggtaaagctatgaagatagaagttattggaagtgact

SEQ ID NO: 408587 - DNA, 415 bp, Oryza sativa
ttagacatatggctcaatgttgaaaaatctaacattcatcaagacttttgcatctggaatacttgtccctaagaactatatctggcctgtaacacaagacaattatctgcagcccagcacatcggtcgttggtgatgctcataaagcaggactagaagtttatgccgctgattttgcaaatgactttttgctcagctacaactacagctatgatccattaacagaatatcttaacttcattgataatggtgccttctctgttgacggtgtattgactgatttccctattaccccttcagaggccattggttgctttagtaacctcaacaacagcaagacagacaatgcgaaacctctcatcatctcccacaatggtgctagtggcgactacccaaattgcactgacctagcttat

SEQ ID NO: 408588 - DNA, 364 bp, Oryza sativa
tataaccctagacttgcacagatcgagacgagagaggctagcagcaacattcttcgacaatggctagccttgcaatcttcgccgctgtagccttcgttctcctcgccgcctcggtgtcgtcgtcgtcggcggctttgtacaccgtcggcgatgcgagggggtgggcagtgccgcccacaggctcagagtcgtacaaccattggggtctaaagaatcgcttccgcgtaggcgacgtcgcggagttcaagtacgtgaacgaatcggtggtggtggtgaaccacgagggctacaggaactgcagctcgctgagcccggtgatcccggtcacggacggcgacacccagtacctgcttgaccgcccggg

SEQ ID NO: 408589 - DNA, 385 bp, Oryza sativa
ttgttatggtaatctccacccggaaggaaatggagggaaagattgactccatgagaatcttagacaactcaaatcctcagaagccagtagtgcgcatggcaaatttgtgcgtagtgtctgcccatacggtgaatggagtggctgagttacacagcaacattttgaaggaagagctttttgcagactatctctctatatggcccaacaaatttcagaacaaaacaaatggaattacacctcgtagatggctccgtttctgcaacccagagttgagtgaaatagtaacaaaatggctaaaaacagatcagtggacaagcaaccttgatcttcttaccgggacttcggaatttgcagatgatgaaaagcttcatgctgagtgggcatc

SEQ ID NO: 408590 - DNA, 277 bp, Oryza sativa
cacgcccggaacggcgtcaagttcggcgaggccgtgtggttcaaggcgggctcgcagatcttcagcgagggcgggctcgactacctcggcaacccgagcctgatccacgcgcagagcatcctcgccatctgggcggtgcaggtggtgctcatgggcgccgtcgaggggtaccgcatcgccggcgggccgctcggcgaggtcgtcgacccgctctaccccggcggcgccttcgacccgctcggcctcgccgatgaccccgaggcgttcgcggagctca

SEQ ID NO: 408591 - DNA, 443 bp, Oryza sativa
ttttcggcggcgcggcgcggagcagaggaggacgaagcagcaggcggcggcggcagagcacggcgacctagcccgacctcgcaaccatggcaaggggtttgaagaagcatctgaagaggctcaatgcgcccaagcattggatgctcgacaagcttggtggagcttttgcccccaagccatcttctggtcctcacaagtccagggagtgcctgcctctgatcctcattatcaggaacaggctcaagtatgctctgacataccgtgaggttatttctatcctcatgcagcgccatgtcttggttgatggcaaggtcaggactgacaagacctacccagcttgtttcatggatgtcatttccatccccaagactggtgagaactacaggcttctgtacgacaccaaaggacgtttcctgcctccagtctgtcaaggatgaggatgc

SEQ ID NO: 408592 - DNA, 303 bp, Oryza sativa
gtttaccaagagaacaaccgttgagtgttgatgagtggagatccttcttagatcctgaaggcagagttatggattcgaaggcgctgaggaaaaaggctctctatggagggattgaccatgttctgagacaagaggtctggaaaatcctgttggggtatcatgaatacgattcaacatatgccgagagggaatatcttggtgttatgaaaagaacagaatatgaagccatgaaatcccagtgggagagtgttttgttcacacaagcttaatgatttaccaagtttagggaaagaaaaagcctta

SEQ ID NO: 408593 - DNA, 389 bp, Oryza sativa
tcttaatccgacgcactacttcgtggaggaggtggtgaagttcgtcaacgagagcgacctccaccggacgtggatcaaggtcgtcgccacccgcaacgcccgcgagcggagcacccgcctcgagaacatgtgctggcgcatctggcacctcgcgagaaagaagaagcagctggagcttgagggaatcctgaggatttctgcacggaggaaggagcaggagcaggtgcgccgcgagacttcggaggaccttgcagaggatctgtttgaaggctagaaggcggacaccgtcggtgaattggcacagcaagacactcccatgaagaagaagttccagaggaacttctcagagctcaccgtcagctggtccgaccagaacaaggagaaaaagc

SEQ ID NO: 408594 - DNA, 308 bp, Oryza sativa
ctttatatcaactcaaggaccaagccacttgcagcctatcttttcaccaaggacaagaaactgcaagaggaatttgtgtccaatgtcccagcaggaggaatgcttgtaaatgatgttgccctgcatctcgccaatccgcacctgccatttggcggagtcggcgacagcgggatcggctcctaccatggcaaattcagcttcgattgtttcacccacaagaaggccgtcctgatccgcggcttctgaggggaggcaactgctaggtacccaccttacacgattgagaagcagaagatcctgagaggact

SEQ ID NO: 408595 - DNA, 340 bp, Oryza sativa
tctgagcaccccgggcaccgacgtcgcggccgagaccgccgtggcgctcgccgccgcctcgctcgtcttccgcaagtccgacccggcctacgccagccgcctcgtcgccagggccaagagggtgtttgagttcgcggacaagcacaggggcacgtacagcacccgtctctcgccatacgtctgcccatactactgctcctactccgggtaccaggatgagctgctgtggggggcggcatggctacacagggggaccaagaacccgacgtacctgagctacattcagatgaacgggcaggtgctgggcgcggactagcaggacaacacgttcgggtgggac

SEQ ID NO: 408596 - DNA, 270 bp, Oryza sativa
tttagctcgaggttgcaagtattaccaaattcgagagtatatggagctgctcaggagctacattctatgagccgcaagaaatccctgatggtttccactgccttgggcactatgcccaacagaatgaccgacctttacagggatttcttcttgtggcaagggaagcggctagctgccaatcgatcaatctcaagcctgctcttgagaaaccattagattacacccttgtttggactagtactgacttgaatgatgatgacaatagtgatt

SEQ ID NO: 408597 - DNA, 410 bp, Oryza sativa
ttttgtgaagcaaaagcttgaagcaggaggcatgggcgctaatgtaattggacaagttacagcatcaccagatattgagctagttgttgatggcaggctgcatctcaaggaaaaaacttcagatctcagggatatctgggaggaaacaagcttccagcttgaggggctacaacgcctgaaatcttgtgtcagacttgagaaagaaggactaaagcacagaacatcaccatcgtggtctttgtctttcactcccaaatttacagatgaaaaactgctgactgcttcctcaaagccaaaagttgccatcattcgtgaagaaaggagcaatggcgatagggagatggctgctgcattctatgctgctggatttgaaccatgggatatcacaatgtcagacctcttagctggga

SEQ ID NO: 408598 - DNA, 261 bp, Oryza sativa
gtctttagccgccgtcgccgccgccgccggtggcccgcgccttcgacgagctgcaggccgtagacctcgccggatctccccgatggccgtgaccttcaccgacctccacaccgtcgacgggctcaaagccctcgagcagcacctctccggcaagacctacgtctccggaaacgcgatcagcaaggacgacatcaaggtgttcgccgccgggccatcaaagcctggagctgagtttccgaacgctgatcgctggtatgatac

SEQ ID NO: 408599 - DNA, 318 bp, Oryza sativa
tatagagaaatctcccgtctcgtcgtctgctgggctccttgcgccaagacgagtggcggctcaacagaggaggggcgccgatctccatctggcgagcagagcacgggaggggaagggaaggtatcctgaaagatgcttaatcttatcaaaataaaggataaaaagaaagagcaggcagcaagtgctgctggaaaggctcctgtgaagaagcaatctgctggagagctccgtcttcacaaagatattagtgagctaaacctacccaagagcacatcaatttctttttcccatgggaaggatgatctgatgaattttgag

SEQ ID NO: 408600 - DNA, 504 bp, Oryza sativa
tgcctcacatcataccaagtgtcctccttcctcctcatcctccccaaccactgcatccgggtcggcgtcctcctcctcctcctcctcctcgcagaatgcaacgggcaattcaagctatcgggtcacatggcagtctcctcaagtctgctgttctgcgacacatcagtgctccaaaaccatctattttacctgctgtatattcacgctccatgtcagtttcatctgctcaaatagaggagagtggatttgagactgccactgtggcagatattttgaagtctaaggggaagagtgctgatggatcttggctctggtgcactactgatgactctgtctatgatgctgtcaaatctatgacgcaacacaatgttggagctctggtggctgctaaacctggacaggataaatcaattgctggtattgctactgagagagattacctcaggaaaatcatagtgcagggacgatcttccaagtcaactaaagctggagacatcatgactg

SEQ ID NO: 408601 - DNA, 365 bp, Oryza sativa
  unsure (1)..(365): unsure at all n locations
gtatatacccaatcaaatccttttcctccaaatctcgccaaattcttcgagcgagacacgtataaactctcactcgctcactcacacctcacacgctgctgctgctgcttctcgatgaggaatattttttttgcttcggccaaggcaacgctaatatcgcgcgatgtaaggttgcacagattgctgtgggatgaaattactgaggaaaagagatgtgcctgaagagaaatatacgaatgcatttctttggtttggacctgaggacaccaactttgcacttgaattgacatacaattatggtggtgataagtacgacattggagcagggatttgngcatttcgctattgcaactgaggacgtgtac

SEQ ID NO: 408602 - DNA, 369 bp, Oryza sativa
gatccgccctagcacgatcccctcccccctccccgtctccgatccccctcctccacctcagatctccggcgagccgatcgaatcggcggctgcggcggcggcggcggcgcgatgtcggggcagacgcagcgcctgaacgtggtgccgacggtgacgatgctcggggtcatgaaggcccggctcgtcggcgccacccgcggccacgcgctcctcaagaagaagtcggacgcgctcaccgtgcagttccgcgccatcctcaagaagatcgtcgccgccaaggagtccatgggggaggccatgagggcgttctccttctccctcgccgaggccaagtacgtcgccggcgacggcgttcgccacgttgacctt

SEQ ID NO: 408603 - DNA, 467 bp, Oryza sativa
ctccagtctccactccactgaatcctcccacctcggctcgaaggaatggcaagcggtagtgaagctgagaagtcacctgaggttgtgctggagtggcctaagaaggacaagaagaggcttctacatgctgtttaccgtgttggagatttggatcgcaccattaaatgttacacagaatgctttggaatgaaattactgaggaaaagagatgtgcctgaagagaaatatacgaatgcatttcttgggtttggacctgaggacaccaactttgcacttgaattgacatacaattatggtgttgataagtacgacattggagcaggatttgggcatttcgctattgcaactgaggacgtgtacaaattggctgagaaaattaaatccagttggtgctgcaagatcactcgtgaacctggtcctgtcaagggaggatccactgtgactgcctttgacaggatcctgacggt

SEQ ID NO: 408604 - DNA, 470 bp, Oryza sativa
tgccatctctctcagctctcacagctcactgcatcaatggccgcggccaccatggcgctctcctccccggtgatggcccgcgcggcgccgtcgacctcctccgcgctcttcggcgaggcgcggatcaccatgcgcaagaccgccgcgaagcccaagccggcggcgtcgtcggggagcccgtggtacggcgccgaccgcgtcctctacctcggcccgctctccggcgagccgccgagctacctcaccggcgagttcccgggcgactacgggtgggacaccgcggggctctccgccgacccggagacgttcgccaagaaccgggagcggaaggtgatccactcccggtgggcgatgctgggcgcgctcggctgcgtcttcccggagctcctcgcccggaacggcgtcaagttcggcgaggccgtgtggttcaaggcgggctcgcagatcttcagcgagggcgggctcgacta

SEQ ID NO: 408605 - DNA, 220 bp, Oryza sativa
atcaccaccaccaccacctccacctcctcccccgtcgctgacggacgacgagcccgttcgtctcccccgtcaaccgccgccgcgcgaggagaagccgtcctgaaccacagcgggacagagccgcattccaggacaggtacctactgccagcagctacattacccccagcactgattatcaccctgatggacagatgcccggtgacaagaccgctggggga

SEQ ID NO: 408606 - DNA, 237 bp, Oryza sativa
gtggtggattcctaggcacccagtgactaggatgggcgtacatggcgcctgaacgctctggactgtcgtacttccgtgtcataacggttagtgaagcacaggtcaagcgctacatgaaccagttactgccaggactggagcattgacatccacgtggactggtacatcgcgacatcaagggtgccaatctgcttgtgaataatgaaggggatctaaaagcgacttgggaggagccta

SEQ ID NO: 408607 - DNA, 155 bp, Oryza sativa
ctcatgccgagtgaagtagctagcaggacattgttggtagtgtgatcttctccctgttttgcaacaatggcctcacgcagtagtgccctgctcctcctcttctcggccttttgcttcctcgcccgaagagccgacgccaacttcggcttctggct

SEQ ID NO: 408608 - DNA, 189 bp, Oryza sativa
tctttacaactgtacacaatattggacatgtgtcgtgcgtttgaccgagtttttaaagagcacctagatggcggtcggccaggtggagatcgtatttatggtgtatttgatcattcaattactagttattatttattaagcttttattttatatgcatttttcattgtataatgtttttaatgttattt

SEQ ID NO: 408609 - DNA, 471 bp, Oryza sativa
gccggaggtcagtggagaagcgggtggtgtccgtgccgatcgcggagtgcggcgaccggccgaagggcgccggggaggggccgccgccgtcggactcgtgggcctggcgcaagtacggccagaagcccatcaagggctctccctacccaaggtaattaggctttatattcagtttggttgatattcttgagcctgttgattagttaccgtgctgattaatcactgcaattagatcagttaaacggttgttgaagtggcaagatttaatttgggtttgttgcttgtgtttattatgctcagggggtactacaggtgcagtagctccaaggggtgtccggcgaggaagcaggtggagcgcagtcgcgccgaccccaccgtgctgctcgtcacctactccttcgagcacaaccacccgtggccgcagcccatgagcagcagctgccacgcgagcatgtcgtctctcggtcgacg

SEQ ID NO: 408610 - DNA, 468 bp, Oryza sativa
gcgtcttcgtactcgcctctctccgcgccctcctccgccgccgctcgccgccgttcgtctccgccgccaccgccgccgccatgagggagtgcatctcgatccacatcgggcaggccggtatccaggtcgggaacgcgtgctgggagctctattgcctcgagcatggcatccagcctgatggacagatgcccggtgacaagaccgttgggggaggtgatgatgcttttaacaccttcttcagtgagactggtgctgggaagcatgtcccccgtgctgtcttcgtcgatcttgagcctaccgtgattgatgaggtgaggactggtgactaccgccagctcttccaccctgagcagctcatcagtggcaaggaggatgcagccaacaactttgcccgtggtcactacaccattggcaaggagattgttgacctgtgccttgaccgaatcaggaagcttgccgacaactgca

SEQ ID NO: 408611 - DNA, 233 bp, Oryza sativa
ttcgcgagcggcggcgcggatggggctctgggagtggccgtgggatcgccggcggcgaggcccgtcgggcttaggccccacctccaccgccgaagaggtcaccgccggcgtagacgccacccacctcaccgccatcgtcacaggagcgacgaacgggatcgggagggagacggcccgagttctggcgaggaggggggcggaggtgatcatcccggcgaggaccatggtcagcg

SEQ ID NO: 408612 - DNA, 144 bp, Oryza sativa
tactctgttgattatggaaagaagtccaaggttggctttacaatttacccttccccccaggtctcaacagctgttgtagaaccatacaacagtgttctctccacttactccttgtttgagcacactgacgtggcttttttcctc

SEQ ID NO: 408613 - DNA, 276 bp, Oryza sativa
tttgagctcaaaagacacacattccaaaagcatctgtggccatctcctcctagtcctaggctcgcgtcaatggcggcgtccaccatggcactctcctcccctgccgccctcgccggcaaggcggtcgccaatgccaaggtgttcggcgagggccgcgtcacgatgcgcaagtcggcggccaagcccaagcccgccgcggcgtcggggagcccgtggtacggcgccgaccgtgtgctctacctcggcccgttctccggcgagccgacgtcctactct

SEQ ID NO: 408614 - DNA, 235 bp, Oryza sativa
tctctccgccgcctcctcctcctctcgccttctcccgtcttctccttcgagttagctacctccttattcaaccatgggtaaggagaagacgcacatcaacatcgtggtcattggccacgtcgactccggcaagtcgaccaccacgggccatctgatttacaagcttggaggtatcgacaagcgtgcgatcgagaggtccgtgatggaagcccctgagatgactacgaggaccttc

SEQ ID NO: 408615 - DNA, 377 bp, Oryza sativa
ttcacgcgtccggttcgcgttcggctcgtgggtcggcatcaagagcggcggcgtggtcgccgccctggtcgccggcgggatcaccatgtcgatcctgggcaacgcggccgacgtcgcgcaggacctcaagacgggctacctgacgctgacgtcgccgcgcgccgtgttcatcagcgaggcgatcggcacggcgctgggatgcgtcgtcaaccccaccgtgttctgggtgttctacagggtgtacaagatgggcagcggcgacatgggcgacatgccctacgccaagctttaccgcggcttcgccatgctcagcgtcggcgacggcgagcaaggcctgcccaggcacagcatgcttctcttcaaggtcttttttgtgc

SEQ ID NO: 408616 - DNA, 397 bp, Oryza sativa
tgatctcttcttctctctgcctgcagacacaagcaggtgactcctccatcctcccaaagcaaagcacccatgtatcccgctgctgccgctgctacctacaagtgcaccctgcagaagctgcttctccttctccttctgatctgaggagctgcagctgctgctccagcagcagaggctgcagtgcaatccgctgccaaattcctcttcttctccttcctactagcttttctcttcttcttcttcttcttcttggaaagctggaacttggagctgcttaagcttacacctgctgattcatctccagctgctgctgctgctgattcagtattattatgtgtgcagatgtacagtagatgaggaggacggaagtagcctctggatagctagctgagctgag

SEQ ID NO: 408617 - DNA, 244 bp, Oryza sativa
tccatctctctcagctctcacagctcactgcatcaatggccgcggccaccatggcgctctcctccccggtgatggcccgcgcggcgccgtcgacctcctccgcgctcttcggcgaggcgcggatcaccatgcgcaagaccgccgcgaagcccaagccggtggcgtcgtcggggagcccgtggtacggagacgatcgcgatcttaacctcggcccgctctacctgcaagccgcctagctatctca

SEQ ID NO: 408618 - DNA, 85 bp, Oryza sativa
tgcgttcgtgtctggctcggcactctcaacagtgctgtagaagctgcaagagcttatgatgctcaagcacgcaggattcgtggca

SEQ ID NO: 408619 - DNA, 64 bp, Oryza sativa
tataatcattatattgcaacaatggcatcctcctcccttctactcacctgagttgcggcttcta

SEQ ID NO: 408620 - DNA, 267 bp, Oryza sativa
cgctgatcgatcttttttcgggagggcgttgcttgctcggatcggcggccatggctgagcccgctggggaggcggccccgcaggcggacggcgtctcggaggaggtggcggcgaggccgagggggtttaggcttcttggggaggacaagtacgtgcaccaggctctcggcggtggtaaagctgctgatgtacttttgtggaaagacaagaagatttctgctgcagtgttaggtggtgcaactgtgttgtgggttttttttgaagacg

SEQ ID NO: 408621 - DNA, 268 bp, Oryza sativa
gatacattgtgcagtacaaggggaacctcagccttgtaaccgtgagaggagcaggccatgaagtccccagctaccagccacagcgagcgcttgtgcttgtccagtatttccttgaaggcaaaacgctacctgattgcgaaaaatgtggagaggcttagttataaaaaaaaaacttaacttatgtttacaaatataagtagcataatgtgccatgaccacaagtcgcatttttcccatcgctgcccccattctagattgtgcctgaaag

SEQ ID NO: 408622 - DNA, 353 bp, Oryza sativa
tttatccaaactccacctacatccatgagcctgcatactttaaggacatgaccatgtccccacctggcccccatggggtgaagaatgcctactgcttactgaactttggggacagcattacgacagaccatatttcaccagcaggtagcattcacaaagacagccctgctgccaagtacttgcttgagcgtggtgtggaccgtaaggacttcaattcatatggtagccgtcgtggtaatgatgaagtaatggcaagaggaacatttgcgaacatcaggattgtgaacaagcttttgaatggagaagttggaccccagaaccgttcatgttcctacaggggagaaggtctatgt

SEQ ID NO: 408623 - DNA, 250 bp, Oryza sativa
actgacgttgccaccacaggctacgcaaaatggtgtgcctttctcctccaccacctccactccgacgatcctcctcctgatcctgtgccggccggcgatggcgtaccggttgctggagctcacgctggtctccgcgagcgacctcaagaaggtcactctcttcttgcgcatgcatgtctacgccgtcgcctccatctccgggagcaacgtacccatgcccatgcacggaacccacgtcgaccgcaacgga

SEQ ID NO: 408624 - DNA, 325 bp, Oryza sativa
ttgatagcatctagctagggagagaaaggaagagacgagaggagagagatggccactgcttatgctcccatggcgagccagctgatgaagagcagcttggtgtgctccaagccgagggggctgtctggtgcttcgctgacaaggaggccccgcttcacagtcaaggccatccagtctgagaagccaacgtaccaggtggtgcagcccatcaatggcgaccccttcatcggcagcctggagacgccggtgaccttcagtccgctggtcgcctggtacctcttcaacctcccggtgtaccgcacccgcgtcagcccgctgctccgcg

SEQ ID NO: 408625 - DNA, 488 bp, Oryza sativa
ttgcgtgaagcagcggcaagaacacaaaaatggcggacgagaagctcgccaagctgcgtgaagccgtcgccggcctctcgcagatcagtgacaacgagaagtccgggttcatcagcctcgtcgcccgctacctcagtggcgaggaggagcatgtggaatgggcaaagatccacacgccgacggacgaggtggtggtgccgtacgacaccctggcggcgccgccggaggacttggaggagaccaagaagctgctcaacaagctcgccgtgctcaagctcaacggcggcctcggcaccaccatgggatgcaccggaccaaaatcggtcatcgaagtgcgcaacggattcacattcctcgacttgattgtgatccagatcgagtccctcacaagaagtatggcagcaatgtcccactgcttctgatgaactcattcaacacccatgaagacaccttgaagattggtgagaaatacaccaattcgaacattg

SEQ ID NO: 408626 - DNA, 518 bp, Oryza sativa
  unsure (1)..(518): unsure at all n locations
tttccttgactttggcttccccactctctcttcttcttgggaggctgggagctaccagcacaacacaccaaggaagctgaggtgcgttgatttcttgatatcatggccaagaggcacctcttgttggtgacaacttgtttgtgggctctgtcatgtgccttgctgcttcatgcttcctctgatgggttcctgagagtcaacctcaacaagaagagattggacaaggaagatctcactgccgccaagttggcgcagcagggcaaccgtcttctgaagaccggcagttcagacagtgatcctgtccctctggtggactacctcaacacccagtactatggggntgattggcctcggctcaccgccgcagaacttcacggtgatatttgacactggaagctccaacctgtgggttccttcagcaaaatgctatttttcgatagcatgctacctccacagcagatacaactcgaaaaagtcgagctcttacaagcagatggagaaacttgcacaatacatac

SEQ ID NO: 408627 - DNA, 462 bp, Oryza sativa
  unsure (1)..(462): unsure at all n locations
ctctccactccactctccgttgctcgcgcggttggcgttgcgttttttcccctcgaatcgcgggggggaatccgccggttaatgcagcagaggggcctcgcgcacaaccgccgctcccgcggcttctcccgatcccgccgcgccgtcgagggcgcctaaaccacacgcctttttttttccttaaaaacgaatagatctctctcaatttcctgaaacttataataatttcaaaaacgccctagacgaggacgaggagacgatcgagatggacgccgtcgcggcgaatgggatcggggaggctgagaaggacggcgcaccggcgctactgggaggagcactccaaggacctcaccgtcgaggccatgatgctcgacttccgcgccgncgacctcgacagggaggagcgccccgaggttggcaaattgatcaataggaactgacgagtactagacttgatgcaga

SEQ ID NO: 408628 - DNA, 442 bp, Oryza sativa
tgacactcgagctgagcacgtctagctagctatatctctcaacatcttccgagctactactagtagctagctagctagaggaagcagcagcaatggcgaaatcttgcaccttggtactactacttgtcgcactggtcgggctctcacttcttgtgagccccattgcttgctcccgcaagctcagcaagccgaaacccaagccgaagccgagcatgaagaagccggtggtccgggctcacaacaactacaccggtagcccgtcggtgacggtcaccaccggctgggccgccgccggcgccacgtactacggcgcccccaacggcgacggcagcgacggcggcgcttgcggctaccagaccgccgtcgggcagcggccgttctcgtcgatgatcgccgccgggagcccgtcgctgtacaagggaggcaaggggtgcggcgcgtg

SEQ ID NO: 408629 - DNA, 454 bp, Oryza sativa
cttccttccttcccttggtggtggtggtggagactggagagcggaggcgaaaaaaagaaacgaatcgaatctctcgtccctcctcctcctcgatctccttcctctcaattccatccatcgtctagtcttcttcccaaacccaacaactccatcttcttctttgcttcgcccttgatttgtgtgctgcgtgaacaaggcctgtctagagggcagccatggccactgtttctgacatcggcctctccgcggctatcaacgtctcgatggccgttgcattcttgctggtctttgcttttctacgattacagcccatcaacgatagggtttactttccaaaatggtacctcagaggaatgagagacagccctgttcctctggtgctgcagtcaaaaggttgtcatctaaacatgagatcatacttgacattttaagcttgatgcccgctgctctcaag

SEQ ID NO: 408630 - DNA, 397 bp, Oryza sativa
tttgcgcagagaggcgcaaccgatggcagcggaggccggctcggcgcgagaggcgcgggcggaggagatggaggccggcttggcgcgagaggcgcggccgatggagggaggccggattggcgcgagaggcgcatccggtggaggaggccggcttgacgcgagaggcgcggccggcagtggaggcgacctcggatcgaggagctgctgatggatgtgacgcggtcttcggcgctcgaaggctagccagtagggggcgccggtgcaggggtcccacatgtcggcagaggatgaggggtggtgggagcattggtgcgtcagccgtggatttcgcggtggtgagcagcgtgtgaaaacccaagctggccatggccggaccgacaacgatgggaattcccct

SEQ ID NO: 408631 - DNA, 455 bp, Oryza sativa
  unsure (1)..(455): unsure at all n locations
ttcaaaccgaagaatcctggtctaccagtttgccacgcacggctccctgcatgacatcctacacgggaagaagggcgtgagggacgcggcgccggggccggcgctgaactggagccagcgggtgaaggcggcgtacggcgccacgagagggctcgagtacctccacgagaaggcccagccgcccatcgtccaccgcgacatgcggtcgagcaacgttctcctcttcgacggctacgagtccaagctcgccgacttcaacctgaccacccagcctcccgacggcgccgcgcggctgcactccacccgcgtnctcggaaccttcggctaccacgcgcccgagtacgcgatgacgggacagcttaatcagaagagcgatgtgtacagtttcggagtcatcctactggagttactgaccggcaggaagccagtgggccataccatgccgtagagacagc

SEQ ID NO: 408632 - DNA, 481 bp, Oryza sativa
ttttcccgtctcctcgcccgccgccctcgactgccgtctcctcgcctgccgctggcgccgatctccatcctgctagcagaggtggcgccggcgtcctcctgctcccgccgcattcgcatcctaatccatcccatccggcctcggcctcgaatttcgtctcctcgcccgccgcttgcgccgatccccatcctgcgagcagaggtggcgcccggcgtcctccttcttccaccgcatcgtcgctcgccgctagtatattgaaggctgaagctttgtgggtatccagcaagtatttcaatggcgctgctacagtttggaggtaccttggctcccaaacttggggaaaaacctcagctgttgcccaggtcacctgcacttacaagagttatttatgctgatccaagatttctggtgtcaaaaagtggtagcggaggcaggcttaaacaccttgtatcacctactgctagtttacaatcatggacat

SEQ ID NO: 408633 - DNA, 437 bp, Oryza sativa
cttgctcaaaagacacacattccaaaagcatctgtggccatctcctcctagtcctaggctcgcgtcaatggcggcgtccaccatggcactctcctcccctgccgccctcgccggcaaggcggtcgccaatgccaaggtgttcggcgagggccgcgtcacgatgcgcaagtcggcggccaagcccaagcccgccgcggcgtcggggagcccgtggtacggcgccgaccgcgtgctctacctcggcccgctctccggcgagccgccgtcctacctcaccggcgagttccccggcgactacggctgggacaccgccgggctgtcggccgacccggagacgttcgccaagaaccgggagctggagggtgatccactgccggtgggccatgctgggcgcgctcggctgcgtcttcccggagctctctcgcccgcacggcgtg

SEQ ID NO: 408634 - DNA, 416 bp, Oryza sativa
  unsure (1)..(416): unsure at all n locations
atttgcctccccctcctcctcctcctcgccggcgtcgtcgccgccgcggcgccactgctcgccaccgcccagctctccgccgacttctactcctccacctgccccaacgtcgagaaggtcgtctccaccgtcatcgagcgcaagttcaaggaggaccctaccacctccgccctcctcctccgnctcctcttccacgactgcttcgccaatggatgcgacgcgtcgatcttgatcgacccgctgtcgaaccagagcgcggagaaggaggcggggccgaacatctcggtgaagggctacgacatcatcgacgagatcaagacggagctggagaaggagtgcccgcaggtggtgtcgcgcgcggacatcgtggcgcttagcacgcgcgacagcgtgcgcctcgccggggggcccaacta

SEQ ID NO: 408635 - DNA, 459 bp, Oryza sativa
  unsure (1)..(459): unsure at all n locations
tcctccttgcttatcaacacgtacgttgcgtttcttggcaatgcgtgctgcaccgacgacgatgtggcgttcgccggcggcgccggtgtgtctcctcgtcgccgccgttctcctgtcggcggtggcggcggcgacggcgggggaggagtacgtgaagtacaaggacccaaagaagccgatcggcgagcgcgtcgacgacctcctcagccggatgacgctcgcggagaagatcggccagatgtcgcagatcgagcgcgccaacgcgacctccgccgttatcgagaagtacttcgtcgggagcgtgctgagcggcggcgggagcgtgccgtcggagaaggcgacggcgaaggagtggcagcagatggtggccaagatgcagaatgcggcgctcaagacgcgcctcggcatcccgatcatctacgggatcgacgccgtgcacgggcacacaacgtncacaac

SEQ ID NO: 408636 - DNA, 445 bp, Oryza sativa
gctttttagcttaactccctatctaatttattgtggaaattccgggatctgtgattggacatggaaaatagaaatactttatcttgggtaaaggaacagatgactcgatcgatttctgtatcgatcatgatatacgtaataactcggacatctatttcaaatgcatatcccatttttgcgcagcaaggttatgaaaacccacgagaagcaactggacgaattgtatgtgccaattgccatttagcgaataagcctgtggatattgaagttccccaagcagtgcttcccgatactgtatttgaagcagatcttcgaattccttatgatatgcaactgaaacaagttcttgctaatgggaaaaagggagggttgaatgtgggtgctgttcttattttgcccgagggattctaaataaggccgcccgaccgtatttttcctgagttga

SEQ ID NO: 408637 - DNA, 464 bp, Oryza sativa
tttagatcgcgagcggccgcccgcgatctagaacctttcacactctcgagctttgctaagatgtatgcttccaagtttggagttgatgaatttaagatgatggagaggctttggggtgagaacttctttgacccagccacaaagaaatggaccaacaagaacactggctcagctacctgcaaaagaggtttcgttcagttctgttatgagccgatcaagcaaatcatcaacacttgcatgaatgatcagaaggataagttgtggcctatgttgcagaagcttggtgtggtcatgaaggctgatgagaaggagcttatgggcaaggctctcatgaagcgtgttatgcaaacatggctgccagccagtaatgctcttcttgagatgatgatataccaccttccatctccgtccaggcccagaggtaccgtgtggagaatttgtatgagggtcctcttgatgatgtc

SEQ ID NO: 408638 - DNA, 331 bp, Oryza sativa
tttttcttcctgtacgagagcgggttcgcgctgttcgtggcgctgctgataaacatcgccgtcgtctccgtctccggcaccgcctgctcctccgccaacctctgccaagaggacgccgacaagtgcgccaacctcagcctcgacacctcctccttccttctcaagaacgtgctgggcaagtcgagtgcgatcgtgtacggcgtggcactgttggcatctgggcagagctccactattaccggcacatacgctggacagtacatcatgcagggctccttggacatcaggatgaggaagtgggttcggaacctgatgaccagaaccatcgcca

SEQ ID NO: 408639 - DNA, 474 bp, Oryza sativa
ttttgatatggccgagtcattgtgccagaaacgtgctttggaggccttccgcttggacccagcgaaatggggagtgaatgtgcaacctctatcagggtcacctgccaacttccatgtttacactgccctattgaaaccacatgagagaatcatggctttggatcttcctcatggtggacatctttctcacggctaccagactgatactaagaagatttcagcagtttcgatattctttgagacaatgccctacagattggatgaaagcactggcttgattgattatgatcagatggagaaaagtgccgttctttctaagccaaagttgatcgttgcgggtgcaagtgcatatgcgcgtctttatgactatgaccgcatgcggaaggtttgtgacaagcagaaggcaatacttctagcaaatatggcacatatcagtgggcttgtcgaactggcgttgctccatctccttttgat

SEQ ID NO: 408640 - DNA, 411 bp, Oryza sativa
gatgtatggtggactactacccatcgcgccacgcgccgctccgtcacgcgccggcgacgcccatcacgccgagccccgtggtggggaggaggcagaaggcgacgatacacaagcagaacgacttcaagcatcccggggagaggtacatgtcgtgggcgccggattgacaggagaggttgatccgccgcttcggcggagagctcgcgcaccccaaggtctcccctgagctccgcgccatctgggtcaactacctctcccagtgtgatgagtcgttgggggtgaagattgcgaataggctcaacgtgaagccatgcatgtgaagaaactaaagcacaagaatgcatcatatcttgataattaattggagtactaccaaccaaataatgccagacaatgtcagatgcacgcatc

SEQ ID NO: 408641 - DNA, 452 bp, Oryza sativa
  unsure (1)..(452): unsure at all n locations
ttcagctcaaacaagtcaagagcgaatagttcttgctgatctgttgtttgattactttagttctcgagaggctttagctgaatccatcgatcgatcatggaggatgagaggaacacggagagccaccatcgtggcgaggctgcagagcaggtggaggtgaaggacaggggcctcttcgacaacctgcttggcaggaagaaggacgatcagccggaggagaagaagcatgaggaggagcttgtcaccggcatggagaaggtctccgtggaagagccaaagaaggaggagcaccacgccgagggcgagaagaaggagagcctcctctccaagctgcaccgatccagctccagctccagctcgtcnagtgatgaggaagaggaggtgatcgatgacaaccgcgaggtggtcaagaggaagaagaagaagggcttcaggagaagatcaggagaagc

SEQ ID NO: 408642 - DNA, 402 bp, Oryza sativa
ttcaggtctcacagctcactgcatcaatggccggggccaccatggcgctctcctccccggcgatggcccgcgcggcgccgacgacctcctccgcgctctgcggagaggcgcggatcaccatgcgcaagaccgccgcgaagcccaagccggcggcagcgtcagggagcccgcggtacggcgccgaccgtgtactctacctcggcccgatctccggcgagccgccgagctacctcaccggcgagttcccgggcgactaccggtgggacaccgcggagctctcctgcgacccggagacgttcgccaagaaccgggagctggagtgtgatccactcccggtgggcgatgctgggcgcgctcggctgcgtattccctgagctactcgtccgggacggcgtcaagttc

SEQ ID NO: 408643 - DNA, 450 bp, Oryza sativa
ttttgctaaatgtatttcgtgcagctgaggcatgtgaagaatttggtggagttctagtcaccctaagaatggctctagatgatctttgtggtataactggtgagaatgtgggccccttgcctggttatatagaagatgctgttaaatctgcatataagcgttacatgaaatatctggaatcatttggcccggaggaaaattatctacgtaagaaagtggagaatgagttggggactaaaatgatacacctgaaaatgcggtgcagcggtgtagggtccgagtggggaaagatcaccctgattggcacctcaggcatctcaggatcctatgtcgagctaagggcatgaggaaagtctgcagatcataaccatggcagaacatcgttttctgagggaaggatgcatatcagaacaaggtgttccgtttctcttttcttactgtgtagctacc

SEQ ID NO: 408644 - DNA, 423 bp, Oryza sativa
tagcattcgcatccacgagaccactcgaacccgacccgcctcgccgccgccgccaccgaagtaatcccttaattggtcaaaatgtctcgggaggagaatgtctacatggccaagctggccgagcaggctgaaaggtatgaggagatggttgagtacatggagaaggctgcaaagactgtagatgtggaagagctcactgttgaggagcgcaacctcttgtctgttgcttacaagaatgtgattggtgcccgccgtgcctcctggcgtattgtctcatccattgaacagaaggaggagggtcgtggcaatgaggaacatgttactctgatcaaggagtaccgtggcaagattgaagctgagctgagcaagatttgcgatggtatcctgaagttgcttgactcacaccttgtgccctcatctact

SEQ ID NO: 408645 - DNA, 482 bp, Oryza sativa
gttgttcttcaacacacctttgttacagatgctaatagtattgcggagtcacactatggcttctctgtggttgatgctaattcattggagtttcttttcaataatgcgcctgaggcagcaaaatggctgaaggataactcactattatcttttgaagaaaagtatcactccgacagaagttcatggttggcactatatcctgtcaatttcttgttctctgggagcttaaagtttccttcagaaaatgaagagattagaaaacattaccagcatttcccccagatggttattcagaagacctcgagtaataatgggcaccggaggatgcatcttgagctttcacttggttcattatcggagatttggacctctgtgcttaatattactggaccactatcaaattggtccttttctgatatgacactttcagatcctcaaagtttagtgggggccaccatcatatatatgcagacttagtggag

SEQ ID NO: 408646 - DNA, 290 bp, Oryza sativa
tttatgatcatcttagcttggagaagacagaagagtgttatcttggaaggacaacatggcaactgcagggaaagtgatcaagtgcaaagcggcggtggcttgggaggccgggaagccgctgtcaatcgaggaggtggaggttgcgccgccgcaagccatggaggttcgcctcaagatcctctacacggcgctctgccacaccgacgtctacttctgggaagccaaggggcaaactccggtgttccctcggatcttcggccacgaagctggagggattgtggagagtgtgg

SEQ ID NO: 408647 - DNA, 478 bp, Oryza sativa
ctctccgggagcgctttgaacaatcgctctctctctctctccctccccgattcgattcaattcgcgacgcctccgtgaaattctccaaagccagcttgccctgtagccgcgtgctccggccatggcgttcttcaggggcctgaccgcggtgtcgaggcttcgatcccgcgtggcacaggaggccaccacgcttggtggtgtgcgatggctgcagatgcagagcgcatctgatcttgatctcaagtcccagctgcaggaattgattcctgaacaacaggaccgcttaaagaaacttaaatcggagcatggaaaggtccaacttggaaatataacagtcgatatggtccttggtgggatgagagggatgactggaatgctttgggaaacatcattgcttgacccggatgagggtattcgttttaggggtctctcgattcagagtgccagaagtgctgccgacagcagttaaagatgggga

SEQ ID NO: 408648 - DNA, 450 bp, Oryza sativa
ttaaatgggatgatctcatagcaaacatgcccctcaagatatgttaccccgcaatggaagatgatgaatggcgcattattaccggcagtgatcctaagaacaccccatggtcatatcataatggtggatcctggccaacgctgctgtggcagtttacattggcctgtatcaaaatgggaagaccagagttggcccgaagagccattgctgtggccgaggagaagctggcagctgacaaatggccagagtactatgacacccgctctggaagattcatcgggaagcaatctcggtcatatcagacatggactattgctggttttctgacctctaagatgctattggaaaaccccgagctggcttctattctgacctgcgatgaggacctcgagctgcttgaaggctgtgcatgctgcctttctaagaagagactaggtgctcacgccgtgc

SEQ ID NO: 408649 - DNA, 468 bp, Oryza sativa
gcaagaatagatgcagttgacgcaagcacagtcaagcgagtggccaaccgtttcatttttgaccaggatatcgctattgctgcaatgggacccattcagggtcttccggactacaactggttcaggcgccggacctacatgctccgttactagactctccaaccgatgtactatgtttacattctgcaaaggcaagataattgcctcttttggcatcagtatattatggcctcgtccatgcacattgtgtgtgcgacgtggaggaaatttttttgagcaccattttccttgttttctttgtccaaaaccaacaaagctgtcaataatgataggcaaattcaactgacgtggcttacttgagttgccacccgttgtttctacgatgaatcgttacccctacttatccttttttttattgcaagattgctttcttttttttgaaatatttgatgaagctgcttatgtaag

SEQ ID NO: 408650 - DNA, 488 bp, Oryza sativa
ttttgacaaggaaggccaaacatctcaacttgcaccaatcgatttctttgtcagtactgttgatcccttgaaggaacctcctttggtcacagcaaacactgttctatctatcctcgcggtagattatccagttgataaggtttcatgctatgtctctgatgatggtgctgcaatgctgacatttgaagcattatccgaaacatctgaatttgcaaagaaatgggttcctttctgcaaaaagtacagtattgaaccacgtgctccagagtggtacttccaacagaagatagactacctgaaggataaggtggcaccatactttgctagggagaggagagcaatgaagagagagtatgaggaattcaaggtgagaatcaatgcattggttgctaaagctcagaaagttcccgaggaaaggctggacaatgcaagatggaactccctggcctggaaacaatgttcgcgatcaccctggaatgattcaagtc

SEQ ID NO: 408651 - DNA, 356 bp, Oryza sativa
ttcacgcgtccgtgagcctgttcaagacgttcaccgacgccgtgtggcggctcgccgcgccgctcgaggcgttcctccgcgcgctgccgcggcggccggactgcgtcgtcgccgactcgtgcagcccgtggacggccggcgtcgcgcggcggctcggcgtgccgcggctcgtgttccatggcccgtcagcgctgtacatactcgcggtgcataacctggcgaggcacggcgtgtacgaccgcgacgacggcgaccttgagccggtcgacgtgccggacttgccggaggctggcgccgtgacgaccaacaggccgtcctcacttgggctcttccactggaccgggcctgagagacac

SEQ ID NO: 408652 - DNA, 422 bp, Oryza sativa
ttaaaaaggaaaaaaaaacaaaacacaccaagccaaataaaagcgacaatgggatcgctcaccaccaacatcgtcctcgccgtcgccgtggtggcagcgctggtcggcggcgggtcgtgcggcccgcccaaggtgccacccggcccgaacatcacgaccaactacaacgccccgtggctccccgccagggccacctggtacggccagccctacggctccggctccaccgacaatggtggcgcgtgcgggatcaagaacgtcaacctgcctccctacaacggcatgatctcctgcggcaacgtcccaatcttcaaggacggcaggggatgcggctcatgctacgaggtgaagtgtgagcagccggcggcgtgctcgagcagccggtgacggtggtcatcacggacatgaactacgagcccatc

SEQ ID NO: 408653 - DNA, 318 bp, Oryza sativa
gtgaaaagaaaaaaaaaaagagataaaaaaaaatctcctcctcctcctcctcgccgccgccgccatggacgcctccgccggaggcggggggaactcgctgccgacggtgggggccgacggggccaagcggcgggtgtgctacttctacgacgcggaggtggggaactactactacgggcaggggcacccgatgaagccccaccgcatccggatgacccacgcgctgctcgcccactacgggctcctcgaccagatgcaggtgctcaagccccacccggcgcgcgaccgcgacctctgtcgcttccacgccgacgacta

SEQ ID NO: 408654 - DNA, 419 bp, Oryza sativa
attggcaattacagtgatggaaaccttgttgccactctgctggctcacaaattaggagttacccagtgtaccattgctcatgccttggagaaaaccaaataccccaactcagacatatacttggacaagtttgacagccagtaccacttctcatgccaattcactgctgatcttatcgccatgaatcacactgatttcatcatcaccagtacattccaagaaattgctggaagcaaggacactgtggggcagtatgaatcacacattgcattcacccttcctgggctttaccgagttgtgcatggcatagatgtttttgatcccaagttcaacattgtctttcctggagctgacatgagtgtctacttcccgtacaccgaggctgacaagaggctcactgctttccaccctgaaattga

SEQ ID NO: 408655 - DNA, 385 bp, Oryza sativa
ttcagcagcagcagcagctgagcttgaagcagcagagcgaggtagacatggccgccgccaccatggccctctcgtccccggcgctggccggcaaggccgccgcgaaggtgttcggcgaggggcgcatcaccatgcgcaagtcggcggcgaagcccaagcccgccgcgtcggggagcccgtggtacggcgccgaccgcgtgctctacctcggcccgctctccggcgagccgccgagctacctgaccggcgagttccccggcgactacgggtgggacaccgcggggctctccgccgacccggagacgttcgccaagaaccgggagctggaaggtgatccactccaagtgggcgatgctcggcgcgctgggctgcgtgttcccggagc

SEQ ID NO: 408656 - DNA, 394 bp, Oryza sativa
tttcctccaagtctccgtcggatccatcctcccctaccccgcgaaaccctagcctcccgagcccctcgccgccggcggatggcgacggcttgatcggccctggacacccgccccgcctcgcctcgcctctgcctctccccgctccccccgcgcatctgatgttcctctcccgcatcgtcctccgcgacctggactccatcgactcccccgccgcctccatggcgtcctccaagaagctggtgacccgcgacgagtgggagcggaagctccgcgacgtcaagatccgcaaggaggacatgaaccgcctcgtcatgaacttcctcgtcaccgagggctttgtcgacgctgcggacaagattcgcgtcgagttccgcacccaaccggatattgacct

SEQ ID NO: 408657 - DNA, 404 bp, Oryza sativa
cttccccccagccatcggcgacgcgaggacgcgacgcgccccaccaaccaccaccgcctccgccgacctcgccgccatgctgtccgcgcgcgccgccgccaccgccgccgccgccgccgcctccccgctgtggaagcgcggcgagggtggcagcagcgggagcgggagcggatgcacgagctgcagggaggtgcggaggagggccgcggcggtgagggtccgcgcggcggcgccgaggagggtggaggcggtcgcgatggagtccgcggcggagaccgagaagaaggaggaggttgcggcggccggcggcggggttgaggacatggctaccgaggaggtgcccgtcacgccatgggccttctccgtcgcgagtggttacacccttttgagggatccacatcaca

SEQ ID NO: 408658 - DNA, 235 bp, Oryza sativa
tgttatatcctctcttctcctcgtgcccaccaccagcaccgtagcaatggcgggcagcgggccgatcaacaaggaggacccgctcaactggggcgcggcggcggccgagatggccggcagccacctcgaccaggtgaagcgcatggtggcgcagatccgcgagccgctggtcaagatccacggcgccaccctccgcgtcggccaggtggacgtcgtcgtccaagccaaggacgcc

SEQ ID NO: 408659 - DNA, 484 bp, Oryza sativa
gtgtcacatcacacttgtagcttctgttgtgaaggctgactctttaagagaattcagaaccccagattttcacccaactgcaagcgatgacaatttttatttgaaagttcagattaaagatacgggctgtggcattagccctcaggatctacctcaagtatttacaaagtttgctcaatctcagcctggaggaaacagaggatacagtggtagtggtcttggccttgccatttgcaagaggtttgttactttgatgggagggcacatctggttggatagcgaaggaacaggaagaggctgcacagtaacgtttgtcatccagcttggcatatgcgataatacgaatgcatatcagcagaagctgattcctctagtctggccaagcagtggggatgctgattttgttggtcccgtgccaaatgctcctaatgaagagaaaggtcaggcttctctgaatctcggtatcagagaagtatatgagcta

SEQ ID NO: 408660 - DNA, 251 bp, Oryza sativa
atgcggttcggttccgtggttcgtctagggggtagtgggttgagatggcggcgccggatgtccagtaccgctgcttcgtcggcggcctcgcctgggccaccgacgaccgctccctcgaggccgccttctccacctacggcgagatcctcgactccaagatcatcaacgacagggagacggggaggtcacgcgggtttggcttcgtcaccttcttctccgagcagtcgatgcgcgacgccatctagggcatg

SEQ ID NO: 408661 - DNA, 477 bp, Oryza sativa
ttttagcttattagcggccatgtgcggcggagcaatcatctccgggttcatcccgccgtcggccgctgcggcggcggcggctgcggcggccaagaagcagcagggcaggagggtcacggccgacgtgctgtggccggggatgctgcggaaggggaaggcggcggcggcggaggaggactttgaggccgacttccgcgagttcgagcgtggcatgagcgacgacgaggcggaggggggcggcggcgaggaggaggaggacgacgacgacgtggtcgtggtggtccccccgccggcggcggcgaggttcgtcgtccgtgccgcggccaaggcggcgcccccaactgcagatgggatgttgactacaaagcttgtgcaacatgatggacctactgctagatcagcaaagcacaagaggaagaatcagtacagggggatccgccagcgcccctggggcaaatgggcagctgaaatccgaga

SEQ ID NO: 408662 - DNA, 299 bp, Oryza sativa
gtatcgagaaggtccaggacctcctcctgctgggtgttacccctctctctctcggggtggagactgctggcggcgtcatgaccgtcttgatcccaaggaacaccaccattcccaccaagaaggagcaggtcttatccacctactctgacaaccagcctggtgagctcatccaagtttatgagggtgagaggaccaggacacgtgacaacaacctgctgggcaaagttgagctctctggaatcccttctgctcccaagggtggtgcacagatcactgcttgctttgacattgataccaat

SEQ ID NO: 408663 - DNA, 347 bp, Oryza sativa
cttttccatcgccggcgagagagagagagttagctagctaggatgggttctacagccgccgacatggccgcggcggccgacgaggaggcgtgcatgtacgcgctgcagctggcgtcgtcgtcgatcctgccgatgacgctcaagaacgccatcgagctgggcctgctcgagacgctgcagtccgccgccgtcgccggaggaggggggaaggcggcgctgctgacgccggcggaggtggccgacaagctgccgtccaaggcgaacccggcggcggccgacatggtggaccgcatgctccgcctgctcgcctcctacaacgtcgtcaggtgcgagatggaagagggcgc

SEQ ID NO: 408664 - DNA, 345 bp, Oryza sativa
gtgtgtagcagcaacaacatttggccgctctgaagattggtgacggagaatgcccggcggctccctcctcaatagcggcggcatggcggactacggcggcggtggcggcagcggcggcggcctcacgttcccggtcgtggttacctgcctcatggcggccctccgtggcctcatcttcggctacgacattggcatctcaggtggtgtgtcggagatggagtcattcctggagaagtccttcctggcttgctgaaggggacggcgcacgccagcaaggacgtgtactgcatctacaacaggcaggcgctcacggcgttcacctcgtcgatgtacgcgttccgcatg

SEQ ID NO: 408665 - DNA, 321 bp, Oryza sativa
ttttagagagagaggagacgccaccacgcgcacggagctcgcgattccaatccgggcacgcctcctccgccaccgccggctcggcctccgccgccggcgcgaccaggatcacagctgcgatggaacacaaggaggctggctgccagcagcccgagggcccaatcctttgcatcaataactgcggcttctttggcagcgcggcgaccatgaacatgtgctccaagtgccacaaggagatgatcatgaaggaggagcaggccaagcttgctgcctctccatcgatagcattgtcaatggttgtgacgggggaaagagcatatt

SEQ ID NO: 408666 - DNA, 405 bp, Oryza sativa
ttatcagcagcagcagctgagcttgaagcagcagagcgaggtagacatggccgccgccaccatggccctctcgtccccggcgctggccggcaaggccgccgcgaaggtgttcggcgaggggcgcatcaccatgcgcaagtcggcggcgaagcccaagcccgccgcgtcggggagcccgtggtacggcgccgaccgcgtgctctacctcggcccgctctccggcgagccgccgagctacctgaccggcgagttccccggcgactaccggtgggacaccgcggggctctccgccgacccggagacgttcgccaagaaccgggagctggaggtgatccactccaagtgggcgatgctcggcgcgctgggctgcgtgttccccgagcttctcgcccgcacggcgtcaag

SEQ ID NO: 408667 - DNA, 500 bp, Oryza sativa
gtgcctgccatgtcgccgacggccagtccgatgtcggcgcccgccggcagcagcagcttctactcccccttcgggctccacgtgcagcccgatcactggagcttcttccatgaccacgagcccgtcttcttcatgcccgacttcaagttcgccgccgccgccgccgccagcgcgcagcccaagcccacctccgccgccgacatgccccacaagatcgtcaagcaggtcgagtaccaattcagcgacattaacctcgtcgccaacgagttcttgctcaagatcatgaacaaagattctgaaggttacgtccccttatccgtgattgcttcttggaagaagatcaagtctcttggagcaaccaatcaaatgctggtcaaggctcttcgcacctccaccaagctgattgtgagtgatgacggcaagaaagtccggcggaggcagccattcacggagaagcacaaggaggagcttcagtcacggatgatcatagcttgagattt

SEQ ID NO: 408668 - DNA, 487 bp, Oryza sativa
atttgttttagcaactgcacagaagctgtttgtaaagatgctatggtgtgtttttcgagcgccaatgtcattctttgatactacaccatctggtcgaattttgaaccgagtttctgtagatcaaagtgtcgtggaccttgatatagcattcagacttggtggatttgcatcaacaacaattcaactacttggaattgttgctgtcatgagcaaagtcacatggcaagttttgattcttatagttcctatggctgttgcatgcatgtggatgcagagatattatattgcttcatcaagggaattgactaggatcttaagcgtacagaagtcgtcggtgatccatttgtttagtgagtcaattgctggtgctggtacaattagagggtttgggtcagagaaacgattcatgaaaagaaatctttaccttcttgactggtttgcttggtcttttttttcagcctggcagctattgaatggttgtgcctgc

SEQ ID NO: 408669 - DNA, 236 bp, Oryza sativa
tcggtttattagtgtcaagatggctactactaagcatttggctcttgccatccttgtcctccttagcattggtatgaccaccagtgcaagaaccctcctaggttatggccccggaggaggaggtggaggtggaggtgaccttgatattacagctggatctggaggattggcatggacaccagtgcaattacttggaattgttgttgtcatgagctaagttacatggctggtttgga

SEQ ID NO: 408670 - DNA, 428 bp, Oryza sativa
atttgtgatgggggtcttattgtgagtgttcttgagatggcatttgctggtaattgcggtgttaagctgaacattgactcagaagattcgggccttcttcaagcactctttgccgaggagcttggccttcttcttgaagtgcacttgaaagatctcagtgttgtgaagcaaaagcttgaagcaggaggcatttccgctaatgtaattggacaagttacagcatcaccagatattgagctagttgttgatggcaggctgcatctcaaggaaaaaacttcagatctcagggatatctgggaggaaacaagcttccagcttgaggggctacaacgcctgaaatcttgtgtcagacttgagaaagaaggacttaagcacagaacatcaccattggggtctttgtcttttacttccaaatttacagatgaaaa

SEQ ID NO: 408671 - DNA, 407 bp, Oryza sativa
gcattgttactggacatactctactactactagccagtaagctagctaactaactacgtggctatggcccccaccgtgatggcctcctcggccacctccgtggctccattccaagggctcatgtccaccgccggccttcccgtcagccgccgctccaccaactcgggcttcggcaacgtcagcaatggcggaaggatcaagtgcatgcaggtgtggccaattgagggcatcaagaagttcgagaccctatcgtacctgccaccactcaccgtggaggatcttttgaagcagatcgagtacctccttcgatccaagtgggtgccttgtcttgagttcagcaaggttgggtttcgctaccgtgagaaccacaggtcttccggatactacgatggcaggtattggaccat

SEQ ID NO: 408672 - DNA, 398 bp, Oryza sativa
tttcttctcctctccaaaccctagcaaaggctatctctctcttcgccgccatggaggatgacgacgcggggggcggaggcggaggcggcgaggcgtccccgccgcacgcgggctccgccgcggcgatggcgggggcggggagggacatcgcggcgtcgccgacgagctcgcggtcggtgacgcagacggtgaacgggtcgcacaggttcgtgatccaggggtactcgctggcgaaggggatgggggtgtgggaagcacatctcgagcgagacgttcacggtgggagggtaccagtgggcgatctacttttaccccgacggggagaaccccgaggacaacttcgtctacgtcttcgttttatcgcgcttgcctcctagggcacccgcttccgggccctt

SEQ ID NO: 408673 - DNA, 369 bp, Oryza sativa
ttttcaccggcttctttcccctcctctccggaccagggaagcagctaactgtctgcgcaagaaaggtggttcaagcacgatgggacggaaccatctttgcctggtcacttgcttgtggattctgtcatgcgcagttctgcttcatgcttctcctgatggattgctgagaattagcctgaataagaagagattggacaagaagaccttggacggtgcaaaattggcaagggaggaaagccatcgtctgagagccgacggtttaggtgatgacatagttcctttggacaactacctggacacgcagtactttggagagatcggcattggcactccaccacagaacttcactgtgatatttgacactggaag

SEQ ID NO: 408674 - DNA, 381 bp, Oryza sativa
tttttgttcagggggtactgtatggctagtagccaggatgctagctaactaactacgtggctatggctcccaccgtgatggcctcctgagccacctgcgtgggtccattccaagggctcaagtccaccgaaggtcaggctaaaagaggctaaataacctgacgagcgatatggcaacatcaggaaaggcggaaggatacatcacctacacatctataattgatgggggttgtaagagtgtgagggcctatattgcctgtcaaggtcttgaagatgatggaacttgagggttgactggcaaacgcctggacccacaagagtttgctggttcgggttcaacaagatataaaactacataaggcgatggctcttttaactcaga

SEQ ID NO: 408675 - DNA, 384 bp, Oryza sativa
caactgactggagtatgggaagcgccctctgcccatgcacagagcctgaacataatgtatccacacccctgacaagctggaaagactactataggtggagatcgcttcctatgcaatcacctgttgctgttttacttcactggccacttactttatatcattgcgttcaactatcgcaccttcaaaccttaaaatatgatggccaagacactctatgtattcactatttaggacctgagaaagaactacatcagcttgcggggtttggggaactacgtgcactatttccaggtgtccatatttacattgaacttgtgggaccagcagttccaaaatctaaggaaggagagccttgaactatttcaaactatgcacaatgttgtg

SEQ ID NO: 408676 - DNA, 272 bp, Oryza sativa
ggttcgtcgccgctgtacgtctactccagcacgttccccgacggcatcggccaccgcgacgacctcgtcggcgtcctctccctcatcctctacaccctcatcatcatccccatgctcaagtacgtcttcatcgtcctctacgccaacgacaatggcgacggtggcacgttcgcgctctactcgctgatctcccggtacgccaagatcaggatgatcccgaaccagcaggcgggggacgccatggtgtccaactacagcatcgaggcgcccag

SEQ ID NO: 408677 - DNA, 496 bp, Oryza sativa
gattccaagccctaaacctcccgaatcggtcgaggcggtgctcgatccggccgttgcatctccggattcgagcggggggcgttgccgcggtgcccggatccggaggaatcgcgccgcggcgggttttctagggttccacaccgtcgcgcgtcccggcgggtgttcatgaaggccatggggtacaataacccctacgattccagcgggactgacgacgatctccctccaacacaaaatagaggattaagagtgcgatcttttagtgcgaatggcagggcatctgttatgccattttcttacattaggccgcacggtgatttggagagtgaaatacatcaggttgagcaagaggcgtacactggtgttcttagagcatttaaagtgcaatctgatgctatattctgggaaaaagaaagattgatcactgcactcaggaaagaaataagagtctctgatgatgaacacagggaactattaaacaaagttaatgaagatg

SEQ ID NO: 408678 - DNA, 254 bp, Oryza sativa
ggccctcaccgggggacttccatttcctgctcctcgtgttctcccacctccaatctcaggatggagcgcgcacgccgcctcgccaaccgcgccctgctgcgccgcctcctcgcggcggcggcgtccaccacgtccccggccccgtcccgcggcatctcgaccctggccaaggcgcccgggggcggggtcgtgcccacgcgccccgtgcccggcgccccaccagtacaccacggggtggtccgtgtcggcgtcgg

SEQ ID NO: 408679 - DNA, 459 bp, Oryza sativa
catatttagctacaagcgagccaatatcaagggcagggtacatctactgctacttcttctactgtggttccagaggatcttgtgcagatacaatcatatcttcggtgggaaagaaagggaaagcagtcatatacacctgagcaagagaaggaggagtatgaagcagcacgaactgagttgatagaggaattaaacaagggtgtttctttggagaagctacgagcgaaactgacaaagacacctgaggcaactgatagtaatgctcctgcatctgaaagcactgtgactactaaagtcccagaggaacttgtacaagttcaggcttacataaggtgggagaaagcagggcagccaaattatgccccagagaaacaattggtcgagtttgaggaagcaagggaggaactgcagtctgagttggataagggaccctagtgagcagttgaggaacaaattttg

SEQ ID NO: 408680 - DNA, 491 bp, Oryza sativa
tccacgcgtccgcccacgcgtccgcagcacactgcaacttaagtttttctatagctcctagcaagctagaaatggctccctcggtgatggcttcgtcggccacctccgtggctcccttccaggggctcaagtccactgcgggcctcccggtgaaccgccgctccagcagctcgagctttggcaacgtcagcaatggcggaaggatcagatgcatgcaggtgtggccgattgagggcattaagaagttcgagactctgtcgtacttgccgccattgacagtggaggaccttttgaagcagatcgaggacctgctccgatctaagtgggtgccttgcttggagttcagcaaggtcggattcgtctaccgggagaatcacagaacacccggatactatgaccgtaggtactggaccatgtggaaactgcccatgtttggatgcaccgatgccaccccagtgcttcaggggctcgaggaggcaaagaaggcatac

SEQ ID NO: 408681 - DNA, 516 bp, Oryza sativa
tacatctgggcaaacaaatgtagtgccacagaaagatgttaacctgtacaaagatacattcattactagtttagcagaggttcctggcctgattttatctgctgttcttgttgattggtttggccgaaaagcttcgatgtggttcatgttattcacatgctgtgctttcatcggaccacttgtgcttcagcagaatgagctgttgacaactgtccttctatttggtgcccgcgccgttgccatgggtagcttcacagttttatgtttatatgccccagaggtttatccaacatctgcgcgctcaaccggtgttggcatcgctaccgctattggcagaatcggtggggttgattgccctcttgtcgtcgttggcatgttgagaagctgccaccagatggaagccatccttgtttttgaggctgttttatttcttgctggagttgcctgctttctcttcctattgagactaaggggcgtggaatggattgatgttcatgctgcactttttttttaaag

SEQ ID NO: 408682 - DNA, 426 bp, Oryza sativa
ctccgttgcgcagccagcttcgctcgcccgctacctcactcactctcgggtgagcgcggccaccgctgccggcgacgaggtagggaggaggaggagggcaagatgttcgggcgggacccgtggggcgggccgctggagatctcgaatgcggactcggcgacggacgacgaccggagccgggacctggacaggggggcgctgatgcggcagctggacgagacgcagcagagctggctcctggccgggccgggcgaccaggccggcaagaagaagaagaagtacgtcgacctcggctgcatggtcctcgaccgcaagatcttcatgtggaccgtcggcaccattcttggcgtcggcctcttatcggcttcgcatgatgatcgcaggtttcgtcctcacaagcgcccccctcttcttcccccgaccagt

SEQ ID NO: 408683 - DNA, 311 bp, Oryza sativa
aatgatcaggggttgttttatgcattggatcttggaggaaccaacttccgcgtcctgcgagtccaactcggtggcaaggagaaacgtgtcgtccaacaacagtacgaggaagtctcaattccaccacatctgatggttggaacttccatggaactgtttgattttattgcttctgcattgtcaaaatttgttgatactgaaggtgatgatttccacctcccagaagggagacagagagagctgggcttcaccttttccttcccagtgagccagacatcaatatcgtcaggaacgctcattaagtggacaaa

SEQ ID NO: 408684 - DNA, 384 bp, Oryza sativa
ggaaaacaaaataatttactttagtcccccaacttatacaaatttacagcaccaaaagtttcagaaagctgcgtgccaggccatgcggaactgcaggttatggcaaccgcagaagctgaaacagcaacagtaacatcaagttaactacaaagaaccgtaaaatagtatcatcaccatgttcatctagacatagtagaaaacattcacactctcgaaatgctctctatctttcagttttgggttgctatacgtcttcttgttttgcattttttttagtattccatttctgttcagcagagtggcagtggcgcgccattccattccttgaggcattcgagcagcgggtcgatgtgcttgcgctcgttgatggcgaagagcaccttg

SEQ ID NO: 408685 - DNA, 466 bp, Oryza sativa
atcctcttctccaccaccgtcctcgtctacctccaggacaacgtcagctggaccgtcggctacggcatccccaccctgggcctcatggtctccgtcgccgtcttcctctccggtacgccgctgtaccgccacaaggtgccccagggtagccccctcgccacgatggggagggtcgtcgccgccgccgtgtggaagtggcgcgtcccgctccccgccgactccaaggagctccacgagctcgagctcgagcactacaccacccgccgcgggttccgcatggacgcgacggtgtccatggcgttcctgaacaaggcggcggtgaagccgggcgaaggaggaggaggatcggtggcgcggctgcccgggtggacgctgtgcacggtgacgcatgtggaggagacgaagcagatcgtgaagctggtgccgctgctcgccacaatggtggtgccgtgcacgctggtggcgc

SEQ ID NO: 408686 - DNA, 438 bp, Oryza sativa
ctccgaccgcgacgacacgagacttttcctgcctccgccgccggtctcggcgtggtgccctgaggcggcgaggccgccgtgagatctcagctccgccgcccgtgggaatcgagctccggccccgtgccttttcctgcccccccagctgaaaaatggggaggataccgtctctgaaaaatttcaatgccttcccccatgcggaagaccacttactaaagaagacttactctggtgctatcgtcacgattttcggactaattataatggttacgttatttgcgcacgagctcaaattttatcttaccacctatactgttcatcagatgtctgtagatctgaaacgaggagaaactctgccaattcatataaatatgtcatttccctctctaccatgtgaagtcttgagtgtggatgcaattgacatgtctggcaagcatg

SEQ ID NO: 408687 - DNA, 520 bp, Oryza sativa
ggcggccgtgagcaccaacactcacgcattccttcctactccgcgagatctccggattcgtttcggtgttttgcgagtcgcgcccggagaagaggagaggaaatccggtcaatcgcggcgtcggcgtgccgtcgcttggggtggtgttggtggttctgaattttgattgcttcgtgcttttcgtttgggggagggcagtggtcgccatgggattggggaacgaggcgagctcgtcgtcgtcgcggctgctggatccggcgcctctgctgccgcaccacggtggagatggcgccgggaagctgtcgtcgcagcccaagaccttcgcgaacgttttcatcgtggtggtcggcgccggcgtgctggggctgtcgtacacgttcttgcggaccgggtgggcggcggggtccatcctactgctctccgtcgcggcgctcaccttctactgcatgatgctggtcgttcgctggcggcgccgtcttgtcgaccagcacccggggaacgccttctttggggactgggg

SEQ ID NO: 408688 - DNA, 475 bp, Oryza sativa
aatacttcagttcgcacagacaaaggttcttgagatgctgatctcaattctcaactataaaatagcagctaaatagcacggtagatcttcagatgccaactctccaggttcatagtgacaaggcattttagacctcatagatccatgggtgctggttgctcctccactcggcgatgccctcagggaaccacagagcaatctccttcctggcgttctcgaccgagtcgcttccgtggatgacattcctgcaaggtatgaggtcatctttagaacttggattctggatacatatttaggtctatgaacagatgagaactcaaagggataacatgagtactagtagaaaggtaaatttgaaggactctagagcaccatttggtgttctgtcgaccatacttgttcttacatactccctccatatcaattgatctacgtatagtttttttgaggttatttctaaatgatctacataatt

SEQ ID NO: 408689 - DNA, 458 bp, Oryza sativa
gtttcgctccatcgacggcggcgccgcgttcggcttcccggacacccccgaggacgccgcccgcgccggcctcgtcagcggcaaggaccagatcatcgaccggagcatccaggacgcctacatcgccgccattaggagggcgcggagcttcatctacatcgagaaccagtacttcctcgggagctcctactgctggaagcccaacgacggcgtcaagccggaagatgtcggcgcgctccacctcatccccaaggagctctccatgaaggtggtgagcaagatcgaggccggcgagcgcttcaccgtctacgtcgtcgtgccgatgtggccggagggcatcccggagagcggcttcgtccaggccatccttgactggcagcgccgcactatggagatgatgtacaccgacatcgcccacgccatccaggccaagggcattgacgcccaccccaggacta

SEQ ID NO: 408690 - DNA, 466 bp, Oryza sativa
cccagctcgcgcgcgcgcgctcggactgacccccacccccaccgaggcaaagcctcgtactacttccctacaccaccaccgcgcgccgtacgcgcggctgcggctgcggctgagggcgaagccctccacctgctggcataactagtcggagagataactaaccaccaaactaataaacccgtcctccctctccacccgatgggctcaatccggagtatgctacgcctgaaatgagaccgtccaattctggacgagccgaggtgacgcatgaaggacatcgacatgaggatcacaagcatgggctgatggaagacgatggacatataaggcatcccacaggccatcctcaaggccctcgtcggctactaccagaagtacgtcgtaagttttttggattaaagggggcatggccatttttggccgataggagcgtactttacttatggccgaccccaggcgctgcgag

SEQ ID NO: 408691 - DNA, 391 bp, Oryza sativa
gcttaccttgagaatgtaccaatagaaaatgggggctcttcagaaaagacagaagacgagtctcgaccattggaggatggcactggagaagcttctagatcaaggaacttgtattttgcaattggtgatgccaagtgccgggctgctgtccaactcctattgattcaggctgtgatggagatatataacatgtacagagctcggttatcatcacagaacactgtgatcctctttgaggcattgcacactgttgctactcatgctcataaaataaacagtgataatgacctgcgatccaagttgcaggagttgggctcgatgacccaaatgcaggacccacctatgttacgcctggagaacgagtcgtatcagttgtgcttgactatcctgc

SEQ ID NO: 408692 - DNA, 459 bp, Oryza sativa
ctctcccgcaccaagccgcctgagccctagccgccgccgccgccgcgcgccaccaccgccgcaaccatggccgccgtgctcacccgcccgccgccaggcacggtccagtgcttcgggcgcaagaagacggcggtggccgtctcctactgcaagccggggcgcgggctgatcaaggtgaacggcgtcccgatcgagctgatcaggccggagatgctccgcctcaaggcgttcgagcccatcctgctcgcggggaggtcacgcttcaaggacatcgacatgaggatccgcgtccgcggcggagggaagacgtcgcagatctacgcgatccgccaggccatcgccaaggccctcgtcgcctactaccagaagtacgttgacgaggcattcaagaaggaggtcatggacatctttgcccgctatgaccgcactctactcgtcgccgacccaggcgctgcgagc

SEQ ID NO: 408693 - DNA, 449 bp, Oryza sativa
gattgatcgaggcgtggagaagatggccgggaggggccccggcatggtccccatggagatcaagttcacccccgccgccaagaacgtcctccaggcctcccaagaagaagcgcaccagctagggcataactatgttggatctgaacacctcctacttgggttgctccgtgagcatggtgccgcgcttgttgtgctgaagaactttcaggctgatcccagcaacatccgcagtgaggttatccgaatgatcagtgacacctctgaagatcatcaacctgttagtgctgcagttgggggaggaagcagtacaactaagatacccacacttttagagtatggtactaatctgacaaaactagcagaggaggggaagctggatcctgttgtcggaaggcaaaaccaggttgaccgtgtagtgcagattcttggcaggcggaccaagaacaccc

SEQ ID NO: 408694 - DNA, 315 bp, Oryza sativa
atcgtttatctccccaagcatggtgtgctgtgggaaattgctttgccttgaggaaagatcatgagactgccttgaagaattttcaacgtgctgtacagcttgactcaagagttgcatacgctcacacgctatgcggtcacgagtattctgcattggaggattatgagaacagtataaaactataccgctctgcactttaggtagatgaaagacactacaatgcctggtatggccttggagtggtgtacctttgccaggaaaagtttgagtttgctgagcatcatttcagaagggcattccagataaatccttgct

SEQ ID NO: 408695 - DNA, 229 bp, Oryza sativa
ggctcgtctccagctcctccgcccccgccctcgccgacgcctacgacatcccgtgggtggagaagtaccgccccacccgcgtcgccgacgtcgtcggcaactccgacgccgtcgcccgtctccaggttattgtccgcgacggcaacatgccaaacctaattctcttcgggcctctgggcaccgggaagactaccagcctactgttgttgggacacgagctggttggacc

SEQ ID NO: 408696 - DNA, 441 bp, Oryza sativa
atatatatatatatatatatatatatatatatatatataccaaaggaagaagtgtcagtggtacaagagtatttggatgtatttcctgaagaactaagtgaattacccccagatcgggagatagaattcatcatagagttacttcctggaacgacacctatatcaaaaagaccttataggatgccaattaatgaattagaagaattaaagaaacaaatagccaagttagaaacaaaaggttttattcgactaagttcttcaccttggggagctcccgtgctatttgtcaaaaagaaagatggaagcttaagaatatgtgttgactaccgagctataagtgaagtgactgttgagaacaaatatcccttgccaacgaacgacgatctatttgatccattaaaaggagcttgcgtattttttaaaatagatcttcgatcgggg

SEQ ID NO: 408697 - DNA, 382 bp, Oryza sativa
caacaaggcacactcttcctacctcttctccggagagctcgatcgctgcaccaatacttcactggagatcgcctagctgcagctagctagcttatcctgcgtgtcttgagcttctctcatggaggagatctcccaccacttcggggtcgtcggagccagcggcgtccatggcggccaccagcatcagcatcaccaccacccgtggggttcttccctgagcgccatcgtcgcgccgccgccgccgccgcagctgcagcagcagcagacgcaggccggcggcatggcgcacacgccgctcacgctgaacaccgtggcggcggcggtcggcaacccggtgctgcagctggcgaacggcagcctgctcgacgcgtgcggcaaggcg

SEQ ID NO: 408698 - DNA, 458 bp, Oryza sativa
gccatctctctcagctctcacagctcactgcatcaatggccgcggccaccatggcgctctcctccccggtgatggcccgcgcggcgccgtcgacctcctccgcgctcttcggcgaggcgcggatcaccatgcgcaagaccgccgcgaagcccaagccggcggcgtcgtcggggagcccgtggtacggcgccgaccgcgtcctctacctcggcccgctctccggcgagccgccgagctacctcaccggcgagttcccgggcgactacgggtgggacaccgcggggctctccgccgacccggagacgttcgccaagaaccgggagctggagggtgatccactcccggtgggcgatgctgggcgcgctcggctgcgtcttcccggagctcctcgcccggaacggcgtcaagttcggcaggccgtgtggttcaaggcgggctcgcagatcttcagcgagggc

SEQ ID NO: 408699 - DNA, 451 bp, Oryza sativa
ttgggcacgaagcgtcgtcagccgccggtgctgagcatggacgagatcatcgacgagtgcaagaccttcttctttgccgggcaggagaccacctcgcacctcctctcctggaccatgtttcttctcagcacgcacccggactggcaggacaagctccgggaagaagccgtgagagagtgcgccggcgccggcgccggggacgacgacgaccagctccccacctacgacatgctcggcaagctgaagctgctaaatcagttcttactggagacgctgcggctgtacagcccggtgccggcgatccggaggcggacggcggcggcggtggagatgggcggcgtgacggtgccgggaggcacgatgctgacgttcccgatcgcgacgatgcaccgcgacgaggaggtgggggcgcccccacgccgggggtgttcgacccgatgaggttcgacgg

SEQ ID NO: 408700 - DNA, 490 bp, Oryza sativa
gttggcttctcctccccctcccggttcggttcggttcggttcgggtccggttcgatttcggtttttccttcggttcgggggttggtgggaaagcatggcggcgccggatgttgagtaccgctgcttcgtcggcggcctcgcctgggccaccgacgaccgctccctcgaagccgccttctccacctacggcgagatcctcgagtccaagatcatcaacgatcgggagacggggaggtcgcgcgggttcgggttcgtgacgttctcgagcgagcaggccatgcgcgacgccatcgaggggatgaacggcaaggagctcgacggccgcaacatcaccgtcaacgaggcccagtcgcgccgctccggaggcggaggcggcggtggctactgtcagcgcggcggaggcggaggctactgtggcggcggctactgtggtggtggcggcggcggtggctactgccagcgccctgaaggcggttaccgcggtggctgt

SEQ ID NO: 408701 - DNA, 374 bp, Oryza sativa
cgccgtgccgccgccgaacacaccccccccaccccccctccccacacgcctccgcctcctcgcaccgaaccgcctcggcgcgagcgcgagggagagagctcctcttctccttcacggcggttgcgcggtgtggtcccgatccaccggggacgcgtctggatctgatctaggagcggtcgcttcttcctcttccggaagccctttttatcagtcatgtacggacgcatgccaaagaagagtaacaataccatgtattatgaggtgcttggtgtatttaagacagcaacccacgatgagctgaagaaagcgtaccgtaaagctgccattaaaaaccaccctgaaagggtggagaccctgggaaggttaaaggattg

SEQ ID NO: 408702 - DNA, 111 bp, Oryza sativa
attgtttgcaaagctggtcgtgtcactcctcccgttaagcttcccgcggcggcgagagcaagctaagctaggtcgggcatggggaaggacgaggtgatggagagcggcgga

SEQ ID NO: 408703 - DNA, 393 bp, Oryza sativa
ctcgcttccacgcaagattaaaagctgcccctcttgctgctgcagactgcagtcctgcaagatcagcgcctgaagcaagaagcgaagaatcaaacgagagcctagcagcgtagcagatcgatcgatcgatcgatattatggaggcgcgaggaagcagaggaatgcggctgtggctcctgtccgtggcggtgatggccatggcgatggcgacgaggtcgcaggcgcagctgcaggtcgggtactacgacacgctgtgcccggcggcggagatcatcgtgcaggaggaggtcagcaaggcggtgtccgggaaccccggcatggccgtcggcctcgtccgtcttcactttcacgactgctttcgtagggggtgcgacgcgtccgtgctgctggact

SEQ ID NO: 408704 - DNA, 438 bp, Oryza sativa
atcagttcagcgtgaagcagcggcaagaacacaaaaatggcggacgagaagctcgccaagctgcgtgaagccgtcgccggcctctcgcagatcagtgacaacgagaagtccgggttcatcagcctcgtcgcccgctacctcagtggcgaggaggagcatgtggaatgggcaaagatccacacgccgacggacgaggtggtggtgccgtacgacaccctggcggcgccgtcggaggacttggaggagaccaagaagctgctcaacaagctcgccgtgctcaagctcaacggcggtctcggcaccaccatgggatgcaccggaccaaaatcggtcatcgaagtgcgcaacggattcacattcctcgacttgattgtgatccagatcgagttcctcaaacaagagtatggcagcaatgttccactgcttctgatgaactca

SEQ ID NO: 408705 - DNA, 236 bp, Oryza sativa
ccttatactcggcgtcgcgccgcctcaaccgaagcaaggagcaaagcggggattcagaacgggaaggagaaggtccggttcgtccgctctcgagctcaagtgtcagttgaagtgttttgaaagtcatggcggagcatttggcttcaatatttgggactgagaaggatagggttaactgccccttttacttcaagattggggcttgccgtcatggggatcgttgcttccgtctgcac

SEQ ID NO: 408706 - DNA, 432 bp, Oryza sativa
ttttgcttctccattcgccggcgccgcccgaaccaatcgccccgaggaggaggagacctagggtttcctcgtcctcgtcgtcgtcgtcttcccccgcgccgccgcccgctcctcccttcgtctatccccggaggtttgagaagagttgcttgtcctaaaatgaggccagttttctgtggaaaccttgactatgatgctcgccaatctgagattgagcgcctcttcagcaaatatggacgtgtggagcgtgttgacatgaagtcgggatatcatggagcatttttgctcttcctggatgatggactgggctctacctttcctgcctgagccccgctcattttttgtccatttccaggagctcagagtccctcctggcatctgttcacttggaaacaaccaccttgtgaatgatgcccttcttttaccatcagc

SEQ ID NO: 408707 - DNA, 510 bp, Oryza sativa
gcttctcgctcgctctcctgccctgtttcttggagaagtgagcttaagtgagagcctctgtccctcgcacacgctattggccatggtggttctcgctggcccgcccgccgtcgatcacatcccgctgctgaggtcgccggaccccggcgacgtcttctccggcgtgccggtcgtcgacctcggcagccccggcgcggcgagggccgtggtggacgcctgcgagcggtacgggttcttcaaggtcgtcaaccacggcgtggccacggacacgatggacaaggccgagtcggaggccgtcaggttcttttcccagacgcagcccgacaaggaccgcttccgtccgggctacccgttcgggtacggcagcaagcggatcgggttcaatggcgacatggggtggctcgagtacctccttctcggcttgacgacgcgttgctcgccgacgctgcaccgttccgtcctggcggctttcgggccgtttgaacgagacatttggggtgccgaagtggc

SEQ ID NO: 408708 - DNA, 479 bp, Oryza sativa
  unsure (1)..(479): unsure at all n locations
cttcaccatccatccatccgcgcgcggtgcgtagtagcgagaagagaagggggggagggcaaagcgatggctccgatgaagctgtacgggtcgacgctgtcgtggaacgtgacgaggtgcgtggcggtgctggaggaggccggcgccgagtacgagatcgtgccgctcgatttctccaaaggcgagcacaaggcccccgaccacctcgccaggaacccctttggtcaggtgccggctttgcaagatggtgacttgttcctctgggaatcacgtgcaatttgcaagtatgtatgccgcaggaacaaaccaaagctgttgaaggatggcgacctcaaggagtcagcaatggtggatgtgtggcttgaagtggagtccaaccagtacactcctgcactgaaccccattcttttcagtgcctaatccgttcgatgatgtttggngcaccccccgacgagaaagttgttgaggagaaccttgag

SEQ ID NO: 408709 - DNA, 331 bp, Oryza sativa
cttccatctccaaatccttcttccctaatccccctcgccggcgaagcgcggcggcggcggcggcgccttcttccctaatcccctcgccagcggggagccgcagggcggcggaggcgtgcgtcggctgctgctgctgcgcgggcgggggaggtggggagagatgcacagatccgcgggcgccacgatggcgtggaacgtgttcaggttctgcactgcgctgagggggctgggctccatcatgatcctgctcgtcctctccatcgttggggtcacctactacgcggacgtggtggacaactaccgccccgcgctttttgccggtggggccagc

SEQ ID NO: 408710 - DNA, 379 bp, Oryza sativa
ccttttgctgccctcttcattcgctcgctcccctgctcgccgcgccgccatctagggtttcgtcttctcctccgccgccgaccgccatggctcgccgcagctcagcaaggtctcgccctgcaccacgtgctgctcccgtgaggaaccctccgcagccagcaaggcaggctcctcctccagctcctgcccagaacggaggtggctctatcctgggaggaattggttccactattgctcaaggcatggcttttggtactggtagtgccatggcacatagggctgctgatgctgtaatggggccccgtaccattcagcatgagactgttgtctccgaggctggtgcctctgccacccccatggccaacgccactccatttga

SEQ ID NO: 408711 - DNA, 505 bp, Oryza sativa
cgacagctcgcccctcgacgtcatcgccatcaacgacaccggaggcgtgaagcaggcgtcgcacctcctcaagtacgactccacgctcggcatcttcgacgccgacgtcaagcccgtgggcgacaacgccatctacgtcgacggcaaggtgatcaaggtcgtctacgaccgcaacccgtccaacctgccgtggggcgagctcggcatcgacctcgtcatcgagggcaccggtgtgttcgtcgaccgcgacggcgcgggcaagcacatccaggccggcgccaagaaggtgctcatcacccgccccgggaagggtgacatccccacctacgtcgtcggcgtcaatgccgaccagtacagccccgacgagcccatcatcagcaacgcctgctgaccaccaactgccttgcccccttcgtgaagatgcttgaccagaagttcggcatcatcaaagggacgatgaccaccacccactcctacaccggcgaccagaggctgctcgacgcga

SEQ ID NO: 408712 - DNA, 486 bp, Oryza sativa
gctgcggcgagctcgtgatctcaacgaccaggaggaaaccggcgctcgcctcgatctccgccgcctcgtcccaccatgtcgaagaggaagaccagggagcccaaggaggagaacgtcactcttggacccactgtccgtgaaggagagtatgtgttcggagttgcccacatcttcgcatccttcaatgacactttcattcatgtcactgacttgtctggaagggaaactcttgttcgcattactggtggcatgaaggtcaaagctgaccgtgatgagtcatcaccatatgcagctatgcttgcttctcaagatgttgcacagcgttgcaaggagcttggtattactgctctgcacatcaagctttgtgccactggaggcaacaagacaaagacacctgggtctggtgctcaatctgcttttagggctcttgctcgctctggcatgaagattggccgcattgaggatgtgacccccgtttccacggac

SEQ ID NO: 408713 - DNA, 477 bp, Oryza sativa
ccatccgccgccgcatcgccctcgttagaacgatggccgcgtcggcgctgcaccagaccaccagcttcctcggcaccgcccctcgccgggatgagctcgtccgccgcgtcggcgactccggtggccgcatcaccatgcgccgcaccgtcaagagcgcgccccagagcatctggtatggacctgaccgtcccaagtacctgggcccgttctcggagcagacgccatcgtacctgaccggagagttcccgggagactacgggtgggacacggcggggctatcggccgacccggagacgttcgcgaggaacagggagctggaggtgatccactcgcggtgggcgatgctgggggcgctgggctgcgtctttccggagatcctgtccaagaacggggtgaagctcggggaggcggtgtggtttaaggccggtgcgcatatctttttcagggggggctcgactacctggggaaccccaccct

SEQ ID NO: 408714 - DNA, 325 bp, Oryza sativa
cgctgccttcgccgtttggcccccgaggtaaccgacggacaccaccaccaccgcgccgcctcgcctcgtgaagctccactagtttctagggtttagcctagccccgaccccgaggaggcccgagatcgcaatggagggcggcggcgagggcgcggagtcagcagctgtcgcctccgcggcggcggcggaggtggaggtgaagaacccgaggtgcttcatggacgtcagcatcggcggcgagattgaggggaggatcgttatagagctctacgcgtcggtggtgccgcggaccgcggagaactttcgcgcgctctgcaccggggag

SEQ ID NO: 408715 - DNA, 387 bp, Oryza sativa
atcttttttccagtcaagaaaaaaggaagattacaccaacaaacaaactagctagccaatggcctccttgacatcttttccggctcgccgtggcggtggtggtactattggtaggtgcctcatgtgccactgagctgaccttcaaggtggttcagggctctagcgctcaaagtctagagcttgtcactaatgttgccatctctaaggtggaggtcaaggagaagggcggtaaggactgggtggcgcttaaggaatcgttgtttaacacctggacgctcaaaagtgagtcgccgctcaagggccccttctctgtccgctttcttgtgaagaatagcggctaccgtgtcgtcgacgatatcattcctgaaagctttacagctggctctg

SEQ ID NO: 408716 - DNA, 365 bp, Oryza sativa
tcctgatccaactcacgaattggggagcacacaacaaaattccgatccaaccctaagcccgatccgccctagcacgatcccctcccccctccccggctgcgatccccctgctccacctcagatctccggcgagccgatcgaatcggtggctgcggcggcggcggcggcgcgatgtcggggcagacgcagcgcctgaacgtggtgccgacggtgacgatgctcggggtcatgaaggcccggctcgtcggcgccacccgggggcacgcgctcctcaagaagaagtcggacgcgctcaccgggcagttccgtgccatcctcaagaagatcgtcggcgccaaggagtccatgggggaggccatgagggc

SEQ ID NO: 408717 - DNA, 515 bp, Oryza sativa
cccgtgtctctactcgctccgccgcgccgtcgtctctcccgacttcggcgacaagcgagcgacgcaggccaccgtgcgcggttcgttttcgcgagggaggccgccgccgaccagccgccatggtctcgccggacaccatccgcacggtcatcggcgtcgtaggcaatggaaccgccctcgtgctcttcctctccccagtgccgacgttcatacggatctggaagaaggggtcggtggagcagtactcggcggtgccgtacgtggcgacgctgctcaactgcatgatgtgggtgctgtacggcctccccgcggtgcacccgcacagcatgctggtcatcaccatcaacggcaccggcatggccatcgagctcacctacatcgccccttttctcgccttctcccttggagccgttcgtcgacgtgttcttcttcttctcgccgccgaggtcgcctttgtcgccgccgtcgccgccctcgttcttaaccttgcccacacccacgagcgacgcttcatg

SEQ ID NO: 408718 - DNA, 469 bp, Oryza sativa
gattattgttgctgcatccttagcgcgcacgcgaaagcgagagggagctcgcgcgcgcgcgagggatcgatggatcgaccccaggcagttaccgagaactatgccaatgctgtgacgtgcctctatcatgtgctcttcaaggctggggcgctggtgttctacatcttgtttttgctcttcgtgaagagcttagtcatcatatttgtcatcaccgagttcctggcggcgctcgacttctgggtggtgaagaatgtgagtggcaggatattggccgggatgcggtggtggaatgagatcgaccaccagggcaacagacgtgggaagtgtgaggtgcctctatggggaggctcttgcttgggtgaacaaaaggacttgtggctgtgctggtggactctttacgtgactgctgatggatggaacatctttgggatagttttacttatgagacttgaagctgactaccttcttg

SEQ ID NO: 408719 - DNA, 342 bp, Oryza sativa
gcatccgcctctcggcgcaccgcatccaccacctcatgtccggcctgctcgcggcgcgcatgctctactgtatctccgcggccgaggaccagcactacatccgcatcgcagggacaccacacgggtgggatgtgatgttctacctgttccagctggtgaagggtgtgatcttgtttgctgcgattgctctgattgggaccggttggtcattcctgaagcccttccttcaggacaaggagaagaaggtccttatggttgtgatcccattgcaggctgcagctaacattgctgcagcatgggtccgggagactggtccattcttgcagggatgggtgacatgga

SEQ ID NO: 408720 - DNA, 441 bp, Oryza sativa
  unsure (1)..(441): unsure at all n locations
catgaggctgcctcccatttctcttctctgtcggtgttctcctcaagatctgtcttaagttcttgagatctgtttcagaactaagctgagaagatggtgaagatctgctgcattggagctggctatgtcggcggcccaaccatggccgtcattgccctcaaatgcccagcaatcgaggtggtggttgttgacatttccaagcctcgcattgatgcctggaacagcgaacagctcccgatctacgagcctggcctcgatgaggtcgtgaaggagtgcagaggcaggaacctcttcttcagcactgatgtggagaagcatgtcgccgaggcgaacatcatctttgtatctgtcaacacccccaccaagacccgtggtcttggagcanggcaggctgctgacctcacctactgggaaagtgctgcttggatgattgctgatgtc

SEQ ID NO: 408721 - DNA, 366 bp, Oryza sativa
agatgtgcctgtgggactgggtctacggtgtgctcgtgtcgctggggctgtggcagaaggaggccaagatcctcttcactcggcctcgacaacgccggcaagaccaccctcctccacatgctcaaggactagaggttggtgcagcaccagccgacgcagaacccgacgtgggaggagctcagcatcgggaagatcaagctcaaggccttcgatctcgggggacaccagatcgcccgccgcgtctggaaggactactaccccaaggctgatgctgtggtatattttggagatgcttatgataaggaaacgtttgctgagtcaaaaaaggggcttgatgcactcctatctgatgaatcattggcagct

SEQ ID NO: 408722 - DNA, 429 bp, Oryza sativa
ttctgcagcagcagcagcaacaacatttggccgctctgaagattggtgacggagaatgcccggcggctccctcctcaatagcggcggcatggcggactacggcggcggtggcggcagcggcgggggcctcacgttcccggtcgtggttacctgcctcatggcggcctccggtggcctcatcttcggctacgacattggcatctcacgtggtgtgtcggagatggagtcattcctggagaagttctttccgggcttgctgaaggggacggcgcacgcgagcaagggcgtgtactgcatttacaacagccaggcgctcacggcgttcaccttgtcgctgtccgcgttcggcatggtcgggacgctgggggggagccgcgtcacccggcggaccggacggcaggccgtcatgctgatcgggggcagcatgtt

SEQ ID NO: 408723 - DNA, 458 bp, Oryza sativa
cgtgttggggcaggagcacgtcgccgtgttcaagccggtggacgaggagcccatggcggccaacaacccacgcggcctcccaccctcgcccaccggcgaggggctcaagaaggggacacgcgtcggcgagggcgccatcagagaggtcgccgcctacatcctcgaccaccctcccggtggccgccgttcgttcgcaggacatcatggctccgccaccgtgggcttcgccggtgtcgcgccaaccgcgctggtccgttgcatgcacaggagcttcaagcaacctgcagcttccgaacaaggtcctccattgttcaaggtggggtcattgcaggcgttcgtgaagaacagcggcagctgcgaggacatgggacctcgtgcgttcccggtgcacgaagttcacaagatctgcgtgctggacatcaggctggccaacgccgacaggcacgccggcaacattc

SEQ ID NO: 408724 - DNA, 344 bp, Oryza sativa
tgttgatatactcggttacctcctctatgttgccaaagttgttgcaaagcaggagggacttgaagatggctaccgtattgtcatcaatgatggccccagtggatgccaatctgtttaccacatacatgtacatctcctcggaggcaggcagatgaactggccgccgggctaacgagtgcccgtctgttgaactgccttcatggcaaggatgtcacactgcctctccgttgaataattactgtaactggcataacaattggtgccctgaacttatgctatatgtttgtggatgttaccaggacaggacatgaccattctgctatgatttatggacaagatacatt

SEQ ID NO: 408725 - DNA, 396 bp, Oryza sativa
ttgttcttaccaaccgaagagctggatgcaatcagggagctgttcaatatgttggacaccaaaaagaaggggcacttgacactagaagagctcagaaagggactgcaagtgatagggcacaacatccatgacacagatgtcgatatgctcatggaagctgcagacatagatggaaatggcatactggactgcaaggagtttgtgacagtatccattcacctgaagaaaatccgtagcgaggagcaccttccgaaggtgttcagcttcttcgacaagaacggcagcgggtacatagagattgaagagttgaaagaagccctctccccaagaggtgaccagaagtcgatcgacgacatatttctggatgttgacatagacaaggatgggaagataagc

SEQ ID NO: 408726 - DNA, 427 bp, Oryza sativa
atttgtcatgagagagagagaggggaattggtgaggtgatgctgtgtgtgggggatgatcctctcccagctgggaggctcctccgtccgtgctcccctcgctgcgccgccatggctcgccggtggccgccactggtggtcggcctcgctctcctcctcctcctctccgtcgcggactactccgtggtggccaagaccgaccagcctgacgttgctgctctgaacgtgatgtttgagagcatgaacaaaccgtctgaattgttgggttggaaagcgagcggcggcgatccgtgtggtgatgacgaccagtggaaagggatcgaatgcagcgattcatctgtcacagagatcaacttgtccgggcttggaataagcggcacgctaggttatcagctcttcagcttggaatcaggtaccaaattcgatgt

SEQ ID NO: 408727 - DNA, 411 bp, Oryza sativa
attctctctcctcctccgccaccgccatggctcgcctcctcctccccctccccatcgccgccgccgccgcctcccgcctccgcctccccgtcctctcctcctccgtggcgcggcgtgaggcgctgctcttcggggggagggtggcggcggcgagggcgccggtgaggctggcgaggagaggggtgagcgccggggcggaggcgggcgggtcgtcgtcggccgccgcggcagcgcaggtgatcgggcaggacgaggcggtggagtgggtcaagaaggaccggaggcgcatgctccatgtcgtctaccgcgtcggcgacctcgacaagacgatcaagttttacaccgagtgcttggggatgaagcttgtgcgcaagcgcgacattcccgaggagaggtataccaaagcttttc

SEQ ID NO: 408728 - DNA, 456 bp, Oryza sativa
aattattaacacttgcatgaatgatcagaaggataagttgtggcctatgttgcagaagcttggtgtggtcatgaaggctgatgagaaggagcttatgggcaaggctctcatgaagcgtgttatgcaaacatggctgccagccagtaatgctcttcttgagatgatgatataccaccttccatctccgtccaaggcccagaggtaccgtgtggagaatttgtatgagggtcctcttgatgatgtctacgcaactgctatcagaaactgtgatccagaaggtcctcttatgctgtatgtttccaagatgattcccgcatcagacaaaggtaggttctttgcctttggtcgtgtcttctctgggagggttgcaactggcatgaaggtgcgtatcatgggtcccaactatgtccctggccagaagaaggatctgtatgtgaagagtgtccagcgtactgt

SEQ ID NO: 408729 - DNA, 519 bp, Oryza sativa
tggtttaatctccgacgccacgacgctctctcgcctctcccggaatggaaacgttcgcgcggtggcgtccaccgccgccgccggcggcagctgggcgcgtgtcccttcgaccggcgtacgggaggcggagccgggccgccacggtctccccgcgcgcgttcggcggcggcgctgacttcgacggcttcgtgcggcgggcgtggcggggcgccaacgccggcgccgagcggctcgcgttcgaggtgcgccagaccgcgcagcgcctggacgggaggttctcgatatcgaggcgcctggccgaggccgtgcgcgccgtccgcgcgcgcgccgtcgagatcgacgccgagctcggcatcggccggcggtggcgctccttctccgtcgacttttcccgcaactggcccaggtataggagggagctgactgacttcatggccacacctattgggagagctttcactacgatcttttcatttggtttgcactgtcaggatggctattcagagttttcatttttgg

SEQ ID NO: 408730 - DNA, 422 bp, Oryza sativa
ctttcgccgtcgcagatccgatccaggaagagctcgccgccgccgctgccatggcgctctccgtggagaagacctcgtcggggagggagtacaaggtgaaggacctctcccaggcggacttcggccgcctcgagatcgagctcgccgaggtcgagatgccggggctcatggcgtgccgcgccgagttcggcccctcccagccgttcaagggcgcccggatctccgggtccctccacatgaccatccagaccgccgtcctcatcgagaccctcaccgtccttggcgccgaggtccgctggtgctcctgcaacatcttctccacgcaggaccacgccgccgccgccatcgccagggactccgccgccgtgttcgcctggaagggggagaccctcgaggagtactggatggtgcaccgagcgctg

SEQ ID NO: 408731 - DNA, 484 bp, Oryza sativa
gttcatgctgatccagctggaccatgcaaggccaggaataacttgtgtaaacttgagagagagggattcattgaatcatctccggcacaggattgtgacctctgctgcaaaatgcctgatttctgccgagagtgctgctgcgtctcttgccgcagggttgttgactattcctttggaggttatagctacattaagtgtgaggcagtcctagaagagaacaaaatatgtgggcatattgggcaccttgattgtgctctccgtacttttatggctggaacagttggaggatgtattgacttggacatgcagtattgttgcagacgttgtgataacaaaacgaacttgatgctgcacgtagaaaaattcttggaaatatgccaatctcttcaatcaagggatgacattgaacctatcctgaatactggcttatgcctagtgcgtggttcaagacaaaccagaacaaatgcttggagagcattatgag

SEQ ID NO: 408732 - DNA, 469 bp, Oryza sativa
ggtgtgcaggaggcagcaatcttggttcccggtgacattatcagcatcaagctcggtgacatcgtccctgctgatgctcgtctccttgagggtgatccccttaagattgaccagtctgcacttactggggagtcccttccagtgaccaagaaccctggtgatgaggtcttctctggctcgacctgcaagcagggtgagattgaggccgtggtcattgccactggagtgcacaccttcttcggcaaggcggcgcatcttgttgacagcaccaaccaagttggtcacttccagacggtgctcactgcgatcgggaacttctgtatctgctcgattgcggttggtatcgtgatcgagatcatcgttatgttcccgatccagcaccgtgcctaccgcagtggcattgagaacctgttggtcctcttgatcggtggtatcccaattgccatgcctaccgtgctctcggtcacca

SEQ ID NO: 408733 - DNA, 433 bp, Oryza sativa
gttgcttgaccgcggtgtcgaggcttcgatcccgcgtggcacaggaggccaccacgcttggtggtgtgcgatggctgcagatgcagagcgcatctgatcttgatctcaagtcccagctgcaggaattgattcctgaacaacaggaccgcttaaagaaacttaaatcggagcatggaaaggtccaacttggaaatataacagtcgatatggtccttggtgggatgagagggatgactggaatgctttgggaaacatcattgcttgacccggatgagggtattcgttttaggggtctctcgattccagagtgccagaaagtgctgccgacagcagttaaagatggggagcctttgcctgagggtctactttggctttttttgaccggaaaggtgccaaccaaagagcaagttgatgctctatcaaaggaattggc

SEQ ID NO: 408734 - DNA, 487 bp, Oryza sativa
tctcacagctcactgcatcaatggccgcggccaccatggcgctctcctccccggtgatggcccgcgcggcgccgtcgacctcctccgcgctcttcggcgaggcgcggatcaccatgcgcaagaccgccgcgaagcccaagccggcggcgtcgtcggggagcccgtggtacggcgccgaccgcgtcctctacctcggcccgctctccggcgagccgccgagctacctcaccggcgagttcccgggcgactacgggtgggacaccgcggggctctccgccgacccggagacgttcgccaagaaccgggagctggaggtgatccactcccggtgggcgatgctgggcgcgctcggctgcgtcttcccggagctcctcgcccggaacggcgttaagttcggcgaggccgtgtggttcaaggcgggctcgcagatcttcagcgagggcgggctcgactacctcggcaacccgagcctgatccacgcgcagag

SEQ ID NO: 408735 - DNA, 305 bp, Oryza sativa
ttgtgagcagagctaagctagctcagagtgagtagcgcgttgagcttgctgaagggagcggcaacgtcgaaggaggtgagcgaggagccggagcacgtgcggcccaaggactacaccgacccgccgccggcgccgctgttcgacgacggcgagctccggctgtggtccttctaccgggcgctcattgcggagttcatcgccacgctcctgcttctatacatcaccgccgccaccgtcaatgggtacaaggtgcagtcgtcccgccgacccgtgcggtggcgccggcccccttcgcatctcctggg

SEQ ID NO: 408736 - DNA, 508 bp, Oryza sativa
cctagccctagctctcccctatccctcgccgcacgcaccaccaccaaccatggccggcgcgcaggagtctctggtgttggccggcgtgatgcacggccacaacgacgtggtgacggccatcgcgacccccatcgacaactcgccgttcatcgtctcctcctcccgcgacaagtcgctgctggtgtgggacctcaccaaccccgtccagaacgtcggcgagggcgccggcgcctccgagtacggcgtgcccttccgccgcctcaccggccactcccacttcgtccaggacgtcgtcctcagctccgacggccagttcgcgctctctggctcctgggacggcgagctccgcctctgggacctctccaccggggtcaccacccgccgcttcgtcggccacgacaaagacgttctctccgtcgccttctccgtcgacaaccgccagatcgtcttcgtctaccgcgaccgcaccataagctgtggaacacccttcgcgagtgcaagtacacca

SEQ ID NO: 408737 - DNA, 519 bp, Oryza sativa
gttctttagccctagcgccgccgccgccgccgccatgaagttcaacatcgccaacccgaccaccgggtgccagaagaagctcgagatcgatgacgaccagaagctccgggcattttatgacaagaggatctcccaggaagtcagtggtgatgctcttggcgaagaattcaagggctatgtattcaagatcatgggaggctgtgacaagcaaggtttccccatgaagcagggtgtgcttacttctggacgtgtccgccttctcctccacaggggtaccccctgcttccgtggatatggcaggcgtgatggtgagcgcaaaaagaagtcagtccgtggttgcattgtcagccaagatctctctgttatcaacttggtgattgtaaagaagggtgataatgacctttctggcttgactgacactgagaagcccaggatgaggggacccaagagggcatctaagatcaggaagctgtttaaccttgccaaagatgatgatgtccgcaggtatgtcaacactta

SEQ ID NO: 408738 - DNA, 477 bp, Oryza sativa
cgccccccatttcgaagcccaccgaattccattcctcgcgattcctctcccctcgcctcctcgtcctccccctcctaggggatcgccggagaggaatcgcgcggaggaaaaaaaaagaaaagggcttcctcgtcgtctaagttaaaaggaagccatggagcacaaggagactggatgccagcagccagaaggcccgatcctttgcatcaataactgcggcttctttggcagtgcggctaccatgaacatgtgctcaaagtgccacaaggagatgataatgaagcaggagcaggccaagctggcagcctcctctatcgacagcattgtcaatggtggtgattccgggaaggaaccaattattgctggtcacgctgaagtagctgctgctcaagtcgaggtgaagacgcttgttgcgcagcctgctgagattgctggtcctagtgagggggtcacggtgaaccccaggtgagggaggac

SEQ ID NO: 408739 - DNA, 529 bp, Oryza sativa
gttggagagagcttggtgagctgcagagatggccccctccgtgatggcgtcgtcggccaccaccgtcgctcccttccaggggctcaagtccaccgccggcatgcccgtcgcccgccgctccggcaactccagcttcggcaacgtcagcaatggcggcaggatcaggtgcatgcaggtgtggccgattgagggcatcaagaagttcgagaccctctcctacctgccaccgctcaccgtggaggacctcctgaagcagatcgagtacctgctccgttccaagtgggtgccctgcctcgagttcagcaaggtcggatttgtctaccgtgagaaccacaggtcccctggatactacgacggcaggtactggaccatgtggaagctgcccatgttcgggtgcaccgacgccacccaggtgctcaaggagctcgaggaggccaagaaggcgtaccctgatgcattcgtccgtatcatcggcttcgacaacgttaggcaggtgcaggtcatcaggttcatcgcctacaagcccccg

SEQ ID NO: 408740 - DNA, 438 bp, Oryza sativa
gtcatttctcccccccatctcctctctgcttgcgagcttgtcaaccgcgcaaaggttcatatatacaccgatcgaaatcgatcggtgtagagccacactcttggagtcgatcgttcgctggttagctaactaagctaagctgagctgccttgctctcttcgacgatcaggttgcttggtttgacgagctgacgatcgaggagaagaggacggcgaacgtttttttgcaggatcagtactagggttcatcttggagaaccaatttgattcgatagaacgagcgagtcgaagaagatggtgctcgcgagcacgccgaaggtggtgctgggatgcgtggcgttcacgatcttctgggtgctggccgtgtttccgtcggtgccgttcatgccggtgggtcgcacgtcggggtccctcctgggcgccatgctgatggtgcttt

SEQ ID NO: 408741 - DNA, 543 bp, Oryza sativa
ttttggtggcggcgggggctgcggcggcggcggaggcggagcacatgcggaggctccacagccacgcccccggcgagcaccagtgcagctccgcgctcgtcaagcacatcaaggctcctgttcacctcgtgtggtcgctggtgcggagcttcgaccagccgcagaggtacaagccgttcgtcagccgctgcgtcgtgcgcggcggcgacctcgagatcggcagcgtgcgcgaggtcaacgtcaagaccggcctcccggcgaccaccagcacggagaggctcgagctgctcgacgacgacgagcacatcctcagcgtcaagttcgtcggcggcgaccaccgcctcaggaactactcatccatcgtaactgtccatccggagagcatcgatggaagaccagggacgctcgtgattgaatcatttgtggtggacgtgcctgatggaaatacaaaggacgagacatgctactttgtcgaggccgtgatcaagtgcaacttaacatctcttcgcgaggtatcagagcggctagcagttcagtcaccca

SEQ ID NO: 408742 - DNA, 347 bp, Oryza sativa
ccgggacttactggctggacccacgcgtccgatttattatatagaggaaggggaaaaacacatttgcagccacatcatccatggcctctctccgcaccattccggtgatcttcggcatcctcttctatgtccttgccagcactgccactgccaccgacgcaccggactacgtcgtccaaggccgtgtctactgtgacacgtgccgcgccgggttcgagaccaatgtcaccgagtatatcaagggtgccaaggtcaggctggagtgcaagcactttggcaccgacaaggtcgagcgtgcgattgacggtgtgactgatgagaccgggacatacaagattgagctcaag

SEQ ID NO: 408743 - DNA, 318 bp, Oryza sativa
cttctcatacttttgaggagggcaccgccatttagttaattagtagttgttaattatcttcactaaccttaattaccctcacgcaaagcactctctaatcctcctcggcgctcgcataatcttgtatccctcatctcagattatcatcacctcgccgtgttagaaaaaagggagtaagttcgttttatcgtcggatttggtgagagttcgccggagtagaagaagatgacggtgacgccgcagatcacggtgagcgacgggaggctggcggtgcgggggcggacggtgctgaccggtgtgcccgagaacgtgacggcg

SEQ ID NO: 408744 - DNA, 507 bp, Oryza sativa
  unsure (1)..(507): unsure at all n locations
tttcacagttcacaccaccttccttccttcccgactccccacaccggccggtctccttctcgctgcagggagagagagctcgagctcttctctgctgctgctgctgccatggcgattccgttgctgctgctgctcttgctggccatgtccacaggctcagatggggcgttctgcgtgtgcaagcccgaccagagcccggcggcgatgcagaaggccatcgactacgcgtgctgtcgcggcgccgactgcacccagatcatgcagtccggcgcgtgctaccagccgagcaccatcgtcgcgcactgctcctacgccaccaactcctacttccagaagaacagccccatcggcgccacctgcgacttcggtggtgtngtcacccttaccaacaccgaccccaggttcggcacctgcaagtacccggccaccgctagcggcgtaggcaccggaatgggaaccggtaccagcaccggcactggcactggagttggcaccggcggcacccgc

SEQ ID NO: 408745 - DNA, 435 bp, Oryza sativa
tggttatatccctccccttgtctcctgcacacctgggtttgcacgccgccatcatggacgagacgaccaccgctctgcaagaagcagacgctcattaagctataggaggaggaggaggaggaaataccaagagcgatgtcgacggggccggtgaagaaggagatccggcacgccggtggggtaagtggaggggccggaccgtcggcagggggcttgcgcggtccgcaggggcaggcagcgaagttcgcgcggtggtcgtcaagcggacggtacgtgagcctgtcgtgggaggacatcgacatggagggcgagctggcggcggactacaccaactacacggtgcagatcccgccgacgcccgacaaccagccgatgctgaacggagtggagccggtgtctggggcgatgaaggccgaggagcagtacgtgtccaac

SEQ ID NO: 408746 - DNA, 345 bp, Oryza sativa
tgatttaggccgggaccgcgaccgcgacgagcagcgccaccaaacaagggcagtacgtgcccatgtacgcgcaggactctgttgagaaggcgacggagatgagcgtgtcgtcgccggtcaccgtctacccgtcgacgtcgaacgccgtggtagcgcacccgccggacgtgccgtacggcgtgccgtacggaggagggttcccaccgtatcagcagcagtacggttacgcgggtcagtcgtcgtacgcgtacaacggctgctcaccgtcgacggtgacgtacagctacgcggtggcacaacagatggtggccaggaaaggtggacgaatgggcatgggccttggac

SEQ ID NO: 408747 - DNA, 398 bp, Oryza sativa
gcctggtcgtgctcaaacgagagagatcttttccgaatccgaggaggagaagccacagaaacgatgacctcgctgtcgtcctccgccgccgcggcgcgcgccaccttcgtcatgccgtcgtcggttcgtgggggcatgagccgcggcaggaggatggcgaggctggtgacgcgcgcggcggcgtcgagcccgaagctcccgagcgggcggcggctgcgggtggcggtggtcggaggcggacccgcgggcggcgcggcggcggaggcgctggccaagggcggcgtggagacggtgctcatcgaacggaagctggacaactgcaagccctgcggcggggccatcccgctgtgcatggtgtcggagttcgacctgccgctggacctcgtcgcaggaagggg

SEQ ID NO: 408748 - DNA, 504 bp, Oryza sativa
ctttgtttctcctctcccccccgtgatctgaccgccggcgacgaccctcttccaccacccgccgccgtcgtcgcgcccccgcccccgccggcgacgaccaccatgttgtacgatcgcgtcacgacctttgaggactcggagaaggagagcgagtacggctactttcgcaaggtttctggacctgtggtcgcggctgatggaatgggtggtgctgccatgtatgaacttgttcgagttggtcatgataaccttattggggaaattattcgtcttgagggtgattcagccaccatctcaagtttatgaggaaacagctgggttgatggtcaatgatccagtgttgagaacaagaaagccttttttagttgaattgggacctggtatcctcggaaatatttttggtggaattcagcgcccttataaactattgctttaagtctggagatgtgttcttaccacgtggtgtatcagttcctgcttttgacaaaaatagttgtgggattt

SEQ ID NO: 408749 - DNA, 372 bp, Oryza sativa
aataaaccaacccaaccgccgccgcatcgccctcgttagaacgatggccgcgtcggcgctgcaccagaccaccagcttcctcggcaccgcccctcgccgggatgagctcgtccgccgcgtcggcgactccggtggccgcatcaccatgcgccgcaccgtcaagagcgcgccccagagcatctggtatggacctgaccgtcccaagtacctgggcccgttctcggagcagacgccatcgtacctgaccggagagttcccgggagactacgggtgggacacggcggggctatcggccgacccggagacgtttgcgaggaacagggagctggagggtgatccactcgcggtgggcgatgctgggggcgctgggct

SEQ ID NO: 408750 - DNA, 386 bp, Oryza sativa
gttctctcgcctttggcagttgaaggccatcagactggatctatgggagattcactaggtgctgttcgtaatgccgcccaagctgctgcccggatataccaagtttttaggatgcaatccttccagagaaaacaagcagttcagtatgaggatgaaaatggtgcgatatcagatgagcgtgccatgtcactcttgtctgctaaaccatccaaacctgcacagcttgatcctctgcatgctgctgggactcgaatacaaaacaagttcccgggatggaagggaagaaaagaatttctgcttattagacagtgaaatgtcaagaaccaagcgcatgtgcgagggtaccaagtgggaaaggattatcgcaaaataatttggtctgttgg

SEQ ID NO: 408751 - DNA, 470 bp, Oryza sativa
  unsure (1)..(470): unsure at all n locations
tcgcttggagggaggaaggaggcctgaagtggcgcagagtaggcgcttgtaaacaaatccccccatttgcttcttttgcactgaagaatccctgaagaatccagcaggatggagaagaaggcgtccatcctcatgaaccggtatgagctcggccgcatgctcgggcaaggcaccttcgccaaggtgtaccatgcacggaaccttgcatccaaccagagcgtcgccatcaaggtcattgacaaggaaaaggtattgcgtgtcggcatgattgaccagatcaagcgagagatctccatcatgcgcctcgttcgccaccccaacatcggccagctgcacgaggtcatggccagccagagcaagatatattttgcaatggagtatgtccggngtggtgagctcttcagcagggtcgccagggggcgactaaggaggatgctgcgaggaagtacttccagcagttgataggggct

SEQ ID NO: 408752 - DNA, 487 bp, Oryza sativa
tttttatgattcgtaatactaggaaatgtcccatccggtcctaggttatattttgggacggatgcagtatatactatggcatgtcacattttcaatatctgtggcagtgtttacctctttatgtggattatctaactcttgctttgctattctttgaagtaatttgtgtctaattgctgaattgttgtctttctatgcttgacctgactatttaattcaattgaaaaaaacaggcggctttttgcagaaaataaggaccagcttggtgtatctctgccctgctgagcacatccctccaaaaattgaggtggacctggcaaatcttgacattggagatagggtatcaatgaatgacatccccgttcatccgtcgttgaggttactgagtaaaaacgagaccatgcctgtctgcaagatcttggccctgaaaccagttgagtagaggaatccatgcaaatttttggagcttggtgacaatggaccccag

SEQ ID NO: 408753 - DNA, 492 bp, Oryza sativa
cctttctgtcccgtctcctcgcccgccgccctcgactgccgtctcctcgcctgccgctggcgccgatctccatcctgctagcagaggtggcgccggcgtcctcctgctcccgccgcattcgcatcctaatccatcccatccggcctcggcctcgaatttcgtctcctcgcccgccgcttgcgccgatccccatcctgcgagcagaggtggcgcccggcgtcctccttcttccaccgcatcgtcgctcgccgctcatggatcctgagatctagacgtcaacgtgcttcctggaaagagagaggctcaggcatgagagcatacctctaaaataatgtccgtgcttacctgtgtgcttgataacatgggctcatcctgtagcagatctcattctttaagtgaggctgaaacaaccaaaaatgcaaaatctgcagacattgacaggcgaattttgcaagagacataagccgagcaacacattcacaagctcttact

SEQ ID NO: 408754 - DNA, 472 bp, Oryza sativa
aataatttttctcctcctctttctcttctctctgtgtcactgcgtgtgaggagcgtagcttagagtgagaaaataatggcgttggagacgtgcttcagagcctgggcgactctgcacgccccacagccaccgtcctccggcggcagtagggacaggctcctcctctccggcgccggcagcagccagtccaagccaaggttgtccgtcgcctcaccgtcaccgctccggcctgcctcccgcttcgcctgccagtgcagcaacgtcgtcgacgaagtggtggtggcggacgagaagaactgggacagcatggtgctggggagcgaggcgccggtgctggtggagttctgggcgccgtggtgcggaccgtgcaggatgatcgcgccggtgatcgacgagctggccaaggagtacgtccgcaagatcaagtgctgctaggtgaacacggacgacttaaccaacatggcaccaacta

SEQ ID NO: 408755 - DNA, 436 bp, Oryza sativa; identical to SEQ ID NO: 392444

SEQ ID NO: 408756 - DNA, 475 bp, Oryza sativa
cctatcatccaggctcctcctcttggtggtccagatagagccgaacagtcatgacagaagtcctatcaagacctcttgaacaccgtctaagctctccaaccttagatggtcactatgaagagaagaggaaatccaatgttgaatactcagaggatgagaagaaagccaaaatcatatcgctgaagaagaaggcaatgagtgcttcacaaaagttaaggcattcaatgaagaaggggaggcaggagtagcaaggtcatatccatctcaattgcggatgaacgtgatcctgaggaggtgcaggctgtagatgccttccgtcagctccttgtacttgaagagttgctaccatctcaccatgatgactaccacatgatgctaaggcttttgaaggcaagaaagtttgatgtgcagaaggcaaagcaaatgtgggttgatatgctgcagtggagaaaggaattcgctgcagataccattc

SEQ ID NO: 408757 - DNA, 533 bp, Oryza sativa
tgttaatctaacattgataatgggaaaccgtgaggctatttccaagatgcataatatgagtgcagctgttttgacatcagtacttacattgattgatgaatatgatttgtatggtcaagtggcatacccaaagcgtcacaaacactcggaagttcctgatatttaccgtttagcagtgagaacaaagggtgcttttgtaaatgtgccttactttgaacagttcggtgtcaccttgatagaggctgccatgcatggtttgcctgtaattgcaacaaaaaatggagctcctgttgaaattcaccaggtgctggacaatggtctccttgttgatccccatgatcagcatgcaattgcagatgcactctataaactcctttctgaaaaacaactttggtcaaaatgccgagagaatgggctgaaaaatatacatcagttttcttggcctgaacattgcaagaattacttgtcaaggatatcaactcttggcccaaggcatcctgcttttgcaggcaatgaagaccggattaggcacc

SEQ ID NO: 408758 - DNA, 346 bp, Oryza sativa
ttggtaagtgcgtcaagatcacacccgctcgtgccgagcatattaagcagtacaagtgcccggactgcaccaacaagaggacccgggcatgagtaacaagaagttgtgtcgaactgtgttagagtggagttgtcaatctccggatgtcatgatctcttagatattatcttgccctagcttttctagtttgtaagcttgtctctaatttaattttaaactgtaactgttgattaacctacctgtgtttaaagcttcatctttcctgtgttaattctagcattcatagtgtgtaaacttgcacatcttgtgtcaactgaagcctgaaggtactgcggctcccctgacc

SEQ ID NO: 408759 - DNA, 503 bp, Oryza sativa
gatatcggaatttctgataatgatgctgggactgtggagtctgttcaaaagatagatctgcagaaagatactagtgtttctctttctgcaaaccatctgcagaagttgcggttatcttttcaactgagtacaccactcgggaagacgtttaaacctcaccaggtgttcctcaagttaaagcatgatgaaagcaaggttgagcatttatttgttgtaccaggctctgcaaggcagtttaaaattgttctagactttcttggtttggtggagaaattctactacctttctggaagatatgacctggagcttgcagttggtgatgctgcaatggagaattcatttctacgagcccttggccatattgaattggacctgcctgaggccccagaaaaagccccaaagcctccggccaggctgttgatccattctaaaatttggtccgaagaggaaatatcgcacatattccgttcccagagaagaggccacccaaggaactctcattt

SEQ ID NO: 408760 - DNA, 482 bp, Oryza sativa
aatcagccactgcacttcttgttcttgttctctttctcctcccgaatccgatccatccattggccgccgccgccgccgtcgtctcgtgcgtcgcgtgttcgtgtccagagacgatgggcagcctcgccgacgagaagaccgtcaccgggtgggccgccagggacgcctccggccacctcaccccctacaactacaccctcaggaagactgggcctgaagatgtggtggtgaaggttttgtattgtggtatctgccatactgacatccaccaggccaagaaccaccttggtgcttccaagtaccccatggtccctggccatgaggtggacggtgaggtggtggaggtcgggccggaggtgaccaagtacagcgccggcgacgttgtcggcgtctgcgttatacttggctgctgtcgcgagtgccatccgtgcaaggccaatgtggagcagtactgcaccagaggatttggtctacaacacctt

SEQ ID NO: 408761 - DNA, 359 bp, Oryza sativa
gctgtttttgagccgcaatggaattgaatgcagggacggtgaagaattattcatcaaagatcaatcactgaccaacgaaaatgtggacaagatagttggctatgctgttagttatcaccttaagcacaataaagtcgagatctgcaaggatggtaaacttgtattggcgagcgaaagccttaagcatgggctcaacatgctgcagaatatgcaaagtgataacaagagctcaaaaaaatcactgaaggatgttgtcacagagaacgaatttgagaaaaggcttctggcagatgttataccacctgatgacatcggagtcacctatgatgatattggagccttggaaaatgtaaaagaca

SEQ ID NO: 408762 - DNA, 440 bp, Oryza sativa
aagtactctctttctcactcgattgattcaagcagcaaataattagcctagcttactctttccatagctagctagcttgttgcgagcaagatcaggttgccggtgcagtaacagagagcaaccatgggtgtattggacagcctctctgatatgtgcagcctgacagagaccaaggaagccctcaagctaaggaagaagcggccactgcagacggtgaacatcaaggtgaagatggactgcgaggggtgcgagaggagggtgaagaacgcggtgaagtcgatgcgaggggtgacgagcgtggcggtgaacccgaagcagagccggtgcacggtgaccgggtacgtggaggcgagcaaggtgctggagcgcgtgaagagcaccgggaaggcggcggagatgtggccctacgtcccgtacaccatgaccacctacccgtacgt

SEQ ID NO: 408763 - DNA, 191 bp, Oryza sativa
gtgttttccacggctacaagtgggcatttgccatctggaatgttcatctggatggtcagccttgtgctgtgctgctgtctgaaatttctgtcctgtccaccattactgaagaatgagagcgtgtgggtcttgaatttccaataaaacgcaatgccttacagatgtgtaaaagaaaatataaaccaacaaag

SEQ ID NO: 408764 - DNA, 406 bp, Oryza sativa
gttttgtctcaagactatgaggacttcaagagagtgctgacatcgctatggctcgacttgtatggaagaggtggcagttctagcagctcttctgcatttgagcatgtgttcgttggtgagatcaagggacgaccaggacagggagagaatgaggtctcaggattccataattggattcagttttacctggaagaagccaatgggaatgtggattaccaaggttacatattcccaaggaggcgtggggaatcgcctgattcagagacacagctattgactattcagtttgagtggcacggagttctgaaatcggtatccagcactctgattggtgtcagccctgagtctgaggctgcactctacacgctctgctttttatgggagggaaagataccgcgttgagatt

SEQ ID NO: 408765 - DNA, 328 bp, Oryza sativa
ctttagagctttctctttctgtgtgtagtgtgtgcaactaggaggcttgttccatactagtttgctaggtcatggaaaagagcgagattttcgtaggagcacactcatatgcagctatatgtgcttttacactcatcataggatggttagctcactgggtatacagatggataaatcctccatgcaatgggaggcttcctccgggctcaatgggcttccctattgttggtgagaccttccaatttttcagaacaagtccatcaatagacatgccaatttactacaagcgaagactggagaggtatggacctatattcaaaactaacat

SEQ ID NO: 408766 - DNA, 417 bp, Oryza sativa
gttgtactcgagcaaagaaggagagagcttggtgagctgcatagatggccccctccgtgatggcgtcgtcggccaccaccgtcgctcccttccaggggctcaagtccaccgccggcatgcccgtcgcccgccgctccggcaactccagcttcggcaacgtcagcaatggcggcaggatcaggtgcatgcaggtgtggccgattgagggcatcaagaagttcgagaccctctcctacctgccaccgctcaccgtggaggacctcctgaagcagatcgagtacctgctccgttccaagtgggtgccctgcctcgagttcagcaaggtcggatttgtctaccgtgagaaccacaggtcccctggatactacgacggcaggtactggaccatgtggaagctgcccatgttccggtgcaccg

SEQ ID NO: 408767 - DNA, 454 bp, Oryza sativa
ttttgaggccgcgaccgcgaccgcgacgagcagcgccaccaaacaagggcagtacgtgcccatgtacgcgcaggactctgatgagaaggcgacggagaagagcgtgtcgtcgccggtcaccgcctacccgccgccgtcgaacgccgtggtagcgcacccgccggtcgtgccgtacggcgcgccgtacggaggagggtacccaccgcatcagcagcagtacggttacgcgggtcagccgccgtacgcgtacaacgccggcccaccgccgccggcgacgtacagctacgcggcggcacaacagccggcggcgaggaaaggtggacgaatgggcatgggcctcggactcgggctcctcggcggcgcggtcggcgggatgatgctcggggaaatggtcggcgacatggaggctgacgccgcctacgaagccgggttcaacgacgcactggaattttag

SEQ ID NO: 408768 - DNA, 499 bp, Oryza sativa
ccacccgttttttttcgatcgcctcgacagcgaccacatgctttgctccttggttagtccgcggtgtaacaccaatagacaagagcaagtctataaaaacatggctgatgcaaatatttgaggaatgcggtaatactgacattgaaggagttgactcctcaaatgcatgctacggtggaacagctgctttatttaattgtgttaattgggtcgagagcaactcatgggatggacgttatgggcttgttgtttgcacagacgctgcggtttacgctgaaggtccggctcgtccaaccggtggtgcacctgctattgcaatgctgattgaaccaacagctccagtttctttcgaaagcaagatagaggatctcatttggcccatgtctatgacttttacaagcctgatcttgctagggaatacccggtggtcgatggaaagctatcacagacatgctttttaatggctttagatttcctgttcaatgttttctgcaaaaag

SEQ ID NO: 408769 - DNA, 180 bp, Oryza sativa
ctaaatttggtgatgcatgcttgcgagcaatgcgtggtgatgctggcgttgtggaatgttcatatgttgcatctgcggcgaccgagttgccgttctttgcaacaaacgtgaggttaggtcgcgctggagccgaataggcatctcctctggggccgctgaattgcttttcagagagctgcc

SEQ ID NO: 408770 - DNA, 396 bp, Oryza sativa
ctggaaaactataagattgatccaaaatgtattggacgtttggaagttggcagtgaaacagtaatagacaagagcaagtctataaaaacatggctgatgcaaatatttgaggaatgcggtaatactgacattgaaggagttgactcctcaaatgcatgctacggtggaacagctgctttatttaattgtgttaattgggtcgagagcaactcatgggatggacgttatgggcttgttgtttgcacagacagctgcggtttacgctgaaggtccggctcgtccaaccggtggtgcagctgctattgcaatgttgattggaccaaaatgctccagtttttttcgaaagcaagtatagaggatctcatatggcacatgtctatgactttttccagcctg

SEQ ID NO: 408771 - DNA, 247 bp, Oryza sativa
ctcgtgaaggagaagaaggagaggagcagccatggcgtcgccggcggcagcggcggcgagcacgttcctggggacgaggctggcggacccggcgccgcagagcgggaggatcgtggcgaggttcgggttcggcggcgggaagaaggcggcggcgaagaaggcggcgaggccgtcggcgccgacgacggacagaccgctgggtcttccaggcccgctgggaggtgctctctttcttgcttacctacct

SEQ ID NO: 408772 - DNA, 502 bp, Oryza sativa
ctttcttgcttttcttctcctcctcctccgcaaccagatcaaaccctagatcagatctcatccccccaccttcgtcatcccatacgaggaggttattatggattcttcgtcttcatcgtcgtccacccaggcgcagagccagccggattttgattacctctttaagctgctcctcatcggcgactcgggcgtcggcaagagcagtctcctcctccgcttcacctccgactctttcgaggatctctcgcccaccataggtgtcgacttcaaggtcaagatggttaacaccggtggcaaaaaactcaagcttgccatctgggacacagctggacaggagcgatttagaaccttgaccagctcatactacagaggtgcacagggtattattatggtgtacgatgtcactcgacgggaaacattcaccaatctttctgacatatgggctaaggaaattgacctctattctacaaaccaggattgtattaagatgcttgtcggaaac

SEQ ID NO: 408773 - DNA, 344 bp, Oryza sativa
caggccgcccgccggaccggtccggaacggactgtggctcgacccacgcgcccgcttacatgaggaaattcatagcagcactgcggcttgcactagcagcagcagctcatctgctgctgacgctgccaccggcacaatgctactggctcaacccggagatctacgacgccggcgggctgagccggcgagccttcccggaggggttcgtgttcggcacggccgcgtcggcgtaccaggtggagggcatggcgaagcagggtggccggggccctagcatctgggacgctttcatagagaaacccaggaaaagcaatcagagattcagagtactaaactttagtgca

SEQ ID NO: 408774 - DNA, 274 bp, Oryza sativa; identical to SEQ ID NO: 393868

SEQ ID NO: 408775 - DNA, 221 bp, Oryza sativa
gttcacaccacccaccaactgagagctgagcaggcgagcgagcggacatggcagcatcgctccaagccgcggccaccctgctgcagccggccaagctcggcggccgggcctcctccgccgcgctgccatcgcgcccgtcttcgcacgtcgccagggcgttcggcgccgacaccggtgccgccggcaggatcacgtgctccctgcagtccgacatccggcag

SEQ ID NO: 408776 - DNA, 172 bp, Oryza sativa
tcgtttgcacggacaatagcaacactgccgaccaccaccaccgcggcggccctgaccccaccctgcgagccctagccatggacggcgacgacgaggatatgcgcgacgtctcgtccacgtcgtcctcctcctgcggcggaggggagggcgcggggttcgaggaggggatggt

SEQ ID NO: 408777 - DNA, 168 bp, Oryza sativa
atcggtttctgggtgaaatacctcgccgccggccaccactacagcggtggccctgaccgcaccctgagagccctagccatggacggctactacgaggatatgctcgacttctcgtccacgtcgtcctcctcctgcggcggatgggaggtcgcggggtacgaggagggg

SEQ ID NO: 408778 - DNA, 323 bp, Oryza sativa
gtctcctcgttccccgcacccaaaccctaatcctagccgccgctgccgctgccggtgccgccgccatggccagcatcaacgtctccacggtctatatctccgtcatcgactacttcatctccaaggtcctcgacgacttcatctcgtacggcgtcggcgacactgtcctcaacgagctccaggcgctctgggagatgaagatgctgcactgcggcgcaatctccgggaccatcgaccgctccaaggcggctcccgcgccgtccgcaggcacccccggcgctggaaccaccccgccggtacacgacctaaacgtgccctacgag

SEQ ID NO: 408779 - DNA, 216 bp, Oryza sativa
cgaggtcgtctccaaggtcggcaccaccgcgcgcatcaccgaggccgacgtcgaggccatgccctacttgcaggcggtggtgaaggagacattccggcgacacccgccgagccacttcgtgctgtcgcacgcggcgacgagggacacggagctcggcgggtaccgcgtgccggcggacgccagcgtggagttttacccggcgtggctgtttgtgta

SEQ ID NO: 408780 - DNA, 429 bp, Oryza sativa
gtcgtcttctccccttcttctcctcctcctcctcgattcggagctccacccgcagccatggctaagaactaccccgtcgtgagcgccgagtaccaggaggccgtcgagaaggccaggcagaagctgcgcgccctcatcgccgagaagagctgcgcccctctcatgctccgcctcgcgtggcactcggcggggacgttcgacgtgtcgtcgaagaccgggggcccgttcgggacgatgaagaccccggcggagctgtcgcacgccgccaacgcggggctggacatcgcggtgcggatgctcgagcccatcaaggaggagatacccaccatctcctacgccgatttctaccagcttgccggagttgtggccgtcgaggtgtccggtggacctgccgtccccttccacccaggaagggaggacaaacctgca

SEQ ID NO: 408781 - DNA, 482 bp, Oryza sativa
tcgctgggtggcaaaacccaagacatactcacaggatcatattatagcaaaggtttcctttcctcaaaggatacatatatatagtttccctacaatacaatggagcctgccaatgatttccaggaaggcatttcaacagagcatgcctttgaggcatagcctgtgccatcattgtcggaaacaataacgccacgatcaatggtggtgagcttcatccttagggtaactctcatcatcgtcgccatgaaggtcaccttgagctctggcttcattccgtcgctcagcatcccagccggcctcctcggtttttgtgtatcccgtgcgtcgatccgcattcttgactacttagcagtggcacaactaccattcacacgccaagagaacaccatcatccagaccctgtgcgtcgcatgcacctcgatcacattcaccggtggctttgggacatatatccttgcaatgggaaagaaagcagcttaggg

SEQ ID NO: 408782 - DNA, 293 bp, Oryza sativa
gtaggaggaggatagcagcctggctgtcggtgcggtgcaggaggagctcatctgctgctgacgctgccaccggcacaatgctactggctcaacccggagatctacgacgccggcgggctgagccggcgagccttcccggaggggttcgtgttcggcacggccgcgtcggcgtaccaggtggagggcatggcgaagcagggtggccggggccctagcatctgggacgctttcatagagaaaccaggtaaaagtaatcagagattcagagtactaaactttaatgcaggtgagat

SEQ ID NO: 408783 - DNA, 501 bp, Oryza sativa
ctttgtgagaattcttaattcatgagttgtagggagggacgtatgtcaccacaaacagaaactaaagcaagtgttggatttaaagctggtgttaaggattataaattgacttactacaccccggagtacgaaaccaaggacactgatatcttggcagcattccgagtaactcctcagccgggggttccgcccgaagaagcaggggctgcagtagctgccgaatcttctactggtacatggacaactgtttggactgatggacttaccagtcttgatcgttacaaaggccgatgctatcacatcgagcccgttgttggggaggataatcaatatatcgcttatgtagcttatccattagacctatttgaagagggttctgttactaacatgtttacttccattgtgggtaacgtatttggttttaaagccctacgcgctctacgtctggaggatctgcgaattccccctacttatttaaaaactttccaggtccgcctcatg

SEQ ID NO: 408784 - DNA, 108 bp, Oryza sativa
tcggttttgaattcttaattcatgagctgacgggagggttgcatgtaatcacaaacagatacttaagccagagttggatttaaagcttgtgtcaaggattatacaatt

SEQ ID NO: 408785 - DNA, 356 bp, Oryza sativa
tcggtagaaacaagccccaaggcaatcagtcagcacgcatgaagatgttttgatgccatctctgcaaaatctgctaaaaaagacgaatcttcccacactagagatcgaccttacaaacggatcctgctcgccctcatcatcgataagagctgctcccctcttatgctccgcctctcgtggcactcgtcggataccatctacttgtctccaaataccgttggcccgttcgcaaccatcaacaccccgcatgagctgttgcacgccgccaacgcattgctgtacatctcggcgcggatgctctatcccatcatggaggatatacccaccatcttctactccgatttctaccaccttgc

SEQ ID NO: 408786 - DNA, 301 bp, Oryza sativa
atgattcttctcttcttcttcttccactagctagtaagctttactccttcagcttgcttgttgcatgtatggcatgggaagatctggactcgcatcgtacgtcgtttagcatcgagcggccaggatggggcggaggaaggtgcagctgaagcggatagagcacaacatgaacagggcggtgagcgagtccaagaggaggcacggctgtgataaaaactgccacgagatcgtcgctcgtgtgaagggcatggtggtcctgatgcgcctcgcggagacgggggagctctacgagctctccatt

SEQ ID NO: 408787 - DNA, 170 bp, Oryza sativa
tcgctcgctcatcgccatctctctcagctctcacagctcactgcatcaatggccgcggccaccatggcgctctcctccccggtgatggcccgcgcggcgccgacgacctcctccgcgctcttcggcgaggcgcggaacaccatgcgcaagaccgtcgtgatgcccaagcc

SEQ ID NO: 408788 - DNA, 428 bp, Oryza sativa
gtcgctatgtctcgcgtgccgaggtgcgtcggcgggcggcggcggcggcgtcgacgtgctcgatcgggcgaggcggccggagttcgcggcgtggatggcgggcgtcaggtgggccatccacgagcggccagagctggcgttcgaggagatcgagaccagcaggctggtgagggcggagctcgacgccatgggcgtcgcgtacaggcacccggtcgccggcacgggcgtcgtcgcgaccgtaggcaccgggcgcccgccgttcgtcgcgctgcgcgccgacatggatgcactcccgatgcaggaggaggttgcagttgggagcacaagagtaaggtggccatgaagatgcacgcctgcggtcacgacgcacacaccaccatgctcctcggtgccgccaggatcctccaggagcgacgccatgagctgca

SEQ ID NO: 408789 - DNA, 494 bp, Oryza sativa
atcgtctcctcctcctctcgccgctcgcagcgaaaaagccagcgcctcccagcgcccacgcgatcccgacgaatcgaatcgagtccgagacgccgatctcggattcgagaccgttgatttcaaccaacacaagccctcctccggatcgatccgctcctcttcagccatggcaggaatggcacccgaaggctcccagtttgatgctaagcactatgacagcaagatgcaggaactactgcaccaaggtgacaatgaggaattcttcacttcatatgatgaagtttttgagagttttgatgacatgggcctccaagagaaccttctcagaggcatctatgcttatggtttttgagaagccatcagctattcagcaaggggggattgttcccttctgcaaagggcttgatggtgatcagcaggctcaatctggaacaggaaaaactgctaccttctgttctgggatcctgaggcacttgactttggattggtggagt

SEQ ID NO: 408790 - DNA, 425 bp, Oryza sativa
atctatttttgagctcaatcagcaacaacatctatctccttcttgcttagttaagtccttcgccctcccaagaagaagaagatgtcttgctgcggcggcaactgcggctgcggcagcggctgccagtgcggcggcggctgcggcggatgcaagatgttccctgatgtggaggccacagccaccaccaagaccttcgtcctcgctgctccatccaacaaggcgagctctggaggaatggagatggcggtggagagcggcgagaacggcggctgcggctgcaacacctgcaagtgtggcaccagctgccgcggctgctcctgctgctcctgcaactgaatctatcgttcgtcgtcgcccggctgcatgaggatttatcgcatggatgctgctactgtccatccgagctttggtcgaggccctaattt

SEQ ID NO: 408791 - DNA, 509 bp, Oryza sativa
  unsure (1)..(509): unsure at all n locations
ggatcttatccaccaccaccagcaagtctctgtcttgcaacatggaaccctgaattatcttttgttctcaaggctacaacaaaaccatctttgagtgtatcaggatatttccttctgagaactgtaggcaacttcgtctcagaagttatttccattggggattcagcaggagatttctgcttgtattttgagtcctcaggagacgcaaatcgtgaactggaactcaatacctggtcccttccactcattgcagtatcatcatctctgcgtgaggaataattactgccactctctacagcagataattcatctgttttctgttgagatctgcggcgagcaggtctctttttccctttctttccagaacggctgcgccttccttctgatcggnggacaatatgttgagatctagcagatgcttgaggctctttatgctgggatatggctctcctcttttcgtactccatttttaactgacttttaatcggctgctgcttcagaataaaaac

SEQ ID NO: 408792 - DNA, 174 bp, Oryza sativa
cttgcccaagaacgaactcaccacgctagtgttgagaagtggagagagttgagaggaatcaatggagatgatggttcatgggaggagagacgagcagtatggcggtctcaggctcgggcttgggcttgggctcagcctcggcgtcgccggtggtgcagcctacgactagctgct

SEQ ID NO: 408793 - DNA, 160 bp, Oryza sativa
atctgtatctccacctgagcacaggagaagccgcagccactgagatttgaccttctgtttctaccagaaaaacacaaacagtgaagatgtcgcagcctgctgagctttcccgtgaggagaatgtgaacatggctaagcttgcagagccggccgtgaggct

SEQ ID NO: 408794 - DNA, 341 bp, Oryza sativa
gtgtaaataaaaaggggaagattttttttgcatctcatcctctcgctctcgccgtctctcgccgctcccccccctttccaggctccaatcccgccgccgcgtaggatggccaagacgcggcagccgcagaagcgggtgctggagtcgttcaccatcaaggggcccgacggggtcatcaagcctggggatactgtgctaatgatggcacctgactcatcaaagaaaccatatgtggcaagggttgaggaaattgaggcaacaggacctcaagcctctcaagtgaagatcaagttgcggcggtactaccgtcccgaagagtccatcggtggccggcggccatt

SEQ ID NO: 408795 - DNA, 281 bp, Oryza sativa
cccgtgcgacccgttttggtatgtgagctaatgagccacaacatctatctccttcttgcttagttaagtccttcgccctcccaagaagaagaagatgtcttgctgcggcggcaactgcggctgcggccgcggctgccagcgcggcggcggctgcggcggatgcaagatgccccctgatgtggaggccacagtcaccaccacgacctttcgtcctcgctgctccatccatcagggaacgctcttgatgtatggagatggcggtggagagcggccagaaccgc

SEQ ID NO: 408796 - DNA, 389 bp, Oryza sativa
tcgttctcctgctgctgccgaagcggaggtggataccccggcatacgattctagatttttccaatcggcgaggttgccggagttctttggatgtactgatgtccttcaagtggaccatccttgatcggccagagctggcgttcgaggagatcgagaccagcaggctggtgagggcggagctcgacgccatgggcgtcgcgtacaggcacccggtcgccggcacgggcgtcgtcgcgaccgtaggcaccgggcgcccgccgttcgtcgcgctgcgcgccgacatggatgcactcccgatgcaggaagaggttgcaatggggagcacaagagtaaggttggcatgaagatgaacgcctgtggccacgactcacacaccatcatgcttcttg

SEQ ID NO: 408797 - DNA, 452 bp, Oryza sativa
atttgatctaaagcctgccgctggttctaacaacgagataaatgtgctgaatcagtcccctttattccttgaacaagtgagaggggaggctcctcgtgttgatttttttaggaggggtgaggtggccaacatttgttagtaccaaattgacatattgttcggaacatgctcaccgagaatactaagatgacgttttctggtacacaggacaagtgcaatgcttgtgacatgaccgtgcatttcattgatctccttaccgcggtcagtattttctaccacaagtcttgctttaattgtcgtccctgtttaggcactttttttgtttttatttttcttttctttttcttattttttcttctttttttacttttttgagcagctttttaaggtaacaggactcctttatgaaaaaattcccttaggtacaaaggcaaacagtgaacaggtttaga

SEQ ID NO: 408798 - DNA, 153 bp, Oryza sativa
gtaggttcaaggtcgcacggagcgcaactggaacaggggccgcaccttgcttgaggctcttgaccagatcaacgagcccaagaggccatcagacaagcccctacgtttttcccttcaggacgtgtacaagatcgtctcgcttgctacctatcc

SEQ ID NO: 408799 - DNA, 531 bp, Oryza sativa
tcggctctctttggtgtcgctggttctaacaacgatataaatgtgctgaatcagtcccctttattccttgaacaagtgagaggggaggctcctcgggttcatttttctgtaaatgggaatgagtacaacaatgggtactaccttgctgatggtttattccctgaacgggccagtttcattattactttttcactttcataaatagcgatgctttatttgttattctgttttattttatttttttttttattatttttttttttcttttattctttttatttatattatcttaattattcttttttttctatttttattttaaattttttttatcctatatctttttttttatttctattatacatcttatctctaattttatttatttattttactatccttctttcttaatcttttttttatttcctgttatttatatttatgtttactacttttattcttatacttgttatttattttatctaatttctattttatatattttccatttattactttttttcttttttt

SEQ ID NO: 408800 - DNA, 371 bp, Oryza sativa
tcgttatcaaagcctcccatcaacttcttgcacacaccctccctttggctttcatctgcatctattcagttgcagattgagagccaaagacattatattgattctatcaggagggttgtgctagcgaattcttgttagcaacaaattgacatattgctcggcacatccccaccgagaataccaagatgacgttctctggtacacaggacaagtgcaatgcttgtgacaagaccgtgcatttcattgatctccttaccgcggacagtattccctaccacaagtcttgcttcagatgcagcccctgcaaaggcacactttcgatgtgcaggtattcgtccatggatggggttctttactgcaagacccatttt

SEQ ID NO: 408801 - DNA, 291 bp, Oryza sativa
tcgctacgaccgcgcccgcgcggcgctgcagcgcatcctcggcgccggcgccgacgttgacgccgagctcaaggacatcgtccgcgccgtggacgaggcgcgccagaacgaggccggcgcgttgcggcggctgttcagcaggcggtacaggcactgcctggcggtggggctcggcataccggtgttctacgagttcaccggcatgatcgccattttcatcttctcgcccgtgctgttccgtacggtggggtctatcgatttgtacgccttctttttgtcctttgacttaat

SEQ ID NO: 408802 - DNA, 484 bp, Oryza sativa
gcggctacggcggcgaacgcggcggggatggcggcggcgagctacaccgccatgcacctggacctcgcctccctcgacagcgttcgccagttcgtggacaacttccggcgctccggcatgccgctcgacgcgctggtgtgcaacgccgccatctaccggccgacggcgcggcagccgacattcaccgccgacggttacgagaggagcgtccgggtgaaccacctgggccacttcctcctcgcccgcctgatgctcgacgacctgaagaaatccgactacccgtgggggcggctcatcatcctcggctgcatcaccggcaacaccaacacccttgccggcaacgtccctcacaaggccgggctaggcgacctccgggggctcgccggtgggctccgcgggcagaaccggtcggcgatcatcgacggcgcggagagctttgacggcgccaatgcgtacaagacagcaagatctgtacatgctgacg

SEQ ID NO: 408803 - DNA, 396 bp, Oryza sativa
catctgcatccaaaaccaaacccaaactcgtattctccaccggagcagagcagcggcggcggcaatggacgccctcctcgtggagaaggtcctcctgggcctgttcgtggcggcggtgctggccctagtggtggccaagctcaccgggaagaggctccgactcccgcccggtcccgccggcgcgcccatcgtcggcaactggctccaggtcggcgacgacctcaaccaccgtaacctgatggcgctggcgcggcggctcggcgacatcctcctcctccgcatgggcgtccgcaacctggtggtggtgtccagcccggacctcgacaggaggtgctccacaccagggcgtcgagttcggctcccgcacccgcaacgtggtgttcgacatcttcaccg

SEQ ID NO: 408804 - DNA, 461 bp, Oryza sativa
actctctccacacaggtaagaagccggcggcggcggcggcgatggtttccctcaagctgcagaagcggctcgcctccagcgtgctcaaatgcggcaagggccaggtctggctcgacccccatgggggcaacgagatcctcatgggccacttccggtagaacattccgaggtgggtcagggagggtttcattatcaagaagccccagaagattcactccaggtccccgtgcacggagagcccatgaggccaagcagaagggacgtcactctggctatggcaagcgtaggggtaccagggaggctaggctccccaccaagatcctgtggatgaggaggatgcgtgtgctcaggcgtttgctgcgcaagtatcgtgaggccaagaagattgacaagcacatgtatcatgacatgtacatgaaggtcaagggtaacatgttcaagaacaagcgggttctcatgga

SEQ ID NO: 408805 - DNA, 439 bp, Oryza sativa
cctgtgcaaagatcaatgttctgctgcaagcatatatttctaggctgaaattggagggtctttcgcttagctccgatatggtctacatcagacagagtgctggccgtctcttacgagcgttgtttgagatagttctgaagagaggatgggcccaactagcagagaaggctttgaatctttgtaagatgatagataagcagatgtggaatgtccaaactcccctgcgccaattccctggtattccgaaggaaatcctaatgaaactggagaaaaaagaattggcttgggagaggtactacgacctatcatctcaggaaattggtgaactaattcggttcccgaagatgggcaggcaactgtacaagtgcattcaccagttccaaagttgtatctttagcccatgttcagccaatactcgtacggtttgggttttgaggtg

SEQ ID NO: 408806 - DNA, 465 bp, Oryza sativa
  unsure (1)..(465): unsure at all n locations
ttctcacctccacctcgcgcactcagtctgtactacctgtacgtacgtggccgccgctagctaagctaggaattgaaatggggatggagaggccgcaagagaaggtggccaccaccaccaccgtcgccttcaacctcgccgagtccggctactccgaccgccccgacctcgacgacgacggccgcgagaagcgcacagggacgctggtgacggcgagcgcgcacataataacggcggtgatcggctccggcgtgctgtcgctggcgtgggcgatagcgcagctggggtggtgtgatcgggccggccgtgctggaggcgttctcggtcataacctggctctgctccagcctactcgccgactgctaccgatctaccgaccccgtccatggcaagcgcaactacacctacggncaagccgtcagggccaacctaagtgtggccaagtacaggctctgctcggtggca

SEQ ID NO: 408807 - DNA, 452 bp, Oryza sativa
atccccgcgacgcgcacgcgacgcgacgaccacccagccacgcgcgacgcgccggaggagccgggcccgccatggcgaaccccatcatcccgagcagcagcggcagcgacggcgctgaggcgaggacgaagctcgggcggctgaacgcggcggtggcgcgctcgcgggtcggtcggcgggtcaagctggcggcacgcgggtcgacgttcaccacggagctccgcgccgggacgaccacgttgctcaccatgggctacatcctctccgtcaacgcctgcatgctgtgcgactccggcgccacctgcaccgccgacgactgcgacgcgccgtccccggcgtgcaggttcccgcccgtggaccccgggtacgccgcctgcgtggcccgcgcgcgccgcgacctgatcgtcgccacggcggcgtcgtcggagatcggctactcatcatgggcacct

SEQ ID NO: 408808 - DNA, 374 bp, Oryza sativa
tctttgaggcgggttggcttttcctgaacctctttaccttctcctactgggacctgctccggggccggcaccacggctagtggggtgagatggcggcccccgatgtagtgcccctcgggctgtcgtcgcggtctccgctgggccaccgactaccgctccctcgagggctgcttcttcacctacggcgagatcctcctctacaagatcatcaacgacagggagacggcaaggtcacgtgggtttggctatagcaccttctactccgagcaggcgatgcgcaacgccatcgagggcatgaacggcaaggagctctacggtcgcaacatcaccgtcaatgatgcccagtccctccgctccggcggcggaggctgtgg

SEQ ID NO: 408809 - DNA, 479 bp, Oryza sativa
  unsure (1)..(479): unsure at all n locations
cgtcgtcgccgcgagtttgctcctctcggcggcgccctcctcgtcgtccccgcgcgctcgtgccgctgctccggccagcgggtactccccgtggcgaggcagcattagtagaatatgatcgcacccaacagctatggctaccacacaagcctcagaagcagccactgagaaaggattgcctttggggatggatgtctccatggtggatgaatatgcttcccagtccaagctgctgcaggaattcgttaaaattcccactattggcaacgcttggatcttcaattgcaagactgaaaacacatctagggcgatagtttctgttggccaaacagatctgttggcaaacaaaaagaggagctttctattaaattcccacatctcaaaaaattcctcaaaatctggggatngtcaaggggtcttcctttccaatcgaaatgagtgggagtttcagcagtaatttcatcggcatctgggagaaa

SEQ ID NO: 408810 - DNA, 463 bp, Oryza sativa
  unsure (1)..(463): unsure at all n locations
gttccttcaaggaggaaatcagcaaggttgttaagatccaggaagagcttgacatcgatgtccttgttcacggcgagcctgaggtcagtatccttgtgtactgtttgtgtctcctagactttgcacctggctgttcgagaaaacaaaataaatatattgatcgaagcattaacaaagtttggtttgttctgcattgaagtaagctaattggcatgtattttatactttcagagaaacgatatggttgagtacttcggtgagcagttttctggttttgcattcactgccaacggatgggtgcaatcttaatgatcacggtgtgtcaagccaccatttatctatngtgatgtgagccggcccaaccccatgactgtgttctggtccaagttggcgcatagcatgacctctcgccccatgatgggaatgttgactggtcccgtcacactccttaactggtcttttg

SEQ ID NO: 408811 - DNA, 506 bp, Oryza sativa
  unsure (1)..(506): unsure at all n locations
cctcctcccatccggatctcgccgggccgggccgggccacctttttccgggccgggtcgtcgggcatgggcgtcgccaccaacggctcctcctcctccacctcggagtcggcggagaccgcgcagtcgcaggcgtacaagttcctcatctacggccggaccgggtggatcgggggcctgctcggccagctctgcgccgcgcggggcatccccttcgcctacggcgccgggcgcctcgagaaccgcgcccagctcgagaccgacatcgacgaggtcgcgcccacccacgtgttcaatgccgcggtggtcaccggccgccccaacgtcgactggtgcgagacccatccgaccgagaccatccgcgccaacgtctgcggnacgcttacgctcgccgacgtctgccgcgcccgcggccttgtgctcatcaactacgccacgggctgcatcttcgagtacgacgccggccaccagctcggcacagggatcgggttcaaggaggaggacacg

SEQ ID NO: 408812 - DNA, 261 bp, Oryza sativa
tgctgttatggcatcctcctaccttctactcgcctgtgttgtggcggcggctatggtgtccgccgtctcctgctggccacccaaggtgccaccgggccccaacatcacgacaagctacggcgacaagtggctggaagccaaggccacctggtatggtgcgcccaagggtgctggccccaaggacaacggctgcgcctgcgggtacaaggatgtcgacaaggctcccttcctcggcatgaactcctgcggagacgaccccat

SEQ ID NO: 408813 - DNA, 424 bp, Oryza sativa
ggggtttgaaagtgcacatttcaagttaagccatgagatgactcaattgcttgatccatctggaacaatgaagagtgacacttggaatcagtttctgagattgtgtgtcaaagggtacctagcaggaaggagacacatgaatgggattattactaccgttaatttgatggtggacagtggcctgccttgctttagcaggggagaacctatcgctaatctgcgaaaacgttttcatccagagatgaacgagcgtgaggctgctaattttatggtcagaacatgtgtggatgcctacaacaaatggactaccgcagggtacgacttgattcaatacttgcagcagggtattgagaaatagtctatttcttcctttgtaatgggggggtcgtgtacatcaattgtatgtagccactaattcttttat

SEQ ID NO: 408814 - DNA, 369 bp, Oryza sativa
cgattcctcgccaccacacccacccacccaccaatggcgtcctcccgcctcctcctcctcgccgcgctgctcgccacggcggcggtgctggcggcgtcgcagaagccgaaggccgccacgccgacgaaggccacgccggcgtcgcccggccccgcggcggcggcggccgacggccccgcgccgacgaacgtgacggcagtgctggagaagtccggcaagtacaccaccttcctccggctcctccacgagagccgggtggacacccagatcaacagccagctgatggacagctacaacgggctgaccatgttcgcgcccacggaccgccgcgtcgcggcgctcaagccggcacgctcactcgctgtcgtc

SEQ ID NO: 408815 - DNA, 439 bp, Oryza sativa
atcgtccaagcatctgcaaaccaacgcgtccaatctgaggtgacggagacggagctgttcagcgtggtgaaggagaagcacggcaagggattctcgcgattcatcgaggagaaggtggtcgccctcgccggcgacatcatctacgacgacctgggcctcgatcccccgttgcttcaacacctcgccgacaacctcgacgtcatggtcaatggcgctgccaccaccaacttctactgcaggtatgatgtgtcgctggatgtgaatgtgctgggagtgaagcatctgtgccaattggccaagaaatgcaagggcctcaaggtcttcctccatgtctccactgcttacgctggcggcgagcaggaggggctaatccaggaatgggcgttcgaggaggggtgggcgctgccagaggcgatgcacctggacgtggacgcggagc

SEQ ID NO: 408816 - DNA, 490 bp, Oryza sativa
gttgtttccggagcggacggagccctggggcttttgcatgttcagatcgacgcatccttcctctggacattgctggtaggctgcgattgctgaacaagctaatcaaccgactgtgcttcagatgttcggtggtctgtctcaccttgactctaccttctctgaaggcgtacggcctcgtaacatttgcccatctgtcttatactatgacatgcgcttttccacaatgagctacatgacccagggccttgttaatggtggcatcaacgttccaatgatgtcgcactctccaattgttgctaatgctccaactgagaaaggtggcaaacacttcatgattgatatcctcatgggtggagtgtcagccgtagtttctgagactgctgctgctccgattgagcgtgtgaagctgcttatccagaaccaggatgaaatgatcaaggctgagatgctctcataacatacagggtattgaagactgcttgggcgcact

SEQ ID NO: 408817 - DNA, 106 bp, Oryza sativa
ccttttcaacaaggtaatggccgtacgagcctgacgactgtccatggattgtagactgtattaagctacaacaagctactaatagatctcaagaatgagttccgct

SEQ ID NO: 408818 - DNA, 490 bp, Oryza sativa
ctccgccaccttcgcccttctagaaccttcccgcgtccgccaatggcgacctgctcgtgggccgccaccacggcggcggcggcgcccccccgcccgcccgccaggtgccgctcgcgcgtcgccgcgctccgccgcacggccgccgcctccgccgccgccgacagctgcgtcctcgccgaagcgcccaaggggctcaaggtggagcaggcggatgcggtcgagccagcggcggcggcggcggcgcggagggacgtggggccggacacggtggcgtccatcatcctcggcgggggtgccggcacgcgcctcttccctctcacgcggaccagggccatgcccgcggtgcctgctgtgcgatgttacaggctgatcgatatcccgatgagcaactgcatatacagcaagatcaacaagatctacgttctcacccagcttaactcccagtctctcaaccgtcacatggcgcgcacttataacattggcgaagggg

SEQ ID NO: 408819 - DNA, 191 bp, Oryza sativa
gttcgacaagctcaaggccgagcgtgagagaggtatcaccatcgatattgccctgtggaagttcgagaccaccaagtactactgcacggtcatcgatgcccctggtcaccgtgacttcatcaagaacatgatcacgggtacctcccaggctgactgtgccgtgctcatcattgactccaccactggtggtt

SEQ ID NO: 408820 - DNA, 448 bp, Oryza sativa
gttgtcgccctttttttttttttttggacacaatgattagggatcacttattcattatagttcttccatgctgctctaccacagcaaaacgtttcagacaccatcaaaccagacttaaggatacacattacaggtaaatagtacacaatgaaacgggacacgaccaaggaccagaccagacaaccatagctccattggggaagacaaataggcagacttgtgaaccctagaacagcagcagctccatggctgaggacttactggccaccacggaggcggagcaccaggtggagctgtggactccttctggatgctgtaatccgcaagggtgcggccatcctcaagctgcttaccagcaaagatcagacgctgctggtccggggggatgccctccttgtcctggatcttcgccttcacgttgtcaatagtgtcggacgactcaacctca

SEQ ID NO: 408821 - DNA, 488 bp, Oryza sativa
gctggccaaagcactctagcaagagagattaaggaacataatccattgcactttgcatttgaggtgtcttctggggggcggacaataaaattgagaacaagaagttctgctaaagtgaaagattgggtatctgcaataaatactgctcgacgacccccagagggttggtctcacccacaccgttttggttcattcgcaccacctaggggtttgactgaagatggtagcgtcgtacaatggtttcttgatgggcaagctgcgtttaatgctattgcttcttcaattgaggaagccaaatcggagatattcattactgattggtggctgtgcccagaactgtaccttcgacgccctttccaccatcatgaatcctctagacttgatattcttctagaatcaagggcaaagcaaggtgtacagatctatattcttttgtacaaggaagtttctcttgcattgaaaattaacagcatgtacagcaaacagag

SEQ ID NO: 408822 - DNA, 340 bp, Oryza sativa
ggctgttgagtactttctcaagcaaaaatgcagctcaaatccagagattgcaaaggtgttggagttcttccattttggatgtacttctgaagatatcaacaacttgtcacatgcattagctctaaaagagggggtaaatacagttatgttccctgttatgatggacatatgcaaagcaatgtgctccttggcaacacaaaattcaaccatccctatgctgtcgcgaactcatggacagccagcatcgccaacaactctgggaaaagagatggcgaattttgcggccagattgtcaagcataggaaatagtttttctgaggtcaagatactatggaaattc

SEQ ID NO: 408823 - DNA, 489 bp, Oryza sativa
gtcttgcctggcccgcgccgcaatgtcctctcggcaatcaacaacggcggtggcacgaacagcgacacggcgtcggtggacggcggcgagggcggggctgggccggcggcgcctgtgatcgagttcaccgggagggaggatgtggagcggctgctcgccgagaagatgaaggggaagagcaagaccgactacaaggggagaactgagcagatgagtgagtacatcaagaagctgacagcttgcatccgctggtacattgagttggaggacggctacttggtcgagcaggagaagctccgtagtacgatggatgcagagaatgcccagcacgcctagttggatgcccagcttagcagtgatctggaagagctgaaagctgcacacctgaacttgacgcggcagtgcgattcgttggaggataagcttaacaaggagaaggccgacaggatgcttgctgtggagtcctaccagaaggagaggcagcaaagg

SEQ ID NO: 408824 - DNA, 373 bp, Oryza sativa
gttgtcccttactgggacgtccatcactctggaggtagaatagggtgacaccatcaacaacgcgcactccacgagccaggataaggaggtcattcctgagaccagaagagctaatgttgccggaagaagatgcgtattagccgacctttgccgactataacatgcagaaggagtccaccctgtaccttgtgctgcgcatacttggtgagatctgagcgcgtgctgtggtgcagatttggacttcattatacctatgccggtcgtctgtcatatcatcgagtcatgggtgtgtcgtctcctggtctagagcccctaggcgatgttgatactagtatgcatgctagtgcaacatgcctaactgtgcatcggtacc

SEQ ID NO: 408825 - DNA, 383 bp, Oryza sativa
gccagctccagccacacgagcctagttcaggtagatacaatggcgtccaccgcctctttcatgctcgccgtcttgctggcggtggccgtcgcggcggcgccggcgagggcggtgcgatgcccgccgagcgacaagcaggcgctgatgagagtgaagcagtcgctgggaaacccggcgacgctgtcgacgtggtccctggcgtcggcggactgctgcgagtgggaccacgtccggtgcgacgaggccgggcgcgtgaacaacgtcttcatcgacggcgccaacgacgtccgcggccagatcccgtccgccgtggcggggctgacggcgctcatgtcgctggcgctgttccgcctaccgggcctctacggtcccattccggcgtg

SEQ ID NO: 408826 - DNA, 444 bp, Oryza sativa
ctctccgatccccacgtatggcggcggcggcggcatctgcggcggcggcgacggccgcggaggacggggcgcggctgctgcggctggaggagcaggcggggcacggcggcggcggcgcgtgggagtacctctgcctcgcccgcaggctccgcgcgcgccgcccggagcccgtcctccgcctcggcctcgccctcctcaacgactcctccgcccgctcccgcctcgcctcagaacagtggacgctgtatgagcaggtggcagtggctgccatggattgccagcgtctcgatgtggcaaaggattgtattggagtgctttccaagcagtttcctggcagcatgcgggttggtcgattggaagccctgctgtttgaagcaaagggtgaatggactgatgctgaaagggcctatgcgcttatccttgaaaacaatccgttcgatcaga

SEQ ID NO: 408827 - DNA, 465 bp, Oryza sativa
cggacgcgtggggagagagaggagagcggcggcgatggcgtcgtcgtcgtcgtcggcgtcgagcaggttctcgccggcgctgcaggcgtcggatctcaacgacttcatcgccccctcgcaggactgcatcatctacctcaacaagggcccctccgcccgccgccttccgatcaaacaaaaggaaattgcagtgagcacaaatcctccagaggaagcagtcaagatttcactgaaggactgtttggcttgcagtggttgcataacatcagcagaaacagttatgcttgagaagcaaagcttgggtgacttcattactcgcatcaactctgacaaagctgtcatagtatcggtctctccacagtcaagagcatcgctagctgcattctttggtctttctcaatcacaggttttcagaaaactcactgcgcttgtcaagtcgatgggcgtaaaggcagtttacgacac

SEQ ID NO: 408828 - DNA, 325 bp, Oryza sativa
gtgctgacgagctactacaagagcgaccacttcaagaaccggccgtacgacccgtaccacaactacacgagcccgacggcggccatcctctgcgccgacgcgttccagagcatgtacgcgcagatggtgtgcggcctgtgccagcgcaacgacgtgctgcgcctcggcgccgtgttcgcctccggcctcctccgggccatccgcttcctccagctcaactgggagcagctcgccgaagacatcgagtccggcgagctcacccctcgcgtcaccgacccgtcggtgcgcgaggctgtcgccgccatcctcctcccggaccccgagc

SEQ ID NO: 408829 - DNA, 323 bp, Oryza sativa
ctcgtcgacgccaaggtggacgtggtgctcgccggccacgtccactcgtacgagcgcagccggaggttcgcgaacatcgactacaacatcgtgaacggcaaggcgacgccggcggcgaacgtggacgcgccggtgtacatcacgatcggcgacggggggaacatcgaggggatcgccaacaacttcacggtgccgcagccggcctactcggcgttccgggaggccagcttcggccacgccacgctggagatcaagaaccggacgcacgcgcactacgcgtggcaccgcaaccacgacggcgccaaggccgtcgccgacgccgt

SEQ ID NO: 408830 - DNA, 379 bp, Oryza sativa
gtgcttgcgagcttctacaagagcgaccacttgaagaaccgggcgtacgacccgtaccacaactacacgagcccgacggtggtcatcctctgcgccgacgcgttgcagagcatgtacgcgcagatggtgtgcggcctgcgccagagcaacgacatgctgcgcctcggcgcctgtgtcgcctgcggtctcctgcggggcatccagctttctccagctcaactgggagcagctcgccggaaacatcgagtccggtgagctcaccactagcgtcaccgacccgtcggtgcgcgaggattgcgacgccatcctcctcccggaccccgagctcggcaagcttatccgtgccgagtgctccaagggcgactgggccggcctcatc

SEQ ID NO: 408831 - DNA, 507 bp, Oryza sativa
ttaagtttgaggatcactaccacttctcatgccagttcacaactgacttgattgcgatgaaccacgctgacttcatcatcaccagtaccttccaagagattgccggaaacaaggacactgttggtcagtatgagtctcacatggcattcaccatgcctggtctgtaccgtgttgtccacggtattgatgtttttgacccgaagtttaacattgtctcgcctggtgcggacatgtccatctacttcccttactctgagtctcgtaagaggctcacctccctccacccagagattgaggagttgctctacagcgaagttgacaacaacgagcacaagtttatgctgaaggacaggaacaagccaatcatcttctccatggctcgtcttgaccgtgtcaagaacttgactggtctggttgagctgtatggtcgcaaccctcgcctgcaagagctggttaccctgtggctgtctgtggtgaccatggcaacccatctaatgacaaggagga

SEQ ID NO: 408832 - DNA, 461 bp, Oryza sativa
cgtgctactacgcggcggcggcggcggcggcgacggcgagatggtgcagcgcctgacgtaccgcaaaaggcacagctatgccacgaagtctaatcagacgcgggtcgtcaagactccaggtggcaagctcgtgtaccagtacaccaagaagagggcgagcgggcccaagtgccccgtgaccgggaagaagatccagggaattccccatctcaggcctgctgagtacaagagatccaggttgtctaggaaccgcagaactgtgaaccgtccctatggcggagtgctctctggaactgcagttagggaaaggatcattcgtgctttcttggttgaagagcagaagattgtgaagaaagtcttgaaaatacagaaaaccaaggacaagtcagcctcaaagtagacaactcttggaagtggaagccaggcgatgtgctataaacacggaaaacatttttggtgat

SEQ ID NO: 408833 - DNA, 440 bp, Oryza sativa
tgatatgtgaggtggtaggagctagcattgtgaaaagtggatctggcatgtttgctgtatattctgtttctgtgactgatgccaatggtaatagttggtccatcaagaggagatttcgccatttcgaagagctacatcggcgtttgaaagaatattctcagtacaatcttcacttgcctccaaagcacttcctttcgtcagggctagaggtccctgttgttcgagagagatgcaagttgcctggcctattttttaaggaggtcttttagatatccacctgttcaaggcgtgtataaaggcttgggattttctaagtgttgattcacagacatacatcttcactgacactctctcagttatccagacgttgtcagtcaatttagatgaaagatcaaaagagaagaatacaaaatcattcaattcttcccaagctttgaatg

SEQ ID NO: 408834 - DNA, 299 bp, Oryza sativa
atttcgaataacccttgctgacaaaaatgcaccaaacgaagaagtgtggaggcagattgaggatatgtgtaggacaacaaaggctgctgctgttcctgttattcctgattctgaaggcacagattcaaatccattttctcttgatgctcttgctgtcttcatgtttcgtgtacttcaacgggacaatcatcctggtaatctggacaaggcatcaccaaatgctggctatgttctgttaatgttttacaacctctacgatggcaagagtcgaagagaatttgaaagtgaactatatgagc

SEQ ID NO: 408835 - DNA, 506 bp, Oryza sativa
aatgcatctgacaatgtgtattgcacactgttggcacacagtgtggttcatggagccatggctggatacactggtttcactgttggccaagtaaatggtcggcattgctatatcccgttttacaggatcacagagaagcagaacaaagtttcaattactgataggatgtgggcaagacttctctcctcaaccaaccagccaagtttcctcagcaagaaagatgtggaggacgcaaagatggaagaagagagagcatccaagtttttcgatgggccgcctcccaaccccaaggttgaagacaaagtcgcttccaatggcaaggctgtgaagcgaggcagaaggctactgatctattatgtgcagatggattaattattactcaataatgtcagtaatctatctatggctagcgagatggattagtaaataatattagtatatctatggcaagtgatgctcagctcttcctgtccaaattaaaatgccgagaatagatctcctctagc

SEQ ID NO: 408836 - DNA, 491 bp, Oryza sativa
gttttccctccgccgccgccgcctcccgcatccacgcgcctcctcctcctccgccgccggcgccgccaccgcagcatcagccatggccgaagtggagctcccgcagcaggaggtcaagctcttcagccgctggtccttcgaggacgtccaggtgaacgacatctcgctggcggactacctggcggtgaacccgacgaagcacgcgacgtacctgccgcacacggcggggaggtactcggcgaagaggttccggaaggcgcagtgccccatcgtggagcgcctgaccaactcgctcatgatgcacggccgcaacaacgggaagaagatcatggccgtgcgcatcgtcaagcacgccatggagatcatccaccttctgaccgacgccaaccccattcaggtcatcgtcgacgccatcatcaacagtggccctcgtgaggatgcgacccgtattgggtctgccgctgctgcgaggaggcaggctgtggatatct

SEQ ID NO: 408837 - DNA, 420 bp, Oryza sativa
ttaagtttgaggatcactaccacttctcatgccagttcacaactgacttgattgcgatgaaccacgctgacttcatcatcaccagtaccttccaagagattgccggaaacaaggacactgttggtcagtatgagtctcacatggcattcaccatgcctggtctgtaccgtgttgtccacggtattgatgtttttgacccgaagtttaacattgtctcgcctggtgcggacatgtccatctacttcccttactctgagtctcgtaagaggctcacctccctccacccagagattgaggagttgctctacagcgaagttgacaacaacgagcacaagtttatgctgaaggacaggaacaagccaatcatcttctccatggctcgtcttgaccgtgtcaagaacttgactggtctggctgagc

SEQ ID NO: 408838 - DNA, 254 bp, Oryza sativa
cctgtgtcaaggagggcatccccccggaccagcagcgtctcatcttcgctggcaagcagcttgaggatggccgcaccctggccgactacaacattcagaaggagtctaccctccaccttgtgctcaagctcaagggaggcatgcagatcttcgtcaagaccttgactggcaagaccatcacccttgaggtcgagtcgtctgacaccattgacaaagccaaggcccagaccccaggcacggagggcattccccca

SEQ ID NO: 408839 - DNA, 482 bp, Oryza sativa
gtctccccctttctgaacacagcaccaccccttctgctgcatctcccacctccctctgaattgtgggcctgaggcgatggcggcgctcgccccgtccaagatgctcggcacccggctcaacttcgccggctcctcccgctacgccaccgtggcaccgaccaccggagcgcagaagatcgtctccctcttcagcaagaagcccgccccgaagcccaagcccgccgccgtcacctcctcgagccccgacatcggcgatgagctcgccaagtggtacggccctgcaggaggatcttcttgccggagggtctcctggaccgctcagaggtgccggactacctcaacggagaggtccccggagactacggctacgacccttttggcctcagcatgatgccagaggacttctccaagtccaggcctatgagctgatccatgcaggtgtgcgatgctcgcgccgctggttcatcatcccgagcctgcac

SEQ ID NO: 408840 - DNA, 408 bp, Oryza sativa
ggggtcgggaggagcgccgggatggaggtggcaatcgccaccgcggcggtcgtggccatgggtacggggaaccgcgtcctctacaagctcgccctcgtgccgctccgcgactaccccttcttcctcgcccagctcgccacgttcggctatgtggttgtctatttctcgatcctgtatcttcgccatcaagctggcattgtcactgatgagatgctgtctctaccacaaaaaccttttctggctgtaggcctcttggaggctttatcagcagcatcagggatggctgctggagccgttctttctggggcttcgataccaatactgtcacagacgtatcttgtttggcagcttcttttatctgctatttttttgaagaggcgctatagaataaatgagataactggatgc

SEQ ID NO: 408841 - DNA, 505 bp, Oryza sativa
ctcatcgccatcgtcgtcgtctccctctcccgtggcaacggggagcagaccgacctcacgcgggagacgttccccgcgggcttcgtcttcggcaccgcgtcgtcggcgtaccaggtggaggggaacgccctccagtatggccgagggccctgcatctgggacaccttcctgatgcaacctggtgtaactcctgataattcgaccgcgaatgtgaccgtcgacgagtaccaccgctacatggatgatgtggacaacatggtgagagtgggcttcgacgcgtatcgcttctcgatctcctggtctcgcattttccccagtggacttgggaagattaacaaagacggcgtggattattaccacaggctcattgattacatgcttgctaacaacattattccatatgttgtgctctaccactacgaccttccacaggtgctccatgatcaatacaagggatggctacaccccagaattgcgagagattctgtgagatttgcagacttct

SEQ ID NO: 408842 - DNA, 410 bp, Oryza sativa
tctggttccttgaccggaacgcgcgcaacagccaccaatacacttgcaagtacaatgatccactccagcagagcacggagaacaagccatcgccaccggccatcttcccggcaacctacaacacgccgaaccaggctctgaacaatctggatttcggcctgcccatggatggccagaggtcaattacagagctgatgaacatgtacgacaacaacttcgtggccaacaagaaccttagcaacgacaatgccacgatcatggagaggcctaatgcagtcaacccaaggatacagattgaagaaggcttttttggacagggaagtggcatcggcggcagcaacggagggtgtgttcgaagatgtcaatggcatgatgcagcaaccgcagcagaccaccccggcacagcagca

SEQ ID NO: 408843 - DNA, 366 bp, Oryza sativa
tgtcgagcatcgcatcgcatcgcatcgcggcggtgcccaagcgaggcaatctccccgtccgtcttccctcccggcctcggatcccggaggaggtctctcctcctcgctaggagcggcggcgggtgccgtcgtcctgctgcttcccttccgcctccggtccacccctgcaggcggcgatggcgttcttccggggcctgaccgcggtttcgaggattcgatcccgcatggcacaggaggccaccacgcttggtggtgtgagatggctgcagatgcagagtccatctgatcttgatcttaagtcccagctgcaggaattgattcccgagcaacaggatcgcttaaagaaacttaaatcagaacatggga

SEQ ID NO: 408844 - DNA, 475 bp, Oryza sativa
tgttcatgcaagatggcacaccatggccaggaaacaatactagggaccatcctggaatgattcaggttttccttggtcacagtggtggccttgataccgagggtaatgagcttccccgcctggtctacgtatctcgtgagaagcgtcctgggtttcagcaccacaagaaggctggcgccatgaatgctcttgttcgtgtctcagctgtgcttaccaatggacagtacatgttgaatcttgattgtgatcactacatcaacaacagcaaggctctgcgggaagctatgtgcttccttatggatccaaacctaggaaggagtgtctgttatgttcagttcccacaaaggttcgatggtattgataggaatgatcgatatgcgaacaggaacactgtgtttttcgatattaacttgaggggtcttgatggcatccaggaccagtttatgtgggaactggttgtgtattcaacagaact

SEQ ID NO: 408845 - DNA, 495 bp, Oryza sativa
gtcttctgtcaaaccagcattcaacaatcttgccaatgcaaatgcgtttgtctacccatctgctaacttcacttcaaacaagccgtttgttcagcctgataacatgccatttgttcctgcaatgaactctgctgctcctattgaggaccctatcatcaactctgaccagggaagcaactcatttggctgctctgactttggctgggagaatgataccaagacaccagatattacatcaattgctcccatttcaaccatagctgaagtcgatgaatctgcattcattaagagcagtaccaacccaatggtccctcctgttatggagaacagcgctgttgatctgcctgatttagaaccctacatgaggttccttctggatgatggtgctggtgactcaattgatagccttctcaacctggatggatcacaggatgttgtcagcaacatggacctctggagctttgatgacatgcccgttagcgatttctattgagg

SEQ ID NO: 408846 - DNA, 470 bp, Oryza sativa
tttttgtgctattttcaacaacatctatgcattctgtgggtcgattgctggcgagcagctctattcatctgaaagtctggatgatagccaaaagctctctgctgatgcattggttaagaaggcatatgataattggatgtatgccattgaatatgatggcaaagctctcttgaactctaaaccgaaaaaaaagggtgcaccaccctgtgataccatgagacacatcctactctgagaaaacctgctttatacgaacagcgcatctcatcagcgagcatgacaggaccatctccagcaggaggaagtggcactggaactgattccatagggtatgatggggaccaagcagtttcacagccatctcaactttaaagtacatcttgcaatgtccctgtgccatacgatgacaccctttcatttttaccgcctagaatgttgatggggtctgataataaagataccgaaatgat

SEQ ID NO: 408847 - DNA, 268 bp, Oryza sativa
tgttcgctccttaaactcatgacaggtgatctcataccgctggacggcatggtgaggcgacacaaccatctcaggatcgcacaattccaccagcaccttgcagagaagctggacctggacatgtcagctctgcagtacatgatgaaggaatacccagggaacgaggaggagaggatgagggcagccatcggcaagtttgggttgtcagggaaggcacaggtaatgcccatgaggaacctgtccgacgggcagaggagcagagtgatat

SEQ ID NO: 408848 - DNA, 476 bp, Oryza sativa
tgttcatcatgtgaaagggcaaagaggaccctctcctccactgcccaaactactattgaaattgattccctctttgagggtgttgatttctattccaccatcaccagagccaggtttgaggagcttaacatggacctcttcaggaaatgtatggagcctgtggagaagtgcctgagggatgcaaagatggacaagagcactgtccatgatgttgtccttgttggtggctcaactagaatccctagggttcagcagcttctgcaggatttcttcaatgggaaggaactctgcaagagcattaaccctgatgaagctgtggcatacggtgctgccgtccaggctgctatccttagtggagaggggaacgagaaggtgcaagatcttcttctcttgatgtgactccactgtctcttggtctcgagacagcgggaagtgtgatgacagtgctcattccaggtacaccaccattcctacca

SEQ ID NO: 408849 - DNA, 494 bp, Oryza sativa
ctctgctcccgcgagatctcacccccgctgcggcgacgcggccatggcggggaggaactaccacggctacggcggcggcggcggcgggggcatgtccatggtggtggcgagcacgccggggcaggagctggccctcaccaactgcgcgtacgtctcctccgtcgacatccgccgcttccccaacgccctcgccctcgtcggcgacgccttcgtcttcaccctgcgtgcccatgatgctgtttctgctggaagcatcgcattgaatgccattcagcgtcgccagacgaaggtttcagctggggattcaatcactgttagcagttttgcccctcccgatgatttcaaattggcattgctcacattagaactagagtataccaaggcatgaaccaaccgaaatgaggagctggatgctgatgtgcttgcccaacaacttcgaaggagatttcttgatcaggtcatgacatctgggcaaagagtaccatttgaatttt

SEQ ID NO: 408850 - DNA, 463 bp, Oryza sativa
tgttaaactggtcagctttggaacagtccattgtacgactggaaagctatggaagcaggtggatttgaatggtggataaaaaggattaatcgtgcccttgatttgtatgatgagttccgtatagaccatttccggtggcttgcaggtttttgggcagttccttctgagtcaaaagtagcgctggttggaagctggagggctggaccgaggaatgcattttttgatgcattattcaaagctgtcggtagaataaacataatagcagaagacctgggggtgataacagaagatgttgttgacctaaggaagtctattgaggctcctggaatggcagttcttcagtttgcttttggcggtggttctgacaattcacacttgccccataaccatgaatttgatcaagtagtatacaccggaacacacgacaatgacacgggtattggctggtggcaaactttaccag

SEQ ID NO: 408851 - DNA, 490 bp, Oryza sativa
ctctgctcccgcgagatctcacccccgctgcggcgacgcggccatggcggggaggaactaccacggctacggcggcggcggcggcgggggcatgtccatggtggtggcgagcacgccggggcaggagctggccctcaccaactgcgcgtacgtctcctccgccgacatccgccgcttccccaacgccctcgccctcgtcggagacgccttcgtcttcaccctgcgtgcccatgatgctgtttctgctggaagcatcgcattgaatgccattcagcgtcgccagacgaaggtttcagctggggattcaatcactgctagcagttttgcccctcccgatgatttcaaattggcattgctcacattagaactagagtataccaaggcaagaaccaaccgaaatgaggagctggatgctgatgtgcttgccaacaacttcaaggagatttcttgatcaggtcatgacatctggcaaagagtaccatttgaattt

SEQ ID NO: 408852 - DNA, 345 bp, Oryza sativa
ttagcttaaccccgtctccttcctccattgctccggcgctagaaccttctagaagctctcctcctcctcccatggcggcgacgatcgtgtccgtcaaggcgcgccagatcttcgacagcaggggcaaccccaccgtcgaggtcgatgtgtgctgctcagatggaacctttgcaagggctgcagttcccagtggtgcatcaactggtgtctatgaagctctcgaattgagggacggtggatctgattacttgggaaagggtgatttcaaggctgtcgacaatgagaactcgggttttgccccagctctgattggcaaggacccttccttacagggctgagcttgat

SEQ ID NO: 408853 - DNA, 251 bp, Oryza sativa
ttttggagctgaagaggatggtgaacatgatcaacaggctcgtgacggtcgcaaagcggaggaatgggctgctcaagaaggcgtacgagctctccatgctctgcgacgccgaggactgacctcatcattttctccagccgcggcaggctctacgagctctgcagcggccaaagcatgaccagaactttggaaagataccaaaaattgagatatggcgggccagatactgccatacagaacatggaaaatga

SEQ ID NO: 408854 - DNA, 232 bp, Oryza sativa
tgtacgcgtgggccttcctacaaccacaattggttgattcccacagactgtggagctcaggagagtccgccgtgagtacaaggcaaaatagatctctgaggaggagtacatcagtgccatcaaggaggaaatcagcaaggttgttaagatccaggaagagcttgacattgatgttcttgttcacggggagcctgagagaaacgatatggttgaggacttacgtgagcagctt

SEQ ID NO: 408855 - DNA, 119 bp, Oryza sativa
tacactctacgcgagccgatcctactcatcgggctacgtcgacgtcgacgggtaccctcggagcccccctctccgacggacgacgatccggtcccgcgagttgaaggaatccttgataa

SEQ ID NO: 408856 - DNA, 276 bp, Oryza sativa
ttagcttttacaccagcaccagcgtcgatccgggggttcggcggagaggcagttcaagttcttggccaagcacttttgctgatagctttcggctcgggagaaaacagacgcgaagagcaagtactgttcgacgtcgttgacatcccgtacaactacaatgccatcctcggccgtgcgaccctgaacaagttcgaagccatttcccaccacaactattctcaagctcaagaatggcccggcccagcgggagtgatagtgggttaaaggggctttcaa

SEQ ID NO: 408857 - DNA, 229 bp, Oryza sativa
gtaatttctgtcacttttgtaggtgggccgggtgctctttattcactgctttgcaggcatgcgaaacttagttttcttccaaatcaacaatcagcagatgaagagctatcgacatactacagaaatggttttacttcacgtcatggatctttaccttggctaagaaggttcatggagaagcacaagaatggcagaaccgggcttctcctcatagctttgggcggtgctt

SEQ ID NO: 408858 - DNA, 440 bp, Oryza sativa
tgttttattatcttaatgtatgctggttatcatgcactcggacaatacatacatcttttctaaagtgtcctagtggaaagctgttttccagagttcacggtctgcagatctgttctcttaaatgtcatataatatgttcatttatcagttacttgattacttcagatctgttccctttaggtacgtttggtgcggattacagaaatggtccatgatgcatactattctcgattgtatcttgctaaggtaaaatgacttcacatgaactactccctccatactcgtaaaggaagtcgctttggacagcaacacggtctcccaaacacaactttgacttcttgtttctataaaaatatttattggaaagtgatatatcgatacttttatgaaaagattttttaagaccaaactatttataatatttttacattttcaaactc

SEQ ID NO: 408859 - DNA, 295 bp, Oryza sativa
gtggacctcagccacaaccgcatcaggggcaccgtgccacgctccctcgccgcgctctccacgctgcagacgctggacctcagctacaaccgcctctgcggcccgctcccgaggctgcacggcgtcatccgccacggctgcaagccgtacgagcacaaccagtgcgccggcggcgccccgctcggcgggtgccaccaatcgtgagcatgcatccatccatcaccgccggcgagctgatgctgccacgtaaggtggagcccgggggtgcgtaacggcatacgtgtttggtggtttt

SEQ ID NO: 408860 - DNA, 144 bp, Oryza sativa
caacaagttccacacagaggcactgaatgagcttctggagtctgatgacaagtttggtttcataatcatggatggcaacggaacactgtatggtacacttagtggcaacagcagggaggttctttacaagttcagcttccacct

SEQ ID NO: 408861 - DNA, 152 bp, Oryza sativa
tgggctcttctctgtcagaccacatcctgcgtttcaacaacatacctcaggtgcaaaatgatggttgttcttggggagcttggaggaaaagatgagtattctcttgttgaagcccttaaacaaggaaaggttcagaaacctgttgttgcatt

SEQ ID NO: 408862 - DNA, 318 bp, Oryza sativa
ttaagatataggatttgatccaacagggtgggaactcgcccttgttaccactccaagtaacacgaattcatctgctgcagatagtcaactgggtggtgggtttgacaagctcatcttggaaagcctatatgaccagggggactacaggcagagacagcaacagcagttatatggttcttcagctcccaacccgttcatgtcaaatgatcctttcggaatgtcgaaccaagttgctcctccaccatcggttcaaatggctgccatgtctcagcagcatcaacagatacccactatgatgccagcgaatccctttggacc

SEQ ID NO: 408863 - DNA, 306 bp, Oryza sativa
ttgacgcgtgggctgagggcgactactccacgcgccacatcatgtgcgcgctgctccgcaagtgcggatatcgagttgccgcacactgtgatggtgtgaaagcgtgggacatactaaaggaaaaatctttcaatatagaccttgttttaactgaagttgaacttcccttgatgtctgggttcctgctgctctccacgatcatggaacatgacgcatgcaagaatatcctcgtcataatgatgtcttcaaatgaatccgttagcatggttttcaaatgcatgcttaagggtgctgcagatttccctt

SEQ ID NO: 408864 - DNA, 460 bp, Oryza sativa
tatagaagtaaaaccaaatgggtatcttagctgaagaagccatatttggactgatactgacaacaaccgctcagggatgcttccttttgtgttcgatgactcatttggatttgagcgatatgtggactacgcattagatatcccgatgtattttgtctatcgtaataagaagtacattgactgtactggaatgtcatttcgggattttatggtaggaaaactcccacaagctccgggggagctgcctactttgaatgactgggagaaccatctaacaacaatatttcctgaggttaggctgaagcgatatctagagatgagaggtgctgatggtggccattgaggagattgtgtgctttgccagattttgggttgggctgttgatgatgaggaatcactgcaaagtatttcggacatgacctttttttggaccaattggggaagagaaatgcttatgcaa

SEQ ID NO: 408865 - DNA, 514 bp, Oryza sativa
taaagagtagctgcaagcaaacccattacttggagaccctagtaaagttttactgcttgcatgtcatggttcaatggctagctcagagcagaaactaatatttgatagacctgagcctggtgtaaggaaaattgttcttgcaaccaatttggctgaaacaagtattactatcaatgatgtagtttttgtggttgattgtggcaaagcaaaagagacatcttatgatgcattgaacaacactccatgtttgcttccaacctggatctccaaggcttctgccagacagagacgaggaagagctggtcgagtccaaccaggggagtgttaccatctatatccacaatgcgtgtatgaagcatttgctgactatcagttgccagaactcctgagaactcctctgcaatccctctgtttgcaaataaaaagcttgcgccttgggagcatctctgaatttttatccagagctttgcaatcacctgagtctctatcggtagaaaatgccattgaatatctc

SEQ ID NO: 408866 - DNA, 162 bp, Oryza sativa
tttccaattcaaccgccgccgaatcgcccttgggagaacgatggtcgggtcggcgctgcaccagaccaccagcttcctcggcaccgcccctcgccgggatgagctcgatcgccgtgccggcgactccggaggtcgcatcagcatgcccctggccgtcaagag

SEQ ID NO: 408867 - DNA, 173 bp, Oryza sativa
tggttatattcgacccaaatagcctttttgagatacaaattaaacgcattcatgagtacaagagacagctgctaaacattttgggagctgtttacagatacaagaagttaaagggaatgagtgcagaggagagacaaaaagttaccccacgcactgttatgatagggggaaaa

SEQ ID NO: 408868 - DNA, 406 bp, Oryza sativa
tttccgttgaagcaggccatccaagagaaagccgagcggtggcatcgaatcactccgtgccatcccatggatcttcgcgtggacgcaaactcgcttccaccttcccgtctggcttggcttcggttctgccttcaagcacatcctggagaaggacatcaggaacctccacacgctccaggagatgtacaatgagtggccgttcttcagagtcacgatcgatctggttgagatgggttttcgccaagggtgaccctggcatcgccgcattgtacgacaagctccttgtctccgaggagctatggcctttgggagagaagctgagggccaactgggaagaaaccaaacagcttttccttaaggttgttggacacaagggtcttttcgaaggggatctttacctgaagca

SEQ ID NO: 408869 - DNA, 125 bp, Oryza sativa
ttcccccccctcctcgctccccgccgccgccgccgttttcttggagaggagaaatccgtaggctcagaggatttttggtagtcttgtttcgtgatattcgtgaagagggggggagctaagggggg

SEQ ID NO: 408870 - DNA, 229 bp, Oryza sativa
tccgccgccgccgcagcctcctcctgtcgtcttctccttcgagttgttagctccctccttattcaaccatgggtaaggagaagacgcacatcaacattgtggtcattggccacgtcgactccggcaagtcgaccaccacgggccatctgatctacaagcttggaggtatcgacaagcgtgtgatcgagaggttcgagaaggaagccgctgtcataatcaagaggtcctt

SEQ ID NO: 408871 - DNA, 403 bp, Oryza sativa
gaagctgtggcgtccgcgtaggagcagctgtttcttttttggatccaatccaatcggataagcagccatggctgtgaaggcgagttctgcagataacaggaccagaagcaccgtgtcactatgcatagtgattggcatgtgctgcttcttctacatccttggggcatggcagaagagcggatttggaaagggggacagcattgcgctggagatcacgaagcgaacggactgcacaatcttgcctaaccttagcttcgacacgcaccttgctaagcaggcaaggcttcgcgatctcgtttcgccggcgaagaagttaaagccgtgccccgatcgctacacggattataccccttgccaagatcagaacagagcgatgaagttcctcgggagaatatgaattaca

SEQ ID NO: 408872 - DNA, 306 bp, Oryza sativa
ttcgagtcaaaaagagggggaagcttctcccgccatagtcctcctcctcctcctgctactcccatcaacgactagtcgcggcgaccaagagccaaaccctacgcctcctcccctccccctccacctcgtcctccccgcgagcggcggcggccatggattcctcctccggcggcgcgggcggcggcggcggcgcgcagatcaaggggatggggacgcacgggggccgctacgtgctgtacaacgtgtacgggaacttcttcgaggtctcctccaagtacgcccctcccatccgccctattgggccgg

SEQ ID NO: 408873 - DNA, 462 bp, Oryza sativa
tttcaatatagagcgaaagctttggaagcgattcaacatttaaaggagacataccacaatggagtgtgtgatgttgcgattgttgatgatggaaaattgcaagcagaatcagattctggtgaattctgggttctttttggaggttttgcaccaatagggaagaaagctatatgtgacgatgatgttgttcttgaaaccacagcccccaagctttacagcatcaataatggtcaattaaagttagaagacacagttctgacaaaatcaattcttgagaacaataagtgctttttggtcgactgtgggtctgatttatttatatgggttggtcgactaacacaagtggaggagagaaaagctgcaagtgcagcagttgaggaattcattgctactcaaaataggccaaagacaacaagagtaaccctgagtgatttaagggtacgagaatcttacattcaagtc

SEQ ID NO: 408874 - DNA, 168 bp, Oryza sativa
gtagtcgcagcagcggtggtgtgcgagtgcgaggcgaatccgagagcgttttgcgtgtttggcgactcgatggtggacagcggcaacaacaactacctgatgacgacagcgcgggcggactccccgacctaccgtgtggactacccgacccaccgagccaaggggcgc

SEQ ID NO: 408875 - DNA, 482 bp, Oryza sativa
  unsure (1)..(482): unsure at all n locations
ttgcaggcggcggcggcagagcacggcgacctagcccgacctcgcaaccatggcaaggggtttgaagaagcatctgaagaggctcaatgcgcccaagcattggatgctcgacaagcttggtggagcttttgcccccaagccatcttctggtcctcacaagtccagggagtgcctgcctctgatcctcattatcaggaacaggctcaagtatgctctgacataccgtgaggttatttctatcctcatgcagcgccatgtcttggttgatggcaaggtcaggactgacaagacctacccagctggtttcatggatgtcatttccatccccaagactggtgagaactacaggcttctgtacgacaccaagngacgtttccgccttcagtctgtcaaggatgaggatgctaagttcaagctttgcaaggtctcgtctgtgcagtttggccagaagggaatcccctacctgaacacctatgatggtc

SEQ ID NO: 408876 - DNA, 389 bp, Oryza sativa
tctggacagaaggatgaggcttactttgcagcaaacgctgctgctcaggcctccaggaggtcatcacctcgtgtgacaaacgaggaagtccaaaaggctgctgctgctctgaaggggtctgaccaccgccgtgctaccaatgttagcgctagactggacgcacagcagaagaagctcaaccttccagtccttcctacaaccacaattggttcattcccacagactgtggagctcaggagagtccgccgcgagtacaaggcaaaaaagatctctgaggaggagtacatcagtgccatcaaggaggaaatcagaagggttgttaagatccaggaagagcttgcattcgatgtccctgctcacggcgagcctgagagaaacgattgggttga

SEQ ID NO: 408877 - DNA, 292 bp, Oryza sativa
attgctgcatgctttagaaggagtgcctggtgaaaatgaaattggtgcaagagcagaaaatcttttggatacccttgccaacaaagaaaataatggtgatggcttcttggcagagaagattcaagagctccgacatgctacaagggatgaaatgcgacgccgtgctctaagaaaagagaaatgctacttcaggggctaggaatgcgacaagaatttgcttctgatggaggtagacgtattgttgtgtctcagcctataattgaaggcttggatgatggggaagaagaagaga

SEQ ID NO: 408878 - DNA, 318 bp, Oryza sativa
tgtcatttcaggggaaaaaaaaagatgaatcacttgcagtacccttgttggcgcgaattctgactcagcccgccttcagttgacaaacgaagaagaccaaatggcggctgctgctctgaaggggtctgaccaccgccgtgctaccaatgttagcgctagactggacgcacagcagaagatgctaacccttcaagtccttctacaaccacattggttcattcccacagactggggagctcaagagagtccgccgtgagtacaaggcaaaaaagaactctgaggaggggtacatcagtggcatcaaggaggaaatcaaca

SEQ ID NO: 408879 - DNA, 278 bp, Oryza sativa
attgctgcatgctccagaaagagtgcctggtggtaatgttattggtgcaggagcggaaaatctcccggatacccttgccaacaaagaaaataatggtgatggcttcttggcagagaagattcaagagctccgacatgctacaagggatgaaatgcgacgccgtgctctcaagaaaagagaaatgctactccaggggcctaggaatgcgacaagaatttgctttttgatggaggtagacctattgctgtgtctacgcctataattgaaggcttggatga

SEQ ID NO: 408880 - DNA, 466 bp, Oryza sativa
ttttgtttaggtaaaagacatgtactaattttgttattccttatgccgaagcaatattggatcaaaaatattctccacaatgtcgtggagcttgattgattatatggaatggcgatatgatctctctttgtgaactctgcatcctttcgctcaaaggtcctcggggccattgatatccttgttctcgatcactgctccatctgggatttccagtttgacaccaggttgggctgtgatggtcaccttgcccttcaatgtgatgctagagccaaaccaaacatcaccggaaaccttcaaggtgtcaagctcaacaatgctggggattgacttgaagcgaccaaggaaacacccgacctttttgaactctggacccagttcaattgagggattcgatgggtttgttctggccgggttgcgtgtaacaaagccatcaaccaaggtatatagatcagactgtactagctgc

SEQ ID NO: 408881 - DNA, 208 bp, Oryza sativa
tcggcgcagccacacagcagcagcaggtgaggaggagaggagacccgccgccgccgccgccatgggtatctcgcgtgattccatgcacaagcgccgcgccacgggcggcaagcagaaggcatggcgcaaaaagcgaaagtatgagctcggaaggcagctctccaacaccaagctgttaagcaacaagacagtgaggagggtgcgtgtt

SEQ ID NO: 408882 - DNA, 419 bp, Oryza sativa
ttgttttttttaatttcatggtcttttatttgttttttcttattgccttatcttttttgtatcaaaaatattctcacaatgtcgtggagcttgattgattatattgaatggggatatgaactctctttgagaactctggatccctttcgttaaaggtccctggggcccttgaaatccttgttttcgatcactgctccatccgggattttccagtttgcccccaggctgggccttggatggtcaccctggccttcaatgggatgcttgaggccaacccaacatgaccggaaacctttaagggggccagccccacaatgctgaaaattgacttggagggacccaggggaccacccgccctttttgaactttggacccagttcaattgagggatccgttggttttgtcctggccgggttgcc

SEQ ID NO: 408883 - DNA, 193 bp, Oryza sativa
ctttctttttatctgcataaccatatatgggtctagcatgttcaatgcaaaatcgcaggagcggaagatctttgggaaaccgttgccaacagagaacataatggtgatggcttcttggcagagaagattcaagagctccgacatgctacaagggatgaaatgcgacgccgtgctctcaagaaaaggaaaaatg

SEQ ID NO: 408884 - DNA, 463 bp, Oryza sativa
ttttgttagaactcaatgatcctatgcttcatggatttaaattataaaggacacatgctttcaaaattccgagtacttttgtgcagcacaatacaatgtcactgcggttccttattaggggtaaaaggagaaaaggaagacaaaaaaacatcgctcatcagaagatgtcacccctgcttgtaatcacgtcctggctacagaacgggcatatagaaaccagaatccaaaaatttaacttgtacagaacttaacaatgaagagatcttatgaagccgactccttggcgatcttctcagctttaggaatgacttcctcaatgcctcccaccatatagaatgactgctcgggaaggtcatcatatttcccatccaaaacaccctggaaactgttgacgctctccttcagctccacgtactttccaggagcacccgtgaaaacttcagccacatggaagggctggctc

SEQ ID NO: 408885 - DNA, 463 bp, Oryza sativa
tttgtttttttttttttttttgttttcacagaaaatcaatccttgcatgcaggggaaatcgatggatcgacctctctccttaacttgttcttaattctcatgtacaatcaaagaaacacacacgcacacacacatgcgtgcactgcatctttctgagcaacgaactcgattgatttgattttaattcgctagggattaaagagaagctgagatagagatttcgacgatcatgcgacgctgaaggagctggctgcgctctcgacgaacttcctggcgcccttgaaccaccttttgtcgccggcctgcgccttgcaaatgtacagcttgccgtcgttgacggtggccgtgatcagctggtgcttgccgccctcgtcgccgtccgccgtcctcgtcagcaccgttacgctgtagtactgtttccctcccaccaccggcgccgagctctccaggatgttcgccgtcg

SEQ ID NO: 408886 - DNA, 475 bp, Oryza sativa
ttttgttttttttttttgaaacaaaacaaacttttataaataaaaatcagtcacagtggaatgttgatcccgtaggagatctgcaaattgttgcgttcgaattctaggattatcaaagacagcatctccgcagagtgaagatcaccacatggcaaccattaccacctgctaccgtctattctgaactcaaaattgaaacaaatcacagctcaagataggacagccatcacatctgatactctcaagacaatgtagttggtgccatcagctcccttgaactcactgcctgcgtacttggagtacatcacagtgctgcccgctgaaactgacaatggctgccttttgccttcatcatcaagagggcctggaccaacggctacaactgttccgattgatggcttctccttagtggtttcagtgagaataagggcaccagcagttttgtcttcagcctcagcaaccttgatgagaaccc

SEQ ID NO: 408887 - DNA, 473 bp, Oryza sativa
gtgcgtcctcagcttctcgctggcgcgcgaccggttcctccgccgccgcttcttctcggcggggctccgccccttctccatccgcctcccgtcccccgccggcgccgggaccagcgtccacgtgtgggcgccgccgcggccggcgcgccgccccgtcctcctcctccacggcttcggcgcctccaccacgtggcagtgggcgtcctacctccggccgctcctcgccgccggcttcgaccccatcgtccccgacctcctcttcttcggcgactcctgcacgctcgccgccgaccgctccgaggtgttccaggcgacggccgtcaaggccgccatggacgccatcggggtgaggcggttcgacgtggtcggcgtcagctacggcgggttcgtggcctaccggatggccgccatgtacccggaggcggtggaccgggcggtgatggtgtgcgccggggtctgcctggaggagaccg

SEQ ID NO: 408888 - DNA, 447 bp, Oryza sativa
  unsure (1)..(447): unsure at all n locations
tctcttccgacctcctcccctctgatccggcgcggccatggcgtcgagcgggagcagcacggtggtgggagagatggagagcagcttggagcgggtngaggcgganntctnngtcaccttcagccgccaccttcttcagggccctctcctgaagcgatccgatacactaagaaaatggattgaacggtgggttatacttgatcctgcatctggaaagatggaatacacgattcctagaagtgtttctccctgttagttgatattattatgtttgttttatccttcacttctactgtttcctcctaaccccttctctctcttgacctactctcagctttcttccgttccttttctctctctcaccttccaatttatctttctcttctttcctttccttcttttcttctccttttcttttctttttcttttatatttctcattcacttc

SEQ ID NO: 408889 - DNA, 256 bp, Oryza sativa
tgtgggctgttccttgcacccaaggagttggaggaggcggctggaaggacaccgaggacaccagcgagacgcccgccatcgacgtctgcaaggggctgatcggcgacaaggccaaggtgagcatctacgacccccaggtgacggaggaccaggtccagcgcgacctcgccatgagcaagttcgattgggatcacccgtgccatcttcagccgatgagccccacggccatcaagcaggtgtcctgcgcctgggacgc

SEQ ID NO: 408890 - DNA, 453 bp, Oryza sativa
  unsure (1)..(453): unsure at all n locations
atgagaccaaaggagtgtatgttgctaagcttgaagaacttaaaaaggtggggggtcccattgaggcaaggtacaaggaatggatggacagaggcccttccatcgaccaacttgcttactgtatcaacagtttcagagatgctgccttgtccaaagatccgaagtttgatcacattgagatggaggagaaacagaaggtgattaaccagtgttccgaagcagaagtctggctgagagagaaaatacagcagcaagatgctctgccgaagcatgctaaccctgtcctactctcttctgatttaaagaaaaaggccgaaacggttgacaggttctgcaaaccgataatgatgaagccgaaaccagctcctaagccacagacgcccncacaaacgccaccgaccgagaccccggctggcggagcccaaacaccagagcagcaacctcagggagctg

SEQ ID NO: 408891 - DNA, 137 bp, Oryza sativa
tagcggccggccatcatcagtgatcctctacaatcatcgactttcagcaaattaagatggctgctgccttctcctccaccgttggagctccggcgtccactccgaccaactttctggggaagaagctgaagatgcag

SEQ ID NO: 408892 - DNA, 256 bp, Oryza sativa
tttccgttcttgcctgtgttctttttagcatctatgtttttgtatctggagagttcatgttgagacaatgtatgcaattgtatttggagagttgatgtttaggcaatttatgcacaatttagatggagtctgtcgagagtaattttatgagaaattgagctgcaatataaaatttgtttttgagacttttttgcttttctatattatttatatatttttataatttttttattttactactaaatttttcattttt

SEQ ID NO: 408893 - DNA, 340 bp, Oryza sativa
tcaaaacaacatcaagctgtacgtacgccgggtgtttatcatggacaactgtgaggagttgatcccagagtggctcagctttgtcaagggcattgttgattctgaagaccttcccctcaacatctcacgtgagatgctccagcagaacaagatcctgaaggtgatccgcaagaaccttgtgaagaagtgcgtggagctcttctttgagatcgctgagaacatggaagactacaacaagttctacgaggctttctccaagaatctcaagcttggcatccatgaggattccaccaacaggaccaagattgctgagctcctgaggtatcactccaccaagagt

SEQ ID NO: 408894 - DNA, 290 bp, Oryza sativa
ctctacttgtcaacttctcttcagcttgctttacaggaaatgcacctctgacagctgttcaacttctttgggtgaacatgatcatggacacccttggcgcccttgcattagctaccgagccacctaacgatgacttaatgaagagagagccagtgggcagaacagggaaatttatcacaaatgtcatgcggtggaacattcttttgccattcttattatttttcatatcatttttcactcctatttccttaatctctatcctcttctttttacttttcaccctttctttc

SEQ ID NO: 408895 - DNA, 495 bp, Oryza sativa
  unsure (1)..(495): unsure at all n locations
tttaattgtaaaaacctctgatggaacttctctggagtcacaactagttgaagttgatatcgtgacagcacgtttaaggaagttatacataaaggcttatcttggaatcacgtccgataaacccccaaagtattggctagtttttcaagcttctgtaccaccactcggctggaacacctacttcatatcaaaatctactggaacaggatctaatggaatggggtatgtctcaaccatggtttctccaagtaatgacacaatagaaattggaccagggcctctgaagatgtcctattcatcaaaatctggacaactcaagagaatgttcaattctatctctgcagnnggatttgccaattcaacagagctttctttggtatgcttcaagccgggagattctgaagattcacaggcattcggagcatatattttcagaccaaataggactacaccgactatagtttcaggaatggcgccattgaagttatccatgga

SEQ ID NO: 408896 - DNA, 189 bp, Oryza sativa
gttaggtgtacaagatgccaccggacctgaaccggacaaagctcttcccaccggccaatttcaagatcgccggtgcatcatcactgaacccagactacacctgtggccagccggtgcccgtcagtcccacagagttccctgatccaagcggtcttgattcaacgtctctggtgaccgtgtcctggtatt

SEQ ID NO: 408897 - DNA, 286 bp, Oryza sativa
tgtcatggtgctgggggtgccagtatttcatcacactatttcgacctcctagtcaagctgaaaaatgatcaagaacatctcttcagaaatattcaaaggagtgaataccataacctcttcaactttatcaatggaaaacacttgaaaataatgaaccttggagatggtcaaggcgcaactggtggggttacagctgttctacgagacactgatgatgatgctgctgatccacatctagaacgaattaaaaatcaggctggggatgagggaagtgatgaagaggatg

SEQ ID NO: 408898 - DNA, 435 bp, Oryza sativa
ttcttcgccagatgctgtggatgagatcaatcaactaagatgtgctagtggagaccattcttcgattgctggttctggacccgatgaaatgcagggagggatcaccgcatcggatcaaatggatctactgattgagcaagtgaagatgcttgctggtgaaattgcttttggtaccagttcgctgaaaagactgattgagcaatctattgaagaccctgaagggacgaagaatcaaatagataatttagagcgtgaaatccgggagaagagaaggcatatgcgagccctggagcaaaaacttatggaaagcggtgaggccatcagttgctaatgcttccatgatggatatgcaacagacgattaccaagctgacagctcaatgcagtgagaaagcttttgaattagagtatagatcagcttataatcgcgtcctta

SEQ ID NO: 408899 - DNA, 53 bp, Oryza sativa
tttgcagtatgcgacgatacacaagcagaacgacttcaagcagtttggggaga

SEQ ID NO: 408900 - DNA, 314 bp, Oryza sativa
tatttcgctctctctctctctccctccccgattcgattcaattcgcgacgcctccgtgaaattctccaaagccagcttgccctgtagccgcgtgctccggccatggcgttcttcaggggcctgaccgcggtgtcgaggcttcgatcccgcgtggcacaggaggccaccacgcttggtggtgtgcgatggctgcagatgcagagcgcatctgatcttgatctcaagtcccagctgcaggaattgattcctgaacaacaggaccgcttaaagaaacttaaatcggagcatggaaaggtccaacttggaaatataac

SEQ ID NO: 408901 - DNA, 329 bp, Oryza sativa
ataaagcattcgcatccacgagaccactcgaacccgacccgcctcgccgccgccgccaccgaagtaatcccttaattggtcaaaatgtctcgggaggagaatgtctacatggccaagctggccgagcaggctgaaaggtatgaggagatggttgagtacatggagaaggttgcaaagactgtagatgtggaagagctcactgttgaggagcgcaacctcttgtctgttgcttacaagaatgtgattggtgcccgtcgtgcctcctggcgtattgtttcatccatcgaacagaaggtggagggttctctgcattgagcaacttcttttct

SEQ ID NO: 408902 - DNA, 202 bp, Oryza sativa
gtttgtttacaacaagttctacgaggccttctccgagggtctcaagcttggcatccaggaggactccaccaacaggaccaagattgctgagctcctgaggtatcactccaccaagagtggtgatgagttgaccagcctcaaggactacagtacccggatgaatgatggccagagtgagatctattacataactggtgagagc

SEQ ID NO: 408903 - DNA, 331 bp, Oryza sativa
cgtcgtttcccatctccgacaagcgcctacaacggcggaggtagccctaaccctaggtcggtggatgcgccgatggccgccgccgccgcagcctgcgtagagagccccgacgagggcgtggagatccgggaggtatgggcggggaacctggaggcggagatcgcggcgatcctggacgaggcccaccgggacccgaacgtcgccatggacacggagttcccgggcatcatgggccgcccccccggcggcttccgcaccaccgacgagttcaactactccaacctcgaggcccacgtcaacatgctcaagctgatacagctcgggctcaccc

SEQ ID NO: 408904 - DNA, 536 bp, Oryza sativa
tcgttttgttgttacatggaatatcttatgctggcatggggaagacccagacgattaatcatttcttggttaacaaaagttggtaccttgtggatttgcctggttacgggtatgttgaccttttctaccctcaattcatatgtaacttgatttgcatgtgctactttctaggatgtatcacaatgacaaaatcatagatggcattgcaaatggagagaaacagagcgagaagtacaattttgcccttgtgttcatcggcttgtaagacaactcggtctggttagaaccagacccagtccattttcactgccctcgatacagtccattctcactctgatggtgtaggtctgattcaaactagacctggtcgagttaaaaagaaatatgtcgtatgggtacaacttgtttttttttttgaaaatttctctctccatttggatcagatataataaaataatacggccagtgtcaccatattcccacggtgttctgcagcaaatacacgttctttgggtgtccagtagcaaagagcgcaa

SEQ ID NO: 408905 - DNA, 393 bp, Oryza sativa
ttggttttcttcaactcttaccacaccacgccgggtgggcgaaaccctagccgcccgtcttccccctcaaagcggcggcggcggcggaggccgatgcatcgcctgctaagatgtccggcggcttcttccgggggacgaccgccgatcaggacacccgtttctccaacaagcaggcgaagctgctcaagacgcagaagttcgcgcccgagcttgaacacctggtggacatgactaaggtgaagatggatgtgatgaaaccatggatcgcgacccgtgtcaccgagctcctagggttcgaggacgaagggctcatcaacttcattcacggtcttctcgaagagaaagaggcggatggaaagaagatacagatacagctgacaggattttatggag

SEQ ID NO: 408906 - DNA, 375 bp, Oryza sativa
tcgcttatattaaaaccaggaggcggatcttgcagatgcacacatctaagatgacattggcagatgatgttaacctagaagagtttgtgatgaccaaggatgagttttctggtgctgacatcaaagcaatatgtacggaggccggattgctcgctttaagggagcgcagaatgaaggtgacacatgccgatttcaagaaggccaaagagaaggtcatgttcaagaagaaggaaggtgtaccgggagggctttatatgtgagacatgcaccactcatcagcaccagaattaccttcaggacacggtaagtgtaatagagaactggtagagctggtgtatggttcaatgttcggagaaatgtttgcttacacctttt

SEQ ID NO: 408907 - DNA, 568 bp, Oryza sativa
  unsure (1)..(568): unsure at all n locations
gtctcgtcgccgtcggcggaggagccgttccgggggggggtcggctacgacccgcgggaggacgaggcgtacgaggtgtgccgccgcagcctgctccgccacgcctccatccccgtcgacgtccgccccatccggcagccggatctccgcgcggcggggctctactggcgggagcgggggcccaccgagagcaccgagttctccttcacccgcttcctcacaccctacctcgccggctaccgcggctgggcgctcttcgtcgactgcgacttcctctacctcgccgacatcgccggcctcctcgcctgcctcccctgctgcgaccccgaccaccgcttcgcncgtcgcctgcgtcaagcacgagtacgcccccgccgaggcgaccaagatggacggcgccatccagaccgtgtacccgcgcaagaactggtcgtccatggtgctctacaactgcggccaccccaagaacgtcgccgtgctcaccccggacgccgtcagcacccagaccggcgccttccttcaccgattcgcctggctcgatgacgacgagatcggcgagatccccttc

SEQ ID NO: 408908 - DNA, 565 bp, Oryza sativa
  unsure (1)..(565): unsure at all n locations
cctcttcccttcctcccgctccggcgaaggcgagggcgcggatcggcgtgatggcgggggcggcaccctctcccccacccgtcgcggcgctggagcagatgagcaggaccaaaatgttcggcggccacaacctccgcttccgccaccacagcgccacgctcggctgccccatgaccttctccgtcttcctcccgccgtcgccggcatccgacctccccgtgctgtactggctctccggcctcacgtgcaacgacgagaacttcgtcaccaaggccggcgcgcagcgcgccgccggcgcccacggcatcgccctcgtcgcccccgacaccttcccacgtgggcttaatatagagggagaggcagacagttgggattttggtgttggtgctggattctatttgaatgcaacaaatgaaaagtggaaaaattggcgcatgtatgactatgttgtgaaggagcttncaaaagttttaagtgacaactttgaacagctgaacacttcacgggcatctatttttggcactcaatgggagggacggtgcactaacaatctacttaaagacac

SEQ ID NO: 408909 - DNA, 270 bp, Oryza sativa
  unsure (1)..(270): unsure at all n locations
gttatctttgtacccgcacgcgcagcaccagttcggccgggattgatcattgtggggggcaatctacttcatattcgggaactcgcaggttgttcttcagaactgcttgctccagcctcgtaagccgatggacaaccaggtgaacatcataacggcgcangggctgcgggagaataggtcgcagggagggactgttatccacaactgcacggtggcgccgcacccggacctggagaagttcacggacaaggtgaagacctaccttgcgct

SEQ ID NO: 408910 - DNA, 542 bp, Oryza sativa
attatttccatttctcccgtatcctctctctccggtccgctcttctcgagcgcggcggcggtggtggggaggaggagggccagcggcagcaagcggcggcggcgacgcgatgatgatgacgcgggcgtcgatgggggcgatggaaggcgcggcggtggacgaggtggtgcggcgcctcgtggagggcgggcgcggggggaggcaggtgcagctgtcggaggcggagatccggcagctctgcgtcgaggcgaagcgggtgctcctgtcgcagccgaacctcctgcgcatccacgcccccgtcaagatctgcggtgatatccatgggcaatttgttgatcttctgaggctgtttgatttgggcggttatcctccaacttccacttatctttttcttggagattatgtggacagaggcaaacaaagcttggaaaccatatgcttgcttctggcatacaaagtgaagtatcctgataagattttctgtaaggggaaaccatgaagatgcgaaaattacagagtgtatggttctatgatgaatgtaa

SEQ ID NO: 408911 - DNA, 459 bp, Oryza sativa
cttgtttaatcgacctcatttcattcgattcatcgatcgctcggcgcggcttagggtttttggcggcagcgatggcgtcggagaagcacttcaagtacgtcatcctcggcggcggcgtcgcagcgggatatgcggcacgggagttcgccaagcagggtgttaagccaggggagctcgccatcatctccaaggaggccgtggctccttatgagcgccctgctctcagcaagggatacctctttcctcagaatgctgcaagactcccaggatttcatgtgtgtgtcggcagtggaggagagaggcttttgcccgaatggtactcagagaaaggcattgagttgatcctgagcactgaaattgtcaaagctgatcttgccttcaagactttgactagtgcagttggagcaacctttacatatgagattttgatcattgcaactggctcctcagtcatcaagc

SEQ ID NO: 408912 - DNA, 401 bp, Oryza sativa
cttagctctcacagctcactgcatcaatgggggcggccaccatggcgctctcctccccggtgatggcccgcgcggcgccgtcgacctcctccgcgctcttcggcgaggcgcggatcaccatgcgcaagaccgccgcgaagcccaagccggcggcgtcgtcggggagcccgtggtacggcgccgaccgcgtcctctacctcggcccgctctccggcgagccgccgagctacctcaccggcgagttcccgggcgactacgggtgggacaccggggggctctccgccgacccgagacgttcgccaagaaccgggagctggaggtgatccactcccggggggcgatgctgggcgcgctcggctgcgtcttcccggagctcctcgcccggaacggcgtcaagttcg

SEQ ID NO: 408913 - DNA, 416 bp, Oryza sativa
  unsure (1)..(416): unsure at all n locations
tcttaggttcatcgtgatgcagctgagcagggtgagcagcagaataagcaaaagggggaagttgctcgacaaattgctttggctgatgaagctcgccgcaaggctgaagaacagaggaaggcccagttagaaagaaggaagcaagaggacgagctaaagcaagtaatgcaacaggagcaacactttgagcgtgtcaaggagcaatggaaaacctcaagtaacactcctggcaagagaaaagataggtctaagcatgaagatgaagaggggggaggtgaaaagaggaggaagaagggtggttgaaagnggaaaggattcacaagacaaaggcacactantgggaagaggaagaagacgaatatatagatgaaccataagcagaagatgattatgcagacacggcgaggagtaaccat

SEQ ID NO: 408914 - DNA, 428 bp, Oryza sativa
ttggtttccccccctatctttgtcttcatgtgcagaggctcaaagatctctctccctcacctatattacctgcaccaacaccactgaccactccctcctcctgttcttgctccttcctcccagtgtctctcaagagcggtgcagggttcacaaggcaggagaaaatgggggagatcaccaatgtcatggagtaccaggccatcgcgaagcagaagcttccgaagatgatctacgactactacgcctctggagctgaggatgagtggactctcaaggagaacagggaggcattctccaggatcttgtttcgtccccgcatcctgatcgatgtctcaaagatcgacatgtccgcaactgttcttgggttcaagatatcaatgcccataatgattgctcccagtgccatgcagaagatggctcaccctgac

SEQ ID NO: 408915 - DNA, 444 bp, Oryza sativa
attcgtgagcctctagggttcgtgggatcccccggagggggatccgaaccctaggggggtcatcctactcgtcctcctcgcgttctccgccaccgtggcgggcgccgaggacggcgaatcgacggggggatcgaaggtctcgctggggcgccgtgcaggggggttcttgcacgggctgaataaggaagcagtggtggagggagaccatggggtggccctcgatgaggtcggccccgggctgttcgatgcgctcttcgcgagtctctcgatgatcttagtcagcgagattggagatgaaacctttattattgcggcgctaatggcaatgcggcaccccaaggcaatcgttctgtctggtgcggtattcgcgctctacgtgatgacggtactatcaactggactttgggaggatagccccaacttgatatcaagggagcacactaa

SEQ ID NO: 408916 - DNA, 487 bp, Oryza sativa
gttgggctactcgttgagggtgggtttcagaggtggggggggtcgcctccatgggggaggacaagggaggcctcgatgccgtcctcaaggagtcggtcgacttggagaacatcccgatcgaagaagtattccagaatttgaaatgctgccgacaggggctcacttccgaagaggcgcagctgcgcctgcaactttttggtccgaacaagctcgaggagaaggaggagagcaaattcctcaagttcttggggttcatgtggaatccgctgtcatgggtcatggaggctgcagctatcatggccattgcattagccaatggtggggggaagccaccagattggcaggactttgttggtatcatcacactgctacttatcaactcaactatcagtttcattgaggaaaacaatgctggcaatgctgctgctgcgctcatggcgcgtcttgcgccaaaagcccaggtgctccgaaatggtagttggactga

SEQ ID NO: 408917 - DNA, 505 bp, Oryza sativa
gttggatgcaaacagaatcaagatcaagaaagccgtgcggggcgtgaaagttgaagtcactcaccggggaaatgtgaggcggaagtatcgcatttcagggctgacaacacaaccaactcatgaactgattttcccaatcgatgaccaaatgaacatgaaatctgtcgtagagtatttcaaggaaatgtatggcttcaccattcagcatccccatcttccctgccttcaggtgggaaaccaaaagaaggcaaactatctaccaatggaggcctgtaagattgttgagggtcagagatatacaaagaggttgaatgaaaagcagatcacatcattactcaaggttacttgccgcaggcctagagaacaggagatggatattctacagttcaacaaaatggatatgagcaagacccttatgcaaaagaatttggaatcaacattagtgagaagctaacctcagttgaagctcgggtccttcctgcaccttggctgaaatatcatgata

SEQ ID NO: 408918 - DNA, 494 bp, Oryza sativa
cgccgccgccgccactttatgctcgtctgcgtgccggcgacgaggcctctcgctcctccggcagcgcccgccccgccccttcccccctctcccgcgcccgcgcagcagcccaccccgcgtcgcctccctccgccccctctccgccgcggcgatgggggagaactccgccgccgccgccgggaaggggaaggaagcgaaggggaaggcgacgacctcggcctcggcctcggcaccgaacgtcgagcccgacgtggcctaccttgaggcggtgacgcagaagcggatccggcagttcgaggagatccaggccaagcaggccctcgagcgcctcaacatcggaggcgagcccatcaggataactttgccagatggtgcagtcaaggacggaaagaaatggatctcaacccctatggatattgctaaggagatatcaagtggattagcaaatagctgcttgatagctcaagtgaatgggacactgtgggatatgacga

SEQ ID NO: 408919 - DNA, 569 bp, Oryza sativa
attggatctgagcacttgcttcttggactggtcggtgagggtgaaggtgtagcagcccgtgtgctcgaaagccttggagccgatcctagcaatattcgcacgcaggttatccgaatgattggcgagactacagaagctgttggtgcaggagttggaggagggagtagtggcaataaaatgccaacacttgaggagtacggaactaatttaacaaaattagcagaggagggaaagctagatcctgttgttggaaggcaacctcagattgagcgtgtcgtacaaattctgggcagacgaacaaagaacaacccatgcttaattggagagcctggtgttggaaagacagcaattgcagaaggccttgctcaacgcatttctactggtgatgtgcctgaaacaattgaaggaaagaaggtcattacccttgatatgggacttcttgttgctggtacaaaataccgtggagaatttgaagaaagattaaagaagctgatggaagaaatcaagcagagtgatgagataatactatttattgatgaagtccacactctcataggagcaggagcagc

SEQ ID NO: 408920 - DNA, 505 bp, Oryza sativa
gttcgccaagaaccgggagctggaggtgatgcagtccatgtgggcgatgctcggggcgctgggctgcgtgttcccggagctcctcgcccgcaacggcgtcaagttcggcgaggcggtgtggttcaaggcggggtcgcagatcttcagcgagggcgggctcgactacctcggcaacccgagcctgatccacgcgcagagcatcctcgccatctgggcggtccaggtggtgctcatgggcgccgtcgaggggtaccgcatcgccggcgggccgctctgcgaggtcgtctacccgctctaccccggcggcagcttcgacccgctcgggctcgccgacgacccggaggccttcgcggagctcaaggtgaaggagatcaagaacggccgcctcgccatgttctccatgttcggcttcttcgtccaggccatcgtcaccggcaagggccccctcgagaacctcgccgaccaccttggcgaccccgtaacaacaacgcctgggcctacgcca

SEQ ID NO: 408921 - DNA, 477 bp, Oryza sativa
tcgatcgaacgtcatgttttagtcggaatactggtgctctaaggatggaggttctctgtgataattgcccagctggtggtgttggcatttataacccagggttctggggcatgaacatagaagatggaaagatctacaatttagtgatgtatgttaaatcaccagaaactgtggagttgacagtttccttaacaagttctgatgggtcgcaaaatttggcttcaactaccataccggtttctggtgcatcgaattggacaaaactggagcagaagttggttgctcaaggaacaaatagaacctcaaggcttcaaataacaactaacaagaagggagttgtatggtttgatcaagtatcgctcatgcctgcagacacttacaagggacatggttttcgcacagaacttatatctatgatgttggacttaaaaccacgattcttgagattccctggaggttgctttgttgaaggggaat

SEQ ID NO: 408922 - DNA, 515 bp, Oryza sativa
  unsure (1)..(515): unsure at all n locations
tcggttgacttgttacgcctgttggtgttcgagtggtaggagcccttgggcttttccaggttcagatcgacgcctccttcctctggacattgttgctagttggtgatggctgagcaggctaatcaaccgactgtccttcagaagttcggtggccagttccaccttggctccagcttttctgaaggtgtacgggctcgcaacatctgcccatctgtctcatcctatgacaggcgctttaccacaaggagctacatgacccagggccttgtcaatggtggcatcaacgtcccaatgatgtcgtcctctccaatttttgctaatgctccagctgagaaaggtggcaaaaacttcatgattgatttcctcatgggtggagtgtcagccgcagtttcaaagactgctgctgctccgatgagcgtgtgaagctgcttatccagaaccaggatgaaatgatcaaggctggtaggctctcagagccatacaagggtattggngactgcttcngacgcactatc

SEQ ID NO: 408923 - DNA, 449 bp, Oryza sativa
gttaatatcaagacctatggtgagtcattggccgaggggctgtggatgattggggggcgcccggttgctgacacctttggccgtgtcaaccgtgtggaacctgtcagccttgaggagcttggacgtcccaggattgacgttgttatcaactgctcgggtgtcttcagagatcttttcatcaaccagatgaatctactggaccgggcagtgaagatggttgccgaactggatgagccagaagagatgaactacttgcgtaagcatgcacaagagcaggcacgggaacttggcgtttcattaagagaggcggcaacaagggtgttctcaaatgcatcaggctcttactcatcgaatgtgaacttggcagtggagaatgcatcatggactgatgagaagcagctccaagacatgtacctgagtcgcaagtcttttgcatttgattgtgatgc

SEQ ID NO: 408924 - DNA, 514 bp, Oryza sativa
ttataaaggctgctgctgctctgaaggggtcggggcaccgccgtgctaccaatgggagcgctagactggacgcacagcagaagaagctcaaccttccagtccttcctacaaccacaattggttcattcccacagactgtggagctcaggagagtccgccgtgagtacaaggcaaaaaagatctctgaggaggagtacatcagtgccatcaaggaggaaatcagcaaggttgttaagatccaggaagagcttgacatcgatgtccttgttcacggcgagcctgagagaaacgatatggttgagtacttcggtgagcagctttctggttttgcattcactgccaacggatgggtgcaatcttatggatcacggtgtgtcaagccaccaattatctatggtgatgtgagccgccccaaccccatgactgtgttctggtccaagttggcgcagagcatgacctctcgccccatgaagggaatgttgactggtcccgtcacaatccttaactggtcttt

SEQ ID NO: 408925 - DNA, 463 bp, Oryza sativa
gtacaaggaattcccctatggctggtgggggggggttgttggccacttggagggatgtgatggaagtgagcacttttgtcggtgtcatcttagtgacactgttgttctggagttcaaccaatacacacctggttcaagatggaggcaggcgctggtgaaccggaaggaccacagggaagagggcaatgagggcgacggtttctactgtggaatcaggaagctccgcagcaaggatgagatctcaaagtggagacagttgtggccaacagacattcttgagtagcaaggacagagattattattccactgttgttattcatcaagttgccaaattgatgctctccaattgctcattctgtattctgaaacctgacgaaaacgccacccatctactccactcaagttgtatacacaaaggattggaacatggggtgacaaaatttggtagcttgggacacaattg

SEQ ID NO: 408926 - DNA, 531 bp, Oryza sativa
tcggttctccacatatcttcagattcctgaggcgatggtcagactcatcattgggagatacacgcgagaagctggtgtacgtaatcttgagcggaacctagctgcattggcccgtgcagctgcagtcaaggttgcggagcaagatagtgcgcttagacttggcaaggaaatacaaccaattactacaactctactggattctaggcttgctgatggtggtgaagttgaaatggaagttattcctatgggccaggacatatcaaatacttatgagaatccatcacccatgattgttgatgaggctatgctagaaaaagtgcttgggcctccaagatttgatgatagcgaagctgcagatcgtgtggcgagcccaggagtgtcagttgggcttgtttggacttcatttggtggggaggtacaatttgtcgaggctacagcgatggtgggtaaaggtgatttgcatctgacagggcaacttggtgacgtaattaaggagtcagcacagttagctctgacatgggtgagagcaag

SEQ ID NO: 408927 - DNA, 426 bp, Oryza sativa
tcggtttcctgataactacaagtatttcataggtgttcaaaagtgccttggtctatactcagagaatggtcagtattccactgatgatgttgaccgattatgcgaattgtatagctcacttaaagaagaatatggttggtcatctgctgttaagcgcataccccttgatttcctggaaggagagaaatttcaggaggcagcagataattatgtcagacccctattaaccaagggagtaccatcactattttctgatcttagcccattgtacgagcaacctggcaaggcaaacatattggaggaattgtttcttaagctagaacgttcaattaggacttcaggatgcttcccaggaagttcgcatacggaacctccatccacactcctgtggactcttgttttgatctctcagcactatgacagaag

SEQ ID NO: 408928 - DNA, 436 bp, Oryza sativa
  unsure (1)..(436): unsure at all n locations
tcgtttagctgaacaccgcatcagcagcagcgggcaggtaatcttgcacgtacgcacaccgtggcccggggcgagatggcgcagtcgatgctggtgtcgggagccaatggcacggtggccgccgcgagcaccagcaggctgcagcccgtgcggccgacgccgttctcgcggctcgtgctgtcgcagccgtcgtcgtcgctggggcgcgcggtgtccgtcaagacggtggcgctgttcggcaggtccaagaccaaggccgcgcccgcaagaaaggctgagccgaagccaaagttcaagaccgaggacggcatcttcggcacgtccggtgggatcggtttcaccaaggagaacgagctgttcgtcnggcgtgtcgccatgctcgggtttgccgcgtcgatcctgggtgaggccatcaccgggaagggaatcctggcgc

SEQ ID NO: 408929 - DNA, 422 bp, Oryza sativa
atccgtcctagcgagcgagagagagggaagggtggcgacttgcgactcgcgagcggggagatggcgaaggacgtggagatggcggtgcggaacggagacggcggcggcggcggcggctactacgccacccacccgcacggcggcgccggcggcgaggacgtcgacgacgacggcaagcagcggcgaaccggtaacgtatggacggcgagcgcgcacatcatcacggcggtgatcggctccggcgtgctctctctcgcatgggcaacggcgcagctcggctgggtggtcgggccggtgactctgatgctcttcgccctcatcacgtactacacctctgggctcctcgccgactgctaccgcactggcgatccggtcagcggcaagcgcaactacacctacatggatgccgttgcggcctactt

SEQ ID NO: 408930 - DNA, 319 bp, Oryza sativa
cttattgtcgagagccggtcgttcccgctctaccgctgcgtccgcgaggagctcggctgcgtattcctcaccggcgagaagctcaagtcccccggcgaggagtgcaacaaggtgttcctcggcatcagccagggcaagctcatcgaccccatgctcgactgcctcaaggagtggaacggcgagccccttcccatcaactaagccaagatcccatcgccattgccattgccatacacccatcatcgaggaggagaggagactaaaaataaaagaaaacgaaccgcttcgtgtatcttcagacaaaaaagccctgtatttt

SEQ ID NO: 408931 - DNA, 457 bp, Oryza sativa
cttcggtgcgtagcgatggcccggccacgcctcgtcctcctccctctcctcgccggggccgcggcggtgctctcgtcgccgctcggccgcgcgctcgccaagacggccaagaagagcaacgacatcgtcaatggcccactgctcacctccaagatcaacgccaagcgcacgctgatcgtcggccccgaggacgagttcaagaccgtgcagtccgccatcgacgccgtgcccgtcggcaacaccgagtgggtcatcgtccacctccgctccggcatctacagggagaaagttatgatcccggaaaccaagccgttcatcttcgtgaggggcaacggcaagggccggacctcaatcaaccacgagtccgcttcctcccacaacgccgagtctgccggctcaccgtgcacgcggacaacgtcatcgtcttcggcctcagcatcaggaacagcgcgcgcgc

SEQ ID NO: 408932 - DNA, 473 bp, Oryza sativa
  unsure (1)..(473): unsure at all n locations
ataagatagaaattaaaaagaaaatcacggcgcgggagcttgcagagacagcagtggtgagagttggtgccgccgcggcggtgctcgtgctggcggcggcggcggcggccatggccgccgagccgcccaccgatgacggcgcggtccgggtggcggcggggctgacgaagtgcgtgtccgggtgcggtagcaaggtgacctcctgcttgctcggctgctcngcngcggcgnctgncgccgccgccgccgcgacggcgatgccgttctgcgtcatcggctgcaccagcgacgtcttgtcctgcgccaccggctgctccacctcgctctgattaagtactaatgaagtaattaaccgcgctaattaataataaatcgcacctacgtatgccacatgtggactcgcttgactaattaaatactgccatgcgaatgcgattagtgggatatgaaaagaggaaatgtaagaactcatg

SEQ ID NO: 408933 - DNA, 492 bp, Oryza sativa
  unsure (1)..(492): unsure at all n locations
ctcgtcgtccccgatcccctcctcctctccggtcgtctccactcctcgagatctggcaaggtcagggagccagcaaattcacccgcgattccgcgcgccgccgccgtcgccgccgccgacgtcgccgcctgggtgggggaggagatggccggcctcgggaaggccttctacgcggtagggttctggatccgggagaccggccaggccctcgaccgcctcggctgccgcctccaggggaactactacttccacgagcagctctcaaggcatcgcacacttatgaacatctttgacaaaacccctcatgttcacagagatgcatttgttgccccaagtgcatctctcattggtgatattcaagttggacaaggagcttcaatttggtatggatgcgtcttaagaggggatgcanacaacgttcaaattggatctgggaccaatatacaagacaattctcttgtccatgtggcaaaatctaatcttagtggaaaa

SEQ ID NO: 408934 - DNA, 524 bp, Oryza sativa
tttagagtggagatattgatgaagcttttagggggataagggagctgggccttgcatttttccatcatgaggttgttaaacgcgctctcaccttgagcatggagaatctgtcatcacagccattaatcctgaagctgttgaaggaatcaactgcaggttgcctgatcagttctaatcaaatgtctaagggtttttgtcggctagcagagagtattgatgatctgagccttgatattccttctgccaagattctctttgacaagctggttctgactgctacatctgaaggatggcttgatgcttcattcactacatcttctgcccctaatgaagatatgcgaaatgcaagtggtgaaaagatcaagcatttcaaagaagaatctggacacataatccaagagtattttctctcagatgatgtcccagaactcattataagccttcaagagctttctgcctcagagtacaatcctatcttcctcaagaagcttatcaccctcgctatggacagaaagaatagggag

SEQ ID NO: 408935 - DNA, 493 bp, Oryza sativa
tcgttgaagaggaccaagaggacgatgatgaagagaatgaacagcaggaccagcagatacctgaggagttcatttttgatgctgaaggtggtatagtagatgagaagctccttttctttgctcagcaagctcaaagacggcgagggaaagctggacgagcaaagaatctcatattctcatctgataggggacgatacataggttctatgcttcccaagggtccaataaggaggttagctgttgatgccacacttcgagcagctgcaccataccagaaactgaggagagagaaagatcgtgacaagacaagaaaggtttttgttgaaaaaactgacatgagagccaaaagaatggctcgaaaagcaggcgcactggtcatatttgttgtggatgctagcggtagcatggctctgaatcgcatgcagaatgcgaaaggtgcagcattaaagttgcttgcagaaagctacacaagcagagatcaggtttcaatcat

SEQ ID NO: 408936 - DNA, 331 bp, Oryza sativa
tcggtttggaggaacaaaccctactcactcccggatacctgctgttgccactaggccactatcatggaatcgggcaagcatcacgcatgcagctcatgcgacacgaagactacgaccacgaacgcgggagctcctgtgtggaacgacaaccaggcgctgacagcggggcccagggggcacaggctccttgaggactatcagctgatccagaaggtgatgcacttggtccggtagcgcattcggagagcgcgtggtccacacctctggggccttcgccaagggctattgagagagcacccacaacgtaacagacaatacctgtaccggctaa

SEQ ID NO: 408937 - DNA, 309 bp, Oryza sativa
tcggtaataactggtcctatggttgtggaagatgttgtttatgaaaataatgaggaagaccaaagttctatgactgaaaagatgttccggcgccttatatttaaaagaaattctggcttagtgcaatctgaagcattgcttgtcaaagattccaccagtgacaaggcagatgaaaacaacaaaaaatcaccttcagcatccaaaaaaaggaggaaccagaaaaaaggtccctcaggatccaagaccgttctgaggattgatcatagctaccttggtagctcttatcacagcagtatcatatctggcttt

SEQ ID NO: 408938 - DNA, 480 bp, Oryza sativa
tcggtaccgcaccgtcaaggtgtggaacctcacgaggggcaagctgcgctgcaacctcgagggccatggcggctacgtcaacgctgtcgcggtcagccccgacggttctctgtgcgcgtccggtggcaaagatggcgttaccctgctgtgggacttggctgagggcaagaggctgtactcgcttgacgcgggttccatcattcactcgctctgcttctcgcccaaccgctactggctctgcgcggcgacccaggactctatcaagatctgggatcttgagtcaaagcacattgtgcaggaccttaagcccgagatccctgtctccaagaaccagatgctctactgcacaagcttgaactggagcgcagatggaagcaccctctatgctggttacacagatggaaccatcaggatctacaagatctcaggtttcagctacgccggctagagatggggagtgttgttttagttatcgcgttc

SEQ ID NO: 408939 - DNA, 548 bp, Oryza sativa
ctcatgtccagccgcctcgtcgtgttcgcgttcggcgcgcggctccgacctccaaagccgccgctacccttcccgtcttcgtcgtcgccgcgcacgcagatcgcgaaccagcccgcgcgccgcgcagcagcgccgcggagaggaaaggagagctccgccgcgcaccccccgccaccatctcgtagggagagatggggctcacgttcacgaagctgttcagccgcctcttcgcgaagaaagagatgaggattctcatggtcgggctcgatgcagccggtaagaccaccatcctctacaagctcaagcttggcgagatcgtcacgaccatccccaccatcggatttaatgttgaaaccgtggaatacaagaacatcagcttcactgtttgggatgtcggtggccaggacaagatcaggcccctgtggaggcactatttccagaacacacagggactcatctttgttgtggacagcaatgatagggagcgtgtttgtgaggccagagacgagcttcacaggatgctgaacgaggatgagctgcgtgatgct

SEQ ID NO: 408940 - DNA, 486 bp, Oryza sativa
  unsure (1)..(486): unsure at all n locations
ctttcgtaccaaaaaccgaatcgaacgccgcgtgcgtgagagagagagagagagagagagagagaaaccaccccaaaattagcgaggcgaggaggaggaggcggaggaggggagccgcaggaatggcggcgatgcagagctggcgcaaggcgtacggcgcgctcaaggactccaccaccgtcagcctcgccaacctcaactccgacttcaaggatctggatgtggcgatcgtgaaggcgactaaccacgtggagtgccctcccaaggagcgccacctgcgcaagattgttgccgcgacgtccatcgctcggcctcgggcagacgtcgcctattgtattcacgcgctttcccgccggcttggaaaaacacgcaattggattgtagcctttgaaacacttgtagtgatccatagacttcttcgagagggtgaccctacttttcgagaagagcttcttnaatttgcacagagggggcgtattttgcagc

SEQ ID NO: 408941 - DNA, 476 bp, Oryza sativa
aagtgtcatcgagtgtggttgagagagtttgagacttgaggctgcgctgcgctgaacctgtcgttcggtgggaggcaagaagaaggtggtggtggtggtgcagcaatgccgcggcgcgcgagggcgaggggcggcggcggcggcggcggggaggaggtgaaggtggaggatgacttcatcgactcggtccctcatcctcgccgactggaagcagatctccgggcccatcccgccgtgcgtcgccaccgccctcccttacctccgcatcctcgagctccccggcaaccgcctcaccggcgagatcccgcgctccatcggcagcctcttccgcctcaccgtgctcaaccttgccgacaacctcatcgtcggcgaaatcccaagctccatcacctcgctcgcgtcgctgaagcacctcgacctcaccaacaaccagcttaccggcgggatccccgacgacgtgggcgaccttaccatgc

SEQ ID NO: 408942 - DNA, 241 bp, Oryza sativa
catctttgttttgggctatgttgatgatatatcaatatataatatgctatatatttttattttacagtttggttatgtaccatctcaatggcctctgctcttaacacatatgtaataatctcttccctccctctccgaccggttttattgtaagagtactacaattatcgttgggtgaggatatgtgaaaacaaagctccggctatatacacacaagatatgtatctagagcatatctgat

SEQ ID NO: 408943 - DNA, 475 bp, Oryza sativa
  unsure (1)..(475): unsure at all n locations
tgatagcttcacaaattacaaaacgcaatcaggaccaccacaacacggcggcggaaatggcagcgacggtgacccagaacgtcgactgcaaggctttcaacgacgcccttctgttcttcgacgccgccaagcaccccgcccttccgcataggtgacctacaagccgtcatccccgtccactgctagcgcaagacccccctccggtacctatactacgtgggccgctacctcctcatccgacgccggcctcttccgctcatcacgattcctccatcagtactcgcatggtcagtgggcagtggacgctctactgctcggcgcatggcaccatgacatgggcgctcttaaggactcgacaccactgcagacactggagcgtttccgacagcgccatgctcaacagcgctctgngncaactgcatgactgcttcatgcttgctcgctaccatggatggaggatcaggcacagaacaca

SEQ ID NO: 408944 - DNA, 543 bp, Oryza sativa
  unsure (1)..(543): unsure at all n locations
gtctcctttcccctttcccgcaaggctcccacgctgacgaaatcgacgccgatttcccgaaatccccaatccccaatccagaatccactcgcttttcgataaaatttctgttgattgcgtcgaaaccttcgcaatcctctcgcacgcatcacgccttgcgcgccgcatctcgtagccctgaattttgatttgattctgctgcctccggcgcgcccctgattggcgaggagggtggtggtggttgtggtgggtgcggccatggcggcttcgacggcggcggcggtggcaccggactggtggaacgacgtgaacaactcgccgatgtggcaggaccgctccttccacgccctcgccacgctatacggcgccgtctcgttcgtcgcgctggtccaattgatcagaatcgaatgtagagtacctgagtacggatggacgacacagaaggtgttccatttcatgaactttatggtgaatggagtgcggtcaatcgtgtttgtgctccgacgagatngtgcacttgtgcagnctgaggtatttcaacat

SEQ ID NO: 408945 - DNA, 516 bp, Oryza sativa
  unsure (1)..(516): unsure at all n locations
tcgcatcactccatttctgagctcttctagtttgagtgagagagcagcagaagggagtagtgcaagatgccgatccgcaacatcgccgtggggagccaccaggaggtgtaccacccgggtgcactcaaggcggcgttggccgagttcatctccaccctcatcttcgtcttcgccggccagggctccggcatggccttcagcaagctgaccggcggcggagcgacgacccccgccgggctgatcgcggcggcggtggcccacgccttcgccctgttcgtggcggtgtccgtcggcgccaacatctccggcggccacgtgaacccggccgtgaccttcggcgccttcgtcggcggcaacatcaccctgttccgcggcctcctctactggatcgcccagctcctgggctccaccgtggcgtgcttcctcctccgcttctccaccggcgggctcgccaccggcaccttcggcctgaccggcgtctncgtgtgggaggccctggtgctggagatcgtcatg

SEQ ID NO: 408946 - DNA, 506 bp, Oryza sativa
tcggttagctcatcgtcgataccaatggcgactaccggggccacatcgacgctgctgctgctgctgctgctggtttcggcaacatgggcggcatcggcgccgacgacgagtcgggcgaggaacgtgataacacacgtgaaggggttccaagggaggctgccgttccacctggagacggggtatgtggaggtggacaacaccgataccgttgagctcttctactacttcatccagtcggagcgcagccccgccgatgaccccctcatcctctggatcaccggcggccccggctgctccgccctctccggcctcctcttcgagattggccctctcaagtttgacgtagctgggtacacggaagggttccctcaattgttctacttccaagattcctggaccaaagtgagcaacgtgatatttctggacgcgccggtggggacggggttctcctacgcccgtgaggaacaagggtacaacgtcaccctcacacagacgggacagcagct

SEQ ID NO: 408947 - DNA, 425 bp, Oryza sativa
cttattttcaactcagggcattggtggactcccaggagattatttgatatgggctgctattttgaggctggaggtttgcttaaactaggtacatccattaattctgctttcaaaatggcacttgaaacatgggcttcatgggtgaaggaaaaggtggatttaaaacgaacacatgtctttttccgcacgtatgagccatctcattggagtggttcaaatcaaaaggtatgtgaagtaacagaatttcctacagctgaggccaaaggagatgacagaagtgaatttggagatatactcgctggggttgtggtgaacatgagcgttcctgcaactatcttgaatgtgactttgatgggggccttcaaaagtgatgctcatatcggtatatggagtcattcttcaaccatacttgattgcagtcattg

SEQ ID NO: 408948 - DNA, 334 bp, Oryza sativa
  unsure (1)..(334): unsure at all n locations
cttacgcgtgggttcagaggcatcttcagtgggaggggctacactccttgatctgtgctctggttgtggcggtatgtctaccgggctctgtttgggtgcggcacttgctggactcaatcttgaaacgcgatgggctgttgatttcaatagttttgcgtgcgagagtctcaagtataatcatccaagaactgaggtccggaatgaaaaggcggatgagtttcttgctcttcttaaaggatggcataacctttgtgatgaatatgtcaagaaagatattgatttcagttcagctggtgcctcanagaacgaagaggatgatgatgagcctcttgag

SEQ ID NO: 408949 - DNA, 465 bp, Oryza sativa
gttcgcgaaggacgtgccgcggacggcggagaacgtccgcgcgctctgcaccggcgagaagggcgtgggcaagagcggcaagccgctgcactacaaggggagcaccttccaccgcgtgatcccggagttcatgtgccagggcggcgacttcacccgcggcaacggcacgggaggggagtcgatctacggcgagaagttcgccgacgaggtgttcaagttcaagcacgacagccccggcatcctgtccatggcgaacgccgggcccaacactaacgggtcccagttcttcatctgcaccgtgccctgcagctggctggacgggaagcacgtcgtgttcgggcgcgtcgtcgagggcatggacgtcgtcaaggccatcgagaaggtgggatcccgcggcgggagcaccgccaagccggtcgtcatcgccgactgcggccagctctcctagatctgtgctgatcccct

SEQ ID NO: 408950 - DNA, 524 bp, Oryza sativa
tcgtttaggcctcgacctcccccctcccccacacacgtctccccgactcgatctccccctcctcctccgccgccgccgccaacgcctcctcctccgcctcctcccccaacgcatcgccccaccccatccatccagattcctccctcctcctcctcctcctcttcctcctcccccgatcccgccccgatgcgatgcccccgcggcgcgatcgcgtgacgccgccatgatgaatcccgacggcggcgacggcgaccgcctcgaggcggcgggggcgggctcgtcgtcggcgcagcaggggcatccgacgatggagtggcggttcgcgcaagtcttcggcgagcgcgcggccggggaggacgtgcaagaagttgacatcatctctgcaattgagtttgataaatctggtgatcatcttgccaccggagacagaagaggacgtgttgttttatttgaaaggacagatgctcgggataatgccagtcggagagaaatggaaagacaagatgctccgattactagacacc

SEQ ID NO: 408951 - DNA, 316 bp, Oryza sativa
  unsure (1)..(316): unsure at all n locations
tactttngatccatcacactcacacaacacaggcgctccttaaaacctcccggagagagcaagacgttcngctttnggcaccactgtcaccatggccaaaaccagccgccccagcaccacggtggtggtggcggttgcgcgcaccagcccaccttcaagatcttctgccgcgccgacgaggggtactgcgtcgccgtgcgcgaggggaacgttgttctcgccccgaccaacccgcgcgacgagcaccagcactggtacaaggacatgcgcttcagcgcccagatcaaggacgaggagggcaacccggcgttcgcgc

SEQ ID NO: 408952 - DNA, 426 bp, Oryza sativa
cttactcgtgggtcgagggggcttggggggagggaagaagatggcggcgggggaggtggagctgaaggagaaggcggggacggcgtggagccactcgtacctgaaccagaagccatggcacccgctctcctacccgaaccagcggcggaagtggatcgccgagcagatccacgccaaccgcgcgcgccgccaggaggaggtgcagcgtgagttcgcgcaggagcaggagttcttccgccagaccgccctcttctccaagaaggacaaggagaagatggagataatgaaagctgtgagtttcatgtatgtccgcccacctggctacaacgcagagagtgcaaaagcagctgaaattgaagatgagaacaggaggtctggtgaaggtcatgcaacccaaaatgctgctgctgcaagcacctcttcaat

SEQ ID NO: 408953 - DNA, 502 bp, Oryza sativa
ctgggaagaggcctgtggggatcaagaagatgaggaggtgggtcttggccattgccattcttgctgctgctgtatgcttcttccttggagctcaggcccaggaggtgcggcagggccaccagacagagaggatctcaggaagtgctggtgatgtgttggaagatgaccctgttgggaggcttaaggtctatgtctatgatctcccaagcaagtacaacaagaagctgctgaagaaggatcctaggtgcctgaaccacatgtttgccgctgagattttcatgcaccggttcctgttgtcaagcgctgtccgaacttttaatcccgaggaagctgattggttctacacaccggggtacactacatgcgacctgactccctccggtcttcccttgcccttcaaatccccaagaatgatgcgcagcgcaattgagctgattgcaacaaattggccttactggaatagatcagagggggctgatcatttctttgtacaccacatgac

SEQ ID NO: 408954 - DNA, 424 bp, Oryza sativa
tgtcatttaagtaaatcagctttccaagaaaaaggggtggacatacatacaaaacttatgaggagatataagcaggttcctgagtggtgggttgtctgcatcctcattggtaacattgccgtcaccatatttgcttgtgaatactacattgagcaactccagttgccctggtggggtgttttacttgcatgtgccattgccttcttcttcaccctcccaattgggataattacagcaacaacgaaccagactccaggcttgaacatcatcacagagtatatcatggggtacttgtaccctggacgaccggtagcaaatatgtgtttcaaggtatatggttacatcagcatgagccaggccctgacatttcttcaagatttaagttgggtcactacatgaagattccaccaaggaccatgtttat

SEQ ID NO: 408955 - DNA, 445 bp, Oryza sativa
  unsure (1)..(445): unsure at all n locations
gttccttaccccaagaagcgcaagcccgactaggggggcgcggccgtggcctcctccccggccgcgggcgccgccgcgctcggcctcacccgcgacgacctcctccgcctcgtcgagccgctctcccgggaccagctcgccgacatcgccgccaccgccgcgctcgcctcgggggtggccctcgacgccgtgcgcgccgccgccgaccgggacccggccctccgcaagctcttcgtgcgggggctcggctgggagaccaactccgactcgctccgggccatcttctccgccttcggcgacctcgaggaggccgtcgtcatcaccgacaagtccaccggccgctccaagggctacgggttcgtcacgttccgccacgccgactccgncgtnctcgccctcaaggagccctcgaagaagatcgacggccgtatgaccgttacgcagc

SEQ ID NO: 408956 - DNA, 530 bp, Oryza sativa
ctttcttctccccaaaccctagccgccgccgccggcgtactcgagagaaacatcagcatccatggcgggcaagggcgagggtccggccatcggcatcgaccttggcacgacctactcgtgcgtgggcgtttggcagcacgaccgcgtggagatcatcgccaacgaccagggcaaccgcaccaccccctcctacgtcggcttcaccgactccgagaggctcatcggagatgctgccaagaaccaggtcgccatgaaccccatcaacaccgtcttcgatgccaagcgtctcattggcaggaggtttagcgatgcttctgttcagagtgacattaagctctggcccttcaaggtgattgctggacctggtgacaagcctatgattggtgtccagtcaagggtgaggagaagcagtttgctgccgaagagatctcctccatggtcctcatcaagatgcgtgagattgctgaggcctaccttggcaccaccatcaaagatgccgttgtcactgttcctgcctacttcaatgactc

SEQ ID NO: 408957 - DNA, 500 bp, Oryza sativa
  unsure (1)..(500): unsure at all n locations
cttgtttgatccatcacactcacacaacacaaccctccccaaaacctcccgaagagagcaagatgttcggcttcgggcaccacggccaccatggccaagaccagccgccccagcaccacggcggcggcggcggcggcgcgcaccagcccaccttcaagatcttctgccgcgccgacgaggggtactgcgtcgccgtgcgcgaggggaacgtcgtcctcgccccgaccaacccgcgcgacgagcaccagcactggtacaaggacatgcgcttcagcgccaagatcaaggacgaggagggcaacccggcgttcgcgctcgtcaacaaggccaccggcctcgccatcaagcactccctcggccagggccacccggtgaagctggcgccgttcaacccgagtacccggacgagtcggtgctgtggacggagagcggtnacgtgggcaagagcttccgctgcatccgcatgctgaacaacatccgcctcaacttcgacgcgtcca

SEQ ID NO: 408958 - DNA, 506 bp, Oryza sativa
  unsure (1)..(506): unsure at all n locations
gttcagccaaggcggcggcgcacagccaggagaagccgtcgagcggcggcgcaccgcgcaccgcgcacggagcacccctcccccccctgttaccgtcccctcccgctgcagaaggcgccggcgcacggcgtcgtcccatccctaattccggccccccctctggttcactccccacgtttgaagtcagcttggttctgactccagggatctcaactatcctgtccaggatcaagaccaaacccgtcagccatcatgcaggctagcgacaggttcaacataaattctcaacttgagcatcttcaagcgaaatatgtgggcacagggcatgctgacttgaatcgatttgaatgggcagtaaacatccaaagggatagctatgcatcctatattgngcactatccaatgctggcatattttttcattgctgagaatgaatcaatnggaagagagcgttacaattttatgcaaaaaatgctacttncgtgtggtctgcctnctgagagaga

SEQ ID NO: 408959 - DNA, 455 bp, Oryza sativa
  unsure (1)..(455): unsure at all n locations
ctcttcctcttcttcttcttcttccctcttgttgtggtggtgggtttgacccaagaacggaggagggatagggcgggcggcgatgggggcagttcgggggattttggtcgtggcggtggttcttgcggtggcggcgattcttgctggggcggcggaggggaaggtgaacgggaaggcgaaggggaagtacagggcgctgttcaacttcggggactcgctggccgacgccggcaacctcctcgccaacggcgtcgacttccgcctcgctaccgcccagctcccctacggccagaccttccccggccaccccaccggccgctgttncgacggccgcctcgtcgtcgaccacctcgccgacgagttcggcctgccgctgctgccgccgtccaagctcaagaactccagcttcgctcacggcgccaacttcgccatcaccggcgccaccgcgctcgaca

SEQ ID NO: 408960 - DNA, 341 bp, Oryza sativa
ttcgttaacccttttctccatcgcctccccctgcgccgcgccgccacttctctgctgtcctcctctcgccgctcccagggtttcgcgcgagatctactctagcattcgggcgttagggttccccgagatggcgagcgagcaggcggcggagagctacacggtggaggagctcgtcgccgtgaacccctacaaccccgacatcctcaacgaccttgagggcttcgtcaacgatcaggtttccaaccaaacatataacttggatgcaaatcttagtcttcttcggctgtgccaggtcgaaccagaaagggtgagtgtgcagattgtatctcgcatattgatta

SEQ ID NO: 408961 - DNA, 381 bp, Oryza sativa
tgaactttgacgcattggaaatgcccaaaactgtgtcaagaatcaagtcacaatgaacacacggtccaccaggttaaaccacgctatacatgactgcaaagcacaatcctgccaattacttagttgtccccatctttcaatcttacaaacggtattacaccttcacaagcatcatggctttcccgatcttattgccaactcaaccatgcacagtatactgcacttattactttatgattcacaactgtaacaactgatatcactgcagaaatgctgagcaacgtgcataccatctcgccaccaaactgaagaagcccagatggactgccaggagaagaccgcatatagtactgcagggtttgctaccgtatgaggcagagg

SEQ ID NO: 408962 - DNA, 373 bp, Oryza sativa
accccagacttggggccctcataacaggttttaaaatgtaacttgtatagatcttttctgaaccaggacatacaaggtaaaatgtattccagatatgttaaaggcatataacagatgagccttgggcccacagtttaaaacacgctactctgaatgatcggtcaaaaagacccactgaacgggtacatctggggtgagagtcgcaacgagaagaatgaagggtttagcattgcgtccttacacgagtaagacagcattgttacagccatcattctctgggttgtttgaaacttgggcatttttaccccaaacaacttttccagcaggggttaccagaccaagttcacttacgttcactaaatgatagttcccc

SEQ ID NO: 408963 - DNA, 369 bp, Oryza sativa
gtttgcattaaggtttagtactcaatcaaagttaacaaccgaccacaaatacagtgttccaatgactgaagcatttcgaggaaaccattacacagatggattgctgatttatgaaaagcttgactaaaacctacacggtaactaggactcatcacacaaaagtccagtttaaactaaggatgctcctgtcctaatcttcactctttggaggacttgttgatcagggacttgtggatgtgaggaatgacacctccaccagcgatggtacccttgatgagagtggcgagctcctaatctccacggatggcaagctgcagatggcgaggggtgatacgcttgaccttcagatccttgctagcgttcccagcc

SEQ ID NO: 408964 - DNA, 362 bp, Oryza sativa
ttttactgggagaggaacgatcaacagatactattaagcatccatgttgcgaaatccatgtgatacaagaacgactgcctcaggctcgaagatgacaaaaagggtgacatggatgcgatactgacacttcagctgcaacttgcagcgacctacaacggggtcagcccaacaacaccgcatgcaagtcgcccaccagcatttccagtactgagactaagctcatggccacccttccccaaatcatcttcaagctcatgaacaacgaatgctctcccaacaacagaatttgggccactcagaggaatctgcttcctaactccaccaacatcatcgtaaccaacttcatcaagactttccttcat

SEQ ID NO: 408965 - DNA, 397 bp, Oryza sativa
tataacttcgccagctaaaagatgatccaggttccacatccgttacatcacgacagagtaaaaatagtttctcagtagcacgcgaacataggattgttgatgtgaaacacatgcattcgacaaaagggaaatgaaatacgacaacgaaagcagttctcttagcagtagaccaactagaacatgtaagggtaacggcacaacacatgcggcggccaaaaatttagagcttgtcctcgaaatcggagaggggagtcatctgctccttgagacccttcctcttgcggatatcctgcaccagggttgaagcctgcgagccagcttcaagaggatcagaggtcatcatgtcccaatggtcgaacacacactgggggaaggcctggccagatgtcgcagccct

SEQ ID NO: 408966 - DNA, 381 bp, Oryza sativa
tttttccccccagggaatttatcccagtgttcatgagacaaagcatctcttaaattcagagaatagaagggagaaggaacacaaaatctgaagaaaaaaattgacttatttggccatttcttttagccatgaactctgctctttctgcacactttgctgtaccccgaaaaataaattaaaagaaaaggaagaaaaaggtcttcacacttgtcgatggcatctcagcaaacggaaacaatggactcaattaaggtcgataagtggagcaagctcagccttatcgatcaatttgaactcccaggtgaacaatgtgaaatgcttgaagcaggcgttaaggtgggcttcttccttgaggctcacaatcttttgaaaatgtgtgtg

SEQ ID NO: 408967 - DNA, 379 bp, Oryza sativa
gtttaccccggactggtccgtcagctgctggcaccggaagtactccgggtcgaggtagccgaagctgcccttgacggcggtgctgacgtgcagctggttcatcccggggccgtccttggacagcccaaagtcggatacctttgcgacgaagttgtcgtcgaggaggatgttggtggtcttgacgtcgcggtggatgatcccctgcgccgtgccggtgtgcaggtagtggaggccgcgggcggcgccgatgcatatctccagccgctgcttccacgtcaacgccggcaggtccttgccgtagatgtggtcgcggaaggggccattgtgcatgtactcgtagaccagggtcatctcggcgttctcgtcgcagtagccgatg

SEQ ID NO: 408968 - DNA, 378 bp, Oryza sativa
ttttcaatacggggattccaaaacagccgatggacaataatcggactcagagcatcagttttaaccgaacagaaataaacgagtattaaacgactgacatagtgcacattgcgagcagatattaacggtccatgaaacgagagccatggccgtgggcaaaacttaacaaatactagaactagatatctcaactgcagacatgcaaaccaccatttgaacgaggctcacttcttcttggcggcagccttggtcaccttggcaccggttgggtccttcttctccacgttcttgatgacgccaacagccaccgtttggctcatgtcacgcaccgcaaaacgatcaagaggagggtactcagagaaggtcttcacaaccatg

SEQ ID NO: 408969 - DNA, 133 bp, Oryza sativa
gcaacaataagactcaaagcatccaatttttaacccaagagaattaaacggggtgtaaacgactaacatagtgcacattgagagcgaatatccacggaccatgcgacgaagtgccatggcccgtgggcaaaac

SEQ ID NO: 408970 - DNA, 363 bp, Oryza sativa
gctcgggggtaaatgtgccacaggatgacttatgcagctggagacaaaagcttttgaggaccagagaaaattctgggatcaaaacacaaggttggaacctggaactagaacaaaaatgggaaatcaagtagacaatggagtcatcaactcaaggagcaaatcatgacaaaataaggctacatatttttgctcataccccaacaaaactatgggcctttgttacacccaaggttgccggtttatgaacaacttgaagaggataccaccgtgggtggagaaaaagggggcgaaaacgagggattcgaccgccatgagcttgatgaggacgttgagagagggtcctgaagggtccttgagagggtc

SEQ ID NO: 408971 - DNA, 399 bp, Oryza sativa
aagtactcccattccacaacaaccgaagggcaacaataagactcagagcatccaagtttttaacccaatagaaataaacgagttttaaacgactaacatagtgcacattgcgagcagatattaacggcccatgcaacgagtgccatggccgtgggcaaaacttaacgaacgctaagatatctcaaacgcaggcagcataaccaccacttcaacgatgctcatttcttcttggcggaagccttggtcaccttggcaccggttgggtccttcttctccacgttcttgatgacgccaacagccaccgattgcctcatgtgacgcacggcaaaacgaccaaaaggagggcactcaaagaagggctacacaaccatgggcttggtgggaatcatcttaaccata

SEQ ID NO: 408972 - DNA, 333 bp, Oryza sativa
tttttcccatagaaggagggtaacgtgtgggaggaaaatcgcctggccttacagcaccgggcactctctactcaaaccctaccctgtgttggtaaaccgttcgcgattaacgcctcctcctatgacaatgtttggagattaacgcttgcaccaaaatacccatgttaggcagtgtattcccctacaagaattgtcatcggtttcaaggctaaaaaggcttaactcaccagatcccgttagtgccggaccaggaataatcacttgctcgccatgactttctgccagcttaggcaccggccgagccgtacttttttccaaagaagaggatctgct

SEQ ID NO: 408973 - DNA, 116 bp, Oryza sativa
cctgggggagaacgaaagactcaaagacaaattaattgttgtcaacatgcacccatgccttcattactccaagggactctaattttaaggggcaattgccagctgggggtacagtt

SEQ ID NO: 408974 - DNA, 289 bp, Oryza sativa
caccaacagcgggatcgagtttgcattactagatacacacattgcagccttccttccctctctccatgtatcgatatatcaacccggccacgcacaaaacatttgttcattccctactcgagctgcgcgtaccacaccccttggatcttgacatccttgggcaccttggcgccgaggtctgtgtccgacggctgcacgctcttgaagacgccaatcaccttgccggtctctggcttgctcttggtgacgctcaacgtgatgttgcccgtcgacgaccaggcgtttttga

SEQ ID NO: 408975 - DNA, 275 bp, Oryza sativa
  unsure (1)..(275): unsure at all n locations
acgtgtngaatgagtttttctttagaccaacaatgtaattcttactctacgatatacctgtatactccatctcgaaaaaaatgcaattcttactctaggcagcctatacattaccctgtagaaaccattcaagaagaaactggatgagagcctccttgccaagttcatgtctgccaaagtttcccaatgaccaggctctgaattgtacagctcggcagattttagcacctgtccattctttttacacccaccagcgacaatagcaattttattaa

SEQ ID NO: 408976 - DNA, 346 bp, Oryza sativa
cacatatattattatagcagagtggtgtcacagttcaaagtgcttctaagcgaaacgagcagaataattcaatttccaaggctggtagatctggattacaatttggcgtgacatagctcagaagcacagccaaaagcagatgaaccatcatcggttcatttatcagttgccagaacacaccgcaggcagccaccttcatgcagcaggtcaaacgccttgttgatgtcagtcaggttcatgctgtgagtaacgtactcgtccaccttgatttccttggtcaagtacttctcaacgagccatggaacttggctttggctcttgaaaccgcccaaaggtgtttcctttc

SEQ ID NO: 408977 - DNA, 433 bp, Oryza sativa
acaagagtatgatatgttttcttctgtccatagcgaagtaccggcattcagctagtattacacataaaaatgtaattaactcatctacactattgttaaagggaacatcaacattgcaagcttagttgctatgctaagttaaagagaattactagtttttttaggtatcaatagcataactcttgctattattcttgaaagggaagagctaatactaacgtagacaaagtgaaaaccaagttcagacatctttcatgcaaaatgtaccgatctaaaagtttaaacactgctcctttttgggatcagggcatggtataattccccagttcctccttactttatccaaatctttatgaaaatgcttctcatagtacacagacataagatctgtgcacttaagaccctgttttgaagcccatgggaaatatgctga

SEQ ID NO: 408978 - DNA, 260 bp, Oryza sativa
gtggttacggcgctcggcgcgtcgtcgacgacgaacccgccgtgcaccggcctgtcgttgaagtaggacgccacgtagaggtcggacatgccggcgccgccgccggcgttccacacgccgttgaagctgcagttccgggactcgcacggggcgttcaggcccagcgccgtcgccatcttctgggcgcacttgccgtggtccgaccctttcggcgacgccgtcgtgtcgtactcctatccgctgtacttgtatgtaccatt

SEQ ID NO: 408979 - DNA, 307 bp, Oryza sativa
caacagggatgataacttaagaattaagatctccatcacataaaaacatacagtgactgagtactggattacacgattgagttgttcagggttcagataggaaaaacattttggggactagagatagagggaatcgacagatgcgcagcagttgtcgcgcgggaaacaggacatcacgattgcgttgcatgtcgtcggctgcgcagcggcggcgcggggcttaagaactgcttttgaatgggatcgccctgatgattcacctggtggtagatggcagccagggcagcgccaacgaagggaccaaccc

SEQ ID NO: 408980 - DNA, 269 bp, Oryza sativa
ttttatattttgcatagtttcccaacatgggccggtgaacagaaaatttatgaaactagactttagaaaaccacagcactggcgcatggggctaaccgaggtcctcggcaaaatcattaccctgaaaaatgaaacccccgggggagcttaacggcggggggcgaatataatttaggtcatccgctgggcgggctccttagcgagaagcttttccctggccttgggttttacctgggacttggggcccatgaagccgttttcccaatttt

SEQ ID NO: 408981 - DNA, 337 bp, Oryza sativa
agaggaacgatcaacagatactattaagcatccatgttgcgaaatccatgtgatacaagaacgactgcctcaggctcgaagatgacaaaaagggtgacatggatgcgatactgacacttcagctgcaacttgcagcgacctacaacggggtcagcccaacaacaccgtatgcaagtcgcccaccagcatttccagtactgagactaagctcatggccacccttccccaaatcatcttcaagctcatgaacaacgaatgctcttccaacaacagaatttgggccactcagaggaatctggttcctaacttcaccaacattattgtaaccaactttatt

SEQ ID NO: 408982 - DNA, 368 bp, Oryza sativa
acttggccggttaaaagatgaggcaggttccacattcgttacatcacgacagagtaaaaatagtttctcagtagcacgcgaacataggattgttgatgtgaaacacatgcattcgacaaaagggaaatgaaatacgacaacgaaagcagttctcttagcagtagaccaactagaacatgtaagggtaacggcacaacacatgcggcggccaaaaatttagagcttgtccttgaaatcggagaggggagtcatctgctccttgagacccttccttttgcggatatcctgcaccagggttgaagcctgcgagccagcttcaagaggatcagaggtcatcatgtcccaatggtcgaacacacactggggga

SEQ ID NO: 408983 - DNA, 181 bp, Oryza sativa
  unsure (1)..(181): unsure at all n locations
aagggggataanatcatcgggggatatgatcatcagttcacgagaacagaggaagaaacaaaagctaaaaattaaaaccatcaacagcccgatcgagtttgcattactagatacacacattgcagccttccttccctctactccatgtatctgatatatcaacccgggcacgcacaaaaca

SEQ ID NO: 408984 - DNA, 287 bp, Oryza sativa
cttgaagagcatgctcctgctgctgctgtgtgctatttgcctgggccaagatcttctttatctgggctccggtgagagtctcgtgctcaagaagtgcttgggctagaacatggtgctccttgctgtgttttgtgaggatggtctttgcattgttgtaggcattcttcagcaggcttcttcaccttctgctcaatcagaagccttgtttctgtgctcatgctcttttcattatcctcattattgttagagacaaagccaacctgcttgttcatgccatatttcgtaac

SEQ ID NO: 408985 - DNA, 354 bp, Oryza sativa
tgattgatagcgatatcatagaagcagcgacacgaattaagatttaaaaccaaccccaagaaggatcgcagatccaactccaccgaatcgatccaagaactccgcctaatccaaccaaaccatgggcgatctcatctcaccaacacgacacgaactcataaaaagactaacaccaccaccacctcctccttatttagggactcgacgactcaagacgactgatactggcgaaaggcgaaggggaacagcacagatctaggagagctggccgcagtcggcgatgaccaccggcttggcggtgctcccgcccggggatcccaccttctcgatggccttgacgacgtccatgccctt

SEQ ID NO: 408986 - DNA, 135 bp, Oryza sativa
gcccaagacaagtcaatactacaacatttgtggcgagtacagaggtacaaaagtcaggcaccgtaagcctttcgattaaaaaccaaactgaaaacactgcacgaatattttttaaacagccccacgaaaaaacaa

SEQ ID NO: 408987 - DNA, 148 bp, Oryza sativa
  unsure (1)..(148): unsure at all n locations
gattaaagacctttattcatgttgggatactacatcactacatgccagtttttattggtagtactaactgatacgaacgatcatgcaatanggattaacaatccgtatggaatgcgattcgatacacttcagcattagctaggctgga

SEQ ID NO: 408988 - DNA, 343 bp, Oryza sativa
gaacataatatccactttattttgattaattgatgttcttgaacaactccattattgaaaatatcttccgaaagaaattagaaactgcacgagcctttgcatcggcaaaattaaatggccgagagcaaatgaccgaaatcaagataagagttccatataaaacggagttgaattcaggcacttcatagttgatagttcgtttagccggtgttctgcattccagcagcaattcccttcatggtcaggatgagggtgtcctccagccccggcgcatactcactggtcgggttcagcttaaccagctccgcagccggtttagaccagtccatgatctccttggaca

SEQ ID NO: 408989 - DNA, 157 bp, Oryza sativa
gattgcaacacaatttcatatgaatgattaagcactcgaatttggggttctacaaaccgatctagcggcgaaactgttcttgacagaataatctaagcaaaacccgactctaaacaatagacggcctcacttgattaaagtatgcattttgggcacg

SEQ ID NO: 408990 - DNA, 197 bp, Oryza sativa
  unsure (1)..(197): unsure at all n locations
aaccgaacagaaataaacgagagtattaaacgactgacatagtgcacattgcgagcagatattaacggtccatgaaacgagagccatgcccgggggcaaaatcttaacaaataactaggaacttaggattatcntcaacctgccaggacattgcaacacnncaccattttgaaaacgcaggctacaccttttcttct

SEQ ID NO: 408991 - DNA, 128 bp, Oryza sativa
attacaacatgcagcagtggcattaatacgccagtacattaattaagttacacatatgcaggctccattttggtttcttttaatattatcgtattacaggaatcttctgtagcccttttgcagcatga

SEQ ID NO: 408992 - DNA, 107 bp, Oryza sativa
aagcggcaattaaggaagtaatagtatagttgtagcagtagaagagtacagcaacacacgttaattaatcacgcgagaagcgtattggatggatcggcacggttaag

SEQ ID NO: 408993 - DNA, 405 bp, Oryza sativa
gtcattttgaagaagttgaaatgcttctttcctatttcatatcctcttactctatcaaaacctttgccatcggtctcaacgaacctgtaatagcaaagcttgtacatgaggcaattcagcgcagtttgagtctacttgatccaacctatgcaagcaagtacatccctattattgttagtgtcagcgaacatcaaccccctacctggccctcctatttcatggatatcaacgtgttggccttcttgattactgctgggatcatttcatgctatatgcctttatctgatgcaagctccttcgtggtcttgaacttggtcaccgcaatattatttttttggagtaatggcgccgtttatgcttgaacttgcttctgatgcgtgcattttatctggaatctcttttttt

SEQ ID NO: 408994 - DNA, 554 bp, Oryza sativa
tttgattggaggtgcaggagaggatgaggaagcagtgtaggagagccatcctctctgcacacctccaatagctcatccaaacaacagctatctcactctccctccatgtctctacactctagcaattcaacaattattttcctttgttttgtcttcatctacaaatgcttggtcatcaccctcatctcttatattactctcacttccaccacaccctccatttcttgcttccatttgtcttgcttggctcttcactctccccctgttcctgcaggggtcaggcactgcctgctacaagagtggtgtaggtgattcggctagctcagcgcgaagatgggggagatcaccaatgtcacggagtaccaggccatcgcgaagcagaagcttccgaagatgatctacgactactatgcatcttgggccgaggactagtggactttccaggagaacagggaggccttcgccaggatcctgtttcgcccacgcatcctgatcgacgtatccaagatgacatggccacacagtcctggggtcaagattcaatgcccattatg

SEQ ID NO: 408995 - DNA, 485 bp, Oryza sativa
ctggggtgttggtgccggaggcgctggggctgggcaactgggtgcaggcgcaggagtgggcggcggagcccggcggccaggccacgtacctcggcaacccggtgccatggggcacgctgccgacgatcctggtcatcgagttcgtcgccatcgccttcgccgagcaccagcgcaccatggagaaggaccccgagaagaagaagtaccccggcggcgccttcgaccccctcggcttctccaaggaccccgtcaagttcgaggagtacaagctcaaggagatcaagaacgggcgattggccatgctggcttttgtgggtttctgcgtccaacagtcggcgtacccgggcaccggcccactggagaacctggccagccacctctcggacccgtggcacaacaacatcggcgacatcatcatcccgagaaccatctacccttgagcttggcacgaaccggtgcgtgcgttcgggcgtacgtgaaggcta

SEQ ID NO: 408996 - DNA, 385 bp, Oryza sativa
ttgttgtttagtacagtaacagagatgacacacatgagcaatacagtgcatgcgtggaaaaaaggggcacatgtgtcaagagaagccatgcgtctggaagacgaatcaagaagaccatgcatgaaaacacaacgcacatgaactgccaagcgaaggtactgagaatggaaagaaccacagatgcatgcggacatgctttacttgattagtgcatcagaagggtgaaacgcaagcaaaaaggcatcttgtacagaaccgggagcagtatggagcacttacactgatcaccggttcttgagaggctaaccaaaaacaactacgaagctatgtactagactgaccatgtacacaaggactggatgcattaccttatggactaccatga

SEQ ID NO: 408997 - DNA, 493 bp, Oryza sativa
atccttatgagtacagcaacaaagataagacagatgaagaaaaaagtgcaatggaggagaaaaagggccagtatgccaagttctggaatgagtttggaaaatcagtcaagttgggcatcattgaagacgcaactaacaggaaccgtcttgcaaagcttctgagatttgaaagtaccaagtcggaaggcaaacttgcctctcttgatgagtacatttcaaggatgaagccagggcagaaggacatcttttacattaccggaagcagcaaggaacaattagagaaatcaccgttccttgagaggctaaccaaaaagaactacgaggttatctacttcactgaccctgttgacgagtacttgatgcaatacctcatggactacgaggacaagaagttccagaacgtctccaaggagggtctcaaactcggcaaggactctaagctcaaggacctcaaggagtccttcaaggagctgaccgactggtggaagaaggc

SEQ ID NO: 408998 - DNA, 521 bp, Oryza sativa
  unsure (1)..(521): unsure at all n locations
tttgttcctgacggttacatgtttgagcttatccagaggggtccaacacctgagcctctttgccaagttatgcttcgtgtgggtgaccttgatcgctccatcaagttctacgagaaggcccttggtatgaagctgctgaggaagaaggatgtacctgactataagtataccattgccatgttgggctatgctgatgaggataagacaactgttattgagttgacatacaactatggtgtcacagaatataccaagggcaacgcatatgctcaggttgctattggcactgaagatgtctacaagagtgctgaggctgttgagttggttacaaaagaactagggggaaagattttgcggtagccaggtccactaccagggctcaacacanagattgcctctttccttgaccctgatggctggaaagtggttttggttgataacgccgactttctgaaggaactccagtgaagatgagagatggcccaagttctgtgctaggaggcaaagcgcaaaccttatgt

SEQ ID NO: 408999 - DNA, 474 bp, Oryza sativa
tcttttgtcttcgtactcgcctctctccgcgccctcctccgccgccgctcgccgccgttcgtctccgccgccaccgccgccgccatgagggagtgcatctcgatccacatcgggcaggccggtatccaggtcgggaacgcgtgctgggagctctattgcctcgagcatggcatccagcctgatggacagatgcccggtgacaagaccgttgggggaggtgatgatgcttttaacaccttcttcagtgagactggtgctgggaagcatgtcccccgtgctgtcttcgtcgatcttgagcctaccgtgattgatgaggtgaggactggtgactaccgccagctcttccaccctgagcagctcatcagtggcaaggaggatgcagccaacaactttgcccgtggtcactacaccattggcaaggagattgttgatctgtgccttgaccgcatcaagaagcttgccgacaactgcact

SEQ ID NO: 409000 - DNA, 506 bp, Oryza sativa
tcggtccaccgaattccattcctcgcgattcctctcccctcgcctcctcgtcctccccctcccaggggatcgccggagaggaatcgcgcggaggaaaaaaaaagaaaagggcttccccgtcgtctaagttaaaaggaagccatggagcacaaggagactggatgccagcagccagaaggcccgatcctttgcatcaataactgcggcttctttggcagtgcggctaccatgaacatgtgctcaaagtgccacaaggagatgataatgaagcaggagcaggccaagctggcagcctcctctatcgacagcattgtcaatggtggtgattccgggaaggaaccaattattgctggtcacgctgaagtagctgttgctcaagtcgaggtgaagacgcttgttgcgcagcctgctgagattgctggtcctagtgagggggtcacggtgaaccccaaggggagggaaggaccacatcggtgctccacttgtcggaagagggttggtcttac

SEQ ID NO: 409001 - DNA, 428 bp, Oryza sativa
tcgttccaagctgcctgagccctagccgccgccgccgccgccgcgcgccaccaccgcaaccatggccgccgcgctcacccgcccgcctccaggcacggtccagtgcttcgggcgcaagaagacggcggtggccgtctcctactgcaagccggggcgcgggctgatcaaggtgaacggcgtcccgatcgagctgatcaggccggagatgctccgcctcaaggcgttcgagcccatcctgctcgcggggcgctcgcgcttcaaggacatcgacatgaggatccgcgtccgcggcggtgggaagacgtcgcagatctacgcgatccgccaggccatcgccaaggccctcgtcgcctactaccagaagtacgtcgacgaggcgttcaagaaggaggtcaaggacatttttgcccgctacgacccgacccttc

SEQ ID NO: 409002 - DNA, 528 bp, Oryza sativa
tcggataagaaacacatatctcctcatgtttttcgtccacgaattgtcaacagaaaaaatgtcttcttttttaagaaagagaagcatttatttatttgtagtagtagactagtagtagtagaagttgtgcgtttgtgttgttcttcgccggcgccgccgcccatggcctcttccatggccgccaccgccaccctctcgccgccggttttatccgccgagaggccgactgtccgcggcggcctcttcttgcccccttcgccggcgacctcccgctctctccgcctccaatccgcccgccgctgcggcatctcgccggcgaccaggaagccacgctccttgcctcgagcagccaaggttgttgtggctgtgaaggctgatcctttgaaggtcatgatagcaggggcttcagcatctggaaagggaacgcagtgtgagctcattaagagcaaatatggtctggtgcacatatctgctggagaattgctaagggcagaaattgctgcaggcagtgagaatgggaagtgagct

SEQ ID NO: 409003 - DNA, 507 bp, Oryza sativa
taatatcggacacaaacttctgtctaagatgggatggagggaaggtgagggtcttggcagtgagagaagtggacgtgcagatcccattatggctggagacgtgaagaaagaccatcttggtgttggcgctgtccaacctggtgaggtcacatctgaagatgatatctatgagcaatacaagaagcgaatgatgcttggctaccgttataggccaaacccactgaacaatccaaggaaagcatactactgatataatgggaggtcatccaaggggcgatcagagaagccaagaagttcatttattcagcatataatctttgaatgccagaggcttcccggtgttctgcagtagctttggttttacgtagtgttacatctatgctactttcaacatgtcatttggtgtgtgtttccccttttgtttcacatggtgatgtattcatgttgctattgatgaataatgtatcttcatgattattcaactcatattgaacttatgtcacgtga

SEQ ID NO: 409004 - DNA, 530 bp, Oryza sativa
ttgaatcggaggcagccgcagccatggcgttggccgctcgcctcgtctcccgctcccggcagctatactctgctcaagctgccttggcaaatggaggtgccactcaagtccgcttgtatgccaaggaggcagatcgtactcccgtcaatggtgatgacctattgaagggcatattttttgaggtaaagaagaaatttgagactgcccttggtgtacttaagaaggaaaagatcactattgatccagatgatcctgcagcagtttctcgttatgcccaagtcatgaagactgtaagacaaaaggcagatcttctatccgactctgagaggattaaatataccatcgacacctttacaaagggcatccctgatgcacggacttacttgaatactcttcaggagatcaggataaagagtggccttatagatgatatgggtgctgaggctatgatgatggaagcccttgagacagttgagaaggagataaaaagccactttgaggagtgacaagaagaaaagggtctctcttgc

SEQ ID NO: 409005 - DNA, 548 bp, Oryza sativa
ttagtttagtctgccggccaagcaagaaccaaaaagcaattaagatcgaactcgagcaaacatgtcgtcgactaacaacagttcaggcgagccgccgccggcggtgcgcgtgctgggcggttgggcgagccccttcacgaaccgcgtggtggtggcgctgaagctgaagggcgtggagcacgagatgttgcaggagacggtggggaagaagagcgagctgctgctccggtccaacccggtgcacaagaagttccccgtgctgttccaccacagcaagccccttcccgagtctctcgtcatcgtcgagtacattgacgaggtctggtcggccttcaatggcggcgccccggccattcttccttgcgacccctacggccgtgccgtcgagcggttctgggcacggtacgtcgatgacaagattttaccagggctttgggttttgagaggatcggttggctgagacaaggaccaaactcgaagtgaaaatgtcacgactttacagcgcttgaggaagcatttgtaagtgcagccaaggaagaatactttgg

SEQ ID NO: 409006 - DNA, 486 bp, Oryza sativa
  unsure (1)..(486): unsure at all n locations
tttagaaccttctcgaccccgccatgcgccccgcggtcgccgccgccctcctcctcgtcgccgccgccgtcgcggcctcgccggtttccgccctctactccgccggctctcccgtcctccagttcaaccccaacaacttcaaatccaaggtgctgaactcgaatggggtggtgctggtggagttcttcgcgccgtggtgcgggcactgccagcagctgacgccgatttgggagaaggccgcgggcgtcctcaagggcgtcgccacggtcgccgcgctcgacgccgacgcgcacaaggagctcgcgcaggaatatggaataagaggatttccaactattaaggtgtttgttcctggaaagcctccagtagattatcaaggagcaagagatgtaaagccaattgttgaatntgctctttcacaggtcaaggctcttcttagagatcggttgatggaaagacatcagcaggttcaggtggcaagaaatc

SEQ ID NO: 409007 - DNA, 455 bp, Oryza sativa
ttggtttttttaaattacggagtagttttatttcccagagaaaagcatccctcctaaaagaccacaaacgatgtttttcttcaactaaaatgtactgtaataacaccaaaggagcattctgaaaattgtcccgcccaaattgtacagttgacacgagtgaagcattagtgttactcagatttacagtctggctaatcaactctaacatcatttccggaattatcagaatcacaactcgtcatttactggagagttgtcggccatcagctcctcaagggagaattcgtcctcttcaataacctcaccatctttgccgtcccatggttcagattggactatcgttggggtaccgtccaaaggaagattacccttcccaccgcgccctgcttccttcacaaactcagttatttcatcaagctggaaagcactaccgagtggagcatatgccccttttt

SEQ ID NO: 409008 - DNA, 551 bp, Oryza sativa
tcgttgtttcatcccagccgccgccgccgcagcctcctcctctcgtcttctccttcgagttgttagctacctccttattcaaccatgggtaaggagaagacgcacatcaacattgtggtcattggccacgtcgactccggcaagtcgaccaccacgggccatctgatctacaagcttggaggtatcgacaagcgtgtgattgagaggttcgagaaggaagccgctgagatgaacaagaggtccttcaagtacgcgtgggtgctcgacaagctcaaggccgagcgtgagagaggtatcaccatcgatattgccctgtggaagttcgagaccaccaagtactactgcacggtcatcgatgcccctggtcaccgtgacttcatcaagaacatgatcacgggtacctcccaggctgactgtgccgtgctcatcattgactccaccactggtggctttgaggctggtatcttcaggatggccagacccgtgagcacgcttttcttgctatcactcttggagtgaagagatgatctgctgctgcaacagaaggatgc

SEQ ID NO: 409009 - DNA, 543 bp, Oryza sativa
  unsure (1)..(543): unsure at all n locations
tcgtttgtattgatactgacgttcttatcctatgctagctatcatgccactaggaagactacaagcattgtcaagagtgttcttgatcctaagacagaaaacctaggtatgttgcattggccgagccatctgtatcttcaggatttaagagatgcacagggcaacatgacggctctctatagcggctgggctccgtttaatgccgacgatggtactgcattgctcggggagatcgacttggcatttctcggagtatatgcaatcggcatgttcttcgctggccatttgggtgatcgggtggatctcaggatacttctgaccatcggaatgataggcactggatttttcactgctgcctttggtgccggcaactggctcaacatacacaacttctactactttctgggtgttcagatgatggctggcctgtttcagtcatccggctggccatctgtggttgcagntgttggtaattggtttggaaagagcaaaagagggctgataatgggaatcttgaatgctcatacaattgtgggaaacata

SEQ ID NO: 409010 - DNA, 201 bp, Oryza sativa
tcgttcttaacacatatgtaataatctcttccctccctctccgaccggttttattgtaagagtactacaattatcgttgggtgaggatatgtgaaaacaaagctccggctatatacacacaagatatgtatctagagcatatctgataaattcgtcgacaataaaaaaaatggatggtattacgtaattatgtttgttttt

SEQ ID NO: 409011 - DNA, 549 bp, Oryza sativa
tgagcagttcacctgtccccactttccccttccccctcccgcgcgcgatggcgtccgccgccgacgagggcaacgcggcggcgcccagggccgccgtctcgcacgtcatcttcgacatggacggcctcctgctcggtctctccctctccctctccctctcctccgacgattcggtttcatatgcgcattcgatggtttctttctttgctttcttggttgctccaatttggatggagttgggtgatgatggatggattggatgaatggcgtggttgttgctggtgggtgcagacacggaggggttctacacggaggtgcaggagaagatcctggcgaggtacggcaaggtgttcgactggtcgctcaaggccaagatgatgggcaagaaggccaccgagtcggcgcgcattttcgtcgaccagtgcggacttgacggccatcttaccccggagcagttcctcgaggagcgcgagagcatgcttcaggagctcttccctttcgcgccgtcttgcttgagtgttacgtttgatcatcatttcatgcaaatga

SEQ ID NO: 409012 - DNA, 437 bp, Oryza sativa
ttgggcttcctgagcgattgcaattatcacttgtgagaacactaccgggactggagaattgtgtgatgctaaggccggcttatgctgttgaatatgattacttgccagcttaccagtgctcaagatcacttatgaccaagaagtttgagggcttattcttctctggccagattaacggaacaacaggatatgaagaagctgcagctcagggtataatttccggaataaacgcagctaggcattctgatggaaaaccacttatcattcttgagagagaaagcagttatatagggactctgattgatgatcttgtgacaaaagatcttagggaaccttatcgcatgttaacaagccgttcagaacaccgtctattgcttcgagctgataatgctgatagtcggttgactccttttggacgagatattggtttgatagat

SEQ ID NO: 409013 - DNA, 475 bp, Oryza sativa
tagtaacccaaccagagagcttgcggaagcgggggtttggtgcgggcgcgcgcgtgtgaggggggagagaaggccaggaggaggcgacgccgtcgcccgagggaggcaaaaatccgatcctcctcctgccctgctcgctcgctcgctcgcctgcgctgcgcgcacttggccccgtcccgtccgttcccgctcgccaggcatagaaagatggtgctctgggtcttcggctatggctccctgatctggaaccccggattcgacttcgatgagaagatcctgggcttcgtcaagggctacaaacgcaccttcaatcttgcttgcattgaccatcggggcacgccggagcatcctgcgaggacctgcacacttgagtccgacgaggaagccatatgctgggggattgcatactgtgtcaaaggggggcttaaaaaggagcatgaagcaatgaagtacttggaaagaagagagtgtgagt

SEQ ID NO: 409014 - DNA, 311 bp, Oryza sativa
attacatcagtaccgaaggcatggaggcaagtggatcgagtaatatgaaattctctctgaatggttgtgttatcattggctctttggatggagctaatgtcgagataagagaggaagtgggacatgaaaatattcttctttttggtgccaaggtagatcaagtagctgggctgaggaaggattgagagaatggcttgttcaaaccagacccactttttgtagattccaagcagcttataaggagtgtgagcttttggcactctaagactatgctcccctcttggatactcttgaaggaaaattcggatttg

SEQ ID NO: 409015 - DNA, 521 bp, Oryza sativa; identical to SEQ ID NO: 392870

SEQ ID NO: 409016 - DNA, 504 bp, Oryza sativa
tcgtagaaagaaaacctctcgtctcctccttcttgcgccgccaagacgagtcgcggctgaacaggggagtggcggcgatctccatctggcgagcagagcaggggagaggatcatgactacctcaaggcgtctttcagataggaaagtggcacggtttgagaagaacgtcaccaataggggttctgttcctgagacagtcaagaaaggaaatgattatcctgttggacccattgtgcttggatttttcgtctttgtggttgttggttcatctttctttcagatcatcaggacagcccaaaatgctggatacttctgagaactgtagtggccgcttatatatatagtctcggttaccttcaggaacatgggtgatatatgtagctgttcgttactccaaaaggagaaacttatggcatagctagctcgctttgatgttaccttgtccgtgaccgtgccttagtcattccgatacagatcgaattatacccgttatactcggtgctt

SEQ ID NO: 409017 - DNA, 491 bp, Oryza sativa
tcgtttctcgcaagtgtctgccaactgtatctgtcaatggcctatccactggttcagtgtggagtattgcctttggaatccttgttgccaaatgtttgcaatacaaacctgtgaagaaagagttagtggtgataatgccaacttttggggttcagctagaaatacatttttggagtggaagagtacatcgtcgttttgtgccaattggtaagattttgaagccattgctgaatgagtgtgtgacgccggtgacctgttactggagcttggcattgcttctgcgtgatgaataggaacttatgcttgtttttcagaaattctacccttctgtcaaaatgtttggttcctgactggatggctttttgaaactcctaaactttggatgcctaatcagtctctgatgttcttgaatcgaaccgttctgaaacatgatccatttttgtgctcatttttgtatgattgtaatatttgataaaccagctatcatttac

SEQ ID NO: 409018 - DNA, 479 bp, Oryza sativa
  unsure (1)..(479): unsure at all n locations
tttcttctaacccggagcctctcgttaccgagagagagagagagagagagagagagggcagtgcaggtgtcgctggccatggcgaggaggagcagcagcagagcgtgcgcggccatggcgacggccgccgtctttgcgctgctggccgcgacggcgacggcgtcggggctcgtacgggtggagcacccggccaagagcgacgggtcgctgagcctgctcgtcgtcggcgactggggccggaagggcacgtacaaccaatccagggtcgccgagcagatggggaaggttggggagaagctaaatatagacttcgtcatatccaccggtgacaatntctacgaggatggactcactggcgtcgatgaccaggcgtttgaggaatcgtttaccgatatctacacggcaaagagcttgcagaagccatggtacctggtgctgggaaatcatgactacaggggtgatgtgctagcacagcttag

SEQ ID NO: 409019 - DNA, 491 bp, Oryza sativa
tttgattcatcataaggctgtgtcaactgtagagtggcatttcaagggagactatttcaccacagttgtgccaagtggtgattcaagagctgtactgttgcatcagctctctaagaagcattcgcatcatcctttccgtaaattgccaggccttcctattgcagcagtgtttcatccaagtcaaaagatgttctttgtggccactaagaaatttgttcaggtttatgatctccagaaggcacagttagtcaagaagttggagtcaggtgttcgtgagatttcctccatctcgatacatcctggtggtgataatgttatcgtgggcagcaaagatggtaaattgtgttggttcgatactgatctatccacgcgaccatacaagacattaaagaaccactcgaaggatatcactaatgttacttttcaccggaaatatcctttttttgcctcatcctcaaaggattgtacggcctatgtattccattgaatgg

SEQ ID NO: 409020 - DNA, 448 bp, Oryza sativa
tctatttaatatcaggtattgccgatggatttgaatttactggcatgtcgaccaaccaggatgatgccgatgaagatatattctgcactggaggaggaatggaacttgaaaacaatgattccgtaaaaggtgacaaagttcaggatggatccttcaagagccaaatttcttcaggacactccatcaataaacaaccttcccgaactcttgtagtcagaaatattactgctaacattgaggattctgatctgacggttctgttacagcaatacggggacattcgcatgctctataccttcttcaagcaccatgggtttgtaactgtttcttattatgacataagaacagcccaaaatgcaatgagagcgcttcatagcaagcctctggggctgatgaaacttgatgtgcaaatttttttttctaggaaaaagtttcaagcaggatattg

SEQ ID NO: 409021 - DNA, 518 bp, Oryza sativa
gaaacattaccatcggagggtgccaaagtggcacatttctgctcaatgtgtggcccaaagttttgttcgatgaaaatcacagaggatattagaaaatatgctgatgaacatggttacgggacagtggaggaagcggtgatacaaggaatgaatgctatgagtgctgagttttcagctgcaaggaaaacaatcagtggggagcaacatggtgaagctggaggggagatatatgttccagaaagctatacagctcgcaaataagatcgtcttggtgtccatctactccgggtggagcgtttatcagcagcactcctcaccatcctatgttaggaggtggggtgcctgtattctcaacgatctgaaggcctcttggcctggattgttgggaattgggctgagaaagttcctttgaacctgaacaggataatgcctgcgaagggagtgtgcatttctacttttatgttttcagggaactctaacacaaccccttttttggtggagatcgagctatccaatat

SEQ ID NO: 409022 - DNA, 454 bp, Oryza sativa
tttgtttttttttttttttgggtttttttttttttttttttttttttttttggaaaattaaaatagcaggctactacaaataaattagactccaagatacaagacaaaactgggttgggctattataaaaaacctccgaggggctgtcaagaggggaagataaaaacgaagggcagatagaactagtcagagggcccagccctgctcctaaagggctccttgaagtccatgatatcaccttcccacctgggcaccgcctggttttcgcacacccaaattttttgagcaacctggttgataagcctgaagtcatgactcaccaggaccaaaccaccgtcccacttgttcagggcctaagccagagaatcgatggtctcaatgtccaaatggttcgtcggctcgtcaagcaacagcagttgaggctgcctgtaagccagccacgcaaagatgacgc

SEQ ID NO: 409023 - DNA, 542 bp, Oryza sativa
  unsure (1)..(542): unsure at all n locations
gttcaagcatttcaaagaagaatctggacacataatccaagagtattttctctcagatgatgtcccagaactcattataagccttcaagagctttctgccccagagtacaatcctatcttcctcaagaagcttatcaccctcgctatggacagaaagaatagggagaaggagatggcttctgccctgctttcttcactcagcttggaacttttctccactgatgacatcatgaagggattcatattgctcctgcagtcagcagaagacactgccctcgacattgtggatgctcccagtgaacttgccctcttccttgccagggcagttattgatgaagttctgattccactgaatttggatgagatcggtaacaggcttcgccctaacagcagtggtagtcaaactgtccagatggctcgtgcccttcttgctgctcgccactctggtgagaggatactgcgttgctggngtggcggcactggctgngctgtagaagatgctgaggacaagatcgcaagctccttgaagatacaatactggc

SEQ ID NO: 409024 - DNA, 584 bp, Oryza sativa
tttcttctcctcggctgcggccacggcgacgacgacgacgacgaattcgagcgaggcgatcggcgatggaggcggtggcgatctgatccgctctttccgtctcggcctcgcgctcctctccctccctcgcggtgtctcgggtaggaaatggcgatcatggtggatcctccaaatgggatgggtaaccaagggaagtattactactcgatgtggcaaactttgtttgagatagacactaagtatgtgccaatcaagcccatcgggcgaggagcttatgggattgtttgttcatccataaatcgtgagaccaacgagaaagtagcaataaagaagatacactatgtttttgacaaccgtgttgatgcactaaggactttgcgggagctgaaacttctccggcatctccgtcatgagaatgttattgctttgaaggatataatgatgccagtacacaggaggaagtttaaagatgtgtacttagtttatgaactcatggatactgacctgcatcagataatcaggtcacctcagggtttttccattgatcactgctcaatatttctttttcagtgcttcgaggactg

SEQ ID NO: 409025 - DNA, 426 bp, Oryza sativa
tttttatgctgttggagatggaccaaactgaggtgctgcacctgctcgagtctccagaggctctcaaggtcaaggttgctgaagccatggaggaccttctcacggcccagcagatccagacgaacgcgacgcctgaacagcagcttgcttctctgacgctgaatgacggcgacgctttcttctaagcataacgactacagcaatttttgatccatatctcagctatcttatctatctagaattgaaaacgactcgggtacttggataattggagttttagatttattggtagttgaactaggcatttaagcaatgcgcgtggattgggtattttgtttgctccgatttcttattttgctttataagctatcatatggattgctcacaacattacaatggtaaaatgtcatcttctctattttaatt

SEQ ID NO: 409026 - DNA, 467 bp, Oryza sativa
tcgttaaaattcagagttgtaaaagaagaagaaaaattcagagttcaaaagttcagtgagaattatcttgcaggtgctgcattatgggggacgagaagcatcctagctcgaaactttcagagattctccggccaggaaagctgctgcaccggcggcggcggctcgtctccgagttcgccgacgtagggcgggaggacgcgttgcacgagagcgacacggtcaagtacagggtgttcgccggcacgtggaacgtcgccggcgtggcgccgccggacgacctggacctcggcgactggctggacgccaaggccgactcctacgacatctacgttcttgggttgcaggagatcgtgccgctgaacgcgaggaacgtgcttggcccgacgaggagcttggtcgccatgaaatggaactcgctcatcggcgacgccgctgaacaggttcactacctgaagaagaagactaga
